United States Patent Application Publication US 2004/0241651 A1 - sequence listing, part 9

SEQ ID NO: 235866 - DNA, 13 bp, Artificial Sequence
  Oligonucleotide for detection of SNP TSC0057582
ttaattacaattt

SEQ ID NO: 235867 - DNA, 13 bp, Artificial Sequence
  Oligonucleotide for detection of SNP TSC0057582
aaattggaattaa

SEQ ID NO: 235868 - DNA, 13 bp, Artificial Sequence
  Oligonucleotide for detection of SNP TSC0057582
ttaattccaattt

SEQ ID NO: 235869 - DNA, 13 bp, Artificial Sequence
  Oligonucleotide for detection of SNP TSC0008809
tttattgaggaga

SEQ ID NO: 235870 - DNA, 13 bp, Artificial Sequence
  Oligonucleotide for detection of SNP TSC0008809
tctcctcaataaa

SEQ ID NO: 235871 - DNA, 13 bp, Artificial Sequence
  Oligonucleotide for detection of SNP TSC0008809
tttattaaggaga

SEQ ID NO: 235872 - DNA, 13 bp, Artificial Sequence
  Oligonucleotide for detection of SNP TSC0008809
tctccttaataaa

SEQ ID NO: 235873 - DNA, 13 bp, Artificial Sequence
  Oligonucleotide for detection of SNP TSC0057583
ggtttaaggagag

SEQ ID NO: 235874 - DNA, 13 bp, Artificial Sequence
  Oligonucleotide for detection of SNP TSC0057583
ctctccttaaacc

SEQ ID NO: 235875 - DNA, 13 bp, Artificial Sequence
  Oligonucleotide for detection of SNP TSC0057583
ggtttatggagag

SEQ ID NO: 235876 - DNA, 13 bp, Artificial Sequence
  Oligonucleotide for detection of SNP TSC0057583
ctctccataaacc

SEQ ID NO: 235877 - DNA, 13 bp, Artificial Sequence
  Oligonucleotide for detection of SNP TSC0057583
ggtttacggagag

SEQ ID NO: 235878 - DNA, 13 bp, Artificial Sequence
  Oligonucleotide for detection of SNP TSC0057583
ctctccgtaaacc

SEQ ID NO: 235879 - DNA, 13 bp, Artificial Sequence
  Oligonucleotide for detection of SNP TSC0008000
aatttagtatttt

SEQ ID NO: 235880 - DNA, 13 bp, Artificial Sequence
  Oligonucleotide for detection of SNP TSC0008000
aaaatactaaatt

SEQ ID NO: 235881 - DNA, 13 bp, Artificial Sequence
  Oligonucleotide for detection of SNP TSC0057585
tgaaaatattttg

SEQ ID NO: 235882 - DNA, 13 bp, Artificial Sequence
  Oligonucleotide for detection of SNP TSC0057585
caaaatattttca

SEQ ID NO: 235883 - DNA, 13 bp, Artificial Sequence
  Oligonucleotide for detection of SNP TSC0057585
tgaaaagattttg

SEQ ID NO: 235884 - DNA, 13 bp, Artificial Sequence
  Oligonucleotide for detection of SNP TSC0057585
caaaatcttttca

SEQ ID NO: 235885 - DNA, 13 bp, Artificial Sequence
  Oligonucleotide for detection of SNP TSC0057585
taaagtattttta

SEQ ID NO: 235886 - DNA, 13 bp, Artificial Sequence
  Oligonucleotide for detection of SNP TSC0057585
taaaaatacttta

SEQ ID NO: 235887 - DNA, 13 bp, Artificial Sequence
  Oligonucleotide for detection of SNP TSC0057585
taaagttttttta

SEQ ID NO: 235888 - DNA, 13 bp, Artificial Sequence
  Oligonucleotide for detection of SNP TSC0057585
taaaaaaacttta

SEQ ID NO: 235889 - DNA, 13 bp, Artificial Sequence
  Oligonucleotide for detection of SNP TSC0057586
gtgaagaaagatg

SEQ ID NO: 235890 - DNA, 13 bp, Artificial Sequence
  Oligonucleotide for detection of SNP TSC0057586
catctttcttcac

SEQ ID NO: 235891 - DNA, 13 bp, Artificial Sequence
  Oligonucleotide for detection of SNP TSC0057586
gtgaagtaagatg

SEQ ID NO: 235892 - DNA, 13 bp, Artificial Sequence
  Oligonucleotide for detection of SNP TSC0057586
catcttacttcac

SEQ ID NO: 235893 - DNA, 13 bp, Artificial Sequence
  Oligonucleotide for detection of SNP TSC0057586
gtgaagaaagacg

SEQ ID NO: 235894 - DNA, 13 bp, Artificial Sequence
  Oligonucleotide for detection of SNP TSC0057586
cgtctttcttcac

SEQ ID NO: 235895 - DNA, 13 bp, Artificial Sequence
  Oligonucleotide for detection of SNP TSC0057586
gtgaagtaagacg

SEQ ID NO: 235896 - DNA, 13 bp, Artificial Sequence
  Oligonucleotide for detection of SNP TSC0057586
cgtcttacttcac

SEQ ID NO: 235897 - DNA, 13 bp, Artificial Sequence
  Oligonucleotide for detection of SNP TSC0057586
tgtttttttttay

SEQ ID NO: 235898 - DNA, 13 bp, Artificial Sequence
  Oligonucleotide for detection of SNP TSC0057586
rtaaaaaaaaaca

SEQ ID NO: 235899 - DNA, 13 bp, Artificial Sequence
  Oligonucleotide for detection of SNP TSC0057586
tgttttattttay

SEQ ID NO: 235900 - DNA, 13 bp, Artificial Sequence
  Oligonucleotide for detection of SNP TSC0057586
rtaaaataaaaca

SEQ ID NO: 235901 - DNA, 13 bp, Artificial Sequence
  Oligonucleotide for detection of SNP TSC0057586
cgtttttttttay

SEQ ID NO: 235902 - DNA, 13 bp, Artificial Sequence
  Oligonucleotide for detection of SNP TSC0057586
rtaaaaaaaaacg

SEQ ID NO: 235903 - DNA, 13 bp, Artificial Sequence
  Oligonucleotide for detection of SNP TSC0057586
cgttttattttay

SEQ ID NO: 235904 - DNA, 13 bp, Artificial Sequence
  Oligonucleotide for detection of SNP TSC0057586
rtaaaataaaacg

SEQ ID NO: 235905 - DNA, 13 bp, Artificial Sequence
  Oligonucleotide for detection of SNP TSC0057587
ataatattataga

SEQ ID NO: 235906 - DNA, 13 bp, Artificial Sequence
  Oligonucleotide for detection of SNP TSC0057587
tctataatattat

SEQ ID NO: 235907 - DNA, 13 bp, Artificial Sequence
  Oligonucleotide for detection of SNP TSC0057587
ataatagtataga

SEQ ID NO: 235908 - DNA, 13 bp, Artificial Sequence
  Oligonucleotide for detection of SNP TSC0057587
tctatactattat

SEQ ID NO: 235909 - DNA, 13 bp, Artificial Sequence
  Oligonucleotide for detection of SNP TSC0057587
tttatagtgttgt

SEQ ID NO: 235910 - DNA, 13 bp, Artificial Sequence
  Oligonucleotide for detection of SNP TSC0057587
acaacactataaa

SEQ ID NO: 235911 - DNA, 13 bp, Artificial Sequence
  Oligonucleotide for detection of SNP TSC0057587
tttatattgttgt

SEQ ID NO: 235912 - DNA, 13 bp, Artificial Sequence
  Oligonucleotide for detection of SNP TSC0057587
acaacaatataaa

SEQ ID NO: 235913 - DNA, 13 bp, Artificial Sequence
  Oligonucleotide for detection of SNP TSC0057588
gaatgaatgtttt

SEQ ID NO: 235914 - DNA, 13 bp, Artificial Sequence
  Oligonucleotide for detection of SNP TSC0057588
aaaacattcattc

SEQ ID NO: 235915 - DNA, 13 bp, Artificial Sequence
  Oligonucleotide for detection of SNP TSC0057588
gaatgagtgtttt

SEQ ID NO: 235916 - DNA, 13 bp, Artificial Sequence
  Oligonucleotide for detection of SNP TSC0057588
aaaacactcattc

SEQ ID NO: 235917 - DNA, 13 bp, Artificial Sequence
  Oligonucleotide for detection of SNP TSC0057589
tgagttgtaagty

SEQ ID NO: 235918 - DNA, 13 bp, Artificial Sequence
  Oligonucleotide for detection of SNP TSC0057589
racttacaactca

SEQ ID NO: 235919 - DNA, 13 bp, Artificial Sequence
  Oligonucleotide for detection of SNP TSC0057589
tgagttataagty

SEQ ID NO: 235920 - DNA, 13 bp, Artificial Sequence
  Oligonucleotide for detection of SNP TSC0057589
racttataactca

SEQ ID NO: 235921 - DNA, 13 bp, Artificial Sequence
  Oligonucleotide for detection of SNP TSC0005301
gtaataatgtgat

SEQ ID NO: 235922 - DNA, 13 bp, Artificial Sequence
  Oligonucleotide for detection of SNP TSC0005301
atcacattattac

SEQ ID NO: 235923 - DNA, 13 bp, Artificial Sequence
  Oligonucleotide for detection of SNP TSC0005301
gtaatagtgtgat

SEQ ID NO: 235924 - DNA, 13 bp, Artificial Sequence
  Oligonucleotide for detection of SNP TSC0005301
atcacactattac

SEQ ID NO: 235925 - DNA, 13 bp, Artificial Sequence
  Oligonucleotide for detection of SNP TSC0005301
gtaataatgcgat

SEQ ID NO: 235926 - DNA, 13 bp, Artificial Sequence
  Oligonucleotide for detection of SNP TSC0005301
atcgcattattac

SEQ ID NO: 235927 - DNA, 13 bp, Artificial Sequence
  Oligonucleotide for detection of SNP TSC0005301
gtaatagtgcgat

SEQ ID NO: 235928 - DNA, 13 bp, Artificial Sequence
  Oligonucleotide for detection of SNP TSC0005301
atcgcactattac

SEQ ID NO: 235929 - DNA, 13 bp, Artificial Sequence
  Oligonucleotide for detection of SNP TSC0057593
ggggaaggtttgt

SEQ ID NO: 235930 - DNA, 13 bp, Artificial Sequence
  Oligonucleotide for detection of SNP TSC0057593
acaaaccttcccc

SEQ ID NO: 235931 - DNA, 13 bp, Artificial Sequence
  Oligonucleotide for detection of SNP TSC0057593
ggggaaagtttgt

SEQ ID NO: 235932 - DNA, 13 bp, Artificial Sequence
  Oligonucleotide for detection of SNP TSC0057593
acaaactttcccc

SEQ ID NO: 235933 - DNA, 13 bp, Artificial Sequence
  Oligonucleotide for detection of SNP TSC0057594
ttataaataatag

SEQ ID NO: 235934 - DNA, 13 bp, Artificial Sequence
  Oligonucleotide for detection of SNP TSC0057594
ctattatttataa

SEQ ID NO: 235935 - DNA, 13 bp, Artificial Sequence
  Oligonucleotide for detection of SNP TSC0057594
ttataagtaatag

SEQ ID NO: 235936 - DNA, 13 bp, Artificial Sequence
  Oligonucleotide for detection of SNP TSC0057594
ctattacttataa

SEQ ID NO: 235937 - DNA, 13 bp, Artificial Sequence
  Oligonucleotide for detection of SNP TSC0057596
gggtagagggaag

SEQ ID NO: 235938 - DNA, 13 bp, Artificial Sequence
  Oligonucleotide for detection of SNP TSC0057596
cttccctctaccc

SEQ ID NO: 235939 - DNA, 13 bp, Artificial Sequence
  Oligonucleotide for detection of SNP TSC0000302
atttatagtgaay

SEQ ID NO: 235940 - DNA, 13 bp, Artificial Sequence
  Oligonucleotide for detection of SNP TSC0000302
rttcactataaat

SEQ ID NO: 235941 - DNA, 13 bp, Artificial Sequence
  Oligonucleotide for detection of SNP TSC0000302
atttattgtgaay

SEQ ID NO: 235942 - DNA, 13 bp, Artificial Sequence
  Oligonucleotide for detection of SNP TSC0000302
rttcacaataaat

SEQ ID NO: 235943 - DNA, 13 bp, Artificial Sequence
  Oligonucleotide for detection of SNP TSC0000303
atttatatggaay

SEQ ID NO: 235944 - DNA, 13 bp, Artificial Sequence
  Oligonucleotide for detection of SNP TSC0000303
rttccatataaat

SEQ ID NO: 235945 - DNA, 13 bp, Artificial Sequence
  Oligonucleotide for detection of SNP TSC0000303
atttatttggaay

SEQ ID NO: 235946 - DNA, 13 bp, Artificial Sequence
  Oligonucleotide for detection of SNP TSC0000303
rttccaaataaat

SEQ ID NO: 235947 - DNA, 13 bp, Artificial Sequence
  Oligonucleotide for detection of SNP TSC0057597
tttgtagtataat

SEQ ID NO: 235948 - DNA, 13 bp, Artificial Sequence
  Oligonucleotide for detection of SNP TSC0057597
attatactacaaa

SEQ ID NO: 235949 - DNA, 13 bp, Artificial Sequence
  Oligonucleotide for detection of SNP TSC0057597
tttgtaatataat

SEQ ID NO: 235950 - DNA, 13 bp, Artificial Sequence
  Oligonucleotide for detection of SNP TSC0057597
attatattacaaa

SEQ ID NO: 235951 - DNA, 13 bp, Artificial Sequence
  Oligonucleotide for detection of SNP TSC0005348
tttaggataaggy

SEQ ID NO: 235952 - DNA, 13 bp, Artificial Sequence
  Oligonucleotide for detection of SNP TSC0005348
rccttatcctaaa

SEQ ID NO: 235953 - DNA, 13 bp, Artificial Sequence
  Oligonucleotide for detection of SNP TSC0005348
tttaggttaaggy

SEQ ID NO: 235954 - DNA, 13 bp, Artificial Sequence
  Oligonucleotide for detection of SNP TSC0005348
rccttaacctaaa

SEQ ID NO: 235955 - DNA, 13 bp, Artificial Sequence
  Oligonucleotide for detection of SNP TSC0005348
gttttgttttggg

SEQ ID NO: 235956 - DNA, 13 bp, Artificial Sequence
  Oligonucleotide for detection of SNP TSC0005348
cccaaaacaaaac

SEQ ID NO: 235957 - DNA, 13 bp, Artificial Sequence
  Oligonucleotide for detection of SNP TSC0005348
gttttgatttggg

SEQ ID NO: 235958 - DNA, 13 bp, Artificial Sequence
  Oligonucleotide for detection of SNP TSC0005348
cccaaatcaaaac

SEQ ID NO: 235959 - DNA, 13 bp, Artificial Sequence
  Oligonucleotide for detection of SNP TSC0057599
ggggtgtggagta

SEQ ID NO: 235960 - DNA, 13 bp, Artificial Sequence
  Oligonucleotide for detection of SNP TSC0057599
tactccacacccc

SEQ ID NO: 235961 - DNA, 13 bp, Artificial Sequence
  Oligonucleotide for detection of SNP TSC0057599
ggggtgcggagta

SEQ ID NO: 235962 - DNA, 13 bp, Artificial Sequence
  Oligonucleotide for detection of SNP TSC0057599
tactccgcacccc

SEQ ID NO: 235963 - DNA, 13 bp, Artificial Sequence
  Oligonucleotide for detection of SNP TSC0005749
tgttagagaatat

SEQ ID NO: 235964 - DNA, 13 bp, Artificial Sequence
  Oligonucleotide for detection of SNP TSC0005749
atattctctaaca

SEQ ID NO: 235965 - DNA, 13 bp, Artificial Sequence
  Oligonucleotide for detection of SNP TSC0005749
tgttagtgaatat

SEQ ID NO: 235966 - DNA, 13 bp, Artificial Sequence
  Oligonucleotide for detection of SNP TSC0005749
atattcactaaca

SEQ ID NO: 235967 - DNA, 13 bp, Artificial Sequence
  Oligonucleotide for detection of SNP TSC0005749
tgttagcgaatat

SEQ ID NO: 235968 - DNA, 13 bp, Artificial Sequence
  Oligonucleotide for detection of SNP TSC0005749
atattcgctaaca

SEQ ID NO: 235969 - DNA, 13 bp, Artificial Sequence
  Oligonucleotide for detection of SNP TSC0005749
atattttttggta

SEQ ID NO: 235970 - DNA, 13 bp, Artificial Sequence
  Oligonucleotide for detection of SNP TSC0005749
taccaaaaaatat

SEQ ID NO: 235971 - DNA, 13 bp, Artificial Sequence
  Oligonucleotide for detection of SNP TSC0005749
atatttgttggta

SEQ ID NO: 235972 - DNA, 13 bp, Artificial Sequence
  Oligonucleotide for detection of SNP TSC0005749
taccaacaaatat

SEQ ID NO: 235973 - DNA, 13 bp, Artificial Sequence
  Oligonucleotide for detection of SNP TSC0005749
atattcgttggta

SEQ ID NO: 235974 - DNA, 13 bp, Artificial Sequence
  Oligonucleotide for detection of SNP TSC0005749
taccaacgaatat

SEQ ID NO: 235975 - DNA, 13 bp, Artificial Sequence
  Oligonucleotide for detection of SNP TSC0005750
aggagggagagag

SEQ ID NO: 235976 - DNA, 13 bp, Artificial Sequence
  Oligonucleotide for detection of SNP TSC0005750
ctctctccctcct

SEQ ID NO: 235977 - DNA, 13 bp, Artificial Sequence
  Oligonucleotide for detection of SNP TSC0005750
aggaggaagagag

SEQ ID NO: 235978 - DNA, 13 bp, Artificial Sequence
  Oligonucleotide for detection of SNP TSC0005750
ctctcttcctcct

SEQ ID NO: 235979 - DNA, 13 bp, Artificial Sequence
  Oligonucleotide for detection of SNP TSC0057602
ttttaattggaaa

SEQ ID NO: 235980 - DNA, 13 bp, Artificial Sequence
  Oligonucleotide for detection of SNP TSC0057602
tttccaattaaaa

SEQ ID NO: 235981 - DNA, 13 bp, Artificial Sequence
  Oligonucleotide for detection of SNP TSC0057602
ttttaagtggaaa

SEQ ID NO: 235982 - DNA, 13 bp, Artificial Sequence
  Oligonucleotide for detection of SNP TSC0057602
tttccacttaaaa

SEQ ID NO: 235983 - DNA, 13 bp, Artificial Sequence
  Oligonucleotide for detection of SNP TSC0057602
tttttagttaaaa

SEQ ID NO: 235984 - DNA, 13 bp, Artificial Sequence
  Oligonucleotide for detection of SNP TSC0057602
ttttaactaaaaa

SEQ ID NO: 235985 - DNA, 13 bp, Artificial Sequence
  Oligonucleotide for detection of SNP TSC0057602
tttttatttaaaa

SEQ ID NO: 235986 - DNA, 13 bp, Artificial Sequence
  Oligonucleotide for detection of SNP TSC0057602
ttttaaataaaaa

SEQ ID NO: 235987 - DNA, 13 bp, Artificial Sequence
  Oligonucleotide for detection of SNP TSC0000520
gagtttagttgga

SEQ ID NO: 235988 - DNA, 13 bp, Artificial Sequence
  Oligonucleotide for detection of SNP TSC0000520
tccaactaaactc

SEQ ID NO: 235989 - DNA, 13 bp, Artificial Sequence
  Oligonucleotide for detection of SNP TSC0000520
gagtttggttgga

SEQ ID NO: 235990 - DNA, 13 bp, Artificial Sequence
  Oligonucleotide for detection of SNP TSC0000520
tccaaccaaactc

SEQ ID NO: 235991 - DNA, 13 bp, Artificial Sequence
  Oligonucleotide for detection of SNP TSC0000520
gagttcggttgga

SEQ ID NO: 235992 - DNA, 13 bp, Artificial Sequence
  Oligonucleotide for detection of SNP TSC0000520
tccaaccgaactc

SEQ ID NO: 235993 - DNA, 13 bp, Artificial Sequence
  Oligonucleotide for detection of SNP TSC0000520
tttagttggatty

SEQ ID NO: 235994 - DNA, 13 bp, Artificial Sequence
  Oligonucleotide for detection of SNP TSC0000520
raatccaactaaa

SEQ ID NO: 235995 - DNA, 13 bp, Artificial Sequence
  Oligonucleotide for detection of SNP TSC0000520
tttagtcggatty

SEQ ID NO: 235996 - DNA, 13 bp, Artificial Sequence
  Oligonucleotide for detection of SNP TSC0000520
raatccgactaaa

SEQ ID NO: 235997 - DNA, 13 bp, Artificial Sequence
  Oligonucleotide for detection of SNP TSC0057608
taagaaaaataaa

SEQ ID NO: 235998 - DNA, 13 bp, Artificial Sequence
  Oligonucleotide for detection of SNP TSC0057608
tttatttttctta

SEQ ID NO: 235999 - DNA, 13 bp, Artificial Sequence
  Oligonucleotide for detection of SNP TSC0057608
taagaataataaa

SEQ ID NO: 236000 - DNA, 13 bp, Artificial Sequence
  Oligonucleotide for detection of SNP TSC0057608
tttattattctta

SEQ ID NO: 236001 - DNA, 13 bp, Artificial Sequence
  Oligonucleotide for detection of SNP TSC0057609
gatgagaaataaa

SEQ ID NO: 236002 - DNA, 13 bp, Artificial Sequence
  Oligonucleotide for detection of SNP TSC0057609
tttatttctcatc

SEQ ID NO: 236003 - DNA, 13 bp, Artificial Sequence
  Oligonucleotide for detection of SNP TSC0057609
gatgagtaataaa

SEQ ID NO: 236004 - DNA, 13 bp, Artificial Sequence
  Oligonucleotide for detection of SNP TSC0057609
tttattactcatc

SEQ ID NO: 236005 - DNA, 13 bp, Artificial Sequence
  Oligonucleotide for detection of SNP TSC0005281
tagattatggtay

SEQ ID NO: 236006 - DNA, 13 bp, Artificial Sequence
  Oligonucleotide for detection of SNP TSC0005281
rtaccataatcta

SEQ ID NO: 236007 - DNA, 13 bp, Artificial Sequence
  Oligonucleotide for detection of SNP TSC0005281
tagattgtggtay

SEQ ID NO: 236008 - DNA, 13 bp, Artificial Sequence
  Oligonucleotide for detection of SNP TSC0005281
rtaccacaatcta

SEQ ID NO: 236009 - DNA, 13 bp, Artificial Sequence
  Oligonucleotide for detection of SNP TSC0005281
tagattacggtay

SEQ ID NO: 236010 - DNA, 13 bp, Artificial Sequence
  Oligonucleotide for detection of SNP TSC0005281
rtaccgtaatcta

SEQ ID NO: 236011 - DNA, 13 bp, Artificial Sequence
  Oligonucleotide for detection of SNP TSC0005281
tagatcgtggtay

SEQ ID NO: 236012 - DNA, 13 bp, Artificial Sequence
  Oligonucleotide for detection of SNP TSC0005281
rtaccacgatcta

SEQ ID NO: 236013 - DNA, 13 bp, Artificial Sequence
  Oligonucleotide for detection of SNP TSC0005281
tagattgcggtay

SEQ ID NO: 236014 - DNA, 13 bp, Artificial Sequence
  Oligonucleotide for detection of SNP TSC0005281
rtaccgcaatcta

SEQ ID NO: 236015 - DNA, 13 bp, Artificial Sequence
  Oligonucleotide for detection of SNP TSC0005281
tagatcgcggtay

SEQ ID NO: 236016 - DNA, 13 bp, Artificial Sequence
  Oligonucleotide for detection of SNP TSC0005281
rtaccgcgatcta

SEQ ID NO: 236017 - DNA, 13 bp, Artificial Sequence
  Oligonucleotide for detection of SNP TSC0005281
gtgttgtgattta

SEQ ID NO: 236018 - DNA, 13 bp, Artificial Sequence
  Oligonucleotide for detection of SNP TSC0005281
taaatcacaacac

SEQ ID NO: 236019 - DNA, 13 bp, Artificial Sequence
  Oligonucleotide for detection of SNP TSC0005281
gtgtcgtgattta

SEQ ID NO: 236020 - DNA, 13 bp, Artificial Sequence
  Oligonucleotide for detection of SNP TSC0005281
taaatcacgacac

SEQ ID NO: 236021 - DNA, 13 bp, Artificial Sequence
  Oligonucleotide for detection of SNP TSC0005281
gtgttgcgattta

SEQ ID NO: 236022 - DNA, 13 bp, Artificial Sequence
  Oligonucleotide for detection of SNP TSC0005281
taaatcgcaacac

SEQ ID NO: 236023 - DNA, 13 bp, Artificial Sequence
  Oligonucleotide for detection of SNP TSC0005281
gtgtcgcgattta

SEQ ID NO: 236024 - DNA, 13 bp, Artificial Sequence
  Oligonucleotide for detection of SNP TSC0005281
taaatcgcgacac

SEQ ID NO: 236025 - DNA, 13 bp, Artificial Sequence
  Oligonucleotide for detection of SNP TSC0057610
atatttagatata

SEQ ID NO: 236026 - DNA, 13 bp, Artificial Sequence
  Oligonucleotide for detection of SNP TSC0057610
tatatctaaatat

SEQ ID NO: 236027 - DNA, 13 bp, Artificial Sequence
  Oligonucleotide for detection of SNP TSC0057610
atatttggatata

SEQ ID NO: 236028 - DNA, 13 bp, Artificial Sequence
  Oligonucleotide for detection of SNP TSC0057610
tatatccaaatat

SEQ ID NO: 236029 - DNA, 13 bp, Artificial Sequence
  Oligonucleotide for detection of SNP TSC0001464
tatgaataattgt

SEQ ID NO: 236030 - DNA, 13 bp, Artificial Sequence
  Oligonucleotide for detection of SNP TSC0001464
acaattattcata

SEQ ID NO: 236031 - DNA, 13 bp, Artificial Sequence
  Oligonucleotide for detection of SNP TSC0001464
tatgaagaattgt

SEQ ID NO: 236032 - DNA, 13 bp, Artificial Sequence
  Oligonucleotide for detection of SNP TSC0001464
acaattcttcata

SEQ ID NO: 236033 - DNA, 13 bp, Artificial Sequence
  Oligonucleotide for detection of SNP TSC0001464
ataattgtttatg

SEQ ID NO: 236034 - DNA, 13 bp, Artificial Sequence
  Oligonucleotide for detection of SNP TSC0001464
cataaacaattat

SEQ ID NO: 236035 - DNA, 13 bp, Artificial Sequence
  Oligonucleotide for detection of SNP TSC0001465
aaaaatggggaga

SEQ ID NO: 236036 - DNA, 13 bp, Artificial Sequence
  Oligonucleotide for detection of SNP TSC0001465
tctccccattttt

SEQ ID NO: 236037 - DNA, 13 bp, Artificial Sequence
  Oligonucleotide for detection of SNP TSC0001465
aaaaatagggaga

SEQ ID NO: 236038 - DNA, 13 bp, Artificial Sequence
  Oligonucleotide for detection of SNP TSC0001465
tctccctattttt

SEQ ID NO: 236039 - DNA, 13 bp, Artificial Sequence
  Oligonucleotide for detection of SNP TSC0057612
agatagggtaaga

SEQ ID NO: 236040 - DNA, 13 bp, Artificial Sequence
  Oligonucleotide for detection of SNP TSC0057612
tcttaccctatct

SEQ ID NO: 236041 - DNA, 13 bp, Artificial Sequence
  Oligonucleotide for detection of SNP TSC0057612
agatagagtaaga

SEQ ID NO: 236042 - DNA, 13 bp, Artificial Sequence
  Oligonucleotide for detection of SNP TSC0057612
tcttactctatct

SEQ ID NO: 236043 - DNA, 13 bp, Artificial Sequence
  Oligonucleotide for detection of SNP TSC0057613
aaaaattagagag

SEQ ID NO: 236044 - DNA, 13 bp, Artificial Sequence
  Oligonucleotide for detection of SNP TSC0057613
ctctctaattttt

SEQ ID NO: 236045 - DNA, 13 bp, Artificial Sequence
  Oligonucleotide for detection of SNP TSC0057613
aaaaatgagagag

SEQ ID NO: 236046 - DNA, 13 bp, Artificial Sequence
  Oligonucleotide for detection of SNP TSC0057613
ctctctcattttt

SEQ ID NO: 236047 - DNA, 13 bp, Artificial Sequence
  Oligonucleotide for detection of SNP TSC0057615
attgtatgtgtat

SEQ ID NO: 236048 - DNA, 13 bp, Artificial Sequence
  Oligonucleotide for detection of SNP TSC0057615
atacacatacaat

SEQ ID NO: 236049 - DNA, 13 bp, Artificial Sequence
  Oligonucleotide for detection of SNP TSC0057615
attgtacgtgtat

SEQ ID NO: 236050 - DNA, 13 bp, Artificial Sequence
  Oligonucleotide for detection of SNP TSC0057615
atacacgtacaat

SEQ ID NO: 236051 - DNA, 13 bp, Artificial Sequence
  Oligonucleotide for detection of SNP TSC0057616
ttttattggtttg

SEQ ID NO: 236052 - DNA, 13 bp, Artificial Sequence
  Oligonucleotide for detection of SNP TSC0057616
caaaccaataaaa

SEQ ID NO: 236053 - DNA, 13 bp, Artificial Sequence
  Oligonucleotide for detection of SNP TSC0057616
ttttatcggtttg

SEQ ID NO: 236054 - DNA, 13 bp, Artificial Sequence
  Oligonucleotide for detection of SNP TSC0057616
caaaccgataaaa

SEQ ID NO: 236055 - DNA, 13 bp, Artificial Sequence
  Oligonucleotide for detection of SNP TSC0057616
taaatcggtagga

SEQ ID NO: 236056 - DNA, 13 bp, Artificial Sequence
  Oligonucleotide for detection of SNP TSC0057616
tcctaccgattta

SEQ ID NO: 236057 - DNA, 13 bp, Artificial Sequence
  Oligonucleotide for detection of SNP TSC0057618
aataagaaagtat

SEQ ID NO: 236058 - DNA, 13 bp, Artificial Sequence
  Oligonucleotide for detection of SNP TSC0057618
atactttcttatt

SEQ ID NO: 236059 - DNA, 13 bp, Artificial Sequence
  Oligonucleotide for detection of SNP TSC0057618
aataaggaagtat

SEQ ID NO: 236060 - DNA, 13 bp, Artificial Sequence
  Oligonucleotide for detection of SNP TSC0057618
atacttccttatt

SEQ ID NO: 236061 - DNA, 13 bp, Artificial Sequence
  Oligonucleotide for detection of SNP TSC0057620
ggtaagtgagggg

SEQ ID NO: 236062 - DNA, 13 bp, Artificial Sequence
  Oligonucleotide for detection of SNP TSC0057620
cccctcacttacc

SEQ ID NO: 236063 - DNA, 13 bp, Artificial Sequence
  Oligonucleotide for detection of SNP TSC0057620
ggtaagcgagggg

SEQ ID NO: 236064 - DNA, 13 bp, Artificial Sequence
  Oligonucleotide for detection of SNP TSC0057620
cccctcgcttacc

SEQ ID NO: 236065 - DNA, 13 bp, Artificial Sequence
  Oligonucleotide for detection of SNP TSC0004735
tgagtttgtggty

SEQ ID NO: 236066 - DNA, 13 bp, Artificial Sequence
  Oligonucleotide for detection of SNP TSC0004735
raccacaaactca

SEQ ID NO: 236067 - DNA, 13 bp, Artificial Sequence
  Oligonucleotide for detection of SNP TSC0004735
tgagttggtggty

SEQ ID NO: 236068 - DNA, 13 bp, Artificial Sequence
  Oligonucleotide for detection of SNP TSC0004735
raccaccaactca

SEQ ID NO: 236069 - DNA, 13 bp, Artificial Sequence
  Oligonucleotide for detection of SNP TSC0004735
tgagttcgtggty

SEQ ID NO: 236070 - DNA, 13 bp, Artificial Sequence
  Oligonucleotide for detection of SNP TSC0004735
raccacgaactca

SEQ ID NO: 236071 - DNA, 13 bp, Artificial Sequence
  Oligonucleotide for detection of SNP TSC0004735
tgagtcggtggty

SEQ ID NO: 236072 - DNA, 13 bp, Artificial Sequence
  Oligonucleotide for detection of SNP TSC0004735
raccaccgactca

SEQ ID NO: 236073 - DNA, 13 bp, Artificial Sequence
  Oligonucleotide for detection of SNP TSC0004735
tgagtttgcggty

SEQ ID NO: 236074 - DNA, 13 bp, Artificial Sequence
  Oligonucleotide for detection of SNP TSC0004735
raccgcaaactca

SEQ ID NO: 236075 - DNA, 13 bp, Artificial Sequence
  Oligonucleotide for detection of SNP TSC0004735
tgagttggcggty

SEQ ID NO: 236076 - DNA, 13 bp, Artificial Sequence
  Oligonucleotide for detection of SNP TSC0004735
raccgccaactca

SEQ ID NO: 236077 - DNA, 13 bp, Artificial Sequence
  Oligonucleotide for detection of SNP TSC0004735
tgagttcgcggty

SEQ ID NO: 236078 - DNA, 13 bp, Artificial Sequence
  Oligonucleotide for detection of SNP TSC0004735
raccgcgaactca

SEQ ID NO: 236079 - DNA, 13 bp, Artificial Sequence
  Oligonucleotide for detection of SNP TSC0004735
tgagtcggcggty

SEQ ID NO: 236080 - DNA, 13 bp, Artificial Sequence
  Oligonucleotide for detection of SNP TSC0004735
raccgccgactca

SEQ ID NO: 236081 - DNA, 13 bp, Artificial Sequence
  Oligonucleotide for detection of SNP TSC0004735
gattgtgggttta

SEQ ID NO: 236082 - DNA, 13 bp, Artificial Sequence
  Oligonucleotide for detection of SNP TSC0004735
taaacccacaatc

SEQ ID NO: 236083 - DNA, 13 bp, Artificial Sequence
  Oligonucleotide for detection of SNP TSC0004735
gattgttggttta

SEQ ID NO: 236084 - DNA, 13 bp, Artificial Sequence
  Oligonucleotide for detection of SNP TSC0004735
taaaccaacaatc

SEQ ID NO: 236085 - DNA, 13 bp, Artificial Sequence
  Oligonucleotide for detection of SNP TSC0004735
gatcgtgggttta

SEQ ID NO: 236086 - DNA, 13 bp, Artificial Sequence
  Oligonucleotide for detection of SNP TSC0004735
taaacccacgatc

SEQ ID NO: 236087 - DNA, 13 bp, Artificial Sequence
  Oligonucleotide for detection of SNP TSC0004735
gatcgttggttta

SEQ ID NO: 236088 - DNA, 13 bp, Artificial Sequence
  Oligonucleotide for detection of SNP TSC0004735
taaaccaacgatc

SEQ ID NO: 236089 - DNA, 13 bp, Artificial Sequence
  Oligonucleotide for detection of SNP TSC0004735
gattgcgggttta

SEQ ID NO: 236090 - DNA, 13 bp, Artificial Sequence
  Oligonucleotide for detection of SNP TSC0004735
taaacccgcaatc

SEQ ID NO: 236091 - DNA, 13 bp, Artificial Sequence
  Oligonucleotide for detection of SNP TSC0004735
gattgtcggttta

SEQ ID NO: 236092 - DNA, 13 bp, Artificial Sequence
  Oligonucleotide for detection of SNP TSC0004735
taaaccgacaatc

SEQ ID NO: 236093 - DNA, 13 bp, Artificial Sequence
  Oligonucleotide for detection of SNP TSC0004735
gatcgcgggttta

SEQ ID NO: 236094 - DNA, 13 bp, Artificial Sequence
  Oligonucleotide for detection of SNP TSC0004735
taaacccgcgatc

SEQ ID NO: 236095 - DNA, 13 bp, Artificial Sequence
  Oligonucleotide for detection of SNP TSC0004735
gatcgtcggttta

SEQ ID NO: 236096 - DNA, 13 bp, Artificial Sequence
  Oligonucleotide for detection of SNP TSC0004735
taaaccgacgatc

SEQ ID NO: 236097 - DNA, 13 bp, Artificial Sequence
  Oligonucleotide for detection of SNP TSC0057621
tttgttagataga

SEQ ID NO: 236098 - DNA, 13 bp, Artificial Sequence
  Oligonucleotide for detection of SNP TSC0057621
tctatctaacaaa

SEQ ID NO: 236099 - DNA, 13 bp, Artificial Sequence
  Oligonucleotide for detection of SNP TSC0057621
tttgttggataga

SEQ ID NO: 236100 - DNA, 13 bp, Artificial Sequence
  Oligonucleotide for detection of SNP TSC0057621
tctatccaacaaa

SEQ ID NO: 236101 - DNA, 13 bp, Artificial Sequence
  Oligonucleotide for detection of SNP TSC0057623
tgatagtgaagaa

SEQ ID NO: 236102 - DNA, 13 bp, Artificial Sequence
  Oligonucleotide for detection of SNP TSC0057623
ttcttcactatca

SEQ ID NO: 236103 - DNA, 13 bp, Artificial Sequence
  Oligonucleotide for detection of SNP TSC0057623
tgatagcgaagaa

SEQ ID NO: 236104 - DNA, 13 bp, Artificial Sequence
  Oligonucleotide for detection of SNP TSC0057623
ttcttcgctatca

SEQ ID NO: 236105 - DNA, 13 bp, Artificial Sequence
  Oligonucleotide for detection of SNP TSC0057623
tttttcgttgtta

SEQ ID NO: 236106 - DNA, 13 bp, Artificial Sequence
  Oligonucleotide for detection of SNP TSC0057623
taacaacgaaaaa

SEQ ID NO: 236107 - DNA, 13 bp, Artificial Sequence
  Oligonucleotide for detection of SNP TSC0057624
gtagaatgggggy

SEQ ID NO: 236108 - DNA, 13 bp, Artificial Sequence
  Oligonucleotide for detection of SNP TSC0057624
rcccccattctac

SEQ ID NO: 236109 - DNA, 13 bp, Artificial Sequence
  Oligonucleotide for detection of SNP TSC0057624
gtagaaggggggy

SEQ ID NO: 236110 - DNA, 13 bp, Artificial Sequence
  Oligonucleotide for detection of SNP TSC0057624
rccccccttctac

SEQ ID NO: 236111 - DNA, 13 bp, Artificial Sequence
  Oligonucleotide for detection of SNP TSC0057624
gtagaacgggggy

SEQ ID NO: 236112 - DNA, 13 bp, Artificial Sequence
  Oligonucleotide for detection of SNP TSC0057624
rcccccgttctac

SEQ ID NO: 236113 - DNA, 13 bp, Artificial Sequence
  Oligonucleotide for detection of SNP TSC0057625
taggagaggaata

SEQ ID NO: 236114 - DNA, 13 bp, Artificial Sequence
  Oligonucleotide for detection of SNP TSC0057625
tattcctctccta

SEQ ID NO: 236115 - DNA, 13 bp, Artificial Sequence
  Oligonucleotide for detection of SNP TSC0057625
taggaggggaata

SEQ ID NO: 236116 - DNA, 13 bp, Artificial Sequence
  Oligonucleotide for detection of SNP TSC0057625
tattcccctccta

SEQ ID NO: 236117 - DNA, 13 bp, Artificial Sequence
  Oligonucleotide for detection of SNP TSC0057626
ttaagaggttaat

SEQ ID NO: 236118 - DNA, 13 bp, Artificial Sequence
  Oligonucleotide for detection of SNP TSC0057626
attaacctcttaa

SEQ ID NO: 236119 - DNA, 13 bp, Artificial Sequence
  Oligonucleotide for detection of SNP TSC0057626
attaatattttga

SEQ ID NO: 236120 - DNA, 13 bp, Artificial Sequence
  Oligonucleotide for detection of SNP TSC0057626
tcaaaatattaat

SEQ ID NO: 236121 - DNA, 13 bp, Artificial Sequence
  Oligonucleotide for detection of SNP TSC0057626
attaattttttga

SEQ ID NO: 236122 - DNA, 13 bp, Artificial Sequence
  Oligonucleotide for detection of SNP TSC0057626
tcaaaaaattaat

SEQ ID NO: 236123 - DNA, 13 bp, Artificial Sequence
  Oligonucleotide for detection of SNP TSC0057627
tgtgaattttttt

SEQ ID NO: 236124 - DNA, 13 bp, Artificial Sequence
  Oligonucleotide for detection of SNP TSC0057627
aaaaaaattcaca

SEQ ID NO: 236125 - DNA, 13 bp, Artificial Sequence
  Oligonucleotide for detection of SNP TSC0057629
aaatttaaagaay

SEQ ID NO: 236126 - DNA, 13 bp, Artificial Sequence
  Oligonucleotide for detection of SNP TSC0057629
rttctttaaattt

SEQ ID NO: 236127 - DNA, 13 bp, Artificial Sequence
  Oligonucleotide for detection of SNP TSC0057629
aaatttgaagaay

SEQ ID NO: 236128 - DNA, 13 bp, Artificial Sequence
  Oligonucleotide for detection of SNP TSC0057629
rttcttcaaattt

SEQ ID NO: 236129 - DNA, 13 bp, Artificial Sequence
  Oligonucleotide for detection of SNP TSC0057629
aaattcgaagaay

SEQ ID NO: 236130 - DNA, 13 bp, Artificial Sequence
  Oligonucleotide for detection of SNP TSC0057629
rttcttcgaattt

SEQ ID NO: 236131 - DNA, 13 bp, Artificial Sequence
  Oligonucleotide for detection of SNP TSC0009249
agggggtgtaaga

SEQ ID NO: 236132 - DNA, 13 bp, Artificial Sequence
  Oligonucleotide for detection of SNP TSC0009249
tcttacaccccct

SEQ ID NO: 236133 - DNA, 13 bp, Artificial Sequence
  Oligonucleotide for detection of SNP TSC0009249
agggggggtaaga

SEQ ID NO: 236134 - DNA, 13 bp, Artificial Sequence
  Oligonucleotide for detection of SNP TSC0009249
tcttaccccccct

SEQ ID NO: 236135 - DNA, 13 bp, Artificial Sequence
  Oligonucleotide for detection of SNP TSC0057630
atattatttatat

SEQ ID NO: 236136 - DNA, 13 bp, Artificial Sequence
  Oligonucleotide for detection of SNP TSC0057630
atataaataatat

SEQ ID NO: 236137 - DNA, 13 bp, Artificial Sequence
  Oligonucleotide for detection of SNP TSC0057630
atgtagttggtgt

SEQ ID NO: 236138 - DNA, 13 bp, Artificial Sequence
  Oligonucleotide for detection of SNP TSC0057630
acaccaactacat

SEQ ID NO: 236139 - DNA, 13 bp, Artificial Sequence
  Oligonucleotide for detection of SNP TSC0057630
atgtaggtggtgt

SEQ ID NO: 236140 - DNA, 13 bp, Artificial Sequence
  Oligonucleotide for detection of SNP TSC0057630
acaccacctacat

SEQ ID NO: 236141 - DNA, 13 bp, Artificial Sequence
  Oligonucleotide for detection of SNP TSC0057634
aataaatggaatg

SEQ ID NO: 236142 - DNA, 13 bp, Artificial Sequence
  Oligonucleotide for detection of SNP TSC0057634
cattccatttatt

SEQ ID NO: 236143 - DNA, 13 bp, Artificial Sequence
  Oligonucleotide for detection of SNP TSC0057634
aataaagggaatg

SEQ ID NO: 236144 - DNA, 13 bp, Artificial Sequence
  Oligonucleotide for detection of SNP TSC0057634
cattccctttatt

SEQ ID NO: 236145 - DNA, 13 bp, Artificial Sequence
  Oligonucleotide for detection of SNP TSC0057635
ttgttagagttty

SEQ ID NO: 236146 - DNA, 13 bp, Artificial Sequence
  Oligonucleotide for detection of SNP TSC0057635
raaactctaacaa

SEQ ID NO: 236147 - DNA, 13 bp, Artificial Sequence
  Oligonucleotide for detection of SNP TSC0057635
ttgttaaagttty

SEQ ID NO: 236148 - DNA, 13 bp, Artificial Sequence
  Oligonucleotide for detection of SNP TSC0057635
raaactttaacaa

SEQ ID NO: 236149 - DNA, 13 bp, Artificial Sequence
  Oligonucleotide for detection of SNP TSC0057636
tggagatggttty

SEQ ID NO: 236150 - DNA, 13 bp, Artificial Sequence
  Oligonucleotide for detection of SNP TSC0057636
raaaccatctcca

SEQ ID NO: 236151 - DNA, 13 bp, Artificial Sequence
  Oligonucleotide for detection of SNP TSC0057636
tggagacggttty

SEQ ID NO: 236152 - DNA, 13 bp, Artificial Sequence
  Oligonucleotide for detection of SNP TSC0057636
raaaccgtctcca

SEQ ID NO: 236153 - DNA, 13 bp, Artificial Sequence
  Oligonucleotide for detection of SNP TSC0057636
gaagttgttttta

SEQ ID NO: 236154 - DNA, 13 bp, Artificial Sequence
  Oligonucleotide for detection of SNP TSC0057636
taaaaacaacttc

SEQ ID NO: 236155 - DNA, 13 bp, Artificial Sequence
  Oligonucleotide for detection of SNP TSC0057636
gaagttattttta

SEQ ID NO: 236156 - DNA, 13 bp, Artificial Sequence
  Oligonucleotide for detection of SNP TSC0057636
taaaaataacttc

SEQ ID NO: 236157 - DNA, 13 bp, Artificial Sequence
  Oligonucleotide for detection of SNP TSC0057636
gaagtcgttttta

SEQ ID NO: 236158 - DNA, 13 bp, Artificial Sequence
  Oligonucleotide for detection of SNP TSC0057636
taaaaacgacttc

SEQ ID NO: 236159 - DNA, 13 bp, Artificial Sequence
  Oligonucleotide for detection of SNP TSC0008942
tagtttgatattt

SEQ ID NO: 236160 - DNA, 13 bp, Artificial Sequence
  Oligonucleotide for detection of SNP TSC0008942
aaatatcaaacta

SEQ ID NO: 236161 - DNA, 13 bp, Artificial Sequence
  Oligonucleotide for detection of SNP TSC0008942
tagtttaatattt

SEQ ID NO: 236162 - DNA, 13 bp, Artificial Sequence
  Oligonucleotide for detection of SNP TSC0008942
aaatattaaacta

SEQ ID NO: 236163 - DNA, 13 bp, Artificial Sequence
  Oligonucleotide for detection of SNP TSC0057641
tttatcgatttat

SEQ ID NO: 236164 - DNA, 13 bp, Artificial Sequence
  Oligonucleotide for detection of SNP TSC0057641
ataaatcgataaa

SEQ ID NO: 236165 - DNA, 13 bp, Artificial Sequence
  Oligonucleotide for detection of SNP TSC0057641
atggattgatgga

SEQ ID NO: 236166 - DNA, 13 bp, Artificial Sequence
  Oligonucleotide for detection of SNP TSC0057641
tccatcaatccat

SEQ ID NO: 236167 - DNA, 13 bp, Artificial Sequence
  Oligonucleotide for detection of SNP TSC0057641
atggatcgatgga

SEQ ID NO: 236168 - DNA, 13 bp, Artificial Sequence
  Oligonucleotide for detection of SNP TSC0057641
tccatcgatccat

SEQ ID NO: 236169 - DNA, 13 bp, Artificial Sequence
  Oligonucleotide for detection of SNP TSC0057642
gtagggggttggg

SEQ ID NO: 236170 - DNA, 13 bp, Artificial Sequence
  Oligonucleotide for detection of SNP TSC0057642
cccaaccccctac

SEQ ID NO: 236171 - DNA, 13 bp, Artificial Sequence
  Oligonucleotide for detection of SNP TSC0057642
gtagggagttggg

SEQ ID NO: 236172 - DNA, 13 bp, Artificial Sequence
  Oligonucleotide for detection of SNP TSC0057642
cccaactccctac

SEQ ID NO: 236173 - DNA, 13 bp, Artificial Sequence
  Oligonucleotide for detection of SNP TSC0006447
aaaaagtgttaaa

SEQ ID NO: 236174 - DNA, 13 bp, Artificial Sequence
  Oligonucleotide for detection of SNP TSC0006447
tttaacacttttt

SEQ ID NO: 236175 - DNA, 13 bp, Artificial Sequence
  Oligonucleotide for detection of SNP TSC0006447
aaaaagcgttaaa

SEQ ID NO: 236176 - DNA, 13 bp, Artificial Sequence
  Oligonucleotide for detection of SNP TSC0006447
tttaacgcttttt

SEQ ID NO: 236177 - DNA, 13 bp, Artificial Sequence
  Oligonucleotide for detection of SNP TSC0057645
tatagtgagagaa

SEQ ID NO: 236178 - DNA, 13 bp, Artificial Sequence
  Oligonucleotide for detection of SNP TSC0057645
ttctctcactata

SEQ ID NO: 236179 - DNA, 13 bp, Artificial Sequence
  Oligonucleotide for detection of SNP TSC0057645
tatagtaagagaa

SEQ ID NO: 236180 - DNA, 13 bp, Artificial Sequence
  Oligonucleotide for detection of SNP TSC0057645
ttctcttactata

SEQ ID NO: 236181 - DNA, 13 bp, Artificial Sequence
  Oligonucleotide for detection of SNP TSC0057646
ggttagaagttay

SEQ ID NO: 236182 - DNA, 13 bp, Artificial Sequence
  Oligonucleotide for detection of SNP TSC0057646
rtaacttctaacc

SEQ ID NO: 236183 - DNA, 13 bp, Artificial Sequence
  Oligonucleotide for detection of SNP TSC0057646
ggttaggagttay

SEQ ID NO: 236184 - DNA, 13 bp, Artificial Sequence
  Oligonucleotide for detection of SNP TSC0057646
rtaactcctaacc

SEQ ID NO: 236185 - DNA, 13 bp, Artificial Sequence
  Oligonucleotide for detection of SNP TSC0057647
gtgaaaattgagy

SEQ ID NO: 236186 - DNA, 13 bp, Artificial Sequence
  Oligonucleotide for detection of SNP TSC0057647
rctcaattttcac

SEQ ID NO: 236187 - DNA, 13 bp, Artificial Sequence
  Oligonucleotide for detection of SNP TSC0057647
gtgaaagttgagy

SEQ ID NO: 236188 - DNA, 13 bp, Artificial Sequence
  Oligonucleotide for detection of SNP TSC0057647
rctcaactttcac

SEQ ID NO: 236189 - DNA, 13 bp, Artificial Sequence
  Oligonucleotide for detection of SNP TSC0057650
gggagagagtagg

SEQ ID NO: 236190 - DNA, 13 bp, Artificial Sequence
  Oligonucleotide for detection of SNP TSC0057650
cctactctctccc

SEQ ID NO: 236191 - DNA, 13 bp, Artificial Sequence
  Oligonucleotide for detection of SNP TSC0057650
gggagatagtagg

SEQ ID NO: 236192 - DNA, 13 bp, Artificial Sequence
  Oligonucleotide for detection of SNP TSC0057650
cctactatctccc

SEQ ID NO: 236193 - DNA, 13 bp, Artificial Sequence
  Oligonucleotide for detection of SNP TSC0057651
ggttttatattty

SEQ ID NO: 236194 - DNA, 13 bp, Artificial Sequence
  Oligonucleotide for detection of SNP TSC0057651
raaatataaaacc

SEQ ID NO: 236195 - DNA, 13 bp, Artificial Sequence
  Oligonucleotide for detection of SNP TSC0057651
ggttttttattty

SEQ ID NO: 236196 - DNA, 13 bp, Artificial Sequence
  Oligonucleotide for detection of SNP TSC0057651
raaataaaaaacc

SEQ ID NO: 236197 - DNA, 13 bp, Artificial Sequence
  Oligonucleotide for detection of SNP TSC0057651
gggatgtgggaty

SEQ ID NO: 236198 - DNA, 13 bp, Artificial Sequence
  Oligonucleotide for detection of SNP TSC0057651
ratcccacatccc

SEQ ID NO: 236199 - DNA, 13 bp, Artificial Sequence
  Oligonucleotide for detection of SNP TSC0057651
gggatgggggaty

SEQ ID NO: 236200 - DNA, 13 bp, Artificial Sequence
  Oligonucleotide for detection of SNP TSC0057651
ratcccccatccc

SEQ ID NO: 236201 - DNA, 13 bp, Artificial Sequence
  Oligonucleotide for detection of SNP TSC0057652
tgttggatttatt

SEQ ID NO: 236202 - DNA, 13 bp, Artificial Sequence
  Oligonucleotide for detection of SNP TSC0057652
aataaatccaaca

SEQ ID NO: 236203 - DNA, 13 bp, Artificial Sequence
  Oligonucleotide for detection of SNP TSC0057652
tgttgggtttatt

SEQ ID NO: 236204 - DNA, 13 bp, Artificial Sequence
  Oligonucleotide for detection of SNP TSC0057652
aataaacccaaca

SEQ ID NO: 236205 - DNA, 13 bp, Artificial Sequence
  Oligonucleotide for detection of SNP TSC0005670
ttgggggaaattt

SEQ ID NO: 236206 - DNA, 13 bp, Artificial Sequence
  Oligonucleotide for detection of SNP TSC0005670
aaatttcccccaa

SEQ ID NO: 236207 - DNA, 13 bp, Artificial Sequence
  Oligonucleotide for detection of SNP TSC0005670
ttggggaaaattt

SEQ ID NO: 236208 - DNA, 13 bp, Artificial Sequence
  Oligonucleotide for detection of SNP TSC0005670
aaattttccccaa

SEQ ID NO: 236209 - DNA, 13 bp, Artificial Sequence
  Oligonucleotide for detection of SNP TSC0057653
agaaaattttagt

SEQ ID NO: 236210 - DNA, 13 bp, Artificial Sequence
  Oligonucleotide for detection of SNP TSC0057653
actaaaattttct

SEQ ID NO: 236211 - DNA, 13 bp, Artificial Sequence
  Oligonucleotide for detection of SNP TSC0057653
agaaaagtttagt

SEQ ID NO: 236212 - DNA, 13 bp, Artificial Sequence
  Oligonucleotide for detection of SNP TSC0057653
actaaacttttct

SEQ ID NO: 236213 - DNA, 13 bp, Artificial Sequence
  Oligonucleotide for detection of SNP TSC0057653
attgggatttttt

SEQ ID NO: 236214 - DNA, 13 bp, Artificial Sequence
  Oligonucleotide for detection of SNP TSC0057653
aaaaaatcccaat

SEQ ID NO: 236215 - DNA, 13 bp, Artificial Sequence
  Oligonucleotide for detection of SNP TSC0057653
attgggttttttt

SEQ ID NO: 236216 - DNA, 13 bp, Artificial Sequence
  Oligonucleotide for detection of SNP TSC0057653
aaaaaaacccaat

SEQ ID NO: 236217 - DNA, 13 bp, Artificial Sequence
  Oligonucleotide for detection of SNP TSC0057654
taaggtattatta

SEQ ID NO: 236218 - DNA, 13 bp, Artificial Sequence
  Oligonucleotide for detection of SNP TSC0057654
taataatacctta

SEQ ID NO: 236219 - DNA, 13 bp, Artificial Sequence
  Oligonucleotide for detection of SNP TSC0057654
taaggtgttatta

SEQ ID NO: 236220 - DNA, 13 bp, Artificial Sequence
  Oligonucleotide for detection of SNP TSC0057654
taataacacctta

SEQ ID NO: 236221 - DNA, 13 bp, Artificial Sequence
  Oligonucleotide for detection of SNP TSC0001284
ttatgtgtaattt

SEQ ID NO: 236222 - DNA, 13 bp, Artificial Sequence
  Oligonucleotide for detection of SNP TSC0001284
aaattacacataa

SEQ ID NO: 236223 - DNA, 13 bp, Artificial Sequence
  Oligonucleotide for detection of SNP TSC0001284
ttatgcgtaattt

SEQ ID NO: 236224 - DNA, 13 bp, Artificial Sequence
  Oligonucleotide for detection of SNP TSC0001284
aaattacgcataa

SEQ ID NO: 236225 - DNA, 13 bp, Artificial Sequence
  Oligonucleotide for detection of SNP TSC0001284
aaattatgtatag

SEQ ID NO: 236226 - DNA, 13 bp, Artificial Sequence
  Oligonucleotide for detection of SNP TSC0001284
ctatacataattt

SEQ ID NO: 236227 - DNA, 13 bp, Artificial Sequence
  Oligonucleotide for detection of SNP TSC0001284
aaattacgtatag

SEQ ID NO: 236228 - DNA, 13 bp, Artificial Sequence
  Oligonucleotide for detection of SNP TSC0001284
ctatacgtaattt

SEQ ID NO: 236229 - DNA, 13 bp, Artificial Sequence
  Oligonucleotide for detection of SNP TSC0057656
taggggaaatagt

SEQ ID NO: 236230 - DNA, 13 bp, Artificial Sequence
  Oligonucleotide for detection of SNP TSC0057656
actatttccccta

SEQ ID NO: 236231 - DNA, 13 bp, Artificial Sequence
  Oligonucleotide for detection of SNP TSC0057656
tagggggaatagt

SEQ ID NO: 236232 - DNA, 13 bp, Artificial Sequence
  Oligonucleotide for detection of SNP TSC0057656
actattcccccta

SEQ ID NO: 236233 - DNA, 13 bp, Artificial Sequence
  Oligonucleotide for detection of SNP TSC0057657
gtttagagggttt

SEQ ID NO: 236234 - DNA, 13 bp, Artificial Sequence
  Oligonucleotide for detection of SNP TSC0057657
aaaccctctaaac

SEQ ID NO: 236235 - DNA, 13 bp, Artificial Sequence
  Oligonucleotide for detection of SNP TSC0057657
gtttagggggttt

SEQ ID NO: 236236 - DNA, 13 bp, Artificial Sequence
  Oligonucleotide for detection of SNP TSC0057657
aaaccccctaaac

SEQ ID NO: 236237 - DNA, 13 bp, Artificial Sequence
  Oligonucleotide for detection of SNP TSC0057658
gttttagttggty

SEQ ID NO: 236238 - DNA, 13 bp, Artificial Sequence
  Oligonucleotide for detection of SNP TSC0057658
raccaactaaaac

SEQ ID NO: 236239 - DNA, 13 bp, Artificial Sequence
  Oligonucleotide for detection of SNP TSC0057658
gttttaattggty

SEQ ID NO: 236240 - DNA, 13 bp, Artificial Sequence
  Oligonucleotide for detection of SNP TSC0057658
raccaattaaaac

SEQ ID NO: 236241 - DNA, 13 bp, Artificial Sequence
  Oligonucleotide for detection of SNP TSC0057659
attttaagtaaat

SEQ ID NO: 236242 - DNA, 13 bp, Artificial Sequence
  Oligonucleotide for detection of SNP TSC0057659
atttacttaaaat

SEQ ID NO: 236243 - DNA, 13 bp, Artificial Sequence
  Oligonucleotide for detection of SNP TSC0057659
attttaggtaaat

SEQ ID NO: 236244 - DNA, 13 bp, Artificial Sequence
  Oligonucleotide for detection of SNP TSC0057659
atttacctaaaat

SEQ ID NO: 236245 - DNA, 13 bp, Artificial Sequence
  Oligonucleotide for detection of SNP TSC0057662
gggataattgttg

SEQ ID NO: 236246 - DNA, 13 bp, Artificial Sequence
  Oligonucleotide for detection of SNP TSC0057662
caacaattatccc

SEQ ID NO: 236247 - DNA, 13 bp, Artificial Sequence
  Oligonucleotide for detection of SNP TSC0057662
gggatagttgttg

SEQ ID NO: 236248 - DNA, 13 bp, Artificial Sequence
  Oligonucleotide for detection of SNP TSC0057662
caacaactatccc

SEQ ID NO: 236249 - DNA, 13 bp, Artificial Sequence
  Oligonucleotide for detection of SNP TSC0057662
gggataatcgttg

SEQ ID NO: 236250 - DNA, 13 bp, Artificial Sequence
  Oligonucleotide for detection of SNP TSC0057662
caacgattatccc

SEQ ID NO: 236251 - DNA, 13 bp, Artificial Sequence
  Oligonucleotide for detection of SNP TSC0057662
gggatagtcgttg

SEQ ID NO: 236252 - DNA, 13 bp, Artificial Sequence
  Oligonucleotide for detection of SNP TSC0057662
caacgactatccc

SEQ ID NO: 236253 - DNA, 13 bp, Artificial Sequence
  Oligonucleotide for detection of SNP TSC0057664
ttaattgtattty

SEQ ID NO: 236254 - DNA, 13 bp, Artificial Sequence
  Oligonucleotide for detection of SNP TSC0057664
raaatacaattaa

SEQ ID NO: 236255 - DNA, 13 bp, Artificial Sequence
  Oligonucleotide for detection of SNP TSC0057664
ttaattatattty

SEQ ID NO: 236256 - DNA, 13 bp, Artificial Sequence
  Oligonucleotide for detection of SNP TSC0057664
raaatataattaa

SEQ ID NO: 236257 - DNA, 13 bp, Artificial Sequence
  Oligonucleotide for detection of SNP TSC0057665
gggaggtgtggtt

SEQ ID NO: 236258 - DNA, 13 bp, Artificial Sequence
  Oligonucleotide for detection of SNP TSC0057665
aaccacacctccc

SEQ ID NO: 236259 - DNA, 13 bp, Artificial Sequence
  Oligonucleotide for detection of SNP TSC0057665
gggaggcgtggtt

SEQ ID NO: 236260 - DNA, 13 bp, Artificial Sequence
  Oligonucleotide for detection of SNP TSC0057665
aaccacgcctccc

SEQ ID NO: 236261 - DNA, 13 bp, Artificial Sequence
  Oligonucleotide for detection of SNP TSC0057665
agttacgttttty

SEQ ID NO: 236262 - DNA, 13 bp, Artificial Sequence
  Oligonucleotide for detection of SNP TSC0057665
raaaaacgtaact

SEQ ID NO: 236263 - DNA, 13 bp, Artificial Sequence
  Oligonucleotide for detection of SNP TSC0057666
atgagaaaaatta

SEQ ID NO: 236264 - DNA, 13 bp, Artificial Sequence
  Oligonucleotide for detection of SNP TSC0057666
taatttttctcat

SEQ ID NO: 236265 - DNA, 13 bp, Artificial Sequence
  Oligonucleotide for detection of SNP TSC0057666
atgagataaatta

SEQ ID NO: 236266 - DNA, 13 bp, Artificial Sequence
  Oligonucleotide for detection of SNP TSC0057666
taatttatctcat

SEQ ID NO: 236267 - DNA, 13 bp, Artificial Sequence
  Oligonucleotide for detection of SNP TSC0057667
tttgaagaattta

SEQ ID NO: 236268 - DNA, 13 bp, Artificial Sequence
  Oligonucleotide for detection of SNP TSC0057667
taaattcttcaaa

SEQ ID NO: 236269 - DNA, 13 bp, Artificial Sequence
  Oligonucleotide for detection of SNP TSC0057667
tttgaaaaattta

SEQ ID NO: 236270 - DNA, 13 bp, Artificial Sequence
  Oligonucleotide for detection of SNP TSC0057667
taaatttttcaaa

SEQ ID NO: 236271 - DNA, 13 bp, Artificial Sequence
  Oligonucleotide for detection of SNP TSC0008120
tattagggaggty

SEQ ID NO: 236272 - DNA, 13 bp, Artificial Sequence
  Oligonucleotide for detection of SNP TSC0008120
racctccctaata

SEQ ID NO: 236273 - DNA, 13 bp, Artificial Sequence
  Oligonucleotide for detection of SNP TSC0008120
tattagagaggty

SEQ ID NO: 236274 - DNA, 13 bp, Artificial Sequence
  Oligonucleotide for detection of SNP TSC0008120
racctctctaata

SEQ ID NO: 236275 - DNA, 13 bp, Artificial Sequence
  Oligonucleotide for detection of SNP TSC0057673
ttgtttggggttt

SEQ ID NO: 236276 - DNA, 13 bp, Artificial Sequence
  Oligonucleotide for detection of SNP TSC0057673
aaaccccaaacaa

SEQ ID NO: 236277 - DNA, 13 bp, Artificial Sequence
  Oligonucleotide for detection of SNP TSC0057673
ttgtttagggttt

SEQ ID NO: 236278 - DNA, 13 bp, Artificial Sequence
  Oligonucleotide for detection of SNP TSC0057673
aaaccctaaacaa

SEQ ID NO: 236279 - DNA, 13 bp, Artificial Sequence
  Oligonucleotide for detection of SNP TSC0057674
gagtatgatataa

SEQ ID NO: 236280 - DNA, 13 bp, Artificial Sequence
  Oligonucleotide for detection of SNP TSC0057674
ttatatcatactc

SEQ ID NO: 236281 - DNA, 13 bp, Artificial Sequence
  Oligonucleotide for detection of SNP TSC0057674
gagtataatataa

SEQ ID NO: 236282 - DNA, 13 bp, Artificial Sequence
  Oligonucleotide for detection of SNP TSC0057674
ttatattatactc

SEQ ID NO: 236283 - DNA, 13 bp, Artificial Sequence
  Oligonucleotide for detection of SNP TSC0057674
gagtacgatataa

SEQ ID NO: 236284 - DNA, 13 bp, Artificial Sequence
  Oligonucleotide for detection of SNP TSC0057674
ttatatcgtactc

SEQ ID NO: 236285 - DNA, 13 bp, Artificial Sequence
  Oligonucleotide for detection of SNP TSC0057675
tttgtatgttatg

SEQ ID NO: 236286 - DNA, 13 bp, Artificial Sequence
  Oligonucleotide for detection of SNP TSC0057675
cataacatacaaa

SEQ ID NO: 236287 - DNA, 13 bp, Artificial Sequence
  Oligonucleotide for detection of SNP TSC0057675
tttgtacgttatg

SEQ ID NO: 236288 - DNA, 13 bp, Artificial Sequence
  Oligonucleotide for detection of SNP TSC0057675
cataacgtacaaa

SEQ ID NO: 236289 - DNA, 13 bp, Artificial Sequence
  Oligonucleotide for detection of SNP TSC0057677
aatttaagaaagy

SEQ ID NO: 236290 - DNA, 13 bp, Artificial Sequence
  Oligonucleotide for detection of SNP TSC0057677
rctttcttaaatt

SEQ ID NO: 236291 - DNA, 13 bp, Artificial Sequence
  Oligonucleotide for detection of SNP TSC0057677
aatttaggaaagy

SEQ ID NO: 236292 - DNA, 13 bp, Artificial Sequence
  Oligonucleotide for detection of SNP TSC0057677
rctttcctaaatt

SEQ ID NO: 236293 - DNA, 13 bp, Artificial Sequence
  Oligonucleotide for detection of SNP TSC0057678
gttgataatgtag

SEQ ID NO: 236294 - DNA, 13 bp, Artificial Sequence
  Oligonucleotide for detection of SNP TSC0057678
ctacattatcaac

SEQ ID NO: 236295 - DNA, 13 bp, Artificial Sequence
  Oligonucleotide for detection of SNP TSC0057678
gttgatgatgtag

SEQ ID NO: 236296 - DNA, 13 bp, Artificial Sequence
  Oligonucleotide for detection of SNP TSC0057678
ctacatcatcaac

SEQ ID NO: 236297 - DNA, 13 bp, Artificial Sequence
  Oligonucleotide for detection of SNP TSC0057678
gttgacgatgtag

SEQ ID NO: 236298 - DNA, 13 bp, Artificial Sequence
  Oligonucleotide for detection of SNP TSC0057678
ctacatcgtcaac

SEQ ID NO: 236299 - DNA, 13 bp, Artificial Sequence
  Oligonucleotide for detection of SNP TSC0057678
ttgtattgttagy

SEQ ID NO: 236300 - DNA, 13 bp, Artificial Sequence
  Oligonucleotide for detection of SNP TSC0057678
rctaacaatacaa

SEQ ID NO: 236301 - DNA, 13 bp, Artificial Sequence
  Oligonucleotide for detection of SNP TSC0057678
ttgtatcgttagy

SEQ ID NO: 236302 - DNA, 13 bp, Artificial Sequence
  Oligonucleotide for detection of SNP TSC0057678
rctaacgatacaa

SEQ ID NO: 236303 - DNA, 13 bp, Artificial Sequence
  Oligonucleotide for detection of SNP TSC0057679
aaaggtattttta

SEQ ID NO: 236304 - DNA, 13 bp, Artificial Sequence
  Oligonucleotide for detection of SNP TSC0057679
taaaaataccttt

SEQ ID NO: 236305 - DNA, 13 bp, Artificial Sequence
  Oligonucleotide for detection of SNP TSC0057679
aaaggtgttttta

SEQ ID NO: 236306 - DNA, 13 bp, Artificial Sequence
  Oligonucleotide for detection of SNP TSC0057679
taaaaacaccttt

SEQ ID NO: 236307 - DNA, 13 bp, Artificial Sequence
  Oligonucleotide for detection of SNP TSC0057679
aaaggcgttttta

SEQ ID NO: 236308 - DNA, 13 bp, Artificial Sequence
  Oligonucleotide for detection of SNP TSC0057679
taaaaacgccttt

SEQ ID NO: 236309 - DNA, 13 bp, Artificial Sequence
  Oligonucleotide for detection of SNP TSC0057679
taggaatgttttt

SEQ ID NO: 236310 - DNA, 13 bp, Artificial Sequence
  Oligonucleotide for detection of SNP TSC0057679
aaaaacattccta

SEQ ID NO: 236311 - DNA, 13 bp, Artificial Sequence
  Oligonucleotide for detection of SNP TSC0057679
taggaacgttttt

SEQ ID NO: 236312 - DNA, 13 bp, Artificial Sequence
  Oligonucleotide for detection of SNP TSC0057679
aaaaacgttccta

SEQ ID NO: 236313 - DNA, 13 bp, Artificial Sequence
  Oligonucleotide for detection of SNP TSC0057682
aagaaagtattag

SEQ ID NO: 236314 - DNA, 13 bp, Artificial Sequence
  Oligonucleotide for detection of SNP TSC0057682
ctaatactttctt

SEQ ID NO: 236315 - DNA, 13 bp, Artificial Sequence
  Oligonucleotide for detection of SNP TSC0057682
aagaaaatattag

SEQ ID NO: 236316 - DNA, 13 bp, Artificial Sequence
  Oligonucleotide for detection of SNP TSC0057682
ctaatattttctt

SEQ ID NO: 236317 - DNA, 13 bp, Artificial Sequence
  Oligonucleotide for detection of SNP TSC0057683
taaaaagaatgag

SEQ ID NO: 236318 - DNA, 13 bp, Artificial Sequence
  Oligonucleotide for detection of SNP TSC0057683
ctcattcttttta

SEQ ID NO: 236319 - DNA, 13 bp, Artificial Sequence
  Oligonucleotide for detection of SNP TSC0057683
taaaaataatgag

SEQ ID NO: 236320 - DNA, 13 bp, Artificial Sequence
  Oligonucleotide for detection of SNP TSC0057683
ctcattattttta

SEQ ID NO: 236321 - DNA, 13 bp, Artificial Sequence
  Oligonucleotide for detection of SNP TSC0057686
atttttgttagta

SEQ ID NO: 236322 - DNA, 13 bp, Artificial Sequence
  Oligonucleotide for detection of SNP TSC0057686
tactaacaaaaat

SEQ ID NO: 236323 - DNA, 13 bp, Artificial Sequence
  Oligonucleotide for detection of SNP TSC0057687
aatatggtaagta

SEQ ID NO: 236324 - DNA, 13 bp, Artificial Sequence
  Oligonucleotide for detection of SNP TSC0057687
tacttaccatatt

SEQ ID NO: 236325 - DNA, 13 bp, Artificial Sequence
  Oligonucleotide for detection of SNP TSC0057687
aatatgataagta

SEQ ID NO: 236326 - DNA, 13 bp, Artificial Sequence
  Oligonucleotide for detection of SNP TSC0057687
tacttatcatatt

SEQ ID NO: 236327 - DNA, 13 bp, Artificial Sequence
  Oligonucleotide for detection of SNP TSC0057688
tatatggaagtgy

SEQ ID NO: 236328 - DNA, 13 bp, Artificial Sequence
  Oligonucleotide for detection of SNP TSC0057688
rcacttccatata

SEQ ID NO: 236329 - DNA, 13 bp, Artificial Sequence
  Oligonucleotide for detection of SNP TSC0057688
tatatgaaagtgy

SEQ ID NO: 236330 - DNA, 13 bp, Artificial Sequence
  Oligonucleotide for detection of SNP TSC0057688
rcactttcatata

SEQ ID NO: 236331 - DNA, 13 bp, Artificial Sequence
  Oligonucleotide for detection of SNP TSC0057688
tatacggaagtgy

SEQ ID NO: 236332 - DNA, 13 bp, Artificial Sequence
  Oligonucleotide for detection of SNP TSC0057688
rcacttccgtata

SEQ ID NO: 236333 - DNA, 13 bp, Artificial Sequence
  Oligonucleotide for detection of SNP TSC0057688
tatacgaaagtgy

SEQ ID NO: 236334 - DNA, 13 bp, Artificial Sequence
  Oligonucleotide for detection of SNP TSC0057688
rcactttcgtata

SEQ ID NO: 236335 - DNA, 13 bp, Artificial Sequence
  Oligonucleotide for detection of SNP TSC0057690
gtagattaattty

SEQ ID NO: 236336 - DNA, 13 bp, Artificial Sequence
  Oligonucleotide for detection of SNP TSC0057690
raaattaatctac

SEQ ID NO: 236337 - DNA, 13 bp, Artificial Sequence
  Oligonucleotide for detection of SNP TSC0057690
gtagatgaattty

SEQ ID NO: 236338 - DNA, 13 bp, Artificial Sequence
  Oligonucleotide for detection of SNP TSC0057690
raaattcatctac

SEQ ID NO: 236339 - DNA, 13 bp, Artificial Sequence
  Oligonucleotide for detection of SNP TSC0057690
gagattgatttay

SEQ ID NO: 236340 - DNA, 13 bp, Artificial Sequence
  Oligonucleotide for detection of SNP TSC0057690
rtaaatcaatctc

SEQ ID NO: 236341 - DNA, 13 bp, Artificial Sequence
  Oligonucleotide for detection of SNP TSC0057690
gagatttatttay

SEQ ID NO: 236342 - DNA, 13 bp, Artificial Sequence
  Oligonucleotide for detection of SNP TSC0057690
rtaaataaatctc

SEQ ID NO: 236343 - DNA, 13 bp, Artificial Sequence
  Oligonucleotide for detection of SNP TSC0057691
tgagagggtgggg

SEQ ID NO: 236344 - DNA, 13 bp, Artificial Sequence
  Oligonucleotide for detection of SNP TSC0057691
ccccaccctctca

SEQ ID NO: 236345 - DNA, 13 bp, Artificial Sequence
  Oligonucleotide for detection of SNP TSC0057691
tgagagtgtgggg

SEQ ID NO: 236346 - DNA, 13 bp, Artificial Sequence
  Oligonucleotide for detection of SNP TSC0057691
ccccacactctca

SEQ ID NO: 236347 - DNA, 13 bp, Artificial Sequence
  Oligonucleotide for detection of SNP TSC0057691
tgagagcgtgggg

SEQ ID NO: 236348 - DNA, 13 bp, Artificial Sequence
  Oligonucleotide for detection of SNP TSC0057691
ccccacgctctca

SEQ ID NO: 236349 - DNA, 13 bp, Artificial Sequence
  Oligonucleotide for detection of SNP TSC0057692
ttagttgtgatat

SEQ ID NO: 236350 - DNA, 13 bp, Artificial Sequence
  Oligonucleotide for detection of SNP TSC0057692
atatcacaactaa

SEQ ID NO: 236351 - DNA, 13 bp, Artificial Sequence
  Oligonucleotide for detection of SNP TSC0057693
ggtttaaatatag

SEQ ID NO: 236352 - DNA, 13 bp, Artificial Sequence
  Oligonucleotide for detection of SNP TSC0057693
ctatatttaaacc

SEQ ID NO: 236353 - DNA, 13 bp, Artificial Sequence
  Oligonucleotide for detection of SNP TSC0057693
ggtttagatatag

SEQ ID NO: 236354 - DNA, 13 bp, Artificial Sequence
  Oligonucleotide for detection of SNP TSC0057693
ctatatctaaacc

SEQ ID NO: 236355 - DNA, 13 bp, Artificial Sequence
  Oligonucleotide for detection of SNP TSC0057696
agtatagttatta

SEQ ID NO: 236356 - DNA, 13 bp, Artificial Sequence
  Oligonucleotide for detection of SNP TSC0057696
taataactatact

SEQ ID NO: 236357 - DNA, 13 bp, Artificial Sequence
  Oligonucleotide for detection of SNP TSC0057696
agtataattatta

SEQ ID NO: 236358 - DNA, 13 bp, Artificial Sequence
  Oligonucleotide for detection of SNP TSC0057696
taataattatact

SEQ ID NO: 236359 - DNA, 13 bp, Artificial Sequence
  Oligonucleotide for detection of SNP TSC0057697
tggagtattttty

SEQ ID NO: 236360 - DNA, 13 bp, Artificial Sequence
  Oligonucleotide for detection of SNP TSC0057697
raaaaatactcca

SEQ ID NO: 236361 - DNA, 13 bp, Artificial Sequence
  Oligonucleotide for detection of SNP TSC0057697
tggagtgttttty

SEQ ID NO: 236362 - DNA, 13 bp, Artificial Sequence
  Oligonucleotide for detection of SNP TSC0057697
raaaaacactcca

SEQ ID NO: 236363 - DNA, 13 bp, Artificial Sequence
  Oligonucleotide for detection of SNP TSC0057698
gtagggaaatagy

SEQ ID NO: 236364 - DNA, 13 bp, Artificial Sequence
  Oligonucleotide for detection of SNP TSC0057698
rctatttccctac

SEQ ID NO: 236365 - DNA, 13 bp, Artificial Sequence
  Oligonucleotide for detection of SNP TSC0057698
gtagggtaatagy

SEQ ID NO: 236366 - DNA, 13 bp, Artificial Sequence
  Oligonucleotide for detection of SNP TSC0057698
rctattaccctac

SEQ ID NO: 236367 - DNA, 13 bp, Artificial Sequence
  Oligonucleotide for detection of SNP TSC0057698
gttgtttttttgy

SEQ ID NO: 236368 - DNA, 13 bp, Artificial Sequence
  Oligonucleotide for detection of SNP TSC0057698
rcaaaaaaacaac

SEQ ID NO: 236369 - DNA, 13 bp, Artificial Sequence
  Oligonucleotide for detection of SNP TSC0057698
gttgttattttgy

SEQ ID NO: 236370 - DNA, 13 bp, Artificial Sequence
  Oligonucleotide for detection of SNP TSC0057698
rcaaaataacaac

SEQ ID NO: 236371 - DNA, 13 bp, Artificial Sequence
  Oligonucleotide for detection of SNP TSC0057700
gggagatggaggg

SEQ ID NO: 236372 - DNA, 13 bp, Artificial Sequence
  Oligonucleotide for detection of SNP TSC0057700
ccctccatctccc

SEQ ID NO: 236373 - DNA, 13 bp, Artificial Sequence
  Oligonucleotide for detection of SNP TSC0057700
gggagacggaggg

SEQ ID NO: 236374 - DNA, 13 bp, Artificial Sequence
  Oligonucleotide for detection of SNP TSC0057700
ccctccgtctccc

SEQ ID NO: 236375 - DNA, 13 bp, Artificial Sequence
  Oligonucleotide for detection of SNP TSC0057701
aaatagatgggay

SEQ ID NO: 236376 - DNA, 13 bp, Artificial Sequence
  Oligonucleotide for detection of SNP TSC0057701
rtcccatctattt

SEQ ID NO: 236377 - DNA, 13 bp, Artificial Sequence
  Oligonucleotide for detection of SNP TSC0057701
aaatagttgggay

SEQ ID NO: 236378 - DNA, 13 bp, Artificial Sequence
  Oligonucleotide for detection of SNP TSC0057701
rtcccaactattt

SEQ ID NO: 236379 - DNA, 13 bp, Artificial Sequence
  Oligonucleotide for detection of SNP TSC0057707
ttatttataaaga

SEQ ID NO: 236380 - DNA, 13 bp, Artificial Sequence
  Oligonucleotide for detection of SNP TSC0057707
tctttataaataa

SEQ ID NO: 236381 - DNA, 13 bp, Artificial Sequence
  Oligonucleotide for detection of SNP TSC0057707
ttatttgtaaaga

SEQ ID NO: 236382 - DNA, 13 bp, Artificial Sequence
  Oligonucleotide for detection of SNP TSC0057707
tctttacaaataa

SEQ ID NO: 236383 - DNA, 13 bp, Artificial Sequence
  Oligonucleotide for detection of SNP TSC0057707
ttattcgtaaaga

SEQ ID NO: 236384 - DNA, 13 bp, Artificial Sequence
  Oligonucleotide for detection of SNP TSC0057707
tctttacgaataa

SEQ ID NO: 236385 - DNA, 13 bp, Artificial Sequence
  Oligonucleotide for detection of SNP TSC0057707
tttttgtgaatag

SEQ ID NO: 236386 - DNA, 13 bp, Artificial Sequence
  Oligonucleotide for detection of SNP TSC0057707
ctattcacaaaaa

SEQ ID NO: 236387 - DNA, 13 bp, Artificial Sequence
  Oligonucleotide for detection of SNP TSC0057707
tttttgcgaatag

SEQ ID NO: 236388 - DNA, 13 bp, Artificial Sequence
  Oligonucleotide for detection of SNP TSC0057707
ctattcgcaaaaa

SEQ ID NO: 236389 - DNA, 13 bp, Artificial Sequence
  Oligonucleotide for detection of SNP TSC0057708
gtatatatgggta

SEQ ID NO: 236390 - DNA, 13 bp, Artificial Sequence
  Oligonucleotide for detection of SNP TSC0057708
tacccatatatac

SEQ ID NO: 236391 - DNA, 13 bp, Artificial Sequence
  Oligonucleotide for detection of SNP TSC0057708
gtatatgtgggta

SEQ ID NO: 236392 - DNA, 13 bp, Artificial Sequence
  Oligonucleotide for detection of SNP TSC0057708
tacccacatatac

SEQ ID NO: 236393 - DNA, 13 bp, Artificial Sequence
  Oligonucleotide for detection of SNP TSC0057708
gtatacgtgggta

SEQ ID NO: 236394 - DNA, 13 bp, Artificial Sequence
  Oligonucleotide for detection of SNP TSC0057708
tacccacgtatac

SEQ ID NO: 236395 - DNA, 13 bp, Artificial Sequence
  Oligonucleotide for detection of SNP TSC0057708
tgtttatgtgtgy

SEQ ID NO: 236396 - DNA, 13 bp, Artificial Sequence
  Oligonucleotide for detection of SNP TSC0057708
rcacacataaaca

SEQ ID NO: 236397 - DNA, 13 bp, Artificial Sequence
  Oligonucleotide for detection of SNP TSC0057708
tgtttacgtgtgy

SEQ ID NO: 236398 - DNA, 13 bp, Artificial Sequence
  Oligonucleotide for detection of SNP TSC0057708
rcacacgtaaaca

SEQ ID NO: 236399 - DNA, 13 bp, Artificial Sequence
  Oligonucleotide for detection of SNP TSC0005336
tatggatgttata

SEQ ID NO: 236400 - DNA, 13 bp, Artificial Sequence
  Oligonucleotide for detection of SNP TSC0005336
tataacatccata

SEQ ID NO: 236401 - DNA, 13 bp, Artificial Sequence
  Oligonucleotide for detection of SNP TSC0005336
tatggacgttata

SEQ ID NO: 236402 - DNA, 13 bp, Artificial Sequence
  Oligonucleotide for detection of SNP TSC0005336
tataacgtccata

SEQ ID NO: 236403 - DNA, 13 bp, Artificial Sequence
  Oligonucleotide for detection of SNP TSC0005336
tatggtgtttatg

SEQ ID NO: 236404 - DNA, 13 bp, Artificial Sequence
  Oligonucleotide for detection of SNP TSC0005336
cataaacaccata

SEQ ID NO: 236405 - DNA, 13 bp, Artificial Sequence
  Oligonucleotide for detection of SNP TSC0005336
tatggtatttatg

SEQ ID NO: 236406 - DNA, 13 bp, Artificial Sequence
  Oligonucleotide for detection of SNP TSC0005336
cataaataccata

SEQ ID NO: 236407 - DNA, 13 bp, Artificial Sequence
  Oligonucleotide for detection of SNP TSC0005336
tatggcgtttatg

SEQ ID NO: 236408 - DNA, 13 bp, Artificial Sequence
  Oligonucleotide for detection of SNP TSC0005336
cataaacgccata

SEQ ID NO: 236409 - DNA, 13 bp, Artificial Sequence
  Oligonucleotide for detection of SNP TSC0057710
agtatagagtttt

SEQ ID NO: 236410 - DNA, 13 bp, Artificial Sequence
  Oligonucleotide for detection of SNP TSC0057710
aaaactctatact

SEQ ID NO: 236411 - DNA, 13 bp, Artificial Sequence
  Oligonucleotide for detection of SNP TSC0057710
agtataaagtttt

SEQ ID NO: 236412 - DNA, 13 bp, Artificial Sequence
  Oligonucleotide for detection of SNP TSC0057710
aaaactttatact

SEQ ID NO: 236413 - DNA, 13 bp, Artificial Sequence
  Oligonucleotide for detection of SNP TSC0057711
gttaagaagtatt

SEQ ID NO: 236414 - DNA, 13 bp, Artificial Sequence
  Oligonucleotide for detection of SNP TSC0057711
aatacttcttaac

SEQ ID NO: 236415 - DNA, 13 bp, Artificial Sequence
  Oligonucleotide for detection of SNP TSC0057711
gttaagtagtatt

SEQ ID NO: 236416 - DNA, 13 bp, Artificial Sequence
  Oligonucleotide for detection of SNP TSC0057711
aatactacttaac

SEQ ID NO: 236417 - DNA, 13 bp, Artificial Sequence
  Oligonucleotide for detection of SNP TSC0057711
aatgttttttaay

SEQ ID NO: 236418 - DNA, 13 bp, Artificial Sequence
  Oligonucleotide for detection of SNP TSC0057711
rttaaaaaacatt

SEQ ID NO: 236419 - DNA, 13 bp, Artificial Sequence
  Oligonucleotide for detection of SNP TSC0057711
aatgttatttaay

SEQ ID NO: 236420 - DNA, 13 bp, Artificial Sequence
  Oligonucleotide for detection of SNP TSC0057711
rttaaataacatt

SEQ ID NO: 236421 - DNA, 13 bp, Artificial Sequence
  Oligonucleotide for detection of SNP TSC0057712
ttggtggggtttt

SEQ ID NO: 236422 - DNA, 13 bp, Artificial Sequence
  Oligonucleotide for detection of SNP TSC0057712
aaaaccccaccaa

SEQ ID NO: 236423 - DNA, 13 bp, Artificial Sequence
  Oligonucleotide for detection of SNP TSC0057712
tcggtggggtttt

SEQ ID NO: 236424 - DNA, 13 bp, Artificial Sequence
  Oligonucleotide for detection of SNP TSC0057712
aaaaccccaccga

SEQ ID NO: 236425 - DNA, 13 bp, Artificial Sequence
  Oligonucleotide for detection of SNP TSC0057714
gagtatagtttta

SEQ ID NO: 236426 - DNA, 13 bp, Artificial Sequence
  Oligonucleotide for detection of SNP TSC0057714
taaaactatactc

SEQ ID NO: 236427 - DNA, 13 bp, Artificial Sequence
  Oligonucleotide for detection of SNP TSC0057714
gagtatggtttta

SEQ ID NO: 236428 - DNA, 13 bp, Artificial Sequence
  Oligonucleotide for detection of SNP TSC0057714
taaaaccatactc

SEQ ID NO: 236429 - DNA, 13 bp, Artificial Sequence
  Oligonucleotide for detection of SNP TSC0057714
gagtacggtttta

SEQ ID NO: 236430 - DNA, 13 bp, Artificial Sequence
  Oligonucleotide for detection of SNP TSC0057714
taaaaccgtactc

SEQ ID NO: 236431 - DNA, 13 bp, Artificial Sequence
  Oligonucleotide for detection of SNP TSC0057714
tagggttgtgtty

SEQ ID NO: 236432 - DNA, 13 bp, Artificial Sequence
  Oligonucleotide for detection of SNP TSC0057714
raacacaacccta

SEQ ID NO: 236433 - DNA, 13 bp, Artificial Sequence
  Oligonucleotide for detection of SNP TSC0057714
tagggtcgtgtty

SEQ ID NO: 236434 - DNA, 13 bp, Artificial Sequence
  Oligonucleotide for detection of SNP TSC0057714
raacacgacccta

SEQ ID NO: 236435 - DNA, 13 bp, Artificial Sequence
  Oligonucleotide for detection of SNP TSC0057715
taatggatattgg

SEQ ID NO: 236436 - DNA, 13 bp, Artificial Sequence
  Oligonucleotide for detection of SNP TSC0057715
ccaatatccatta

SEQ ID NO: 236437 - DNA, 13 bp, Artificial Sequence
  Oligonucleotide for detection of SNP TSC0057715
taatgggtattgg

SEQ ID NO: 236438 - DNA, 13 bp, Artificial Sequence
  Oligonucleotide for detection of SNP TSC0057715
ccaatacccatta

SEQ ID NO: 236439 - DNA, 13 bp, Artificial Sequence
  Oligonucleotide for detection of SNP TSC0057717
ggtaaatgagtaa

SEQ ID NO: 236440 - DNA, 13 bp, Artificial Sequence
  Oligonucleotide for detection of SNP TSC0057717
ttactcatttacc

SEQ ID NO: 236441 - DNA, 13 bp, Artificial Sequence
  Oligonucleotide for detection of SNP TSC0057717
ggtaaaggagtaa

SEQ ID NO: 236442 - DNA, 13 bp, Artificial Sequence
  Oligonucleotide for detection of SNP TSC0057717
ttactcctttacc

SEQ ID NO: 236443 - DNA, 13 bp, Artificial Sequence
  Oligonucleotide for detection of SNP TSC0057718
ttgtaattttttg

SEQ ID NO: 236444 - DNA, 13 bp, Artificial Sequence
  Oligonucleotide for detection of SNP TSC0057718
caaaaaattacaa

SEQ ID NO: 236445 - DNA, 13 bp, Artificial Sequence
  Oligonucleotide for detection of SNP TSC0057718
ttgtaagtttttg

SEQ ID NO: 236446 - DNA, 13 bp, Artificial Sequence
  Oligonucleotide for detection of SNP TSC0057718
caaaaacttacaa

SEQ ID NO: 236447 - DNA, 13 bp, Artificial Sequence
  Oligonucleotide for detection of SNP TSC0057718
ttgtaatttttcg

SEQ ID NO: 236448 - DNA, 13 bp, Artificial Sequence
  Oligonucleotide for detection of SNP TSC0057718
cgaaaaattacaa

SEQ ID NO: 236449 - DNA, 13 bp, Artificial Sequence
  Oligonucleotide for detection of SNP TSC0057718
ttgtaagttttcg

SEQ ID NO: 236450 - DNA, 13 bp, Artificial Sequence
  Oligonucleotide for detection of SNP TSC0057718
cgaaaacttacaa

SEQ ID NO: 236451 - DNA, 13 bp, Artificial Sequence
  Oligonucleotide for detection of SNP TSC0057718
cggaaggttgtaa

SEQ ID NO: 236452 - DNA, 13 bp, Artificial Sequence
  Oligonucleotide for detection of SNP TSC0057718
ttacaaccttccg

SEQ ID NO: 236453 - DNA, 13 bp, Artificial Sequence
  Oligonucleotide for detection of SNP TSC0057718
cggaagtttgtaa

SEQ ID NO: 236454 - DNA, 13 bp, Artificial Sequence
  Oligonucleotide for detection of SNP TSC0057718
ttacaaacttccg

SEQ ID NO: 236455 - DNA, 13 bp, Artificial Sequence
  Oligonucleotide for detection of SNP TSC0057719
ttttttataggag

SEQ ID NO: 236456 - DNA, 13 bp, Artificial Sequence
  Oligonucleotide for detection of SNP TSC0057719
ctcctataaaaaa

SEQ ID NO: 236457 - DNA, 13 bp, Artificial Sequence
  Oligonucleotide for detection of SNP TSC0057719
ttttttgtaggag

SEQ ID NO: 236458 - DNA, 13 bp, Artificial Sequence
  Oligonucleotide for detection of SNP TSC0057719
ctcctacaaaaaa

SEQ ID NO: 236459 - DNA, 13 bp, Artificial Sequence
  Oligonucleotide for detection of SNP TSC0057719
tttttcgtaggag

SEQ ID NO: 236460 - DNA, 13 bp, Artificial Sequence
  Oligonucleotide for detection of SNP TSC0057719
ctcctacgaaaaa

SEQ ID NO: 236461 - DNA, 13 bp, Artificial Sequence
  Oligonucleotide for detection of SNP TSC0057719
tttttgtggaagg

SEQ ID NO: 236462 - DNA, 13 bp, Artificial Sequence
  Oligonucleotide for detection of SNP TSC0057719
ccttccacaaaaa

SEQ ID NO: 236463 - DNA, 13 bp, Artificial Sequence
  Oligonucleotide for detection of SNP TSC0057719
tttttgcggaagg

SEQ ID NO: 236464 - DNA, 13 bp, Artificial Sequence
  Oligonucleotide for detection of SNP TSC0057719
ccttccgcaaaaa

SEQ ID NO: 236465 - DNA, 13 bp, Artificial Sequence
  Oligonucleotide for detection of SNP TSC0006534
ttattttaagtty

SEQ ID NO: 236466 - DNA, 13 bp, Artificial Sequence
  Oligonucleotide for detection of SNP TSC0006534
raacttaaaataa

SEQ ID NO: 236467 - DNA, 13 bp, Artificial Sequence
  Oligonucleotide for detection of SNP TSC0006534
gggtttggaatag

SEQ ID NO: 236468 - DNA, 13 bp, Artificial Sequence
  Oligonucleotide for detection of SNP TSC0006534
ctattccaaaccc

SEQ ID NO: 236469 - DNA, 13 bp, Artificial Sequence
  Oligonucleotide for detection of SNP TSC0006534
gggttttgaatag

SEQ ID NO: 236470 - DNA, 13 bp, Artificial Sequence
  Oligonucleotide for detection of SNP TSC0006534
ctattcaaaaccc

SEQ ID NO: 236471 - DNA, 13 bp, Artificial Sequence
  Oligonucleotide for detection of SNP TSC0006534
gggtttcgaatag

SEQ ID NO: 236472 - DNA, 13 bp, Artificial Sequence
  Oligonucleotide for detection of SNP TSC0006534
ctattcgaaaccc

SEQ ID NO: 236473 - DNA, 13 bp, Artificial Sequence
  Oligonucleotide for detection of SNP TSC0057722
ttattaatgtaat

SEQ ID NO: 236474 - DNA, 13 bp, Artificial Sequence
  Oligonucleotide for detection of SNP TSC0057722
attacattaataa

SEQ ID NO: 236475 - DNA, 13 bp, Artificial Sequence
  Oligonucleotide for detection of SNP TSC0057722
ttattagtgtaat

SEQ ID NO: 236476 - DNA, 13 bp, Artificial Sequence
  Oligonucleotide for detection of SNP TSC0057722
attacactaataa

SEQ ID NO: 236477 - DNA, 13 bp, Artificial Sequence
  Oligonucleotide for detection of SNP TSC0057723
agaggtagggtgy

SEQ ID NO: 236478 - DNA, 13 bp, Artificial Sequence
  Oligonucleotide for detection of SNP TSC0057723
rcaccctacctct

SEQ ID NO: 236479 - DNA, 13 bp, Artificial Sequence
  Oligonucleotide for detection of SNP TSC0057723
gtattttgttttt

SEQ ID NO: 236480 - DNA, 13 bp, Artificial Sequence
  Oligonucleotide for detection of SNP TSC0057723
aaaaacaaaatac

SEQ ID NO: 236481 - DNA, 13 bp, Artificial Sequence
  Oligonucleotide for detection of SNP TSC0057725
aatattgtaaaag

SEQ ID NO: 236482 - DNA, 13 bp, Artificial Sequence
  Oligonucleotide for detection of SNP TSC0057725
cttttacaatatt

SEQ ID NO: 236483 - DNA, 13 bp, Artificial Sequence
  Oligonucleotide for detection of SNP TSC0057725
aatattataaaag

SEQ ID NO: 236484 - DNA, 13 bp, Artificial Sequence
  Oligonucleotide for detection of SNP TSC0057725
cttttataatatt

SEQ ID NO: 236485 - DNA, 13 bp, Artificial Sequence
  Oligonucleotide for detection of SNP TSC0057726
ttttaagtgaggy

SEQ ID NO: 236486 - DNA, 13 bp, Artificial Sequence
  Oligonucleotide for detection of SNP TSC0057726
rcctcacttaaaa

SEQ ID NO: 236487 - DNA, 13 bp, Artificial Sequence
  Oligonucleotide for detection of SNP TSC0057726
ttttaaatgaggy

SEQ ID NO: 236488 - DNA, 13 bp, Artificial Sequence
  Oligonucleotide for detection of SNP TSC0057726
rcctcatttaaaa

SEQ ID NO: 236489 - DNA, 13 bp, Artificial Sequence
  Oligonucleotide for detection of SNP TSC0057728
ttttaaatggaaa

SEQ ID NO: 236490 - DNA, 13 bp, Artificial Sequence
  Oligonucleotide for detection of SNP TSC0057728
tttccatttaaaa

SEQ ID NO: 236491 - DNA, 13 bp, Artificial Sequence
  Oligonucleotide for detection of SNP TSC0057729
tttattgatgtty

SEQ ID NO: 236492 - DNA, 13 bp, Artificial Sequence
  Oligonucleotide for detection of SNP TSC0057729
raacatcaataaa

SEQ ID NO: 236493 - DNA, 13 bp, Artificial Sequence
  Oligonucleotide for detection of SNP TSC0057729
tttattaatgtty

SEQ ID NO: 236494 - DNA, 13 bp, Artificial Sequence
  Oligonucleotide for detection of SNP TSC0057729
raacattaataaa

SEQ ID NO: 236495 - DNA, 13 bp, Artificial Sequence
  Oligonucleotide for detection of SNP TSC0057733
tttatatggggtt

SEQ ID NO: 236496 - DNA, 13 bp, Artificial Sequence
  Oligonucleotide for detection of SNP TSC0057733
aaccccatataaa

SEQ ID NO: 236497 - DNA, 13 bp, Artificial Sequence
  Oligonucleotide for detection of SNP TSC0057733
tttatacggggtt

SEQ ID NO: 236498 - DNA, 13 bp, Artificial Sequence
  Oligonucleotide for detection of SNP TSC0057733
aaccccgtataaa

SEQ ID NO: 236499 - DNA, 13 bp, Artificial Sequence
  Oligonucleotide for detection of SNP TSC0057733
aattttgtgtgag

SEQ ID NO: 236500 - DNA, 13 bp, Artificial Sequence
  Oligonucleotide for detection of SNP TSC0057733
ctcacacaaaatt

SEQ ID NO: 236501 - DNA, 13 bp, Artificial Sequence
  Oligonucleotide for detection of SNP TSC0057733
aattttatgtgag

SEQ ID NO: 236502 - DNA, 13 bp, Artificial Sequence
  Oligonucleotide for detection of SNP TSC0057733
ctcacataaaatt

SEQ ID NO: 236503 - DNA, 13 bp, Artificial Sequence
  Oligonucleotide for detection of SNP TSC0057733
aatttcgtgtgag

SEQ ID NO: 236504 - DNA, 13 bp, Artificial Sequence
  Oligonucleotide for detection of SNP TSC0057733
ctcacacgaaatt

SEQ ID NO: 236505 - DNA, 13 bp, Artificial Sequence
  Oligonucleotide for detection of SNP TSC0057734
tttaaaggattag

SEQ ID NO: 236506 - DNA, 13 bp, Artificial Sequence
  Oligonucleotide for detection of SNP TSC0057734
ctaatcctttaaa

SEQ ID NO: 236507 - DNA, 13 bp, Artificial Sequence
  Oligonucleotide for detection of SNP TSC0057735
atgtatatgatat

SEQ ID NO: 236508 - DNA, 13 bp, Artificial Sequence
  Oligonucleotide for detection of SNP TSC0057735
atatcatatacat

SEQ ID NO: 236509 - DNA, 13 bp, Artificial Sequence
  Oligonucleotide for detection of SNP TSC0057735
atgtatgtgatat

SEQ ID NO: 236510 - DNA, 13 bp, Artificial Sequence
  Oligonucleotide for detection of SNP TSC0057735
atatcacatacat

SEQ ID NO: 236511 - DNA, 13 bp, Artificial Sequence
  Oligonucleotide for detection of SNP TSC0057736
attttaggattag

SEQ ID NO: 236512 - DNA, 13 bp, Artificial Sequence
  Oligonucleotide for detection of SNP TSC0057736
ctaatcctaaaat

SEQ ID NO: 236513 - DNA, 13 bp, Artificial Sequence
  Oligonucleotide for detection of SNP TSC0057736
attttaagattag

SEQ ID NO: 236514 - DNA, 13 bp, Artificial Sequence
  Oligonucleotide for detection of SNP TSC0057736
ctaatcttaaaat

SEQ ID NO: 236515 - DNA, 13 bp, Artificial Sequence
  Oligonucleotide for detection of SNP TSC0057737
tgaaattgagaaa

SEQ ID NO: 236516 - DNA, 13 bp, Artificial Sequence
  Oligonucleotide for detection of SNP TSC0057737
tttctcaatttca

SEQ ID NO: 236517 - DNA, 13 bp, Artificial Sequence
  Oligonucleotide for detection of SNP TSC0057737
tgaaatagagaaa

SEQ ID NO: 236518 - DNA, 13 bp, Artificial Sequence
  Oligonucleotide for detection of SNP TSC0057737
tttctctatttca

SEQ ID NO: 236519 - DNA, 13 bp, Artificial Sequence
  Oligonucleotide for detection of SNP TSC0057739
taattattatagt

SEQ ID NO: 236520 - DNA, 13 bp, Artificial Sequence
  Oligonucleotide for detection of SNP TSC0057739
actataataatta

SEQ ID NO: 236521 - DNA, 13 bp, Artificial Sequence
  Oligonucleotide for detection of SNP TSC0057739
taattagtatagt

SEQ ID NO: 236522 - DNA, 13 bp, Artificial Sequence
  Oligonucleotide for detection of SNP TSC0057739
actatactaatta

SEQ ID NO: 236523 - DNA, 13 bp, Artificial Sequence
  Oligonucleotide for detection of SNP TSC0057739
attatattaatta

SEQ ID NO: 236524 - DNA, 13 bp, Artificial Sequence
  Oligonucleotide for detection of SNP TSC0057739
taattaatataat

SEQ ID NO: 236525 - DNA, 13 bp, Artificial Sequence
  Oligonucleotide for detection of SNP TSC0057740
ggaaaatgtaatt

SEQ ID NO: 236526 - DNA, 13 bp, Artificial Sequence
  Oligonucleotide for detection of SNP TSC0057740
aattacattttcc

SEQ ID NO: 236527 - DNA, 13 bp, Artificial Sequence
  Oligonucleotide for detection of SNP TSC0057740
ggaaaacgtaatt

SEQ ID NO: 236528 - DNA, 13 bp, Artificial Sequence
  Oligonucleotide for detection of SNP TSC0057740
aattacgttttcc

SEQ ID NO: 236529 - DNA, 13 bp, Artificial Sequence
  Oligonucleotide for detection of SNP TSC0057740
aattgcgttttty

SEQ ID NO: 236530 - DNA, 13 bp, Artificial Sequence
  Oligonucleotide for detection of SNP TSC0057740
raaaaacgcaatt

SEQ ID NO: 236531 - DNA, 13 bp, Artificial Sequence
  Oligonucleotide for detection of SNP TSC0057741
tagtgtgttattt

SEQ ID NO: 236532 - DNA, 13 bp, Artificial Sequence
  Oligonucleotide for detection of SNP TSC0057741
aaataacacacta

SEQ ID NO: 236533 - DNA, 13 bp, Artificial Sequence
  Oligonucleotide for detection of SNP TSC0057741
tagtgcgttattt

SEQ ID NO: 236534 - DNA, 13 bp, Artificial Sequence
  Oligonucleotide for detection of SNP TSC0057741
aaataacgcacta

SEQ ID NO: 236535 - DNA, 13 bp, Artificial Sequence
  Oligonucleotide for detection of SNP TSC0057741
aaatggtgtattg

SEQ ID NO: 236536 - DNA, 13 bp, Artificial Sequence
  Oligonucleotide for detection of SNP TSC0057741
caatacaccattt

SEQ ID NO: 236537 - DNA, 13 bp, Artificial Sequence
  Oligonucleotide for detection of SNP TSC0057741
aaatggcgtattg

SEQ ID NO: 236538 - DNA, 13 bp, Artificial Sequence
  Oligonucleotide for detection of SNP TSC0057741
caatacgccattt

SEQ ID NO: 236539 - DNA, 13 bp, Artificial Sequence
  Oligonucleotide for detection of SNP TSC0057743
gggtaaatgtaaa

SEQ ID NO: 236540 - DNA, 13 bp, Artificial Sequence
  Oligonucleotide for detection of SNP TSC0057743
tttacatttaccc

SEQ ID NO: 236541 - DNA, 13 bp, Artificial Sequence
  Oligonucleotide for detection of SNP TSC0057743
gggtaattgtaaa

SEQ ID NO: 236542 - DNA, 13 bp, Artificial Sequence
  Oligonucleotide for detection of SNP TSC0057743
tttacaattaccc

SEQ ID NO: 236543 - DNA, 13 bp, Artificial Sequence
  Oligonucleotide for detection of SNP TSC0057743
tttatatttatty

SEQ ID NO: 236544 - DNA, 13 bp, Artificial Sequence
  Oligonucleotide for detection of SNP TSC0057743
raataaatataaa

SEQ ID NO: 236545 - DNA, 13 bp, Artificial Sequence
  Oligonucleotide for detection of SNP TSC0057743
tttataattatty

SEQ ID NO: 236546 - DNA, 13 bp, Artificial Sequence
  Oligonucleotide for detection of SNP TSC0057743
raataattataaa

SEQ ID NO: 236547 - DNA, 13 bp, Artificial Sequence
  Oligonucleotide for detection of SNP TSC0057745
tatgtttgtaatt

SEQ ID NO: 236548 - DNA, 13 bp, Artificial Sequence
  Oligonucleotide for detection of SNP TSC0057745
aattacaaacata

SEQ ID NO: 236549 - DNA, 13 bp, Artificial Sequence
  Oligonucleotide for detection of SNP TSC0057745
tatgttcgtaatt

SEQ ID NO: 236550 - DNA, 13 bp, Artificial Sequence
  Oligonucleotide for detection of SNP TSC0057745
aattacgaacata

SEQ ID NO: 236551 - DNA, 13 bp, Artificial Sequence
  Oligonucleotide for detection of SNP TSC0057745
aattatgggtatg

SEQ ID NO: 236552 - DNA, 13 bp, Artificial Sequence
  Oligonucleotide for detection of SNP TSC0057745
catacccataatt

SEQ ID NO: 236553 - DNA, 13 bp, Artificial Sequence
  Oligonucleotide for detection of SNP TSC0057745
aattataggtatg

SEQ ID NO: 236554 - DNA, 13 bp, Artificial Sequence
  Oligonucleotide for detection of SNP TSC0057745
catacctataatt

SEQ ID NO: 236555 - DNA, 13 bp, Artificial Sequence
  Oligonucleotide for detection of SNP TSC0057745
aattacgggtatg

SEQ ID NO: 236556 - DNA, 13 bp, Artificial Sequence
  Oligonucleotide for detection of SNP TSC0057745
catacccgtaatt

SEQ ID NO: 236557 - DNA, 13 bp, Artificial Sequence
  Oligonucleotide for detection of SNP TSC0006515
aattatatttagt

SEQ ID NO: 236558 - DNA, 13 bp, Artificial Sequence
  Oligonucleotide for detection of SNP TSC0006515
actaaatataatt

SEQ ID NO: 236559 - DNA, 13 bp, Artificial Sequence
  Oligonucleotide for detection of SNP TSC0006515
aattatgtttagt

SEQ ID NO: 236560 - DNA, 13 bp, Artificial Sequence
  Oligonucleotide for detection of SNP TSC0006515
actaaacataatt

SEQ ID NO: 236561 - DNA, 13 bp, Artificial Sequence
  Oligonucleotide for detection of SNP TSC0006515
aattacgtttagt

SEQ ID NO: 236562 - DNA, 13 bp, Artificial Sequence
  Oligonucleotide for detection of SNP TSC0006515
actaaacgtaatt

SEQ ID NO: 236563 - DNA, 13 bp, Artificial Sequence
  Oligonucleotide for detection of SNP TSC0006515
attaaatgtgatt

SEQ ID NO: 236564 - DNA, 13 bp, Artificial Sequence
  Oligonucleotide for detection of SNP TSC0006515
aatcacatttaat

SEQ ID NO: 236565 - DNA, 13 bp, Artificial Sequence
  Oligonucleotide for detection of SNP TSC0006515
attaaacgtgatt

SEQ ID NO: 236566 - DNA, 13 bp, Artificial Sequence
  Oligonucleotide for detection of SNP TSC0006515
aatcacgtttaat

SEQ ID NO: 236567 - DNA, 13 bp, Artificial Sequence
  Oligonucleotide for detection of SNP TSC0057746
tatgtttgttagy

SEQ ID NO: 236568 - DNA, 13 bp, Artificial Sequence
  Oligonucleotide for detection of SNP TSC0057746
rctaacaaacata

SEQ ID NO: 236569 - DNA, 13 bp, Artificial Sequence
  Oligonucleotide for detection of SNP TSC0057746
tatgttggttagy

SEQ ID NO: 236570 - DNA, 13 bp, Artificial Sequence
  Oligonucleotide for detection of SNP TSC0057746
rctaaccaacata

SEQ ID NO: 236571 - DNA, 13 bp, Artificial Sequence
  Oligonucleotide for detection of SNP TSC0057746
tatgttcgttagy

SEQ ID NO: 236572 - DNA, 13 bp, Artificial Sequence
  Oligonucleotide for detection of SNP TSC0057746
rctaacgaacata

SEQ ID NO: 236573 - DNA, 13 bp, Artificial Sequence
  Oligonucleotide for detection of SNP TSC0057746
gttggtgaatatg

SEQ ID NO: 236574 - DNA, 13 bp, Artificial Sequence
  Oligonucleotide for detection of SNP TSC0057746
catattcaccaac

SEQ ID NO: 236575 - DNA, 13 bp, Artificial Sequence
  Oligonucleotide for detection of SNP TSC0057746
gttggttaatatg

SEQ ID NO: 236576 - DNA, 13 bp, Artificial Sequence
  Oligonucleotide for detection of SNP TSC0057746
catattaaccaac

SEQ ID NO: 236577 - DNA, 13 bp, Artificial Sequence
  Oligonucleotide for detection of SNP TSC0057746
gttggcgaatatg

SEQ ID NO: 236578 - DNA, 13 bp, Artificial Sequence
  Oligonucleotide for detection of SNP TSC0057746
catattcgccaac

SEQ ID NO: 236579 - DNA, 13 bp, Artificial Sequence
  Oligonucleotide for detection of SNP TSC0057747
gaggggagtagat

SEQ ID NO: 236580 - DNA, 13 bp, Artificial Sequence
  Oligonucleotide for detection of SNP TSC0057747
atctactcccctc

SEQ ID NO: 236581 - DNA, 13 bp, Artificial Sequence
  Oligonucleotide for detection of SNP TSC0057747
gaggggggtagat

SEQ ID NO: 236582 - DNA, 13 bp, Artificial Sequence
  Oligonucleotide for detection of SNP TSC0057747
atctacccccctc

SEQ ID NO: 236583 - DNA, 13 bp, Artificial Sequence
  Oligonucleotide for detection of SNP TSC0057748
gtgagtaagtaay

SEQ ID NO: 236584 - DNA, 13 bp, Artificial Sequence
  Oligonucleotide for detection of SNP TSC0057748
rttacttactcac

SEQ ID NO: 236585 - DNA, 13 bp, Artificial Sequence
  Oligonucleotide for detection of SNP TSC0057748
gtgagtgagtaay

SEQ ID NO: 236586 - DNA, 13 bp, Artificial Sequence
  Oligonucleotide for detection of SNP TSC0057748
rttactcactcac

SEQ ID NO: 236587 - DNA, 13 bp, Artificial Sequence
  Oligonucleotide for detection of SNP TSC0057748
gtgagcgagtaay

SEQ ID NO: 236588 - DNA, 13 bp, Artificial Sequence
  Oligonucleotide for detection of SNP TSC0057748
rttactcgctcac

SEQ ID NO: 236589 - DNA, 13 bp, Artificial Sequence
  Oligonucleotide for detection of SNP TSC0057748
gttatttgtttay

SEQ ID NO: 236590 - DNA, 13 bp, Artificial Sequence
  Oligonucleotide for detection of SNP TSC0057748
rtaaacaaataac

SEQ ID NO: 236591 - DNA, 13 bp, Artificial Sequence
  Oligonucleotide for detection of SNP TSC0057748
gttattcgtttay

SEQ ID NO: 236592 - DNA, 13 bp, Artificial Sequence
  Oligonucleotide for detection of SNP TSC0057748
rtaaacgaataac

SEQ ID NO: 236593 - DNA, 13 bp, Artificial Sequence
  Oligonucleotide for detection of SNP TSC0057749
ttgtatattgggt

SEQ ID NO: 236594 - DNA, 13 bp, Artificial Sequence
  Oligonucleotide for detection of SNP TSC0057749
acccaatatacaa

SEQ ID NO: 236595 - DNA, 13 bp, Artificial Sequence
  Oligonucleotide for detection of SNP TSC0057749
ttgtatgttgggt

SEQ ID NO: 236596 - DNA, 13 bp, Artificial Sequence
  Oligonucleotide for detection of SNP TSC0057749
acccaacatacaa

SEQ ID NO: 236597 - DNA, 13 bp, Artificial Sequence
  Oligonucleotide for detection of SNP TSC0057749
ttgtacgttgggt

SEQ ID NO: 236598 - DNA, 13 bp, Artificial Sequence
  Oligonucleotide for detection of SNP TSC0057749
acccaacgtacaa

SEQ ID NO: 236599 - DNA, 13 bp, Artificial Sequence
  Oligonucleotide for detection of SNP TSC0057749
atttaatgtgtag

SEQ ID NO: 236600 - DNA, 13 bp, Artificial Sequence
  Oligonucleotide for detection of SNP TSC0057749
ctacacattaaat

SEQ ID NO: 236601 - DNA, 13 bp, Artificial Sequence
  Oligonucleotide for detection of SNP TSC0057749
atttaacgtgtag

SEQ ID NO: 236602 - DNA, 13 bp, Artificial Sequence
  Oligonucleotide for detection of SNP TSC0057749
ctacacgttaaat

SEQ ID NO: 236603 - DNA, 13 bp, Artificial Sequence
  Oligonucleotide for detection of SNP TSC0057750
atagtatatttty

SEQ ID NO: 236604 - DNA, 13 bp, Artificial Sequence
  Oligonucleotide for detection of SNP TSC0057750
raaaatatactat

SEQ ID NO: 236605 - DNA, 13 bp, Artificial Sequence
  Oligonucleotide for detection of SNP TSC0057750
atagtagatttty

SEQ ID NO: 236606 - DNA, 13 bp, Artificial Sequence
  Oligonucleotide for detection of SNP TSC0057750
raaaatctactat

SEQ ID NO: 236607 - DNA, 13 bp, Artificial Sequence
  Oligonucleotide for detection of SNP TSC0057750
gagaatgtattgt

SEQ ID NO: 236608 - DNA, 13 bp, Artificial Sequence
  Oligonucleotide for detection of SNP TSC0057750
acaatacattctc

SEQ ID NO: 236609 - DNA, 13 bp, Artificial Sequence
  Oligonucleotide for detection of SNP TSC0057750
gagaatttattgt

SEQ ID NO: 236610 - DNA, 13 bp, Artificial Sequence
  Oligonucleotide for detection of SNP TSC0057750
acaataaattctc

SEQ ID NO: 236611 - DNA, 13 bp, Artificial Sequence
  Oligonucleotide for detection of SNP TSC0057752
tatttagagataa

SEQ ID NO: 236612 - DNA, 13 bp, Artificial Sequence
  Oligonucleotide for detection of SNP TSC0057752
ttatctctaaata

SEQ ID NO: 236613 - DNA, 13 bp, Artificial Sequence
  Oligonucleotide for detection of SNP TSC0057752
ttatttgtgaatg

SEQ ID NO: 236614 - DNA, 13 bp, Artificial Sequence
  Oligonucleotide for detection of SNP TSC0057752
cattcacaaataa

SEQ ID NO: 236615 - DNA, 13 bp, Artificial Sequence
  Oligonucleotide for detection of SNP TSC0057752
ttatttttgaatg

SEQ ID NO: 236616 - DNA, 13 bp, Artificial Sequence
  Oligonucleotide for detection of SNP TSC0057752
cattcaaaaataa

SEQ ID NO: 236617 - DNA, 13 bp, Artificial Sequence
  Oligonucleotide for detection of SNP TSC0057753
ttagttaatatay

SEQ ID NO: 236618 - DNA, 13 bp, Artificial Sequence
  Oligonucleotide for detection of SNP TSC0057753
rtatattaactaa

SEQ ID NO: 236619 - DNA, 13 bp, Artificial Sequence
  Oligonucleotide for detection of SNP TSC0057753
ttagttgatatay

SEQ ID NO: 236620 - DNA, 13 bp, Artificial Sequence
  Oligonucleotide for detection of SNP TSC0057753
rtatatcaactaa

SEQ ID NO: 236621 - DNA, 13 bp, Artificial Sequence
  Oligonucleotide for detection of SNP TSC0057753
ttagtcgatatay

SEQ ID NO: 236622 - DNA, 13 bp, Artificial Sequence
  Oligonucleotide for detection of SNP TSC0057753
rtatatcgactaa

SEQ ID NO: 236623 - DNA, 13 bp, Artificial Sequence
  Oligonucleotide for detection of SNP TSC0057753
gtatgttgattga

SEQ ID NO: 236624 - DNA, 13 bp, Artificial Sequence
  Oligonucleotide for detection of SNP TSC0057753
tcaatcaacatac

SEQ ID NO: 236625 - DNA, 13 bp, Artificial Sequence
  Oligonucleotide for detection of SNP TSC0057753
gtatgtcgattga

SEQ ID NO: 236626 - DNA, 13 bp, Artificial Sequence
  Oligonucleotide for detection of SNP TSC0057753
tcaatcgacatac

SEQ ID NO: 236627 - DNA, 13 bp, Artificial Sequence
  Oligonucleotide for detection of SNP TSC0057756
tatataaaaaatt

SEQ ID NO: 236628 - DNA, 13 bp, Artificial Sequence
  Oligonucleotide for detection of SNP TSC0057756
aattttttatata

SEQ ID NO: 236629 - DNA, 13 bp, Artificial Sequence
  Oligonucleotide for detection of SNP TSC0057756
tatatagaaaatt

SEQ ID NO: 236630 - DNA, 13 bp, Artificial Sequence
  Oligonucleotide for detection of SNP TSC0057756
aattttctatata

SEQ ID NO: 236631 - DNA, 13 bp, Artificial Sequence
  Oligonucleotide for detection of SNP TSC0057757
gaattgataattt

SEQ ID NO: 236632 - DNA, 13 bp, Artificial Sequence
  Oligonucleotide for detection of SNP TSC0057757
aaattatcaattc

SEQ ID NO: 236633 - DNA, 13 bp, Artificial Sequence
  Oligonucleotide for detection of SNP TSC0057757
gaattggtaattt

SEQ ID NO: 236634 - DNA, 13 bp, Artificial Sequence
  Oligonucleotide for detection of SNP TSC0057757
aaattaccaattc

SEQ ID NO: 236635 - DNA, 13 bp, Artificial Sequence
  Oligonucleotide for detection of SNP TSC0057760
tagggatgattta

SEQ ID NO: 236636 - DNA, 13 bp, Artificial Sequence
  Oligonucleotide for detection of SNP TSC0057760
taaatcatcccta

SEQ ID NO: 236637 - DNA, 13 bp, Artificial Sequence
  Oligonucleotide for detection of SNP TSC0057760
tagggaggattta

SEQ ID NO: 236638 - DNA, 13 bp, Artificial Sequence
  Oligonucleotide for detection of SNP TSC0057760
taaatcctcccta

SEQ ID NO: 236639 - DNA, 13 bp, Artificial Sequence
  Oligonucleotide for detection of SNP TSC0057760
tggattattttta

SEQ ID NO: 236640 - DNA, 13 bp, Artificial Sequence
  Oligonucleotide for detection of SNP TSC0057760
taaaaataatcca

SEQ ID NO: 236641 - DNA, 13 bp, Artificial Sequence
  Oligonucleotide for detection of SNP TSC0057760
tggatttttttta

SEQ ID NO: 236642 - DNA, 13 bp, Artificial Sequence
  Oligonucleotide for detection of SNP TSC0057760
taaaaaaaatcca

SEQ ID NO: 236643 - DNA, 13 bp, Artificial Sequence
  Oligonucleotide for detection of SNP TSC0057764
aagattggaagag

SEQ ID NO: 236644 - DNA, 13 bp, Artificial Sequence
  Oligonucleotide for detection of SNP TSC0057764
ctcttccaatctt

SEQ ID NO: 236645 - DNA, 13 bp, Artificial Sequence
  Oligonucleotide for detection of SNP TSC0057764
aagatttgaagag

SEQ ID NO: 236646 - DNA, 13 bp, Artificial Sequence
  Oligonucleotide for detection of SNP TSC0057764
ctcttcaaatctt

SEQ ID NO: 236647 - DNA, 13 bp, Artificial Sequence
  Oligonucleotide for detection of SNP TSC0057764
aagattcgaagag

SEQ ID NO: 236648 - DNA, 13 bp, Artificial Sequence
  Oligonucleotide for detection of SNP TSC0057764
ctcttcgaatctt

SEQ ID NO: 236649 - DNA, 13 bp, Artificial Sequence
  Oligonucleotide for detection of SNP TSC0005709
ttaaaatgaatgg

SEQ ID NO: 236650 - DNA, 13 bp, Artificial Sequence
  Oligonucleotide for detection of SNP TSC0005709
ccattcattttaa

SEQ ID NO: 236651 - DNA, 13 bp, Artificial Sequence
  Oligonucleotide for detection of SNP TSC0005709
ttaaaacgaatgg

SEQ ID NO: 236652 - DNA, 13 bp, Artificial Sequence
  Oligonucleotide for detection of SNP TSC0005709
ccattcgttttaa

SEQ ID NO: 236653 - DNA, 13 bp, Artificial Sequence
  Oligonucleotide for detection of SNP TSC0005710
tagtaaatttaga

SEQ ID NO: 236654 - DNA, 13 bp, Artificial Sequence
  Oligonucleotide for detection of SNP TSC0005710
tctaaatttacta

SEQ ID NO: 236655 - DNA, 13 bp, Artificial Sequence
  Oligonucleotide for detection of SNP TSC0005710
tagtaagtttaga

SEQ ID NO: 236656 - DNA, 13 bp, Artificial Sequence
  Oligonucleotide for detection of SNP TSC0005710
tctaaacttacta

SEQ ID NO: 236657 - DNA, 13 bp, Artificial Sequence
  Oligonucleotide for detection of SNP TSC0005711
attatcgtttttt

SEQ ID NO: 236658 - DNA, 13 bp, Artificial Sequence
  Oligonucleotide for detection of SNP TSC0005711
aaaaaacgataat

SEQ ID NO: 236659 - DNA, 13 bp, Artificial Sequence
  Oligonucleotide for detection of SNP TSC0005711
aaaaaaggatgat

SEQ ID NO: 236660 - DNA, 13 bp, Artificial Sequence
  Oligonucleotide for detection of SNP TSC0005711
atcatcctttttt

SEQ ID NO: 236661 - DNA, 13 bp, Artificial Sequence
  Oligonucleotide for detection of SNP TSC0005711
aaaaaatgatgat

SEQ ID NO: 236662 - DNA, 13 bp, Artificial Sequence
  Oligonucleotide for detection of SNP TSC0005711
atcatcatttttt

SEQ ID NO: 236663 - DNA, 13 bp, Artificial Sequence
  Oligonucleotide for detection of SNP TSC0005711
aaaaaacgatgat

SEQ ID NO: 236664 - DNA, 13 bp, Artificial Sequence
  Oligonucleotide for detection of SNP TSC0005711
atcatcgtttttt

SEQ ID NO: 236665 - DNA, 13 bp, Artificial Sequence
  Oligonucleotide for detection of SNP TSC0005712
attttaagtgtga

SEQ ID NO: 236666 - DNA, 13 bp, Artificial Sequence
  Oligonucleotide for detection of SNP TSC0005712
tcacacttaaaat

SEQ ID NO: 236667 - DNA, 13 bp, Artificial Sequence
  Oligonucleotide for detection of SNP TSC0005712
attttaggtgtga

SEQ ID NO: 236668 - DNA, 13 bp, Artificial Sequence
  Oligonucleotide for detection of SNP TSC0005712
tcacacctaaaat

SEQ ID NO: 236669 - DNA, 13 bp, Artificial Sequence
  Oligonucleotide for detection of SNP TSC0005713
ttgttaaagaaag

SEQ ID NO: 236670 - DNA, 13 bp, Artificial Sequence
  Oligonucleotide for detection of SNP TSC0005713
ctttctttaacaa

SEQ ID NO: 236671 - DNA, 13 bp, Artificial Sequence
  Oligonucleotide for detection of SNP TSC0005713
ttgttagagaaag

SEQ ID NO: 236672 - DNA, 13 bp, Artificial Sequence
  Oligonucleotide for detection of SNP TSC0005713
ctttctctaacaa

SEQ ID NO: 236673 - DNA, 13 bp, Artificial Sequence
  Oligonucleotide for detection of SNP TSC0057765
ttttttagtgaaa

SEQ ID NO: 236674 - DNA, 13 bp, Artificial Sequence
  Oligonucleotide for detection of SNP TSC0057765
tttcactaaaaaa

SEQ ID NO: 236675 - DNA, 13 bp, Artificial Sequence
  Oligonucleotide for detection of SNP TSC0057765
tttttttgtgaaa

SEQ ID NO: 236676 - DNA, 13 bp, Artificial Sequence
  Oligonucleotide for detection of SNP TSC0057765
tttcacaaaaaaa

SEQ ID NO: 236677 - DNA, 13 bp, Artificial Sequence
  Oligonucleotide for detection of SNP TSC0057765
ttttttcgtgaaa

SEQ ID NO: 236678 - DNA, 13 bp, Artificial Sequence
  Oligonucleotide for detection of SNP TSC0057765
tttcacgaaaaaa

SEQ ID NO: 236679 - DNA, 13 bp, Artificial Sequence
  Oligonucleotide for detection of SNP TSC0057765
ttttattgaaaga

SEQ ID NO: 236680 - DNA, 13 bp, Artificial Sequence
  Oligonucleotide for detection of SNP TSC0057765
tctttcaataaaa

SEQ ID NO: 236681 - DNA, 13 bp, Artificial Sequence
  Oligonucleotide for detection of SNP TSC0057765
ttttatggaaaga

SEQ ID NO: 236682 - DNA, 13 bp, Artificial Sequence
  Oligonucleotide for detection of SNP TSC0057765
tctttccataaaa

SEQ ID NO: 236683 - DNA, 13 bp, Artificial Sequence
  Oligonucleotide for detection of SNP TSC0057765
ttttacggaaaga

SEQ ID NO: 236684 - DNA, 13 bp, Artificial Sequence
  Oligonucleotide for detection of SNP TSC0057765
tctttccgtaaaa

SEQ ID NO: 236685 - DNA, 13 bp, Artificial Sequence
  Oligonucleotide for detection of SNP TSC0057766
ataattatatatt

SEQ ID NO: 236686 - DNA, 13 bp, Artificial Sequence
  Oligonucleotide for detection of SNP TSC0057766
aatatataattat

SEQ ID NO: 236687 - DNA, 13 bp, Artificial Sequence
  Oligonucleotide for detection of SNP TSC0057766
ataattttatatt

SEQ ID NO: 236688 - DNA, 13 bp, Artificial Sequence
  Oligonucleotide for detection of SNP TSC0057766
aatataaaattat

SEQ ID NO: 236689 - DNA, 13 bp, Artificial Sequence
  Oligonucleotide for detection of SNP TSC0057766
aatatatgattgt

SEQ ID NO: 236690 - DNA, 13 bp, Artificial Sequence
  Oligonucleotide for detection of SNP TSC0057766
acaatcatatatt

SEQ ID NO: 236691 - DNA, 13 bp, Artificial Sequence
  Oligonucleotide for detection of SNP TSC0057766
aatataagattgt

SEQ ID NO: 236692 - DNA, 13 bp, Artificial Sequence
  Oligonucleotide for detection of SNP TSC0057766
acaatcttatatt

SEQ ID NO: 236693 - DNA, 13 bp, Artificial Sequence
  Oligonucleotide for detection of SNP TSC0057767
gtttagaggatag

SEQ ID NO: 236694 - DNA, 13 bp, Artificial Sequence
  Oligonucleotide for detection of SNP TSC0057767
ctatcctctaaac

SEQ ID NO: 236695 - DNA, 13 bp, Artificial Sequence
  Oligonucleotide for detection of SNP TSC0057767
gtttaggggatag

SEQ ID NO: 236696 - DNA, 13 bp, Artificial Sequence
  Oligonucleotide for detection of SNP TSC0057767
ctatcccctaaac

SEQ ID NO: 236697 - DNA, 13 bp, Artificial Sequence
  Oligonucleotide for detection of SNP TSC0005385
ttatgtataagty

SEQ ID NO: 236698 - DNA, 13 bp, Artificial Sequence
  Oligonucleotide for detection of SNP TSC0005385
racttatacataa

SEQ ID NO: 236699 - DNA, 13 bp, Artificial Sequence
  Oligonucleotide for detection of SNP TSC0005385
ttatgtgtaagty

SEQ ID NO: 236700 - DNA, 13 bp, Artificial Sequence
  Oligonucleotide for detection of SNP TSC0005385
racttacacataa

SEQ ID NO: 236701 - DNA, 13 bp, Artificial Sequence
  Oligonucleotide for detection of SNP TSC0057768
attttagtggtgg

SEQ ID NO: 236702 - DNA, 13 bp, Artificial Sequence
  Oligonucleotide for detection of SNP TSC0057768
ccaccactaaaat

SEQ ID NO: 236703 - DNA, 13 bp, Artificial Sequence
  Oligonucleotide for detection of SNP TSC0057768
attttaatggtgg

SEQ ID NO: 236704 - DNA, 13 bp, Artificial Sequence
  Oligonucleotide for detection of SNP TSC0057768
ccaccattaaaat

SEQ ID NO: 236705 - DNA, 13 bp, Artificial Sequence
  Oligonucleotide for detection of SNP TSC0005241
ttgtgtatttgag

SEQ ID NO: 236706 - DNA, 13 bp, Artificial Sequence
  Oligonucleotide for detection of SNP TSC0005241
ctcaaatacacaa

SEQ ID NO: 236707 - DNA, 13 bp, Artificial Sequence
  Oligonucleotide for detection of SNP TSC0005241
ttgtgtgtttgag

SEQ ID NO: 236708 - DNA, 13 bp, Artificial Sequence
  Oligonucleotide for detection of SNP TSC0005241
ctcaaacacacaa

SEQ ID NO: 236709 - DNA, 13 bp, Artificial Sequence
  Oligonucleotide for detection of SNP TSC0005241
ttgtgcgtttgag

SEQ ID NO: 236710 - DNA, 13 bp, Artificial Sequence
  Oligonucleotide for detection of SNP TSC0005241
ctcaaacgcacaa

SEQ ID NO: 236711 - DNA, 13 bp, Artificial Sequence
  Oligonucleotide for detection of SNP TSC0005241
tttaaatgtatag

SEQ ID NO: 236712 - DNA, 13 bp, Artificial Sequence
  Oligonucleotide for detection of SNP TSC0005241
ctatacatttaaa

SEQ ID NO: 236713 - DNA, 13 bp, Artificial Sequence
  Oligonucleotide for detection of SNP TSC0005241
tttaaacgtatag

SEQ ID NO: 236714 - DNA, 13 bp, Artificial Sequence
  Oligonucleotide for detection of SNP TSC0005241
ctatacgtttaaa

SEQ ID NO: 236715 - DNA, 13 bp, Artificial Sequence
  Oligonucleotide for detection of SNP TSC0057770
ttagagaagtata

SEQ ID NO: 236716 - DNA, 13 bp, Artificial Sequence
  Oligonucleotide for detection of SNP TSC0057770
tatacttctctaa

SEQ ID NO: 236717 - DNA, 13 bp, Artificial Sequence
  Oligonucleotide for detection of SNP TSC0057770
ttagaggagtata

SEQ ID NO: 236718 - DNA, 13 bp, Artificial Sequence
  Oligonucleotide for detection of SNP TSC0057770
tatactcctctaa

SEQ ID NO: 236719 - DNA, 13 bp, Artificial Sequence
  Oligonucleotide for detection of SNP TSC0006935
tagtagatatagg

SEQ ID NO: 236720 - DNA, 13 bp, Artificial Sequence
  Oligonucleotide for detection of SNP TSC0006935
cctatatctacta

SEQ ID NO: 236721 - DNA, 13 bp, Artificial Sequence
  Oligonucleotide for detection of SNP TSC0006935
tagtagttatagg

SEQ ID NO: 236722 - DNA, 13 bp, Artificial Sequence
  Oligonucleotide for detection of SNP TSC0006935
cctataactacta

SEQ ID NO: 236723 - DNA, 13 bp, Artificial Sequence
  Oligonucleotide for detection of SNP TSC0006935
tttgtatttattg

SEQ ID NO: 236724 - DNA, 13 bp, Artificial Sequence
  Oligonucleotide for detection of SNP TSC0006935
caataaatacaaa

SEQ ID NO: 236725 - DNA, 13 bp, Artificial Sequence
  Oligonucleotide for detection of SNP TSC0006935
tttgtagttattg

SEQ ID NO: 236726 - DNA, 13 bp, Artificial Sequence
  Oligonucleotide for detection of SNP TSC0006935
caataactacaaa

SEQ ID NO: 236727 - DNA, 13 bp, Artificial Sequence
  Oligonucleotide for detection of SNP TSC0057771
ataaatatattta

SEQ ID NO: 236728 - DNA, 13 bp, Artificial Sequence
  Oligonucleotide for detection of SNP TSC0057771
taaatatatttat

SEQ ID NO: 236729 - DNA, 13 bp, Artificial Sequence
  Oligonucleotide for detection of SNP TSC0057772
tttttaggaagaa

SEQ ID NO: 236730 - DNA, 13 bp, Artificial Sequence
  Oligonucleotide for detection of SNP TSC0057772
ttcttcctaaaaa

SEQ ID NO: 236731 - DNA, 13 bp, Artificial Sequence
  Oligonucleotide for detection of SNP TSC0057772
tttttaagaagaa

SEQ ID NO: 236732 - DNA, 13 bp, Artificial Sequence
  Oligonucleotide for detection of SNP TSC0057772
ttcttcttaaaaa

SEQ ID NO: 236733 - DNA, 13 bp, Artificial Sequence
  Oligonucleotide for detection of SNP TSC0057773
gggatgaatggat

SEQ ID NO: 236734 - DNA, 13 bp, Artificial Sequence
  Oligonucleotide for detection of SNP TSC0057773
atccattcatccc

SEQ ID NO: 236735 - DNA, 13 bp, Artificial Sequence
  Oligonucleotide for detection of SNP TSC0057773
gggatgtatggat

SEQ ID NO: 236736 - DNA, 13 bp, Artificial Sequence
  Oligonucleotide for detection of SNP TSC0057773
atccatacatccc

SEQ ID NO: 236737 - DNA, 13 bp, Artificial Sequence
  Oligonucleotide for detection of SNP TSC0057773
atttatttattty

SEQ ID NO: 236738 - DNA, 13 bp, Artificial Sequence
  Oligonucleotide for detection of SNP TSC0057773
raaataaataaat

SEQ ID NO: 236739 - DNA, 13 bp, Artificial Sequence
  Oligonucleotide for detection of SNP TSC0057774
ttgaatagtattt

SEQ ID NO: 236740 - DNA, 13 bp, Artificial Sequence
  Oligonucleotide for detection of SNP TSC0057774
aaatactattcaa

SEQ ID NO: 236741 - DNA, 13 bp, Artificial Sequence
  Oligonucleotide for detection of SNP TSC0057774
ttgaattgtattt

SEQ ID NO: 236742 - DNA, 13 bp, Artificial Sequence
  Oligonucleotide for detection of SNP TSC0057774
aaatacaattcaa

SEQ ID NO: 236743 - DNA, 13 bp, Artificial Sequence
  Oligonucleotide for detection of SNP TSC0057774
ttgaatcgtattt

SEQ ID NO: 236744 - DNA, 13 bp, Artificial Sequence
  Oligonucleotide for detection of SNP TSC0057774
aaatacgattcaa

SEQ ID NO: 236745 - DNA, 13 bp, Artificial Sequence
  Oligonucleotide for detection of SNP TSC0057774
aagtattatttag

SEQ ID NO: 236746 - DNA, 13 bp, Artificial Sequence
  Oligonucleotide for detection of SNP TSC0057774
ctaaataatactt

SEQ ID NO: 236747 - DNA, 13 bp, Artificial Sequence
  Oligonucleotide for detection of SNP TSC0057774
aagtatgatttag

SEQ ID NO: 236748 - DNA, 13 bp, Artificial Sequence
  Oligonucleotide for detection of SNP TSC0057774
ctaaatcatactt

SEQ ID NO: 236749 - DNA, 13 bp, Artificial Sequence
  Oligonucleotide for detection of SNP TSC0057774
aagtacgatttag

SEQ ID NO: 236750 - DNA, 13 bp, Artificial Sequence
  Oligonucleotide for detection of SNP TSC0057774
ctaaatcgtactt

SEQ ID NO: 236751 - DNA, 13 bp, Artificial Sequence
  Oligonucleotide for detection of SNP TSC0057775
agaaaggaaataa

SEQ ID NO: 236752 - DNA, 13 bp, Artificial Sequence
  Oligonucleotide for detection of SNP TSC0057775
ttatttcctttct

SEQ ID NO: 236753 - DNA, 13 bp, Artificial Sequence
  Oligonucleotide for detection of SNP TSC0057775
agaaagaaaataa

SEQ ID NO: 236754 - DNA, 13 bp, Artificial Sequence
  Oligonucleotide for detection of SNP TSC0057775
ttattttctttct

SEQ ID NO: 236755 - DNA, 13 bp, Artificial Sequence
  Oligonucleotide for detection of SNP TSC0057776
ttggatgttttat

SEQ ID NO: 236756 - DNA, 13 bp, Artificial Sequence
  Oligonucleotide for detection of SNP TSC0057776
ataaaacatccaa

SEQ ID NO: 236757 - DNA, 13 bp, Artificial Sequence
  Oligonucleotide for detection of SNP TSC0057776
ttggatattttat

SEQ ID NO: 236758 - DNA, 13 bp, Artificial Sequence
  Oligonucleotide for detection of SNP TSC0057776
ataaaatatccaa

SEQ ID NO: 236759 - DNA, 13 bp, Artificial Sequence
  Oligonucleotide for detection of SNP TSC0057778
gtaataatgtaat

SEQ ID NO: 236760 - DNA, 13 bp, Artificial Sequence
  Oligonucleotide for detection of SNP TSC0057778
attacattattac

SEQ ID NO: 236761 - DNA, 13 bp, Artificial Sequence
  Oligonucleotide for detection of SNP TSC0057778
gtaatagtgtaat

SEQ ID NO: 236762 - DNA, 13 bp, Artificial Sequence
  Oligonucleotide for detection of SNP TSC0057778
attacactattac

SEQ ID NO: 236763 - DNA, 13 bp, Artificial Sequence
  Oligonucleotide for detection of SNP TSC0057779
ttattttgtatgy

SEQ ID NO: 236764 - DNA, 13 bp, Artificial Sequence
  Oligonucleotide for detection of SNP TSC0057779
rcatacaaaataa

SEQ ID NO: 236765 - DNA, 13 bp, Artificial Sequence
  Oligonucleotide for detection of SNP TSC0057779
gtatataaaatga

SEQ ID NO: 236766 - DNA, 13 bp, Artificial Sequence
  Oligonucleotide for detection of SNP TSC0057779
tcattttatatac

SEQ ID NO: 236767 - DNA, 13 bp, Artificial Sequence
  Oligonucleotide for detection of SNP TSC0057779
gtatattaaatga

SEQ ID NO: 236768 - DNA, 13 bp, Artificial Sequence
  Oligonucleotide for detection of SNP TSC0057779
tcatttaatatac

SEQ ID NO: 236769 - DNA, 13 bp, Artificial Sequence
  Oligonucleotide for detection of SNP TSC0057780
tttttaaggtaay

SEQ ID NO: 236770 - DNA, 13 bp, Artificial Sequence
  Oligonucleotide for detection of SNP TSC0057780
rttaccttaaaaa

SEQ ID NO: 236771 - DNA, 13 bp, Artificial Sequence
  Oligonucleotide for detection of SNP TSC0057780
tttttagggtaay

SEQ ID NO: 236772 - DNA, 13 bp, Artificial Sequence
  Oligonucleotide for detection of SNP TSC0057780
rttaccctaaaaa

SEQ ID NO: 236773 - DNA, 13 bp, Artificial Sequence
  Oligonucleotide for detection of SNP TSC0057781
ttgattatttttt

SEQ ID NO: 236774 - DNA, 13 bp, Artificial Sequence
  Oligonucleotide for detection of SNP TSC0057781
aaaaaataatcaa

SEQ ID NO: 236775 - DNA, 13 bp, Artificial Sequence
  Oligonucleotide for detection of SNP TSC0057781
ttgattttttttt

SEQ ID NO: 236776 - DNA, 13 bp, Artificial Sequence
  Oligonucleotide for detection of SNP TSC0057781
aaaaaaaaatcaa

SEQ ID NO: 236777 - DNA, 13 bp, Artificial Sequence
  Oligonucleotide for detection of SNP TSC0057781
aaaggagaattaa

SEQ ID NO: 236778 - DNA, 13 bp, Artificial Sequence
  Oligonucleotide for detection of SNP TSC0057781
ttaattctccttt

SEQ ID NO: 236779 - DNA, 13 bp, Artificial Sequence
  Oligonucleotide for detection of SNP TSC0057782
tattagttatagy

SEQ ID NO: 236780 - DNA, 13 bp, Artificial Sequence
  Oligonucleotide for detection of SNP TSC0057782
rctataactaata

SEQ ID NO: 236781 - DNA, 13 bp, Artificial Sequence
  Oligonucleotide for detection of SNP TSC0057782
tattaggtatagy

SEQ ID NO: 236782 - DNA, 13 bp, Artificial Sequence
  Oligonucleotide for detection of SNP TSC0057782
rctatacctaata

SEQ ID NO: 236783 - DNA, 13 bp, Artificial Sequence
  Oligonucleotide for detection of SNP TSC0057782
gttgtagttagtg

SEQ ID NO: 236784 - DNA, 13 bp, Artificial Sequence
  Oligonucleotide for detection of SNP TSC0057782
cactaactacaac

SEQ ID NO: 236785 - DNA, 13 bp, Artificial Sequence
  Oligonucleotide for detection of SNP TSC0057785
atattaattgtga

SEQ ID NO: 236786 - DNA, 13 bp, Artificial Sequence
  Oligonucleotide for detection of SNP TSC0057785
tcacaattaatat

SEQ ID NO: 236787 - DNA, 13 bp, Artificial Sequence
  Oligonucleotide for detection of SNP TSC0057785
atattagttgtga

SEQ ID NO: 236788 - DNA, 13 bp, Artificial Sequence
  Oligonucleotide for detection of SNP TSC0057785
tcacaactaatat

SEQ ID NO: 236789 - DNA, 13 bp, Artificial Sequence
  Oligonucleotide for detection of SNP TSC0057786
ttgttaaaataat

SEQ ID NO: 236790 - DNA, 13 bp, Artificial Sequence
  Oligonucleotide for detection of SNP TSC0057786
attattttaacaa

SEQ ID NO: 236791 - DNA, 13 bp, Artificial Sequence
  Oligonucleotide for detection of SNP TSC0057786
ttgttataataat

SEQ ID NO: 236792 - DNA, 13 bp, Artificial Sequence
  Oligonucleotide for detection of SNP TSC0057786
attattataacaa

SEQ ID NO: 236793 - DNA, 13 bp, Artificial Sequence
  Oligonucleotide for detection of SNP TSC0057786
attgttttgataa

SEQ ID NO: 236794 - DNA, 13 bp, Artificial Sequence
  Oligonucleotide for detection of SNP TSC0057786
ttatcaaaacaat

SEQ ID NO: 236795 - DNA, 13 bp, Artificial Sequence
  Oligonucleotide for detection of SNP TSC0057786
attgttgtgataa

SEQ ID NO: 236796 - DNA, 13 bp, Artificial Sequence
  Oligonucleotide for detection of SNP TSC0057786
ttatcacaacaat

SEQ ID NO: 236797 - DNA, 13 bp, Artificial Sequence
  Oligonucleotide for detection of SNP TSC0001117
atattttgaggaa

SEQ ID NO: 236798 - DNA, 13 bp, Artificial Sequence
  Oligonucleotide for detection of SNP TSC0001117
ttcctcaaaatat

SEQ ID NO: 236799 - DNA, 13 bp, Artificial Sequence
  Oligonucleotide for detection of SNP TSC0001117
atatttcgaggaa

SEQ ID NO: 236800 - DNA, 13 bp, Artificial Sequence
  Oligonucleotide for detection of SNP TSC0001117
ttcctcgaaatat

SEQ ID NO: 236801 - DNA, 13 bp, Artificial Sequence
  Oligonucleotide for detection of SNP TSC0057789
ggaagtgttggag

SEQ ID NO: 236802 - DNA, 13 bp, Artificial Sequence
  Oligonucleotide for detection of SNP TSC0057789
ctccaacacttcc

SEQ ID NO: 236803 - DNA, 13 bp, Artificial Sequence
  Oligonucleotide for detection of SNP TSC0057789
ggaagtattggag

SEQ ID NO: 236804 - DNA, 13 bp, Artificial Sequence
  Oligonucleotide for detection of SNP TSC0057789
ctccaatacttcc

SEQ ID NO: 236805 - DNA, 13 bp, Artificial Sequence
  Oligonucleotide for detection of SNP TSC0057789
ggaagcgttggag

SEQ ID NO: 236806 - DNA, 13 bp, Artificial Sequence
  Oligonucleotide for detection of SNP TSC0057789
ctccaacgcttcc

SEQ ID NO: 236807 - DNA, 13 bp, Artificial Sequence
  Oligonucleotide for detection of SNP TSC0057790
tataatataggga

SEQ ID NO: 236808 - DNA, 13 bp, Artificial Sequence
  Oligonucleotide for detection of SNP TSC0057790
tccctatattata

SEQ ID NO: 236809 - DNA, 13 bp, Artificial Sequence
  Oligonucleotide for detection of SNP TSC0057790
tataatttaggga

SEQ ID NO: 236810 - DNA, 13 bp, Artificial Sequence
  Oligonucleotide for detection of SNP TSC0057790
tccctaaattata

SEQ ID NO: 236811 - DNA, 13 bp, Artificial Sequence
  Oligonucleotide for detection of SNP TSC0057791
atattaaatgaaa

SEQ ID NO: 236812 - DNA, 13 bp, Artificial Sequence
  Oligonucleotide for detection of SNP TSC0057791
tttcatttaatat

SEQ ID NO: 236813 - DNA, 13 bp, Artificial Sequence
  Oligonucleotide for detection of SNP TSC0057791
atattagatgaaa

SEQ ID NO: 236814 - DNA, 13 bp, Artificial Sequence
  Oligonucleotide for detection of SNP TSC0057791
tttcatctaatat

SEQ ID NO: 236815 - DNA, 13 bp, Artificial Sequence
  Oligonucleotide for detection of SNP TSC0057792
tttgatatatggg

SEQ ID NO: 236816 - DNA, 13 bp, Artificial Sequence
  Oligonucleotide for detection of SNP TSC0057792
cccatatatcaaa

SEQ ID NO: 236817 - DNA, 13 bp, Artificial Sequence
  Oligonucleotide for detection of SNP TSC0057792
tttgatttatggg

SEQ ID NO: 236818 - DNA, 13 bp, Artificial Sequence
  Oligonucleotide for detection of SNP TSC0057792
cccataaatcaaa

SEQ ID NO: 236819 - DNA, 13 bp, Artificial Sequence
  Oligonucleotide for detection of SNP TSC0057792
tttatatgttaag

SEQ ID NO: 236820 - DNA, 13 bp, Artificial Sequence
  Oligonucleotide for detection of SNP TSC0057792
cttaacatataaa

SEQ ID NO: 236821 - DNA, 13 bp, Artificial Sequence
  Oligonucleotide for detection of SNP TSC0057792
tttataggttaag

SEQ ID NO: 236822 - DNA, 13 bp, Artificial Sequence
  Oligonucleotide for detection of SNP TSC0057792
cttaacctataaa

SEQ ID NO: 236823 - DNA, 13 bp, Artificial Sequence
  Oligonucleotide for detection of SNP TSC0057793
agtttggttttat

SEQ ID NO: 236824 - DNA, 13 bp, Artificial Sequence
  Oligonucleotide for detection of SNP TSC0057793
ataaaaccaaact

SEQ ID NO: 236825 - DNA, 13 bp, Artificial Sequence
  Oligonucleotide for detection of SNP TSC0057793
agtttgattttat

SEQ ID NO: 236826 - DNA, 13 bp, Artificial Sequence
  Oligonucleotide for detection of SNP TSC0057793
ataaaatcaaact

SEQ ID NO: 236827 - DNA, 13 bp, Artificial Sequence
  Oligonucleotide for detection of SNP TSC0057794
ttgattagttggg

SEQ ID NO: 236828 - DNA, 13 bp, Artificial Sequence
  Oligonucleotide for detection of SNP TSC0057794
cccaactaatcaa

SEQ ID NO: 236829 - DNA, 13 bp, Artificial Sequence
  Oligonucleotide for detection of SNP TSC0057794
ttgattggttggg

SEQ ID NO: 236830 - DNA, 13 bp, Artificial Sequence
  Oligonucleotide for detection of SNP TSC0057794
cccaaccaatcaa

SEQ ID NO: 236831 - DNA, 13 bp, Artificial Sequence
  Oligonucleotide for detection of SNP TSC0057795
tggttgagattay

SEQ ID NO: 236832 - DNA, 13 bp, Artificial Sequence
  Oligonucleotide for detection of SNP TSC0057795
rtaatctcaacca

SEQ ID NO: 236833 - DNA, 13 bp, Artificial Sequence
  Oligonucleotide for detection of SNP TSC0057795
tggttgggattay

SEQ ID NO: 236834 - DNA, 13 bp, Artificial Sequence
  Oligonucleotide for detection of SNP TSC0057795
rtaatcccaacca

SEQ ID NO: 236835 - DNA, 13 bp, Artificial Sequence
  Oligonucleotide for detection of SNP TSC0009654
aattaaatgtgta

SEQ ID NO: 236836 - DNA, 13 bp, Artificial Sequence
  Oligonucleotide for detection of SNP TSC0009654
tacacatttaatt

SEQ ID NO: 236837 - DNA, 13 bp, Artificial Sequence
  Oligonucleotide for detection of SNP TSC0009654
aattaattgtgta

SEQ ID NO: 236838 - DNA, 13 bp, Artificial Sequence
  Oligonucleotide for detection of SNP TSC0009654
tacacaattaatt

SEQ ID NO: 236839 - DNA, 13 bp, Artificial Sequence
  Oligonucleotide for detection of SNP TSC0009654
tgtatatttagtt

SEQ ID NO: 236840 - DNA, 13 bp, Artificial Sequence
  Oligonucleotide for detection of SNP TSC0009654
aactaaatataca

SEQ ID NO: 236841 - DNA, 13 bp, Artificial Sequence
  Oligonucleotide for detection of SNP TSC0009654
tgtatagttagtt

SEQ ID NO: 236842 - DNA, 13 bp, Artificial Sequence
  Oligonucleotide for detection of SNP TSC0009654
aactaactataca

SEQ ID NO: 236843 - DNA, 13 bp, Artificial Sequence
  Oligonucleotide for detection of SNP TSC0009655
tttagtatgatta

SEQ ID NO: 236844 - DNA, 13 bp, Artificial Sequence
  Oligonucleotide for detection of SNP TSC0009655
taatcatactaaa

SEQ ID NO: 236845 - DNA, 13 bp, Artificial Sequence
  Oligonucleotide for detection of SNP TSC0009655
tttagtttgatta

SEQ ID NO: 236846 - DNA, 13 bp, Artificial Sequence
  Oligonucleotide for detection of SNP TSC0009655
taatcaaactaaa

SEQ ID NO: 236847 - DNA, 13 bp, Artificial Sequence
  Oligonucleotide for detection of SNP TSC0009655
tttagtgtgatta

SEQ ID NO: 236848 - DNA, 13 bp, Artificial Sequence
  Oligonucleotide for detection of SNP TSC0009655
taatcacactaaa

SEQ ID NO: 236849 - DNA, 13 bp, Artificial Sequence
  Oligonucleotide for detection of SNP TSC0009655
tttagcgtgatta

SEQ ID NO: 236850 - DNA, 13 bp, Artificial Sequence
  Oligonucleotide for detection of SNP TSC0009655
taatcacgctaaa

SEQ ID NO: 236851 - DNA, 13 bp, Artificial Sequence
  Oligonucleotide for detection of SNP TSC0009655
tgattatgttgag

SEQ ID NO: 236852 - DNA, 13 bp, Artificial Sequence
  Oligonucleotide for detection of SNP TSC0009655
ctcaacataatca

SEQ ID NO: 236853 - DNA, 13 bp, Artificial Sequence
  Oligonucleotide for detection of SNP TSC0009655
tgattaagttgag

SEQ ID NO: 236854 - DNA, 13 bp, Artificial Sequence
  Oligonucleotide for detection of SNP TSC0009655
ctcaacttaatca

SEQ ID NO: 236855 - DNA, 13 bp, Artificial Sequence
  Oligonucleotide for detection of SNP TSC0009655
tgattacgttgag

SEQ ID NO: 236856 - DNA, 13 bp, Artificial Sequence
  Oligonucleotide for detection of SNP TSC0009655
ctcaacgtaatca

SEQ ID NO: 236857 - DNA, 13 bp, Artificial Sequence
  Oligonucleotide for detection of SNP TSC0009656
tgttgggaagtag

SEQ ID NO: 236858 - DNA, 13 bp, Artificial Sequence
  Oligonucleotide for detection of SNP TSC0009656
ctacttcccaaca

SEQ ID NO: 236859 - DNA, 13 bp, Artificial Sequence
  Oligonucleotide for detection of SNP TSC0009656
tgttggaaagtag

SEQ ID NO: 236860 - DNA, 13 bp, Artificial Sequence
  Oligonucleotide for detection of SNP TSC0009656
ctactttccaaca

SEQ ID NO: 236861 - DNA, 13 bp, Artificial Sequence
  Oligonucleotide for detection of SNP TSC0057796
tatttagagtgat

SEQ ID NO: 236862 - DNA, 13 bp, Artificial Sequence
  Oligonucleotide for detection of SNP TSC0057796
atcactctaaata

SEQ ID NO: 236863 - DNA, 13 bp, Artificial Sequence
  Oligonucleotide for detection of SNP TSC0057796
attattttaagta

SEQ ID NO: 236864 - DNA, 13 bp, Artificial Sequence
  Oligonucleotide for detection of SNP TSC0057796
tacttaaaataat

SEQ ID NO: 236865 - DNA, 13 bp, Artificial Sequence
  Oligonucleotide for detection of SNP TSC0057798
attgttgatatty

SEQ ID NO: 236866 - DNA, 13 bp, Artificial Sequence
  Oligonucleotide for detection of SNP TSC0057798
raatatcaacaat

SEQ ID NO: 236867 - DNA, 13 bp, Artificial Sequence
  Oligonucleotide for detection of SNP TSC0057798
attgttaatatty

SEQ ID NO: 236868 - DNA, 13 bp, Artificial Sequence
  Oligonucleotide for detection of SNP TSC0057798
raatattaacaat

SEQ ID NO: 236869 - DNA, 13 bp, Artificial Sequence
  Oligonucleotide for detection of SNP TSC0057799
gagattattagta

SEQ ID NO: 236870 - DNA, 13 bp, Artificial Sequence
  Oligonucleotide for detection of SNP TSC0057799
tactaataatctc

SEQ ID NO: 236871 - DNA, 13 bp, Artificial Sequence
  Oligonucleotide for detection of SNP TSC0057799
gagatttttagta

SEQ ID NO: 236872 - DNA, 13 bp, Artificial Sequence
  Oligonucleotide for detection of SNP TSC0057799
tactaaaaatctc

SEQ ID NO: 236873 - DNA, 13 bp, Artificial Sequence
  Oligonucleotide for detection of SNP TSC0057799
tattgatgattty

SEQ ID NO: 236874 - DNA, 13 bp, Artificial Sequence
  Oligonucleotide for detection of SNP TSC0057799
raaatcatcaata

SEQ ID NO: 236875 - DNA, 13 bp, Artificial Sequence
  Oligonucleotide for detection of SNP TSC0057799
tattgaggattty

SEQ ID NO: 236876 - DNA, 13 bp, Artificial Sequence
  Oligonucleotide for detection of SNP TSC0057799
raaatcctcaata

SEQ ID NO: 236877 - DNA, 13 bp, Artificial Sequence
  Oligonucleotide for detection of SNP TSC0057800
ggtataataaggg

SEQ ID NO: 236878 - DNA, 13 bp, Artificial Sequence
  Oligonucleotide for detection of SNP TSC0057800
cccttattatacc

SEQ ID NO: 236879 - DNA, 13 bp, Artificial Sequence
  Oligonucleotide for detection of SNP TSC0057800
ggtatagtaaggg

SEQ ID NO: 236880 - DNA, 13 bp, Artificial Sequence
  Oligonucleotide for detection of SNP TSC0057800
cccttactatacc

SEQ ID NO: 236881 - DNA, 13 bp, Artificial Sequence
  Oligonucleotide for detection of SNP TSC0057801
ggagtatgggaay

SEQ ID NO: 236882 - DNA, 13 bp, Artificial Sequence
  Oligonucleotide for detection of SNP TSC0057801
rttcccatactcc

SEQ ID NO: 236883 - DNA, 13 bp, Artificial Sequence
  Oligonucleotide for detection of SNP TSC0057801
ggagtaggggaay

SEQ ID NO: 236884 - DNA, 13 bp, Artificial Sequence
  Oligonucleotide for detection of SNP TSC0057801
rttcccctactcc

SEQ ID NO: 236885 - DNA, 13 bp, Artificial Sequence
  Oligonucleotide for detection of SNP TSC0057801
ggagtacgggaay

SEQ ID NO: 236886 - DNA, 13 bp, Artificial Sequence
  Oligonucleotide for detection of SNP TSC0057801
rttcccgtactcc

SEQ ID NO: 236887 - DNA, 13 bp, Artificial Sequence
  Oligonucleotide for detection of SNP TSC0057802
gttttgaagagag

SEQ ID NO: 236888 - DNA, 13 bp, Artificial Sequence
  Oligonucleotide for detection of SNP TSC0057802
ctctcttcaaaac

SEQ ID NO: 236889 - DNA, 13 bp, Artificial Sequence
  Oligonucleotide for detection of SNP TSC0057802
gttttgtagagag

SEQ ID NO: 236890 - DNA, 13 bp, Artificial Sequence
  Oligonucleotide for detection of SNP TSC0057802
ctctctacaaaac

SEQ ID NO: 236891 - DNA, 13 bp, Artificial Sequence
  Oligonucleotide for detection of SNP TSC0057802
ttttttgtagagy

SEQ ID NO: 236892 - DNA, 13 bp, Artificial Sequence
  Oligonucleotide for detection of SNP TSC0057802
rctctacaaaaaa

SEQ ID NO: 236893 - DNA, 13 bp, Artificial Sequence
  Oligonucleotide for detection of SNP TSC0004543
aaagagtggtaaa

SEQ ID NO: 236894 - DNA, 13 bp, Artificial Sequence
  Oligonucleotide for detection of SNP TSC0004543
tttaccactcttt

SEQ ID NO: 236895 - DNA, 13 bp, Artificial Sequence
  Oligonucleotide for detection of SNP TSC0004543
aaagagcggtaaa

SEQ ID NO: 236896 - DNA, 13 bp, Artificial Sequence
  Oligonucleotide for detection of SNP TSC0004543
tttaccgctcttt

SEQ ID NO: 236897 - DNA, 13 bp, Artificial Sequence
  Oligonucleotide for detection of SNP TSC0005449
gtttatgtatgtg

SEQ ID NO: 236898 - DNA, 13 bp, Artificial Sequence
  Oligonucleotide for detection of SNP TSC0005449
cacatacataaac

SEQ ID NO: 236899 - DNA, 13 bp, Artificial Sequence
  Oligonucleotide for detection of SNP TSC0005449
gtttatatatgtg

SEQ ID NO: 236900 - DNA, 13 bp, Artificial Sequence
  Oligonucleotide for detection of SNP TSC0005449
cacatatataaac

SEQ ID NO: 236901 - DNA, 13 bp, Artificial Sequence
  Oligonucleotide for detection of SNP TSC0001653
taaggtgggaggg

SEQ ID NO: 236902 - DNA, 13 bp, Artificial Sequence
  Oligonucleotide for detection of SNP TSC0001653
ccctcccacctta

SEQ ID NO: 236903 - DNA, 13 bp, Artificial Sequence
  Oligonucleotide for detection of SNP TSC0001653
taaggtaggaggg

SEQ ID NO: 236904 - DNA, 13 bp, Artificial Sequence
  Oligonucleotide for detection of SNP TSC0001653
ccctcctacctta

SEQ ID NO: 236905 - DNA, 13 bp, Artificial Sequence
  Oligonucleotide for detection of SNP TSC0000091
atagtttgaggtt

SEQ ID NO: 236906 - DNA, 13 bp, Artificial Sequence
  Oligonucleotide for detection of SNP TSC0000091
aacctcaaactat

SEQ ID NO: 236907 - DNA, 13 bp, Artificial Sequence
  Oligonucleotide for detection of SNP TSC0000091
atagttggaggtt

SEQ ID NO: 236908 - DNA, 13 bp, Artificial Sequence
  Oligonucleotide for detection of SNP TSC0000091
aacctccaactat

SEQ ID NO: 236909 - DNA, 13 bp, Artificial Sequence
  Oligonucleotide for detection of SNP TSC0000091
atagtcggaggtt

SEQ ID NO: 236910 - DNA, 13 bp, Artificial Sequence
  Oligonucleotide for detection of SNP TSC0000091
aacctccgactat

SEQ ID NO: 236911 - DNA, 13 bp, Artificial Sequence
  Oligonucleotide for detection of SNP TSC0057804
gggttaaagggag

SEQ ID NO: 236912 - DNA, 13 bp, Artificial Sequence
  Oligonucleotide for detection of SNP TSC0057804
ctccctttaaccc

SEQ ID NO: 236913 - DNA, 13 bp, Artificial Sequence
  Oligonucleotide for detection of SNP TSC0057804
gggttagagggag

SEQ ID NO: 236914 - DNA, 13 bp, Artificial Sequence
  Oligonucleotide for detection of SNP TSC0057804
ctccctctaaccc

SEQ ID NO: 236915 - DNA, 13 bp, Artificial Sequence
  Oligonucleotide for detection of SNP TSC0057805
tgagttaagattt

SEQ ID NO: 236916 - DNA, 13 bp, Artificial Sequence
  Oligonucleotide for detection of SNP TSC0057805
aaatcttaactca

SEQ ID NO: 236917 - DNA, 13 bp, Artificial Sequence
  Oligonucleotide for detection of SNP TSC0057805
tgagttgagattt

SEQ ID NO: 236918 - DNA, 13 bp, Artificial Sequence
  Oligonucleotide for detection of SNP TSC0057805
aaatctcaactca

SEQ ID NO: 236919 - DNA, 13 bp, Artificial Sequence
  Oligonucleotide for detection of SNP TSC0057805
tgagtcgagattt

SEQ ID NO: 236920 - DNA, 13 bp, Artificial Sequence
  Oligonucleotide for detection of SNP TSC0057805
aaatctcgactca

SEQ ID NO: 236921 - DNA, 13 bp, Artificial Sequence
  Oligonucleotide for detection of SNP TSC0057805
aaattttggttta

SEQ ID NO: 236922 - DNA, 13 bp, Artificial Sequence
  Oligonucleotide for detection of SNP TSC0057805
taaaccaaaattt

SEQ ID NO: 236923 - DNA, 13 bp, Artificial Sequence
  Oligonucleotide for detection of SNP TSC0057805
aaatttcggttta

SEQ ID NO: 236924 - DNA, 13 bp, Artificial Sequence
  Oligonucleotide for detection of SNP TSC0057805
taaaccgaaattt

SEQ ID NO: 236925 - DNA, 13 bp, Artificial Sequence
  Oligonucleotide for detection of SNP TSC0057806
agtaaaaaaaaty

SEQ ID NO: 236926 - DNA, 13 bp, Artificial Sequence
  Oligonucleotide for detection of SNP TSC0057806
rattttttttact

SEQ ID NO: 236927 - DNA, 13 bp, Artificial Sequence
  Oligonucleotide for detection of SNP TSC0057806
agtaaagaaaaty

SEQ ID NO: 236928 - DNA, 13 bp, Artificial Sequence
  Oligonucleotide for detection of SNP TSC0057806
rattttctttact

SEQ ID NO: 236929 - DNA, 13 bp, Artificial Sequence
  Oligonucleotide for detection of SNP TSC0057808
attttatggagga

SEQ ID NO: 236930 - DNA, 13 bp, Artificial Sequence
  Oligonucleotide for detection of SNP TSC0057808
tcctccataaaat

SEQ ID NO: 236931 - DNA, 13 bp, Artificial Sequence
  Oligonucleotide for detection of SNP TSC0057808
attttacggagga

SEQ ID NO: 236932 - DNA, 13 bp, Artificial Sequence
  Oligonucleotide for detection of SNP TSC0057808
tcctccgtaaaat

SEQ ID NO: 236933 - DNA, 13 bp, Artificial Sequence
  Oligonucleotide for detection of SNP TSC0057809
tattatatttgta

SEQ ID NO: 236934 - DNA, 13 bp, Artificial Sequence
  Oligonucleotide for detection of SNP TSC0057809
tacaaatataata

SEQ ID NO: 236935 - DNA, 13 bp, Artificial Sequence
  Oligonucleotide for detection of SNP TSC0057809
tattatgtttgta

SEQ ID NO: 236936 - DNA, 13 bp, Artificial Sequence
  Oligonucleotide for detection of SNP TSC0057809
tacaaacataata

SEQ ID NO: 236937 - DNA, 13 bp, Artificial Sequence
  Oligonucleotide for detection of SNP TSC0057809
tattacgtttgta

SEQ ID NO: 236938 - DNA, 13 bp, Artificial Sequence
  Oligonucleotide for detection of SNP TSC0057809
tacaaacgtaata

SEQ ID NO: 236939 - DNA, 13 bp, Artificial Sequence
  Oligonucleotide for detection of SNP TSC0057809
tgtaggtgtgatg

SEQ ID NO: 236940 - DNA, 13 bp, Artificial Sequence
  Oligonucleotide for detection of SNP TSC0057809
catcacacctaca

SEQ ID NO: 236941 - DNA, 13 bp, Artificial Sequence
  Oligonucleotide for detection of SNP TSC0057809
tgtaggcgtgatg

SEQ ID NO: 236942 - DNA, 13 bp, Artificial Sequence
  Oligonucleotide for detection of SNP TSC0057809
catcacgcctaca

SEQ ID NO: 236943 - DNA, 13 bp, Artificial Sequence
  Oligonucleotide for detection of SNP TSC0057810
tttgttttggttg

SEQ ID NO: 236944 - DNA, 13 bp, Artificial Sequence
  Oligonucleotide for detection of SNP TSC0057810
caaccaaaacaaa

SEQ ID NO: 236945 - DNA, 13 bp, Artificial Sequence
  Oligonucleotide for detection of SNP TSC0057810
tttgttgtggttg

SEQ ID NO: 236946 - DNA, 13 bp, Artificial Sequence
  Oligonucleotide for detection of SNP TSC0057810
caaccacaacaaa

SEQ ID NO: 236947 - DNA, 13 bp, Artificial Sequence
  Oligonucleotide for detection of SNP TSC0057810
taattaaaataga

SEQ ID NO: 236948 - DNA, 13 bp, Artificial Sequence
  Oligonucleotide for detection of SNP TSC0057810
tctattttaatta

SEQ ID NO: 236949 - DNA, 13 bp, Artificial Sequence
  Oligonucleotide for detection of SNP TSC0057810
taattataataga

SEQ ID NO: 236950 - DNA, 13 bp, Artificial Sequence
  Oligonucleotide for detection of SNP TSC0057810
tctattataatta

SEQ ID NO: 236951 - DNA, 13 bp, Artificial Sequence
  Oligonucleotide for detection of SNP TSC0057811
ttggagattggtt

SEQ ID NO: 236952 - DNA, 13 bp, Artificial Sequence
  Oligonucleotide for detection of SNP TSC0057811
aaccaatctccaa

SEQ ID NO: 236953 - DNA, 13 bp, Artificial Sequence
  Oligonucleotide for detection of SNP TSC0057811
ttggagtttggtt

SEQ ID NO: 236954 - DNA, 13 bp, Artificial Sequence
  Oligonucleotide for detection of SNP TSC0057811
aaccaaactccaa

SEQ ID NO: 236955 - DNA, 13 bp, Artificial Sequence
  Oligonucleotide for detection of SNP TSC0057811
aattagtttttag

SEQ ID NO: 236956 - DNA, 13 bp, Artificial Sequence
  Oligonucleotide for detection of SNP TSC0057811
ctaaaaactaatt

SEQ ID NO: 236957 - DNA, 13 bp, Artificial Sequence
  Oligonucleotide for detection of SNP TSC0057811
aattaggttttag

SEQ ID NO: 236958 - DNA, 13 bp, Artificial Sequence
  Oligonucleotide for detection of SNP TSC0057811
ctaaaacctaatt

SEQ ID NO: 236959 - DNA, 13 bp, Artificial Sequence
  Oligonucleotide for detection of SNP TSC0057813
tggtgtgaagaaa

SEQ ID NO: 236960 - DNA, 13 bp, Artificial Sequence
  Oligonucleotide for detection of SNP TSC0057813
tttcttcacacca

SEQ ID NO: 236961 - DNA, 13 bp, Artificial Sequence
  Oligonucleotide for detection of SNP TSC0057813
tggtgtaaagaaa

SEQ ID NO: 236962 - DNA, 13 bp, Artificial Sequence
  Oligonucleotide for detection of SNP TSC0057813
tttctttacacca

SEQ ID NO: 236963 - DNA, 13 bp, Artificial Sequence
  Oligonucleotide for detection of SNP TSC0010057
agattgaatggty

SEQ ID NO: 236964 - DNA, 13 bp, Artificial Sequence
  Oligonucleotide for detection of SNP TSC0010057
raccattcaatct

SEQ ID NO: 236965 - DNA, 13 bp, Artificial Sequence
  Oligonucleotide for detection of SNP TSC0010057
agattgtatggty

SEQ ID NO: 236966 - DNA, 13 bp, Artificial Sequence
  Oligonucleotide for detection of SNP TSC0010057
raccatacaatct

SEQ ID NO: 236967 - DNA, 13 bp, Artificial Sequence
  Oligonucleotide for detection of SNP TSC0010057
gattatttaattt

SEQ ID NO: 236968 - DNA, 13 bp, Artificial Sequence
  Oligonucleotide for detection of SNP TSC0010057
aaattaaataatc

SEQ ID NO: 236969 - DNA, 13 bp, Artificial Sequence
  Oligonucleotide for detection of SNP TSC0010057
gattatgtaattt

SEQ ID NO: 236970 - DNA, 13 bp, Artificial Sequence
  Oligonucleotide for detection of SNP TSC0010057
aaattacataatc

SEQ ID NO: 236971 - DNA, 13 bp, Artificial Sequence
  Oligonucleotide for detection of SNP TSC0057815
gtggttagtatga

SEQ ID NO: 236972 - DNA, 13 bp, Artificial Sequence
  Oligonucleotide for detection of SNP TSC0057815
tcatactaaccac

SEQ ID NO: 236973 - DNA, 13 bp, Artificial Sequence
  Oligonucleotide for detection of SNP TSC0057815
gtggtttgtatga

SEQ ID NO: 236974 - DNA, 13 bp, Artificial Sequence
  Oligonucleotide for detection of SNP TSC0057815
tcatacaaaccac

SEQ ID NO: 236975 - DNA, 13 bp, Artificial Sequence
  Oligonucleotide for detection of SNP TSC0057815
ttatattgattay

SEQ ID NO: 236976 - DNA, 13 bp, Artificial Sequence
  Oligonucleotide for detection of SNP TSC0057815
rtaatcaatataa

SEQ ID NO: 236977 - DNA, 13 bp, Artificial Sequence
  Oligonucleotide for detection of SNP TSC0057815
ttatatagattay

SEQ ID NO: 236978 - DNA, 13 bp, Artificial Sequence
  Oligonucleotide for detection of SNP TSC0057815
rtaatctatataa

SEQ ID NO: 236979 - DNA, 13 bp, Artificial Sequence
  Oligonucleotide for detection of SNP TSC0057817
aagtattgtttag

SEQ ID NO: 236980 - DNA, 13 bp, Artificial Sequence
  Oligonucleotide for detection of SNP TSC0057817
ctaaacaatactt

SEQ ID NO: 236981 - DNA, 13 bp, Artificial Sequence
  Oligonucleotide for detection of SNP TSC0057817
aagtatcgtttag

SEQ ID NO: 236982 - DNA, 13 bp, Artificial Sequence
  Oligonucleotide for detection of SNP TSC0057817
ctaaacgatactt

SEQ ID NO: 236983 - DNA, 13 bp, Artificial Sequence
  Oligonucleotide for detection of SNP TSC0057817
ttagatggtgttt

SEQ ID NO: 236984 - DNA, 13 bp, Artificial Sequence
  Oligonucleotide for detection of SNP TSC0057817
aaacaccatctaa

SEQ ID NO: 236985 - DNA, 13 bp, Artificial Sequence
  Oligonucleotide for detection of SNP TSC0057817
ttagatagtgttt

SEQ ID NO: 236986 - DNA, 13 bp, Artificial Sequence
  Oligonucleotide for detection of SNP TSC0057817
aaacactatctaa

SEQ ID NO: 236987 - DNA, 13 bp, Artificial Sequence
  Oligonucleotide for detection of SNP TSC0057817
ttagacggtgttt

SEQ ID NO: 236988 - DNA, 13 bp, Artificial Sequence
  Oligonucleotide for detection of SNP TSC0057817
aaacaccgtctaa

SEQ ID NO: 236989 - DNA, 13 bp, Artificial Sequence
  Oligonucleotide for detection of SNP TSC0057818
gtgttgaagttty

SEQ ID NO: 236990 - DNA, 13 bp, Artificial Sequence
  Oligonucleotide for detection of SNP TSC0057818
raaacttcaacac

SEQ ID NO: 236991 - DNA, 13 bp, Artificial Sequence
  Oligonucleotide for detection of SNP TSC0057818
gtgttggagttty

SEQ ID NO: 236992 - DNA, 13 bp, Artificial Sequence
  Oligonucleotide for detection of SNP TSC0057818
raaactccaacac

SEQ ID NO: 236993 - DNA, 13 bp, Artificial Sequence
  Oligonucleotide for detection of SNP TSC0057819
aagaaatggtagt

SEQ ID NO: 236994 - DNA, 13 bp, Artificial Sequence
  Oligonucleotide for detection of SNP TSC0057819
actaccatttctt

SEQ ID NO: 236995 - DNA, 13 bp, Artificial Sequence
  Oligonucleotide for detection of SNP TSC0057819
aagaaacggtagt

SEQ ID NO: 236996 - DNA, 13 bp, Artificial Sequence
  Oligonucleotide for detection of SNP TSC0057819
actaccgtttctt

SEQ ID NO: 236997 - DNA, 13 bp, Artificial Sequence
  Oligonucleotide for detection of SNP TSC0057820
gaaaataaataaa

SEQ ID NO: 236998 - DNA, 13 bp, Artificial Sequence
  Oligonucleotide for detection of SNP TSC0057820
tttatttattttc

SEQ ID NO: 236999 - DNA, 13 bp, Artificial Sequence
  Oligonucleotide for detection of SNP TSC0057820
gaaaatgaataaa

SEQ ID NO: 237000 - DNA, 13 bp, Artificial Sequence
  Oligonucleotide for detection of SNP TSC0057820
tttattcattttc

SEQ ID NO: 237001 - DNA, 13 bp, Artificial Sequence
  Oligonucleotide for detection of SNP TSC0057821
tttttaattgtga

SEQ ID NO: 237002 - DNA, 13 bp, Artificial Sequence
  Oligonucleotide for detection of SNP TSC0057821
tcacaattaaaaa

SEQ ID NO: 237003 - DNA, 13 bp, Artificial Sequence
  Oligonucleotide for detection of SNP TSC0057821
tttttatttgtga

SEQ ID NO: 237004 - DNA, 13 bp, Artificial Sequence
  Oligonucleotide for detection of SNP TSC0057821
tcacaaataaaaa

SEQ ID NO: 237005 - DNA, 13 bp, Artificial Sequence
  Oligonucleotide for detection of SNP TSC0057821
ttataattaaaga

SEQ ID NO: 237006 - DNA, 13 bp, Artificial Sequence
  Oligonucleotide for detection of SNP TSC0057821
tctttaattataa

SEQ ID NO: 237007 - DNA, 13 bp, Artificial Sequence
  Oligonucleotide for detection of SNP TSC0057821
ttataagtaaaga

SEQ ID NO: 237008 - DNA, 13 bp, Artificial Sequence
  Oligonucleotide for detection of SNP TSC0057821
tctttacttataa

SEQ ID NO: 237009 - DNA, 13 bp, Artificial Sequence
  Oligonucleotide for detection of SNP TSC0057822
aaaaaatgtaaaa

SEQ ID NO: 237010 - DNA, 13 bp, Artificial Sequence
  Oligonucleotide for detection of SNP TSC0057822
ttttacatttttt

SEQ ID NO: 237011 - DNA, 13 bp, Artificial Sequence
  Oligonucleotide for detection of SNP TSC0057823
tttaagggttagg

SEQ ID NO: 237012 - DNA, 13 bp, Artificial Sequence
  Oligonucleotide for detection of SNP TSC0057823
cctaacccttaaa

SEQ ID NO: 237013 - DNA, 13 bp, Artificial Sequence
  Oligonucleotide for detection of SNP TSC0057823
tttaagagttagg

SEQ ID NO: 237014 - DNA, 13 bp, Artificial Sequence
  Oligonucleotide for detection of SNP TSC0057823
cctaactcttaaa

SEQ ID NO: 237015 - DNA, 13 bp, Artificial Sequence
  Oligonucleotide for detection of SNP TSC0057824
tgatgtatggagt

SEQ ID NO: 237016 - DNA, 13 bp, Artificial Sequence
  Oligonucleotide for detection of SNP TSC0057824
actccatacatca

SEQ ID NO: 237017 - DNA, 13 bp, Artificial Sequence
  Oligonucleotide for detection of SNP TSC0057824
tgatgtgtggagt

SEQ ID NO: 237018 - DNA, 13 bp, Artificial Sequence
  Oligonucleotide for detection of SNP TSC0057824
actccacacatca

SEQ ID NO: 237019 - DNA, 13 bp, Artificial Sequence
  Oligonucleotide for detection of SNP TSC0057824
tgatgcgtggagt

SEQ ID NO: 237020 - DNA, 13 bp, Artificial Sequence
  Oligonucleotide for detection of SNP TSC0057824
actccacgcatca

SEQ ID NO: 237021 - DNA, 13 bp, Artificial Sequence
  Oligonucleotide for detection of SNP TSC0057824
attttatgtatta

SEQ ID NO: 237022 - DNA, 13 bp, Artificial Sequence
  Oligonucleotide for detection of SNP TSC0057824
taatacataaaat

SEQ ID NO: 237023 - DNA, 13 bp, Artificial Sequence
  Oligonucleotide for detection of SNP TSC0057824
attttacgtatta

SEQ ID NO: 237024 - DNA, 13 bp, Artificial Sequence
  Oligonucleotide for detection of SNP TSC0057824
taatacgtaaaat

SEQ ID NO: 237025 - DNA, 13 bp, Artificial Sequence
  Oligonucleotide for detection of SNP TSC0057825
tattgaattttag

SEQ ID NO: 237026 - DNA, 13 bp, Artificial Sequence
  Oligonucleotide for detection of SNP TSC0057825
ctaaaattcaata

SEQ ID NO: 237027 - DNA, 13 bp, Artificial Sequence
  Oligonucleotide for detection of SNP TSC0057825
tattgagttttag

SEQ ID NO: 237028 - DNA, 13 bp, Artificial Sequence
  Oligonucleotide for detection of SNP TSC0057825
ctaaaactcaata

SEQ ID NO: 237029 - DNA, 13 bp, Artificial Sequence
  Oligonucleotide for detection of SNP TSC0057827
atgattgtagtgy

SEQ ID NO: 237030 - DNA, 13 bp, Artificial Sequence
  Oligonucleotide for detection of SNP TSC0057827
rcactacaatcat

SEQ ID NO: 237031 - DNA, 13 bp, Artificial Sequence
  Oligonucleotide for detection of SNP TSC0057827
atgattatagtgy

SEQ ID NO: 237032 - DNA, 13 bp, Artificial Sequence
  Oligonucleotide for detection of SNP TSC0057827
rcactataatcat

SEQ ID NO: 237033 - DNA, 13 bp, Artificial Sequence
  Oligonucleotide for detection of SNP TSC0057827
acgattgtagtgy

SEQ ID NO: 237034 - DNA, 13 bp, Artificial Sequence
  Oligonucleotide for detection of SNP TSC0057827
rcactacaatcgt

SEQ ID NO: 237035 - DNA, 13 bp, Artificial Sequence
  Oligonucleotide for detection of SNP TSC0057827
acgattatagtgy

SEQ ID NO: 237036 - DNA, 13 bp, Artificial Sequence
  Oligonucleotide for detection of SNP TSC0057827
rcactataatcgt

SEQ ID NO: 237037 - DNA, 13 bp, Artificial Sequence
  Oligonucleotide for detection of SNP TSC0057827
atgattgtagcgy

SEQ ID NO: 237038 - DNA, 13 bp, Artificial Sequence
  Oligonucleotide for detection of SNP TSC0057827
rcgctacaatcat

SEQ ID NO: 237039 - DNA, 13 bp, Artificial Sequence
  Oligonucleotide for detection of SNP TSC0057827
atgattatagcgy

SEQ ID NO: 237040 - DNA, 13 bp, Artificial Sequence
  Oligonucleotide for detection of SNP TSC0057827
rcgctataatcat

SEQ ID NO: 237041 - DNA, 13 bp, Artificial Sequence
  Oligonucleotide for detection of SNP TSC0057827
acgattgtagcgy

SEQ ID NO: 237042 - DNA, 13 bp, Artificial Sequence
  Oligonucleotide for detection of SNP TSC0057827
rcgctacaatcgt

SEQ ID NO: 237043 - DNA, 13 bp, Artificial Sequence
  Oligonucleotide for detection of SNP TSC0057827
acgattatagcgy

SEQ ID NO: 237044 - DNA, 13 bp, Artificial Sequence
  Oligonucleotide for detection of SNP TSC0057827
rcgctataatcgt

SEQ ID NO: 237045 - DNA, 13 bp, Artificial Sequence
  Oligonucleotide for detection of SNP TSC0057828
attgttaatgatg

SEQ ID NO: 237046 - DNA, 13 bp, Artificial Sequence
  Oligonucleotide for detection of SNP TSC0057828
catcattaacaat

SEQ ID NO: 237047 - DNA, 13 bp, Artificial Sequence
  Oligonucleotide for detection of SNP TSC0057828
attgttgatgatg

SEQ ID NO: 237048 - DNA, 13 bp, Artificial Sequence
  Oligonucleotide for detection of SNP TSC0057828
catcatcaacaat

SEQ ID NO: 237049 - DNA, 13 bp, Artificial Sequence
  Oligonucleotide for detection of SNP TSC0057828
attgttaacgatg

SEQ ID NO: 237050 - DNA, 13 bp, Artificial Sequence
  Oligonucleotide for detection of SNP TSC0057828
catcgttaacaat

SEQ ID NO: 237051 - DNA, 13 bp, Artificial Sequence
  Oligonucleotide for detection of SNP TSC0057828
attgtcgatgatg

SEQ ID NO: 237052 - DNA, 13 bp, Artificial Sequence
  Oligonucleotide for detection of SNP TSC0057828
catcatcgacaat

SEQ ID NO: 237053 - DNA, 13 bp, Artificial Sequence
  Oligonucleotide for detection of SNP TSC0057828
attgttgacgatg

SEQ ID NO: 237054 - DNA, 13 bp, Artificial Sequence
  Oligonucleotide for detection of SNP TSC0057828
catcgtcaacaat

SEQ ID NO: 237055 - DNA, 13 bp, Artificial Sequence
  Oligonucleotide for detection of SNP TSC0057828
attgtcgacgatg

SEQ ID NO: 237056 - DNA, 13 bp, Artificial Sequence
  Oligonucleotide for detection of SNP TSC0057828
catcgtcgacaat

SEQ ID NO: 237057 - DNA, 13 bp, Artificial Sequence
  Oligonucleotide for detection of SNP TSC0057828
tattgttggtagt

SEQ ID NO: 237058 - DNA, 13 bp, Artificial Sequence
  Oligonucleotide for detection of SNP TSC0057828
actaccaacaata

SEQ ID NO: 237059 - DNA, 13 bp, Artificial Sequence
  Oligonucleotide for detection of SNP TSC0057828
tatcgttggtagt

SEQ ID NO: 237060 - DNA, 13 bp, Artificial Sequence
  Oligonucleotide for detection of SNP TSC0057828
actaccaacgata

SEQ ID NO: 237061 - DNA, 13 bp, Artificial Sequence
  Oligonucleotide for detection of SNP TSC0057828
tattgtcggtagt

SEQ ID NO: 237062 - DNA, 13 bp, Artificial Sequence
  Oligonucleotide for detection of SNP TSC0057828
actaccgacaata

SEQ ID NO: 237063 - DNA, 13 bp, Artificial Sequence
  Oligonucleotide for detection of SNP TSC0057828
tatcgtcggtagt

SEQ ID NO: 237064 - DNA, 13 bp, Artificial Sequence
  Oligonucleotide for detection of SNP TSC0057828
actaccgacgata

SEQ ID NO: 237065 - DNA, 13 bp, Artificial Sequence
  Oligonucleotide for detection of SNP TSC0057829
tttatggggttay

SEQ ID NO: 237066 - DNA, 13 bp, Artificial Sequence
  Oligonucleotide for detection of SNP TSC0057829
rtaaccccataaa

SEQ ID NO: 237067 - DNA, 13 bp, Artificial Sequence
  Oligonucleotide for detection of SNP TSC0057829
tttatgaggttay

SEQ ID NO: 237068 - DNA, 13 bp, Artificial Sequence
  Oligonucleotide for detection of SNP TSC0057829
rtaacctcataaa

SEQ ID NO: 237069 - DNA, 13 bp, Artificial Sequence
  Oligonucleotide for detection of SNP TSC0057830
ttattgatgttaa

SEQ ID NO: 237070 - DNA, 13 bp, Artificial Sequence
  Oligonucleotide for detection of SNP TSC0057830
ttaacatcaataa

SEQ ID NO: 237071 - DNA, 13 bp, Artificial Sequence
  Oligonucleotide for detection of SNP TSC0000226
gaggtagatttty

SEQ ID NO: 237072 - DNA, 13 bp, Artificial Sequence
  Oligonucleotide for detection of SNP TSC0000226
raaaatctacctc

SEQ ID NO: 237073 - DNA, 13 bp, Artificial Sequence
  Oligonucleotide for detection of SNP TSC0000226
gaggtaaatttty

SEQ ID NO: 237074 - DNA, 13 bp, Artificial Sequence
  Oligonucleotide for detection of SNP TSC0000226
raaaatttacctc

SEQ ID NO: 237075 - DNA, 13 bp, Artificial Sequence
  Oligonucleotide for detection of SNP TSC0057832
atttagtttaggt

SEQ ID NO: 237076 - DNA, 13 bp, Artificial Sequence
  Oligonucleotide for detection of SNP TSC0057832
acctaaactaaat

SEQ ID NO: 237077 - DNA, 13 bp, Artificial Sequence
  Oligonucleotide for detection of SNP TSC0057832
atttaggttaggt

SEQ ID NO: 237078 - DNA, 13 bp, Artificial Sequence
  Oligonucleotide for detection of SNP TSC0057832
acctaacctaaat

SEQ ID NO: 237079 - DNA, 13 bp, Artificial Sequence
  Oligonucleotide for detection of SNP TSC0057832
atttaggttggat

SEQ ID NO: 237080 - DNA, 13 bp, Artificial Sequence
  Oligonucleotide for detection of SNP TSC0057832
atccaacctaaat

SEQ ID NO: 237081 - DNA, 13 bp, Artificial Sequence
  Oligonucleotide for detection of SNP TSC0057832
atttagtttggat

SEQ ID NO: 237082 - DNA, 13 bp, Artificial Sequence
  Oligonucleotide for detection of SNP TSC0057832
atccaaactaaat

SEQ ID NO: 237083 - DNA, 13 bp, Artificial Sequence
  Oligonucleotide for detection of SNP TSC0057833
tgtatttgtaggt

SEQ ID NO: 237084 - DNA, 13 bp, Artificial Sequence
  Oligonucleotide for detection of SNP TSC0057833
acctacaaataca

SEQ ID NO: 237085 - DNA, 13 bp, Artificial Sequence
  Oligonucleotide for detection of SNP TSC0057833
tgtattcgtaggt

SEQ ID NO: 237086 - DNA, 13 bp, Artificial Sequence
  Oligonucleotide for detection of SNP TSC0057833
acctacgaataca

SEQ ID NO: 237087 - DNA, 13 bp, Artificial Sequence
  Oligonucleotide for detection of SNP TSC0057833
atttgtgaatgta

SEQ ID NO: 237088 - DNA, 13 bp, Artificial Sequence
  Oligonucleotide for detection of SNP TSC0057833
tacattcacaaat

SEQ ID NO: 237089 - DNA, 13 bp, Artificial Sequence
  Oligonucleotide for detection of SNP TSC0057833
atttgtaaatgta

SEQ ID NO: 237090 - DNA, 13 bp, Artificial Sequence
  Oligonucleotide for detection of SNP TSC0057833
tacatttacaaat

SEQ ID NO: 237091 - DNA, 13 bp, Artificial Sequence
  Oligonucleotide for detection of SNP TSC0057833
atttgcgaatgta

SEQ ID NO: 237092 - DNA, 13 bp, Artificial Sequence
  Oligonucleotide for detection of SNP TSC0057833
tacattcgcaaat

SEQ ID NO: 237093 - DNA, 13 bp, Artificial Sequence
  Oligonucleotide for detection of SNP TSC0057834
tgtgttagtgaag

SEQ ID NO: 237094 - DNA, 13 bp, Artificial Sequence
  Oligonucleotide for detection of SNP TSC0057834
cttcactaacaca

SEQ ID NO: 237095 - DNA, 13 bp, Artificial Sequence
  Oligonucleotide for detection of SNP TSC0057834
tgtgttggtgaag

SEQ ID NO: 237096 - DNA, 13 bp, Artificial Sequence
  Oligonucleotide for detection of SNP TSC0057834
cttcaccaacaca

SEQ ID NO: 237097 - DNA, 13 bp, Artificial Sequence
  Oligonucleotide for detection of SNP TSC0057834
cgtgttagtgaag

SEQ ID NO: 237098 - DNA, 13 bp, Artificial Sequence
  Oligonucleotide for detection of SNP TSC0057834
cttcactaacacg

SEQ ID NO: 237099 - DNA, 13 bp, Artificial Sequence
  Oligonucleotide for detection of SNP TSC0057834
cgtgttggtgaag

SEQ ID NO: 237100 - DNA, 13 bp, Artificial Sequence
  Oligonucleotide for detection of SNP TSC0057834
cttcaccaacacg

SEQ ID NO: 237101 - DNA, 13 bp, Artificial Sequence
  Oligonucleotide for detection of SNP TSC0057834
tgtgtcggtgaag

SEQ ID NO: 237102 - DNA, 13 bp, Artificial Sequence
  Oligonucleotide for detection of SNP TSC0057834
cttcaccgacaca

SEQ ID NO: 237103 - DNA, 13 bp, Artificial Sequence
  Oligonucleotide for detection of SNP TSC0057834
cgtgtcggtgaag

SEQ ID NO: 237104 - DNA, 13 bp, Artificial Sequence
  Oligonucleotide for detection of SNP TSC0057834
cttcaccgacacg

SEQ ID NO: 237105 - DNA, 13 bp, Artificial Sequence
  Oligonucleotide for detection of SNP TSC0057834
ttttattggtatg

SEQ ID NO: 237106 - DNA, 13 bp, Artificial Sequence
  Oligonucleotide for detection of SNP TSC0057834
cataccaataaaa

SEQ ID NO: 237107 - DNA, 13 bp, Artificial Sequence
  Oligonucleotide for detection of SNP TSC0057834
ttttattggtacg

SEQ ID NO: 237108 - DNA, 13 bp, Artificial Sequence
  Oligonucleotide for detection of SNP TSC0057834
cgtaccaataaaa

SEQ ID NO: 237109 - DNA, 13 bp, Artificial Sequence
  Oligonucleotide for detection of SNP TSC0057834
ttttatcggtatg

SEQ ID NO: 237110 - DNA, 13 bp, Artificial Sequence
  Oligonucleotide for detection of SNP TSC0057834
cataccgataaaa

SEQ ID NO: 237111 - DNA, 13 bp, Artificial Sequence
  Oligonucleotide for detection of SNP TSC0057834
ttttatcggtacg

SEQ ID NO: 237112 - DNA, 13 bp, Artificial Sequence
  Oligonucleotide for detection of SNP TSC0057834
cgtaccgataaaa

SEQ ID NO: 237113 - DNA, 13 bp, Artificial Sequence
  Oligonucleotide for detection of SNP TSC0057835
ttttatgattata

SEQ ID NO: 237114 - DNA, 13 bp, Artificial Sequence
  Oligonucleotide for detection of SNP TSC0057835
tataatcataaaa

SEQ ID NO: 237115 - DNA, 13 bp, Artificial Sequence
  Oligonucleotide for detection of SNP TSC0000666
tttattattggat

SEQ ID NO: 237116 - DNA, 13 bp, Artificial Sequence
  Oligonucleotide for detection of SNP TSC0000666
atccaataataaa

SEQ ID NO: 237117 - DNA, 13 bp, Artificial Sequence
  Oligonucleotide for detection of SNP TSC0000666
tttattgttggat

SEQ ID NO: 237118 - DNA, 13 bp, Artificial Sequence
  Oligonucleotide for detection of SNP TSC0000666
atccaacaataaa

SEQ ID NO: 237119 - DNA, 13 bp, Artificial Sequence
  Oligonucleotide for detection of SNP TSC0057836
gtttttatgaagt

SEQ ID NO: 237120 - DNA, 13 bp, Artificial Sequence
  Oligonucleotide for detection of SNP TSC0057836
acttcataaaaac

SEQ ID NO: 237121 - DNA, 13 bp, Artificial Sequence
  Oligonucleotide for detection of SNP TSC0057836
gtttttgtgaagt

SEQ ID NO: 237122 - DNA, 13 bp, Artificial Sequence
  Oligonucleotide for detection of SNP TSC0057836
acttcacaaaaac

SEQ ID NO: 237123 - DNA, 13 bp, Artificial Sequence
  Oligonucleotide for detection of SNP TSC0057836
gttttcgtgaagt

SEQ ID NO: 237124 - DNA, 13 bp, Artificial Sequence
  Oligonucleotide for detection of SNP TSC0057836
acttcacgaaaac

SEQ ID NO: 237125 - DNA, 13 bp, Artificial Sequence
  Oligonucleotide for detection of SNP TSC0057836
attttatgagaay

SEQ ID NO: 237126 - DNA, 13 bp, Artificial Sequence
  Oligonucleotide for detection of SNP TSC0057836
rttctcataaaat

SEQ ID NO: 237127 - DNA, 13 bp, Artificial Sequence
  Oligonucleotide for detection of SNP TSC0057836
attttacgagaay

SEQ ID NO: 237128 - DNA, 13 bp, Artificial Sequence
  Oligonucleotide for detection of SNP TSC0057836
rttctcgtaaaat

SEQ ID NO: 237129 - DNA, 13 bp, Artificial Sequence
  Oligonucleotide for detection of SNP TSC0057837
agtgataattgta

SEQ ID NO: 237130 - DNA, 13 bp, Artificial Sequence
  Oligonucleotide for detection of SNP TSC0057837
tacaattatcact

SEQ ID NO: 237131 - DNA, 13 bp, Artificial Sequence
  Oligonucleotide for detection of SNP TSC0057837
agtgatgattgta

SEQ ID NO: 237132 - DNA, 13 bp, Artificial Sequence
  Oligonucleotide for detection of SNP TSC0057837
tacaatcatcact

SEQ ID NO: 237133 - DNA, 13 bp, Artificial Sequence
  Oligonucleotide for detection of SNP TSC0057838
tatttatgaaaga

SEQ ID NO: 237134 - DNA, 13 bp, Artificial Sequence
  Oligonucleotide for detection of SNP TSC0057838
tctttcataaata

SEQ ID NO: 237135 - DNA, 13 bp, Artificial Sequence
  Oligonucleotide for detection of SNP TSC0057838
tatttacgaaaga

SEQ ID NO: 237136 - DNA, 13 bp, Artificial Sequence
  Oligonucleotide for detection of SNP TSC0057838
tctttcgtaaata

SEQ ID NO: 237137 - DNA, 13 bp, Artificial Sequence
  Oligonucleotide for detection of SNP TSC0057839
gtaagagaattgy

SEQ ID NO: 237138 - DNA, 13 bp, Artificial Sequence
  Oligonucleotide for detection of SNP TSC0057839
rcaattctcttac

SEQ ID NO: 237139 - DNA, 13 bp, Artificial Sequence
  Oligonucleotide for detection of SNP TSC0057839
gtaagaaaattgy

SEQ ID NO: 237140 - DNA, 13 bp, Artificial Sequence
  Oligonucleotide for detection of SNP TSC0057839
rcaattttcttac

SEQ ID NO: 237141 - DNA, 13 bp, Artificial Sequence
  Oligonucleotide for detection of SNP TSC0057839
gtaagagaatcgy

SEQ ID NO: 237142 - DNA, 13 bp, Artificial Sequence
  Oligonucleotide for detection of SNP TSC0057839
rcgattctcttac

SEQ ID NO: 237143 - DNA, 13 bp, Artificial Sequence
  Oligonucleotide for detection of SNP TSC0057839
gtaagaaaatcgy

SEQ ID NO: 237144 - DNA, 13 bp, Artificial Sequence
  Oligonucleotide for detection of SNP TSC0057839
rcgattttcttac

SEQ ID NO: 237145 - DNA, 13 bp, Artificial Sequence
  Oligonucleotide for detection of SNP TSC0004861
tagagaattattt

SEQ ID NO: 237146 - DNA, 13 bp, Artificial Sequence
  Oligonucleotide for detection of SNP TSC0004861
aaataattctcta

SEQ ID NO: 237147 - DNA, 13 bp, Artificial Sequence
  Oligonucleotide for detection of SNP TSC0004861
tagagagttattt

SEQ ID NO: 237148 - DNA, 13 bp, Artificial Sequence
  Oligonucleotide for detection of SNP TSC0004861
aaataactctcta

SEQ ID NO: 237149 - DNA, 13 bp, Artificial Sequence
  Oligonucleotide for detection of SNP TSC0057842
aagaaggtatgtg

SEQ ID NO: 237150 - DNA, 13 bp, Artificial Sequence
  Oligonucleotide for detection of SNP TSC0057842
cacataccttctt

SEQ ID NO: 237151 - DNA, 13 bp, Artificial Sequence
  Oligonucleotide for detection of SNP TSC0057842
aagaagatatgtg

SEQ ID NO: 237152 - DNA, 13 bp, Artificial Sequence
  Oligonucleotide for detection of SNP TSC0057842
cacatatcttctt

SEQ ID NO: 237153 - DNA, 13 bp, Artificial Sequence
  Oligonucleotide for detection of SNP TSC0057843
tggagagtggatt

SEQ ID NO: 237154 - DNA, 13 bp, Artificial Sequence
  Oligonucleotide for detection of SNP TSC0057843
aatccactctcca

SEQ ID NO: 237155 - DNA, 13 bp, Artificial Sequence
  Oligonucleotide for detection of SNP TSC0057843
tggagaatggatt

SEQ ID NO: 237156 - DNA, 13 bp, Artificial Sequence
  Oligonucleotide for detection of SNP TSC0057843
aatccattctcca

SEQ ID NO: 237157 - DNA, 13 bp, Artificial Sequence
  Oligonucleotide for detection of SNP TSC0057844
gtttattttattt

SEQ ID NO: 237158 - DNA, 13 bp, Artificial Sequence
  Oligonucleotide for detection of SNP TSC0057844
aaataaaataaac

SEQ ID NO: 237159 - DNA, 13 bp, Artificial Sequence
  Oligonucleotide for detection of SNP TSC0057844
aaataagataaay

SEQ ID NO: 237160 - DNA, 13 bp, Artificial Sequence
  Oligonucleotide for detection of SNP TSC0057844
rtttatcttattt

SEQ ID NO: 237161 - DNA, 13 bp, Artificial Sequence
  Oligonucleotide for detection of SNP TSC0057844
aaataatataaay

SEQ ID NO: 237162 - DNA, 13 bp, Artificial Sequence
  Oligonucleotide for detection of SNP TSC0057844
rtttatattattt

SEQ ID NO: 237163 - DNA, 13 bp, Artificial Sequence
  Oligonucleotide for detection of SNP TSC0005586
aattgaggtttag

SEQ ID NO: 237164 - DNA, 13 bp, Artificial Sequence
  Oligonucleotide for detection of SNP TSC0005586
ctaaacctcaatt

SEQ ID NO: 237165 - DNA, 13 bp, Artificial Sequence
  Oligonucleotide for detection of SNP TSC0005586
aattgaagtttag

SEQ ID NO: 237166 - DNA, 13 bp, Artificial Sequence
  Oligonucleotide for detection of SNP TSC0005586
ctaaacttcaatt

SEQ ID NO: 237167 - DNA, 13 bp, Artificial Sequence
  Oligonucleotide for detection of SNP TSC0005586
aatcgaggtttag

SEQ ID NO: 237168 - DNA, 13 bp, Artificial Sequence
  Oligonucleotide for detection of SNP TSC0005586
ctaaacctcgatt

SEQ ID NO: 237169 - DNA, 13 bp, Artificial Sequence
  Oligonucleotide for detection of SNP TSC0005586
aatcgaagtttag

SEQ ID NO: 237170 - DNA, 13 bp, Artificial Sequence
  Oligonucleotide for detection of SNP TSC0005586
ctaaacttcgatt

SEQ ID NO: 237171 - DNA, 13 bp, Artificial Sequence
  Oligonucleotide for detection of SNP TSC0001462
ttttgttttttgt

SEQ ID NO: 237172 - DNA, 13 bp, Artificial Sequence
  Oligonucleotide for detection of SNP TSC0001462
acaaaaaacaaaa

SEQ ID NO: 237173 - DNA, 13 bp, Artificial Sequence
  Oligonucleotide for detection of SNP TSC0001462
ttttgtttttcgt

SEQ ID NO: 237174 - DNA, 13 bp, Artificial Sequence
  Oligonucleotide for detection of SNP TSC0001462
acgaaaaacaaaa

SEQ ID NO: 237175 - DNA, 13 bp, Artificial Sequence
  Oligonucleotide for detection of SNP TSC0001462
ttttgtgtttcgt

SEQ ID NO: 237176 - DNA, 13 bp, Artificial Sequence
  Oligonucleotide for detection of SNP TSC0001462
acgaaacacaaaa

SEQ ID NO: 237177 - DNA, 13 bp, Artificial Sequence
  Oligonucleotide for detection of SNP TSC0001462
atgggaaataaaa

SEQ ID NO: 237178 - DNA, 13 bp, Artificial Sequence
  Oligonucleotide for detection of SNP TSC0001462
ttttatttcccat

SEQ ID NO: 237179 - DNA, 13 bp, Artificial Sequence
  Oligonucleotide for detection of SNP TSC0001462
atgggatataaaa

SEQ ID NO: 237180 - DNA, 13 bp, Artificial Sequence
  Oligonucleotide for detection of SNP TSC0001462
ttttatatcccat

SEQ ID NO: 237181 - DNA, 13 bp, Artificial Sequence
  Oligonucleotide for detection of SNP TSC0001462
acgggaaataaaa

SEQ ID NO: 237182 - DNA, 13 bp, Artificial Sequence
  Oligonucleotide for detection of SNP TSC0001462
ttttatttcccgt

SEQ ID NO: 237183 - DNA, 13 bp, Artificial Sequence
  Oligonucleotide for detection of SNP TSC0001462
acgggatataaaa

SEQ ID NO: 237184 - DNA, 13 bp, Artificial Sequence
  Oligonucleotide for detection of SNP TSC0001462
ttttatatcccgt

SEQ ID NO: 237185 - DNA, 13 bp, Artificial Sequence
  Oligonucleotide for detection of SNP TSC0001463
ggtttgtttaggy

SEQ ID NO: 237186 - DNA, 13 bp, Artificial Sequence
  Oligonucleotide for detection of SNP TSC0001463
rcctaaacaaacc

SEQ ID NO: 237187 - DNA, 13 bp, Artificial Sequence
  Oligonucleotide for detection of SNP TSC0001463
gtttgagtaaaty

SEQ ID NO: 237188 - DNA, 13 bp, Artificial Sequence
  Oligonucleotide for detection of SNP TSC0001463
ratttactcaaac

SEQ ID NO: 237189 - DNA, 13 bp, Artificial Sequence
  Oligonucleotide for detection of SNP TSC0001463
gtttgattaaaty

SEQ ID NO: 237190 - DNA, 13 bp, Artificial Sequence
  Oligonucleotide for detection of SNP TSC0001463
ratttaatcaaac

SEQ ID NO: 237191 - DNA, 13 bp, Artificial Sequence
  Oligonucleotide for detection of SNP TSC0057848
tgggttattgtay

SEQ ID NO: 237192 - DNA, 13 bp, Artificial Sequence
  Oligonucleotide for detection of SNP TSC0057848
rtacaataaccca

SEQ ID NO: 237193 - DNA, 13 bp, Artificial Sequence
  Oligonucleotide for detection of SNP TSC0057848
tgggtttttgtay

SEQ ID NO: 237194 - DNA, 13 bp, Artificial Sequence
  Oligonucleotide for detection of SNP TSC0057848
rtacaaaaaccca

SEQ ID NO: 237195 - DNA, 13 bp, Artificial Sequence
  Oligonucleotide for detection of SNP TSC0057849
ttttaatgggaag

SEQ ID NO: 237196 - DNA, 13 bp, Artificial Sequence
  Oligonucleotide for detection of SNP TSC0057849
cttcccattaaaa

SEQ ID NO: 237197 - DNA, 13 bp, Artificial Sequence
  Oligonucleotide for detection of SNP TSC0057849
ttttaacgggaag

SEQ ID NO: 237198 - DNA, 13 bp, Artificial Sequence
  Oligonucleotide for detection of SNP TSC0057849
cttcccgttaaaa

SEQ ID NO: 237199 - DNA, 13 bp, Artificial Sequence
  Oligonucleotide for detection of SNP TSC0057851
agtttaggattag

SEQ ID NO: 237200 - DNA, 13 bp, Artificial Sequence
  Oligonucleotide for detection of SNP TSC0057851
ctaatcctaaact

SEQ ID NO: 237201 - DNA, 13 bp, Artificial Sequence
  Oligonucleotide for detection of SNP TSC0057852
attatgagtattt

SEQ ID NO: 237202 - DNA, 13 bp, Artificial Sequence
  Oligonucleotide for detection of SNP TSC0057852
aaatactcataat

SEQ ID NO: 237203 - DNA, 13 bp, Artificial Sequence
  Oligonucleotide for detection of SNP TSC0057852
attatgggtattt

SEQ ID NO: 237204 - DNA, 13 bp, Artificial Sequence
  Oligonucleotide for detection of SNP TSC0057852
aaatacccataat

SEQ ID NO: 237205 - DNA, 13 bp, Artificial Sequence
  Oligonucleotide for detection of SNP TSC0057853
tattagaaaggga

SEQ ID NO: 237206 - DNA, 13 bp, Artificial Sequence
  Oligonucleotide for detection of SNP TSC0057853
tccctttctaata

SEQ ID NO: 237207 - DNA, 13 bp, Artificial Sequence
  Oligonucleotide for detection of SNP TSC0057853
tattaggaaggga

SEQ ID NO: 237208 - DNA, 13 bp, Artificial Sequence
  Oligonucleotide for detection of SNP TSC0057853
tcccttcctaata

SEQ ID NO: 237209 - DNA, 13 bp, Artificial Sequence
  Oligonucleotide for detection of SNP TSC0057855
gaagtaagttttt

SEQ ID NO: 237210 - DNA, 13 bp, Artificial Sequence
  Oligonucleotide for detection of SNP TSC0057855
aaaaacttacttc

SEQ ID NO: 237211 - DNA, 13 bp, Artificial Sequence
  Oligonucleotide for detection of SNP TSC0057856
aggttagaataaa

SEQ ID NO: 237212 - DNA, 13 bp, Artificial Sequence
  Oligonucleotide for detection of SNP TSC0057856
tttattctaacct

SEQ ID NO: 237213 - DNA, 13 bp, Artificial Sequence
  Oligonucleotide for detection of SNP TSC0057856
aggttaaaataaa

SEQ ID NO: 237214 - DNA, 13 bp, Artificial Sequence
  Oligonucleotide for detection of SNP TSC0057856
tttattttaacct

SEQ ID NO: 237215 - DNA, 13 bp, Artificial Sequence
  Oligonucleotide for detection of SNP TSC0057857
agtttttttttgy

SEQ ID NO: 237216 - DNA, 13 bp, Artificial Sequence
  Oligonucleotide for detection of SNP TSC0057857
rcaaaaaaaaact

SEQ ID NO: 237217 - DNA, 13 bp, Artificial Sequence
  Oligonucleotide for detection of SNP TSC0057857
gtagagagagatt

SEQ ID NO: 237218 - DNA, 13 bp, Artificial Sequence
  Oligonucleotide for detection of SNP TSC0057857
aatctctctctac

SEQ ID NO: 237219 - DNA, 13 bp, Artificial Sequence
  Oligonucleotide for detection of SNP TSC0057857
gtagagtgagatt

SEQ ID NO: 237220 - DNA, 13 bp, Artificial Sequence
  Oligonucleotide for detection of SNP TSC0057857
aatctcactctac

SEQ ID NO: 237221 - DNA, 13 bp, Artificial Sequence
  Oligonucleotide for detection of SNP TSC0057857
gtagagcgagatt

SEQ ID NO: 237222 - DNA, 13 bp, Artificial Sequence
  Oligonucleotide for detection of SNP TSC0057857
aatctcgctctac

SEQ ID NO: 237223 - DNA, 13 bp, Artificial Sequence
  Oligonucleotide for detection of SNP TSC0057859
aatattaatattg

SEQ ID NO: 237224 - DNA, 13 bp, Artificial Sequence
  Oligonucleotide for detection of SNP TSC0057859
caatattaatatt

SEQ ID NO: 237225 - DNA, 13 bp, Artificial Sequence
  Oligonucleotide for detection of SNP TSC0057859
aatattgatattg

SEQ ID NO: 237226 - DNA, 13 bp, Artificial Sequence
  Oligonucleotide for detection of SNP TSC0057859
caatatcaatatt

SEQ ID NO: 237227 - DNA, 13 bp, Artificial Sequence
  Oligonucleotide for detection of SNP TSC0057859
aatatcgatattg

SEQ ID NO: 237228 - DNA, 13 bp, Artificial Sequence
  Oligonucleotide for detection of SNP TSC0057859
caatatcgatatt

SEQ ID NO: 237229 - DNA, 13 bp, Artificial Sequence
  Oligonucleotide for detection of SNP TSC0057859
tagtgttggtgtt

SEQ ID NO: 237230 - DNA, 13 bp, Artificial Sequence
  Oligonucleotide for detection of SNP TSC0057859
aacaccaacacta

SEQ ID NO: 237231 - DNA, 13 bp, Artificial Sequence
  Oligonucleotide for detection of SNP TSC0057859
tagtgtcggtgtt

SEQ ID NO: 237232 - DNA, 13 bp, Artificial Sequence
  Oligonucleotide for detection of SNP TSC0057859
aacaccgacacta

SEQ ID NO: 237233 - DNA, 13 bp, Artificial Sequence
  Oligonucleotide for detection of SNP TSC0057860
agataatgaaaaa

SEQ ID NO: 237234 - DNA, 13 bp, Artificial Sequence
  Oligonucleotide for detection of SNP TSC0057860
tttttcattatct

SEQ ID NO: 237235 - DNA, 13 bp, Artificial Sequence
  Oligonucleotide for detection of SNP TSC0057860
agataacgaaaaa

SEQ ID NO: 237236 - DNA, 13 bp, Artificial Sequence
  Oligonucleotide for detection of SNP TSC0057860
tttttcgttatct

SEQ ID NO: 237237 - DNA, 13 bp, Artificial Sequence
  Oligonucleotide for detection of SNP TSC0057861
aatagtatttatg

SEQ ID NO: 237238 - DNA, 13 bp, Artificial Sequence
  Oligonucleotide for detection of SNP TSC0057861
cataaatactatt

SEQ ID NO: 237239 - DNA, 13 bp, Artificial Sequence
  Oligonucleotide for detection of SNP TSC0057861
aatagtgtttatg

SEQ ID NO: 237240 - DNA, 13 bp, Artificial Sequence
  Oligonucleotide for detection of SNP TSC0057861
cataaacactatt

SEQ ID NO: 237241 - DNA, 13 bp, Artificial Sequence
  Oligonucleotide for detection of SNP TSC0057862
tttttagatagat

SEQ ID NO: 237242 - DNA, 13 bp, Artificial Sequence
  Oligonucleotide for detection of SNP TSC0057862
atctatctaaaaa

SEQ ID NO: 237243 - DNA, 13 bp, Artificial Sequence
  Oligonucleotide for detection of SNP TSC0057862
tttttaaatagat

SEQ ID NO: 237244 - DNA, 13 bp, Artificial Sequence
  Oligonucleotide for detection of SNP TSC0057862
atctatttaaaaa

SEQ ID NO: 237245 - DNA, 13 bp, Artificial Sequence
  Oligonucleotide for detection of SNP TSC0057868
aaaatattaagat

SEQ ID NO: 237246 - DNA, 13 bp, Artificial Sequence
  Oligonucleotide for detection of SNP TSC0057868
atcttaatatttt

SEQ ID NO: 237247 - DNA, 13 bp, Artificial Sequence
  Oligonucleotide for detection of SNP TSC0057870
tgtgggatgttay

SEQ ID NO: 237248 - DNA, 13 bp, Artificial Sequence
  Oligonucleotide for detection of SNP TSC0057870
rtaacatcccaca

SEQ ID NO: 237249 - DNA, 13 bp, Artificial Sequence
  Oligonucleotide for detection of SNP TSC0057870
tgtgggttgttay

SEQ ID NO: 237250 - DNA, 13 bp, Artificial Sequence
  Oligonucleotide for detection of SNP TSC0057870
rtaacaacccaca

SEQ ID NO: 237251 - DNA, 13 bp, Artificial Sequence
  Oligonucleotide for detection of SNP TSC0057870
gtgatattttata

SEQ ID NO: 237252 - DNA, 13 bp, Artificial Sequence
  Oligonucleotide for detection of SNP TSC0057870
tataaaatatcac

SEQ ID NO: 237253 - DNA, 13 bp, Artificial Sequence
  Oligonucleotide for detection of SNP TSC0057870
gtgataatttata

SEQ ID NO: 237254 - DNA, 13 bp, Artificial Sequence
  Oligonucleotide for detection of SNP TSC0057870
tataaattatcac

SEQ ID NO: 237255 - DNA, 13 bp, Artificial Sequence
  Oligonucleotide for detection of SNP TSC0057871
aatagagagtgay

SEQ ID NO: 237256 - DNA, 13 bp, Artificial Sequence
  Oligonucleotide for detection of SNP TSC0057871
rtcactctctatt

SEQ ID NO: 237257 - DNA, 13 bp, Artificial Sequence
  Oligonucleotide for detection of SNP TSC0057871
aatagaaagtgay

SEQ ID NO: 237258 - DNA, 13 bp, Artificial Sequence
  Oligonucleotide for detection of SNP TSC0057871
rtcactttctatt

SEQ ID NO: 237259 - DNA, 13 bp, Artificial Sequence
  Oligonucleotide for detection of SNP TSC0057872
ggtgtatgtgaga

SEQ ID NO: 237260 - DNA, 13 bp, Artificial Sequence
  Oligonucleotide for detection of SNP TSC0057872
tctcacatacacc

SEQ ID NO: 237261 - DNA, 13 bp, Artificial Sequence
  Oligonucleotide for detection of SNP TSC0057872
ggtgtaggtgaga

SEQ ID NO: 237262 - DNA, 13 bp, Artificial Sequence
  Oligonucleotide for detection of SNP TSC0057872
tctcacctacacc

SEQ ID NO: 237263 - DNA, 13 bp, Artificial Sequence
  Oligonucleotide for detection of SNP TSC0057873
tattttgagatay

SEQ ID NO: 237264 - DNA, 13 bp, Artificial Sequence
  Oligonucleotide for detection of SNP TSC0057873
rtatctcaaaata

SEQ ID NO: 237265 - DNA, 13 bp, Artificial Sequence
  Oligonucleotide for detection of SNP TSC0057873
tattttaagatay

SEQ ID NO: 237266 - DNA, 13 bp, Artificial Sequence
  Oligonucleotide for detection of SNP TSC0057873
rtatcttaaaata

SEQ ID NO: 237267 - DNA, 13 bp, Artificial Sequence
  Oligonucleotide for detection of SNP TSC0057874
ggaatttgagtta

SEQ ID NO: 237268 - DNA, 13 bp, Artificial Sequence
  Oligonucleotide for detection of SNP TSC0057874
taactcaaattcc

SEQ ID NO: 237269 - DNA, 13 bp, Artificial Sequence
  Oligonucleotide for detection of SNP TSC0057874
ggaattcgagtta

SEQ ID NO: 237270 - DNA, 13 bp, Artificial Sequence
  Oligonucleotide for detection of SNP TSC0057874
taactcgaattcc

SEQ ID NO: 237271 - DNA, 13 bp, Artificial Sequence
  Oligonucleotide for detection of SNP TSC0057874
tggtttgggttty

SEQ ID NO: 237272 - DNA, 13 bp, Artificial Sequence
  Oligonucleotide for detection of SNP TSC0057874
raaacccaaacca

SEQ ID NO: 237273 - DNA, 13 bp, Artificial Sequence
  Oligonucleotide for detection of SNP TSC0057874
tggtttaggttty

SEQ ID NO: 237274 - DNA, 13 bp, Artificial Sequence
  Oligonucleotide for detection of SNP TSC0057874
raaacctaaacca

SEQ ID NO: 237275 - DNA, 13 bp, Artificial Sequence
  Oligonucleotide for detection of SNP TSC0057874
tggttcgggttty

SEQ ID NO: 237276 - DNA, 13 bp, Artificial Sequence
  Oligonucleotide for detection of SNP TSC0057874
raaacccgaacca

SEQ ID NO: 237277 - DNA, 13 bp, Artificial Sequence
  Oligonucleotide for detection of SNP TSC0057879
ttttgaagttggg

SEQ ID NO: 237278 - DNA, 13 bp, Artificial Sequence
  Oligonucleotide for detection of SNP TSC0057879
cccaacttcaaaa

SEQ ID NO: 237279 - DNA, 13 bp, Artificial Sequence
  Oligonucleotide for detection of SNP TSC0057879
ttttgaggttggg

SEQ ID NO: 237280 - DNA, 13 bp, Artificial Sequence
  Oligonucleotide for detection of SNP TSC0057879
cccaacctcaaaa

SEQ ID NO: 237281 - DNA, 13 bp, Artificial Sequence
  Oligonucleotide for detection of SNP TSC0057880
aatagtaaattty

SEQ ID NO: 237282 - DNA, 13 bp, Artificial Sequence
  Oligonucleotide for detection of SNP TSC0057880
raaatttactatt

SEQ ID NO: 237283 - DNA, 13 bp, Artificial Sequence
  Oligonucleotide for detection of SNP TSC0057880
aatagtgaattty

SEQ ID NO: 237284 - DNA, 13 bp, Artificial Sequence
  Oligonucleotide for detection of SNP TSC0057880
raaattcactatt

SEQ ID NO: 237285 - DNA, 13 bp, Artificial Sequence
  Oligonucleotide for detection of SNP TSC0057881
gataggtgggtag

SEQ ID NO: 237286 - DNA, 13 bp, Artificial Sequence
  Oligonucleotide for detection of SNP TSC0057881
ctacccacctatc

SEQ ID NO: 237287 - DNA, 13 bp, Artificial Sequence
  Oligonucleotide for detection of SNP TSC0057881
gataggcgggtag

SEQ ID NO: 237288 - DNA, 13 bp, Artificial Sequence
  Oligonucleotide for detection of SNP TSC0057881
ctacccgcctatc

SEQ ID NO: 237289 - DNA, 13 bp, Artificial Sequence
  Oligonucleotide for detection of SNP TSC0057883
agattggtttttt

SEQ ID NO: 237290 - DNA, 13 bp, Artificial Sequence
  Oligonucleotide for detection of SNP TSC0057883
aaaaaaccaatct

SEQ ID NO: 237291 - DNA, 13 bp, Artificial Sequence
  Oligonucleotide for detection of SNP TSC0057883
agattgatttttt

SEQ ID NO: 237292 - DNA, 13 bp, Artificial Sequence
  Oligonucleotide for detection of SNP TSC0057883
aaaaaatcaatct

SEQ ID NO: 237293 - DNA, 13 bp, Artificial Sequence
  Oligonucleotide for detection of SNP TSC0057884
taaaatatttggg

SEQ ID NO: 237294 - DNA, 13 bp, Artificial Sequence
  Oligonucleotide for detection of SNP TSC0057884
cccaaatatttta

SEQ ID NO: 237295 - DNA, 13 bp, Artificial Sequence
  Oligonucleotide for detection of SNP TSC0057884
taaaatgtttggg

SEQ ID NO: 237296 - DNA, 13 bp, Artificial Sequence
  Oligonucleotide for detection of SNP TSC0057884
cccaaacatttta

SEQ ID NO: 237297 - DNA, 13 bp, Artificial Sequence
  Oligonucleotide for detection of SNP TSC0007198
ttgagcgttagta

SEQ ID NO: 237298 - DNA, 13 bp, Artificial Sequence
  Oligonucleotide for detection of SNP TSC0007198
tactaacgctcaa

SEQ ID NO: 237299 - DNA, 13 bp, Artificial Sequence
  Oligonucleotide for detection of SNP TSC0007198
tgttaatgtttaa

SEQ ID NO: 237300 - DNA, 13 bp, Artificial Sequence
  Oligonucleotide for detection of SNP TSC0007198
ttaaacattaaca

SEQ ID NO: 237301 - DNA, 13 bp, Artificial Sequence
  Oligonucleotide for detection of SNP TSC0007198
tgttaacgtttaa

SEQ ID NO: 237302 - DNA, 13 bp, Artificial Sequence
  Oligonucleotide for detection of SNP TSC0007198
ttaaacgttaaca

SEQ ID NO: 237303 - DNA, 13 bp, Artificial Sequence
  Oligonucleotide for detection of SNP TSC0057885
tttaagggaattt

SEQ ID NO: 237304 - DNA, 13 bp, Artificial Sequence
  Oligonucleotide for detection of SNP TSC0057885
aaattcccttaaa

SEQ ID NO: 237305 - DNA, 13 bp, Artificial Sequence
  Oligonucleotide for detection of SNP TSC0057885
tttaagagaattt

SEQ ID NO: 237306 - DNA, 13 bp, Artificial Sequence
  Oligonucleotide for detection of SNP TSC0057885
aaattctcttaaa

SEQ ID NO: 237307 - DNA, 13 bp, Artificial Sequence
  Oligonucleotide for detection of SNP TSC0057886
tattttgaaaaat

SEQ ID NO: 237308 - DNA, 13 bp, Artificial Sequence
  Oligonucleotide for detection of SNP TSC0057886
atttttcaaaata

SEQ ID NO: 237309 - DNA, 13 bp, Artificial Sequence
  Oligonucleotide for detection of SNP TSC0057886
tatttcgaaaaat

SEQ ID NO: 237310 - DNA, 13 bp, Artificial Sequence
  Oligonucleotide for detection of SNP TSC0057886
atttttcgaaata

SEQ ID NO: 237311 - DNA, 13 bp, Artificial Sequence
  Oligonucleotide for detection of SNP TSC0057886
attttttggaata

SEQ ID NO: 237312 - DNA, 13 bp, Artificial Sequence
  Oligonucleotide for detection of SNP TSC0057886
tattccaaaaaat

SEQ ID NO: 237313 - DNA, 13 bp, Artificial Sequence
  Oligonucleotide for detection of SNP TSC0057886
atttttcggaata

SEQ ID NO: 237314 - DNA, 13 bp, Artificial Sequence
  Oligonucleotide for detection of SNP TSC0057886
tattccgaaaaat

SEQ ID NO: 237315 - DNA, 13 bp, Artificial Sequence
  Oligonucleotide for detection of SNP TSC0007536
tttaaatttagta

SEQ ID NO: 237316 - DNA, 13 bp, Artificial Sequence
  Oligonucleotide for detection of SNP TSC0007536
tactaaatttaaa

SEQ ID NO: 237317 - DNA, 13 bp, Artificial Sequence
  Oligonucleotide for detection of SNP TSC0007536
tgttaaatttaaa

SEQ ID NO: 237318 - DNA, 13 bp, Artificial Sequence
  Oligonucleotide for detection of SNP TSC0007536
tttaaatttaaca

SEQ ID NO: 237319 - DNA, 13 bp, Artificial Sequence
  Oligonucleotide for detection of SNP TSC0007536
tgttaattttaaa

SEQ ID NO: 237320 - DNA, 13 bp, Artificial Sequence
  Oligonucleotide for detection of SNP TSC0007536
tttaaaattaaca

SEQ ID NO: 237321 - DNA, 13 bp, Artificial Sequence
  Oligonucleotide for detection of SNP TSC0057887
aatttaattggty

SEQ ID NO: 237322 - DNA, 13 bp, Artificial Sequence
  Oligonucleotide for detection of SNP TSC0057887
raccaattaaatt

SEQ ID NO: 237323 - DNA, 13 bp, Artificial Sequence
  Oligonucleotide for detection of SNP TSC0057887
aatttagttggty

SEQ ID NO: 237324 - DNA, 13 bp, Artificial Sequence
  Oligonucleotide for detection of SNP TSC0057887
raccaactaaatt

SEQ ID NO: 237325 - DNA, 13 bp, Artificial Sequence
  Oligonucleotide for detection of SNP TSC0057888
aaataaatataag

SEQ ID NO: 237326 - DNA, 13 bp, Artificial Sequence
  Oligonucleotide for detection of SNP TSC0057888
cttatatttattt

SEQ ID NO: 237327 - DNA, 13 bp, Artificial Sequence
  Oligonucleotide for detection of SNP TSC0057888
aaataagtataag

SEQ ID NO: 237328 - DNA, 13 bp, Artificial Sequence
  Oligonucleotide for detection of SNP TSC0057888
cttatacttattt

SEQ ID NO: 237329 - DNA, 13 bp, Artificial Sequence
  Oligonucleotide for detection of SNP TSC0057889
atatttgttttgt

SEQ ID NO: 237330 - DNA, 13 bp, Artificial Sequence
  Oligonucleotide for detection of SNP TSC0057889
acaaaacaaatat

SEQ ID NO: 237331 - DNA, 13 bp, Artificial Sequence
  Oligonucleotide for detection of SNP TSC0057889
atatttattttgt

SEQ ID NO: 237332 - DNA, 13 bp, Artificial Sequence
  Oligonucleotide for detection of SNP TSC0057889
acaaaataaatat

SEQ ID NO: 237333 - DNA, 13 bp, Artificial Sequence
  Oligonucleotide for detection of SNP TSC0057890
tatttgttggtat

SEQ ID NO: 237334 - DNA, 13 bp, Artificial Sequence
  Oligonucleotide for detection of SNP TSC0057890
ataccaacaaata

SEQ ID NO: 237335 - DNA, 13 bp, Artificial Sequence
  Oligonucleotide for detection of SNP TSC0057890
tatttggtggtat

SEQ ID NO: 237336 - DNA, 13 bp, Artificial Sequence
  Oligonucleotide for detection of SNP TSC0057890
ataccaccaaata

SEQ ID NO: 237337 - DNA, 13 bp, Artificial Sequence
  Oligonucleotide for detection of SNP TSC0057890
tattcgttggtat

SEQ ID NO: 237338 - DNA, 13 bp, Artificial Sequence
  Oligonucleotide for detection of SNP TSC0057890
ataccaacgaata

SEQ ID NO: 237339 - DNA, 13 bp, Artificial Sequence
  Oligonucleotide for detection of SNP TSC0057890
tattcggtggtat

SEQ ID NO: 237340 - DNA, 13 bp, Artificial Sequence
  Oligonucleotide for detection of SNP TSC0057890
ataccaccgaata

SEQ ID NO: 237341 - DNA, 13 bp, Artificial Sequence
  Oligonucleotide for detection of SNP TSC0057890
atgttaatgaatg

SEQ ID NO: 237342 - DNA, 13 bp, Artificial Sequence
  Oligonucleotide for detection of SNP TSC0057890
cattcattaacat

SEQ ID NO: 237343 - DNA, 13 bp, Artificial Sequence
  Oligonucleotide for detection of SNP TSC0057890
atgttattgaatg

SEQ ID NO: 237344 - DNA, 13 bp, Artificial Sequence
  Oligonucleotide for detection of SNP TSC0057890
cattcaataacat

SEQ ID NO: 237345 - DNA, 13 bp, Artificial Sequence
  Oligonucleotide for detection of SNP TSC0057890
atgttaacgaatg

SEQ ID NO: 237346 - DNA, 13 bp, Artificial Sequence
  Oligonucleotide for detection of SNP TSC0057890
cattcgttaacat

SEQ ID NO: 237347 - DNA, 13 bp, Artificial Sequence
  Oligonucleotide for detection of SNP TSC0057890
atgttatcgaatg

SEQ ID NO: 237348 - DNA, 13 bp, Artificial Sequence
  Oligonucleotide for detection of SNP TSC0057890
cattcgataacat

SEQ ID NO: 237349 - DNA, 13 bp, Artificial Sequence
  Oligonucleotide for detection of SNP TSC0057891
ttagaaattggtt

SEQ ID NO: 237350 - DNA, 13 bp, Artificial Sequence
  Oligonucleotide for detection of SNP TSC0057891
aaccaatttctaa

SEQ ID NO: 237351 - DNA, 13 bp, Artificial Sequence
  Oligonucleotide for detection of SNP TSC0057891
ttagaagttggtt

SEQ ID NO: 237352 - DNA, 13 bp, Artificial Sequence
  Oligonucleotide for detection of SNP TSC0057891
aaccaacttctaa

SEQ ID NO: 237353 - DNA, 13 bp, Artificial Sequence
  Oligonucleotide for detection of SNP TSC0057892
tttaatataatgt

SEQ ID NO: 237354 - DNA, 13 bp, Artificial Sequence
  Oligonucleotide for detection of SNP TSC0057892
acattatattaaa

SEQ ID NO: 237355 - DNA, 13 bp, Artificial Sequence
  Oligonucleotide for detection of SNP TSC0057892
tttaatgtaatgt

SEQ ID NO: 237356 - DNA, 13 bp, Artificial Sequence
  Oligonucleotide for detection of SNP TSC0057892
acattacattaaa

SEQ ID NO: 237357 - DNA, 13 bp, Artificial Sequence
  Oligonucleotide for detection of SNP TSC0057894
taaataaatgtaa

SEQ ID NO: 237358 - DNA, 13 bp, Artificial Sequence
  Oligonucleotide for detection of SNP TSC0057894
ttacatttattta

SEQ ID NO: 237359 - DNA, 13 bp, Artificial Sequence
  Oligonucleotide for detection of SNP TSC0057894
taaatagatgtaa

SEQ ID NO: 237360 - DNA, 13 bp, Artificial Sequence
  Oligonucleotide for detection of SNP TSC0057894
ttacatctattta

SEQ ID NO: 237361 - DNA, 13 bp, Artificial Sequence
  Oligonucleotide for detection of SNP TSC0057894
taaataaacgtaa

SEQ ID NO: 237362 - DNA, 13 bp, Artificial Sequence
  Oligonucleotide for detection of SNP TSC0057894
ttacgtttattta

SEQ ID NO: 237363 - DNA, 13 bp, Artificial Sequence
  Oligonucleotide for detection of SNP TSC0057894
taaatagacgtaa

SEQ ID NO: 237364 - DNA, 13 bp, Artificial Sequence
  Oligonucleotide for detection of SNP TSC0057894
ttacgtctattta

SEQ ID NO: 237365 - DNA, 13 bp, Artificial Sequence
  Oligonucleotide for detection of SNP TSC0057896
aagttgatataaa

SEQ ID NO: 237366 - DNA, 13 bp, Artificial Sequence
  Oligonucleotide for detection of SNP TSC0057896
tttatatcaactt

SEQ ID NO: 237367 - DNA, 13 bp, Artificial Sequence
  Oligonucleotide for detection of SNP TSC0057896
aagttgttataaa

SEQ ID NO: 237368 - DNA, 13 bp, Artificial Sequence
  Oligonucleotide for detection of SNP TSC0057896
tttataacaactt

SEQ ID NO: 237369 - DNA, 13 bp, Artificial Sequence
  Oligonucleotide for detection of SNP TSC0057896
tttatagtaattt

SEQ ID NO: 237370 - DNA, 13 bp, Artificial Sequence
  Oligonucleotide for detection of SNP TSC0057896
aaattactataaa

SEQ ID NO: 237371 - DNA, 13 bp, Artificial Sequence
  Oligonucleotide for detection of SNP TSC0057898
tagaagtgggggt

SEQ ID NO: 237372 - DNA, 13 bp, Artificial Sequence
  Oligonucleotide for detection of SNP TSC0057898
acccccacttcta

SEQ ID NO: 237373 - DNA, 13 bp, Artificial Sequence
  Oligonucleotide for detection of SNP TSC0057898
tagaagcgggggt

SEQ ID NO: 237374 - DNA, 13 bp, Artificial Sequence
  Oligonucleotide for detection of SNP TSC0057898
acccccgcttcta

SEQ ID NO: 237375 - DNA, 13 bp, Artificial Sequence
  Oligonucleotide for detection of SNP TSC0057899
atttaaaagaaag

SEQ ID NO: 237376 - DNA, 13 bp, Artificial Sequence
  Oligonucleotide for detection of SNP TSC0057899
ctttcttttaaat

SEQ ID NO: 237377 - DNA, 13 bp, Artificial Sequence
  Oligonucleotide for detection of SNP TSC0057899
atttaagagaaag

SEQ ID NO: 237378 - DNA, 13 bp, Artificial Sequence
  Oligonucleotide for detection of SNP TSC0057899
ctttctcttaaat

SEQ ID NO: 237379 - DNA, 13 bp, Artificial Sequence
  Oligonucleotide for detection of SNP TSC0057900
agaagtgtgtttg

SEQ ID NO: 237380 - DNA, 13 bp, Artificial Sequence
  Oligonucleotide for detection of SNP TSC0057900
caaacacacttct

SEQ ID NO: 237381 - DNA, 13 bp, Artificial Sequence
  Oligonucleotide for detection of SNP TSC0057900
agaagtatgtttg

SEQ ID NO: 237382 - DNA, 13 bp, Artificial Sequence
  Oligonucleotide for detection of SNP TSC0057900
caaacatacttct

SEQ ID NO: 237383 - DNA, 13 bp, Artificial Sequence
  Oligonucleotide for detection of SNP TSC0057901
atagtagtaaaga

SEQ ID NO: 237384 - DNA, 13 bp, Artificial Sequence
  Oligonucleotide for detection of SNP TSC0057901
tctttactactat

SEQ ID NO: 237385 - DNA, 13 bp, Artificial Sequence
  Oligonucleotide for detection of SNP TSC0057901
atagtaataaaga

SEQ ID NO: 237386 - DNA, 13 bp, Artificial Sequence
  Oligonucleotide for detection of SNP TSC0057901
tctttattactat

SEQ ID NO: 237387 - DNA, 13 bp, Artificial Sequence
  Oligonucleotide for detection of SNP TSC0057902
tgaaaatatataa

SEQ ID NO: 237388 - DNA, 13 bp, Artificial Sequence
  Oligonucleotide for detection of SNP TSC0057902
ttatatattttca

SEQ ID NO: 237389 - DNA, 13 bp, Artificial Sequence
  Oligonucleotide for detection of SNP TSC0057902
tgaaaagatataa

SEQ ID NO: 237390 - DNA, 13 bp, Artificial Sequence
  Oligonucleotide for detection of SNP TSC0057902
ttatatcttttca

SEQ ID NO: 237391 - DNA, 13 bp, Artificial Sequence
  Oligonucleotide for detection of SNP TSC0057903
tgatatatgttaa

SEQ ID NO: 237392 - DNA, 13 bp, Artificial Sequence
  Oligonucleotide for detection of SNP TSC0057903
ttaacatatatca

SEQ ID NO: 237393 - DNA, 13 bp, Artificial Sequence
  Oligonucleotide for detection of SNP TSC0057903
tgatatgtgttaa

SEQ ID NO: 237394 - DNA, 13 bp, Artificial Sequence
  Oligonucleotide for detection of SNP TSC0057903
ttaacacatatca

SEQ ID NO: 237395 - DNA, 13 bp, Artificial Sequence
  Oligonucleotide for detection of SNP TSC0057903
tgatatacgttaa

SEQ ID NO: 237396 - DNA, 13 bp, Artificial Sequence
  Oligonucleotide for detection of SNP TSC0057903
ttaacgtatatca

SEQ ID NO: 237397 - DNA, 13 bp, Artificial Sequence
  Oligonucleotide for detection of SNP TSC0057903
tgatatgcgttaa

SEQ ID NO: 237398 - DNA, 13 bp, Artificial Sequence
  Oligonucleotide for detection of SNP TSC0057903
ttaacgcatatca

SEQ ID NO: 237399 - DNA, 13 bp, Artificial Sequence
  Oligonucleotide for detection of SNP TSC0057904
gattttatatttg

SEQ ID NO: 237400 - DNA, 13 bp, Artificial Sequence
  Oligonucleotide for detection of SNP TSC0057904
caaatataaaatc

SEQ ID NO: 237401 - DNA, 13 bp, Artificial Sequence
  Oligonucleotide for detection of SNP TSC0057904
gattttgtatttg

SEQ ID NO: 237402 - DNA, 13 bp, Artificial Sequence
  Oligonucleotide for detection of SNP TSC0057904
caaatacaaaatc

SEQ ID NO: 237403 - DNA, 13 bp, Artificial Sequence
  Oligonucleotide for detection of SNP TSC0057904
gatttcgtatttg

SEQ ID NO: 237404 - DNA, 13 bp, Artificial Sequence
  Oligonucleotide for detection of SNP TSC0057904
caaatacgaaatc

SEQ ID NO: 237405 - DNA, 13 bp, Artificial Sequence
  Oligonucleotide for detection of SNP TSC0057904
taagtatggggty

SEQ ID NO: 237406 - DNA, 13 bp, Artificial Sequence
  Oligonucleotide for detection of SNP TSC0057904
raccccatactta

SEQ ID NO: 237407 - DNA, 13 bp, Artificial Sequence
  Oligonucleotide for detection of SNP TSC0057904
taagtacggggty

SEQ ID NO: 237408 - DNA, 13 bp, Artificial Sequence
  Oligonucleotide for detection of SNP TSC0057904
raccccgtactta

SEQ ID NO: 237409 - DNA, 13 bp, Artificial Sequence
  Oligonucleotide for detection of SNP TSC0057905
aggtatagtgtta

SEQ ID NO: 237410 - DNA, 13 bp, Artificial Sequence
  Oligonucleotide for detection of SNP TSC0057905
taacactatacct

SEQ ID NO: 237411 - DNA, 13 bp, Artificial Sequence
  Oligonucleotide for detection of SNP TSC0057905
aggtattgtgtta

SEQ ID NO: 237412 - DNA, 13 bp, Artificial Sequence
  Oligonucleotide for detection of SNP TSC0057905
taacacaatacct

SEQ ID NO: 237413 - DNA, 13 bp, Artificial Sequence
  Oligonucleotide for detection of SNP TSC0057905
aggtatcgtgtta

SEQ ID NO: 237414 - DNA, 13 bp, Artificial Sequence
  Oligonucleotide for detection of SNP TSC0057905
taacacgatacct

SEQ ID NO: 237415 - DNA, 13 bp, Artificial Sequence
  Oligonucleotide for detection of SNP TSC0057905
tagtattgtgttt

SEQ ID NO: 237416 - DNA, 13 bp, Artificial Sequence
  Oligonucleotide for detection of SNP TSC0057905
aaacacaatacta

SEQ ID NO: 237417 - DNA, 13 bp, Artificial Sequence
  Oligonucleotide for detection of SNP TSC0057905
tagtatggtgttt

SEQ ID NO: 237418 - DNA, 13 bp, Artificial Sequence
  Oligonucleotide for detection of SNP TSC0057905
aaacaccatacta

SEQ ID NO: 237419 - DNA, 13 bp, Artificial Sequence
  Oligonucleotide for detection of SNP TSC0057905
tagtacggtgttt

SEQ ID NO: 237420 - DNA, 13 bp, Artificial Sequence
  Oligonucleotide for detection of SNP TSC0057905
aaacaccgtacta

SEQ ID NO: 237421 - DNA, 13 bp, Artificial Sequence
  Oligonucleotide for detection of SNP TSC0057906
ttgaatataggtt

SEQ ID NO: 237422 - DNA, 13 bp, Artificial Sequence
  Oligonucleotide for detection of SNP TSC0057906
aacctatattcaa

SEQ ID NO: 237423 - DNA, 13 bp, Artificial Sequence
  Oligonucleotide for detection of SNP TSC0057906
ttgaatttaggtt

SEQ ID NO: 237424 - DNA, 13 bp, Artificial Sequence
  Oligonucleotide for detection of SNP TSC0057906
aacctaaattcaa

SEQ ID NO: 237425 - DNA, 13 bp, Artificial Sequence
  Oligonucleotide for detection of SNP TSC0057906
agtttatgtttag

SEQ ID NO: 237426 - DNA, 13 bp, Artificial Sequence
  Oligonucleotide for detection of SNP TSC0057906
ctaaacataaact

SEQ ID NO: 237427 - DNA, 13 bp, Artificial Sequence
  Oligonucleotide for detection of SNP TSC0057906
agtttaggtttag

SEQ ID NO: 237428 - DNA, 13 bp, Artificial Sequence
  Oligonucleotide for detection of SNP TSC0057906
ctaaacctaaact

SEQ ID NO: 237429 - DNA, 13 bp, Artificial Sequence
  Oligonucleotide for detection of SNP TSC0057907
gttaggagtttga

SEQ ID NO: 237430 - DNA, 13 bp, Artificial Sequence
  Oligonucleotide for detection of SNP TSC0057907
tcaaactcctaac

SEQ ID NO: 237431 - DNA, 13 bp, Artificial Sequence
  Oligonucleotide for detection of SNP TSC0057907
gttaggggtttga

SEQ ID NO: 237432 - DNA, 13 bp, Artificial Sequence
  Oligonucleotide for detection of SNP TSC0057907
tcaaacccctaac

SEQ ID NO: 237433 - DNA, 13 bp, Artificial Sequence
  Oligonucleotide for detection of SNP TSC0057908
aatatagaaaata

SEQ ID NO: 237434 - DNA, 13 bp, Artificial Sequence
  Oligonucleotide for detection of SNP TSC0057908
tattttctatatt

SEQ ID NO: 237435 - DNA, 13 bp, Artificial Sequence
  Oligonucleotide for detection of SNP TSC0057909
tagttttggcgay

SEQ ID NO: 237436 - DNA, 13 bp, Artificial Sequence
  Oligonucleotide for detection of SNP TSC0057909
rtcgccaaaacta

SEQ ID NO: 237437 - DNA, 13 bp, Artificial Sequence
  Oligonucleotide for detection of SNP TSC0057909
tagtttcggcgay

SEQ ID NO: 237438 - DNA, 13 bp, Artificial Sequence
  Oligonucleotide for detection of SNP TSC0057909
rtcgccgaaacta

SEQ ID NO: 237439 - DNA, 13 bp, Artificial Sequence
  Oligonucleotide for detection of SNP TSC0057909
gtcgttgaggttg

SEQ ID NO: 237440 - DNA, 13 bp, Artificial Sequence
  Oligonucleotide for detection of SNP TSC0057909
caacctcaacgac

SEQ ID NO: 237441 - DNA, 13 bp, Artificial Sequence
  Oligonucleotide for detection of SNP TSC0057909
gtcgttaaggttg

SEQ ID NO: 237442 - DNA, 13 bp, Artificial Sequence
  Oligonucleotide for detection of SNP TSC0057909
caaccttaacgac

SEQ ID NO: 237443 - DNA, 13 bp, Artificial Sequence
  Oligonucleotide for detection of SNP TSC0057909
gtcgtcgaggttg

SEQ ID NO: 237444 - DNA, 13 bp, Artificial Sequence
  Oligonucleotide for detection of SNP TSC0057909
caacctcgacgac

SEQ ID NO: 237445 - DNA, 13 bp, Artificial Sequence
  Oligonucleotide for detection of SNP TSC0057913
agatatagtatty

SEQ ID NO: 237446 - DNA, 13 bp, Artificial Sequence
  Oligonucleotide for detection of SNP TSC0057913
raatactatatct

SEQ ID NO: 237447 - DNA, 13 bp, Artificial Sequence
  Oligonucleotide for detection of SNP TSC0057913
agatatggtatty

SEQ ID NO: 237448 - DNA, 13 bp, Artificial Sequence
  Oligonucleotide for detection of SNP TSC0057913
raataccatatct

SEQ ID NO: 237449 - DNA, 13 bp, Artificial Sequence
  Oligonucleotide for detection of SNP TSC0057913
agatacggtatty

SEQ ID NO: 237450 - DNA, 13 bp, Artificial Sequence
  Oligonucleotide for detection of SNP TSC0057913
raataccgtatct

SEQ ID NO: 237451 - DNA, 13 bp, Artificial Sequence
  Oligonucleotide for detection of SNP TSC0057914
atgtttattaaaa

SEQ ID NO: 237452 - DNA, 13 bp, Artificial Sequence
  Oligonucleotide for detection of SNP TSC0057914
ttttaataaacat

SEQ ID NO: 237453 - DNA, 13 bp, Artificial Sequence
  Oligonucleotide for detection of SNP TSC0057914
atgtttgttaaaa

SEQ ID NO: 237454 - DNA, 13 bp, Artificial Sequence
  Oligonucleotide for detection of SNP TSC0057914
ttttaacaaacat

SEQ ID NO: 237455 - DNA, 13 bp, Artificial Sequence
  Oligonucleotide for detection of SNP TSC0057915
taattggttgttt

SEQ ID NO: 237456 - DNA, 13 bp, Artificial Sequence
  Oligonucleotide for detection of SNP TSC0057915
aaacaaccaatta

SEQ ID NO: 237457 - DNA, 13 bp, Artificial Sequence
  Oligonucleotide for detection of SNP TSC0057915
taattgattgttt

SEQ ID NO: 237458 - DNA, 13 bp, Artificial Sequence
  Oligonucleotide for detection of SNP TSC0057915
aaacaatcaatta

SEQ ID NO: 237459 - DNA, 13 bp, Artificial Sequence
  Oligonucleotide for detection of SNP TSC0057917
atattaatatagg

SEQ ID NO: 237460 - DNA, 13 bp, Artificial Sequence
  Oligonucleotide for detection of SNP TSC0057917
cctatattaatat

SEQ ID NO: 237461 - DNA, 13 bp, Artificial Sequence
  Oligonucleotide for detection of SNP TSC0057917
atattagtatagg

SEQ ID NO: 237462 - DNA, 13 bp, Artificial Sequence
  Oligonucleotide for detection of SNP TSC0057917
cctatactaatat

SEQ ID NO: 237463 - DNA, 13 bp, Artificial Sequence
  Oligonucleotide for detection of SNP TSC0057918
agtatagaatttt

SEQ ID NO: 237464 - DNA, 13 bp, Artificial Sequence
  Oligonucleotide for detection of SNP TSC0057918
aaaattctatact

SEQ ID NO: 237465 - DNA, 13 bp, Artificial Sequence
  Oligonucleotide for detection of SNP TSC0057918
agtataaaatttt

SEQ ID NO: 237466 - DNA, 13 bp, Artificial Sequence
  Oligonucleotide for detection of SNP TSC0057918
aaaattttatact

SEQ ID NO: 237467 - DNA, 13 bp, Artificial Sequence
  Oligonucleotide for detection of SNP TSC0057919
tgttttttgttay

SEQ ID NO: 237468 - DNA, 13 bp, Artificial Sequence
  Oligonucleotide for detection of SNP TSC0057919
rtaacaaaaaaca

SEQ ID NO: 237469 - DNA, 13 bp, Artificial Sequence
  Oligonucleotide for detection of SNP TSC0057919
gtaatagagaata

SEQ ID NO: 237470 - DNA, 13 bp, Artificial Sequence
  Oligonucleotide for detection of SNP TSC0057919
tattctctattac

SEQ ID NO: 237471 - DNA, 13 bp, Artificial Sequence
  Oligonucleotide for detection of SNP TSC0057919
gtaatatagaata

SEQ ID NO: 237472 - DNA, 13 bp, Artificial Sequence
  Oligonucleotide for detection of SNP TSC0057919
tattctatattac

SEQ ID NO: 237473 - DNA, 13 bp, Artificial Sequence
  Oligonucleotide for detection of SNP TSC0057920
tgtttaagataga

SEQ ID NO: 237474 - DNA, 13 bp, Artificial Sequence
  Oligonucleotide for detection of SNP TSC0057920
tctatcttaaaca

SEQ ID NO: 237475 - DNA, 13 bp, Artificial Sequence
  Oligonucleotide for detection of SNP TSC0057920
tgtttaggataga

SEQ ID NO: 237476 - DNA, 13 bp, Artificial Sequence
  Oligonucleotide for detection of SNP TSC0057920
tctatcctaaaca

SEQ ID NO: 237477 - DNA, 13 bp, Artificial Sequence
  Oligonucleotide for detection of SNP TSC0057920
cgtttaagataga

SEQ ID NO: 237478 - DNA, 13 bp, Artificial Sequence
  Oligonucleotide for detection of SNP TSC0057920
tctatcttaaacg

SEQ ID NO: 237479 - DNA, 13 bp, Artificial Sequence
  Oligonucleotide for detection of SNP TSC0057920
cgtttaggataga

SEQ ID NO: 237480 - DNA, 13 bp, Artificial Sequence
  Oligonucleotide for detection of SNP TSC0057920
tctatcctaaacg

SEQ ID NO: 237481 - DNA, 13 bp, Artificial Sequence
  Oligonucleotide for detection of SNP TSC0057921
aattaaaaagaaa

SEQ ID NO: 237482 - DNA, 13 bp, Artificial Sequence
  Oligonucleotide for detection of SNP TSC0057921
tttctttttaatt

SEQ ID NO: 237483 - DNA, 13 bp, Artificial Sequence
  Oligonucleotide for detection of SNP TSC0057921
aattaagaagaaa

SEQ ID NO: 237484 - DNA, 13 bp, Artificial Sequence
  Oligonucleotide for detection of SNP TSC0057921
tttcttcttaatt

SEQ ID NO: 237485 - DNA, 13 bp, Artificial Sequence
  Oligonucleotide for detection of SNP TSC0057922
aggaagatgatag

SEQ ID NO: 237486 - DNA, 13 bp, Artificial Sequence
  Oligonucleotide for detection of SNP TSC0057922
ctatcatcttcct

SEQ ID NO: 237487 - DNA, 13 bp, Artificial Sequence
  Oligonucleotide for detection of SNP TSC0057922
aggaaggtgatag

SEQ ID NO: 237488 - DNA, 13 bp, Artificial Sequence
  Oligonucleotide for detection of SNP TSC0057922
ctatcaccttcct

SEQ ID NO: 237489 - DNA, 13 bp, Artificial Sequence
  Oligonucleotide for detection of SNP TSC0057923
taatgtatagtta

SEQ ID NO: 237490 - DNA, 13 bp, Artificial Sequence
  Oligonucleotide for detection of SNP TSC0057923
taactatacatta

SEQ ID NO: 237491 - DNA, 13 bp, Artificial Sequence
  Oligonucleotide for detection of SNP TSC0057923
taatgtgtagtta

SEQ ID NO: 237492 - DNA, 13 bp, Artificial Sequence
  Oligonucleotide for detection of SNP TSC0057923
taactacacatta

SEQ ID NO: 237493 - DNA, 13 bp, Artificial Sequence
  Oligonucleotide for detection of SNP TSC0057923
taacgtatagtta

SEQ ID NO: 237494 - DNA, 13 bp, Artificial Sequence
  Oligonucleotide for detection of SNP TSC0057923
taactatacgtta

SEQ ID NO: 237495 - DNA, 13 bp, Artificial Sequence
  Oligonucleotide for detection of SNP TSC0057923
taacgtgtagtta

SEQ ID NO: 237496 - DNA, 13 bp, Artificial Sequence
  Oligonucleotide for detection of SNP TSC0057923
taactacacgtta

SEQ ID NO: 237497 - DNA, 13 bp, Artificial Sequence
  Oligonucleotide for detection of SNP TSC0005325
ttggagtgattgy

SEQ ID NO: 237498 - DNA, 13 bp, Artificial Sequence
  Oligonucleotide for detection of SNP TSC0005325
rcaatcactccaa

SEQ ID NO: 237499 - DNA, 13 bp, Artificial Sequence
  Oligonucleotide for detection of SNP TSC0005325
ttggagcgattgy

SEQ ID NO: 237500 - DNA, 13 bp, Artificial Sequence
  Oligonucleotide for detection of SNP TSC0005325
rcaatcgctccaa

SEQ ID NO: 237501 - DNA, 13 bp, Artificial Sequence
  Oligonucleotide for detection of SNP TSC0005325
gtagttgttttaa

SEQ ID NO: 237502 - DNA, 13 bp, Artificial Sequence
  Oligonucleotide for detection of SNP TSC0005325
ttaaaacaactac

SEQ ID NO: 237503 - DNA, 13 bp, Artificial Sequence
  Oligonucleotide for detection of SNP TSC0005325
gtagttattttaa

SEQ ID NO: 237504 - DNA, 13 bp, Artificial Sequence
  Oligonucleotide for detection of SNP TSC0005325
ttaaaataactac

SEQ ID NO: 237505 - DNA, 13 bp, Artificial Sequence
  Oligonucleotide for detection of SNP TSC0005325
gtagtcgttttaa

SEQ ID NO: 237506 - DNA, 13 bp, Artificial Sequence
  Oligonucleotide for detection of SNP TSC0005325
ttaaaacgactac

SEQ ID NO: 237507 - DNA, 13 bp, Artificial Sequence
  Oligonucleotide for detection of SNP TSC0057925
ataaggtaataat

SEQ ID NO: 237508 - DNA, 13 bp, Artificial Sequence
  Oligonucleotide for detection of SNP TSC0057925
attattaccttat

SEQ ID NO: 237509 - DNA, 13 bp, Artificial Sequence
  Oligonucleotide for detection of SNP TSC0057925
ataagggaataat

SEQ ID NO: 237510 - DNA, 13 bp, Artificial Sequence
  Oligonucleotide for detection of SNP TSC0057925
attattcccttat

SEQ ID NO: 237511 - DNA, 13 bp, Artificial Sequence
  Oligonucleotide for detection of SNP TSC0057926
attttaaagttay

SEQ ID NO: 237512 - DNA, 13 bp, Artificial Sequence
  Oligonucleotide for detection of SNP TSC0057926
rtaactttaaaat

SEQ ID NO: 237513 - DNA, 13 bp, Artificial Sequence
  Oligonucleotide for detection of SNP TSC0057926
attttatagttay

SEQ ID NO: 237514 - DNA, 13 bp, Artificial Sequence
  Oligonucleotide for detection of SNP TSC0057926
rtaactataaaat

SEQ ID NO: 237515 - DNA, 13 bp, Artificial Sequence
  Oligonucleotide for detection of SNP TSC0057926
gtgattttgaagt

SEQ ID NO: 237516 - DNA, 13 bp, Artificial Sequence
  Oligonucleotide for detection of SNP TSC0057926
acttcaaaatcac

SEQ ID NO: 237517 - DNA, 13 bp, Artificial Sequence
  Oligonucleotide for detection of SNP TSC0057926
gtgattgtgaagt

SEQ ID NO: 237518 - DNA, 13 bp, Artificial Sequence
  Oligonucleotide for detection of SNP TSC0057926
acttcacaatcac

SEQ ID NO: 237519 - DNA, 13 bp, Artificial Sequence
  Oligonucleotide for detection of SNP TSC0057927
ttataattattaa

SEQ ID NO: 237520 - DNA, 13 bp, Artificial Sequence
  Oligonucleotide for detection of SNP TSC0057927
ttaataattataa

SEQ ID NO: 237521 - DNA, 13 bp, Artificial Sequence
  Oligonucleotide for detection of SNP TSC0057927
ttagtgtttatag

SEQ ID NO: 237522 - DNA, 13 bp, Artificial Sequence
  Oligonucleotide for detection of SNP TSC0057927
ctataaacactaa

SEQ ID NO: 237523 - DNA, 13 bp, Artificial Sequence
  Oligonucleotide for detection of SNP TSC0057927
ttagtggttatag

SEQ ID NO: 237524 - DNA, 13 bp, Artificial Sequence
  Oligonucleotide for detection of SNP TSC0057927
ctataaccactaa

SEQ ID NO: 237525 - DNA, 13 bp, Artificial Sequence
  Oligonucleotide for detection of SNP TSC0057928
atatttattagtt

SEQ ID NO: 237526 - DNA, 13 bp, Artificial Sequence
  Oligonucleotide for detection of SNP TSC0057928
aactaataaatat

SEQ ID NO: 237527 - DNA, 13 bp, Artificial Sequence
  Oligonucleotide for detection of SNP TSC0057928
atattttttagtt

SEQ ID NO: 237528 - DNA, 13 bp, Artificial Sequence
  Oligonucleotide for detection of SNP TSC0057928
aactaaaaaatat

SEQ ID NO: 237529 - DNA, 13 bp, Artificial Sequence
  Oligonucleotide for detection of SNP TSC0057928
agttgataaatat

SEQ ID NO: 237530 - DNA, 13 bp, Artificial Sequence
  Oligonucleotide for detection of SNP TSC0057928
atatttatcaact

SEQ ID NO: 237531 - DNA, 13 bp, Artificial Sequence
  Oligonucleotide for detection of SNP TSC0057928
agttgaaaaatat

SEQ ID NO: 237532 - DNA, 13 bp, Artificial Sequence
  Oligonucleotide for detection of SNP TSC0057928
atatttttcaact

SEQ ID NO: 237533 - DNA, 13 bp, Artificial Sequence
  Oligonucleotide for detection of SNP TSC0057929
tttttgaatttag

SEQ ID NO: 237534 - DNA, 13 bp, Artificial Sequence
  Oligonucleotide for detection of SNP TSC0057929
ctaaattcaaaaa

SEQ ID NO: 237535 - DNA, 13 bp, Artificial Sequence
  Oligonucleotide for detection of SNP TSC0057929
tttttggatttag

SEQ ID NO: 237536 - DNA, 13 bp, Artificial Sequence
  Oligonucleotide for detection of SNP TSC0057929
ctaaatccaaaaa

SEQ ID NO: 237537 - DNA, 13 bp, Artificial Sequence
  Oligonucleotide for detection of SNP TSC0057929
ttttcgaatttag

SEQ ID NO: 237538 - DNA, 13 bp, Artificial Sequence
  Oligonucleotide for detection of SNP TSC0057929
ctaaattcgaaaa

SEQ ID NO: 237539 - DNA, 13 bp, Artificial Sequence
  Oligonucleotide for detection of SNP TSC0057929
ttttcggatttag

SEQ ID NO: 237540 - DNA, 13 bp, Artificial Sequence
  Oligonucleotide for detection of SNP TSC0057929
ctaaatccgaaaa

SEQ ID NO: 237541 - DNA, 13 bp, Artificial Sequence
  Oligonucleotide for detection of SNP TSC0057931
tgttttgtttagg

SEQ ID NO: 237542 - DNA, 13 bp, Artificial Sequence
  Oligonucleotide for detection of SNP TSC0057931
cctaaacaaaaca

SEQ ID NO: 237543 - DNA, 13 bp, Artificial Sequence
  Oligonucleotide for detection of SNP TSC0057931
tgttttatttagg

SEQ ID NO: 237544 - DNA, 13 bp, Artificial Sequence
  Oligonucleotide for detection of SNP TSC0057931
cctaaataaaaca

SEQ ID NO: 237545 - DNA, 13 bp, Artificial Sequence
  Oligonucleotide for detection of SNP TSC0057932
gtttaagtttgaa

SEQ ID NO: 237546 - DNA, 13 bp, Artificial Sequence
  Oligonucleotide for detection of SNP TSC0057932
ttcaaacttaaac

SEQ ID NO: 237547 - DNA, 13 bp, Artificial Sequence
  Oligonucleotide for detection of SNP TSC0057932
gtttaaatttgaa

SEQ ID NO: 237548 - DNA, 13 bp, Artificial Sequence
  Oligonucleotide for detection of SNP TSC0057932
ttcaaatttaaac

SEQ ID NO: 237549 - DNA, 13 bp, Artificial Sequence
  Oligonucleotide for detection of SNP TSC0057932
gtttaagttcgaa

SEQ ID NO: 237550 - DNA, 13 bp, Artificial Sequence
  Oligonucleotide for detection of SNP TSC0057932
ttcgaacttaaac

SEQ ID NO: 237551 - DNA, 13 bp, Artificial Sequence
  Oligonucleotide for detection of SNP TSC0057932
gtttaaattcgaa

SEQ ID NO: 237552 - DNA, 13 bp, Artificial Sequence
  Oligonucleotide for detection of SNP TSC0057932
ttcgaatttaaac

SEQ ID NO: 237553 - DNA, 13 bp, Artificial Sequence
  Oligonucleotide for detection of SNP TSC0057934
gttttttattttg

SEQ ID NO: 237554 - DNA, 13 bp, Artificial Sequence
  Oligonucleotide for detection of SNP TSC0057934
caaaataaaaaac

SEQ ID NO: 237555 - DNA, 13 bp, Artificial Sequence
  Oligonucleotide for detection of SNP TSC0057934
gtttttgattttg

SEQ ID NO: 237556 - DNA, 13 bp, Artificial Sequence
  Oligonucleotide for detection of SNP TSC0057934
caaaatcaaaaac

SEQ ID NO: 237557 - DNA, 13 bp, Artificial Sequence
  Oligonucleotide for detection of SNP TSC0057936
ttatattaattga

SEQ ID NO: 237558 - DNA, 13 bp, Artificial Sequence
  Oligonucleotide for detection of SNP TSC0057936
tcaattaatataa

SEQ ID NO: 237559 - DNA, 13 bp, Artificial Sequence
  Oligonucleotide for detection of SNP TSC0057936
ttatatgaattga

SEQ ID NO: 237560 - DNA, 13 bp, Artificial Sequence
  Oligonucleotide for detection of SNP TSC0057936
tcaattcatataa

SEQ ID NO: 237561 - DNA, 13 bp, Artificial Sequence
  Oligonucleotide for detection of SNP TSC0057936
ttagttaatgtaa

SEQ ID NO: 237562 - DNA, 13 bp, Artificial Sequence
  Oligonucleotide for detection of SNP TSC0057936
ttacattaactaa

SEQ ID NO: 237563 - DNA, 13 bp, Artificial Sequence
  Oligonucleotide for detection of SNP TSC0057936
ttagtttatgtaa

SEQ ID NO: 237564 - DNA, 13 bp, Artificial Sequence
  Oligonucleotide for detection of SNP TSC0057936
ttacataaactaa

SEQ ID NO: 237565 - DNA, 13 bp, Artificial Sequence
  Oligonucleotide for detection of SNP TSC0057937
tgttttagagtta

SEQ ID NO: 237566 - DNA, 13 bp, Artificial Sequence
  Oligonucleotide for detection of SNP TSC0057937
taactctaaaaca

SEQ ID NO: 237567 - DNA, 13 bp, Artificial Sequence
  Oligonucleotide for detection of SNP TSC0057937
tgttttggagtta

SEQ ID NO: 237568 - DNA, 13 bp, Artificial Sequence
  Oligonucleotide for detection of SNP TSC0057937
taactccaaaaca

SEQ ID NO: 237569 - DNA, 13 bp, Artificial Sequence
  Oligonucleotide for detection of SNP TSC0057937
tgtttcggagtta

SEQ ID NO: 237570 - DNA, 13 bp, Artificial Sequence
  Oligonucleotide for detection of SNP TSC0057937
taactccgaaaca

SEQ ID NO: 237571 - DNA, 13 bp, Artificial Sequence
  Oligonucleotide for detection of SNP TSC0057937
tgattttgaaata

SEQ ID NO: 237572 - DNA, 13 bp, Artificial Sequence
  Oligonucleotide for detection of SNP TSC0057937
tatttcaaaatca

SEQ ID NO: 237573 - DNA, 13 bp, Artificial Sequence
  Oligonucleotide for detection of SNP TSC0057937
tgatttcgaaata

SEQ ID NO: 237574 - DNA, 13 bp, Artificial Sequence
  Oligonucleotide for detection of SNP TSC0057937
tatttcgaaatca

SEQ ID NO: 237575 - DNA, 13 bp, Artificial Sequence
  Oligonucleotide for detection of SNP TSC0057939
agttatagatttg

SEQ ID NO: 237576 - DNA, 13 bp, Artificial Sequence
  Oligonucleotide for detection of SNP TSC0057939
caaatctataact

SEQ ID NO: 237577 - DNA, 13 bp, Artificial Sequence
  Oligonucleotide for detection of SNP TSC0057939
taaatttgtaatt

SEQ ID NO: 237578 - DNA, 13 bp, Artificial Sequence
  Oligonucleotide for detection of SNP TSC0057939
aattacaaattta

SEQ ID NO: 237579 - DNA, 13 bp, Artificial Sequence
  Oligonucleotide for detection of SNP TSC0057939
taaattagtaatt

SEQ ID NO: 237580 - DNA, 13 bp, Artificial Sequence
  Oligonucleotide for detection of SNP TSC0057939
aattactaattta

SEQ ID NO: 237581 - DNA, 13 bp, Artificial Sequence
  Oligonucleotide for detection of SNP TSC0057940
aaagagatttatt

SEQ ID NO: 237582 - DNA, 13 bp, Artificial Sequence
  Oligonucleotide for detection of SNP TSC0057940
aataaatctcttt

SEQ ID NO: 237583 - DNA, 13 bp, Artificial Sequence
  Oligonucleotide for detection of SNP TSC0057940
aaagagttttatt

SEQ ID NO: 237584 - DNA, 13 bp, Artificial Sequence
  Oligonucleotide for detection of SNP TSC0057940
aataaaactcttt

SEQ ID NO: 237585 - DNA, 13 bp, Artificial Sequence
  Oligonucleotide for detection of SNP TSC0057941
attagaatttttt

SEQ ID NO: 237586 - DNA, 13 bp, Artificial Sequence
  Oligonucleotide for detection of SNP TSC0057941
aaaaaattctaat

SEQ ID NO: 237587 - DNA, 13 bp, Artificial Sequence
  Oligonucleotide for detection of SNP TSC0057941
attagattttttt

SEQ ID NO: 237588 - DNA, 13 bp, Artificial Sequence
  Oligonucleotide for detection of SNP TSC0057941
aaaaaaatctaat

SEQ ID NO: 237589 - DNA, 13 bp, Artificial Sequence
  Oligonucleotide for detection of SNP TSC0057941
agagagttttaat

SEQ ID NO: 237590 - DNA, 13 bp, Artificial Sequence
  Oligonucleotide for detection of SNP TSC0057941
attaaaactctct

SEQ ID NO: 237591 - DNA, 13 bp, Artificial Sequence
  Oligonucleotide for detection of SNP TSC0057941
agagaggtttaat

SEQ ID NO: 237592 - DNA, 13 bp, Artificial Sequence
  Oligonucleotide for detection of SNP TSC0057941
attaaacctctct

SEQ ID NO: 237593 - DNA, 13 bp, Artificial Sequence
  Oligonucleotide for detection of SNP TSC0057942
ttttaagttgtay

SEQ ID NO: 237594 - DNA, 13 bp, Artificial Sequence
  Oligonucleotide for detection of SNP TSC0057942
rtacaacttaaaa

SEQ ID NO: 237595 - DNA, 13 bp, Artificial Sequence
  Oligonucleotide for detection of SNP TSC0057942
ttttaaattgtay

SEQ ID NO: 237596 - DNA, 13 bp, Artificial Sequence
  Oligonucleotide for detection of SNP TSC0057942
rtacaatttaaaa

SEQ ID NO: 237597 - DNA, 13 bp, Artificial Sequence
  Oligonucleotide for detection of SNP TSC0057943
ttaattattagga

SEQ ID NO: 237598 - DNA, 13 bp, Artificial Sequence
  Oligonucleotide for detection of SNP TSC0057943
tcctaataattaa

SEQ ID NO: 237599 - DNA, 13 bp, Artificial Sequence
  Oligonucleotide for detection of SNP TSC0057943
ttaatttttagga

SEQ ID NO: 237600 - DNA, 13 bp, Artificial Sequence
  Oligonucleotide for detection of SNP TSC0057943
tcctaaaaattaa

SEQ ID NO: 237601 - DNA, 13 bp, Artificial Sequence
  Oligonucleotide for detection of SNP TSC0057943
ttttggtagttaa

SEQ ID NO: 237602 - DNA, 13 bp, Artificial Sequence
  Oligonucleotide for detection of SNP TSC0057943
ttaactaccaaaa

SEQ ID NO: 237603 - DNA, 13 bp, Artificial Sequence
  Oligonucleotide for detection of SNP TSC0057943
ttttggaagttaa

SEQ ID NO: 237604 - DNA, 13 bp, Artificial Sequence
  Oligonucleotide for detection of SNP TSC0057943
ttaacttccaaaa

SEQ ID NO: 237605 - DNA, 13 bp, Artificial Sequence
  Oligonucleotide for detection of SNP TSC0057944
taaattattttgt

SEQ ID NO: 237606 - DNA, 13 bp, Artificial Sequence
  Oligonucleotide for detection of SNP TSC0057944
acaaaataattta

SEQ ID NO: 237607 - DNA, 13 bp, Artificial Sequence
  Oligonucleotide for detection of SNP TSC0057944
taaattgttttgt

SEQ ID NO: 237608 - DNA, 13 bp, Artificial Sequence
  Oligonucleotide for detection of SNP TSC0057944
acaaaacaattta

SEQ ID NO: 237609 - DNA, 13 bp, Artificial Sequence
  Oligonucleotide for detection of SNP TSC0057944
taaatcgttttgt

SEQ ID NO: 237610 - DNA, 13 bp, Artificial Sequence
  Oligonucleotide for detection of SNP TSC0057944
acaaaacgattta

SEQ ID NO: 237611 - DNA, 13 bp, Artificial Sequence
  Oligonucleotide for detection of SNP TSC0057944
ataaagtggttta

SEQ ID NO: 237612 - DNA, 13 bp, Artificial Sequence
  Oligonucleotide for detection of SNP TSC0057944
taaaccactttat

SEQ ID NO: 237613 - DNA, 13 bp, Artificial Sequence
  Oligonucleotide for detection of SNP TSC0057944
ataaagcggttta

SEQ ID NO: 237614 - DNA, 13 bp, Artificial Sequence
  Oligonucleotide for detection of SNP TSC0057944
taaaccgctttat

SEQ ID NO: 237615 - DNA, 13 bp, Artificial Sequence
  Oligonucleotide for detection of SNP TSC0057945
ttaaattgttttg

SEQ ID NO: 237616 - DNA, 13 bp, Artificial Sequence
  Oligonucleotide for detection of SNP TSC0057945
caaaacaatttaa

SEQ ID NO: 237617 - DNA, 13 bp, Artificial Sequence
  Oligonucleotide for detection of SNP TSC0057945
ttaaatcgttttg

SEQ ID NO: 237618 - DNA, 13 bp, Artificial Sequence
  Oligonucleotide for detection of SNP TSC0057945
caaaacgatttaa

SEQ ID NO: 237619 - DNA, 13 bp, Artificial Sequence
  Oligonucleotide for detection of SNP TSC0057945
taaagtggtttag

SEQ ID NO: 237620 - DNA, 13 bp, Artificial Sequence
  Oligonucleotide for detection of SNP TSC0057945
ctaaaccacttta

SEQ ID NO: 237621 - DNA, 13 bp, Artificial Sequence
  Oligonucleotide for detection of SNP TSC0057945
taaagtagtttag

SEQ ID NO: 237622 - DNA, 13 bp, Artificial Sequence
  Oligonucleotide for detection of SNP TSC0057945
ctaaactacttta

SEQ ID NO: 237623 - DNA, 13 bp, Artificial Sequence
  Oligonucleotide for detection of SNP TSC0057945
taaagcggtttag

SEQ ID NO: 237624 - DNA, 13 bp, Artificial Sequence
  Oligonucleotide for detection of SNP TSC0057945
ctaaaccgcttta

SEQ ID NO: 237625 - DNA, 13 bp, Artificial Sequence
  Oligonucleotide for detection of SNP TSC0057946
attaagtgtttat

SEQ ID NO: 237626 - DNA, 13 bp, Artificial Sequence
  Oligonucleotide for detection of SNP TSC0057946
ataaacacttaat

SEQ ID NO: 237627 - DNA, 13 bp, Artificial Sequence
  Oligonucleotide for detection of SNP TSC0057946
attaagcgtttat

SEQ ID NO: 237628 - DNA, 13 bp, Artificial Sequence
  Oligonucleotide for detection of SNP TSC0057946
ataaacgcttaat

SEQ ID NO: 237629 - DNA, 13 bp, Artificial Sequence
  Oligonucleotide for detection of SNP TSC0057946
ataagtgtttgat

SEQ ID NO: 237630 - DNA, 13 bp, Artificial Sequence
  Oligonucleotide for detection of SNP TSC0057946
atcaaacacttat

SEQ ID NO: 237631 - DNA, 13 bp, Artificial Sequence
  Oligonucleotide for detection of SNP TSC0057946
ataagtatttgat

SEQ ID NO: 237632 - DNA, 13 bp, Artificial Sequence
  Oligonucleotide for detection of SNP TSC0057946
atcaaatacttat

SEQ ID NO: 237633 - DNA, 13 bp, Artificial Sequence
  Oligonucleotide for detection of SNP TSC0057946
ataagcgtttgat

SEQ ID NO: 237634 - DNA, 13 bp, Artificial Sequence
  Oligonucleotide for detection of SNP TSC0057946
atcaaacgcttat

SEQ ID NO: 237635 - DNA, 13 bp, Artificial Sequence
  Oligonucleotide for detection of SNP TSC0057947
taaaatgaaatta

SEQ ID NO: 237636 - DNA, 13 bp, Artificial Sequence
  Oligonucleotide for detection of SNP TSC0057947
taatttcatttta

SEQ ID NO: 237637 - DNA, 13 bp, Artificial Sequence
  Oligonucleotide for detection of SNP TSC0057948
atattatgtgtgy

SEQ ID NO: 237638 - DNA, 13 bp, Artificial Sequence
  Oligonucleotide for detection of SNP TSC0057948
rcacacataatat

SEQ ID NO: 237639 - DNA, 13 bp, Artificial Sequence
  Oligonucleotide for detection of SNP TSC0057948
atattacgtgtgy

SEQ ID NO: 237640 - DNA, 13 bp, Artificial Sequence
  Oligonucleotide for detection of SNP TSC0057948
rcacacgtaatat

SEQ ID NO: 237641 - DNA, 13 bp, Artificial Sequence
  Oligonucleotide for detection of SNP TSC0057948
gtatatgtagtat

SEQ ID NO: 237642 - DNA, 13 bp, Artificial Sequence
  Oligonucleotide for detection of SNP TSC0057948
atactacatatac

SEQ ID NO: 237643 - DNA, 13 bp, Artificial Sequence
  Oligonucleotide for detection of SNP TSC0057948
gtatatatagtat

SEQ ID NO: 237644 - DNA, 13 bp, Artificial Sequence
  Oligonucleotide for detection of SNP TSC0057948
atactatatatac

SEQ ID NO: 237645 - DNA, 13 bp, Artificial Sequence
  Oligonucleotide for detection of SNP TSC0057948
gtatacgtagtat

SEQ ID NO: 237646 - DNA, 13 bp, Artificial Sequence
  Oligonucleotide for detection of SNP TSC0057948
atactacgtatac

SEQ ID NO: 237647 - DNA, 13 bp, Artificial Sequence
  Oligonucleotide for detection of SNP TSC0057956
ttttagtaaattt

SEQ ID NO: 237648 - DNA, 13 bp, Artificial Sequence
  Oligonucleotide for detection of SNP TSC0057956
aaatttactaaaa

SEQ ID NO: 237649 - DNA, 13 bp, Artificial Sequence
  Oligonucleotide for detection of SNP TSC0057956
ttttaggaaattt

SEQ ID NO: 237650 - DNA, 13 bp, Artificial Sequence
  Oligonucleotide for detection of SNP TSC0057956
aaatttcctaaaa

SEQ ID NO: 237651 - DNA, 13 bp, Artificial Sequence
  Oligonucleotide for detection of SNP TSC0057956
aaatttattaaaa

SEQ ID NO: 237652 - DNA, 13 bp, Artificial Sequence
  Oligonucleotide for detection of SNP TSC0057956
ttttaataaattt

SEQ ID NO: 237653 - DNA, 13 bp, Artificial Sequence
  Oligonucleotide for detection of SNP TSC0057956
aaattttttaaaa

SEQ ID NO: 237654 - DNA, 13 bp, Artificial Sequence
  Oligonucleotide for detection of SNP TSC0057956
ttttaaaaaattt

SEQ ID NO: 237655 - DNA, 13 bp, Artificial Sequence
  Oligonucleotide for detection of SNP TSC0057959
ttattaataatta

SEQ ID NO: 237656 - DNA, 13 bp, Artificial Sequence
  Oligonucleotide for detection of SNP TSC0057959
taattattaataa

SEQ ID NO: 237657 - DNA, 13 bp, Artificial Sequence
  Oligonucleotide for detection of SNP TSC0057959
ttattagtaatta

SEQ ID NO: 237658 - DNA, 13 bp, Artificial Sequence
  Oligonucleotide for detection of SNP TSC0057959
taattactaataa

SEQ ID NO: 237659 - DNA, 13 bp, Artificial Sequence
  Oligonucleotide for detection of SNP TSC0057961
tttaaagtaagaa

SEQ ID NO: 237660 - DNA, 13 bp, Artificial Sequence
  Oligonucleotide for detection of SNP TSC0057961
ttcttactttaaa

SEQ ID NO: 237661 - DNA, 13 bp, Artificial Sequence
  Oligonucleotide for detection of SNP TSC0057961
tttaaaataagaa

SEQ ID NO: 237662 - DNA, 13 bp, Artificial Sequence
  Oligonucleotide for detection of SNP TSC0057961
ttcttattttaaa

SEQ ID NO: 237663 - DNA, 13 bp, Artificial Sequence
  Oligonucleotide for detection of SNP TSC0057962
ttattaaaaattt

SEQ ID NO: 237664 - DNA, 13 bp, Artificial Sequence
  Oligonucleotide for detection of SNP TSC0057962
aaatttttaataa

SEQ ID NO: 237665 - DNA, 13 bp, Artificial Sequence
  Oligonucleotide for detection of SNP TSC0057962
ttattagaaattt

SEQ ID NO: 237666 - DNA, 13 bp, Artificial Sequence
  Oligonucleotide for detection of SNP TSC0057962
aaatttctaataa

SEQ ID NO: 237667 - DNA, 13 bp, Artificial Sequence
  Oligonucleotide for detection of SNP TSC0057966
aagagggtgaaty

SEQ ID NO: 237668 - DNA, 13 bp, Artificial Sequence
  Oligonucleotide for detection of SNP TSC0057966
rattcaccctctt

SEQ ID NO: 237669 - DNA, 13 bp, Artificial Sequence
  Oligonucleotide for detection of SNP TSC0057966
aagaggatgaaty

SEQ ID NO: 237670 - DNA, 13 bp, Artificial Sequence
  Oligonucleotide for detection of SNP TSC0057966
rattcatcctctt

SEQ ID NO: 237671 - DNA, 13 bp, Artificial Sequence
  Oligonucleotide for detection of SNP TSC0006492
taagaggaagata

SEQ ID NO: 237672 - DNA, 13 bp, Artificial Sequence
  Oligonucleotide for detection of SNP TSC0006492
tatcttcctctta

SEQ ID NO: 237673 - DNA, 13 bp, Artificial Sequence
  Oligonucleotide for detection of SNP TSC0006492
taagagaaagata

SEQ ID NO: 237674 - DNA, 13 bp, Artificial Sequence
  Oligonucleotide for detection of SNP TSC0006492
tatctttctctta

SEQ ID NO: 237675 - DNA, 13 bp, Artificial Sequence
  Oligonucleotide for detection of SNP TSC0057968
aaaattaaatatg

SEQ ID NO: 237676 - DNA, 13 bp, Artificial Sequence
  Oligonucleotide for detection of SNP TSC0057968
catatttaatttt

SEQ ID NO: 237677 - DNA, 13 bp, Artificial Sequence
  Oligonucleotide for detection of SNP TSC0057968
aaaattgaatatg

SEQ ID NO: 237678 - DNA, 13 bp, Artificial Sequence
  Oligonucleotide for detection of SNP TSC0057968
catattcaatttt

SEQ ID NO: 237679 - DNA, 13 bp, Artificial Sequence
  Oligonucleotide for detection of SNP TSC0057973
tataagagaagtg

SEQ ID NO: 237680 - DNA, 13 bp, Artificial Sequence
  Oligonucleotide for detection of SNP TSC0057973
cacttctcttata

SEQ ID NO: 237681 - DNA, 13 bp, Artificial Sequence
  Oligonucleotide for detection of SNP TSC0057973
tataagtgaagtg

SEQ ID NO: 237682 - DNA, 13 bp, Artificial Sequence
  Oligonucleotide for detection of SNP TSC0057973
cacttcacttata

SEQ ID NO: 237683 - DNA, 13 bp, Artificial Sequence
  Oligonucleotide for detection of SNP TSC0057975
ttttttagtagta

SEQ ID NO: 237684 - DNA, 13 bp, Artificial Sequence
  Oligonucleotide for detection of SNP TSC0057975
tactactaaaaaa

SEQ ID NO: 237685 - DNA, 13 bp, Artificial Sequence
  Oligonucleotide for detection of SNP TSC0057975
ttttttggtagta

SEQ ID NO: 237686 - DNA, 13 bp, Artificial Sequence
  Oligonucleotide for detection of SNP TSC0057975
tactaccaaaaaa

SEQ ID NO: 237687 - DNA, 13 bp, Artificial Sequence
  Oligonucleotide for detection of SNP TSC0057975
tttttcggtagta

SEQ ID NO: 237688 - DNA, 13 bp, Artificial Sequence
  Oligonucleotide for detection of SNP TSC0057975
tactaccgaaaaa

SEQ ID NO: 237689 - DNA, 13 bp, Artificial Sequence
  Oligonucleotide for detection of SNP TSC0057975
tattattggagag

SEQ ID NO: 237690 - DNA, 13 bp, Artificial Sequence
  Oligonucleotide for detection of SNP TSC0057975
ctctccaataata

SEQ ID NO: 237691 - DNA, 13 bp, Artificial Sequence
  Oligonucleotide for detection of SNP TSC0057975
tattatcggagag

SEQ ID NO: 237692 - DNA, 13 bp, Artificial Sequence
  Oligonucleotide for detection of SNP TSC0057975
ctctccgataata

SEQ ID NO: 237693 - DNA, 13 bp, Artificial Sequence
  Oligonucleotide for detection of SNP TSC0057976
tttagattattta

SEQ ID NO: 237694 - DNA, 13 bp, Artificial Sequence
  Oligonucleotide for detection of SNP TSC0057976
taaataatctaaa

SEQ ID NO: 237695 - DNA, 13 bp, Artificial Sequence
  Oligonucleotide for detection of SNP TSC0057976
tagatgttttaag

SEQ ID NO: 237696 - DNA, 13 bp, Artificial Sequence
  Oligonucleotide for detection of SNP TSC0057976
cttaaaacatcta

SEQ ID NO: 237697 - DNA, 13 bp, Artificial Sequence
  Oligonucleotide for detection of SNP TSC0057976
tagatggtttaag

SEQ ID NO: 237698 - DNA, 13 bp, Artificial Sequence
  Oligonucleotide for detection of SNP TSC0057976
cttaaaccatcta

SEQ ID NO: 237699 - DNA, 13 bp, Artificial Sequence
  Oligonucleotide for detection of SNP TSC0057978
gttatatttggga

SEQ ID NO: 237700 - DNA, 13 bp, Artificial Sequence
  Oligonucleotide for detection of SNP TSC0057978
tcccaaatataac

SEQ ID NO: 237701 - DNA, 13 bp, Artificial Sequence
  Oligonucleotide for detection of SNP TSC0057978
gttatagttggga

SEQ ID NO: 237702 - DNA, 13 bp, Artificial Sequence
  Oligonucleotide for detection of SNP TSC0057978
tcccaactataac

SEQ ID NO: 237703 - DNA, 13 bp, Artificial Sequence
  Oligonucleotide for detection of SNP TSC0057978
ttttaaatatgay

SEQ ID NO: 237704 - DNA, 13 bp, Artificial Sequence
  Oligonucleotide for detection of SNP TSC0057978
rtcatatttaaaa

SEQ ID NO: 237705 - DNA, 13 bp, Artificial Sequence
  Oligonucleotide for detection of SNP TSC0057978
ttttaattatgay

SEQ ID NO: 237706 - DNA, 13 bp, Artificial Sequence
  Oligonucleotide for detection of SNP TSC0057978
rtcataattaaaa

SEQ ID NO: 237707 - DNA, 13 bp, Artificial Sequence
  Oligonucleotide for detection of SNP TSC0057979
taggatattgaay

SEQ ID NO: 237708 - DNA, 13 bp, Artificial Sequence
  Oligonucleotide for detection of SNP TSC0057979
rttcaatatccta

SEQ ID NO: 237709 - DNA, 13 bp, Artificial Sequence
  Oligonucleotide for detection of SNP TSC0057979
taggatgttgaay

SEQ ID NO: 237710 - DNA, 13 bp, Artificial Sequence
  Oligonucleotide for detection of SNP TSC0057979
rttcaacatccta

SEQ ID NO: 237711 - DNA, 13 bp, Artificial Sequence
  Oligonucleotide for detection of SNP TSC0057979
taggacgttgaay

SEQ ID NO: 237712 - DNA, 13 bp, Artificial Sequence
  Oligonucleotide for detection of SNP TSC0057979
rttcaacgtccta

SEQ ID NO: 237713 - DNA, 13 bp, Artificial Sequence
  Oligonucleotide for detection of SNP TSC0057979
gtttaatgttttg

SEQ ID NO: 237714 - DNA, 13 bp, Artificial Sequence
  Oligonucleotide for detection of SNP TSC0057979
caaaacattaaac

SEQ ID NO: 237715 - DNA, 13 bp, Artificial Sequence
  Oligonucleotide for detection of SNP TSC0057979
gtttaacgttttg

SEQ ID NO: 237716 - DNA, 13 bp, Artificial Sequence
  Oligonucleotide for detection of SNP TSC0057979
caaaacgttaaac

SEQ ID NO: 237717 - DNA, 13 bp, Artificial Sequence
  Oligonucleotide for detection of SNP TSC0057981
atttacgtaatta

SEQ ID NO: 237718 - DNA, 13 bp, Artificial Sequence
  Oligonucleotide for detection of SNP TSC0057981
taattacgtaaat

SEQ ID NO: 237719 - DNA, 13 bp, Artificial Sequence
  Oligonucleotide for detection of SNP TSC0057981
tgattgtgtaaat

SEQ ID NO: 237720 - DNA, 13 bp, Artificial Sequence
  Oligonucleotide for detection of SNP TSC0057981
atttacacaatca

SEQ ID NO: 237721 - DNA, 13 bp, Artificial Sequence
  Oligonucleotide for detection of SNP TSC0057981
tgattgcgtaaat

SEQ ID NO: 237722 - DNA, 13 bp, Artificial Sequence
  Oligonucleotide for detection of SNP TSC0057981
atttacgcaatca

SEQ ID NO: 237723 - DNA, 13 bp, Artificial Sequence
  Oligonucleotide for detection of SNP TSC0057983
tagttcgtagtty

SEQ ID NO: 237724 - DNA, 13 bp, Artificial Sequence
  Oligonucleotide for detection of SNP TSC0057983
raactacgaacta

SEQ ID NO: 237725 - DNA, 13 bp, Artificial Sequence
  Oligonucleotide for detection of SNP TSC0057983
gggttgtgggttg

SEQ ID NO: 237726 - DNA, 13 bp, Artificial Sequence
  Oligonucleotide for detection of SNP TSC0057983
caacccacaaccc

SEQ ID NO: 237727 - DNA, 13 bp, Artificial Sequence
  Oligonucleotide for detection of SNP TSC0057983
gggttgcgggttg

SEQ ID NO: 237728 - DNA, 13 bp, Artificial Sequence
  Oligonucleotide for detection of SNP TSC0057983
caacccgcaaccc

SEQ ID NO: 237729 - DNA, 13 bp, Artificial Sequence
  Oligonucleotide for detection of SNP TSC0057985
tttttatattatg

SEQ ID NO: 237730 - DNA, 13 bp, Artificial Sequence
  Oligonucleotide for detection of SNP TSC0057985
cataatataaaaa

SEQ ID NO: 237731 - DNA, 13 bp, Artificial Sequence
  Oligonucleotide for detection of SNP TSC0057985
tttttagattatg

SEQ ID NO: 237732 - DNA, 13 bp, Artificial Sequence
  Oligonucleotide for detection of SNP TSC0057985
cataatctaaaaa

SEQ ID NO: 237733 - DNA, 13 bp, Artificial Sequence
  Oligonucleotide for detection of SNP TSC0057985
tatagtgtagaaa

SEQ ID NO: 237734 - DNA, 13 bp, Artificial Sequence
  Oligonucleotide for detection of SNP TSC0057985
tttctacactata

SEQ ID NO: 237735 - DNA, 13 bp, Artificial Sequence
  Oligonucleotide for detection of SNP TSC0057985
tatagtttagaaa

SEQ ID NO: 237736 - DNA, 13 bp, Artificial Sequence
  Oligonucleotide for detection of SNP TSC0057985
tttctaaactata

SEQ ID NO: 237737 - DNA, 13 bp, Artificial Sequence
  Oligonucleotide for detection of SNP TSC0057986
gttttaatattty

SEQ ID NO: 237738 - DNA, 13 bp, Artificial Sequence
  Oligonucleotide for detection of SNP TSC0057986
raaatattaaaac

SEQ ID NO: 237739 - DNA, 13 bp, Artificial Sequence
  Oligonucleotide for detection of SNP TSC0057987
atttagatttgtt

SEQ ID NO: 237740 - DNA, 13 bp, Artificial Sequence
  Oligonucleotide for detection of SNP TSC0057987
aacaaatctaaat

SEQ ID NO: 237741 - DNA, 13 bp, Artificial Sequence
  Oligonucleotide for detection of SNP TSC0057987
atttaggtttgtt

SEQ ID NO: 237742 - DNA, 13 bp, Artificial Sequence
  Oligonucleotide for detection of SNP TSC0057987
aacaaacctaaat

SEQ ID NO: 237743 - DNA, 13 bp, Artificial Sequence
  Oligonucleotide for detection of SNP TSC0057988
agatgaagtttta

SEQ ID NO: 237744 - DNA, 13 bp, Artificial Sequence
  Oligonucleotide for detection of SNP TSC0057988
taaaacttcatct

SEQ ID NO: 237745 - DNA, 13 bp, Artificial Sequence
  Oligonucleotide for detection of SNP TSC0057988
agatgaggtttta

SEQ ID NO: 237746 - DNA, 13 bp, Artificial Sequence
  Oligonucleotide for detection of SNP TSC0057988
taaaacctcatct

SEQ ID NO: 237747 - DNA, 13 bp, Artificial Sequence
  Oligonucleotide for detection of SNP TSC0057989
tagtttgtaatty

SEQ ID NO: 237748 - DNA, 13 bp, Artificial Sequence
  Oligonucleotide for detection of SNP TSC0057989
raattacaaacta

SEQ ID NO: 237749 - DNA, 13 bp, Artificial Sequence
  Oligonucleotide for detection of SNP TSC0057989
tagtttataatty

SEQ ID NO: 237750 - DNA, 13 bp, Artificial Sequence
  Oligonucleotide for detection of SNP TSC0057989
raattataaacta

SEQ ID NO: 237751 - DNA, 13 bp, Artificial Sequence
  Oligonucleotide for detection of SNP TSC0057990
aatggagataatg

SEQ ID NO: 237752 - DNA, 13 bp, Artificial Sequence
  Oligonucleotide for detection of SNP TSC0057990
cattatctccatt

SEQ ID NO: 237753 - DNA, 13 bp, Artificial Sequence
  Oligonucleotide for detection of SNP TSC0057990
aatggaaataatg

SEQ ID NO: 237754 - DNA, 13 bp, Artificial Sequence
  Oligonucleotide for detection of SNP TSC0057990
cattatttccatt

SEQ ID NO: 237755 - DNA, 13 bp, Artificial Sequence
  Oligonucleotide for detection of SNP TSC0005635
aataagatgaatg

SEQ ID NO: 237756 - DNA, 13 bp, Artificial Sequence
  Oligonucleotide for detection of SNP TSC0005635
cattcatcttatt

SEQ ID NO: 237757 - DNA, 13 bp, Artificial Sequence
  Oligonucleotide for detection of SNP TSC0005635
aataaggtgaatg

SEQ ID NO: 237758 - DNA, 13 bp, Artificial Sequence
  Oligonucleotide for detection of SNP TSC0005635
cattcaccttatt

SEQ ID NO: 237759 - DNA, 13 bp, Artificial Sequence
  Oligonucleotide for detection of SNP TSC0057996
tttaaatgtgtay

SEQ ID NO: 237760 - DNA, 13 bp, Artificial Sequence
  Oligonucleotide for detection of SNP TSC0057996
rtacacatttaaa

SEQ ID NO: 237761 - DNA, 13 bp, Artificial Sequence
  Oligonucleotide for detection of SNP TSC0057996
tttaaacgtgtay

SEQ ID NO: 237762 - DNA, 13 bp, Artificial Sequence
  Oligonucleotide for detection of SNP TSC0057996
rtacacgtttaaa

SEQ ID NO: 237763 - DNA, 13 bp, Artificial Sequence
  Oligonucleotide for detection of SNP TSC0057996
gtatatgtttaga

SEQ ID NO: 237764 - DNA, 13 bp, Artificial Sequence
  Oligonucleotide for detection of SNP TSC0057996
tctaaacatatac

SEQ ID NO: 237765 - DNA, 13 bp, Artificial Sequence
  Oligonucleotide for detection of SNP TSC0057996
gtatatatttaga

SEQ ID NO: 237766 - DNA, 13 bp, Artificial Sequence
  Oligonucleotide for detection of SNP TSC0057996
tctaaatatatac

SEQ ID NO: 237767 - DNA, 13 bp, Artificial Sequence
  Oligonucleotide for detection of SNP TSC0057996
gtatacgtttaga

SEQ ID NO: 237768 - DNA, 13 bp, Artificial Sequence
  Oligonucleotide for detection of SNP TSC0057996
tctaaacgtatac

SEQ ID NO: 237769 - DNA, 13 bp, Artificial Sequence
  Oligonucleotide for detection of SNP TSC0057997
tgtgtatatagat

SEQ ID NO: 237770 - DNA, 13 bp, Artificial Sequence
  Oligonucleotide for detection of SNP TSC0057997
atctatatacaca

SEQ ID NO: 237771 - DNA, 13 bp, Artificial Sequence
  Oligonucleotide for detection of SNP TSC0057997
tgtgtagatagat

SEQ ID NO: 237772 - DNA, 13 bp, Artificial Sequence
  Oligonucleotide for detection of SNP TSC0057997
atctatctacaca

SEQ ID NO: 237773 - DNA, 13 bp, Artificial Sequence
  Oligonucleotide for detection of SNP TSC0057998
ggttttgtatatt

SEQ ID NO: 237774 - DNA, 13 bp, Artificial Sequence
  Oligonucleotide for detection of SNP TSC0057998
aatatacaaaacc

SEQ ID NO: 237775 - DNA, 13 bp, Artificial Sequence
  Oligonucleotide for detection of SNP TSC0057998
ggttttatatatt

SEQ ID NO: 237776 - DNA, 13 bp, Artificial Sequence
  Oligonucleotide for detection of SNP TSC0057998
aatatataaaacc

SEQ ID NO: 237777 - DNA, 13 bp, Artificial Sequence
  Oligonucleotide for detection of SNP TSC0057999
ttttggtttaggt

SEQ ID NO: 237778 - DNA, 13 bp, Artificial Sequence
  Oligonucleotide for detection of SNP TSC0057999
acctaaaccaaaa

SEQ ID NO: 237779 - DNA, 13 bp, Artificial Sequence
  Oligonucleotide for detection of SNP TSC0057999
ttttgggttaggt

SEQ ID NO: 237780 - DNA, 13 bp, Artificial Sequence
  Oligonucleotide for detection of SNP TSC0057999
acctaacccaaaa

SEQ ID NO: 237781 - DNA, 13 bp, Artificial Sequence
  Oligonucleotide for detection of SNP TSC0057999
atttgaattaagg

SEQ ID NO: 237782 - DNA, 13 bp, Artificial Sequence
  Oligonucleotide for detection of SNP TSC0057999
ccttaattcaaat

SEQ ID NO: 237783 - DNA, 13 bp, Artificial Sequence
  Oligonucleotide for detection of SNP TSC0057999
atttgatttaagg

SEQ ID NO: 237784 - DNA, 13 bp, Artificial Sequence
  Oligonucleotide for detection of SNP TSC0057999
ccttaaatcaaat

SEQ ID NO: 237785 - DNA, 13 bp, Artificial Sequence
  Oligonucleotide for detection of SNP TSC0058000
taaattattaggy

SEQ ID NO: 237786 - DNA, 13 bp, Artificial Sequence
  Oligonucleotide for detection of SNP TSC0058000
rcctaataattta

SEQ ID NO: 237787 - DNA, 13 bp, Artificial Sequence
  Oligonucleotide for detection of SNP TSC0058000
taaatttttaggy

SEQ ID NO: 237788 - DNA, 13 bp, Artificial Sequence
  Oligonucleotide for detection of SNP TSC0058000
rcctaaaaattta

SEQ ID NO: 237789 - DNA, 13 bp, Artificial Sequence
  Oligonucleotide for detection of SNP TSC0058000
gtttgatagtttg

SEQ ID NO: 237790 - DNA, 13 bp, Artificial Sequence
  Oligonucleotide for detection of SNP TSC0058000
caaactatcaaac

SEQ ID NO: 237791 - DNA, 13 bp, Artificial Sequence
  Oligonucleotide for detection of SNP TSC0058000
gtttgagagtttg

SEQ ID NO: 237792 - DNA, 13 bp, Artificial Sequence
  Oligonucleotide for detection of SNP TSC0058000
caaactctcaaac

SEQ ID NO: 237793 - DNA, 13 bp, Artificial Sequence
  Oligonucleotide for detection of SNP TSC0006854
gttgttgttatag

SEQ ID NO: 237794 - DNA, 13 bp, Artificial Sequence
  Oligonucleotide for detection of SNP TSC0006854
ctataacaacaac

SEQ ID NO: 237795 - DNA, 13 bp, Artificial Sequence
  Oligonucleotide for detection of SNP TSC0006854
gttgttattatag

SEQ ID NO: 237796 - DNA, 13 bp, Artificial Sequence
  Oligonucleotide for detection of SNP TSC0006854
ctataataacaac

SEQ ID NO: 237797 - DNA, 13 bp, Artificial Sequence
  Oligonucleotide for detection of SNP TSC0058001
tttagttttggay

SEQ ID NO: 237798 - DNA, 13 bp, Artificial Sequence
  Oligonucleotide for detection of SNP TSC0058001
rtccaaaactaaa

SEQ ID NO: 237799 - DNA, 13 bp, Artificial Sequence
  Oligonucleotide for detection of SNP TSC0058001
gtttagagttggg

SEQ ID NO: 237800 - DNA, 13 bp, Artificial Sequence
  Oligonucleotide for detection of SNP TSC0058001
cccaactctaaac

SEQ ID NO: 237801 - DNA, 13 bp, Artificial Sequence
  Oligonucleotide for detection of SNP TSC0058001
gtttagtgttggg

SEQ ID NO: 237802 - DNA, 13 bp, Artificial Sequence
  Oligonucleotide for detection of SNP TSC0058001
cccaacactaaac

SEQ ID NO: 237803 - DNA, 13 bp, Artificial Sequence
  Oligonucleotide for detection of SNP TSC0058001
gtttagcgttggg

SEQ ID NO: 237804 - DNA, 13 bp, Artificial Sequence
  Oligonucleotide for detection of SNP TSC0058001
cccaacgctaaac

SEQ ID NO: 237805 - DNA, 13 bp, Artificial Sequence
  Oligonucleotide for detection of SNP TSC0058002
ttgaggaggtgag

SEQ ID NO: 237806 - DNA, 13 bp, Artificial Sequence
  Oligonucleotide for detection of SNP TSC0058002
ctcacctcctcaa

SEQ ID NO: 237807 - DNA, 13 bp, Artificial Sequence
  Oligonucleotide for detection of SNP TSC0058002
ttgaggtggtgag

SEQ ID NO: 237808 - DNA, 13 bp, Artificial Sequence
  Oligonucleotide for detection of SNP TSC0058002
ctcaccacctcaa

SEQ ID NO: 237809 - DNA, 13 bp, Artificial Sequence
  Oligonucleotide for detection of SNP TSC0058002
ttgaggcggtgag

SEQ ID NO: 237810 - DNA, 13 bp, Artificial Sequence
  Oligonucleotide for detection of SNP TSC0058002
ctcaccgcctcaa

SEQ ID NO: 237811 - DNA, 13 bp, Artificial Sequence
  Oligonucleotide for detection of SNP TSC0058003
aattgagattttt

SEQ ID NO: 237812 - DNA, 13 bp, Artificial Sequence
  Oligonucleotide for detection of SNP TSC0058003
aaaaatctcaatt

SEQ ID NO: 237813 - DNA, 13 bp, Artificial Sequence
  Oligonucleotide for detection of SNP TSC0058003
aattgaaattttt

SEQ ID NO: 237814 - DNA, 13 bp, Artificial Sequence
  Oligonucleotide for detection of SNP TSC0058003
aaaaatttcaatt

SEQ ID NO: 237815 - DNA, 13 bp, Artificial Sequence
  Oligonucleotide for detection of SNP TSC0058007
aatataattgaaa

SEQ ID NO: 237816 - DNA, 13 bp, Artificial Sequence
  Oligonucleotide for detection of SNP TSC0058007
tttcaattatatt

SEQ ID NO: 237817 - DNA, 13 bp, Artificial Sequence
  Oligonucleotide for detection of SNP TSC0058007
aatatatttgaaa

SEQ ID NO: 237818 - DNA, 13 bp, Artificial Sequence
  Oligonucleotide for detection of SNP TSC0058007
tttcaaatatatt

SEQ ID NO: 237819 - DNA, 13 bp, Artificial Sequence
  Oligonucleotide for detection of SNP TSC0058007
ttttagttatatt

SEQ ID NO: 237820 - DNA, 13 bp, Artificial Sequence
  Oligonucleotide for detection of SNP TSC0058007
aatataactaaaa

SEQ ID NO: 237821 - DNA, 13 bp, Artificial Sequence
  Oligonucleotide for detection of SNP TSC0058007
ttttagatatatt

SEQ ID NO: 237822 - DNA, 13 bp, Artificial Sequence
  Oligonucleotide for detection of SNP TSC0058007
aatatatctaaaa

SEQ ID NO: 237823 - DNA, 13 bp, Artificial Sequence
  Oligonucleotide for detection of SNP TSC0058008
aatagtatatatt

SEQ ID NO: 237824 - DNA, 13 bp, Artificial Sequence
  Oligonucleotide for detection of SNP TSC0058008
aatatatactatt

SEQ ID NO: 237825 - DNA, 13 bp, Artificial Sequence
  Oligonucleotide for detection of SNP TSC0058008
aatagtttatatt

SEQ ID NO: 237826 - DNA, 13 bp, Artificial Sequence
  Oligonucleotide for detection of SNP TSC0058008
aatataaactatt

SEQ ID NO: 237827 - DNA, 13 bp, Artificial Sequence
  Oligonucleotide for detection of SNP TSC0058008
agtgtgtattgtt

SEQ ID NO: 237828 - DNA, 13 bp, Artificial Sequence
  Oligonucleotide for detection of SNP TSC0058008
aacaatacacact

SEQ ID NO: 237829 - DNA, 13 bp, Artificial Sequence
  Oligonucleotide for detection of SNP TSC0058008
agtgtgaattgtt

SEQ ID NO: 237830 - DNA, 13 bp, Artificial Sequence
  Oligonucleotide for detection of SNP TSC0058008
aacaattcacact

SEQ ID NO: 237831 - DNA, 13 bp, Artificial Sequence
  Oligonucleotide for detection of SNP TSC0058009
atattgagatata

SEQ ID NO: 237832 - DNA, 13 bp, Artificial Sequence
  Oligonucleotide for detection of SNP TSC0058009
tatatctcaatat

SEQ ID NO: 237833 - DNA, 13 bp, Artificial Sequence
  Oligonucleotide for detection of SNP TSC0058009
atattgtgatata

SEQ ID NO: 237834 - DNA, 13 bp, Artificial Sequence
  Oligonucleotide for detection of SNP TSC0058009
tatatcacaatat

SEQ ID NO: 237835 - DNA, 13 bp, Artificial Sequence
  Oligonucleotide for detection of SNP TSC0058009
atattgcgatata

SEQ ID NO: 237836 - DNA, 13 bp, Artificial Sequence
  Oligonucleotide for detection of SNP TSC0058009
tatatcgcaatat

SEQ ID NO: 237837 - DNA, 13 bp, Artificial Sequence
  Oligonucleotide for detection of SNP TSC0058009
tgtattttaatgt

SEQ ID NO: 237838 - DNA, 13 bp, Artificial Sequence
  Oligonucleotide for detection of SNP TSC0058009
acattaaaataca

SEQ ID NO: 237839 - DNA, 13 bp, Artificial Sequence
  Oligonucleotide for detection of SNP TSC0058010
gggtttatagatt

SEQ ID NO: 237840 - DNA, 13 bp, Artificial Sequence
  Oligonucleotide for detection of SNP TSC0058010
aatctataaaccc

SEQ ID NO: 237841 - DNA, 13 bp, Artificial Sequence
  Oligonucleotide for detection of SNP TSC0058010
gggtttttagatt

SEQ ID NO: 237842 - DNA, 13 bp, Artificial Sequence
  Oligonucleotide for detection of SNP TSC0058010
aatctaaaaaccc

SEQ ID NO: 237843 - DNA, 13 bp, Artificial Sequence
  Oligonucleotide for detection of SNP TSC0058010
aatttatgaatty

SEQ ID NO: 237844 - DNA, 13 bp, Artificial Sequence
  Oligonucleotide for detection of SNP TSC0058010
raattcataaatt

SEQ ID NO: 237845 - DNA, 13 bp, Artificial Sequence
  Oligonucleotide for detection of SNP TSC0058010
aatttaggaatty

SEQ ID NO: 237846 - DNA, 13 bp, Artificial Sequence
  Oligonucleotide for detection of SNP TSC0058010
raattcctaaatt

SEQ ID NO: 237847 - DNA, 13 bp, Artificial Sequence
  Oligonucleotide for detection of SNP TSC0006202
tgtaatattattt

SEQ ID NO: 237848 - DNA, 13 bp, Artificial Sequence
  Oligonucleotide for detection of SNP TSC0006202
aaataatattaca

SEQ ID NO: 237849 - DNA, 13 bp, Artificial Sequence
  Oligonucleotide for detection of SNP TSC0006202
tgtaatgttattt

SEQ ID NO: 237850 - DNA, 13 bp, Artificial Sequence
  Oligonucleotide for detection of SNP TSC0006202
aaataacattaca

SEQ ID NO: 237851 - DNA, 13 bp, Artificial Sequence
  Oligonucleotide for detection of SNP TSC0006202
tgtaacgttattt

SEQ ID NO: 237852 - DNA, 13 bp, Artificial Sequence
  Oligonucleotide for detection of SNP TSC0006202
aaataacgttaca

SEQ ID NO: 237853 - DNA, 13 bp, Artificial Sequence
  Oligonucleotide for detection of SNP TSC0006202
aaataatgttgta

SEQ ID NO: 237854 - DNA, 13 bp, Artificial Sequence
  Oligonucleotide for detection of SNP TSC0006202
tacaacattattt

SEQ ID NO: 237855 - DNA, 13 bp, Artificial Sequence
  Oligonucleotide for detection of SNP TSC0006202
aaataacgttgta

SEQ ID NO: 237856 - DNA, 13 bp, Artificial Sequence
  Oligonucleotide for detection of SNP TSC0006202
tacaacgttattt

SEQ ID NO: 237857 - DNA, 13 bp, Artificial Sequence
  Oligonucleotide for detection of SNP TSC0058011
aatatgtttattg

SEQ ID NO: 237858 - DNA, 13 bp, Artificial Sequence
  Oligonucleotide for detection of SNP TSC0058011
caataaacatatt

SEQ ID NO: 237859 - DNA, 13 bp, Artificial Sequence
  Oligonucleotide for detection of SNP TSC0058011
aatatggttattg

SEQ ID NO: 237860 - DNA, 13 bp, Artificial Sequence
  Oligonucleotide for detection of SNP TSC0058011
caataaccatatt

SEQ ID NO: 237861 - DNA, 13 bp, Artificial Sequence
  Oligonucleotide for detection of SNP TSC0058011
taataagtatatt

SEQ ID NO: 237862 - DNA, 13 bp, Artificial Sequence
  Oligonucleotide for detection of SNP TSC0058011
aatatacttatta

SEQ ID NO: 237863 - DNA, 13 bp, Artificial Sequence
  Oligonucleotide for detection of SNP TSC0058011
taataattatatt

SEQ ID NO: 237864 - DNA, 13 bp, Artificial Sequence
  Oligonucleotide for detection of SNP TSC0058011
aatataattatta

SEQ ID NO: 237865 - DNA, 13 bp, Artificial Sequence
  Oligonucleotide for detection of SNP TSC0058013
agttaatgggtag

SEQ ID NO: 237866 - DNA, 13 bp, Artificial Sequence
  Oligonucleotide for detection of SNP TSC0058013
ctacccattaact

SEQ ID NO: 237867 - DNA, 13 bp, Artificial Sequence
  Oligonucleotide for detection of SNP TSC0058013
agttaacgggtag

SEQ ID NO: 237868 - DNA, 13 bp, Artificial Sequence
  Oligonucleotide for detection of SNP TSC0058013
ctacccgttaact

SEQ ID NO: 237869 - DNA, 13 bp, Artificial Sequence
  Oligonucleotide for detection of SNP TSC0058013
ttgtttgttggtt

SEQ ID NO: 237870 - DNA, 13 bp, Artificial Sequence
  Oligonucleotide for detection of SNP TSC0058013
aaccaacaaacaa

SEQ ID NO: 237871 - DNA, 13 bp, Artificial Sequence
  Oligonucleotide for detection of SNP TSC0058013
ttgtttattggtt

SEQ ID NO: 237872 - DNA, 13 bp, Artificial Sequence
  Oligonucleotide for detection of SNP TSC0058013
aaccaataaacaa

SEQ ID NO: 237873 - DNA, 13 bp, Artificial Sequence
  Oligonucleotide for detection of SNP TSC0058013
ttgttcgttggtt

SEQ ID NO: 237874 - DNA, 13 bp, Artificial Sequence
  Oligonucleotide for detection of SNP TSC0058013
aaccaacgaacaa

SEQ ID NO: 237875 - DNA, 13 bp, Artificial Sequence
  Oligonucleotide for detection of SNP TSC0058014
aattaaatatttt

SEQ ID NO: 237876 - DNA, 13 bp, Artificial Sequence
  Oligonucleotide for detection of SNP TSC0058014
aaaatatttaatt

SEQ ID NO: 237877 - DNA, 13 bp, Artificial Sequence
  Oligonucleotide for detection of SNP TSC0058014
aattaagtatttt

SEQ ID NO: 237878 - DNA, 13 bp, Artificial Sequence
  Oligonucleotide for detection of SNP TSC0058014
aaaatacttaatt

SEQ ID NO: 237879 - DNA, 13 bp, Artificial Sequence
  Oligonucleotide for detection of SNP TSC0058015
atgttggtttagg

SEQ ID NO: 237880 - DNA, 13 bp, Artificial Sequence
  Oligonucleotide for detection of SNP TSC0058015
cctaaaccaacat

SEQ ID NO: 237881 - DNA, 13 bp, Artificial Sequence
  Oligonucleotide for detection of SNP TSC0058015
atgttgatttagg

SEQ ID NO: 237882 - DNA, 13 bp, Artificial Sequence
  Oligonucleotide for detection of SNP TSC0058015
cctaaatcaacat

SEQ ID NO: 237883 - DNA, 13 bp, Artificial Sequence
  Oligonucleotide for detection of SNP TSC0000652
tgagagatgagta

SEQ ID NO: 237884 - DNA, 13 bp, Artificial Sequence
  Oligonucleotide for detection of SNP TSC0000652
tactcatctctca

SEQ ID NO: 237885 - DNA, 13 bp, Artificial Sequence
  Oligonucleotide for detection of SNP TSC0000652
tgagaggtgagta

SEQ ID NO: 237886 - DNA, 13 bp, Artificial Sequence
  Oligonucleotide for detection of SNP TSC0000652
tactcacctctca

SEQ ID NO: 237887 - DNA, 13 bp, Artificial Sequence
  Oligonucleotide for detection of SNP TSC0000652
cgagagatgagta

SEQ ID NO: 237888 - DNA, 13 bp, Artificial Sequence
  Oligonucleotide for detection of SNP TSC0000652
tactcatctctcg

SEQ ID NO: 237889 - DNA, 13 bp, Artificial Sequence
  Oligonucleotide for detection of SNP TSC0000652
cgagaggtgagta

SEQ ID NO: 237890 - DNA, 13 bp, Artificial Sequence
  Oligonucleotide for detection of SNP TSC0000652
tactcacctctcg

SEQ ID NO: 237891 - DNA, 13 bp, Artificial Sequence
  Oligonucleotide for detection of SNP TSC0058016
ttatagtgataty

SEQ ID NO: 237892 - DNA, 13 bp, Artificial Sequence
  Oligonucleotide for detection of SNP TSC0058016
ratatcactataa

SEQ ID NO: 237893 - DNA, 13 bp, Artificial Sequence
  Oligonucleotide for detection of SNP TSC0058016
ttatagggataty

SEQ ID NO: 237894 - DNA, 13 bp, Artificial Sequence
  Oligonucleotide for detection of SNP TSC0058016
ratatccctataa

SEQ ID NO: 237895 - DNA, 13 bp, Artificial Sequence
  Oligonucleotide for detection of SNP TSC0058016
gatgttattataa

SEQ ID NO: 237896 - DNA, 13 bp, Artificial Sequence
  Oligonucleotide for detection of SNP TSC0058016
ttataataacatc

SEQ ID NO: 237897 - DNA, 13 bp, Artificial Sequence
  Oligonucleotide for detection of SNP TSC0058016
gatgtttttataa

SEQ ID NO: 237898 - DNA, 13 bp, Artificial Sequence
  Oligonucleotide for detection of SNP TSC0058016
ttataaaaacatc

SEQ ID NO: 237899 - DNA, 13 bp, Artificial Sequence
  Oligonucleotide for detection of SNP TSC0058017
tattaggtattag

SEQ ID NO: 237900 - DNA, 13 bp, Artificial Sequence
  Oligonucleotide for detection of SNP TSC0058017
ctaatacctaata

SEQ ID NO: 237901 - DNA, 13 bp, Artificial Sequence
  Oligonucleotide for detection of SNP TSC0058017
tattagatattag

SEQ ID NO: 237902 - DNA, 13 bp, Artificial Sequence
  Oligonucleotide for detection of SNP TSC0058017
ctaatatctaata

SEQ ID NO: 237903 - DNA, 13 bp, Artificial Sequence
  Oligonucleotide for detection of SNP TSC0058018
taattagaaaaat

SEQ ID NO: 237904 - DNA, 13 bp, Artificial Sequence
  Oligonucleotide for detection of SNP TSC0058018
atttttctaatta

SEQ ID NO: 237905 - DNA, 13 bp, Artificial Sequence
  Oligonucleotide for detection of SNP TSC0058019
ttatgaaaagagg

SEQ ID NO: 237906 - DNA, 13 bp, Artificial Sequence
  Oligonucleotide for detection of SNP TSC0058019
cctcttttcataa

SEQ ID NO: 237907 - DNA, 13 bp, Artificial Sequence
  Oligonucleotide for detection of SNP TSC0058019
ttatgagaagagg

SEQ ID NO: 237908 - DNA, 13 bp, Artificial Sequence
  Oligonucleotide for detection of SNP TSC0058019
cctcttctcataa

SEQ ID NO: 237909 - DNA, 13 bp, Artificial Sequence
  Oligonucleotide for detection of SNP TSC0058020
gtttatgtgtaga

SEQ ID NO: 237910 - DNA, 13 bp, Artificial Sequence
  Oligonucleotide for detection of SNP TSC0058020
tctacacataaac

SEQ ID NO: 237911 - DNA, 13 bp, Artificial Sequence
  Oligonucleotide for detection of SNP TSC0058020
gtttatatgtaga

SEQ ID NO: 237912 - DNA, 13 bp, Artificial Sequence
  Oligonucleotide for detection of SNP TSC0058020
tctacatataaac

SEQ ID NO: 237913 - DNA, 13 bp, Artificial Sequence
  Oligonucleotide for detection of SNP TSC0058020
gtttacgtgtaga

SEQ ID NO: 237914 - DNA, 13 bp, Artificial Sequence
  Oligonucleotide for detection of SNP TSC0058020
tctacacgtaaac

SEQ ID NO: 237915 - DNA, 13 bp, Artificial Sequence
  Oligonucleotide for detection of SNP TSC0058021
aattttatgtgtg

SEQ ID NO: 237916 - DNA, 13 bp, Artificial Sequence
  Oligonucleotide for detection of SNP TSC0058021
cacacataaaatt

SEQ ID NO: 237917 - DNA, 13 bp, Artificial Sequence
  Oligonucleotide for detection of SNP TSC0058022
ttagtttgttaty

SEQ ID NO: 237918 - DNA, 13 bp, Artificial Sequence
  Oligonucleotide for detection of SNP TSC0058022
rataacaaactaa

SEQ ID NO: 237919 - DNA, 13 bp, Artificial Sequence
  Oligonucleotide for detection of SNP TSC0058022
ttagttcgttaty

SEQ ID NO: 237920 - DNA, 13 bp, Artificial Sequence
  Oligonucleotide for detection of SNP TSC0058022
rataacgaactaa

SEQ ID NO: 237921 - DNA, 13 bp, Artificial Sequence
  Oligonucleotide for detection of SNP TSC0058023
gtttgagtaatag

SEQ ID NO: 237922 - DNA, 13 bp, Artificial Sequence
  Oligonucleotide for detection of SNP TSC0058023
ctattactcaaac

SEQ ID NO: 237923 - DNA, 13 bp, Artificial Sequence
  Oligonucleotide for detection of SNP TSC0058023
gtttgaataatag

SEQ ID NO: 237924 - DNA, 13 bp, Artificial Sequence
  Oligonucleotide for detection of SNP TSC0058023
ctattattcaaac

SEQ ID NO: 237925 - DNA, 13 bp, Artificial Sequence
  Oligonucleotide for detection of SNP TSC0058025
gggttgtgggtag

SEQ ID NO: 237926 - DNA, 13 bp, Artificial Sequence
  Oligonucleotide for detection of SNP TSC0058025
ctacccacaaccc

SEQ ID NO: 237927 - DNA, 13 bp, Artificial Sequence
  Oligonucleotide for detection of SNP TSC0058025
gggttgggggtag

SEQ ID NO: 237928 - DNA, 13 bp, Artificial Sequence
  Oligonucleotide for detection of SNP TSC0058025
ctacccccaaccc

SEQ ID NO: 237929 - DNA, 13 bp, Artificial Sequence
  Oligonucleotide for detection of SNP TSC0058026
ttatgtatatagt

SEQ ID NO: 237930 - DNA, 13 bp, Artificial Sequence
  Oligonucleotide for detection of SNP TSC0058026
actatatacataa

SEQ ID NO: 237931 - DNA, 13 bp, Artificial Sequence
  Oligonucleotide for detection of SNP TSC0058026
ttatgtttatagt

SEQ ID NO: 237932 - DNA, 13 bp, Artificial Sequence
  Oligonucleotide for detection of SNP TSC0058026
actataaacataa

SEQ ID NO: 237933 - DNA, 13 bp, Artificial Sequence
  Oligonucleotide for detection of SNP TSC0058026
attatatatatga

SEQ ID NO: 237934 - DNA, 13 bp, Artificial Sequence
  Oligonucleotide for detection of SNP TSC0058026
tcatatatataat

SEQ ID NO: 237935 - DNA, 13 bp, Artificial Sequence
  Oligonucleotide for detection of SNP TSC0058026
attatagatatga

SEQ ID NO: 237936 - DNA, 13 bp, Artificial Sequence
  Oligonucleotide for detection of SNP TSC0058026
tcatatctataat

SEQ ID NO: 237937 - DNA, 13 bp, Artificial Sequence
  Oligonucleotide for detection of SNP TSC0058027
tagggtgagtaty

SEQ ID NO: 237938 - DNA, 13 bp, Artificial Sequence
  Oligonucleotide for detection of SNP TSC0058027
ratactcacccta

SEQ ID NO: 237939 - DNA, 13 bp, Artificial Sequence
  Oligonucleotide for detection of SNP TSC0058027
tagggtaagtaty

SEQ ID NO: 237940 - DNA, 13 bp, Artificial Sequence
  Oligonucleotide for detection of SNP TSC0058027
ratacttacccta

SEQ ID NO: 237941 - DNA, 13 bp, Artificial Sequence
  Oligonucleotide for detection of SNP TSC0058028
ataatagtatgtt

SEQ ID NO: 237942 - DNA, 13 bp, Artificial Sequence
  Oligonucleotide for detection of SNP TSC0058028
aacatactattat

SEQ ID NO: 237943 - DNA, 13 bp, Artificial Sequence
  Oligonucleotide for detection of SNP TSC0058028
ataataatatgtt

SEQ ID NO: 237944 - DNA, 13 bp, Artificial Sequence
  Oligonucleotide for detection of SNP TSC0058028
aacatattattat

SEQ ID NO: 237945 - DNA, 13 bp, Artificial Sequence
  Oligonucleotide for detection of SNP TSC0058035
ttgtttaggatat

SEQ ID NO: 237946 - DNA, 13 bp, Artificial Sequence
  Oligonucleotide for detection of SNP TSC0058035
atatcctaaacaa

SEQ ID NO: 237947 - DNA, 13 bp, Artificial Sequence
  Oligonucleotide for detection of SNP TSC0058035
ttgtttgggatat

SEQ ID NO: 237948 - DNA, 13 bp, Artificial Sequence
  Oligonucleotide for detection of SNP TSC0058035
atatcccaaacaa

SEQ ID NO: 237949 - DNA, 13 bp, Artificial Sequence
  Oligonucleotide for detection of SNP TSC0058036
tggtgtaatatta

SEQ ID NO: 237950 - DNA, 13 bp, Artificial Sequence
  Oligonucleotide for detection of SNP TSC0058036
taatattacacca

SEQ ID NO: 237951 - DNA, 13 bp, Artificial Sequence
  Oligonucleotide for detection of SNP TSC0058036
tggtgtgatatta

SEQ ID NO: 237952 - DNA, 13 bp, Artificial Sequence
  Oligonucleotide for detection of SNP TSC0058036
taatatcacacca

SEQ ID NO: 237953 - DNA, 13 bp, Artificial Sequence
  Oligonucleotide for detection of SNP TSC0058036
tggcgtaatatta

SEQ ID NO: 237954 - DNA, 13 bp, Artificial Sequence
  Oligonucleotide for detection of SNP TSC0058036
taatattacgcca

SEQ ID NO: 237955 - DNA, 13 bp, Artificial Sequence
  Oligonucleotide for detection of SNP TSC0058036
tggcgtgatatta

SEQ ID NO: 237956 - DNA, 13 bp, Artificial Sequence
  Oligonucleotide for detection of SNP TSC0058036
taatatcacgcca

SEQ ID NO: 237957 - DNA, 13 bp, Artificial Sequence
  Oligonucleotide for detection of SNP TSC0004787
attattaatttat

SEQ ID NO: 237958 - DNA, 13 bp, Artificial Sequence
  Oligonucleotide for detection of SNP TSC0004787
ataaattaataat

SEQ ID NO: 237959 - DNA, 13 bp, Artificial Sequence
  Oligonucleotide for detection of SNP TSC0058038
ttttgagtattty

SEQ ID NO: 237960 - DNA, 13 bp, Artificial Sequence
  Oligonucleotide for detection of SNP TSC0058038
raaatactcaaaa

SEQ ID NO: 237961 - DNA, 13 bp, Artificial Sequence
  Oligonucleotide for detection of SNP TSC0058038
ttttgaatattty

SEQ ID NO: 237962 - DNA, 13 bp, Artificial Sequence
  Oligonucleotide for detection of SNP TSC0058038
raaatattcaaaa

SEQ ID NO: 237963 - DNA, 13 bp, Artificial Sequence
  Oligonucleotide for detection of SNP TSC0005485
tggtgtgtgatty

SEQ ID NO: 237964 - DNA, 13 bp, Artificial Sequence
  Oligonucleotide for detection of SNP TSC0005485
raatcacacacca

SEQ ID NO: 237965 - DNA, 13 bp, Artificial Sequence
  Oligonucleotide for detection of SNP TSC0005485
tggtgtatgatty

SEQ ID NO: 237966 - DNA, 13 bp, Artificial Sequence
  Oligonucleotide for detection of SNP TSC0005485
raatcatacacca

SEQ ID NO: 237967 - DNA, 13 bp, Artificial Sequence
  Oligonucleotide for detection of SNP TSC0058040
agaattatagaaa

SEQ ID NO: 237968 - DNA, 13 bp, Artificial Sequence
  Oligonucleotide for detection of SNP TSC0058040
tttctataattct

SEQ ID NO: 237969 - DNA, 13 bp, Artificial Sequence
  Oligonucleotide for detection of SNP TSC0058040
agaattgtagaaa

SEQ ID NO: 237970 - DNA, 13 bp, Artificial Sequence
  Oligonucleotide for detection of SNP TSC0058040
tttctacaattct

SEQ ID NO: 237971 - DNA, 13 bp, Artificial Sequence
  Oligonucleotide for detection of SNP TSC0058040
agaatcgtagaaa

SEQ ID NO: 237972 - DNA, 13 bp, Artificial Sequence
  Oligonucleotide for detection of SNP TSC0058040
tttctacgattct

SEQ ID NO: 237973 - DNA, 13 bp, Artificial Sequence
  Oligonucleotide for detection of SNP TSC0058043
attggggaggaaa

SEQ ID NO: 237974 - DNA, 13 bp, Artificial Sequence
  Oligonucleotide for detection of SNP TSC0058043
tttcctccccaat

SEQ ID NO: 237975 - DNA, 13 bp, Artificial Sequence
  Oligonucleotide for detection of SNP TSC0058043
attgggtaggaaa

SEQ ID NO: 237976 - DNA, 13 bp, Artificial Sequence
  Oligonucleotide for detection of SNP TSC0058043
tttcctacccaat

SEQ ID NO: 237977 - DNA, 13 bp, Artificial Sequence
  Oligonucleotide for detection of SNP TSC0058044
tttttggtagtay

SEQ ID NO: 237978 - DNA, 13 bp, Artificial Sequence
  Oligonucleotide for detection of SNP TSC0058044
rtactaccaaaaa

SEQ ID NO: 237979 - DNA, 13 bp, Artificial Sequence
  Oligonucleotide for detection of SNP TSC0058044
tttttgatagtay

SEQ ID NO: 237980 - DNA, 13 bp, Artificial Sequence
  Oligonucleotide for detection of SNP TSC0058044
rtactatcaaaaa

SEQ ID NO: 237981 - DNA, 13 bp, Artificial Sequence
  Oligonucleotide for detection of SNP TSC0058045
gtattttggtttt

SEQ ID NO: 237982 - DNA, 13 bp, Artificial Sequence
  Oligonucleotide for detection of SNP TSC0058045
aaaaccaaaatac

SEQ ID NO: 237983 - DNA, 13 bp, Artificial Sequence
  Oligonucleotide for detection of SNP TSC0058045
gtatttcggtttt

SEQ ID NO: 237984 - DNA, 13 bp, Artificial Sequence
  Oligonucleotide for detection of SNP TSC0058045
aaaaccgaaatac

SEQ ID NO: 237985 - DNA, 13 bp, Artificial Sequence
  Oligonucleotide for detection of SNP TSC0058045
aaaattgggatgy

SEQ ID NO: 237986 - DNA, 13 bp, Artificial Sequence
  Oligonucleotide for detection of SNP TSC0058045
rcatcccaatttt

SEQ ID NO: 237987 - DNA, 13 bp, Artificial Sequence
  Oligonucleotide for detection of SNP TSC0058045
aaaattaggatgy

SEQ ID NO: 237988 - DNA, 13 bp, Artificial Sequence
  Oligonucleotide for detection of SNP TSC0058045
rcatcctaatttt

SEQ ID NO: 237989 - DNA, 13 bp, Artificial Sequence
  Oligonucleotide for detection of SNP TSC0058045
aaaatcgggatgy

SEQ ID NO: 237990 - DNA, 13 bp, Artificial Sequence
  Oligonucleotide for detection of SNP TSC0058045
rcatcccgatttt

SEQ ID NO: 237991 - DNA, 13 bp, Artificial Sequence
  Oligonucleotide for detection of SNP TSC0006337
tttatgtgataag

SEQ ID NO: 237992 - DNA, 13 bp, Artificial Sequence
  Oligonucleotide for detection of SNP TSC0006337
cttatcacataaa

SEQ ID NO: 237993 - DNA, 13 bp, Artificial Sequence
  Oligonucleotide for detection of SNP TSC0006337
tttatgcgataag

SEQ ID NO: 237994 - DNA, 13 bp, Artificial Sequence
  Oligonucleotide for detection of SNP TSC0006337
cttatcgcataaa

SEQ ID NO: 237995 - DNA, 13 bp, Artificial Sequence
  Oligonucleotide for detection of SNP TSC0006337
tttattgtatggg

SEQ ID NO: 237996 - DNA, 13 bp, Artificial Sequence
  Oligonucleotide for detection of SNP TSC0006337
cccatacaataaa

SEQ ID NO: 237997 - DNA, 13 bp, Artificial Sequence
  Oligonucleotide for detection of SNP TSC0006337
tttattatatggg

SEQ ID NO: 237998 - DNA, 13 bp, Artificial Sequence
  Oligonucleotide for detection of SNP TSC0006337
cccatataataaa

SEQ ID NO: 237999 - DNA, 13 bp, Artificial Sequence
  Oligonucleotide for detection of SNP TSC0006337
tttatcgtatggg

SEQ ID NO: 238000 - DNA, 13 bp, Artificial Sequence
  Oligonucleotide for detection of SNP TSC0006337
cccatacgataaa

SEQ ID NO: 238001 - DNA, 13 bp, Artificial Sequence
  Oligonucleotide for detection of SNP TSC0000206
atgattaaaattt

SEQ ID NO: 238002 - DNA, 13 bp, Artificial Sequence
  Oligonucleotide for detection of SNP TSC0000206
aaattttaatcat

SEQ ID NO: 238003 - DNA, 13 bp, Artificial Sequence
  Oligonucleotide for detection of SNP TSC0000206
atgattgaaattt

SEQ ID NO: 238004 - DNA, 13 bp, Artificial Sequence
  Oligonucleotide for detection of SNP TSC0000206
aaatttcaatcat

SEQ ID NO: 238005 - DNA, 13 bp, Artificial Sequence
  Oligonucleotide for detection of SNP TSC0000206
acgattaaaattt

SEQ ID NO: 238006 - DNA, 13 bp, Artificial Sequence
  Oligonucleotide for detection of SNP TSC0000206
aaattttaatcgt

SEQ ID NO: 238007 - DNA, 13 bp, Artificial Sequence
  Oligonucleotide for detection of SNP TSC0000206
acgattgaaattt

SEQ ID NO: 238008 - DNA, 13 bp, Artificial Sequence
  Oligonucleotide for detection of SNP TSC0000206
aaatttcaatcgt

SEQ ID NO: 238009 - DNA, 13 bp, Artificial Sequence
  Oligonucleotide for detection of SNP TSC0000206
atgatcgaaattt

SEQ ID NO: 238010 - DNA, 13 bp, Artificial Sequence
  Oligonucleotide for detection of SNP TSC0000206
aaatttcgatcat

SEQ ID NO: 238011 - DNA, 13 bp, Artificial Sequence
  Oligonucleotide for detection of SNP TSC0000206
acgatcgaaattt

SEQ ID NO: 238012 - DNA, 13 bp, Artificial Sequence
  Oligonucleotide for detection of SNP TSC0000206
aaatttcgatcgt

SEQ ID NO: 238013 - DNA, 13 bp, Artificial Sequence
  Oligonucleotide for detection of SNP TSC0000206
agattttggttgt

SEQ ID NO: 238014 - DNA, 13 bp, Artificial Sequence
  Oligonucleotide for detection of SNP TSC0000206
acaaccaaaatct

SEQ ID NO: 238015 - DNA, 13 bp, Artificial Sequence
  Oligonucleotide for detection of SNP TSC0000206
agattttggtcgt

SEQ ID NO: 238016 - DNA, 13 bp, Artificial Sequence
  Oligonucleotide for detection of SNP TSC0000206
acgaccaaaatct

SEQ ID NO: 238017 - DNA, 13 bp, Artificial Sequence
  Oligonucleotide for detection of SNP TSC0000206
agatttcggttgt

SEQ ID NO: 238018 - DNA, 13 bp, Artificial Sequence
  Oligonucleotide for detection of SNP TSC0000206
acaaccgaaatct

SEQ ID NO: 238019 - DNA, 13 bp, Artificial Sequence
  Oligonucleotide for detection of SNP TSC0000206
agatttcggtcgt

SEQ ID NO: 238020 - DNA, 13 bp, Artificial Sequence
  Oligonucleotide for detection of SNP TSC0000206
acgaccgaaatct

SEQ ID NO: 238021 - DNA, 13 bp, Artificial Sequence
  Oligonucleotide for detection of SNP TSC0000207
gttataaagagga

SEQ ID NO: 238022 - DNA, 13 bp, Artificial Sequence
  Oligonucleotide for detection of SNP TSC0000207
tcctctttataac

SEQ ID NO: 238023 - DNA, 13 bp, Artificial Sequence
  Oligonucleotide for detection of SNP TSC0000207
gttatatagagga

SEQ ID NO: 238024 - DNA, 13 bp, Artificial Sequence
  Oligonucleotide for detection of SNP TSC0000207
tcctctatataac

SEQ ID NO: 238025 - DNA, 13 bp, Artificial Sequence
  Oligonucleotide for detection of SNP TSC0058047
gaaggaaagggty

SEQ ID NO: 238026 - DNA, 13 bp, Artificial Sequence
  Oligonucleotide for detection of SNP TSC0058047
raccctttccttc

SEQ ID NO: 238027 - DNA, 13 bp, Artificial Sequence
  Oligonucleotide for detection of SNP TSC0058047
gaaggatagggty

SEQ ID NO: 238028 - DNA, 13 bp, Artificial Sequence
  Oligonucleotide for detection of SNP TSC0058047
raccctatccttc

SEQ ID NO: 238029 - DNA, 13 bp, Artificial Sequence
  Oligonucleotide for detection of SNP TSC0058048
aaattgtatatta

SEQ ID NO: 238030 - DNA, 13 bp, Artificial Sequence
  Oligonucleotide for detection of SNP TSC0058048
taatatacaattt

SEQ ID NO: 238031 - DNA, 13 bp, Artificial Sequence
  Oligonucleotide for detection of SNP TSC0058048
aaattggatatta

SEQ ID NO: 238032 - DNA, 13 bp, Artificial Sequence
  Oligonucleotide for detection of SNP TSC0058048
taatatccaattt

SEQ ID NO: 238033 - DNA, 13 bp, Artificial Sequence
  Oligonucleotide for detection of SNP TSC0058048
tgatatatagttt

SEQ ID NO: 238034 - DNA, 13 bp, Artificial Sequence
  Oligonucleotide for detection of SNP TSC0058048
aaactatatatca

SEQ ID NO: 238035 - DNA, 13 bp, Artificial Sequence
  Oligonucleotide for detection of SNP TSC0058048
tgatatttagttt

SEQ ID NO: 238036 - DNA, 13 bp, Artificial Sequence
  Oligonucleotide for detection of SNP TSC0058048
aaactaaatatca

SEQ ID NO: 238037 - DNA, 13 bp, Artificial Sequence
  Oligonucleotide for detection of SNP TSC0058049
tttattttttgtt

SEQ ID NO: 238038 - DNA, 13 bp, Artificial Sequence
  Oligonucleotide for detection of SNP TSC0058049
aacaaaaaataaa

SEQ ID NO: 238039 - DNA, 13 bp, Artificial Sequence
  Oligonucleotide for detection of SNP TSC0058049
agtaggtgataaa

SEQ ID NO: 238040 - DNA, 13 bp, Artificial Sequence
  Oligonucleotide for detection of SNP TSC0058049
tttatcacctact

SEQ ID NO: 238041 - DNA, 13 bp, Artificial Sequence
  Oligonucleotide for detection of SNP TSC0058049
agtaggggataaa

SEQ ID NO: 238042 - DNA, 13 bp, Artificial Sequence
  Oligonucleotide for detection of SNP TSC0058049
tttatcccctact

SEQ ID NO: 238043 - DNA, 13 bp, Artificial Sequence
  Oligonucleotide for detection of SNP TSC0058050
tttttaaagtgat

SEQ ID NO: 238044 - DNA, 13 bp, Artificial Sequence
  Oligonucleotide for detection of SNP TSC0058050
atcactttaaaaa

SEQ ID NO: 238045 - DNA, 13 bp, Artificial Sequence
  Oligonucleotide for detection of SNP TSC0058050
tttttagagtgat

SEQ ID NO: 238046 - DNA, 13 bp, Artificial Sequence
  Oligonucleotide for detection of SNP TSC0058050
atcactctaaaaa

SEQ ID NO: 238047 - DNA, 13 bp, Artificial Sequence
  Oligonucleotide for detection of SNP TSC0058051
tgtgaagatatga

SEQ ID NO: 238048 - DNA, 13 bp, Artificial Sequence
  Oligonucleotide for detection of SNP TSC0058051
tcatatcttcaca

SEQ ID NO: 238049 - DNA, 13 bp, Artificial Sequence
  Oligonucleotide for detection of SNP TSC0058051
tgtgaaaatatga

SEQ ID NO: 238050 - DNA, 13 bp, Artificial Sequence
  Oligonucleotide for detection of SNP TSC0058051
tcatattttcaca

SEQ ID NO: 238051 - DNA, 13 bp, Artificial Sequence
  Oligonucleotide for detection of SNP TSC0058054
tgttttattgaay

SEQ ID NO: 238052 - DNA, 13 bp, Artificial Sequence
  Oligonucleotide for detection of SNP TSC0058054
rttcaataaaaca

SEQ ID NO: 238053 - DNA, 13 bp, Artificial Sequence
  Oligonucleotide for detection of SNP TSC0058054
tgtttttttgaay

SEQ ID NO: 238054 - DNA, 13 bp, Artificial Sequence
  Oligonucleotide for detection of SNP TSC0058054
rttcaaaaaaaca

SEQ ID NO: 238055 - DNA, 13 bp, Artificial Sequence
  Oligonucleotide for detection of SNP TSC0058054
gtttaataaagta

SEQ ID NO: 238056 - DNA, 13 bp, Artificial Sequence
  Oligonucleotide for detection of SNP TSC0058054
tactttattaaac

SEQ ID NO: 238057 - DNA, 13 bp, Artificial Sequence
  Oligonucleotide for detection of SNP TSC0058054
gtttaagaaagta

SEQ ID NO: 238058 - DNA, 13 bp, Artificial Sequence
  Oligonucleotide for detection of SNP TSC0058054
tactttcttaaac

SEQ ID NO: 238059 - DNA, 13 bp, Artificial Sequence
  Oligonucleotide for detection of SNP TSC0007997
tttatgagtatty

SEQ ID NO: 238060 - DNA, 13 bp, Artificial Sequence
  Oligonucleotide for detection of SNP TSC0007997
raatactcataaa

SEQ ID NO: 238061 - DNA, 13 bp, Artificial Sequence
  Oligonucleotide for detection of SNP TSC0007997
tttatgggtatty

SEQ ID NO: 238062 - DNA, 13 bp, Artificial Sequence
  Oligonucleotide for detection of SNP TSC0007997
raatacccataaa

SEQ ID NO: 238063 - DNA, 13 bp, Artificial Sequence
  Oligonucleotide for detection of SNP TSC0001696
gttggtgaattgg

SEQ ID NO: 238064 - DNA, 13 bp, Artificial Sequence
  Oligonucleotide for detection of SNP TSC0001696
ccaattcaccaac

SEQ ID NO: 238065 - DNA, 13 bp, Artificial Sequence
  Oligonucleotide for detection of SNP TSC0001696
gttggtaaattgg

SEQ ID NO: 238066 - DNA, 13 bp, Artificial Sequence
  Oligonucleotide for detection of SNP TSC0001696
ccaatttaccaac

SEQ ID NO: 238067 - DNA, 13 bp, Artificial Sequence
  Oligonucleotide for detection of SNP TSC0001696
gttggcgaattgg

SEQ ID NO: 238068 - DNA, 13 bp, Artificial Sequence
  Oligonucleotide for detection of SNP TSC0001696
ccaattcgccaac

SEQ ID NO: 238069 - DNA, 13 bp, Artificial Sequence
  Oligonucleotide for detection of SNP TSC0001697
ttgaaggtatgag

SEQ ID NO: 238070 - DNA, 13 bp, Artificial Sequence
  Oligonucleotide for detection of SNP TSC0001697
ctcataccttcaa

SEQ ID NO: 238071 - DNA, 13 bp, Artificial Sequence
  Oligonucleotide for detection of SNP TSC0001697
ttgaagatatgag

SEQ ID NO: 238072 - DNA, 13 bp, Artificial Sequence
  Oligonucleotide for detection of SNP TSC0001697
ctcatatcttcaa

SEQ ID NO: 238073 - DNA, 13 bp, Artificial Sequence
  Oligonucleotide for detection of SNP TSC0058058
tagtgttgaagtg

SEQ ID NO: 238074 - DNA, 13 bp, Artificial Sequence
  Oligonucleotide for detection of SNP TSC0058058
cacttcaacacta

SEQ ID NO: 238075 - DNA, 13 bp, Artificial Sequence
  Oligonucleotide for detection of SNP TSC0058058
tagtgtcgaagtg

SEQ ID NO: 238076 - DNA, 13 bp, Artificial Sequence
  Oligonucleotide for detection of SNP TSC0058058
cacttcgacacta

SEQ ID NO: 238077 - DNA, 13 bp, Artificial Sequence
  Oligonucleotide for detection of SNP TSC0058058
tattttggtattg

SEQ ID NO: 238078 - DNA, 13 bp, Artificial Sequence
  Oligonucleotide for detection of SNP TSC0058058
caataccaaaata

SEQ ID NO: 238079 - DNA, 13 bp, Artificial Sequence
  Oligonucleotide for detection of SNP TSC0058058
tattttagtattg

SEQ ID NO: 238080 - DNA, 13 bp, Artificial Sequence
  Oligonucleotide for detection of SNP TSC0058058
caatactaaaata

SEQ ID NO: 238081 - DNA, 13 bp, Artificial Sequence
  Oligonucleotide for detection of SNP TSC0058058
tatttcggtattg

SEQ ID NO: 238082 - DNA, 13 bp, Artificial Sequence
  Oligonucleotide for detection of SNP TSC0058058
caataccgaaata

SEQ ID NO: 238083 - DNA, 13 bp, Artificial Sequence
  Oligonucleotide for detection of SNP TSC0058059
tgagtagtaatgg

SEQ ID NO: 238084 - DNA, 13 bp, Artificial Sequence
  Oligonucleotide for detection of SNP TSC0058059
ccattactactca

SEQ ID NO: 238085 - DNA, 13 bp, Artificial Sequence
  Oligonucleotide for detection of SNP TSC0058059
tgagtaataatgg

SEQ ID NO: 238086 - DNA, 13 bp, Artificial Sequence
  Oligonucleotide for detection of SNP TSC0058059
ccattattactca

SEQ ID NO: 238087 - DNA, 13 bp, Artificial Sequence
  Oligonucleotide for detection of SNP TSC0058060
tattaagttttga

SEQ ID NO: 238088 - DNA, 13 bp, Artificial Sequence
  Oligonucleotide for detection of SNP TSC0058060
tcaaaacttaata

SEQ ID NO: 238089 - DNA, 13 bp, Artificial Sequence
  Oligonucleotide for detection of SNP TSC0058060
tattaaattttga

SEQ ID NO: 238090 - DNA, 13 bp, Artificial Sequence
  Oligonucleotide for detection of SNP TSC0058060
tcaaaatttaata

SEQ ID NO: 238091 - DNA, 13 bp, Artificial Sequence
  Oligonucleotide for detection of SNP TSC0058061
gtagtttggagtg

SEQ ID NO: 238092 - DNA, 13 bp, Artificial Sequence
  Oligonucleotide for detection of SNP TSC0058061
cactccaaactac

SEQ ID NO: 238093 - DNA, 13 bp, Artificial Sequence
  Oligonucleotide for detection of SNP TSC0058061
gtagttgggagtg

SEQ ID NO: 238094 - DNA, 13 bp, Artificial Sequence
  Oligonucleotide for detection of SNP TSC0058061
cactcccaactac

SEQ ID NO: 238095 - DNA, 13 bp, Artificial Sequence
  Oligonucleotide for detection of SNP TSC0058061
gtagtcgggagtg

SEQ ID NO: 238096 - DNA, 13 bp, Artificial Sequence
  Oligonucleotide for detection of SNP TSC0058061
cactcccgactac

SEQ ID NO: 238097 - DNA, 13 bp, Artificial Sequence
  Oligonucleotide for detection of SNP TSC0058061
tattttagattgy

SEQ ID NO: 238098 - DNA, 13 bp, Artificial Sequence
  Oligonucleotide for detection of SNP TSC0058061
rcaatctaaaata

SEQ ID NO: 238099 - DNA, 13 bp, Artificial Sequence
  Oligonucleotide for detection of SNP TSC0058061
tatttttgattgy

SEQ ID NO: 238100 - DNA, 13 bp, Artificial Sequence
  Oligonucleotide for detection of SNP TSC0058061
rcaatcaaaaata

SEQ ID NO: 238101 - DNA, 13 bp, Artificial Sequence
  Oligonucleotide for detection of SNP TSC0058061
tattttcgattgy

SEQ ID NO: 238102 - DNA, 13 bp, Artificial Sequence
  Oligonucleotide for detection of SNP TSC0058061
rcaatcgaaaata

SEQ ID NO: 238103 - DNA, 13 bp, Artificial Sequence
  Oligonucleotide for detection of SNP TSC0058062
tttttaggttata

SEQ ID NO: 238104 - DNA, 13 bp, Artificial Sequence
  Oligonucleotide for detection of SNP TSC0058062
tataacctaaaaa

SEQ ID NO: 238105 - DNA, 13 bp, Artificial Sequence
  Oligonucleotide for detection of SNP TSC0058062
tgtagtgtagagg

SEQ ID NO: 238106 - DNA, 13 bp, Artificial Sequence
  Oligonucleotide for detection of SNP TSC0058062
cctctacactaca

SEQ ID NO: 238107 - DNA, 13 bp, Artificial Sequence
  Oligonucleotide for detection of SNP TSC0058062
tgtagtatagagg

SEQ ID NO: 238108 - DNA, 13 bp, Artificial Sequence
  Oligonucleotide for detection of SNP TSC0058062
cctctatactaca

SEQ ID NO: 238109 - DNA, 13 bp, Artificial Sequence
  Oligonucleotide for detection of SNP TSC0058062
tgtagtttagagg

SEQ ID NO: 238110 - DNA, 13 bp, Artificial Sequence
  Oligonucleotide for detection of SNP TSC0058062
cctctaaactaca

SEQ ID NO: 238111 - DNA, 13 bp, Artificial Sequence
  Oligonucleotide for detection of SNP TSC0058062
tgtagcgtagagg

SEQ ID NO: 238112 - DNA, 13 bp, Artificial Sequence
  Oligonucleotide for detection of SNP TSC0058062
cctctacgctaca

SEQ ID NO: 238113 - DNA, 13 bp, Artificial Sequence
  Oligonucleotide for detection of SNP TSC0000883
taaatgattgaat

SEQ ID NO: 238114 - DNA, 13 bp, Artificial Sequence
  Oligonucleotide for detection of SNP TSC0000883
attcaatcattta

SEQ ID NO: 238115 - DNA, 13 bp, Artificial Sequence
  Oligonucleotide for detection of SNP TSC0000883
taaatggttgaat

SEQ ID NO: 238116 - DNA, 13 bp, Artificial Sequence
  Oligonucleotide for detection of SNP TSC0000883
attcaaccattta

SEQ ID NO: 238117 - DNA, 13 bp, Artificial Sequence
  Oligonucleotide for detection of SNP TSC0058063
gttgaaaatgtaa

SEQ ID NO: 238118 - DNA, 13 bp, Artificial Sequence
  Oligonucleotide for detection of SNP TSC0058063
ttacattttcaac

SEQ ID NO: 238119 - DNA, 13 bp, Artificial Sequence
  Oligonucleotide for detection of SNP TSC0058063
gttgaatatgtaa

SEQ ID NO: 238120 - DNA, 13 bp, Artificial Sequence
  Oligonucleotide for detection of SNP TSC0058063
ttacatattcaac

SEQ ID NO: 238121 - DNA, 13 bp, Artificial Sequence
  Oligonucleotide for detection of SNP TSC0001427
gtgttaatagggg

SEQ ID NO: 238122 - DNA, 13 bp, Artificial Sequence
  Oligonucleotide for detection of SNP TSC0001427
cccctattaacac

SEQ ID NO: 238123 - DNA, 13 bp, Artificial Sequence
  Oligonucleotide for detection of SNP TSC0001427
gtgttagtagggg

SEQ ID NO: 238124 - DNA, 13 bp, Artificial Sequence
  Oligonucleotide for detection of SNP TSC0001427
cccctactaacac

SEQ ID NO: 238125 - DNA, 13 bp, Artificial Sequence
  Oligonucleotide for detection of SNP TSC0001428
ggtttatggttty

SEQ ID NO: 238126 - DNA, 13 bp, Artificial Sequence
  Oligonucleotide for detection of SNP TSC0001428
raaaccataaacc

SEQ ID NO: 238127 - DNA, 13 bp, Artificial Sequence
  Oligonucleotide for detection of SNP TSC0001428
ggtttacggttty

SEQ ID NO: 238128 - DNA, 13 bp, Artificial Sequence
  Oligonucleotide for detection of SNP TSC0001428
raaaccgtaaacc

SEQ ID NO: 238129 - DNA, 13 bp, Artificial Sequence
  Oligonucleotide for detection of SNP TSC0001428
ggaattgtgagty

SEQ ID NO: 238130 - DNA, 13 bp, Artificial Sequence
  Oligonucleotide for detection of SNP TSC0001428
ractcacaattcc

SEQ ID NO: 238131 - DNA, 13 bp, Artificial Sequence
  Oligonucleotide for detection of SNP TSC0001428
ggaattatgagty

SEQ ID NO: 238132 - DNA, 13 bp, Artificial Sequence
  Oligonucleotide for detection of SNP TSC0001428
ractcataattcc

SEQ ID NO: 238133 - DNA, 13 bp, Artificial Sequence
  Oligonucleotide for detection of SNP TSC0001428
ggaatcgtgagty

SEQ ID NO: 238134 - DNA, 13 bp, Artificial Sequence
  Oligonucleotide for detection of SNP TSC0001428
ractcacgattcc

SEQ ID NO: 238135 - DNA, 13 bp, Artificial Sequence
  Oligonucleotide for detection of SNP TSC0058068
taatagtggggga

SEQ ID NO: 238136 - DNA, 13 bp, Artificial Sequence
  Oligonucleotide for detection of SNP TSC0058068
tcccccactatta

SEQ ID NO: 238137 - DNA, 13 bp, Artificial Sequence
  Oligonucleotide for detection of SNP TSC0058068
taatagcggggga

SEQ ID NO: 238138 - DNA, 13 bp, Artificial Sequence
  Oligonucleotide for detection of SNP TSC0058068
tcccccgctatta

SEQ ID NO: 238139 - DNA, 13 bp, Artificial Sequence
  Oligonucleotide for detection of SNP TSC0058069
tgtttaagtaaat

SEQ ID NO: 238140 - DNA, 13 bp, Artificial Sequence
  Oligonucleotide for detection of SNP TSC0058069
atttacttaaaca

SEQ ID NO: 238141 - DNA, 13 bp, Artificial Sequence
  Oligonucleotide for detection of SNP TSC0058069
tgtttaggtaaat

SEQ ID NO: 238142 - DNA, 13 bp, Artificial Sequence
  Oligonucleotide for detection of SNP TSC0058069
atttacctaaaca

SEQ ID NO: 238143 - DNA, 13 bp, Artificial Sequence
  Oligonucleotide for detection of SNP TSC0058070
aatttttgaggtt

SEQ ID NO: 238144 - DNA, 13 bp, Artificial Sequence
  Oligonucleotide for detection of SNP TSC0058070
aacctcaaaaatt

SEQ ID NO: 238145 - DNA, 13 bp, Artificial Sequence
  Oligonucleotide for detection of SNP TSC0058070
aattttcgaggtt

SEQ ID NO: 238146 - DNA, 13 bp, Artificial Sequence
  Oligonucleotide for detection of SNP TSC0058070
aacctcgaaaatt

SEQ ID NO: 238147 - DNA, 13 bp, Artificial Sequence
  Oligonucleotide for detection of SNP TSC0058070
agttttggaaatt

SEQ ID NO: 238148 - DNA, 13 bp, Artificial Sequence
  Oligonucleotide for detection of SNP TSC0058070
aatttccaaaact

SEQ ID NO: 238149 - DNA, 13 bp, Artificial Sequence
  Oligonucleotide for detection of SNP TSC0058070
agttttagaaatt

SEQ ID NO: 238150 - DNA, 13 bp, Artificial Sequence
  Oligonucleotide for detection of SNP TSC0058070
aatttctaaaact

SEQ ID NO: 238151 - DNA, 13 bp, Artificial Sequence
  Oligonucleotide for detection of SNP TSC0058070
agtttcggaaatt

SEQ ID NO: 238152 - DNA, 13 bp, Artificial Sequence
  Oligonucleotide for detection of SNP TSC0058070
aatttccgaaact

SEQ ID NO: 238153 - DNA, 13 bp, Artificial Sequence
  Oligonucleotide for detection of SNP TSC0058071
agtttagggatat

SEQ ID NO: 238154 - DNA, 13 bp, Artificial Sequence
  Oligonucleotide for detection of SNP TSC0058071
atatccctaaact

SEQ ID NO: 238155 - DNA, 13 bp, Artificial Sequence
  Oligonucleotide for detection of SNP TSC0058071
agtttaaggatat

SEQ ID NO: 238156 - DNA, 13 bp, Artificial Sequence
  Oligonucleotide for detection of SNP TSC0058071
atatccttaaact

SEQ ID NO: 238157 - DNA, 13 bp, Artificial Sequence
  Oligonucleotide for detection of SNP TSC0058072
tttttagttaatt

SEQ ID NO: 238158 - DNA, 13 bp, Artificial Sequence
  Oligonucleotide for detection of SNP TSC0058072
aattaactaaaaa

SEQ ID NO: 238159 - DNA, 13 bp, Artificial Sequence
  Oligonucleotide for detection of SNP TSC0058073
aaaaagtgagtta

SEQ ID NO: 238160 - DNA, 13 bp, Artificial Sequence
  Oligonucleotide for detection of SNP TSC0058073
taactcacttttt

SEQ ID NO: 238161 - DNA, 13 bp, Artificial Sequence
  Oligonucleotide for detection of SNP TSC0058073
aaaaagcgagtta

SEQ ID NO: 238162 - DNA, 13 bp, Artificial Sequence
  Oligonucleotide for detection of SNP TSC0058073
taactcgcttttt

SEQ ID NO: 238163 - DNA, 13 bp, Artificial Sequence
  Oligonucleotide for detection of SNP TSC0058074
gaatgatgaagag

SEQ ID NO: 238164 - DNA, 13 bp, Artificial Sequence
  Oligonucleotide for detection of SNP TSC0058074
ctcttcatcattc

SEQ ID NO: 238165 - DNA, 13 bp, Artificial Sequence
  Oligonucleotide for detection of SNP TSC0058074
gaatgaagaagag

SEQ ID NO: 238166 - DNA, 13 bp, Artificial Sequence
  Oligonucleotide for detection of SNP TSC0058074
ctcttcttcattc

SEQ ID NO: 238167 - DNA, 13 bp, Artificial Sequence
  Oligonucleotide for detection of SNP TSC0058078
ttttgttgttgat

SEQ ID NO: 238168 - DNA, 13 bp, Artificial Sequence
  Oligonucleotide for detection of SNP TSC0058078
atcaacaacaaaa

SEQ ID NO: 238169 - DNA, 13 bp, Artificial Sequence
  Oligonucleotide for detection of SNP TSC0058078
attagtagtagga

SEQ ID NO: 238170 - DNA, 13 bp, Artificial Sequence
  Oligonucleotide for detection of SNP TSC0058078
tcctactactaat

SEQ ID NO: 238171 - DNA, 13 bp, Artificial Sequence
  Oligonucleotide for detection of SNP TSC0058078
attagttgtagga

SEQ ID NO: 238172 - DNA, 13 bp, Artificial Sequence
  Oligonucleotide for detection of SNP TSC0058078
tcctacaactaat

SEQ ID NO: 238173 - DNA, 13 bp, Artificial Sequence
  Oligonucleotide for detection of SNP TSC0058078
attagtcgtagga

SEQ ID NO: 238174 - DNA, 13 bp, Artificial Sequence
  Oligonucleotide for detection of SNP TSC0058078
tcctacgactaat

SEQ ID NO: 238175 - DNA, 13 bp, Artificial Sequence
  Oligonucleotide for detection of SNP TSC0058079
tagagaaatgtga

SEQ ID NO: 238176 - DNA, 13 bp, Artificial Sequence
  Oligonucleotide for detection of SNP TSC0058079
tcacatttctcta

SEQ ID NO: 238177 - DNA, 13 bp, Artificial Sequence
  Oligonucleotide for detection of SNP TSC0058079
tagagatatgtga

SEQ ID NO: 238178 - DNA, 13 bp, Artificial Sequence
  Oligonucleotide for detection of SNP TSC0058079
tcacatatctcta

SEQ ID NO: 238179 - DNA, 13 bp, Artificial Sequence
  Oligonucleotide for detection of SNP TSC0058079
tagagagatgtga

SEQ ID NO: 238180 - DNA, 13 bp, Artificial Sequence
  Oligonucleotide for detection of SNP TSC0058079
tcacatctctcta

SEQ ID NO: 238181 - DNA, 13 bp, Artificial Sequence
  Oligonucleotide for detection of SNP TSC0058079
ttatatttttttg

SEQ ID NO: 238182 - DNA, 13 bp, Artificial Sequence
  Oligonucleotide for detection of SNP TSC0058079
caaaaaaatataa

SEQ ID NO: 238183 - DNA, 13 bp, Artificial Sequence
  Oligonucleotide for detection of SNP TSC0058080
tatgtatagtaaa

SEQ ID NO: 238184 - DNA, 13 bp, Artificial Sequence
  Oligonucleotide for detection of SNP TSC0058080
tttactatacata

SEQ ID NO: 238185 - DNA, 13 bp, Artificial Sequence
  Oligonucleotide for detection of SNP TSC0058080
tatgtagagtaaa

SEQ ID NO: 238186 - DNA, 13 bp, Artificial Sequence
  Oligonucleotide for detection of SNP TSC0058080
tttactctacata

SEQ ID NO: 238187 - DNA, 13 bp, Artificial Sequence
  Oligonucleotide for detection of SNP TSC0058080
tttgttgtgtatg

SEQ ID NO: 238188 - DNA, 13 bp, Artificial Sequence
  Oligonucleotide for detection of SNP TSC0058080
catacacaacaaa

SEQ ID NO: 238189 - DNA, 13 bp, Artificial Sequence
  Oligonucleotide for detection of SNP TSC0058080
tttgttttgtatg

SEQ ID NO: 238190 - DNA, 13 bp, Artificial Sequence
  Oligonucleotide for detection of SNP TSC0058080
catacaaaacaaa

SEQ ID NO: 238191 - DNA, 13 bp, Artificial Sequence
  Oligonucleotide for detection of SNP TSC0058081
aggattaggtaga

SEQ ID NO: 238192 - DNA, 13 bp, Artificial Sequence
  Oligonucleotide for detection of SNP TSC0058081
tctacctaatcct

SEQ ID NO: 238193 - DNA, 13 bp, Artificial Sequence
  Oligonucleotide for detection of SNP TSC0058081
aggattgggtaga

SEQ ID NO: 238194 - DNA, 13 bp, Artificial Sequence
  Oligonucleotide for detection of SNP TSC0058081
tctacccaatcct

SEQ ID NO: 238195 - DNA, 13 bp, Artificial Sequence
  Oligonucleotide for detection of SNP TSC0058081
aggatcgggtaga

SEQ ID NO: 238196 - DNA, 13 bp, Artificial Sequence
  Oligonucleotide for detection of SNP TSC0058081
tctacccgatcct

SEQ ID NO: 238197 - DNA, 13 bp, Artificial Sequence
  Oligonucleotide for detection of SNP TSC0058082
gttattaggatta

SEQ ID NO: 238198 - DNA, 13 bp, Artificial Sequence
  Oligonucleotide for detection of SNP TSC0058082
taatcctaataac

SEQ ID NO: 238199 - DNA, 13 bp, Artificial Sequence
  Oligonucleotide for detection of SNP TSC0058082
gttattgggatta

SEQ ID NO: 238200 - DNA, 13 bp, Artificial Sequence
  Oligonucleotide for detection of SNP TSC0058082
taatcccaataac

SEQ ID NO: 238201 - DNA, 13 bp, Artificial Sequence
  Oligonucleotide for detection of SNP TSC0058088
agattggtattgt

SEQ ID NO: 238202 - DNA, 13 bp, Artificial Sequence
  Oligonucleotide for detection of SNP TSC0058088
acaataccaatct

SEQ ID NO: 238203 - DNA, 13 bp, Artificial Sequence
  Oligonucleotide for detection of SNP TSC0058088
agattgatattgt

SEQ ID NO: 238204 - DNA, 13 bp, Artificial Sequence
  Oligonucleotide for detection of SNP TSC0058088
acaatatcaatct

SEQ ID NO: 238205 - DNA, 13 bp, Artificial Sequence
  Oligonucleotide for detection of SNP TSC0058090
tgaatgattggga

SEQ ID NO: 238206 - DNA, 13 bp, Artificial Sequence
  Oligonucleotide for detection of SNP TSC0058090
tcccaatcattca

SEQ ID NO: 238207 - DNA, 13 bp, Artificial Sequence
  Oligonucleotide for detection of SNP TSC0058090
tgaatgtttggga

SEQ ID NO: 238208 - DNA, 13 bp, Artificial Sequence
  Oligonucleotide for detection of SNP TSC0058090
tcccaaacattca

SEQ ID NO: 238209 - DNA, 13 bp, Artificial Sequence
  Oligonucleotide for detection of SNP TSC0058091
ttggtatggagaa

SEQ ID NO: 238210 - DNA, 13 bp, Artificial Sequence
  Oligonucleotide for detection of SNP TSC0058091
ttctccataccaa

SEQ ID NO: 238211 - DNA, 13 bp, Artificial Sequence
  Oligonucleotide for detection of SNP TSC0058091
ttggtacggagaa

SEQ ID NO: 238212 - DNA, 13 bp, Artificial Sequence
  Oligonucleotide for detection of SNP TSC0058091
ttctccgtaccaa

SEQ ID NO: 238213 - DNA, 13 bp, Artificial Sequence
  Oligonucleotide for detection of SNP TSC0058091
tttttcgtattaa

SEQ ID NO: 238214 - DNA, 13 bp, Artificial Sequence
  Oligonucleotide for detection of SNP TSC0058091
ttaatacgaaaaa

SEQ ID NO: 238215 - DNA, 13 bp, Artificial Sequence
  Oligonucleotide for detection of SNP TSC0058092
atatttgtattga

SEQ ID NO: 238216 - DNA, 13 bp, Artificial Sequence
  Oligonucleotide for detection of SNP TSC0058092
tcaatacaaatat

SEQ ID NO: 238217 - DNA, 13 bp, Artificial Sequence
  Oligonucleotide for detection of SNP TSC0058092
atatttatattga

SEQ ID NO: 238218 - DNA, 13 bp, Artificial Sequence
  Oligonucleotide for detection of SNP TSC0058092
tcaatataaatat

SEQ ID NO: 238219 - DNA, 13 bp, Artificial Sequence
  Oligonucleotide for detection of SNP TSC0058096
gatggaattttgy

SEQ ID NO: 238220 - DNA, 13 bp, Artificial Sequence
  Oligonucleotide for detection of SNP TSC0058096
rcaaaattccatc

SEQ ID NO: 238221 - DNA, 13 bp, Artificial Sequence
  Oligonucleotide for detection of SNP TSC0058097
aggtagtttttga

SEQ ID NO: 238222 - DNA, 13 bp, Artificial Sequence
  Oligonucleotide for detection of SNP TSC0058097
tcaaaaactacct

SEQ ID NO: 238223 - DNA, 13 bp, Artificial Sequence
  Oligonucleotide for detection of SNP TSC0058097
aggtaggttttga

SEQ ID NO: 238224 - DNA, 13 bp, Artificial Sequence
  Oligonucleotide for detection of SNP TSC0058097
tcaaaacctacct

SEQ ID NO: 238225 - DNA, 13 bp, Artificial Sequence
  Oligonucleotide for detection of SNP TSC0058098
agttttatgtgag

SEQ ID NO: 238226 - DNA, 13 bp, Artificial Sequence
  Oligonucleotide for detection of SNP TSC0058098
ctcacataaaact

SEQ ID NO: 238227 - DNA, 13 bp, Artificial Sequence
  Oligonucleotide for detection of SNP TSC0058098
agttttgtgtgag

SEQ ID NO: 238228 - DNA, 13 bp, Artificial Sequence
  Oligonucleotide for detection of SNP TSC0058098
ctcacacaaaact

SEQ ID NO: 238229 - DNA, 13 bp, Artificial Sequence
  Oligonucleotide for detection of SNP TSC0058102
gatattcgttttt

SEQ ID NO: 238230 - DNA, 13 bp, Artificial Sequence
  Oligonucleotide for detection of SNP TSC0058102
aaaaacgaatatc

SEQ ID NO: 238231 - DNA, 13 bp, Artificial Sequence
  Oligonucleotide for detection of SNP TSC0058102
aggggtgaataty

SEQ ID NO: 238232 - DNA, 13 bp, Artificial Sequence
  Oligonucleotide for detection of SNP TSC0058102
ratattcacccct

SEQ ID NO: 238233 - DNA, 13 bp, Artificial Sequence
  Oligonucleotide for detection of SNP TSC0058102
aggggtaaataty

SEQ ID NO: 238234 - DNA, 13 bp, Artificial Sequence
  Oligonucleotide for detection of SNP TSC0058102
ratatttacccct

SEQ ID NO: 238235 - DNA, 13 bp, Artificial Sequence
  Oligonucleotide for detection of SNP TSC0058102
aggggcgaataty

SEQ ID NO: 238236 - DNA, 13 bp, Artificial Sequence
  Oligonucleotide for detection of SNP TSC0058102
ratattcgcccct

SEQ ID NO: 238237 - DNA, 13 bp, Artificial Sequence
  Oligonucleotide for detection of SNP TSC0058103
tgaagggttattg

SEQ ID NO: 238238 - DNA, 13 bp, Artificial Sequence
  Oligonucleotide for detection of SNP TSC0058103
caataacccttca

SEQ ID NO: 238239 - DNA, 13 bp, Artificial Sequence
  Oligonucleotide for detection of SNP TSC0058103
tgaaggattattg

SEQ ID NO: 238240 - DNA, 13 bp, Artificial Sequence
  Oligonucleotide for detection of SNP TSC0058103
caataatccttca

SEQ ID NO: 238241 - DNA, 13 bp, Artificial Sequence
  Oligonucleotide for detection of SNP TSC0058106
tatgtatttatat

SEQ ID NO: 238242 - DNA, 13 bp, Artificial Sequence
  Oligonucleotide for detection of SNP TSC0058106
atataaatacata

SEQ ID NO: 238243 - DNA, 13 bp, Artificial Sequence
  Oligonucleotide for detection of SNP TSC0058106
tatgtagttatat

SEQ ID NO: 238244 - DNA, 13 bp, Artificial Sequence
  Oligonucleotide for detection of SNP TSC0058106
atataactacata

SEQ ID NO: 238245 - DNA, 13 bp, Artificial Sequence
  Oligonucleotide for detection of SNP TSC0058106
tacgtatttatat

SEQ ID NO: 238246 - DNA, 13 bp, Artificial Sequence
  Oligonucleotide for detection of SNP TSC0058106
atataaatacgta

SEQ ID NO: 238247 - DNA, 13 bp, Artificial Sequence
  Oligonucleotide for detection of SNP TSC0058106
tacgtagttatat

SEQ ID NO: 238248 - DNA, 13 bp, Artificial Sequence
  Oligonucleotide for detection of SNP TSC0058106
atataactacgta

SEQ ID NO: 238249 - DNA, 13 bp, Artificial Sequence
  Oligonucleotide for detection of SNP TSC0058106
atatgaatatgtg

SEQ ID NO: 238250 - DNA, 13 bp, Artificial Sequence
  Oligonucleotide for detection of SNP TSC0058106
cacatattcatat

SEQ ID NO: 238251 - DNA, 13 bp, Artificial Sequence
  Oligonucleotide for detection of SNP TSC0058106
atatgattatgtg

SEQ ID NO: 238252 - DNA, 13 bp, Artificial Sequence
  Oligonucleotide for detection of SNP TSC0058106
cacataatcatat

SEQ ID NO: 238253 - DNA, 13 bp, Artificial Sequence
  Oligonucleotide for detection of SNP TSC0058106
atatgaatacgtg

SEQ ID NO: 238254 - DNA, 13 bp, Artificial Sequence
  Oligonucleotide for detection of SNP TSC0058106
cacgtattcatat

SEQ ID NO: 238255 - DNA, 13 bp, Artificial Sequence
  Oligonucleotide for detection of SNP TSC0058106
atatgattacgtg

SEQ ID NO: 238256 - DNA, 13 bp, Artificial Sequence
  Oligonucleotide for detection of SNP TSC0058106
cacgtaatcatat

SEQ ID NO: 238257 - DNA, 13 bp, Artificial Sequence
  Oligonucleotide for detection of SNP TSC0058109
gtaaaagtggtty

SEQ ID NO: 238258 - DNA, 13 bp, Artificial Sequence
  Oligonucleotide for detection of SNP TSC0058109
raaccacttttac

SEQ ID NO: 238259 - DNA, 13 bp, Artificial Sequence
  Oligonucleotide for detection of SNP TSC0058109
gtaaaaatggtty

SEQ ID NO: 238260 - DNA, 13 bp, Artificial Sequence
  Oligonucleotide for detection of SNP TSC0058109
raaccatttttac

SEQ ID NO: 238261 - DNA, 13 bp, Artificial Sequence
  Oligonucleotide for detection of SNP TSC0058110
tattagtaatatt

SEQ ID NO: 238262 - DNA, 13 bp, Artificial Sequence
  Oligonucleotide for detection of SNP TSC0058110
aatattactaata

SEQ ID NO: 238263 - DNA, 13 bp, Artificial Sequence
  Oligonucleotide for detection of SNP TSC0058110
tattaggaatatt

SEQ ID NO: 238264 - DNA, 13 bp, Artificial Sequence
  Oligonucleotide for detection of SNP TSC0058110
aatattcctaata

SEQ ID NO: 238265 - DNA, 13 bp, Artificial Sequence
  Oligonucleotide for detection of SNP TSC0058110
aatattgttgata

SEQ ID NO: 238266 - DNA, 13 bp, Artificial Sequence
  Oligonucleotide for detection of SNP TSC0058110
tatcaacaatatt

SEQ ID NO: 238267 - DNA, 13 bp, Artificial Sequence
  Oligonucleotide for detection of SNP TSC0058111
ttgttgaaggaat

SEQ ID NO: 238268 - DNA, 13 bp, Artificial Sequence
  Oligonucleotide for detection of SNP TSC0058111
attccttcaacaa

SEQ ID NO: 238269 - DNA, 13 bp, Artificial Sequence
  Oligonucleotide for detection of SNP TSC0058111
ttgttggaggaat

SEQ ID NO: 238270 - DNA, 13 bp, Artificial Sequence
  Oligonucleotide for detection of SNP TSC0058111
attcctccaacaa

SEQ ID NO: 238271 - DNA, 13 bp, Artificial Sequence
  Oligonucleotide for detection of SNP TSC0058115
tattataggtttt

SEQ ID NO: 238272 - DNA, 13 bp, Artificial Sequence
  Oligonucleotide for detection of SNP TSC0058115
aaaacctataata

SEQ ID NO: 238273 - DNA, 13 bp, Artificial Sequence
  Oligonucleotide for detection of SNP TSC0058115
tattatgggtttt

SEQ ID NO: 238274 - DNA, 13 bp, Artificial Sequence
  Oligonucleotide for detection of SNP TSC0058115
aaaacccataata

SEQ ID NO: 238275 - DNA, 13 bp, Artificial Sequence
  Oligonucleotide for detection of SNP TSC0058117
ttaggtaatttga

SEQ ID NO: 238276 - DNA, 13 bp, Artificial Sequence
  Oligonucleotide for detection of SNP TSC0058117
tcaaattacctaa

SEQ ID NO: 238277 - DNA, 13 bp, Artificial Sequence
  Oligonucleotide for detection of SNP TSC0058117
ttaggtgatttga

SEQ ID NO: 238278 - DNA, 13 bp, Artificial Sequence
  Oligonucleotide for detection of SNP TSC0058117
tcaaatcacctaa

SEQ ID NO: 238279 - DNA, 13 bp, Artificial Sequence
  Oligonucleotide for detection of SNP TSC0058117
ttaggcgatttga

SEQ ID NO: 238280 - DNA, 13 bp, Artificial Sequence
  Oligonucleotide for detection of SNP TSC0058117
tcaaatcgcctaa

SEQ ID NO: 238281 - DNA, 13 bp, Artificial Sequence
  Oligonucleotide for detection of SNP TSC0058117
ttagattgtttga

SEQ ID NO: 238282 - DNA, 13 bp, Artificial Sequence
  Oligonucleotide for detection of SNP TSC0058117
tcaaacaatctaa

SEQ ID NO: 238283 - DNA, 13 bp, Artificial Sequence
  Oligonucleotide for detection of SNP TSC0058117
ttagatcgtttga

SEQ ID NO: 238284 - DNA, 13 bp, Artificial Sequence
  Oligonucleotide for detection of SNP TSC0058117
tcaaacgatctaa

SEQ ID NO: 238285 - DNA, 13 bp, Artificial Sequence
  Oligonucleotide for detection of SNP TSC0058118
ttgtgtaattatt

SEQ ID NO: 238286 - DNA, 13 bp, Artificial Sequence
  Oligonucleotide for detection of SNP TSC0058118
aataattacacaa

SEQ ID NO: 238287 - DNA, 13 bp, Artificial Sequence
  Oligonucleotide for detection of SNP TSC0058118
ttgtgttattatt

SEQ ID NO: 238288 - DNA, 13 bp, Artificial Sequence
  Oligonucleotide for detection of SNP TSC0058118
aataataacacaa

SEQ ID NO: 238289 - DNA, 13 bp, Artificial Sequence
  Oligonucleotide for detection of SNP TSC0058118
aatgattatataa

SEQ ID NO: 238290 - DNA, 13 bp, Artificial Sequence
  Oligonucleotide for detection of SNP TSC0058118
ttatataatcatt

SEQ ID NO: 238291 - DNA, 13 bp, Artificial Sequence
  Oligonucleotide for detection of SNP TSC0058118
aatgatgatataa

SEQ ID NO: 238292 - DNA, 13 bp, Artificial Sequence
  Oligonucleotide for detection of SNP TSC0058118
ttatatcatcatt

SEQ ID NO: 238293 - DNA, 13 bp, Artificial Sequence
  Oligonucleotide for detection of SNP TSC0058120
atttgtaaaataa

SEQ ID NO: 238294 - DNA, 13 bp, Artificial Sequence
  Oligonucleotide for detection of SNP TSC0058120
ttattttacaaat

SEQ ID NO: 238295 - DNA, 13 bp, Artificial Sequence
  Oligonucleotide for detection of SNP TSC0058120
atttgttaaataa

SEQ ID NO: 238296 - DNA, 13 bp, Artificial Sequence
  Oligonucleotide for detection of SNP TSC0058120
ttatttaacaaat

SEQ ID NO: 238297 - DNA, 13 bp, Artificial Sequence
  Oligonucleotide for detection of SNP TSC0058120
ttattttatagat

SEQ ID NO: 238298 - DNA, 13 bp, Artificial Sequence
  Oligonucleotide for detection of SNP TSC0058120
atctataaaataa

SEQ ID NO: 238299 - DNA, 13 bp, Artificial Sequence
  Oligonucleotide for detection of SNP TSC0058120
ttatttaatagat

SEQ ID NO: 238300 - DNA, 13 bp, Artificial Sequence
  Oligonucleotide for detection of SNP TSC0058120
atctattaaataa

SEQ ID NO: 238301 - DNA, 13 bp, Artificial Sequence
  Oligonucleotide for detection of SNP TSC0058121
ttaaggaatttat

SEQ ID NO: 238302 - DNA, 13 bp, Artificial Sequence
  Oligonucleotide for detection of SNP TSC0058121
ataaattccttaa

SEQ ID NO: 238303 - DNA, 13 bp, Artificial Sequence
  Oligonucleotide for detection of SNP TSC0058121
ttaaggtatttat

SEQ ID NO: 238304 - DNA, 13 bp, Artificial Sequence
  Oligonucleotide for detection of SNP TSC0058121
ataaataccttaa

SEQ ID NO: 238305 - DNA, 13 bp, Artificial Sequence
  Oligonucleotide for detection of SNP TSC0058121
atagattttttaa

SEQ ID NO: 238306 - DNA, 13 bp, Artificial Sequence
  Oligonucleotide for detection of SNP TSC0058121
ttaaaaaatctat

SEQ ID NO: 238307 - DNA, 13 bp, Artificial Sequence
  Oligonucleotide for detection of SNP TSC0058121
atagatgttttaa

SEQ ID NO: 238308 - DNA, 13 bp, Artificial Sequence
  Oligonucleotide for detection of SNP TSC0058121
ttaaaacatctat

SEQ ID NO: 238309 - DNA, 13 bp, Artificial Sequence
  Oligonucleotide for detection of SNP TSC0004938
ttaggaattttgt

SEQ ID NO: 238310 - DNA, 13 bp, Artificial Sequence
  Oligonucleotide for detection of SNP TSC0004938
acaaaattcctaa

SEQ ID NO: 238311 - DNA, 13 bp, Artificial Sequence
  Oligonucleotide for detection of SNP TSC0004938
ttaggatttttgt

SEQ ID NO: 238312 - DNA, 13 bp, Artificial Sequence
  Oligonucleotide for detection of SNP TSC0004938
acaaaaatcctaa

SEQ ID NO: 238313 - DNA, 13 bp, Artificial Sequence
  Oligonucleotide for detection of SNP TSC0004938
atagggtttttaa

SEQ ID NO: 238314 - DNA, 13 bp, Artificial Sequence
  Oligonucleotide for detection of SNP TSC0004938
ttaaaaaccctat

SEQ ID NO: 238315 - DNA, 13 bp, Artificial Sequence
  Oligonucleotide for detection of SNP TSC0004938
atagggattttaa

SEQ ID NO: 238316 - DNA, 13 bp, Artificial Sequence
  Oligonucleotide for detection of SNP TSC0004938
ttaaaatccctat

SEQ ID NO: 238317 - DNA, 13 bp, Artificial Sequence
  Oligonucleotide for detection of SNP TSC0058122
tttggttttttgt

SEQ ID NO: 238318 - DNA, 13 bp, Artificial Sequence
  Oligonucleotide for detection of SNP TSC0058122
acaaaaaaccaaa

SEQ ID NO: 238319 - DNA, 13 bp, Artificial Sequence
  Oligonucleotide for detection of SNP TSC0058122
atagaatattaag

SEQ ID NO: 238320 - DNA, 13 bp, Artificial Sequence
  Oligonucleotide for detection of SNP TSC0058122
cttaatattctat

SEQ ID NO: 238321 - DNA, 13 bp, Artificial Sequence
  Oligonucleotide for detection of SNP TSC0058122
atagaagattaag

SEQ ID NO: 238322 - DNA, 13 bp, Artificial Sequence
  Oligonucleotide for detection of SNP TSC0058122
cttaatcttctat

SEQ ID NO: 238323 - DNA, 13 bp, Artificial Sequence
  Oligonucleotide for detection of SNP TSC0058123
tttaagtttttay

SEQ ID NO: 238324 - DNA, 13 bp, Artificial Sequence
  Oligonucleotide for detection of SNP TSC0058123
rtaaaaacttaaa

SEQ ID NO: 238325 - DNA, 13 bp, Artificial Sequence
  Oligonucleotide for detection of SNP TSC0058123
tttaaggttttay

SEQ ID NO: 238326 - DNA, 13 bp, Artificial Sequence
  Oligonucleotide for detection of SNP TSC0058123
rtaaaaccttaaa

SEQ ID NO: 238327 - DNA, 13 bp, Artificial Sequence
  Oligonucleotide for detection of SNP TSC0058123
gtgggagtttgga

SEQ ID NO: 238328 - DNA, 13 bp, Artificial Sequence
  Oligonucleotide for detection of SNP TSC0058123
tccaaactcccac

SEQ ID NO: 238329 - DNA, 13 bp, Artificial Sequence
  Oligonucleotide for detection of SNP TSC0058123
gtgggattttgga

SEQ ID NO: 238330 - DNA, 13 bp, Artificial Sequence
  Oligonucleotide for detection of SNP TSC0058123
tccaaaatcccac

SEQ ID NO: 238331 - DNA, 13 bp, Artificial Sequence
  Oligonucleotide for detection of SNP TSC0058124
attgtagttttat

SEQ ID NO: 238332 - DNA, 13 bp, Artificial Sequence
  Oligonucleotide for detection of SNP TSC0058124
ataaaactacaat

SEQ ID NO: 238333 - DNA, 13 bp, Artificial Sequence
  Oligonucleotide for detection of SNP TSC0058125
atgatagataagt

SEQ ID NO: 238334 - DNA, 13 bp, Artificial Sequence
  Oligonucleotide for detection of SNP TSC0058125
acttatctatcat

SEQ ID NO: 238335 - DNA, 13 bp, Artificial Sequence
  Oligonucleotide for detection of SNP TSC0058125
atgataaataagt

SEQ ID NO: 238336 - DNA, 13 bp, Artificial Sequence
  Oligonucleotide for detection of SNP TSC0058125
acttatttatcat

SEQ ID NO: 238337 - DNA, 13 bp, Artificial Sequence
  Oligonucleotide for detection of SNP TSC0058126
ttgatagttttga

SEQ ID NO: 238338 - DNA, 13 bp, Artificial Sequence
  Oligonucleotide for detection of SNP TSC0058126
tcaaaactatcaa

SEQ ID NO: 238339 - DNA, 13 bp, Artificial Sequence
  Oligonucleotide for detection of SNP TSC0058126
ttgataattttga

SEQ ID NO: 238340 - DNA, 13 bp, Artificial Sequence
  Oligonucleotide for detection of SNP TSC0058126
tcaaaattatcaa

SEQ ID NO: 238341 - DNA, 13 bp, Artificial Sequence
  Oligonucleotide for detection of SNP TSC0058130
gttagaattgaay

SEQ ID NO: 238342 - DNA, 13 bp, Artificial Sequence
  Oligonucleotide for detection of SNP TSC0058130
rttcaattctaac

SEQ ID NO: 238343 - DNA, 13 bp, Artificial Sequence
  Oligonucleotide for detection of SNP TSC0058130
gttagatttgaay

SEQ ID NO: 238344 - DNA, 13 bp, Artificial Sequence
  Oligonucleotide for detection of SNP TSC0058130
rttcaaatctaac

SEQ ID NO: 238345 - DNA, 13 bp, Artificial Sequence
  Oligonucleotide for detection of SNP TSC0058130
gtttaattttgay

SEQ ID NO: 238346 - DNA, 13 bp, Artificial Sequence
  Oligonucleotide for detection of SNP TSC0058130
rtcaaaattaaac

SEQ ID NO: 238347 - DNA, 13 bp, Artificial Sequence
  Oligonucleotide for detection of SNP TSC0058130
gtttaaatttgay

SEQ ID NO: 238348 - DNA, 13 bp, Artificial Sequence
  Oligonucleotide for detection of SNP TSC0058130
rtcaaatttaaac

SEQ ID NO: 238349 - DNA, 13 bp, Artificial Sequence
  Oligonucleotide for detection of SNP TSC0058131
tttaggggtttty

SEQ ID NO: 238350 - DNA, 13 bp, Artificial Sequence
  Oligonucleotide for detection of SNP TSC0058131
raaaacccctaaa

SEQ ID NO: 238351 - DNA, 13 bp, Artificial Sequence
  Oligonucleotide for detection of SNP TSC0008626
gaaggatgttttt

SEQ ID NO: 238352 - DNA, 13 bp, Artificial Sequence
  Oligonucleotide for detection of SNP TSC0008626
aaaaacatccttc

SEQ ID NO: 238353 - DNA, 13 bp, Artificial Sequence
  Oligonucleotide for detection of SNP TSC0008626
gaaggaagttttt

SEQ ID NO: 238354 - DNA, 13 bp, Artificial Sequence
  Oligonucleotide for detection of SNP TSC0008626
aaaaacttccttc

SEQ ID NO: 238355 - DNA, 13 bp, Artificial Sequence
  Oligonucleotide for detection of SNP TSC0058136
ttaattgataatt

SEQ ID NO: 238356 - DNA, 13 bp, Artificial Sequence
  Oligonucleotide for detection of SNP TSC0058136
aattatcaattaa

SEQ ID NO: 238357 - DNA, 13 bp, Artificial Sequence
  Oligonucleotide for detection of SNP TSC0058136
ttaattaataatt

SEQ ID NO: 238358 - DNA, 13 bp, Artificial Sequence
  Oligonucleotide for detection of SNP TSC0058136
aattattaattaa

SEQ ID NO: 238359 - DNA, 13 bp, Artificial Sequence
  Oligonucleotide for detection of SNP TSC0058137
ggttgaagtgggt

SEQ ID NO: 238360 - DNA, 13 bp, Artificial Sequence
  Oligonucleotide for detection of SNP TSC0058137
acccacttcaacc

SEQ ID NO: 238361 - DNA, 13 bp, Artificial Sequence
  Oligonucleotide for detection of SNP TSC0058137
ggttgaggtgggt

SEQ ID NO: 238362 - DNA, 13 bp, Artificial Sequence
  Oligonucleotide for detection of SNP TSC0058137
acccacctcaacc

SEQ ID NO: 238363 - DNA, 13 bp, Artificial Sequence
  Oligonucleotide for detection of SNP TSC0058138
atatatattatga

SEQ ID NO: 238364 - DNA, 13 bp, Artificial Sequence
  Oligonucleotide for detection of SNP TSC0058138
tcataatatatat

SEQ ID NO: 238365 - DNA, 13 bp, Artificial Sequence
  Oligonucleotide for detection of SNP TSC0058138
atatatgttatga

SEQ ID NO: 238366 - DNA, 13 bp, Artificial Sequence
  Oligonucleotide for detection of SNP TSC0058138
tcataacatatat

SEQ ID NO: 238367 - DNA, 13 bp, Artificial Sequence
  Oligonucleotide for detection of SNP TSC0058138
atatacgttatga

SEQ ID NO: 238368 - DNA, 13 bp, Artificial Sequence
  Oligonucleotide for detection of SNP TSC0058138
tcataacgtatat

SEQ ID NO: 238369 - DNA, 13 bp, Artificial Sequence
  Oligonucleotide for detection of SNP TSC0058138
ttatgatgtatat

SEQ ID NO: 238370 - DNA, 13 bp, Artificial Sequence
  Oligonucleotide for detection of SNP TSC0058138
atatacatcataa

SEQ ID NO: 238371 - DNA, 13 bp, Artificial Sequence
  Oligonucleotide for detection of SNP TSC0058138
ttatgacgtatat

SEQ ID NO: 238372 - DNA, 13 bp, Artificial Sequence
  Oligonucleotide for detection of SNP TSC0058138
atatacgtcataa

SEQ ID NO: 238373 - DNA, 13 bp, Artificial Sequence
  Oligonucleotide for detection of SNP TSC0058140
aaaataatggttg

SEQ ID NO: 238374 - DNA, 13 bp, Artificial Sequence
  Oligonucleotide for detection of SNP TSC0058140
caaccattatttt

SEQ ID NO: 238375 - DNA, 13 bp, Artificial Sequence
  Oligonucleotide for detection of SNP TSC0058140
aaaatattggttg

SEQ ID NO: 238376 - DNA, 13 bp, Artificial Sequence
  Oligonucleotide for detection of SNP TSC0058140
caaccaatatttt

SEQ ID NO: 238377 - DNA, 13 bp, Artificial Sequence
  Oligonucleotide for detection of SNP TSC0005876
tagtggagtttty

SEQ ID NO: 238378 - DNA, 13 bp, Artificial Sequence
  Oligonucleotide for detection of SNP TSC0005876
raaaactccacta

SEQ ID NO: 238379 - DNA, 13 bp, Artificial Sequence
  Oligonucleotide for detection of SNP TSC0005876
tagtggggtttty

SEQ ID NO: 238380 - DNA, 13 bp, Artificial Sequence
  Oligonucleotide for detection of SNP TSC0005876
raaaaccccacta

SEQ ID NO: 238381 - DNA, 13 bp, Artificial Sequence
  Oligonucleotide for detection of SNP TSC0058141
gtggtatgtgaag

SEQ ID NO: 238382 - DNA, 13 bp, Artificial Sequence
  Oligonucleotide for detection of SNP TSC0058141
cttcacataccac

SEQ ID NO: 238383 - DNA, 13 bp, Artificial Sequence
  Oligonucleotide for detection of SNP TSC0058141
gtggtaggtgaag

SEQ ID NO: 238384 - DNA, 13 bp, Artificial Sequence
  Oligonucleotide for detection of SNP TSC0058141
cttcacctaccac

SEQ ID NO: 238385 - DNA, 13 bp, Artificial Sequence
  Oligonucleotide for detection of SNP TSC0058142
gtttattgtatty

SEQ ID NO: 238386 - DNA, 13 bp, Artificial Sequence
  Oligonucleotide for detection of SNP TSC0058142
raatacaataaac

SEQ ID NO: 238387 - DNA, 13 bp, Artificial Sequence
  Oligonucleotide for detection of SNP TSC0058142
gtttatcgtatty

SEQ ID NO: 238388 - DNA, 13 bp, Artificial Sequence
  Oligonucleotide for detection of SNP TSC0058142
raatacgataaac

SEQ ID NO: 238389 - DNA, 13 bp, Artificial Sequence
  Oligonucleotide for detection of SNP TSC0058142
gaatatggtagay

SEQ ID NO: 238390 - DNA, 13 bp, Artificial Sequence
  Oligonucleotide for detection of SNP TSC0058142
rtctaccatattc

SEQ ID NO: 238391 - DNA, 13 bp, Artificial Sequence
  Oligonucleotide for detection of SNP TSC0058142
gaatatagtagay

SEQ ID NO: 238392 - DNA, 13 bp, Artificial Sequence
  Oligonucleotide for detection of SNP TSC0058142
rtctactatattc

SEQ ID NO: 238393 - DNA, 13 bp, Artificial Sequence
  Oligonucleotide for detection of SNP TSC0058142
gaatacggtagay

SEQ ID NO: 238394 - DNA, 13 bp, Artificial Sequence
  Oligonucleotide for detection of SNP TSC0058142
rtctaccgtattc

SEQ ID NO: 238395 - DNA, 13 bp, Artificial Sequence
  Oligonucleotide for detection of SNP TSC0058150
gatataagaatga

SEQ ID NO: 238396 - DNA, 13 bp, Artificial Sequence
  Oligonucleotide for detection of SNP TSC0058150
tcattcttatatc

SEQ ID NO: 238397 - DNA, 13 bp, Artificial Sequence
  Oligonucleotide for detection of SNP TSC0058150
gatataggaatga

SEQ ID NO: 238398 - DNA, 13 bp, Artificial Sequence
  Oligonucleotide for detection of SNP TSC0058150
tcattcctatatc

SEQ ID NO: 238399 - DNA, 13 bp, Artificial Sequence
  Oligonucleotide for detection of SNP TSC0058151
tgtagttgtttat

SEQ ID NO: 238400 - DNA, 13 bp, Artificial Sequence
  Oligonucleotide for detection of SNP TSC0058151
ataaacaactaca

SEQ ID NO: 238401 - DNA, 13 bp, Artificial Sequence
  Oligonucleotide for detection of SNP TSC0058151
cgtagttgtttat

SEQ ID NO: 238402 - DNA, 13 bp, Artificial Sequence
  Oligonucleotide for detection of SNP TSC0058151
ataaacaactacg

SEQ ID NO: 238403 - DNA, 13 bp, Artificial Sequence
  Oligonucleotide for detection of SNP TSC0058151
cgtagtggtttat

SEQ ID NO: 238404 - DNA, 13 bp, Artificial Sequence
  Oligonucleotide for detection of SNP TSC0058151
ataaaccactacg

SEQ ID NO: 238405 - DNA, 13 bp, Artificial Sequence
  Oligonucleotide for detection of SNP TSC0058151
ataagtaattatg

SEQ ID NO: 238406 - DNA, 13 bp, Artificial Sequence
  Oligonucleotide for detection of SNP TSC0058151
cataattacttat

SEQ ID NO: 238407 - DNA, 13 bp, Artificial Sequence
  Oligonucleotide for detection of SNP TSC0058151
ataagttattatg

SEQ ID NO: 238408 - DNA, 13 bp, Artificial Sequence
  Oligonucleotide for detection of SNP TSC0058151
cataataacttat

SEQ ID NO: 238409 - DNA, 13 bp, Artificial Sequence
  Oligonucleotide for detection of SNP TSC0058151
ataagtaattacg

SEQ ID NO: 238410 - DNA, 13 bp, Artificial Sequence
  Oligonucleotide for detection of SNP TSC0058151
cgtaattacttat

SEQ ID NO: 238411 - DNA, 13 bp, Artificial Sequence
  Oligonucleotide for detection of SNP TSC0058151
ataagttattacg

SEQ ID NO: 238412 - DNA, 13 bp, Artificial Sequence
  Oligonucleotide for detection of SNP TSC0058151
cgtaataacttat

SEQ ID NO: 238413 - DNA, 13 bp, Artificial Sequence
  Oligonucleotide for detection of SNP TSC0058153
ggttattttttgt

SEQ ID NO: 238414 - DNA, 13 bp, Artificial Sequence
  Oligonucleotide for detection of SNP TSC0058153
acaaaaaataacc

SEQ ID NO: 238415 - DNA, 13 bp, Artificial Sequence
  Oligonucleotide for detection of SNP TSC0058153
ggttatgttttgt

SEQ ID NO: 238416 - DNA, 13 bp, Artificial Sequence
  Oligonucleotide for detection of SNP TSC0058153
acaaaacataacc

SEQ ID NO: 238417 - DNA, 13 bp, Artificial Sequence
  Oligonucleotide for detection of SNP TSC0058153
ggttatttttcgt

SEQ ID NO: 238418 - DNA, 13 bp, Artificial Sequence
  Oligonucleotide for detection of SNP TSC0058153
acgaaaaataacc

SEQ ID NO: 238419 - DNA, 13 bp, Artificial Sequence
  Oligonucleotide for detection of SNP TSC0058153
ggttacgttttgt

SEQ ID NO: 238420 - DNA, 13 bp, Artificial Sequence
  Oligonucleotide for detection of SNP TSC0058153
acaaaacgtaacc

SEQ ID NO: 238421 - DNA, 13 bp, Artificial Sequence
  Oligonucleotide for detection of SNP TSC0058153
ggttatgtttcgt

SEQ ID NO: 238422 - DNA, 13 bp, Artificial Sequence
  Oligonucleotide for detection of SNP TSC0058153
acgaaacataacc

SEQ ID NO: 238423 - DNA, 13 bp, Artificial Sequence
  Oligonucleotide for detection of SNP TSC0058153
ggttacgtttcgt

SEQ ID NO: 238424 - DNA, 13 bp, Artificial Sequence
  Oligonucleotide for detection of SNP TSC0058153
acgaaacgtaacc

SEQ ID NO: 238425 - DNA, 13 bp, Artificial Sequence
  Oligonucleotide for detection of SNP TSC0058153
atgaaaagtggty

SEQ ID NO: 238426 - DNA, 13 bp, Artificial Sequence
  Oligonucleotide for detection of SNP TSC0058153
raccacttttcat

SEQ ID NO: 238427 - DNA, 13 bp, Artificial Sequence
  Oligonucleotide for detection of SNP TSC0058153
atgaaatgtggty

SEQ ID NO: 238428 - DNA, 13 bp, Artificial Sequence
  Oligonucleotide for detection of SNP TSC0058153
raccacatttcat

SEQ ID NO: 238429 - DNA, 13 bp, Artificial Sequence
  Oligonucleotide for detection of SNP TSC0058153
acgaaaagtggty

SEQ ID NO: 238430 - DNA, 13 bp, Artificial Sequence
  Oligonucleotide for detection of SNP TSC0058153
raccacttttcgt

SEQ ID NO: 238431 - DNA, 13 bp, Artificial Sequence
  Oligonucleotide for detection of SNP TSC0058153
acgaaatgtggty

SEQ ID NO: 238432 - DNA, 13 bp, Artificial Sequence
  Oligonucleotide for detection of SNP TSC0058153
raccacatttcgt

SEQ ID NO: 238433 - DNA, 13 bp, Artificial Sequence
  Oligonucleotide for detection of SNP TSC0058153
atgaaacgtggty

SEQ ID NO: 238434 - DNA, 13 bp, Artificial Sequence
  Oligonucleotide for detection of SNP TSC0058153
raccacgtttcat

SEQ ID NO: 238435 - DNA, 13 bp, Artificial Sequence
  Oligonucleotide for detection of SNP TSC0058153
acgaaacgtggty

SEQ ID NO: 238436 - DNA, 13 bp, Artificial Sequence
  Oligonucleotide for detection of SNP TSC0058153
raccacgtttcgt

SEQ ID NO: 238437 - DNA, 13 bp, Artificial Sequence
  Oligonucleotide for detection of SNP TSC0058154
tgattagtttaty

SEQ ID NO: 238438 - DNA, 13 bp, Artificial Sequence
  Oligonucleotide for detection of SNP TSC0058154
rataaactaatca

SEQ ID NO: 238439 - DNA, 13 bp, Artificial Sequence
  Oligonucleotide for detection of SNP TSC0058154
tgattaatttaty

SEQ ID NO: 238440 - DNA, 13 bp, Artificial Sequence
  Oligonucleotide for detection of SNP TSC0058154
rataaattaatca

SEQ ID NO: 238441 - DNA, 13 bp, Artificial Sequence
  Oligonucleotide for detection of SNP TSC0058156
gtgatttttgatt

SEQ ID NO: 238442 - DNA, 13 bp, Artificial Sequence
  Oligonucleotide for detection of SNP TSC0058156
aatcaaaaatcac

SEQ ID NO: 238443 - DNA, 13 bp, Artificial Sequence
  Oligonucleotide for detection of SNP TSC0058156
gtgattgttgatt

SEQ ID NO: 238444 - DNA, 13 bp, Artificial Sequence
  Oligonucleotide for detection of SNP TSC0058156
aatcaacaatcac

SEQ ID NO: 238445 - DNA, 13 bp, Artificial Sequence
  Oligonucleotide for detection of SNP TSC0058156
gtgatcgttgatt

SEQ ID NO: 238446 - DNA, 13 bp, Artificial Sequence
  Oligonucleotide for detection of SNP TSC0058156
aatcaacgatcac

SEQ ID NO: 238447 - DNA, 13 bp, Artificial Sequence
  Oligonucleotide for detection of SNP TSC0058156
agttaggggttay

SEQ ID NO: 238448 - DNA, 13 bp, Artificial Sequence
  Oligonucleotide for detection of SNP TSC0058156
rtaacccctaact

SEQ ID NO: 238449 - DNA, 13 bp, Artificial Sequence
  Oligonucleotide for detection of SNP TSC0058156
agttagtggttay

SEQ ID NO: 238450 - DNA, 13 bp, Artificial Sequence
  Oligonucleotide for detection of SNP TSC0058156
rtaaccactaact

SEQ ID NO: 238451 - DNA, 13 bp, Artificial Sequence
  Oligonucleotide for detection of SNP TSC0058156
agttagcggttay

SEQ ID NO: 238452 - DNA, 13 bp, Artificial Sequence
  Oligonucleotide for detection of SNP TSC0058156
rtaaccgctaact

SEQ ID NO: 238453 - DNA, 13 bp, Artificial Sequence
  Oligonucleotide for detection of SNP TSC0058158
gagttttggatga

SEQ ID NO: 238454 - DNA, 13 bp, Artificial Sequence
  Oligonucleotide for detection of SNP TSC0058158
tcatccaaaactc

SEQ ID NO: 238455 - DNA, 13 bp, Artificial Sequence
  Oligonucleotide for detection of SNP TSC0058158
gagtttcggatga

SEQ ID NO: 238456 - DNA, 13 bp, Artificial Sequence
  Oligonucleotide for detection of SNP TSC0058158
tcatccgaaactc

SEQ ID NO: 238457 - DNA, 13 bp, Artificial Sequence
  Oligonucleotide for detection of SNP TSC0058158
ttatttgaggtty

SEQ ID NO: 238458 - DNA, 13 bp, Artificial Sequence
  Oligonucleotide for detection of SNP TSC0058158
raacctcaaataa

SEQ ID NO: 238459 - DNA, 13 bp, Artificial Sequence
  Oligonucleotide for detection of SNP TSC0058158
ttatttaaggtty

SEQ ID NO: 238460 - DNA, 13 bp, Artificial Sequence
  Oligonucleotide for detection of SNP TSC0058158
raaccttaaataa

SEQ ID NO: 238461 - DNA, 13 bp, Artificial Sequence
  Oligonucleotide for detection of SNP TSC0058158
ttattcgaggtty

SEQ ID NO: 238462 - DNA, 13 bp, Artificial Sequence
  Oligonucleotide for detection of SNP TSC0058158
raacctcgaataa

SEQ ID NO: 238463 - DNA, 13 bp, Artificial Sequence
  Oligonucleotide for detection of SNP TSC0007146
gttatataaaaaa

SEQ ID NO: 238464 - DNA, 13 bp, Artificial Sequence
  Oligonucleotide for detection of SNP TSC0007146
ttttttatataac

SEQ ID NO: 238465 - DNA, 13 bp, Artificial Sequence
  Oligonucleotide for detection of SNP TSC0007146
gttatagaaaaaa

SEQ ID NO: 238466 - DNA, 13 bp, Artificial Sequence
  Oligonucleotide for detection of SNP TSC0007146
ttttttctataac

SEQ ID NO: 238467 - DNA, 13 bp, Artificial Sequence
  Oligonucleotide for detection of SNP TSC0007146
ttttttgtatgay

SEQ ID NO: 238468 - DNA, 13 bp, Artificial Sequence
  Oligonucleotide for detection of SNP TSC0007146
rtcatacaaaaaa

SEQ ID NO: 238469 - DNA, 13 bp, Artificial Sequence
  Oligonucleotide for detection of SNP TSC0007146
ttttttttatgay

SEQ ID NO: 238470 - DNA, 13 bp, Artificial Sequence
  Oligonucleotide for detection of SNP TSC0007146
rtcataaaaaaaa

SEQ ID NO: 238471 - DNA, 13 bp, Artificial Sequence
  Oligonucleotide for detection of SNP TSC0058159
aataagggtatat

SEQ ID NO: 238472 - DNA, 13 bp, Artificial Sequence
  Oligonucleotide for detection of SNP TSC0058159
atatacccttatt

SEQ ID NO: 238473 - DNA, 13 bp, Artificial Sequence
  Oligonucleotide for detection of SNP TSC0058159
aataagagtatat

SEQ ID NO: 238474 - DNA, 13 bp, Artificial Sequence
  Oligonucleotide for detection of SNP TSC0058159
atatactcttatt

SEQ ID NO: 238475 - DNA, 13 bp, Artificial Sequence
  Oligonucleotide for detection of SNP TSC0006692
gagaagttttgay

SEQ ID NO: 238476 - DNA, 13 bp, Artificial Sequence
  Oligonucleotide for detection of SNP TSC0006692
rtcaaaacttctc

SEQ ID NO: 238477 - DNA, 13 bp, Artificial Sequence
  Oligonucleotide for detection of SNP TSC0006692
gagaaggtttgay

SEQ ID NO: 238478 - DNA, 13 bp, Artificial Sequence
  Oligonucleotide for detection of SNP TSC0006692
rtcaaaccttctc

SEQ ID NO: 238479 - DNA, 13 bp, Artificial Sequence
  Oligonucleotide for detection of SNP TSC0006692
gttaaggttttty

SEQ ID NO: 238480 - DNA, 13 bp, Artificial Sequence
  Oligonucleotide for detection of SNP TSC0006692
raaaaaccttaac

SEQ ID NO: 238481 - DNA, 13 bp, Artificial Sequence
  Oligonucleotide for detection of SNP TSC0006692
gttaagtttttty

SEQ ID NO: 238482 - DNA, 13 bp, Artificial Sequence
  Oligonucleotide for detection of SNP TSC0006692
raaaaaacttaac

SEQ ID NO: 238483 - DNA, 13 bp, Artificial Sequence
  Oligonucleotide for detection of SNP TSC0007275
tttttagtttaty

SEQ ID NO: 238484 - DNA, 13 bp, Artificial Sequence
  Oligonucleotide for detection of SNP TSC0007275
rataaactaaaaa

SEQ ID NO: 238485 - DNA, 13 bp, Artificial Sequence
  Oligonucleotide for detection of SNP TSC0058162
taattaaggtaat

SEQ ID NO: 238486 - DNA, 13 bp, Artificial Sequence
  Oligonucleotide for detection of SNP TSC0058162
attaccttaatta

SEQ ID NO: 238487 - DNA, 13 bp, Artificial Sequence
  Oligonucleotide for detection of SNP TSC0058162
taattatggtaat

SEQ ID NO: 238488 - DNA, 13 bp, Artificial Sequence
  Oligonucleotide for detection of SNP TSC0058162
attaccataatta

SEQ ID NO: 238489 - DNA, 13 bp, Artificial Sequence
  Oligonucleotide for detection of SNP TSC0058162
attgttttggtta

SEQ ID NO: 238490 - DNA, 13 bp, Artificial Sequence
  Oligonucleotide for detection of SNP TSC0058162
taaccaaaacaat

SEQ ID NO: 238491 - DNA, 13 bp, Artificial Sequence
  Oligonucleotide for detection of SNP TSC0058162
attgttatggtta

SEQ ID NO: 238492 - DNA, 13 bp, Artificial Sequence
  Oligonucleotide for detection of SNP TSC0058162
taaccataacaat

SEQ ID NO: 238493 - DNA, 13 bp, Artificial Sequence
  Oligonucleotide for detection of SNP TSC0058163
attttatgtagta

SEQ ID NO: 238494 - DNA, 13 bp, Artificial Sequence
  Oligonucleotide for detection of SNP TSC0058163
tactacataaaat

SEQ ID NO: 238495 - DNA, 13 bp, Artificial Sequence
  Oligonucleotide for detection of SNP TSC0058163
attttacgtagta

SEQ ID NO: 238496 - DNA, 13 bp, Artificial Sequence
  Oligonucleotide for detection of SNP TSC0058163
tactacgtaaaat

SEQ ID NO: 238497 - DNA, 13 bp, Artificial Sequence
  Oligonucleotide for detection of SNP TSC0058164
gttttttgggatt

SEQ ID NO: 238498 - DNA, 13 bp, Artificial Sequence
  Oligonucleotide for detection of SNP TSC0058164
aatcccaaaaaac

SEQ ID NO: 238499 - DNA, 13 bp, Artificial Sequence
  Oligonucleotide for detection of SNP TSC0058164
gtttttcgggatt

SEQ ID NO: 238500 - DNA, 13 bp, Artificial Sequence
  Oligonucleotide for detection of SNP TSC0058164
aatcccgaaaaac

SEQ ID NO: 238501 - DNA, 13 bp, Artificial Sequence
  Oligonucleotide for detection of SNP TSC0058164
aattttgggaggy

SEQ ID NO: 238502 - DNA, 13 bp, Artificial Sequence
  Oligonucleotide for detection of SNP TSC0058164
rcctcccaaaatt

SEQ ID NO: 238503 - DNA, 13 bp, Artificial Sequence
  Oligonucleotide for detection of SNP TSC0058164
aattttaggaggy

SEQ ID NO: 238504 - DNA, 13 bp, Artificial Sequence
  Oligonucleotide for detection of SNP TSC0058164
rcctcctaaaatt

SEQ ID NO: 238505 - DNA, 13 bp, Artificial Sequence
  Oligonucleotide for detection of SNP TSC0058164
aatttcgggaggy

SEQ ID NO: 238506 - DNA, 13 bp, Artificial Sequence
  Oligonucleotide for detection of SNP TSC0058164
rcctcccgaaatt

SEQ ID NO: 238507 - DNA, 13 bp, Artificial Sequence
  Oligonucleotide for detection of SNP TSC0058165
tgagtgggtgtta

SEQ ID NO: 238508 - DNA, 13 bp, Artificial Sequence
  Oligonucleotide for detection of SNP TSC0058165
taacacccactca

SEQ ID NO: 238509 - DNA, 13 bp, Artificial Sequence
  Oligonucleotide for detection of SNP TSC0058165
cgagtgtgtgtta

SEQ ID NO: 238510 - DNA, 13 bp, Artificial Sequence
  Oligonucleotide for detection of SNP TSC0058165
taacacacactcg

SEQ ID NO: 238511 - DNA, 13 bp, Artificial Sequence
  Oligonucleotide for detection of SNP TSC0058165
cgagtgggtgtta

SEQ ID NO: 238512 - DNA, 13 bp, Artificial Sequence
  Oligonucleotide for detection of SNP TSC0058165
taacacccactcg

SEQ ID NO: 238513 - DNA, 13 bp, Artificial Sequence
  Oligonucleotide for detection of SNP TSC0058165
cgagtgcgtgtta

SEQ ID NO: 238514 - DNA, 13 bp, Artificial Sequence
  Oligonucleotide for detection of SNP TSC0058165
taacacgcactcg

SEQ ID NO: 238515 - DNA, 13 bp, Artificial Sequence
  Oligonucleotide for detection of SNP TSC0058165
taatatgtatttg

SEQ ID NO: 238516 - DNA, 13 bp, Artificial Sequence
  Oligonucleotide for detection of SNP TSC0058165
caaatacatatta

SEQ ID NO: 238517 - DNA, 13 bp, Artificial Sequence
  Oligonucleotide for detection of SNP TSC0058165
taatatttatttg

SEQ ID NO: 238518 - DNA, 13 bp, Artificial Sequence
  Oligonucleotide for detection of SNP TSC0058165
caaataaatatta

SEQ ID NO: 238519 - DNA, 13 bp, Artificial Sequence
  Oligonucleotide for detection of SNP TSC0058165
taatacgtatttg

SEQ ID NO: 238520 - DNA, 13 bp, Artificial Sequence
  Oligonucleotide for detection of SNP TSC0058165
caaatacgtatta

SEQ ID NO: 238521 - DNA, 13 bp, Artificial Sequence
  Oligonucleotide for detection of SNP TSC0058165
taatatttattcg

SEQ ID NO: 238522 - DNA, 13 bp, Artificial Sequence
  Oligonucleotide for detection of SNP TSC0058165
cgaataaatatta

SEQ ID NO: 238523 - DNA, 13 bp, Artificial Sequence
  Oligonucleotide for detection of SNP TSC0058165
taatatgtattcg

SEQ ID NO: 238524 - DNA, 13 bp, Artificial Sequence
  Oligonucleotide for detection of SNP TSC0058165
cgaatacatatta

SEQ ID NO: 238525 - DNA, 13 bp, Artificial Sequence
  Oligonucleotide for detection of SNP TSC0058165
taatacgtattcg

SEQ ID NO: 238526 - DNA, 13 bp, Artificial Sequence
  Oligonucleotide for detection of SNP TSC0058165
cgaatacgtatta

SEQ ID NO: 238527 - DNA, 13 bp, Artificial Sequence
  Oligonucleotide for detection of SNP TSC0058167
aattatagatgty

SEQ ID NO: 238528 - DNA, 13 bp, Artificial Sequence
  Oligonucleotide for detection of SNP TSC0058167
racatctataatt

SEQ ID NO: 238529 - DNA, 13 bp, Artificial Sequence
  Oligonucleotide for detection of SNP TSC0058167
aattatggatgty

SEQ ID NO: 238530 - DNA, 13 bp, Artificial Sequence
  Oligonucleotide for detection of SNP TSC0058167
racatccataatt

SEQ ID NO: 238531 - DNA, 13 bp, Artificial Sequence
  Oligonucleotide for detection of SNP TSC0058168
ttgtatagattta

SEQ ID NO: 238532 - DNA, 13 bp, Artificial Sequence
  Oligonucleotide for detection of SNP TSC0058168
taaatctatacaa

SEQ ID NO: 238533 - DNA, 13 bp, Artificial Sequence
  Oligonucleotide for detection of SNP TSC0058168
ttgtatggattta

SEQ ID NO: 238534 - DNA, 13 bp, Artificial Sequence
  Oligonucleotide for detection of SNP TSC0058168
taaatccatacaa

SEQ ID NO: 238535 - DNA, 13 bp, Artificial Sequence
  Oligonucleotide for detection of SNP TSC0010153
aatttatggttgy

SEQ ID NO: 238536 - DNA, 13 bp, Artificial Sequence
  Oligonucleotide for detection of SNP TSC0010153
rcaaccataaatt

SEQ ID NO: 238537 - DNA, 13 bp, Artificial Sequence
  Oligonucleotide for detection of SNP TSC0010153
aatttacggttgy

SEQ ID NO: 238538 - DNA, 13 bp, Artificial Sequence
  Oligonucleotide for detection of SNP TSC0010153
rcaaccgtaaatt

SEQ ID NO: 238539 - DNA, 13 bp, Artificial Sequence
  Oligonucleotide for detection of SNP TSC0058169
ggattaaaataag

SEQ ID NO: 238540 - DNA, 13 bp, Artificial Sequence
  Oligonucleotide for detection of SNP TSC0058169
cttattttaatcc

SEQ ID NO: 238541 - DNA, 13 bp, Artificial Sequence
  Oligonucleotide for detection of SNP TSC0058169
ggattagaataag

SEQ ID NO: 238542 - DNA, 13 bp, Artificial Sequence
  Oligonucleotide for detection of SNP TSC0058169
cttattctaatcc

SEQ ID NO: 238543 - DNA, 13 bp, Artificial Sequence
  Oligonucleotide for detection of SNP TSC0058170
taaattatatata

SEQ ID NO: 238544 - DNA, 13 bp, Artificial Sequence
  Oligonucleotide for detection of SNP TSC0058170
tatatataattta

SEQ ID NO: 238545 - DNA, 13 bp, Artificial Sequence
  Oligonucleotide for detection of SNP TSC0058170
taaattgtatata

SEQ ID NO: 238546 - DNA, 13 bp, Artificial Sequence
  Oligonucleotide for detection of SNP TSC0058170
tatatacaattta

SEQ ID NO: 238547 - DNA, 13 bp, Artificial Sequence
  Oligonucleotide for detection of SNP TSC0058172
attttttggggay

SEQ ID NO: 238548 - DNA, 13 bp, Artificial Sequence
  Oligonucleotide for detection of SNP TSC0058172
rtccccaaaaaat

SEQ ID NO: 238549 - DNA, 13 bp, Artificial Sequence
  Oligonucleotide for detection of SNP TSC0058172
atttttgggggay

SEQ ID NO: 238550 - DNA, 13 bp, Artificial Sequence
  Oligonucleotide for detection of SNP TSC0058172
rtcccccaaaaat

SEQ ID NO: 238551 - DNA, 13 bp, Artificial Sequence
  Oligonucleotide for detection of SNP TSC0058172
gtttttaaaaagt

SEQ ID NO: 238552 - DNA, 13 bp, Artificial Sequence
  Oligonucleotide for detection of SNP TSC0058172
actttttaaaaac

SEQ ID NO: 238553 - DNA, 13 bp, Artificial Sequence
  Oligonucleotide for detection of SNP TSC0058172
gttttttaaaagt

SEQ ID NO: 238554 - DNA, 13 bp, Artificial Sequence
  Oligonucleotide for detection of SNP TSC0058172
acttttaaaaaac

SEQ ID NO: 238555 - DNA, 13 bp, Artificial Sequence
  Oligonucleotide for detection of SNP TSC0058173
gtatattttttaa

SEQ ID NO: 238556 - DNA, 13 bp, Artificial Sequence
  Oligonucleotide for detection of SNP TSC0058173
ttaaaaaatatac

SEQ ID NO: 238557 - DNA, 13 bp, Artificial Sequence
  Oligonucleotide for detection of SNP TSC0058173
gtatatgttttaa

SEQ ID NO: 238558 - DNA, 13 bp, Artificial Sequence
  Oligonucleotide for detection of SNP TSC0058173
ttaaaacatatac

SEQ ID NO: 238559 - DNA, 13 bp, Artificial Sequence
  Oligonucleotide for detection of SNP TSC0058173
ttgaaaaatatay

SEQ ID NO: 238560 - DNA, 13 bp, Artificial Sequence
  Oligonucleotide for detection of SNP TSC0058173
rtatatttttcaa

SEQ ID NO: 238561 - DNA, 13 bp, Artificial Sequence
  Oligonucleotide for detection of SNP TSC0058173
ttgaaatatatay

SEQ ID NO: 238562 - DNA, 13 bp, Artificial Sequence
  Oligonucleotide for detection of SNP TSC0058173
rtatatatttcaa

SEQ ID NO: 238563 - DNA, 13 bp, Artificial Sequence
  Oligonucleotide for detection of SNP TSC0058176
tttattaaagatt

SEQ ID NO: 238564 - DNA, 13 bp, Artificial Sequence
  Oligonucleotide for detection of SNP TSC0058176
aatctttaataaa

SEQ ID NO: 238565 - DNA, 13 bp, Artificial Sequence
  Oligonucleotide for detection of SNP TSC0058176
tttattgaagatt

SEQ ID NO: 238566 - DNA, 13 bp, Artificial Sequence
  Oligonucleotide for detection of SNP TSC0058176
aatcttcaataaa

SEQ ID NO: 238567 - DNA, 13 bp, Artificial Sequence
  Oligonucleotide for detection of SNP TSC0058176
tttatcgaagatt

SEQ ID NO: 238568 - DNA, 13 bp, Artificial Sequence
  Oligonucleotide for detection of SNP TSC0058176
aatcttcgataaa

SEQ ID NO: 238569 - DNA, 13 bp, Artificial Sequence
  Oligonucleotide for detection of SNP TSC0058176
agtttttggtgga

SEQ ID NO: 238570 - DNA, 13 bp, Artificial Sequence
  Oligonucleotide for detection of SNP TSC0058176
tccaccaaaaact

SEQ ID NO: 238571 - DNA, 13 bp, Artificial Sequence
  Oligonucleotide for detection of SNP TSC0058176
agttttcggtgga

SEQ ID NO: 238572 - DNA, 13 bp, Artificial Sequence
  Oligonucleotide for detection of SNP TSC0058176
tccaccgaaaact

SEQ ID NO: 238573 - DNA, 13 bp, Artificial Sequence
  Oligonucleotide for detection of SNP TSC0058178
aataattggaaat

SEQ ID NO: 238574 - DNA, 13 bp, Artificial Sequence
  Oligonucleotide for detection of SNP TSC0058178
atttccaattatt

SEQ ID NO: 238575 - DNA, 13 bp, Artificial Sequence
  Oligonucleotide for detection of SNP TSC0058178
aataatgggaaat

SEQ ID NO: 238576 - DNA, 13 bp, Artificial Sequence
  Oligonucleotide for detection of SNP TSC0058178
atttcccattatt

SEQ ID NO: 238577 - DNA, 13 bp, Artificial Sequence
  Oligonucleotide for detection of SNP TSC0001451
agaaaataatatg

SEQ ID NO: 238578 - DNA, 13 bp, Artificial Sequence
  Oligonucleotide for detection of SNP TSC0001451
catattattttct

SEQ ID NO: 238579 - DNA, 13 bp, Artificial Sequence
  Oligonucleotide for detection of SNP TSC0001452
gagataaatatta

SEQ ID NO: 238580 - DNA, 13 bp, Artificial Sequence
  Oligonucleotide for detection of SNP TSC0001452
taatatttatctc

SEQ ID NO: 238581 - DNA, 13 bp, Artificial Sequence
  Oligonucleotide for detection of SNP TSC0001452
gagatatatatta

SEQ ID NO: 238582 - DNA, 13 bp, Artificial Sequence
  Oligonucleotide for detection of SNP TSC0001452
taatatatatctc

SEQ ID NO: 238583 - DNA, 13 bp, Artificial Sequence
  Oligonucleotide for detection of SNP TSC0001452
taatgtttgttty

SEQ ID NO: 238584 - DNA, 13 bp, Artificial Sequence
  Oligonucleotide for detection of SNP TSC0001452
raaacaaacatta

SEQ ID NO: 238585 - DNA, 13 bp, Artificial Sequence
  Oligonucleotide for detection of SNP TSC0001452
taatgtgtgttty

SEQ ID NO: 238586 - DNA, 13 bp, Artificial Sequence
  Oligonucleotide for detection of SNP TSC0001452
raaacacacatta

SEQ ID NO: 238587 - DNA, 13 bp, Artificial Sequence
  Oligonucleotide for detection of SNP TSC0058179
agtttttgaagtt

SEQ ID NO: 238588 - DNA, 13 bp, Artificial Sequence
  Oligonucleotide for detection of SNP TSC0058179
aacttcaaaaact

SEQ ID NO: 238589 - DNA, 13 bp, Artificial Sequence
  Oligonucleotide for detection of SNP TSC0058179
agttttcgaagtt

SEQ ID NO: 238590 - DNA, 13 bp, Artificial Sequence
  Oligonucleotide for detection of SNP TSC0058179
aacttcgaaaact

SEQ ID NO: 238591 - DNA, 13 bp, Artificial Sequence
  Oligonucleotide for detection of SNP TSC0058179
aattttggaaatt

SEQ ID NO: 238592 - DNA, 13 bp, Artificial Sequence
  Oligonucleotide for detection of SNP TSC0058179
aatttccaaaatt

SEQ ID NO: 238593 - DNA, 13 bp, Artificial Sequence
  Oligonucleotide for detection of SNP TSC0058179
aattttagaaatt

SEQ ID NO: 238594 - DNA, 13 bp, Artificial Sequence
  Oligonucleotide for detection of SNP TSC0058179
aatttctaaaatt

SEQ ID NO: 238595 - DNA, 13 bp, Artificial Sequence
  Oligonucleotide for detection of SNP TSC0058179
aatttcggaaatt

SEQ ID NO: 238596 - DNA, 13 bp, Artificial Sequence
  Oligonucleotide for detection of SNP TSC0058179
aatttccgaaatt

SEQ ID NO: 238597 - DNA, 13 bp, Artificial Sequence
  Oligonucleotide for detection of SNP TSC0009804
tagttatggggtg

SEQ ID NO: 238598 - DNA, 13 bp, Artificial Sequence
  Oligonucleotide for detection of SNP TSC0009804
caccccataacta

SEQ ID NO: 238599 - DNA, 13 bp, Artificial Sequence
  Oligonucleotide for detection of SNP TSC0009804
tagttacggggtg

SEQ ID NO: 238600 - DNA, 13 bp, Artificial Sequence
  Oligonucleotide for detection of SNP TSC0009804
caccccgtaacta

SEQ ID NO: 238601 - DNA, 13 bp, Artificial Sequence
  Oligonucleotide for detection of SNP TSC0001527
tgggagggaattg

SEQ ID NO: 238602 - DNA, 13 bp, Artificial Sequence
  Oligonucleotide for detection of SNP TSC0001527
caattccctccca

SEQ ID NO: 238603 - DNA, 13 bp, Artificial Sequence
  Oligonucleotide for detection of SNP TSC0001527
tgggagagaattg

SEQ ID NO: 238604 - DNA, 13 bp, Artificial Sequence
  Oligonucleotide for detection of SNP TSC0001527
caattctctccca

SEQ ID NO: 238605 - DNA, 13 bp, Artificial Sequence
  Oligonucleotide for detection of SNP TSC0058180
tggaagtgtatga

SEQ ID NO: 238606 - DNA, 13 bp, Artificial Sequence
  Oligonucleotide for detection of SNP TSC0058180
tcatacacttcca

SEQ ID NO: 238607 - DNA, 13 bp, Artificial Sequence
  Oligonucleotide for detection of SNP TSC0058180
tggaagggtatga

SEQ ID NO: 238608 - DNA, 13 bp, Artificial Sequence
  Oligonucleotide for detection of SNP TSC0058180
tcatacccttcca

SEQ ID NO: 238609 - DNA, 13 bp, Artificial Sequence
  Oligonucleotide for detection of SNP TSC0009812
tttgggtagtttt

SEQ ID NO: 238610 - DNA, 13 bp, Artificial Sequence
  Oligonucleotide for detection of SNP TSC0009812
aaaactacccaaa

SEQ ID NO: 238611 - DNA, 13 bp, Artificial Sequence
  Oligonucleotide for detection of SNP TSC0009812
tttggggagtttt

SEQ ID NO: 238612 - DNA, 13 bp, Artificial Sequence
  Oligonucleotide for detection of SNP TSC0009812
aaaactccccaaa

SEQ ID NO: 238613 - DNA, 13 bp, Artificial Sequence
  Oligonucleotide for detection of SNP TSC0009812
aaggttgtttaag

SEQ ID NO: 238614 - DNA, 13 bp, Artificial Sequence
  Oligonucleotide for detection of SNP TSC0009812
cttaaacaacctt

SEQ ID NO: 238615 - DNA, 13 bp, Artificial Sequence
  Oligonucleotide for detection of SNP TSC0009812
aaggttttttaag

SEQ ID NO: 238616 - DNA, 13 bp, Artificial Sequence
  Oligonucleotide for detection of SNP TSC0009812
cttaaaaaacctt

SEQ ID NO: 238617 - DNA, 13 bp, Artificial Sequence
  Oligonucleotide for detection of SNP TSC0058181
tggttaattgttg

SEQ ID NO: 238618 - DNA, 13 bp, Artificial Sequence
  Oligonucleotide for detection of SNP TSC0058181
caacaattaacca

SEQ ID NO: 238619 - DNA, 13 bp, Artificial Sequence
  Oligonucleotide for detection of SNP TSC0058181
tggttatttgttg

SEQ ID NO: 238620 - DNA, 13 bp, Artificial Sequence
  Oligonucleotide for detection of SNP TSC0058181
caacaaataacca

SEQ ID NO: 238621 - DNA, 13 bp, Artificial Sequence
  Oligonucleotide for detection of SNP TSC0058181
tggttaatcgttg

SEQ ID NO: 238622 - DNA, 13 bp, Artificial Sequence
  Oligonucleotide for detection of SNP TSC0058181
caacgattaacca

SEQ ID NO: 238623 - DNA, 13 bp, Artificial Sequence
  Oligonucleotide for detection of SNP TSC0058181
tggttattcgttg

SEQ ID NO: 238624 - DNA, 13 bp, Artificial Sequence
  Oligonucleotide for detection of SNP TSC0058181
caacgaataacca

SEQ ID NO: 238625 - DNA, 13 bp, Artificial Sequence
  Oligonucleotide for detection of SNP TSC0058181
tagtggttaatta

SEQ ID NO: 238626 - DNA, 13 bp, Artificial Sequence
  Oligonucleotide for detection of SNP TSC0058181
taattaaccacta

SEQ ID NO: 238627 - DNA, 13 bp, Artificial Sequence
  Oligonucleotide for detection of SNP TSC0058181
tagtgggtaatta

SEQ ID NO: 238628 - DNA, 13 bp, Artificial Sequence
  Oligonucleotide for detection of SNP TSC0058181
taattacccacta

SEQ ID NO: 238629 - DNA, 13 bp, Artificial Sequence
  Oligonucleotide for detection of SNP TSC0058181
tagtggataatta

SEQ ID NO: 238630 - DNA, 13 bp, Artificial Sequence
  Oligonucleotide for detection of SNP TSC0058181
taattatccacta

SEQ ID NO: 238631 - DNA, 13 bp, Artificial Sequence
  Oligonucleotide for detection of SNP TSC0058181
tagcggttaatta

SEQ ID NO: 238632 - DNA, 13 bp, Artificial Sequence
  Oligonucleotide for detection of SNP TSC0058181
taattaaccgcta

SEQ ID NO: 238633 - DNA, 13 bp, Artificial Sequence
  Oligonucleotide for detection of SNP TSC0058181
tagcgggtaatta

SEQ ID NO: 238634 - DNA, 13 bp, Artificial Sequence
  Oligonucleotide for detection of SNP TSC0058181
taattacccgcta

SEQ ID NO: 238635 - DNA, 13 bp, Artificial Sequence
  Oligonucleotide for detection of SNP TSC0058181
tagcggataatta

SEQ ID NO: 238636 - DNA, 13 bp, Artificial Sequence
  Oligonucleotide for detection of SNP TSC0058181
taattatccgcta

SEQ ID NO: 238637 - DNA, 13 bp, Artificial Sequence
  Oligonucleotide for detection of SNP TSC0000440
agatttaaaaaaa

SEQ ID NO: 238638 - DNA, 13 bp, Artificial Sequence
  Oligonucleotide for detection of SNP TSC0000440
tttttttaaatct

SEQ ID NO: 238639 - DNA, 13 bp, Artificial Sequence
  Oligonucleotide for detection of SNP TSC0000440
agattttaaaaaa

SEQ ID NO: 238640 - DNA, 13 bp, Artificial Sequence
  Oligonucleotide for detection of SNP TSC0000440
ttttttaaaatct

SEQ ID NO: 238641 - DNA, 13 bp, Artificial Sequence
  Oligonucleotide for detection of SNP TSC0058182
attagtatgaatt

SEQ ID NO: 238642 - DNA, 13 bp, Artificial Sequence
  Oligonucleotide for detection of SNP TSC0058182
aattcatactaat

SEQ ID NO: 238643 - DNA, 13 bp, Artificial Sequence
  Oligonucleotide for detection of SNP TSC0058182
attagtttgaatt

SEQ ID NO: 238644 - DNA, 13 bp, Artificial Sequence
  Oligonucleotide for detection of SNP TSC0058182
aattcaaactaat

SEQ ID NO: 238645 - DNA, 13 bp, Artificial Sequence
  Oligonucleotide for detection of SNP TSC0058182
agtttatgttgat

SEQ ID NO: 238646 - DNA, 13 bp, Artificial Sequence
  Oligonucleotide for detection of SNP TSC0058182
atcaacataaact

SEQ ID NO: 238647 - DNA, 13 bp, Artificial Sequence
  Oligonucleotide for detection of SNP TSC0058182
agtttaggttgat

SEQ ID NO: 238648 - DNA, 13 bp, Artificial Sequence
  Oligonucleotide for detection of SNP TSC0058182
atcaacctaaact

SEQ ID NO: 238649 - DNA, 13 bp, Artificial Sequence
  Oligonucleotide for detection of SNP TSC0058183
attaaagtatatt

SEQ ID NO: 238650 - DNA, 13 bp, Artificial Sequence
  Oligonucleotide for detection of SNP TSC0058183
aatatactttaat

SEQ ID NO: 238651 - DNA, 13 bp, Artificial Sequence
  Oligonucleotide for detection of SNP TSC0058183
attaaaatatatt

SEQ ID NO: 238652 - DNA, 13 bp, Artificial Sequence
  Oligonucleotide for detection of SNP TSC0058183
aatatattttaat

SEQ ID NO: 238653 - DNA, 13 bp, Artificial Sequence
  Oligonucleotide for detection of SNP TSC0058190
ggttaagagtaay

SEQ ID NO: 238654 - DNA, 13 bp, Artificial Sequence
  Oligonucleotide for detection of SNP TSC0058190
rttactcttaacc

SEQ ID NO: 238655 - DNA, 13 bp, Artificial Sequence
  Oligonucleotide for detection of SNP TSC0058190
ggttaaaagtaay

SEQ ID NO: 238656 - DNA, 13 bp, Artificial Sequence
  Oligonucleotide for detection of SNP TSC0058190
rttacttttaacc

SEQ ID NO: 238657 - DNA, 13 bp, Artificial Sequence
  Oligonucleotide for detection of SNP TSC0001297
tgatttatgaggy

SEQ ID NO: 238658 - DNA, 13 bp, Artificial Sequence
  Oligonucleotide for detection of SNP TSC0001297
rcctcataaatca

SEQ ID NO: 238659 - DNA, 13 bp, Artificial Sequence
  Oligonucleotide for detection of SNP TSC0001297
tgatttgtgaggy

SEQ ID NO: 238660 - DNA, 13 bp, Artificial Sequence
  Oligonucleotide for detection of SNP TSC0001297
rcctcacaaatca

SEQ ID NO: 238661 - DNA, 13 bp, Artificial Sequence
  Oligonucleotide for detection of SNP TSC0001297
tgattcgtgaggy

SEQ ID NO: 238662 - DNA, 13 bp, Artificial Sequence
  Oligonucleotide for detection of SNP TSC0001297
rcctcacgaatca

SEQ ID NO: 238663 - DNA, 13 bp, Artificial Sequence
  Oligonucleotide for detection of SNP TSC0001297
gttttatgggtta

SEQ ID NO: 238664 - DNA, 13 bp, Artificial Sequence
  Oligonucleotide for detection of SNP TSC0001297
taacccataaaac

SEQ ID NO: 238665 - DNA, 13 bp, Artificial Sequence
  Oligonucleotide for detection of SNP TSC0001297
gttttacgggtta

SEQ ID NO: 238666 - DNA, 13 bp, Artificial Sequence
  Oligonucleotide for detection of SNP TSC0001297
taacccgtaaaac

SEQ ID NO: 238667 - DNA, 13 bp, Artificial Sequence
  Oligonucleotide for detection of SNP TSC0058191
ggtataggggagg

SEQ ID NO: 238668 - DNA, 13 bp, Artificial Sequence
  Oligonucleotide for detection of SNP TSC0058191
cctcccctatacc

SEQ ID NO: 238669 - DNA, 13 bp, Artificial Sequence
  Oligonucleotide for detection of SNP TSC0058191
ggtataagggagg

SEQ ID NO: 238670 - DNA, 13 bp, Artificial Sequence
  Oligonucleotide for detection of SNP TSC0058191
cctcccttatacc

SEQ ID NO: 238671 - DNA, 13 bp, Artificial Sequence
  Oligonucleotide for detection of SNP TSC0058192
agaatggttggtt

SEQ ID NO: 238672 - DNA, 13 bp, Artificial Sequence
  Oligonucleotide for detection of SNP TSC0058192
aaccaaccattct

SEQ ID NO: 238673 - DNA, 13 bp, Artificial Sequence
  Oligonucleotide for detection of SNP TSC0058192
agaatgattggtt

SEQ ID NO: 238674 - DNA, 13 bp, Artificial Sequence
  Oligonucleotide for detection of SNP TSC0058192
aaccaatcattct

SEQ ID NO: 238675 - DNA, 13 bp, Artificial Sequence
  Oligonucleotide for detection of SNP TSC0058194
aaggaaataaaay

SEQ ID NO: 238676 - DNA, 13 bp, Artificial Sequence
  Oligonucleotide for detection of SNP TSC0058194
rttttatttcctt

SEQ ID NO: 238677 - DNA, 13 bp, Artificial Sequence
  Oligonucleotide for detection of SNP TSC0058194
aaggaattaaaay

SEQ ID NO: 238678 - DNA, 13 bp, Artificial Sequence
  Oligonucleotide for detection of SNP TSC0058194
rttttaattcctt

SEQ ID NO: 238679 - DNA, 13 bp, Artificial Sequence
  Oligonucleotide for detection of SNP TSC0058194
gttttgttttttt

SEQ ID NO: 238680 - DNA, 13 bp, Artificial Sequence
  Oligonucleotide for detection of SNP TSC0058194
aaaaaaacaaaac

SEQ ID NO: 238681 - DNA, 13 bp, Artificial Sequence
  Oligonucleotide for detection of SNP TSC0058195
tatataggggaaa

SEQ ID NO: 238682 - DNA, 13 bp, Artificial Sequence
  Oligonucleotide for detection of SNP TSC0058195
tttcccctatata

SEQ ID NO: 238683 - DNA, 13 bp, Artificial Sequence
  Oligonucleotide for detection of SNP TSC0058195
tatatatgggaaa

SEQ ID NO: 238684 - DNA, 13 bp, Artificial Sequence
  Oligonucleotide for detection of SNP TSC0058195
tttcccatatata

SEQ ID NO: 238685 - DNA, 13 bp, Artificial Sequence
  Oligonucleotide for detection of SNP TSC0058195
tatatacgggaaa

SEQ ID NO: 238686 - DNA, 13 bp, Artificial Sequence
  Oligonucleotide for detection of SNP TSC0058195
tttcccgtatata

SEQ ID NO: 238687 - DNA, 13 bp, Artificial Sequence
  Oligonucleotide for detection of SNP TSC0058196
ataagatgagaga

SEQ ID NO: 238688 - DNA, 13 bp, Artificial Sequence
  Oligonucleotide for detection of SNP TSC0058196
tctctcatcttat

SEQ ID NO: 238689 - DNA, 13 bp, Artificial Sequence
  Oligonucleotide for detection of SNP TSC0058196
ataagacgagaga

SEQ ID NO: 238690 - DNA, 13 bp, Artificial Sequence
  Oligonucleotide for detection of SNP TSC0058196
tctctcgtcttat

SEQ ID NO: 238691 - DNA, 13 bp, Artificial Sequence
  Oligonucleotide for detection of SNP TSC0058197
agagttttttttt

SEQ ID NO: 238692 - DNA, 13 bp, Artificial Sequence
  Oligonucleotide for detection of SNP TSC0058197
aaaaaaaaactct

SEQ ID NO: 238693 - DNA, 13 bp, Artificial Sequence
  Oligonucleotide for detection of SNP TSC0058197
agagttgtttttt

SEQ ID NO: 238694 - DNA, 13 bp, Artificial Sequence
  Oligonucleotide for detection of SNP TSC0058197
aaaaaacaactct

SEQ ID NO: 238695 - DNA, 13 bp, Artificial Sequence
  Oligonucleotide for detection of SNP TSC0058197
agggaaaaatttt

SEQ ID NO: 238696 - DNA, 13 bp, Artificial Sequence
  Oligonucleotide for detection of SNP TSC0058197
aaaatttttccct

SEQ ID NO: 238697 - DNA, 13 bp, Artificial Sequence
  Oligonucleotide for detection of SNP TSC0058197
agggaataatttt

SEQ ID NO: 238698 - DNA, 13 bp, Artificial Sequence
  Oligonucleotide for detection of SNP TSC0058197
aaaattattccct

SEQ ID NO: 238699 - DNA, 13 bp, Artificial Sequence
  Oligonucleotide for detection of SNP TSC0058203
aatttatatttaa

SEQ ID NO: 238700 - DNA, 13 bp, Artificial Sequence
  Oligonucleotide for detection of SNP TSC0058203
ttaaatataaatt

SEQ ID NO: 238701 - DNA, 13 bp, Artificial Sequence
  Oligonucleotide for detection of SNP TSC0058203
ttagatttgagtt

SEQ ID NO: 238702 - DNA, 13 bp, Artificial Sequence
  Oligonucleotide for detection of SNP TSC0058203
aactcaaatctaa

SEQ ID NO: 238703 - DNA, 13 bp, Artificial Sequence
  Oligonucleotide for detection of SNP TSC0058204
aatttatgtgaaa

SEQ ID NO: 238704 - DNA, 13 bp, Artificial Sequence
  Oligonucleotide for detection of SNP TSC0058204
tttcacataaatt

SEQ ID NO: 238705 - DNA, 13 bp, Artificial Sequence
  Oligonucleotide for detection of SNP TSC0058204
aatttaggtgaaa

SEQ ID NO: 238706 - DNA, 13 bp, Artificial Sequence
  Oligonucleotide for detection of SNP TSC0058204
tttcacctaaatt

SEQ ID NO: 238707 - DNA, 13 bp, Artificial Sequence
  Oligonucleotide for detection of SNP TSC0058205
aatttttatggag

SEQ ID NO: 238708 - DNA, 13 bp, Artificial Sequence
  Oligonucleotide for detection of SNP TSC0058205
ctccataaaaatt

SEQ ID NO: 238709 - DNA, 13 bp, Artificial Sequence
  Oligonucleotide for detection of SNP TSC0058205
aattttgatggag

SEQ ID NO: 238710 - DNA, 13 bp, Artificial Sequence
  Oligonucleotide for detection of SNP TSC0058205
ctccatcaaaatt

SEQ ID NO: 238711 - DNA, 13 bp, Artificial Sequence
  Oligonucleotide for detection of SNP TSC0058205
ttttataagagtt

SEQ ID NO: 238712 - DNA, 13 bp, Artificial Sequence
  Oligonucleotide for detection of SNP TSC0058205
aactcttataaaa

SEQ ID NO: 238713 - DNA, 13 bp, Artificial Sequence
  Oligonucleotide for detection of SNP TSC0058205
ttttattagagtt

SEQ ID NO: 238714 - DNA, 13 bp, Artificial Sequence
  Oligonucleotide for detection of SNP TSC0058205
aactctaataaaa

SEQ ID NO: 238715 - DNA, 13 bp, Artificial Sequence
  Oligonucleotide for detection of SNP TSC0058206
atttagatagaaa

SEQ ID NO: 238716 - DNA, 13 bp, Artificial Sequence
  Oligonucleotide for detection of SNP TSC0058206
tttctatctaaat

SEQ ID NO: 238717 - DNA, 13 bp, Artificial Sequence
  Oligonucleotide for detection of SNP TSC0058206
atttagttagaaa

SEQ ID NO: 238718 - DNA, 13 bp, Artificial Sequence
  Oligonucleotide for detection of SNP TSC0058206
tttctaactaaat

SEQ ID NO: 238719 - DNA, 13 bp, Artificial Sequence
  Oligonucleotide for detection of SNP TSC0058213
agggtttggaata

SEQ ID NO: 238720 - DNA, 13 bp, Artificial Sequence
  Oligonucleotide for detection of SNP TSC0058213
tattccaaaccct

SEQ ID NO: 238721 - DNA, 13 bp, Artificial Sequence
  Oligonucleotide for detection of SNP TSC0058213
agggttcggaata

SEQ ID NO: 238722 - DNA, 13 bp, Artificial Sequence
  Oligonucleotide for detection of SNP TSC0058213
tattccgaaccct

SEQ ID NO: 238723 - DNA, 13 bp, Artificial Sequence
  Oligonucleotide for detection of SNP TSC0058216
taatgttgttgtg

SEQ ID NO: 238724 - DNA, 13 bp, Artificial Sequence
  Oligonucleotide for detection of SNP TSC0058216
cacaacaacatta

SEQ ID NO: 238725 - DNA, 13 bp, Artificial Sequence
  Oligonucleotide for detection of SNP TSC0058216
taatgtcgttgtg

SEQ ID NO: 238726 - DNA, 13 bp, Artificial Sequence
  Oligonucleotide for detection of SNP TSC0058216
cacaacgacatta

SEQ ID NO: 238727 - DNA, 13 bp, Artificial Sequence
  Oligonucleotide for detection of SNP TSC0058216
tatagtggtatta

SEQ ID NO: 238728 - DNA, 13 bp, Artificial Sequence
  Oligonucleotide for detection of SNP TSC0058216
taataccactata

SEQ ID NO: 238729 - DNA, 13 bp, Artificial Sequence
  Oligonucleotide for detection of SNP TSC0058216
tatagtagtatta

SEQ ID NO: 238730 - DNA, 13 bp, Artificial Sequence
  Oligonucleotide for detection of SNP TSC0058216
taatactactata

SEQ ID NO: 238731 - DNA, 13 bp, Artificial Sequence
  Oligonucleotide for detection of SNP TSC0058216
tatagcggtatta

SEQ ID NO: 238732 - DNA, 13 bp, Artificial Sequence
  Oligonucleotide for detection of SNP TSC0058216
taataccgctata

SEQ ID NO: 238733 - DNA, 13 bp, Artificial Sequence
  Oligonucleotide for detection of SNP TSC0058220
ttttaatgggtaa

SEQ ID NO: 238734 - DNA, 13 bp, Artificial Sequence
  Oligonucleotide for detection of SNP TSC0058220
ttacccattaaaa

SEQ ID NO: 238735 - DNA, 13 bp, Artificial Sequence
  Oligonucleotide for detection of SNP TSC0058220
ttttaaggggtaa

SEQ ID NO: 238736 - DNA, 13 bp, Artificial Sequence
  Oligonucleotide for detection of SNP TSC0058220
ttaccccttaaaa

SEQ ID NO: 238737 - DNA, 13 bp, Artificial Sequence
  Oligonucleotide for detection of SNP TSC0058220
ttttaacgggtaa

SEQ ID NO: 238738 - DNA, 13 bp, Artificial Sequence
  Oligonucleotide for detection of SNP TSC0058220
ttacccgttaaaa

SEQ ID NO: 238739 - DNA, 13 bp, Artificial Sequence
  Oligonucleotide for detection of SNP TSC0058220
ttatttgttaaaa

SEQ ID NO: 238740 - DNA, 13 bp, Artificial Sequence
  Oligonucleotide for detection of SNP TSC0058220
ttttaacaaataa

SEQ ID NO: 238741 - DNA, 13 bp, Artificial Sequence
  Oligonucleotide for detection of SNP TSC0058220
ttattcgttaaaa

SEQ ID NO: 238742 - DNA, 13 bp, Artificial Sequence
  Oligonucleotide for detection of SNP TSC0058220
ttttaacgaataa

SEQ ID NO: 238743 - DNA, 13 bp, Artificial Sequence
  Oligonucleotide for detection of SNP TSC0058221
tgttatttatgat

SEQ ID NO: 238744 - DNA, 13 bp, Artificial Sequence
  Oligonucleotide for detection of SNP TSC0058221
atcataaataaca

SEQ ID NO: 238745 - DNA, 13 bp, Artificial Sequence
  Oligonucleotide for detection of SNP TSC0058221
tgttatgtatgat

SEQ ID NO: 238746 - DNA, 13 bp, Artificial Sequence
  Oligonucleotide for detection of SNP TSC0058221
atcatacataaca

SEQ ID NO: 238747 - DNA, 13 bp, Artificial Sequence
  Oligonucleotide for detection of SNP TSC0058221
attataaatgata

SEQ ID NO: 238748 - DNA, 13 bp, Artificial Sequence
  Oligonucleotide for detection of SNP TSC0058221
tatcatttataat

SEQ ID NO: 238749 - DNA, 13 bp, Artificial Sequence
  Oligonucleotide for detection of SNP TSC0058221
attatatatgata

SEQ ID NO: 238750 - DNA, 13 bp, Artificial Sequence
  Oligonucleotide for detection of SNP TSC0058221
tatcatatataat

SEQ ID NO: 238751 - DNA, 13 bp, Artificial Sequence
  Oligonucleotide for detection of SNP TSC0058226
gggagtatataga

SEQ ID NO: 238752 - DNA, 13 bp, Artificial Sequence
  Oligonucleotide for detection of SNP TSC0058226
tctatatactccc

SEQ ID NO: 238753 - DNA, 13 bp, Artificial Sequence
  Oligonucleotide for detection of SNP TSC0058226
gggagtgtataga

SEQ ID NO: 238754 - DNA, 13 bp, Artificial Sequence
  Oligonucleotide for detection of SNP TSC0058226
tctatacactccc

SEQ ID NO: 238755 - DNA, 13 bp, Artificial Sequence
  Oligonucleotide for detection of SNP TSC0058227
gttagtaggtgat

SEQ ID NO: 238756 - DNA, 13 bp, Artificial Sequence
  Oligonucleotide for detection of SNP TSC0058227
atcacctactaac

SEQ ID NO: 238757 - DNA, 13 bp, Artificial Sequence
  Oligonucleotide for detection of SNP TSC0058227
gttagttggtgat

SEQ ID NO: 238758 - DNA, 13 bp, Artificial Sequence
  Oligonucleotide for detection of SNP TSC0058227
atcaccaactaac

SEQ ID NO: 238759 - DNA, 13 bp, Artificial Sequence
  Oligonucleotide for detection of SNP TSC0058227
gttagtcggtgat

SEQ ID NO: 238760 - DNA, 13 bp, Artificial Sequence
  Oligonucleotide for detection of SNP TSC0058227
atcaccgactaac

SEQ ID NO: 238761 - DNA, 13 bp, Artificial Sequence
  Oligonucleotide for detection of SNP TSC0058227
attatttgttggy

SEQ ID NO: 238762 - DNA, 13 bp, Artificial Sequence
  Oligonucleotide for detection of SNP TSC0058227
rccaacaaataat

SEQ ID NO: 238763 - DNA, 13 bp, Artificial Sequence
  Oligonucleotide for detection of SNP TSC0058227
attattggttggy

SEQ ID NO: 238764 - DNA, 13 bp, Artificial Sequence
  Oligonucleotide for detection of SNP TSC0058227
rccaaccaataat

SEQ ID NO: 238765 - DNA, 13 bp, Artificial Sequence
  Oligonucleotide for detection of SNP TSC0058227
attatcggttggy

SEQ ID NO: 238766 - DNA, 13 bp, Artificial Sequence
  Oligonucleotide for detection of SNP TSC0058227
rccaaccgataat

SEQ ID NO: 238767 - DNA, 13 bp, Artificial Sequence
  Oligonucleotide for detection of SNP TSC0058228
tattatttttgtg

SEQ ID NO: 238768 - DNA, 13 bp, Artificial Sequence
  Oligonucleotide for detection of SNP TSC0058228
cacaaaaataata

SEQ ID NO: 238769 - DNA, 13 bp, Artificial Sequence
  Oligonucleotide for detection of SNP TSC0058228
tattatatttgtg

SEQ ID NO: 238770 - DNA, 13 bp, Artificial Sequence
  Oligonucleotide for detection of SNP TSC0058228
cacaaatataata

SEQ ID NO: 238771 - DNA, 13 bp, Artificial Sequence
  Oligonucleotide for detection of SNP TSC0058228
tataaggataatg

SEQ ID NO: 238772 - DNA, 13 bp, Artificial Sequence
  Oligonucleotide for detection of SNP TSC0058228
cattatccttata

SEQ ID NO: 238773 - DNA, 13 bp, Artificial Sequence
  Oligonucleotide for detection of SNP TSC0058228
tataagtataatg

SEQ ID NO: 238774 - DNA, 13 bp, Artificial Sequence
  Oligonucleotide for detection of SNP TSC0058228
cattatacttata

SEQ ID NO: 238775 - DNA, 13 bp, Artificial Sequence
  Oligonucleotide for detection of SNP TSC0058231
ttagtatgaaagt

SEQ ID NO: 238776 - DNA, 13 bp, Artificial Sequence
  Oligonucleotide for detection of SNP TSC0058231
actttcatactaa

SEQ ID NO: 238777 - DNA, 13 bp, Artificial Sequence
  Oligonucleotide for detection of SNP TSC0058231
ttagtacgaaagt

SEQ ID NO: 238778 - DNA, 13 bp, Artificial Sequence
  Oligonucleotide for detection of SNP TSC0058231
actttcgtactaa

SEQ ID NO: 238779 - DNA, 13 bp, Artificial Sequence
  Oligonucleotide for detection of SNP TSC0058232
tgtttaattattg

SEQ ID NO: 238780 - DNA, 13 bp, Artificial Sequence
  Oligonucleotide for detection of SNP TSC0058232
caataattaaaca

SEQ ID NO: 238781 - DNA, 13 bp, Artificial Sequence
  Oligonucleotide for detection of SNP TSC0058232
tgtttagttattg

SEQ ID NO: 238782 - DNA, 13 bp, Artificial Sequence
  Oligonucleotide for detection of SNP TSC0058232
caataactaaaca

SEQ ID NO: 238783 - DNA, 13 bp, Artificial Sequence
  Oligonucleotide for detection of SNP TSC0058233
tgaaatgtgtaaa

SEQ ID NO: 238784 - DNA, 13 bp, Artificial Sequence
  Oligonucleotide for detection of SNP TSC0058233
tttacacatttca

SEQ ID NO: 238785 - DNA, 13 bp, Artificial Sequence
  Oligonucleotide for detection of SNP TSC0058233
tgaaatatgtaaa

SEQ ID NO: 238786 - DNA, 13 bp, Artificial Sequence
  Oligonucleotide for detection of SNP TSC0058233
tttacatatttca

SEQ ID NO: 238787 - DNA, 13 bp, Artificial Sequence
  Oligonucleotide for detection of SNP TSC0058233
tgaaacgtgtaaa

SEQ ID NO: 238788 - DNA, 13 bp, Artificial Sequence
  Oligonucleotide for detection of SNP TSC0058233
tttacacgtttca

SEQ ID NO: 238789 - DNA, 13 bp, Artificial Sequence
  Oligonucleotide for detection of SNP TSC0058236
aatttgaaaaaty

SEQ ID NO: 238790 - DNA, 13 bp, Artificial Sequence
  Oligonucleotide for detection of SNP TSC0058236
ratttttcaaatt

SEQ ID NO: 238791 - DNA, 13 bp, Artificial Sequence
  Oligonucleotide for detection of SNP TSC0058236
aatttgtaaaaty

SEQ ID NO: 238792 - DNA, 13 bp, Artificial Sequence
  Oligonucleotide for detection of SNP TSC0058236
rattttacaaatt

SEQ ID NO: 238793 - DNA, 13 bp, Artificial Sequence
  Oligonucleotide for detection of SNP TSC0058236
gattttttaaatt

SEQ ID NO: 238794 - DNA, 13 bp, Artificial Sequence
  Oligonucleotide for detection of SNP TSC0058236
aatttaaaaaatc

SEQ ID NO: 238795 - DNA, 13 bp, Artificial Sequence
  Oligonucleotide for detection of SNP TSC0058236
gattttgtaaatt

SEQ ID NO: 238796 - DNA, 13 bp, Artificial Sequence
  Oligonucleotide for detection of SNP TSC0058236
aatttacaaaatc

SEQ ID NO: 238797 - DNA, 13 bp, Artificial Sequence
  Oligonucleotide for detection of SNP TSC0058238
tatagtgtatgty

SEQ ID NO: 238798 - DNA, 13 bp, Artificial Sequence
  Oligonucleotide for detection of SNP TSC0058238
racatacactata

SEQ ID NO: 238799 - DNA, 13 bp, Artificial Sequence
  Oligonucleotide for detection of SNP TSC0058238
tatagtatatgty

SEQ ID NO: 238800 - DNA, 13 bp, Artificial Sequence
  Oligonucleotide for detection of SNP TSC0058238
racatatactata

SEQ ID NO: 238801 - DNA, 13 bp, Artificial Sequence
  Oligonucleotide for detection of SNP TSC0058238
tatagcgtatgty

SEQ ID NO: 238802 - DNA, 13 bp, Artificial Sequence
  Oligonucleotide for detection of SNP TSC0058238
racatacgctata

SEQ ID NO: 238803 - DNA, 13 bp, Artificial Sequence
  Oligonucleotide for detection of SNP TSC0058239
atttatatgtaag

SEQ ID NO: 238804 - DNA, 13 bp, Artificial Sequence
  Oligonucleotide for detection of SNP TSC0058239
cttacatataaat

SEQ ID NO: 238805 - DNA, 13 bp, Artificial Sequence
  Oligonucleotide for detection of SNP TSC0058239
atttatgtgtaag

SEQ ID NO: 238806 - DNA, 13 bp, Artificial Sequence
  Oligonucleotide for detection of SNP TSC0058239
cttacacataaat

SEQ ID NO: 238807 - DNA, 13 bp, Artificial Sequence
  Oligonucleotide for detection of SNP TSC0058239
atttacgtgtaag

SEQ ID NO: 238808 - DNA, 13 bp, Artificial Sequence
  Oligonucleotide for detection of SNP TSC0058239
cttacacgtaaat

SEQ ID NO: 238809 - DNA, 13 bp, Artificial Sequence
  Oligonucleotide for detection of SNP TSC0058239
tttatatgtaaat

SEQ ID NO: 238810 - DNA, 13 bp, Artificial Sequence
  Oligonucleotide for detection of SNP TSC0058239
atttacatataaa

SEQ ID NO: 238811 - DNA, 13 bp, Artificial Sequence
  Oligonucleotide for detection of SNP TSC0058239
tttatacgtaaat

SEQ ID NO: 238812 - DNA, 13 bp, Artificial Sequence
  Oligonucleotide for detection of SNP TSC0058239
atttacgtataaa

SEQ ID NO: 238813 - DNA, 13 bp, Artificial Sequence
  Oligonucleotide for detection of SNP TSC0058241
tattgtgggtgtg

SEQ ID NO: 238814 - DNA, 13 bp, Artificial Sequence
  Oligonucleotide for detection of SNP TSC0058241
cacacccacaata

SEQ ID NO: 238815 - DNA, 13 bp, Artificial Sequence
  Oligonucleotide for detection of SNP TSC0058241
tattgtaggtgtg

SEQ ID NO: 238816 - DNA, 13 bp, Artificial Sequence
  Oligonucleotide for detection of SNP TSC0058241
cacacctacaata

SEQ ID NO: 238817 - DNA, 13 bp, Artificial Sequence
  Oligonucleotide for detection of SNP TSC0058242
aaatggtgataty

SEQ ID NO: 238818 - DNA, 13 bp, Artificial Sequence
  Oligonucleotide for detection of SNP TSC0058242
ratatcaccattt

SEQ ID NO: 238819 - DNA, 13 bp, Artificial Sequence
  Oligonucleotide for detection of SNP TSC0058242
aaatggggataty

SEQ ID NO: 238820 - DNA, 13 bp, Artificial Sequence
  Oligonucleotide for detection of SNP TSC0058242
ratatccccattt

SEQ ID NO: 238821 - DNA, 13 bp, Artificial Sequence
  Oligonucleotide for detection of SNP TSC0058242
gatgttattattt

SEQ ID NO: 238822 - DNA, 13 bp, Artificial Sequence
  Oligonucleotide for detection of SNP TSC0058242
aaataataacatc

SEQ ID NO: 238823 - DNA, 13 bp, Artificial Sequence
  Oligonucleotide for detection of SNP TSC0058242
gatgtttttattt

SEQ ID NO: 238824 - DNA, 13 bp, Artificial Sequence
  Oligonucleotide for detection of SNP TSC0058242
aaataaaaacatc

SEQ ID NO: 238825 - DNA, 13 bp, Artificial Sequence
  Oligonucleotide for detection of SNP TSC0058243
atgtgtatgaata

SEQ ID NO: 238826 - DNA, 13 bp, Artificial Sequence
  Oligonucleotide for detection of SNP TSC0058243
tattcatacacat

SEQ ID NO: 238827 - DNA, 13 bp, Artificial Sequence
  Oligonucleotide for detection of SNP TSC0058243
atgtgtttgaata

SEQ ID NO: 238828 - DNA, 13 bp, Artificial Sequence
  Oligonucleotide for detection of SNP TSC0058243
tattcaaacacat

SEQ ID NO: 238829 - DNA, 13 bp, Artificial Sequence
  Oligonucleotide for detection of SNP TSC0058244
gttaattttttat

SEQ ID NO: 238830 - DNA, 13 bp, Artificial Sequence
  Oligonucleotide for detection of SNP TSC0058244
ataaaaaattaac

SEQ ID NO: 238831 - DNA, 13 bp, Artificial Sequence
  Oligonucleotide for detection of SNP TSC0058244
gttaatgttttat

SEQ ID NO: 238832 - DNA, 13 bp, Artificial Sequence
  Oligonucleotide for detection of SNP TSC0058244
ataaaacattaac

SEQ ID NO: 238833 - DNA, 13 bp, Artificial Sequence
  Oligonucleotide for detection of SNP TSC0058244
ataaagaattggy

SEQ ID NO: 238834 - DNA, 13 bp, Artificial Sequence
  Oligonucleotide for detection of SNP TSC0058244
rccaattctttat

SEQ ID NO: 238835 - DNA, 13 bp, Artificial Sequence
  Oligonucleotide for detection of SNP TSC0058244
ataaagtattggy

SEQ ID NO: 238836 - DNA, 13 bp, Artificial Sequence
  Oligonucleotide for detection of SNP TSC0058244
rccaatactttat

SEQ ID NO: 238837 - DNA, 13 bp, Artificial Sequence
  Oligonucleotide for detection of SNP TSC0006739
atgttgtagatay

SEQ ID NO: 238838 - DNA, 13 bp, Artificial Sequence
  Oligonucleotide for detection of SNP TSC0006739
rtatctacaacat

SEQ ID NO: 238839 - DNA, 13 bp, Artificial Sequence
  Oligonucleotide for detection of SNP TSC0006739
atgttggagatay

SEQ ID NO: 238840 - DNA, 13 bp, Artificial Sequence
  Oligonucleotide for detection of SNP TSC0006739
rtatctccaacat

SEQ ID NO: 238841 - DNA, 13 bp, Artificial Sequence
  Oligonucleotide for detection of SNP TSC0006739
gtatttgtaatat

SEQ ID NO: 238842 - DNA, 13 bp, Artificial Sequence
  Oligonucleotide for detection of SNP TSC0006739
atattacaaatac

SEQ ID NO: 238843 - DNA, 13 bp, Artificial Sequence
  Oligonucleotide for detection of SNP TSC0006739
gtatttttaatat

SEQ ID NO: 238844 - DNA, 13 bp, Artificial Sequence
  Oligonucleotide for detection of SNP TSC0006739
atattaaaaatac

SEQ ID NO: 238845 - DNA, 13 bp, Artificial Sequence
  Oligonucleotide for detection of SNP TSC0006740
gatgaaagggtgt

SEQ ID NO: 238846 - DNA, 13 bp, Artificial Sequence
  Oligonucleotide for detection of SNP TSC0006740
acaccctttcatc

SEQ ID NO: 238847 - DNA, 13 bp, Artificial Sequence
  Oligonucleotide for detection of SNP TSC0006740
gatgaatgggtgt

SEQ ID NO: 238848 - DNA, 13 bp, Artificial Sequence
  Oligonucleotide for detection of SNP TSC0006740
acacccattcatc

SEQ ID NO: 238849 - DNA, 13 bp, Artificial Sequence
  Oligonucleotide for detection of SNP TSC0006740
gacgaaagggtgt

SEQ ID NO: 238850 - DNA, 13 bp, Artificial Sequence
  Oligonucleotide for detection of SNP TSC0006740
acaccctttcgtc

SEQ ID NO: 238851 - DNA, 13 bp, Artificial Sequence
  Oligonucleotide for detection of SNP TSC0006740
gacgaatgggtgt

SEQ ID NO: 238852 - DNA, 13 bp, Artificial Sequence
  Oligonucleotide for detection of SNP TSC0006740
acacccattcgtc

SEQ ID NO: 238853 - DNA, 13 bp, Artificial Sequence
  Oligonucleotide for detection of SNP TSC0006740
atatttttttgty

SEQ ID NO: 238854 - DNA, 13 bp, Artificial Sequence
  Oligonucleotide for detection of SNP TSC0006740
racaaaaaaatat

SEQ ID NO: 238855 - DNA, 13 bp, Artificial Sequence
  Oligonucleotide for detection of SNP TSC0006740
atattttttcgty

SEQ ID NO: 238856 - DNA, 13 bp, Artificial Sequence
  Oligonucleotide for detection of SNP TSC0006740
racgaaaaaatat

SEQ ID NO: 238857 - DNA, 13 bp, Artificial Sequence
  Oligonucleotide for detection of SNP TSC0006740
atatttattcgty

SEQ ID NO: 238858 - DNA, 13 bp, Artificial Sequence
  Oligonucleotide for detection of SNP TSC0006740
racgaataaatat

SEQ ID NO: 238859 - DNA, 13 bp, Artificial Sequence
  Oligonucleotide for detection of SNP TSC0058253
gataattggggay

SEQ ID NO: 238860 - DNA, 13 bp, Artificial Sequence
  Oligonucleotide for detection of SNP TSC0058253
rtccccaattatc

SEQ ID NO: 238861 - DNA, 13 bp, Artificial Sequence
  Oligonucleotide for detection of SNP TSC0058253
gataatgggggay

SEQ ID NO: 238862 - DNA, 13 bp, Artificial Sequence
  Oligonucleotide for detection of SNP TSC0058253
rtcccccattatc

SEQ ID NO: 238863 - DNA, 13 bp, Artificial Sequence
  Oligonucleotide for detection of SNP TSC0058253
gtttttaattaty

SEQ ID NO: 238864 - DNA, 13 bp, Artificial Sequence
  Oligonucleotide for detection of SNP TSC0058253
rataattaaaaac

SEQ ID NO: 238865 - DNA, 13 bp, Artificial Sequence
  Oligonucleotide for detection of SNP TSC0058253
gttttttattaty

SEQ ID NO: 238866 - DNA, 13 bp, Artificial Sequence
  Oligonucleotide for detection of SNP TSC0058253
rataataaaaaac

SEQ ID NO: 238867 - DNA, 13 bp, Artificial Sequence
  Oligonucleotide for detection of SNP TSC0058254
tgggttttttagy

SEQ ID NO: 238868 - DNA, 13 bp, Artificial Sequence
  Oligonucleotide for detection of SNP TSC0058254
rctaaaaaaccca

SEQ ID NO: 238869 - DNA, 13 bp, Artificial Sequence
  Oligonucleotide for detection of SNP TSC0058254
tgggttgtttagy

SEQ ID NO: 238870 - DNA, 13 bp, Artificial Sequence
  Oligonucleotide for detection of SNP TSC0058254
rctaaacaaccca

SEQ ID NO: 238871 - DNA, 13 bp, Artificial Sequence
  Oligonucleotide for detection of SNP TSC0058254
cgggttttttagy

SEQ ID NO: 238872 - DNA, 13 bp, Artificial Sequence
  Oligonucleotide for detection of SNP TSC0058254
rctaaaaaacccg

SEQ ID NO: 238873 - DNA, 13 bp, Artificial Sequence
  Oligonucleotide for detection of SNP TSC0058254
cgggttgtttagy

SEQ ID NO: 238874 - DNA, 13 bp, Artificial Sequence
  Oligonucleotide for detection of SNP TSC0058254
rctaaacaacccg

SEQ ID NO: 238875 - DNA, 13 bp, Artificial Sequence
  Oligonucleotide for detection of SNP TSC0058254
gttgagaaatttg

SEQ ID NO: 238876 - DNA, 13 bp, Artificial Sequence
  Oligonucleotide for detection of SNP TSC0058254
caaatttctcaac

SEQ ID NO: 238877 - DNA, 13 bp, Artificial Sequence
  Oligonucleotide for detection of SNP TSC0058254
gttgagtaatttg

SEQ ID NO: 238878 - DNA, 13 bp, Artificial Sequence
  Oligonucleotide for detection of SNP TSC0058254
caaattactcaac

SEQ ID NO: 238879 - DNA, 13 bp, Artificial Sequence
  Oligonucleotide for detection of SNP TSC0058254
gttgagaaattcg

SEQ ID NO: 238880 - DNA, 13 bp, Artificial Sequence
  Oligonucleotide for detection of SNP TSC0058254
cgaatttctcaac

SEQ ID NO: 238881 - DNA, 13 bp, Artificial Sequence
  Oligonucleotide for detection of SNP TSC0058254
gttgagtaattcg

SEQ ID NO: 238882 - DNA, 13 bp, Artificial Sequence
  Oligonucleotide for detection of SNP TSC0058254
cgaattactcaac

SEQ ID NO: 238883 - DNA, 13 bp, Artificial Sequence
  Oligonucleotide for detection of SNP TSC0005106
atttagatgttgy

SEQ ID NO: 238884 - DNA, 13 bp, Artificial Sequence
  Oligonucleotide for detection of SNP TSC0005106
rcaacatctaaat

SEQ ID NO: 238885 - DNA, 13 bp, Artificial Sequence
  Oligonucleotide for detection of SNP TSC0005106
atttaggtgttgy

SEQ ID NO: 238886 - DNA, 13 bp, Artificial Sequence
  Oligonucleotide for detection of SNP TSC0005106
rcaacacctaaat

SEQ ID NO: 238887 - DNA, 13 bp, Artificial Sequence
  Oligonucleotide for detection of SNP TSC0058257
ggaggtaagttgg

SEQ ID NO: 238888 - DNA, 13 bp, Artificial Sequence
  Oligonucleotide for detection of SNP TSC0058257
ccaacttacctcc

SEQ ID NO: 238889 - DNA, 13 bp, Artificial Sequence
  Oligonucleotide for detection of SNP TSC0058257
ggaggtgagttgg

SEQ ID NO: 238890 - DNA, 13 bp, Artificial Sequence
  Oligonucleotide for detection of SNP TSC0058257
ccaactcacctcc

SEQ ID NO: 238891 - DNA, 13 bp, Artificial Sequence
  Oligonucleotide for detection of SNP TSC0058263
taattaattttat

SEQ ID NO: 238892 - DNA, 13 bp, Artificial Sequence
  Oligonucleotide for detection of SNP TSC0058263
ataaaattaatta

SEQ ID NO: 238893 - DNA, 13 bp, Artificial Sequence
  Oligonucleotide for detection of SNP TSC0058263
taattatttttat

SEQ ID NO: 238894 - DNA, 13 bp, Artificial Sequence
  Oligonucleotide for detection of SNP TSC0058263
ataaaaataatta

SEQ ID NO: 238895 - DNA, 13 bp, Artificial Sequence
  Oligonucleotide for detection of SNP TSC0058263
ataaaattgatta

SEQ ID NO: 238896 - DNA, 13 bp, Artificial Sequence
  Oligonucleotide for detection of SNP TSC0058263
taatcaattttat

SEQ ID NO: 238897 - DNA, 13 bp, Artificial Sequence
  Oligonucleotide for detection of SNP TSC0058263
ataaaaatgatta

SEQ ID NO: 238898 - DNA, 13 bp, Artificial Sequence
  Oligonucleotide for detection of SNP TSC0058263
taatcatttttat

SEQ ID NO: 238899 - DNA, 13 bp, Artificial Sequence
  Oligonucleotide for detection of SNP TSC0058265
atgaatggaagaa

SEQ ID NO: 238900 - DNA, 13 bp, Artificial Sequence
  Oligonucleotide for detection of SNP TSC0058265
ttcttccattcat

SEQ ID NO: 238901 - DNA, 13 bp, Artificial Sequence
  Oligonucleotide for detection of SNP TSC0058265
atgaattgaagaa

SEQ ID NO: 238902 - DNA, 13 bp, Artificial Sequence
  Oligonucleotide for detection of SNP TSC0058265
ttcttcaattcat

SEQ ID NO: 238903 - DNA, 13 bp, Artificial Sequence
  Oligonucleotide for detection of SNP TSC0058265
atgaatcgaagaa

SEQ ID NO: 238904 - DNA, 13 bp, Artificial Sequence
  Oligonucleotide for detection of SNP TSC0058265
ttcttcgattcat

SEQ ID NO: 238905 - DNA, 13 bp, Artificial Sequence
  Oligonucleotide for detection of SNP TSC0005900
atttatatggttg

SEQ ID NO: 238906 - DNA, 13 bp, Artificial Sequence
  Oligonucleotide for detection of SNP TSC0005900
caaccatataaat

SEQ ID NO: 238907 - DNA, 13 bp, Artificial Sequence
  Oligonucleotide for detection of SNP TSC0005900
atttatgtggttg

SEQ ID NO: 238908 - DNA, 13 bp, Artificial Sequence
  Oligonucleotide for detection of SNP TSC0005900
caaccacataaat

SEQ ID NO: 238909 - DNA, 13 bp, Artificial Sequence
  Oligonucleotide for detection of SNP TSC0006763
gagttaaaataag

SEQ ID NO: 238910 - DNA, 13 bp, Artificial Sequence
  Oligonucleotide for detection of SNP TSC0006763
cttattttaactc

SEQ ID NO: 238911 - DNA, 13 bp, Artificial Sequence
  Oligonucleotide for detection of SNP TSC0006763
gagttataataag

SEQ ID NO: 238912 - DNA, 13 bp, Artificial Sequence
  Oligonucleotide for detection of SNP TSC0006763
cttattataactc

SEQ ID NO: 238913 - DNA, 13 bp, Artificial Sequence
  Oligonucleotide for detection of SNP TSC0007922
tattagaagttty

SEQ ID NO: 238914 - DNA, 13 bp, Artificial Sequence
  Oligonucleotide for detection of SNP TSC0007922
raaacttctaata

SEQ ID NO: 238915 - DNA, 13 bp, Artificial Sequence
  Oligonucleotide for detection of SNP TSC0007922
tattaggagttty

SEQ ID NO: 238916 - DNA, 13 bp, Artificial Sequence
  Oligonucleotide for detection of SNP TSC0007922
raaactcctaata

SEQ ID NO: 238917 - DNA, 13 bp, Artificial Sequence
  Oligonucleotide for detection of SNP TSC0058268
agatttagtataa

SEQ ID NO: 238918 - DNA, 13 bp, Artificial Sequence
  Oligonucleotide for detection of SNP TSC0058268
ttatactaaatct

SEQ ID NO: 238919 - DNA, 13 bp, Artificial Sequence
  Oligonucleotide for detection of SNP TSC0058268
agattttgtataa

SEQ ID NO: 238920 - DNA, 13 bp, Artificial Sequence
  Oligonucleotide for detection of SNP TSC0058268
ttatacaaaatct

SEQ ID NO: 238921 - DNA, 13 bp, Artificial Sequence
  Oligonucleotide for detection of SNP TSC0058268
agatttcgtataa

SEQ ID NO: 238922 - DNA, 13 bp, Artificial Sequence
  Oligonucleotide for detection of SNP TSC0058268
ttatacgaaatct

SEQ ID NO: 238923 - DNA, 13 bp, Artificial Sequence
  Oligonucleotide for detection of SNP TSC0058268
ttgtgttaaattt

SEQ ID NO: 238924 - DNA, 13 bp, Artificial Sequence
  Oligonucleotide for detection of SNP TSC0058268
aaatttaacacaa

SEQ ID NO: 238925 - DNA, 13 bp, Artificial Sequence
  Oligonucleotide for detection of SNP TSC0058268
ttgtgtgaaattt

SEQ ID NO: 238926 - DNA, 13 bp, Artificial Sequence
  Oligonucleotide for detection of SNP TSC0058268
aaatttcacacaa

SEQ ID NO: 238927 - DNA, 13 bp, Artificial Sequence
  Oligonucleotide for detection of SNP TSC0058268
ttgtgcgaaattt

SEQ ID NO: 238928 - DNA, 13 bp, Artificial Sequence
  Oligonucleotide for detection of SNP TSC0058268
aaatttcgcacaa

SEQ ID NO: 238929 - DNA, 13 bp, Artificial Sequence
  Oligonucleotide for detection of SNP TSC0058269
tttttaaatggaa

SEQ ID NO: 238930 - DNA, 13 bp, Artificial Sequence
  Oligonucleotide for detection of SNP TSC0058269
ttccatttaaaaa

SEQ ID NO: 238931 - DNA, 13 bp, Artificial Sequence
  Oligonucleotide for detection of SNP TSC0058269
tttttagatggaa

SEQ ID NO: 238932 - DNA, 13 bp, Artificial Sequence
  Oligonucleotide for detection of SNP TSC0058269
ttccatctaaaaa

SEQ ID NO: 238933 - DNA, 13 bp, Artificial Sequence
  Oligonucleotide for detection of SNP TSC0058271
gtaattataatgg

SEQ ID NO: 238934 - DNA, 13 bp, Artificial Sequence
  Oligonucleotide for detection of SNP TSC0058271
ccattataattac

SEQ ID NO: 238935 - DNA, 13 bp, Artificial Sequence
  Oligonucleotide for detection of SNP TSC0058271
gtaattttaatgg

SEQ ID NO: 238936 - DNA, 13 bp, Artificial Sequence
  Oligonucleotide for detection of SNP TSC0058271
ccattaaaattac

SEQ ID NO: 238937 - DNA, 13 bp, Artificial Sequence
  Oligonucleotide for detection of SNP TSC0058271
ttattgtgattay

SEQ ID NO: 238938 - DNA, 13 bp, Artificial Sequence
  Oligonucleotide for detection of SNP TSC0058271
rtaatcacaataa

SEQ ID NO: 238939 - DNA, 13 bp, Artificial Sequence
  Oligonucleotide for detection of SNP TSC0058271
ttattgagattay

SEQ ID NO: 238940 - DNA, 13 bp, Artificial Sequence
  Oligonucleotide for detection of SNP TSC0058271
rtaatctcaataa

SEQ ID NO: 238941 - DNA, 13 bp, Artificial Sequence
  Oligonucleotide for detection of SNP TSC0058272
ataggtgtggggg

SEQ ID NO: 238942 - DNA, 13 bp, Artificial Sequence
  Oligonucleotide for detection of SNP TSC0058272
cccccacacctat

SEQ ID NO: 238943 - DNA, 13 bp, Artificial Sequence
  Oligonucleotide for detection of SNP TSC0058272
ataggtatggggg

SEQ ID NO: 238944 - DNA, 13 bp, Artificial Sequence
  Oligonucleotide for detection of SNP TSC0058272
cccccatacctat

SEQ ID NO: 238945 - DNA, 13 bp, Artificial Sequence
  Oligonucleotide for detection of SNP TSC0058272
ataggcgtggggg

SEQ ID NO: 238946 - DNA, 13 bp, Artificial Sequence
  Oligonucleotide for detection of SNP TSC0058272
cccccacgcctat

SEQ ID NO: 238947 - DNA, 13 bp, Artificial Sequence
  Oligonucleotide for detection of SNP TSC0008243
tatatatgtagtt

SEQ ID NO: 238948 - DNA, 13 bp, Artificial Sequence
  Oligonucleotide for detection of SNP TSC0008243
aactacatatata

SEQ ID NO: 238949 - DNA, 13 bp, Artificial Sequence
  Oligonucleotide for detection of SNP TSC0008243
tatatacgtagtt

SEQ ID NO: 238950 - DNA, 13 bp, Artificial Sequence
  Oligonucleotide for detection of SNP TSC0008243
aactacgtatata

SEQ ID NO: 238951 - DNA, 13 bp, Artificial Sequence
  Oligonucleotide for detection of SNP TSC0058273
tattttaaggatt

SEQ ID NO: 238952 - DNA, 13 bp, Artificial Sequence
  Oligonucleotide for detection of SNP TSC0058273
aatccttaaaata

SEQ ID NO: 238953 - DNA, 13 bp, Artificial Sequence
  Oligonucleotide for detection of SNP TSC0058273
tatttttaggatt

SEQ ID NO: 238954 - DNA, 13 bp, Artificial Sequence
  Oligonucleotide for detection of SNP TSC0058273
aatcctaaaaata

SEQ ID NO: 238955 - DNA, 13 bp, Artificial Sequence
  Oligonucleotide for detection of SNP TSC0058273
aatttttaagata

SEQ ID NO: 238956 - DNA, 13 bp, Artificial Sequence
  Oligonucleotide for detection of SNP TSC0058273
tatcttaaaaatt

SEQ ID NO: 238957 - DNA, 13 bp, Artificial Sequence
  Oligonucleotide for detection of SNP TSC0058273
aattttgaagata

SEQ ID NO: 238958 - DNA, 13 bp, Artificial Sequence
  Oligonucleotide for detection of SNP TSC0058273
tatcttcaaaatt

SEQ ID NO: 238959 - DNA, 13 bp, Artificial Sequence
  Oligonucleotide for detection of SNP TSC0058274
tataggataatta

SEQ ID NO: 238960 - DNA, 13 bp, Artificial Sequence
  Oligonucleotide for detection of SNP TSC0058274
taattatcctata

SEQ ID NO: 238961 - DNA, 13 bp, Artificial Sequence
  Oligonucleotide for detection of SNP TSC0058274
tataggttaatta

SEQ ID NO: 238962 - DNA, 13 bp, Artificial Sequence
  Oligonucleotide for detection of SNP TSC0058274
taattaacctata

SEQ ID NO: 238963 - DNA, 13 bp, Artificial Sequence
  Oligonucleotide for detection of SNP TSC0058274
tagttattttgta

SEQ ID NO: 238964 - DNA, 13 bp, Artificial Sequence
  Oligonucleotide for detection of SNP TSC0058274
tacaaaataacta

SEQ ID NO: 238965 - DNA, 13 bp, Artificial Sequence
  Oligonucleotide for detection of SNP TSC0058274
tagttagtttgta

SEQ ID NO: 238966 - DNA, 13 bp, Artificial Sequence
  Oligonucleotide for detection of SNP TSC0058274
tacaaactaacta

SEQ ID NO: 238967 - DNA, 13 bp, Artificial Sequence
  Oligonucleotide for detection of SNP TSC0058277
tatgaatgttatt

SEQ ID NO: 238968 - DNA, 13 bp, Artificial Sequence
  Oligonucleotide for detection of SNP TSC0058277
aataacattcata

SEQ ID NO: 238969 - DNA, 13 bp, Artificial Sequence
  Oligonucleotide for detection of SNP TSC0058277
tatgaacgttatt

SEQ ID NO: 238970 - DNA, 13 bp, Artificial Sequence
  Oligonucleotide for detection of SNP TSC0058277
aataacgttcata

SEQ ID NO: 238971 - DNA, 13 bp, Artificial Sequence
  Oligonucleotide for detection of SNP TSC0058277
aatagtgtttata

SEQ ID NO: 238972 - DNA, 13 bp, Artificial Sequence
  Oligonucleotide for detection of SNP TSC0058277
tataaacactatt

SEQ ID NO: 238973 - DNA, 13 bp, Artificial Sequence
  Oligonucleotide for detection of SNP TSC0058277
aatagtatttata

SEQ ID NO: 238974 - DNA, 13 bp, Artificial Sequence
  Oligonucleotide for detection of SNP TSC0058277
tataaatactatt

SEQ ID NO: 238975 - DNA, 13 bp, Artificial Sequence
  Oligonucleotide for detection of SNP TSC0058277
aatagcgtttata

SEQ ID NO: 238976 - DNA, 13 bp, Artificial Sequence
  Oligonucleotide for detection of SNP TSC0058277
tataaacgctatt

SEQ ID NO: 238977 - DNA, 13 bp, Artificial Sequence
  Oligonucleotide for detection of SNP TSC0007242
aatgtttttttta

SEQ ID NO: 238978 - DNA, 13 bp, Artificial Sequence
  Oligonucleotide for detection of SNP TSC0007242
taaaaaaaacatt

SEQ ID NO: 238979 - DNA, 13 bp, Artificial Sequence
  Oligonucleotide for detection of SNP TSC0007242
tagaaataatatt

SEQ ID NO: 238980 - DNA, 13 bp, Artificial Sequence
  Oligonucleotide for detection of SNP TSC0007242
aatattatttcta

SEQ ID NO: 238981 - DNA, 13 bp, Artificial Sequence
  Oligonucleotide for detection of SNP TSC0058278
ttttataaggtay

SEQ ID NO: 238982 - DNA, 13 bp, Artificial Sequence
  Oligonucleotide for detection of SNP TSC0058278
rtaccttataaaa

SEQ ID NO: 238983 - DNA, 13 bp, Artificial Sequence
  Oligonucleotide for detection of SNP TSC0058278
ttttattaggtay

SEQ ID NO: 238984 - DNA, 13 bp, Artificial Sequence
  Oligonucleotide for detection of SNP TSC0058278
rtacctaataaaa

SEQ ID NO: 238985 - DNA, 13 bp, Artificial Sequence
  Oligonucleotide for detection of SNP TSC0058278
ttttatgaggtay

SEQ ID NO: 238986 - DNA, 13 bp, Artificial Sequence
  Oligonucleotide for detection of SNP TSC0058278
rtacctcataaaa

SEQ ID NO: 238987 - DNA, 13 bp, Artificial Sequence
  Oligonucleotide for detection of SNP TSC0058278
ttttacgaggtay

SEQ ID NO: 238988 - DNA, 13 bp, Artificial Sequence
  Oligonucleotide for detection of SNP TSC0058278
rtacctcgtaaaa

SEQ ID NO: 238989 - DNA, 13 bp, Artificial Sequence
  Oligonucleotide for detection of SNP TSC0058278
gtattttgtgaag

SEQ ID NO: 238990 - DNA, 13 bp, Artificial Sequence
  Oligonucleotide for detection of SNP TSC0058278
cttcacaaaatac

SEQ ID NO: 238991 - DNA, 13 bp, Artificial Sequence
  Oligonucleotide for detection of SNP TSC0058278
gtatttggtgaag

SEQ ID NO: 238992 - DNA, 13 bp, Artificial Sequence
  Oligonucleotide for detection of SNP TSC0058278
cttcaccaaatac

SEQ ID NO: 238993 - DNA, 13 bp, Artificial Sequence
  Oligonucleotide for detection of SNP TSC0058278
gtatttcgtgaag

SEQ ID NO: 238994 - DNA, 13 bp, Artificial Sequence
  Oligonucleotide for detection of SNP TSC0058278
cttcacgaaatac

SEQ ID NO: 238995 - DNA, 13 bp, Artificial Sequence
  Oligonucleotide for detection of SNP TSC0058279
taataattgaaaa

SEQ ID NO: 238996 - DNA, 13 bp, Artificial Sequence
  Oligonucleotide for detection of SNP TSC0058279
ttttcaattatta

SEQ ID NO: 238997 - DNA, 13 bp, Artificial Sequence
  Oligonucleotide for detection of SNP TSC0058279
taataagtgaaaa

SEQ ID NO: 238998 - DNA, 13 bp, Artificial Sequence
  Oligonucleotide for detection of SNP TSC0058279
ttttcacttatta

SEQ ID NO: 238999 - DNA, 13 bp, Artificial Sequence
  Oligonucleotide for detection of SNP TSC0058279
taataaatgaaaa

SEQ ID NO: 239000 - DNA, 13 bp, Artificial Sequence
  Oligonucleotide for detection of SNP TSC0058279
ttttcatttatta

SEQ ID NO: 239001 - DNA, 13 bp, Artificial Sequence
  Oligonucleotide for detection of SNP TSC0058280
ttaatgagggata

SEQ ID NO: 239002 - DNA, 13 bp, Artificial Sequence
  Oligonucleotide for detection of SNP TSC0058280
tatccctcattaa

SEQ ID NO: 239003 - DNA, 13 bp, Artificial Sequence
  Oligonucleotide for detection of SNP TSC0058280
ttaatgtgggata

SEQ ID NO: 239004 - DNA, 13 bp, Artificial Sequence
  Oligonucleotide for detection of SNP TSC0058280
tatcccacattaa

SEQ ID NO: 239005 - DNA, 13 bp, Artificial Sequence
  Oligonucleotide for detection of SNP TSC0058280
ttaatgggggata

SEQ ID NO: 239006 - DNA, 13 bp, Artificial Sequence
  Oligonucleotide for detection of SNP TSC0058280
tatcccccattaa

SEQ ID NO: 239007 - DNA, 13 bp, Artificial Sequence
  Oligonucleotide for detection of SNP TSC0058280
ttaatgcgggata

SEQ ID NO: 239008 - DNA, 13 bp, Artificial Sequence
  Oligonucleotide for detection of SNP TSC0058280
tatcccgcattaa

SEQ ID NO: 239009 - DNA, 13 bp, Artificial Sequence
  Oligonucleotide for detection of SNP TSC0058281
attgataggtaag

SEQ ID NO: 239010 - DNA, 13 bp, Artificial Sequence
  Oligonucleotide for detection of SNP TSC0058281
cttacctatcaat

SEQ ID NO: 239011 - DNA, 13 bp, Artificial Sequence
  Oligonucleotide for detection of SNP TSC0058281
attgattggtaag

SEQ ID NO: 239012 - DNA, 13 bp, Artificial Sequence
  Oligonucleotide for detection of SNP TSC0058281
cttaccaatcaat

SEQ ID NO: 239013 - DNA, 13 bp, Artificial Sequence
  Oligonucleotide for detection of SNP TSC0058281
attgatcggtaag

SEQ ID NO: 239014 - DNA, 13 bp, Artificial Sequence
  Oligonucleotide for detection of SNP TSC0058281
cttaccgatcaat

SEQ ID NO: 239015 - DNA, 13 bp, Artificial Sequence
  Oligonucleotide for detection of SNP TSC0058281
tttatttgttaat

SEQ ID NO: 239016 - DNA, 13 bp, Artificial Sequence
  Oligonucleotide for detection of SNP TSC0058281
attaacaaataaa

SEQ ID NO: 239017 - DNA, 13 bp, Artificial Sequence
  Oligonucleotide for detection of SNP TSC0058281
tttatcggttaat

SEQ ID NO: 239018 - DNA, 13 bp, Artificial Sequence
  Oligonucleotide for detection of SNP TSC0058281
attaaccgataaa

SEQ ID NO: 239019 - DNA, 13 bp, Artificial Sequence
  Oligonucleotide for detection of SNP TSC0058282
tttgtatagattg

SEQ ID NO: 239020 - DNA, 13 bp, Artificial Sequence
  Oligonucleotide for detection of SNP TSC0058282
caatctatacaaa

SEQ ID NO: 239021 - DNA, 13 bp, Artificial Sequence
  Oligonucleotide for detection of SNP TSC0058282
tttgtagagattg

SEQ ID NO: 239022 - DNA, 13 bp, Artificial Sequence
  Oligonucleotide for detection of SNP TSC0058282
caatctctacaaa

SEQ ID NO: 239023 - DNA, 13 bp, Artificial Sequence
  Oligonucleotide for detection of SNP TSC0058282
tttgtatagatcg

SEQ ID NO: 239024 - DNA, 13 bp, Artificial Sequence
  Oligonucleotide for detection of SNP TSC0058282
cgatctatacaaa

SEQ ID NO: 239025 - DNA, 13 bp, Artificial Sequence
  Oligonucleotide for detection of SNP TSC0058282
tttgtagagatcg

SEQ ID NO: 239026 - DNA, 13 bp, Artificial Sequence
  Oligonucleotide for detection of SNP TSC0058282
cgatctctacaaa

SEQ ID NO: 239027 - DNA, 13 bp, Artificial Sequence
  Oligonucleotide for detection of SNP TSC0058282
tgatttgtataag

SEQ ID NO: 239028 - DNA, 13 bp, Artificial Sequence
  Oligonucleotide for detection of SNP TSC0058282
cttatacaaatca

SEQ ID NO: 239029 - DNA, 13 bp, Artificial Sequence
  Oligonucleotide for detection of SNP TSC0058282
tgatttttataag

SEQ ID NO: 239030 - DNA, 13 bp, Artificial Sequence
  Oligonucleotide for detection of SNP TSC0058282
cttataaaaatca

SEQ ID NO: 239031 - DNA, 13 bp, Artificial Sequence
  Oligonucleotide for detection of SNP TSC0058282
cgatttgtataag

SEQ ID NO: 239032 - DNA, 13 bp, Artificial Sequence
  Oligonucleotide for detection of SNP TSC0058282
cttatacaaatcg

SEQ ID NO: 239033 - DNA, 13 bp, Artificial Sequence
  Oligonucleotide for detection of SNP TSC0058282
cgatttttataag

SEQ ID NO: 239034 - DNA, 13 bp, Artificial Sequence
  Oligonucleotide for detection of SNP TSC0058282
cttataaaaatcg

SEQ ID NO: 239035 - DNA, 13 bp, Artificial Sequence
  Oligonucleotide for detection of SNP TSC0058283
gagaaaggttaag

SEQ ID NO: 239036 - DNA, 13 bp, Artificial Sequence
  Oligonucleotide for detection of SNP TSC0058283
cttaacctttctc

SEQ ID NO: 239037 - DNA, 13 bp, Artificial Sequence
  Oligonucleotide for detection of SNP TSC0058283
gagaaaagttaag

SEQ ID NO: 239038 - DNA, 13 bp, Artificial Sequence
  Oligonucleotide for detection of SNP TSC0058283
cttaacttttctc

SEQ ID NO: 239039 - DNA, 13 bp, Artificial Sequence
  Oligonucleotide for detection of SNP TSC0058284
taatatatattag

SEQ ID NO: 239040 - DNA, 13 bp, Artificial Sequence
  Oligonucleotide for detection of SNP TSC0058284
ctaatatatatta

SEQ ID NO: 239041 - DNA, 13 bp, Artificial Sequence
  Oligonucleotide for detection of SNP TSC0058284
taatatgtattag

SEQ ID NO: 239042 - DNA, 13 bp, Artificial Sequence
  Oligonucleotide for detection of SNP TSC0058284
ctaatacatatta

SEQ ID NO: 239043 - DNA, 13 bp, Artificial Sequence
  Oligonucleotide for detection of SNP TSC0058285
ttgttttgtattt

SEQ ID NO: 239044 - DNA, 13 bp, Artificial Sequence
  Oligonucleotide for detection of SNP TSC0058285
aaatacaaaacaa

SEQ ID NO: 239045 - DNA, 13 bp, Artificial Sequence
  Oligonucleotide for detection of SNP TSC0058285
ttgtttcgtattt

SEQ ID NO: 239046 - DNA, 13 bp, Artificial Sequence
  Oligonucleotide for detection of SNP TSC0058285
aaatacgaaacaa

SEQ ID NO: 239047 - DNA, 13 bp, Artificial Sequence
  Oligonucleotide for detection of SNP TSC0058285
aggtgtggagtag

SEQ ID NO: 239048 - DNA, 13 bp, Artificial Sequence
  Oligonucleotide for detection of SNP TSC0058285
ctactccacacct

SEQ ID NO: 239049 - DNA, 13 bp, Artificial Sequence
  Oligonucleotide for detection of SNP TSC0058285
aggtgtagagtag

SEQ ID NO: 239050 - DNA, 13 bp, Artificial Sequence
  Oligonucleotide for detection of SNP TSC0058285
ctactctacacct

SEQ ID NO: 239051 - DNA, 13 bp, Artificial Sequence
  Oligonucleotide for detection of SNP TSC0058285
aggtgcggagtag

SEQ ID NO: 239052 - DNA, 13 bp, Artificial Sequence
  Oligonucleotide for detection of SNP TSC0058285
ctactccgcacct

SEQ ID NO: 239053 - DNA, 13 bp, Artificial Sequence
  Oligonucleotide for detection of SNP TSC0058286
aaattatgattgt

SEQ ID NO: 239054 - DNA, 13 bp, Artificial Sequence
  Oligonucleotide for detection of SNP TSC0058286
acaatcataattt

SEQ ID NO: 239055 - DNA, 13 bp, Artificial Sequence
  Oligonucleotide for detection of SNP TSC0058286
aaattaggattgt

SEQ ID NO: 239056 - DNA, 13 bp, Artificial Sequence
  Oligonucleotide for detection of SNP TSC0058286
acaatcctaattt

SEQ ID NO: 239057 - DNA, 13 bp, Artificial Sequence
  Oligonucleotide for detection of SNP TSC0058286
aaattacgattgt

SEQ ID NO: 239058 - DNA, 13 bp, Artificial Sequence
  Oligonucleotide for detection of SNP TSC0058286
acaatcgtaattt

SEQ ID NO: 239059 - DNA, 13 bp, Artificial Sequence
  Oligonucleotide for detection of SNP TSC0058286
ataattgtagttt

SEQ ID NO: 239060 - DNA, 13 bp, Artificial Sequence
  Oligonucleotide for detection of SNP TSC0058286
aaactacaattat

SEQ ID NO: 239061 - DNA, 13 bp, Artificial Sequence
  Oligonucleotide for detection of SNP TSC0058286
ataatcgtagttt

SEQ ID NO: 239062 - DNA, 13 bp, Artificial Sequence
  Oligonucleotide for detection of SNP TSC0058286
aaactacgattat

SEQ ID NO: 239063 - DNA, 13 bp, Artificial Sequence
  Oligonucleotide for detection of SNP TSC0058289
gttgttaggggtt

SEQ ID NO: 239064 - DNA, 13 bp, Artificial Sequence
  Oligonucleotide for detection of SNP TSC0058289
aacccctaacaac

SEQ ID NO: 239065 - DNA, 13 bp, Artificial Sequence
  Oligonucleotide for detection of SNP TSC0058289
gttgttgggggtt

SEQ ID NO: 239066 - DNA, 13 bp, Artificial Sequence
  Oligonucleotide for detection of SNP TSC0058289
aacccccaacaac

SEQ ID NO: 239067 - DNA, 13 bp, Artificial Sequence
  Oligonucleotide for detection of SNP TSC0058289
gtcgttaggggtt

SEQ ID NO: 239068 - DNA, 13 bp, Artificial Sequence
  Oligonucleotide for detection of SNP TSC0058289
aacccctaacgac

SEQ ID NO: 239069 - DNA, 13 bp, Artificial Sequence
  Oligonucleotide for detection of SNP TSC0058289
gtcgttgggggtt

SEQ ID NO: 239070 - DNA, 13 bp, Artificial Sequence
  Oligonucleotide for detection of SNP TSC0058289
aacccccaacgac

SEQ ID NO: 239071 - DNA, 13 bp, Artificial Sequence
  Oligonucleotide for detection of SNP TSC0058289
gttgtcgggggtt

SEQ ID NO: 239072 - DNA, 13 bp, Artificial Sequence
  Oligonucleotide for detection of SNP TSC0058289
aacccccgacaac

SEQ ID NO: 239073 - DNA, 13 bp, Artificial Sequence
  Oligonucleotide for detection of SNP TSC0058289
gtcgtcgggggtt

SEQ ID NO: 239074 - DNA, 13 bp, Artificial Sequence
  Oligonucleotide for detection of SNP TSC0058289
aacccccgacgac

SEQ ID NO: 239075 - DNA, 13 bp, Artificial Sequence
  Oligonucleotide for detection of SNP TSC0058289
aatttttggcgay

SEQ ID NO: 239076 - DNA, 13 bp, Artificial Sequence
  Oligonucleotide for detection of SNP TSC0058289
rtcgccaaaaatt

SEQ ID NO: 239077 - DNA, 13 bp, Artificial Sequence
  Oligonucleotide for detection of SNP TSC0058289
aattttcggcgay

SEQ ID NO: 239078 - DNA, 13 bp, Artificial Sequence
  Oligonucleotide for detection of SNP TSC0058289
rtcgccgaaaatt

SEQ ID NO: 239079 - DNA, 13 bp, Artificial Sequence
  Oligonucleotide for detection of SNP TSC0058290
ttggttagtatta

SEQ ID NO: 239080 - DNA, 13 bp, Artificial Sequence
  Oligonucleotide for detection of SNP TSC0058290
taatactaaccaa

SEQ ID NO: 239081 - DNA, 13 bp, Artificial Sequence
  Oligonucleotide for detection of SNP TSC0058290
ttggttggtatta

SEQ ID NO: 239082 - DNA, 13 bp, Artificial Sequence
  Oligonucleotide for detection of SNP TSC0058290
taataccaaccaa

SEQ ID NO: 239083 - DNA, 13 bp, Artificial Sequence
  Oligonucleotide for detection of SNP TSC0058290
ttggtcggtatta

SEQ ID NO: 239084 - DNA, 13 bp, Artificial Sequence
  Oligonucleotide for detection of SNP TSC0058290
taataccgaccaa

SEQ ID NO: 239085 - DNA, 13 bp, Artificial Sequence
  Oligonucleotide for detection of SNP TSC0058290
taatgttggttag

SEQ ID NO: 239086 - DNA, 13 bp, Artificial Sequence
  Oligonucleotide for detection of SNP TSC0058290
ctaaccaacatta

SEQ ID NO: 239087 - DNA, 13 bp, Artificial Sequence
  Oligonucleotide for detection of SNP TSC0058290
taatgtcggttag

SEQ ID NO: 239088 - DNA, 13 bp, Artificial Sequence
  Oligonucleotide for detection of SNP TSC0058290
ctaaccgacatta

SEQ ID NO: 239089 - DNA, 13 bp, Artificial Sequence
  Oligonucleotide for detection of SNP TSC0058291
tttgggtggtaat

SEQ ID NO: 239090 - DNA, 13 bp, Artificial Sequence
  Oligonucleotide for detection of SNP TSC0058291
attaccacccaaa

SEQ ID NO: 239091 - DNA, 13 bp, Artificial Sequence
  Oligonucleotide for detection of SNP TSC0058291
ttcgggtggtaat

SEQ ID NO: 239092 - DNA, 13 bp, Artificial Sequence
  Oligonucleotide for detection of SNP TSC0058291
attaccacccgaa

SEQ ID NO: 239093 - DNA, 13 bp, Artificial Sequence
  Oligonucleotide for detection of SNP TSC0058291
tttgggcggtaat

SEQ ID NO: 239094 - DNA, 13 bp, Artificial Sequence
  Oligonucleotide for detection of SNP TSC0058291
attaccgcccaaa

SEQ ID NO: 239095 - DNA, 13 bp, Artificial Sequence
  Oligonucleotide for detection of SNP TSC0058291
ttcgggcggtaat

SEQ ID NO: 239096 - DNA, 13 bp, Artificial Sequence
  Oligonucleotide for detection of SNP TSC0058291
attaccgcccgaa

SEQ ID NO: 239097 - DNA, 13 bp, Artificial Sequence
  Oligonucleotide for detection of SNP TSC0058291
attattgtttgag

SEQ ID NO: 239098 - DNA, 13 bp, Artificial Sequence
  Oligonucleotide for detection of SNP TSC0058291
ctcaaacaataat

SEQ ID NO: 239099 - DNA, 13 bp, Artificial Sequence
  Oligonucleotide for detection of SNP TSC0058291
attatcgtttgag

SEQ ID NO: 239100 - DNA, 13 bp, Artificial Sequence
  Oligonucleotide for detection of SNP TSC0058291
ctcaaacgataat

SEQ ID NO: 239101 - DNA, 13 bp, Artificial Sequence
  Oligonucleotide for detection of SNP TSC0058291
attattattcgag

SEQ ID NO: 239102 - DNA, 13 bp, Artificial Sequence
  Oligonucleotide for detection of SNP TSC0058291
ctcgaataataat

SEQ ID NO: 239103 - DNA, 13 bp, Artificial Sequence
  Oligonucleotide for detection of SNP TSC0058291
attattgttcgag

SEQ ID NO: 239104 - DNA, 13 bp, Artificial Sequence
  Oligonucleotide for detection of SNP TSC0058291
ctcgaacaataat

SEQ ID NO: 239105 - DNA, 13 bp, Artificial Sequence
  Oligonucleotide for detection of SNP TSC0058291
attatcgttcgag

SEQ ID NO: 239106 - DNA, 13 bp, Artificial Sequence
  Oligonucleotide for detection of SNP TSC0058291
ctcgaacgataat

SEQ ID NO: 239107 - DNA, 13 bp, Artificial Sequence
  Oligonucleotide for detection of SNP TSC0058293
ttgtagtatttty

SEQ ID NO: 239108 - DNA, 13 bp, Artificial Sequence
  Oligonucleotide for detection of SNP TSC0058293
raaaatactacaa

SEQ ID NO: 239109 - DNA, 13 bp, Artificial Sequence
  Oligonucleotide for detection of SNP TSC0058293
ttgtaggatttty

SEQ ID NO: 239110 - DNA, 13 bp, Artificial Sequence
  Oligonucleotide for detection of SNP TSC0058293
raaaatcctacaa

SEQ ID NO: 239111 - DNA, 13 bp, Artificial Sequence
  Oligonucleotide for detection of SNP TSC0058293
gagagtattgtag

SEQ ID NO: 239112 - DNA, 13 bp, Artificial Sequence
  Oligonucleotide for detection of SNP TSC0058293
ctacaatactctc

SEQ ID NO: 239113 - DNA, 13 bp, Artificial Sequence
  Oligonucleotide for detection of SNP TSC0058293
gagagttttgtag

SEQ ID NO: 239114 - DNA, 13 bp, Artificial Sequence
  Oligonucleotide for detection of SNP TSC0058293
ctacaaaactctc

SEQ ID NO: 239115 - DNA, 13 bp, Artificial Sequence
  Oligonucleotide for detection of SNP TSC0058295
atgtttattgttt

SEQ ID NO: 239116 - DNA, 13 bp, Artificial Sequence
  Oligonucleotide for detection of SNP TSC0058295
aaacaataaacat

SEQ ID NO: 239117 - DNA, 13 bp, Artificial Sequence
  Oligonucleotide for detection of SNP TSC0058295
atgttttttgttt

SEQ ID NO: 239118 - DNA, 13 bp, Artificial Sequence
  Oligonucleotide for detection of SNP TSC0058295
aaacaaaaaacat

SEQ ID NO: 239119 - DNA, 13 bp, Artificial Sequence
  Oligonucleotide for detection of SNP TSC0058296
agtaaggtataaa

SEQ ID NO: 239120 - DNA, 13 bp, Artificial Sequence
  Oligonucleotide for detection of SNP TSC0058296
tttataccttact

SEQ ID NO: 239121 - DNA, 13 bp, Artificial Sequence
  Oligonucleotide for detection of SNP TSC0058296
agtaagttataaa

SEQ ID NO: 239122 - DNA, 13 bp, Artificial Sequence
  Oligonucleotide for detection of SNP TSC0058296
tttataacttact

SEQ ID NO: 239123 - DNA, 13 bp, Artificial Sequence
  Oligonucleotide for detection of SNP TSC0005890
taatttgtgttgg

SEQ ID NO: 239124 - DNA, 13 bp, Artificial Sequence
  Oligonucleotide for detection of SNP TSC0005890
ccaacacaaatta

SEQ ID NO: 239125 - DNA, 13 bp, Artificial Sequence
  Oligonucleotide for detection of SNP TSC0005890
taatttatgttgg

SEQ ID NO: 239126 - DNA, 13 bp, Artificial Sequence
  Oligonucleotide for detection of SNP TSC0005890
ccaacataaatta

SEQ ID NO: 239127 - DNA, 13 bp, Artificial Sequence
  Oligonucleotide for detection of SNP TSC0004699
tttgggttttgta

SEQ ID NO: 239128 - DNA, 13 bp, Artificial Sequence
  Oligonucleotide for detection of SNP TSC0004699
tacaaaacccaaa

SEQ ID NO: 239129 - DNA, 13 bp, Artificial Sequence
  Oligonucleotide for detection of SNP TSC0004699
tttggggtttgta

SEQ ID NO: 239130 - DNA, 13 bp, Artificial Sequence
  Oligonucleotide for detection of SNP TSC0004699
tacaaaccccaaa

SEQ ID NO: 239131 - DNA, 13 bp, Artificial Sequence
  Oligonucleotide for detection of SNP TSC0058301
ataagggttaaaa

SEQ ID NO: 239132 - DNA, 13 bp, Artificial Sequence
  Oligonucleotide for detection of SNP TSC0058301
ttttaacccttat

SEQ ID NO: 239133 - DNA, 13 bp, Artificial Sequence
  Oligonucleotide for detection of SNP TSC0058301
ataaggattaaaa

SEQ ID NO: 239134 - DNA, 13 bp, Artificial Sequence
  Oligonucleotide for detection of SNP TSC0058301
ttttaatccttat

SEQ ID NO: 239135 - DNA, 13 bp, Artificial Sequence
  Oligonucleotide for detection of SNP TSC0058302
atgtgattaaata

SEQ ID NO: 239136 - DNA, 13 bp, Artificial Sequence
  Oligonucleotide for detection of SNP TSC0058302
tatttaatcacat

SEQ ID NO: 239137 - DNA, 13 bp, Artificial Sequence
  Oligonucleotide for detection of SNP TSC0058302
atgtgagtaaata

SEQ ID NO: 239138 - DNA, 13 bp, Artificial Sequence
  Oligonucleotide for detection of SNP TSC0058302
tatttactcacat

SEQ ID NO: 239139 - DNA, 13 bp, Artificial Sequence
  Oligonucleotide for detection of SNP TSC0058303
tataagaaaaagg

SEQ ID NO: 239140 - DNA, 13 bp, Artificial Sequence
  Oligonucleotide for detection of SNP TSC0058303
cctttttcttata

SEQ ID NO: 239141 - DNA, 13 bp, Artificial Sequence
  Oligonucleotide for detection of SNP TSC0058303
tataaggaaaagg

SEQ ID NO: 239142 - DNA, 13 bp, Artificial Sequence
  Oligonucleotide for detection of SNP TSC0058303
ccttttccttata

SEQ ID NO: 239143 - DNA, 13 bp, Artificial Sequence
  Oligonucleotide for detection of SNP TSC0058305
taggatgataaaa

SEQ ID NO: 239144 - DNA, 13 bp, Artificial Sequence
  Oligonucleotide for detection of SNP TSC0058305
ttttatcatccta

SEQ ID NO: 239145 - DNA, 13 bp, Artificial Sequence
  Oligonucleotide for detection of SNP TSC0058305
taggataataaaa

SEQ ID NO: 239146 - DNA, 13 bp, Artificial Sequence
  Oligonucleotide for detection of SNP TSC0058305
ttttattatccta

SEQ ID NO: 239147 - DNA, 13 bp, Artificial Sequence
  Oligonucleotide for detection of SNP TSC0058310
ggtggtagggaag

SEQ ID NO: 239148 - DNA, 13 bp, Artificial Sequence
  Oligonucleotide for detection of SNP TSC0058310
cttccctaccacc

SEQ ID NO: 239149 - DNA, 13 bp, Artificial Sequence
  Oligonucleotide for detection of SNP TSC0058310
ggtggtggggaag

SEQ ID NO: 239150 - DNA, 13 bp, Artificial Sequence
  Oligonucleotide for detection of SNP TSC0058310
cttccccaccacc

SEQ ID NO: 239151 - DNA, 13 bp, Artificial Sequence
  Oligonucleotide for detection of SNP TSC0058310
ggtggcggggaag

SEQ ID NO: 239152 - DNA, 13 bp, Artificial Sequence
  Oligonucleotide for detection of SNP TSC0058310
cttccccgccacc

SEQ ID NO: 239153 - DNA, 13 bp, Artificial Sequence
  Oligonucleotide for detection of SNP TSC0058311
aagtttttaagtg

SEQ ID NO: 239154 - DNA, 13 bp, Artificial Sequence
  Oligonucleotide for detection of SNP TSC0058311
cacttaaaaactt

SEQ ID NO: 239155 - DNA, 13 bp, Artificial Sequence
  Oligonucleotide for detection of SNP TSC0058311
aagtttgtaagtg

SEQ ID NO: 239156 - DNA, 13 bp, Artificial Sequence
  Oligonucleotide for detection of SNP TSC0058311
cacttacaaactt

SEQ ID NO: 239157 - DNA, 13 bp, Artificial Sequence
  Oligonucleotide for detection of SNP TSC0058311
tatttagagattt

SEQ ID NO: 239158 - DNA, 13 bp, Artificial Sequence
  Oligonucleotide for detection of SNP TSC0058311
aaatctctaaata

SEQ ID NO: 239159 - DNA, 13 bp, Artificial Sequence
  Oligonucleotide for detection of SNP TSC0058311
tatttatagattt

SEQ ID NO: 239160 - DNA, 13 bp, Artificial Sequence
  Oligonucleotide for detection of SNP TSC0058311
aaatctataaata

SEQ ID NO: 239161 - DNA, 13 bp, Artificial Sequence
  Oligonucleotide for detection of SNP TSC0058315
gtagatataatty

SEQ ID NO: 239162 - DNA, 13 bp, Artificial Sequence
  Oligonucleotide for detection of SNP TSC0058315
raattatatctac

SEQ ID NO: 239163 - DNA, 13 bp, Artificial Sequence
  Oligonucleotide for detection of SNP TSC0058315
gtagatttaatty

SEQ ID NO: 239164 - DNA, 13 bp, Artificial Sequence
  Oligonucleotide for detection of SNP TSC0058315
raattaaatctac

SEQ ID NO: 239165 - DNA, 13 bp, Artificial Sequence
  Oligonucleotide for detection of SNP TSC0058315
gggttatatttgy

SEQ ID NO: 239166 - DNA, 13 bp, Artificial Sequence
  Oligonucleotide for detection of SNP TSC0058315
rcaaatataaccc

SEQ ID NO: 239167 - DNA, 13 bp, Artificial Sequence
  Oligonucleotide for detection of SNP TSC0058315
gggttaaatttgy

SEQ ID NO: 239168 - DNA, 13 bp, Artificial Sequence
  Oligonucleotide for detection of SNP TSC0058315
rcaaatttaaccc

SEQ ID NO: 239169 - DNA, 13 bp, Artificial Sequence
  Oligonucleotide for detection of SNP TSC0058317
tgatgaaattttt

SEQ ID NO: 239170 - DNA, 13 bp, Artificial Sequence
  Oligonucleotide for detection of SNP TSC0058317
aaaaatttcatca

SEQ ID NO: 239171 - DNA, 13 bp, Artificial Sequence
  Oligonucleotide for detection of SNP TSC0058317
tgatgatattttt

SEQ ID NO: 239172 - DNA, 13 bp, Artificial Sequence
  Oligonucleotide for detection of SNP TSC0058317
aaaaatatcatca

SEQ ID NO: 239173 - DNA, 13 bp, Artificial Sequence
  Oligonucleotide for detection of SNP TSC0058317
aaggattttatta

SEQ ID NO: 239174 - DNA, 13 bp, Artificial Sequence
  Oligonucleotide for detection of SNP TSC0058317
taataaaatcctt

SEQ ID NO: 239175 - DNA, 13 bp, Artificial Sequence
  Oligonucleotide for detection of SNP TSC0058317
aaggatattatta

SEQ ID NO: 239176 - DNA, 13 bp, Artificial Sequence
  Oligonucleotide for detection of SNP TSC0058317
taataatatcctt

SEQ ID NO: 239177 - DNA, 13 bp, Artificial Sequence
  Oligonucleotide for detection of SNP TSC0058318
ttaatggttgaag

SEQ ID NO: 239178 - DNA, 13 bp, Artificial Sequence
  Oligonucleotide for detection of SNP TSC0058318
cttcaaccattaa

SEQ ID NO: 239179 - DNA, 13 bp, Artificial Sequence
  Oligonucleotide for detection of SNP TSC0058318
ttaatgattgaag

SEQ ID NO: 239180 - DNA, 13 bp, Artificial Sequence
  Oligonucleotide for detection of SNP TSC0058318
cttcaatcattaa

SEQ ID NO: 239181 - DNA, 13 bp, Artificial Sequence
  Oligonucleotide for detection of SNP TSC0058319
atataggtattaa

SEQ ID NO: 239182 - DNA, 13 bp, Artificial Sequence
  Oligonucleotide for detection of SNP TSC0058319
ttaatacctatat

SEQ ID NO: 239183 - DNA, 13 bp, Artificial Sequence
  Oligonucleotide for detection of SNP TSC0058319
atatagatattaa

SEQ ID NO: 239184 - DNA, 13 bp, Artificial Sequence
  Oligonucleotide for detection of SNP TSC0058319
ttaatatctatat

SEQ ID NO: 239185 - DNA, 13 bp, Artificial Sequence
  Oligonucleotide for detection of SNP TSC0058320
ataattgttagag

SEQ ID NO: 239186 - DNA, 13 bp, Artificial Sequence
  Oligonucleotide for detection of SNP TSC0058320
ctctaacaattat

SEQ ID NO: 239187 - DNA, 13 bp, Artificial Sequence
  Oligonucleotide for detection of SNP TSC0058320
ataattattagag

SEQ ID NO: 239188 - DNA, 13 bp, Artificial Sequence
  Oligonucleotide for detection of SNP TSC0058320
ctctaataattat

SEQ ID NO: 239189 - DNA, 13 bp, Artificial Sequence
  Oligonucleotide for detection of SNP TSC0058322
attatatgatggg

SEQ ID NO: 239190 - DNA, 13 bp, Artificial Sequence
  Oligonucleotide for detection of SNP TSC0058322
cccatcatataat

SEQ ID NO: 239191 - DNA, 13 bp, Artificial Sequence
  Oligonucleotide for detection of SNP TSC0058322
attataggatggg

SEQ ID NO: 239192 - DNA, 13 bp, Artificial Sequence
  Oligonucleotide for detection of SNP TSC0058322
cccatcctataat

SEQ ID NO: 239193 - DNA, 13 bp, Artificial Sequence
  Oligonucleotide for detection of SNP TSC0058322
tttattatataat

SEQ ID NO: 239194 - DNA, 13 bp, Artificial Sequence
  Oligonucleotide for detection of SNP TSC0058322
attatataataaa

SEQ ID NO: 239195 - DNA, 13 bp, Artificial Sequence
  Oligonucleotide for detection of SNP TSC0058322
tttattttataat

SEQ ID NO: 239196 - DNA, 13 bp, Artificial Sequence
  Oligonucleotide for detection of SNP TSC0058322
attataaaataaa

SEQ ID NO: 239197 - DNA, 13 bp, Artificial Sequence
  Oligonucleotide for detection of SNP TSC0058323
atgaggatgttty

SEQ ID NO: 239198 - DNA, 13 bp, Artificial Sequence
  Oligonucleotide for detection of SNP TSC0058323
raaacatcctcat

SEQ ID NO: 239199 - DNA, 13 bp, Artificial Sequence
  Oligonucleotide for detection of SNP TSC0058323
atgaggttgttty

SEQ ID NO: 239200 - DNA, 13 bp, Artificial Sequence
  Oligonucleotide for detection of SNP TSC0058323
raaacaacctcat

SEQ ID NO: 239201 - DNA, 13 bp, Artificial Sequence
  Oligonucleotide for detection of SNP TSC0058323
gagatatttttat

SEQ ID NO: 239202 - DNA, 13 bp, Artificial Sequence
  Oligonucleotide for detection of SNP TSC0058323
ataaaaatatctc

SEQ ID NO: 239203 - DNA, 13 bp, Artificial Sequence
  Oligonucleotide for detection of SNP TSC0058323
gagatagttttat

SEQ ID NO: 239204 - DNA, 13 bp, Artificial Sequence
  Oligonucleotide for detection of SNP TSC0058323
ataaaactatctc

SEQ ID NO: 239205 - DNA, 13 bp, Artificial Sequence
  Oligonucleotide for detection of SNP TSC0058324
gaaagatgaagay

SEQ ID NO: 239206 - DNA, 13 bp, Artificial Sequence
  Oligonucleotide for detection of SNP TSC0058324
rtcttcatctttc

SEQ ID NO: 239207 - DNA, 13 bp, Artificial Sequence
  Oligonucleotide for detection of SNP TSC0058324
gaaagacgaagay

SEQ ID NO: 239208 - DNA, 13 bp, Artificial Sequence
  Oligonucleotide for detection of SNP TSC0058324
rtcttcgtctttc

SEQ ID NO: 239209 - DNA, 13 bp, Artificial Sequence
  Oligonucleotide for detection of SNP TSC0058325
gaagtatttagta

SEQ ID NO: 239210 - DNA, 13 bp, Artificial Sequence
  Oligonucleotide for detection of SNP TSC0058325
tactaaatacttc

SEQ ID NO: 239211 - DNA, 13 bp, Artificial Sequence
  Oligonucleotide for detection of SNP TSC0058325
gaagtaattagta

SEQ ID NO: 239212 - DNA, 13 bp, Artificial Sequence
  Oligonucleotide for detection of SNP TSC0058325
tactaattacttc

SEQ ID NO: 239213 - DNA, 13 bp, Artificial Sequence
  Oligonucleotide for detection of SNP TSC0058326
tgtagaaagttta

SEQ ID NO: 239214 - DNA, 13 bp, Artificial Sequence
  Oligonucleotide for detection of SNP TSC0058326
taaactttctaca

SEQ ID NO: 239215 - DNA, 13 bp, Artificial Sequence
  Oligonucleotide for detection of SNP TSC0058326
tgtagatagttta

SEQ ID NO: 239216 - DNA, 13 bp, Artificial Sequence
  Oligonucleotide for detection of SNP TSC0058326
taaactatctaca

SEQ ID NO: 239217 - DNA, 13 bp, Artificial Sequence
  Oligonucleotide for detection of SNP TSC0058326
taggttttttgta

SEQ ID NO: 239218 - DNA, 13 bp, Artificial Sequence
  Oligonucleotide for detection of SNP TSC0058326
tacaaaaaaccta

SEQ ID NO: 239219 - DNA, 13 bp, Artificial Sequence
  Oligonucleotide for detection of SNP TSC0006975
tataagatagtay

SEQ ID NO: 239220 - DNA, 13 bp, Artificial Sequence
  Oligonucleotide for detection of SNP TSC0006975
rtactatcttata

SEQ ID NO: 239221 - DNA, 13 bp, Artificial Sequence
  Oligonucleotide for detection of SNP TSC0006975
tataagttagtay

SEQ ID NO: 239222 - DNA, 13 bp, Artificial Sequence
  Oligonucleotide for detection of SNP TSC0006975
rtactaacttata

SEQ ID NO: 239223 - DNA, 13 bp, Artificial Sequence
  Oligonucleotide for detection of SNP TSC0006975
gtattgttttgta

SEQ ID NO: 239224 - DNA, 13 bp, Artificial Sequence
  Oligonucleotide for detection of SNP TSC0006975
tacaaaacaatac

SEQ ID NO: 239225 - DNA, 13 bp, Artificial Sequence
  Oligonucleotide for detection of SNP TSC0006975
gtattgatttgta

SEQ ID NO: 239226 - DNA, 13 bp, Artificial Sequence
  Oligonucleotide for detection of SNP TSC0006975
tacaaatcaatac

SEQ ID NO: 239227 - DNA, 13 bp, Artificial Sequence
  Oligonucleotide for detection of SNP TSC0058329
tatgttataggtg

SEQ ID NO: 239228 - DNA, 13 bp, Artificial Sequence
  Oligonucleotide for detection of SNP TSC0058329
cacctataacata

SEQ ID NO: 239229 - DNA, 13 bp, Artificial Sequence
  Oligonucleotide for detection of SNP TSC0058329
tatgttgtaggtg

SEQ ID NO: 239230 - DNA, 13 bp, Artificial Sequence
  Oligonucleotide for detection of SNP TSC0058329
cacctacaacata

SEQ ID NO: 239231 - DNA, 13 bp, Artificial Sequence
  Oligonucleotide for detection of SNP TSC0058331
aagtaaatgaagt

SEQ ID NO: 239232 - DNA, 13 bp, Artificial Sequence
  Oligonucleotide for detection of SNP TSC0058331
acttcatttactt

SEQ ID NO: 239233 - DNA, 13 bp, Artificial Sequence
  Oligonucleotide for detection of SNP TSC0058331
aagtaagtgaagt

SEQ ID NO: 239234 - DNA, 13 bp, Artificial Sequence
  Oligonucleotide for detection of SNP TSC0058331
acttcacttactt

SEQ ID NO: 239235 - DNA, 13 bp, Artificial Sequence
  Oligonucleotide for detection of SNP TSC0058332
ttttgagtattag

SEQ ID NO: 239236 - DNA, 13 bp, Artificial Sequence
  Oligonucleotide for detection of SNP TSC0058332
ctaatactcaaaa

SEQ ID NO: 239237 - DNA, 13 bp, Artificial Sequence
  Oligonucleotide for detection of SNP TSC0058332
ttttgaatattag

SEQ ID NO: 239238 - DNA, 13 bp, Artificial Sequence
  Oligonucleotide for detection of SNP TSC0058332
ctaatattcaaaa

SEQ ID NO: 239239 - DNA, 13 bp, Artificial Sequence
  Oligonucleotide for detection of SNP TSC0058333
taaaggtttatty

SEQ ID NO: 239240 - DNA, 13 bp, Artificial Sequence
  Oligonucleotide for detection of SNP TSC0058333
raataaaccttta

SEQ ID NO: 239241 - DNA, 13 bp, Artificial Sequence
  Oligonucleotide for detection of SNP TSC0058334
atgtatgaaaaty

SEQ ID NO: 239242 - DNA, 13 bp, Artificial Sequence
  Oligonucleotide for detection of SNP TSC0058334
rattttcatacat

SEQ ID NO: 239243 - DNA, 13 bp, Artificial Sequence
  Oligonucleotide for detection of SNP TSC0058334
atgtataaaaaty

SEQ ID NO: 239244 - DNA, 13 bp, Artificial Sequence
  Oligonucleotide for detection of SNP TSC0058334
ratttttatacat

SEQ ID NO: 239245 - DNA, 13 bp, Artificial Sequence
  Oligonucleotide for detection of SNP TSC0058338
gtagaattagtgt

SEQ ID NO: 239246 - DNA, 13 bp, Artificial Sequence
  Oligonucleotide for detection of SNP TSC0058338
acactaattctac

SEQ ID NO: 239247 - DNA, 13 bp, Artificial Sequence
  Oligonucleotide for detection of SNP TSC0058338
gtagaagtagtgt

SEQ ID NO: 239248 - DNA, 13 bp, Artificial Sequence
  Oligonucleotide for detection of SNP TSC0058338
acactacttctac

SEQ ID NO: 239249 - DNA, 13 bp, Artificial Sequence
  Oligonucleotide for detection of SNP TSC0058338
atattatttttay

SEQ ID NO: 239250 - DNA, 13 bp, Artificial Sequence
  Oligonucleotide for detection of SNP TSC0058338
rtaaaaataatat

SEQ ID NO: 239251 - DNA, 13 bp, Artificial Sequence
  Oligonucleotide for detection of SNP TSC0058339
ttttggttaatgy

SEQ ID NO: 239252 - DNA, 13 bp, Artificial Sequence
  Oligonucleotide for detection of SNP TSC0058339
rcattaaccaaaa

SEQ ID NO: 239253 - DNA, 13 bp, Artificial Sequence
  Oligonucleotide for detection of SNP TSC0058339
ttttgggtaatgy

SEQ ID NO: 239254 - DNA, 13 bp, Artificial Sequence
  Oligonucleotide for detection of SNP TSC0058339
rcattacccaaaa

SEQ ID NO: 239255 - DNA, 13 bp, Artificial Sequence
  Oligonucleotide for detection of SNP TSC0058339
gtattggttagaa

SEQ ID NO: 239256 - DNA, 13 bp, Artificial Sequence
  Oligonucleotide for detection of SNP TSC0058339
ttctaaccaatac

SEQ ID NO: 239257 - DNA, 13 bp, Artificial Sequence
  Oligonucleotide for detection of SNP TSC0058339
gtattgtttagaa

SEQ ID NO: 239258 - DNA, 13 bp, Artificial Sequence
  Oligonucleotide for detection of SNP TSC0058339
ttctaaacaatac

SEQ ID NO: 239259 - DNA, 13 bp, Artificial Sequence
  Oligonucleotide for detection of SNP TSC0058340
gaatttttggtta

SEQ ID NO: 239260 - DNA, 13 bp, Artificial Sequence
  Oligonucleotide for detection of SNP TSC0058340
taaccaaaaattc

SEQ ID NO: 239261 - DNA, 13 bp, Artificial Sequence
  Oligonucleotide for detection of SNP TSC0058340
gaatttgtggtta

SEQ ID NO: 239262 - DNA, 13 bp, Artificial Sequence
  Oligonucleotide for detection of SNP TSC0058340
taaccacaaattc

SEQ ID NO: 239263 - DNA, 13 bp, Artificial Sequence
  Oligonucleotide for detection of SNP TSC0058340
tggttagaagtty

SEQ ID NO: 239264 - DNA, 13 bp, Artificial Sequence
  Oligonucleotide for detection of SNP TSC0058340
raacttctaacca

SEQ ID NO: 239265 - DNA, 13 bp, Artificial Sequence
  Oligonucleotide for detection of SNP TSC0058340
tggttataagtty

SEQ ID NO: 239266 - DNA, 13 bp, Artificial Sequence
  Oligonucleotide for detection of SNP TSC0058340
raacttataacca

SEQ ID NO: 239267 - DNA, 13 bp, Artificial Sequence
  Oligonucleotide for detection of SNP TSC0058347
tatttttgggttg

SEQ ID NO: 239268 - DNA, 13 bp, Artificial Sequence
  Oligonucleotide for detection of SNP TSC0058347
caacccaaaaata

SEQ ID NO: 239269 - DNA, 13 bp, Artificial Sequence
  Oligonucleotide for detection of SNP TSC0058347
tattttcgggttg

SEQ ID NO: 239270 - DNA, 13 bp, Artificial Sequence
  Oligonucleotide for detection of SNP TSC0058347
caacccgaaaata

SEQ ID NO: 239271 - DNA, 13 bp, Artificial Sequence
  Oligonucleotide for detection of SNP TSC0058347
taatttggaaatg

SEQ ID NO: 239272 - DNA, 13 bp, Artificial Sequence
  Oligonucleotide for detection of SNP TSC0058347
catttccaaatta

SEQ ID NO: 239273 - DNA, 13 bp, Artificial Sequence
  Oligonucleotide for detection of SNP TSC0058347
taatttagaaatg

SEQ ID NO: 239274 - DNA, 13 bp, Artificial Sequence
  Oligonucleotide for detection of SNP TSC0058347
catttctaaatta

SEQ ID NO: 239275 - DNA, 13 bp, Artificial Sequence
  Oligonucleotide for detection of SNP TSC0058347
taattcggaaatg

SEQ ID NO: 239276 - DNA, 13 bp, Artificial Sequence
  Oligonucleotide for detection of SNP TSC0058347
catttccgaatta

SEQ ID NO: 239277 - DNA, 13 bp, Artificial Sequence
  Oligonucleotide for detection of SNP TSC0058353
attagagatattg

SEQ ID NO: 239278 - DNA, 13 bp, Artificial Sequence
  Oligonucleotide for detection of SNP TSC0058353
caatatctctaat

SEQ ID NO: 239279 - DNA, 13 bp, Artificial Sequence
  Oligonucleotide for detection of SNP TSC0058353
attagaaatattg

SEQ ID NO: 239280 - DNA, 13 bp, Artificial Sequence
  Oligonucleotide for detection of SNP TSC0058353
caatatttctaat

SEQ ID NO: 239281 - DNA, 13 bp, Artificial Sequence
  Oligonucleotide for detection of SNP TSC0058354
tttagagatggta

SEQ ID NO: 239282 - DNA, 13 bp, Artificial Sequence
  Oligonucleotide for detection of SNP TSC0058354
taccatctctaaa

SEQ ID NO: 239283 - DNA, 13 bp, Artificial Sequence
  Oligonucleotide for detection of SNP TSC0058354
tttagaaatggta

SEQ ID NO: 239284 - DNA, 13 bp, Artificial Sequence
  Oligonucleotide for detection of SNP TSC0058354
taccatttctaaa

SEQ ID NO: 239285 - DNA, 13 bp, Artificial Sequence
  Oligonucleotide for detection of SNP TSC0058355
tttaatgaaagag

SEQ ID NO: 239286 - DNA, 13 bp, Artificial Sequence
  Oligonucleotide for detection of SNP TSC0058355
ctctttcattaaa

SEQ ID NO: 239287 - DNA, 13 bp, Artificial Sequence
  Oligonucleotide for detection of SNP TSC0058355
tttaattaaagag

SEQ ID NO: 239288 - DNA, 13 bp, Artificial Sequence
  Oligonucleotide for detection of SNP TSC0058355
ctctttaattaaa

SEQ ID NO: 239289 - DNA, 13 bp, Artificial Sequence
  Oligonucleotide for detection of SNP TSC0058358
tttttggaagtgg

SEQ ID NO: 239290 - DNA, 13 bp, Artificial Sequence
  Oligonucleotide for detection of SNP TSC0058358
ccacttccaaaaa

SEQ ID NO: 239291 - DNA, 13 bp, Artificial Sequence
  Oligonucleotide for detection of SNP TSC0058358
tttttgaaagtgg

SEQ ID NO: 239292 - DNA, 13 bp, Artificial Sequence
  Oligonucleotide for detection of SNP TSC0058358
ccactttcaaaaa

SEQ ID NO: 239293 - DNA, 13 bp, Artificial Sequence
  Oligonucleotide for detection of SNP TSC0058359
ttttttgtaaggt

SEQ ID NO: 239294 - DNA, 13 bp, Artificial Sequence
  Oligonucleotide for detection of SNP TSC0058359
accttacaaaaaa

SEQ ID NO: 239295 - DNA, 13 bp, Artificial Sequence
  Oligonucleotide for detection of SNP TSC0058360
ttatatgagttgt

SEQ ID NO: 239296 - DNA, 13 bp, Artificial Sequence
  Oligonucleotide for detection of SNP TSC0058360
acaactcatataa

SEQ ID NO: 239297 - DNA, 13 bp, Artificial Sequence
  Oligonucleotide for detection of SNP TSC0058360
ttatataagttgt

SEQ ID NO: 239298 - DNA, 13 bp, Artificial Sequence
  Oligonucleotide for detection of SNP TSC0058360
acaacttatataa

SEQ ID NO: 239299 - DNA, 13 bp, Artificial Sequence
  Oligonucleotide for detection of SNP TSC0058361
aagattataggaa

SEQ ID NO: 239300 - DNA, 13 bp, Artificial Sequence
  Oligonucleotide for detection of SNP TSC0058361
ttcctataatctt

SEQ ID NO: 239301 - DNA, 13 bp, Artificial Sequence
  Oligonucleotide for detection of SNP TSC0058361
aagattgtaggaa

SEQ ID NO: 239302 - DNA, 13 bp, Artificial Sequence
  Oligonucleotide for detection of SNP TSC0058361
ttcctacaatctt

SEQ ID NO: 239303 - DNA, 13 bp, Artificial Sequence
  Oligonucleotide for detection of SNP TSC0058362
aattgtaattttt

SEQ ID NO: 239304 - DNA, 13 bp, Artificial Sequence
  Oligonucleotide for detection of SNP TSC0058362
aaaaattacaatt

SEQ ID NO: 239305 - DNA, 13 bp, Artificial Sequence
  Oligonucleotide for detection of SNP TSC0058362
aattgttattttt

SEQ ID NO: 239306 - DNA, 13 bp, Artificial Sequence
  Oligonucleotide for detection of SNP TSC0058362
aaaaataacaatt

SEQ ID NO: 239307 - DNA, 13 bp, Artificial Sequence
  Oligonucleotide for detection of SNP TSC0058362
aaaagttatagtt

SEQ ID NO: 239308 - DNA, 13 bp, Artificial Sequence
  Oligonucleotide for detection of SNP TSC0058362
aactataactttt

SEQ ID NO: 239309 - DNA, 13 bp, Artificial Sequence
  Oligonucleotide for detection of SNP TSC0058362
aaaagtaatagtt

SEQ ID NO: 239310 - DNA, 13 bp, Artificial Sequence
  Oligonucleotide for detection of SNP TSC0058362
aactattactttt

SEQ ID NO: 239311 - DNA, 13 bp, Artificial Sequence
  Oligonucleotide for detection of SNP TSC0058364
aggtatatgttty

SEQ ID NO: 239312 - DNA, 13 bp, Artificial Sequence
  Oligonucleotide for detection of SNP TSC0058364
raaacatatacct

SEQ ID NO: 239313 - DNA, 13 bp, Artificial Sequence
  Oligonucleotide for detection of SNP TSC0058364
aggtatgtgttty

SEQ ID NO: 239314 - DNA, 13 bp, Artificial Sequence
  Oligonucleotide for detection of SNP TSC0058364
raaacacatacct

SEQ ID NO: 239315 - DNA, 13 bp, Artificial Sequence
  Oligonucleotide for detection of SNP TSC0058364
aggtacgtgttty

SEQ ID NO: 239316 - DNA, 13 bp, Artificial Sequence
  Oligonucleotide for detection of SNP TSC0058364
raaacacgtacct

SEQ ID NO: 239317 - DNA, 13 bp, Artificial Sequence
  Oligonucleotide for detection of SNP TSC0058364
ggggtatgtgttt

SEQ ID NO: 239318 - DNA, 13 bp, Artificial Sequence
  Oligonucleotide for detection of SNP TSC0058364
aaacacatacccc

SEQ ID NO: 239319 - DNA, 13 bp, Artificial Sequence
  Oligonucleotide for detection of SNP TSC0058364
ggggtacgtgttt

SEQ ID NO: 239320 - DNA, 13 bp, Artificial Sequence
  Oligonucleotide for detection of SNP TSC0058364
aaacacgtacccc

SEQ ID NO: 239321 - DNA, 13 bp, Artificial Sequence
  Oligonucleotide for detection of SNP TSC0058365
aagatgatatgag

SEQ ID NO: 239322 - DNA, 13 bp, Artificial Sequence
  Oligonucleotide for detection of SNP TSC0058365
ctcatatcatctt

SEQ ID NO: 239323 - DNA, 13 bp, Artificial Sequence
  Oligonucleotide for detection of SNP TSC0058365
aagatggtatgag

SEQ ID NO: 239324 - DNA, 13 bp, Artificial Sequence
  Oligonucleotide for detection of SNP TSC0058365
ctcataccatctt

SEQ ID NO: 239325 - DNA, 13 bp, Artificial Sequence
  Oligonucleotide for detection of SNP TSC0058365
aagatgatacgag

SEQ ID NO: 239326 - DNA, 13 bp, Artificial Sequence
  Oligonucleotide for detection of SNP TSC0058365
ctcgtatcatctt

SEQ ID NO: 239327 - DNA, 13 bp, Artificial Sequence
  Oligonucleotide for detection of SNP TSC0058365
aagatggtacgag

SEQ ID NO: 239328 - DNA, 13 bp, Artificial Sequence
  Oligonucleotide for detection of SNP TSC0058365
ctcgtaccatctt

SEQ ID NO: 239329 - DNA, 13 bp, Artificial Sequence
  Oligonucleotide for detection of SNP TSC0058372
agaaatatatata

SEQ ID NO: 239330 - DNA, 13 bp, Artificial Sequence
  Oligonucleotide for detection of SNP TSC0058372
tatatatatttct

SEQ ID NO: 239331 - DNA, 13 bp, Artificial Sequence
  Oligonucleotide for detection of SNP TSC0058372
agaaatgtatata

SEQ ID NO: 239332 - DNA, 13 bp, Artificial Sequence
  Oligonucleotide for detection of SNP TSC0058372
tatatacatttct

SEQ ID NO: 239333 - DNA, 13 bp, Artificial Sequence
  Oligonucleotide for detection of SNP TSC0058373
tagaatatatata

SEQ ID NO: 239334 - DNA, 13 bp, Artificial Sequence
  Oligonucleotide for detection of SNP TSC0058373
tatatatattcta

SEQ ID NO: 239335 - DNA, 13 bp, Artificial Sequence
  Oligonucleotide for detection of SNP TSC0058376
ttgaaagttgtgg

SEQ ID NO: 239336 - DNA, 13 bp, Artificial Sequence
  Oligonucleotide for detection of SNP TSC0058376
ccacaactttcaa

SEQ ID NO: 239337 - DNA, 13 bp, Artificial Sequence
  Oligonucleotide for detection of SNP TSC0058376
ttgaaatttgtgg

SEQ ID NO: 239338 - DNA, 13 bp, Artificial Sequence
  Oligonucleotide for detection of SNP TSC0058376
ccacaaatttcaa

SEQ ID NO: 239339 - DNA, 13 bp, Artificial Sequence
  Oligonucleotide for detection of SNP TSC0058379
tatttgatgagat

SEQ ID NO: 239340 - DNA, 13 bp, Artificial Sequence
  Oligonucleotide for detection of SNP TSC0058379
atctcatcaaata

SEQ ID NO: 239341 - DNA, 13 bp, Artificial Sequence
  Oligonucleotide for detection of SNP TSC0058379
tatttgttgagat

SEQ ID NO: 239342 - DNA, 13 bp, Artificial Sequence
  Oligonucleotide for detection of SNP TSC0058379
atctcaacaaata

SEQ ID NO: 239343 - DNA, 13 bp, Artificial Sequence
  Oligonucleotide for detection of SNP TSC0058379
attttattaaatg

SEQ ID NO: 239344 - DNA, 13 bp, Artificial Sequence
  Oligonucleotide for detection of SNP TSC0058379
catttaataaaat

SEQ ID NO: 239345 - DNA, 13 bp, Artificial Sequence
  Oligonucleotide for detection of SNP TSC0058379
attttagtaaatg

SEQ ID NO: 239346 - DNA, 13 bp, Artificial Sequence
  Oligonucleotide for detection of SNP TSC0058379
catttactaaaat

SEQ ID NO: 239347 - DNA, 13 bp, Artificial Sequence
  Oligonucleotide for detection of SNP TSC0058380
gttttgtggggtg

SEQ ID NO: 239348 - DNA, 13 bp, Artificial Sequence
  Oligonucleotide for detection of SNP TSC0058380
caccccacaaaac

SEQ ID NO: 239349 - DNA, 13 bp, Artificial Sequence
  Oligonucleotide for detection of SNP TSC0058380
gttttgcggggtg

SEQ ID NO: 239350 - DNA, 13 bp, Artificial Sequence
  Oligonucleotide for detection of SNP TSC0058380
caccccgcaaaac

SEQ ID NO: 239351 - DNA, 13 bp, Artificial Sequence
  Oligonucleotide for detection of SNP TSC0058380
tattttgtaagay

SEQ ID NO: 239352 - DNA, 13 bp, Artificial Sequence
  Oligonucleotide for detection of SNP TSC0058380
rtcttacaaaata

SEQ ID NO: 239353 - DNA, 13 bp, Artificial Sequence
  Oligonucleotide for detection of SNP TSC0058380
tattttataagay

SEQ ID NO: 239354 - DNA, 13 bp, Artificial Sequence
  Oligonucleotide for detection of SNP TSC0058380
rtcttataaaata

SEQ ID NO: 239355 - DNA, 13 bp, Artificial Sequence
  Oligonucleotide for detection of SNP TSC0058380
tatttcgtaagay

SEQ ID NO: 239356 - DNA, 13 bp, Artificial Sequence
  Oligonucleotide for detection of SNP TSC0058380
rtcttacgaaata

SEQ ID NO: 239357 - DNA, 13 bp, Artificial Sequence
  Oligonucleotide for detection of SNP TSC0058381
ataagtatgtggg

SEQ ID NO: 239358 - DNA, 13 bp, Artificial Sequence
  Oligonucleotide for detection of SNP TSC0058381
cccacatacttat

SEQ ID NO: 239359 - DNA, 13 bp, Artificial Sequence
  Oligonucleotide for detection of SNP TSC0058381
ataagtgtgtggg

SEQ ID NO: 239360 - DNA, 13 bp, Artificial Sequence
  Oligonucleotide for detection of SNP TSC0058381
cccacacacttat

SEQ ID NO: 239361 - DNA, 13 bp, Artificial Sequence
  Oligonucleotide for detection of SNP TSC0058382
tattggaggatag

SEQ ID NO: 239362 - DNA, 13 bp, Artificial Sequence
  Oligonucleotide for detection of SNP TSC0058382
ctatcctccaata

SEQ ID NO: 239363 - DNA, 13 bp, Artificial Sequence
  Oligonucleotide for detection of SNP TSC0058382
tattgggggatag

SEQ ID NO: 239364 - DNA, 13 bp, Artificial Sequence
  Oligonucleotide for detection of SNP TSC0058382
ctatcccccaata

SEQ ID NO: 239365 - DNA, 13 bp, Artificial Sequence
  Oligonucleotide for detection of SNP TSC0058383
ttgtatttattta

SEQ ID NO: 239366 - DNA, 13 bp, Artificial Sequence
  Oligonucleotide for detection of SNP TSC0058383
taaataaatacaa

SEQ ID NO: 239367 - DNA, 13 bp, Artificial Sequence
  Oligonucleotide for detection of SNP TSC0058383
tgaataggtatag

SEQ ID NO: 239368 - DNA, 13 bp, Artificial Sequence
  Oligonucleotide for detection of SNP TSC0058383
ctatacctattca

SEQ ID NO: 239369 - DNA, 13 bp, Artificial Sequence
  Oligonucleotide for detection of SNP TSC0058383
tgaatatgtatag

SEQ ID NO: 239370 - DNA, 13 bp, Artificial Sequence
  Oligonucleotide for detection of SNP TSC0058383
ctatacatattca

SEQ ID NO: 239371 - DNA, 13 bp, Artificial Sequence
  Oligonucleotide for detection of SNP TSC0058383
tgaatacgtatag

SEQ ID NO: 239372 - DNA, 13 bp, Artificial Sequence
  Oligonucleotide for detection of SNP TSC0058383
ctatacgtattca

SEQ ID NO: 239373 - DNA, 13 bp, Artificial Sequence
  Oligonucleotide for detection of SNP TSC0058388
gggatgagtaatt

SEQ ID NO: 239374 - DNA, 13 bp, Artificial Sequence
  Oligonucleotide for detection of SNP TSC0058388
aattactcatccc

SEQ ID NO: 239375 - DNA, 13 bp, Artificial Sequence
  Oligonucleotide for detection of SNP TSC0058388
gggatgggtaatt

SEQ ID NO: 239376 - DNA, 13 bp, Artificial Sequence
  Oligonucleotide for detection of SNP TSC0058388
aattacccatccc

SEQ ID NO: 239377 - DNA, 13 bp, Artificial Sequence
  Oligonucleotide for detection of SNP TSC0058390
aagtttgaagaag

SEQ ID NO: 239378 - DNA, 13 bp, Artificial Sequence
  Oligonucleotide for detection of SNP TSC0058390
cttcttcaaactt

SEQ ID NO: 239379 - DNA, 13 bp, Artificial Sequence
  Oligonucleotide for detection of SNP TSC0058390
aagtttaaagaag

SEQ ID NO: 239380 - DNA, 13 bp, Artificial Sequence
  Oligonucleotide for detection of SNP TSC0058390
cttctttaaactt

SEQ ID NO: 239381 - DNA, 13 bp, Artificial Sequence
  Oligonucleotide for detection of SNP TSC0058391
gtgagatataaag

SEQ ID NO: 239382 - DNA, 13 bp, Artificial Sequence
  Oligonucleotide for detection of SNP TSC0058391
ctttatatctcac

SEQ ID NO: 239383 - DNA, 13 bp, Artificial Sequence
  Oligonucleotide for detection of SNP TSC0058391
gtgagagataaag

SEQ ID NO: 239384 - DNA, 13 bp, Artificial Sequence
  Oligonucleotide for detection of SNP TSC0058391
ctttatctctcac

SEQ ID NO: 239385 - DNA, 13 bp, Artificial Sequence
  Oligonucleotide for detection of SNP TSC0058392
agttttaaattta

SEQ ID NO: 239386 - DNA, 13 bp, Artificial Sequence
  Oligonucleotide for detection of SNP TSC0058392
taaatttaaaact

SEQ ID NO: 239387 - DNA, 13 bp, Artificial Sequence
  Oligonucleotide for detection of SNP TSC0058392
agtttttaattta

SEQ ID NO: 239388 - DNA, 13 bp, Artificial Sequence
  Oligonucleotide for detection of SNP TSC0058392
taaattaaaaact

SEQ ID NO: 239389 - DNA, 13 bp, Artificial Sequence
  Oligonucleotide for detection of SNP TSC0058392
taaatttgaggtt

SEQ ID NO: 239390 - DNA, 13 bp, Artificial Sequence
  Oligonucleotide for detection of SNP TSC0058392
aacctcaaattta

SEQ ID NO: 239391 - DNA, 13 bp, Artificial Sequence
  Oligonucleotide for detection of SNP TSC0058392
taaattagaggtt

SEQ ID NO: 239392 - DNA, 13 bp, Artificial Sequence
  Oligonucleotide for detection of SNP TSC0058392
aacctctaattta

SEQ ID NO: 239393 - DNA, 13 bp, Artificial Sequence
  Oligonucleotide for detection of SNP TSC0058393
ataaagttaggtg

SEQ ID NO: 239394 - DNA, 13 bp, Artificial Sequence
  Oligonucleotide for detection of SNP TSC0058393
cacctaactttat

SEQ ID NO: 239395 - DNA, 13 bp, Artificial Sequence
  Oligonucleotide for detection of SNP TSC0058393
ataaaggtaggtg

SEQ ID NO: 239396 - DNA, 13 bp, Artificial Sequence
  Oligonucleotide for detection of SNP TSC0058393
cacctacctttat

SEQ ID NO: 239397 - DNA, 13 bp, Artificial Sequence
  Oligonucleotide for detection of SNP TSC0058393
ataaagttaggcg

SEQ ID NO: 239398 - DNA, 13 bp, Artificial Sequence
  Oligonucleotide for detection of SNP TSC0058393
cgcctaactttat

SEQ ID NO: 239399 - DNA, 13 bp, Artificial Sequence
  Oligonucleotide for detection of SNP TSC0058393
ataaaggtaggcg

SEQ ID NO: 239400 - DNA, 13 bp, Artificial Sequence
  Oligonucleotide for detection of SNP TSC0058393
cgcctacctttat

SEQ ID NO: 239401 - DNA, 13 bp, Artificial Sequence
  Oligonucleotide for detection of SNP TSC0058393
tgtttgtttttat

SEQ ID NO: 239402 - DNA, 13 bp, Artificial Sequence
  Oligonucleotide for detection of SNP TSC0058393
ataaaaacaaaca

SEQ ID NO: 239403 - DNA, 13 bp, Artificial Sequence
  Oligonucleotide for detection of SNP TSC0058393
cgtttgattttat

SEQ ID NO: 239404 - DNA, 13 bp, Artificial Sequence
  Oligonucleotide for detection of SNP TSC0058393
ataaaatcaaacg

SEQ ID NO: 239405 - DNA, 13 bp, Artificial Sequence
  Oligonucleotide for detection of SNP TSC0058393
cgtttgtttttat

SEQ ID NO: 239406 - DNA, 13 bp, Artificial Sequence
  Oligonucleotide for detection of SNP TSC0058393
ataaaaacaaacg

SEQ ID NO: 239407 - DNA, 13 bp, Artificial Sequence
  Oligonucleotide for detection of SNP TSC0058396
aataatgttaaat

SEQ ID NO: 239408 - DNA, 13 bp, Artificial Sequence
  Oligonucleotide for detection of SNP TSC0058396
atttaacattatt

SEQ ID NO: 239409 - DNA, 13 bp, Artificial Sequence
  Oligonucleotide for detection of SNP TSC0058396
aataatattaaat

SEQ ID NO: 239410 - DNA, 13 bp, Artificial Sequence
  Oligonucleotide for detection of SNP TSC0058396
atttaatattatt

SEQ ID NO: 239411 - DNA, 13 bp, Artificial Sequence
  Oligonucleotide for detection of SNP TSC0058397
gaagaagaagata

SEQ ID NO: 239412 - DNA, 13 bp, Artificial Sequence
  Oligonucleotide for detection of SNP TSC0058397
tatcttcttcttc

SEQ ID NO: 239413 - DNA, 13 bp, Artificial Sequence
  Oligonucleotide for detection of SNP TSC0058397
gaagaaaaagata

SEQ ID NO: 239414 - DNA, 13 bp, Artificial Sequence
  Oligonucleotide for detection of SNP TSC0058397
tatctttttcttc

SEQ ID NO: 239415 - DNA, 13 bp, Artificial Sequence
  Oligonucleotide for detection of SNP TSC0058398
aataggataagtg

SEQ ID NO: 239416 - DNA, 13 bp, Artificial Sequence
  Oligonucleotide for detection of SNP TSC0058398
cacttatcctatt

SEQ ID NO: 239417 - DNA, 13 bp, Artificial Sequence
  Oligonucleotide for detection of SNP TSC0058398
aataggttaagtg

SEQ ID NO: 239418 - DNA, 13 bp, Artificial Sequence
  Oligonucleotide for detection of SNP TSC0058398
cacttaacctatt

SEQ ID NO: 239419 - DNA, 13 bp, Artificial Sequence
  Oligonucleotide for detection of SNP TSC0058399
gttagataataay

SEQ ID NO: 239420 - DNA, 13 bp, Artificial Sequence
  Oligonucleotide for detection of SNP TSC0058399
rttattatctaac

SEQ ID NO: 239421 - DNA, 13 bp, Artificial Sequence
  Oligonucleotide for detection of SNP TSC0058399
gttagagaataay

SEQ ID NO: 239422 - DNA, 13 bp, Artificial Sequence
  Oligonucleotide for detection of SNP TSC0058399
rttattctctaac

SEQ ID NO: 239423 - DNA, 13 bp, Artificial Sequence
  Oligonucleotide for detection of SNP TSC0058399
gttgttgtttaay

SEQ ID NO: 239424 - DNA, 13 bp, Artificial Sequence
  Oligonucleotide for detection of SNP TSC0058399
rttaaacaacaac

SEQ ID NO: 239425 - DNA, 13 bp, Artificial Sequence
  Oligonucleotide for detection of SNP TSC0058399
gttgttttttaay

SEQ ID NO: 239426 - DNA, 13 bp, Artificial Sequence
  Oligonucleotide for detection of SNP TSC0058399
rttaaaaaacaac

SEQ ID NO: 239427 - DNA, 13 bp, Artificial Sequence
  Oligonucleotide for detection of SNP TSC0058400
atttagatattta

SEQ ID NO: 239428 - DNA, 13 bp, Artificial Sequence
  Oligonucleotide for detection of SNP TSC0058400
taaatatctaaat

SEQ ID NO: 239429 - DNA, 13 bp, Artificial Sequence
  Oligonucleotide for detection of SNP TSC0058401
tgcgtagggttty

SEQ ID NO: 239430 - DNA, 13 bp, Artificial Sequence
  Oligonucleotide for detection of SNP TSC0058401
raaaccctacgca

SEQ ID NO: 239431 - DNA, 13 bp, Artificial Sequence
  Oligonucleotide for detection of SNP TSC0058401
tgcgtaaggttty

SEQ ID NO: 239432 - DNA, 13 bp, Artificial Sequence
  Oligonucleotide for detection of SNP TSC0058401
raaaccttacgca

SEQ ID NO: 239433 - DNA, 13 bp, Artificial Sequence
  Oligonucleotide for detection of SNP TSC0058402
gaaggtatatttt

SEQ ID NO: 239434 - DNA, 13 bp, Artificial Sequence
  Oligonucleotide for detection of SNP TSC0058402
aaaatataccttc

SEQ ID NO: 239435 - DNA, 13 bp, Artificial Sequence
  Oligonucleotide for detection of SNP TSC0058402
gaaggtgtatttt

SEQ ID NO: 239436 - DNA, 13 bp, Artificial Sequence
  Oligonucleotide for detection of SNP TSC0058402
aaaatacaccttc

SEQ ID NO: 239437 - DNA, 13 bp, Artificial Sequence
  Oligonucleotide for detection of SNP TSC0058404
ggaataagtagtg

SEQ ID NO: 239438 - DNA, 13 bp, Artificial Sequence
  Oligonucleotide for detection of SNP TSC0058404
cactacttattcc

SEQ ID NO: 239439 - DNA, 13 bp, Artificial Sequence
  Oligonucleotide for detection of SNP TSC0058404
ggaataggtagtg

SEQ ID NO: 239440 - DNA, 13 bp, Artificial Sequence
  Oligonucleotide for detection of SNP TSC0058404
cactacctattcc

SEQ ID NO: 239441 - DNA, 13 bp, Artificial Sequence
  Oligonucleotide for detection of SNP TSC0058408
agttgaagatata

SEQ ID NO: 239442 - DNA, 13 bp, Artificial Sequence
  Oligonucleotide for detection of SNP TSC0058408
tatatcttcaact

SEQ ID NO: 239443 - DNA, 13 bp, Artificial Sequence
  Oligonucleotide for detection of SNP TSC0058408
agttgaggatata

SEQ ID NO: 239444 - DNA, 13 bp, Artificial Sequence
  Oligonucleotide for detection of SNP TSC0058408
tatatcctcaact

SEQ ID NO: 239445 - DNA, 13 bp, Artificial Sequence
  Oligonucleotide for detection of SNP TSC0058409
gaattaatggaag

SEQ ID NO: 239446 - DNA, 13 bp, Artificial Sequence
  Oligonucleotide for detection of SNP TSC0058409
cttccattaattc

SEQ ID NO: 239447 - DNA, 13 bp, Artificial Sequence
  Oligonucleotide for detection of SNP TSC0058409
gaattagtggaag

SEQ ID NO: 239448 - DNA, 13 bp, Artificial Sequence
  Oligonucleotide for detection of SNP TSC0058409
cttccactaattc

SEQ ID NO: 239449 - DNA, 13 bp, Artificial Sequence
  Oligonucleotide for detection of SNP TSC0058410
tatgtgatttgtg

SEQ ID NO: 239450 - DNA, 13 bp, Artificial Sequence
  Oligonucleotide for detection of SNP TSC0058410
cacaaatcacata

SEQ ID NO: 239451 - DNA, 13 bp, Artificial Sequence
  Oligonucleotide for detection of SNP TSC0058410
tatgtggtttgtg

SEQ ID NO: 239452 - DNA, 13 bp, Artificial Sequence
  Oligonucleotide for detection of SNP TSC0058410
cacaaaccacata

SEQ ID NO: 239453 - DNA, 13 bp, Artificial Sequence
  Oligonucleotide for detection of SNP TSC0058411
ttttaagatttay

SEQ ID NO: 239454 - DNA, 13 bp, Artificial Sequence
  Oligonucleotide for detection of SNP TSC0058411
rtaaatcttaaaa

SEQ ID NO: 239455 - DNA, 13 bp, Artificial Sequence
  Oligonucleotide for detection of SNP TSC0058411
ttttaaaatttay

SEQ ID NO: 239456 - DNA, 13 bp, Artificial Sequence
  Oligonucleotide for detection of SNP TSC0058411
rtaaattttaaaa

SEQ ID NO: 239457 - DNA, 13 bp, Artificial Sequence
  Oligonucleotide for detection of SNP TSC0058412
attttggatattt

SEQ ID NO: 239458 - DNA, 13 bp, Artificial Sequence
  Oligonucleotide for detection of SNP TSC0058412
aaatatccaaaat

SEQ ID NO: 239459 - DNA, 13 bp, Artificial Sequence
  Oligonucleotide for detection of SNP TSC0058413
gtgatatgtaagg

SEQ ID NO: 239460 - DNA, 13 bp, Artificial Sequence
  Oligonucleotide for detection of SNP TSC0058413
ccttacatatcac

SEQ ID NO: 239461 - DNA, 13 bp, Artificial Sequence
  Oligonucleotide for detection of SNP TSC0058413
gtgatacgtaagg

SEQ ID NO: 239462 - DNA, 13 bp, Artificial Sequence
  Oligonucleotide for detection of SNP TSC0058413
ccttacgtatcac

SEQ ID NO: 239463 - DNA, 13 bp, Artificial Sequence
  Oligonucleotide for detection of SNP TSC0058413
ttttgtgtgttay

SEQ ID NO: 239464 - DNA, 13 bp, Artificial Sequence
  Oligonucleotide for detection of SNP TSC0058413
rtaacacacaaaa

SEQ ID NO: 239465 - DNA, 13 bp, Artificial Sequence
  Oligonucleotide for detection of SNP TSC0058413
ttttgtatgttay

SEQ ID NO: 239466 - DNA, 13 bp, Artificial Sequence
  Oligonucleotide for detection of SNP TSC0058413
rtaacatacaaaa

SEQ ID NO: 239467 - DNA, 13 bp, Artificial Sequence
  Oligonucleotide for detection of SNP TSC0058413
ttttgcgtgttay

SEQ ID NO: 239468 - DNA, 13 bp, Artificial Sequence
  Oligonucleotide for detection of SNP TSC0058413
rtaacacgcaaaa

SEQ ID NO: 239469 - DNA, 13 bp, Artificial Sequence
  Oligonucleotide for detection of SNP TSC0058414
ttgtgatgatagy

SEQ ID NO: 239470 - DNA, 13 bp, Artificial Sequence
  Oligonucleotide for detection of SNP TSC0058414
rctatcatcacaa

SEQ ID NO: 239471 - DNA, 13 bp, Artificial Sequence
  Oligonucleotide for detection of SNP TSC0058414
ttgtgacgatagy

SEQ ID NO: 239472 - DNA, 13 bp, Artificial Sequence
  Oligonucleotide for detection of SNP TSC0058414
rctatcgtcacaa

SEQ ID NO: 239473 - DNA, 13 bp, Artificial Sequence
  Oligonucleotide for detection of SNP TSC0058414
gttattgttatag

SEQ ID NO: 239474 - DNA, 13 bp, Artificial Sequence
  Oligonucleotide for detection of SNP TSC0058414
ctataacaataac

SEQ ID NO: 239475 - DNA, 13 bp, Artificial Sequence
  Oligonucleotide for detection of SNP TSC0058414
gttatcgttatag

SEQ ID NO: 239476 - DNA, 13 bp, Artificial Sequence
  Oligonucleotide for detection of SNP TSC0058414
ctataacgataac

SEQ ID NO: 239477 - DNA, 13 bp, Artificial Sequence
  Oligonucleotide for detection of SNP TSC0058415
gtatttttatgty

SEQ ID NO: 239478 - DNA, 13 bp, Artificial Sequence
  Oligonucleotide for detection of SNP TSC0058415
racataaaaatac

SEQ ID NO: 239479 - DNA, 13 bp, Artificial Sequence
  Oligonucleotide for detection of SNP TSC0058415
gtatttgtatgty

SEQ ID NO: 239480 - DNA, 13 bp, Artificial Sequence
  Oligonucleotide for detection of SNP TSC0058415
racatacaaatac

SEQ ID NO: 239481 - DNA, 13 bp, Artificial Sequence
  Oligonucleotide for detection of SNP TSC0058415
ggtatagaagtay

SEQ ID NO: 239482 - DNA, 13 bp, Artificial Sequence
  Oligonucleotide for detection of SNP TSC0058415
rtacttctatacc

SEQ ID NO: 239483 - DNA, 13 bp, Artificial Sequence
  Oligonucleotide for detection of SNP TSC0058415
ggtatataagtay

SEQ ID NO: 239484 - DNA, 13 bp, Artificial Sequence
  Oligonucleotide for detection of SNP TSC0058415
rtacttatatacc

SEQ ID NO: 239485 - DNA, 13 bp, Artificial Sequence
  Oligonucleotide for detection of SNP TSC0058416
agtaaagatttta

SEQ ID NO: 239486 - DNA, 13 bp, Artificial Sequence
  Oligonucleotide for detection of SNP TSC0058416
taaaatctttact

SEQ ID NO: 239487 - DNA, 13 bp, Artificial Sequence
  Oligonucleotide for detection of SNP TSC0058416
agtaaaaatttta

SEQ ID NO: 239488 - DNA, 13 bp, Artificial Sequence
  Oligonucleotide for detection of SNP TSC0058416
taaaatttttact

SEQ ID NO: 239489 - DNA, 13 bp, Artificial Sequence
  Oligonucleotide for detection of SNP TSC0058417
aatgtagtttggy

SEQ ID NO: 239490 - DNA, 13 bp, Artificial Sequence
  Oligonucleotide for detection of SNP TSC0058417
rccaaactacatt

SEQ ID NO: 239491 - DNA, 13 bp, Artificial Sequence
  Oligonucleotide for detection of SNP TSC0058417
aatgtaatttggy

SEQ ID NO: 239492 - DNA, 13 bp, Artificial Sequence
  Oligonucleotide for detection of SNP TSC0058417
rccaaattacatt

SEQ ID NO: 239493 - DNA, 13 bp, Artificial Sequence
  Oligonucleotide for detection of SNP TSC0058418
aatgtggtaaagg

SEQ ID NO: 239494 - DNA, 13 bp, Artificial Sequence
  Oligonucleotide for detection of SNP TSC0058418
cctttaccacatt

SEQ ID NO: 239495 - DNA, 13 bp, Artificial Sequence
  Oligonucleotide for detection of SNP TSC0058418
aatgtgttaaagg

SEQ ID NO: 239496 - DNA, 13 bp, Artificial Sequence
  Oligonucleotide for detection of SNP TSC0058418
cctttaacacatt

SEQ ID NO: 239497 - DNA, 13 bp, Artificial Sequence
  Oligonucleotide for detection of SNP TSC0058419
taaagaattagat

SEQ ID NO: 239498 - DNA, 13 bp, Artificial Sequence
  Oligonucleotide for detection of SNP TSC0058419
atctaattcttta

SEQ ID NO: 239499 - DNA, 13 bp, Artificial Sequence
  Oligonucleotide for detection of SNP TSC0058419
taaagagttagat

SEQ ID NO: 239500 - DNA, 13 bp, Artificial Sequence
  Oligonucleotide for detection of SNP TSC0058419
atctaactcttta

SEQ ID NO: 239501 - DNA, 13 bp, Artificial Sequence
  Oligonucleotide for detection of SNP TSC0058420
gatttataattay

SEQ ID NO: 239502 - DNA, 13 bp, Artificial Sequence
  Oligonucleotide for detection of SNP TSC0058420
rtaattataaatc

SEQ ID NO: 239503 - DNA, 13 bp, Artificial Sequence
  Oligonucleotide for detection of SNP TSC0058420
gatttagaattay

SEQ ID NO: 239504 - DNA, 13 bp, Artificial Sequence
  Oligonucleotide for detection of SNP TSC0058420
rtaattctaaatc

SEQ ID NO: 239505 - DNA, 13 bp, Artificial Sequence
  Oligonucleotide for detection of SNP TSC0058420
gtagttataaaty

SEQ ID NO: 239506 - DNA, 13 bp, Artificial Sequence
  Oligonucleotide for detection of SNP TSC0058420
ratttataactac

SEQ ID NO: 239507 - DNA, 13 bp, Artificial Sequence
  Oligonucleotide for detection of SNP TSC0058420
gtagttttaaaty

SEQ ID NO: 239508 - DNA, 13 bp, Artificial Sequence
  Oligonucleotide for detection of SNP TSC0058420
ratttaaaactac

SEQ ID NO: 239509 - DNA, 13 bp, Artificial Sequence
  Oligonucleotide for detection of SNP TSC0058425
gttaaattgtttt

SEQ ID NO: 239510 - DNA, 13 bp, Artificial Sequence
  Oligonucleotide for detection of SNP TSC0058425
aaaacaatttaac

SEQ ID NO: 239511 - DNA, 13 bp, Artificial Sequence
  Oligonucleotide for detection of SNP TSC0058425
gttaaagtgtttt

SEQ ID NO: 239512 - DNA, 13 bp, Artificial Sequence
  Oligonucleotide for detection of SNP TSC0058425
aaaacactttaac

SEQ ID NO: 239513 - DNA, 13 bp, Artificial Sequence
  Oligonucleotide for detection of SNP TSC0058425
aaaataatttagy

SEQ ID NO: 239514 - DNA, 13 bp, Artificial Sequence
  Oligonucleotide for detection of SNP TSC0058425
rctaaattatttt

SEQ ID NO: 239515 - DNA, 13 bp, Artificial Sequence
  Oligonucleotide for detection of SNP TSC0058425
aaaatattttagy

SEQ ID NO: 239516 - DNA, 13 bp, Artificial Sequence
  Oligonucleotide for detection of SNP TSC0058425
rctaaaatatttt

SEQ ID NO: 239517 - DNA, 13 bp, Artificial Sequence
  Oligonucleotide for detection of SNP TSC0058426
tttgtagtaatta

SEQ ID NO: 239518 - DNA, 13 bp, Artificial Sequence
  Oligonucleotide for detection of SNP TSC0058426
taattactacaaa

SEQ ID NO: 239519 - DNA, 13 bp, Artificial Sequence
  Oligonucleotide for detection of SNP TSC0058426
tttgtaataatta

SEQ ID NO: 239520 - DNA, 13 bp, Artificial Sequence
  Oligonucleotide for detection of SNP TSC0058426
taattattacaaa

SEQ ID NO: 239521 - DNA, 13 bp, Artificial Sequence
  Oligonucleotide for detection of SNP TSC0058427
gagtgaatgttgt

SEQ ID NO: 239522 - DNA, 13 bp, Artificial Sequence
  Oligonucleotide for detection of SNP TSC0058427
acaacattcactc

SEQ ID NO: 239523 - DNA, 13 bp, Artificial Sequence
  Oligonucleotide for detection of SNP TSC0058427
gagtgagtgttgt

SEQ ID NO: 239524 - DNA, 13 bp, Artificial Sequence
  Oligonucleotide for detection of SNP TSC0058427
acaacactcactc

SEQ ID NO: 239525 - DNA, 13 bp, Artificial Sequence
  Oligonucleotide for detection of SNP TSC0058428
taagtaagttttg

SEQ ID NO: 239526 - DNA, 13 bp, Artificial Sequence
  Oligonucleotide for detection of SNP TSC0058428
caaaacttactta

SEQ ID NO: 239527 - DNA, 13 bp, Artificial Sequence
  Oligonucleotide for detection of SNP TSC0058432
tttataatgtggg

SEQ ID NO: 239528 - DNA, 13 bp, Artificial Sequence
  Oligonucleotide for detection of SNP TSC0058432
cccacattataaa

SEQ ID NO: 239529 - DNA, 13 bp, Artificial Sequence
  Oligonucleotide for detection of SNP TSC0058432
tttatagtgtggg

SEQ ID NO: 239530 - DNA, 13 bp, Artificial Sequence
  Oligonucleotide for detection of SNP TSC0058432
cccacactataaa

SEQ ID NO: 239531 - DNA, 13 bp, Artificial Sequence
  Oligonucleotide for detection of SNP TSC0058433
ggttttatataty

SEQ ID NO: 239532 - DNA, 13 bp, Artificial Sequence
  Oligonucleotide for detection of SNP TSC0058433
ratatataaaacc

SEQ ID NO: 239533 - DNA, 13 bp, Artificial Sequence
  Oligonucleotide for detection of SNP TSC0058433
ggttttttataty

SEQ ID NO: 239534 - DNA, 13 bp, Artificial Sequence
  Oligonucleotide for detection of SNP TSC0058433
ratataaaaaacc

SEQ ID NO: 239535 - DNA, 13 bp, Artificial Sequence
  Oligonucleotide for detection of SNP TSC0058433
ggtgtataagaty

SEQ ID NO: 239536 - DNA, 13 bp, Artificial Sequence
  Oligonucleotide for detection of SNP TSC0058433
ratcttatacacc

SEQ ID NO: 239537 - DNA, 13 bp, Artificial Sequence
  Oligonucleotide for detection of SNP TSC0058433
ggtgtaaaagaty

SEQ ID NO: 239538 - DNA, 13 bp, Artificial Sequence
  Oligonucleotide for detection of SNP TSC0058433
ratcttttacacc

SEQ ID NO: 239539 - DNA, 13 bp, Artificial Sequence
  Oligonucleotide for detection of SNP TSC0058434
tttaggtgtatat

SEQ ID NO: 239540 - DNA, 13 bp, Artificial Sequence
  Oligonucleotide for detection of SNP TSC0058434
atatacacctaaa

SEQ ID NO: 239541 - DNA, 13 bp, Artificial Sequence
  Oligonucleotide for detection of SNP TSC0058434
tttaggggtatat

SEQ ID NO: 239542 - DNA, 13 bp, Artificial Sequence
  Oligonucleotide for detection of SNP TSC0058434
atatacccctaaa

SEQ ID NO: 239543 - DNA, 13 bp, Artificial Sequence
  Oligonucleotide for detection of SNP TSC0058434
tttaggcgtatat

SEQ ID NO: 239544 - DNA, 13 bp, Artificial Sequence
  Oligonucleotide for detection of SNP TSC0058434
atatacgcctaaa

SEQ ID NO: 239545 - DNA, 13 bp, Artificial Sequence
  Oligonucleotide for detection of SNP TSC0058434
atgtatgtttaaa

SEQ ID NO: 239546 - DNA, 13 bp, Artificial Sequence
  Oligonucleotide for detection of SNP TSC0058434
tttaaacatacat

SEQ ID NO: 239547 - DNA, 13 bp, Artificial Sequence
  Oligonucleotide for detection of SNP TSC0058434
atgtatttttaaa

SEQ ID NO: 239548 - DNA, 13 bp, Artificial Sequence
  Oligonucleotide for detection of SNP TSC0058434
tttaaaaatacat

SEQ ID NO: 239549 - DNA, 13 bp, Artificial Sequence
  Oligonucleotide for detection of SNP TSC0058434
atgtacgtttaaa

SEQ ID NO: 239550 - DNA, 13 bp, Artificial Sequence
  Oligonucleotide for detection of SNP TSC0058434
tttaaacgtacat

SEQ ID NO: 239551 - DNA, 13 bp, Artificial Sequence
  Oligonucleotide for detection of SNP TSC0058436
aaaaatgagaaty

SEQ ID NO: 239552 - DNA, 13 bp, Artificial Sequence
  Oligonucleotide for detection of SNP TSC0058436
rattctcattttt

SEQ ID NO: 239553 - DNA, 13 bp, Artificial Sequence
  Oligonucleotide for detection of SNP TSC0058436
aaaaataagaaty

SEQ ID NO: 239554 - DNA, 13 bp, Artificial Sequence
  Oligonucleotide for detection of SNP TSC0058436
rattcttattttt

SEQ ID NO: 239555 - DNA, 13 bp, Artificial Sequence
  Oligonucleotide for detection of SNP TSC0058436
aaaaacgagaaty

SEQ ID NO: 239556 - DNA, 13 bp, Artificial Sequence
  Oligonucleotide for detection of SNP TSC0058436
rattctcgttttt

SEQ ID NO: 239557 - DNA, 13 bp, Artificial Sequence
  Oligonucleotide for detection of SNP TSC0005079
ttatttgtgagaa

SEQ ID NO: 239558 - DNA, 13 bp, Artificial Sequence
  Oligonucleotide for detection of SNP TSC0005079
ttctcacaaataa

SEQ ID NO: 239559 - DNA, 13 bp, Artificial Sequence
  Oligonucleotide for detection of SNP TSC0058437
attttgtgttagy

SEQ ID NO: 239560 - DNA, 13 bp, Artificial Sequence
  Oligonucleotide for detection of SNP TSC0058437
rctaacacaaaat

SEQ ID NO: 239561 - DNA, 13 bp, Artificial Sequence
  Oligonucleotide for detection of SNP TSC0058437
attttgggttagy

SEQ ID NO: 239562 - DNA, 13 bp, Artificial Sequence
  Oligonucleotide for detection of SNP TSC0058437
rctaacccaaaat

SEQ ID NO: 239563 - DNA, 13 bp, Artificial Sequence
  Oligonucleotide for detection of SNP TSC0058437
gttgatatagagt

SEQ ID NO: 239564 - DNA, 13 bp, Artificial Sequence
  Oligonucleotide for detection of SNP TSC0058437
actctatatcaac

SEQ ID NO: 239565 - DNA, 13 bp, Artificial Sequence
  Oligonucleotide for detection of SNP TSC0058437
gttgatttagagt

SEQ ID NO: 239566 - DNA, 13 bp, Artificial Sequence
  Oligonucleotide for detection of SNP TSC0058437
actctaaatcaac

SEQ ID NO: 239567 - DNA, 13 bp, Artificial Sequence
  Oligonucleotide for detection of SNP TSC0058438
aggaattagaagg

SEQ ID NO: 239568 - DNA, 13 bp, Artificial Sequence
  Oligonucleotide for detection of SNP TSC0058438
ccttctaattcct

SEQ ID NO: 239569 - DNA, 13 bp, Artificial Sequence
  Oligonucleotide for detection of SNP TSC0058438
aggaatgagaagg

SEQ ID NO: 239570 - DNA, 13 bp, Artificial Sequence
  Oligonucleotide for detection of SNP TSC0058438
ccttctcattcct

SEQ ID NO: 239571 - DNA, 13 bp, Artificial Sequence
  Oligonucleotide for detection of SNP TSC0058439
tttttgggaaaaa

SEQ ID NO: 239572 - DNA, 13 bp, Artificial Sequence
  Oligonucleotide for detection of SNP TSC0058439
tttttcccaaaaa

SEQ ID NO: 239573 - DNA, 13 bp, Artificial Sequence
  Oligonucleotide for detection of SNP TSC0058440
tgtagtattagag

SEQ ID NO: 239574 - DNA, 13 bp, Artificial Sequence
  Oligonucleotide for detection of SNP TSC0058440
ctctaatactaca

SEQ ID NO: 239575 - DNA, 13 bp, Artificial Sequence
  Oligonucleotide for detection of SNP TSC0058440
tgtagtgttagag

SEQ ID NO: 239576 - DNA, 13 bp, Artificial Sequence
  Oligonucleotide for detection of SNP TSC0058440
ctctaacactaca

SEQ ID NO: 239577 - DNA, 13 bp, Artificial Sequence
  Oligonucleotide for detection of SNP TSC0058440
tgtagcgttagag

SEQ ID NO: 239578 - DNA, 13 bp, Artificial Sequence
  Oligonucleotide for detection of SNP TSC0058440
ctctaacgctaca

SEQ ID NO: 239579 - DNA, 13 bp, Artificial Sequence
  Oligonucleotide for detection of SNP TSC0058440
ttttgatgttata

SEQ ID NO: 239580 - DNA, 13 bp, Artificial Sequence
  Oligonucleotide for detection of SNP TSC0058440
tataacatcaaaa

SEQ ID NO: 239581 - DNA, 13 bp, Artificial Sequence
  Oligonucleotide for detection of SNP TSC0058440
ttttgacgttata

SEQ ID NO: 239582 - DNA, 13 bp, Artificial Sequence
  Oligonucleotide for detection of SNP TSC0058440
tataacgtcaaaa

SEQ ID NO: 239583 - DNA, 13 bp, Artificial Sequence
  Oligonucleotide for detection of SNP TSC0058442
gtttgaaaaaatt

SEQ ID NO: 239584 - DNA, 13 bp, Artificial Sequence
  Oligonucleotide for detection of SNP TSC0058442
aattttttcaaac

SEQ ID NO: 239585 - DNA, 13 bp, Artificial Sequence
  Oligonucleotide for detection of SNP TSC0058442
gtttgagaaaatt

SEQ ID NO: 239586 - DNA, 13 bp, Artificial Sequence
  Oligonucleotide for detection of SNP TSC0058442
aattttctcaaac

SEQ ID NO: 239587 - DNA, 13 bp, Artificial Sequence
  Oligonucleotide for detection of SNP TSC0058443
ggtaattgaaaaa

SEQ ID NO: 239588 - DNA, 13 bp, Artificial Sequence
  Oligonucleotide for detection of SNP TSC0058443
tttttcaattacc

SEQ ID NO: 239589 - DNA, 13 bp, Artificial Sequence
  Oligonucleotide for detection of SNP TSC0058443
ggtaatcgaaaaa

SEQ ID NO: 239590 - DNA, 13 bp, Artificial Sequence
  Oligonucleotide for detection of SNP TSC0058443
tttttcgattacc

SEQ ID NO: 239591 - DNA, 13 bp, Artificial Sequence
  Oligonucleotide for detection of SNP TSC0058444
tttggttgtagtg

SEQ ID NO: 239592 - DNA, 13 bp, Artificial Sequence
  Oligonucleotide for detection of SNP TSC0058444
cactacaaccaaa

SEQ ID NO: 239593 - DNA, 13 bp, Artificial Sequence
  Oligonucleotide for detection of SNP TSC0058444
tttggtcgtagtg

SEQ ID NO: 239594 - DNA, 13 bp, Artificial Sequence
  Oligonucleotide for detection of SNP TSC0058444
cactacgaccaaa

SEQ ID NO: 239595 - DNA, 13 bp, Artificial Sequence
  Oligonucleotide for detection of SNP TSC0058444
tattatgattaaa

SEQ ID NO: 239596 - DNA, 13 bp, Artificial Sequence
  Oligonucleotide for detection of SNP TSC0058444
tttaatcataata

SEQ ID NO: 239597 - DNA, 13 bp, Artificial Sequence
  Oligonucleotide for detection of SNP TSC0058444
tattataattaaa

SEQ ID NO: 239598 - DNA, 13 bp, Artificial Sequence
  Oligonucleotide for detection of SNP TSC0058444
tttaattataata

SEQ ID NO: 239599 - DNA, 13 bp, Artificial Sequence
  Oligonucleotide for detection of SNP TSC0058444
tattacgattaaa

SEQ ID NO: 239600 - DNA, 13 bp, Artificial Sequence
  Oligonucleotide for detection of SNP TSC0058444
tttaatcgtaata

SEQ ID NO: 239601 - DNA, 13 bp, Artificial Sequence
  Oligonucleotide for detection of SNP TSC0058445
aaaatatggaggy

SEQ ID NO: 239602 - DNA, 13 bp, Artificial Sequence
  Oligonucleotide for detection of SNP TSC0058445
rcctccatatttt

SEQ ID NO: 239603 - DNA, 13 bp, Artificial Sequence
  Oligonucleotide for detection of SNP TSC0058445
aaaatacggaggy

SEQ ID NO: 239604 - DNA, 13 bp, Artificial Sequence
  Oligonucleotide for detection of SNP TSC0058445
rcctccgtatttt

SEQ ID NO: 239605 - DNA, 13 bp, Artificial Sequence
  Oligonucleotide for detection of SNP TSC0058446
tttaaggagagaa

SEQ ID NO: 239606 - DNA, 13 bp, Artificial Sequence
  Oligonucleotide for detection of SNP TSC0058446
ttctctccttaaa

SEQ ID NO: 239607 - DNA, 13 bp, Artificial Sequence
  Oligonucleotide for detection of SNP TSC0058446
tttaagaagagaa

SEQ ID NO: 239608 - DNA, 13 bp, Artificial Sequence
  Oligonucleotide for detection of SNP TSC0058446
ttctcttcttaaa

SEQ ID NO: 239609 - DNA, 13 bp, Artificial Sequence
  Oligonucleotide for detection of SNP TSC0058448
tatattgtgggta

SEQ ID NO: 239610 - DNA, 13 bp, Artificial Sequence
  Oligonucleotide for detection of SNP TSC0058448
tacccacaatata

SEQ ID NO: 239611 - DNA, 13 bp, Artificial Sequence
  Oligonucleotide for detection of SNP TSC0058448
tatattatgggta

SEQ ID NO: 239612 - DNA, 13 bp, Artificial Sequence
  Oligonucleotide for detection of SNP TSC0058448
tacccataatata

SEQ ID NO: 239613 - DNA, 13 bp, Artificial Sequence
  Oligonucleotide for detection of SNP TSC0058452
tagtgggagattg

SEQ ID NO: 239614 - DNA, 13 bp, Artificial Sequence
  Oligonucleotide for detection of SNP TSC0058452
caatctcccacta

SEQ ID NO: 239615 - DNA, 13 bp, Artificial Sequence
  Oligonucleotide for detection of SNP TSC0058452
tagtggaagattg

SEQ ID NO: 239616 - DNA, 13 bp, Artificial Sequence
  Oligonucleotide for detection of SNP TSC0058452
caatcttccacta

SEQ ID NO: 239617 - DNA, 13 bp, Artificial Sequence
  Oligonucleotide for detection of SNP TSC0058453
taatatattatat

SEQ ID NO: 239618 - DNA, 13 bp, Artificial Sequence
  Oligonucleotide for detection of SNP TSC0058453
atataatatatta

SEQ ID NO: 239619 - DNA, 13 bp, Artificial Sequence
  Oligonucleotide for detection of SNP TSC0058453
taatatgttatat

SEQ ID NO: 239620 - DNA, 13 bp, Artificial Sequence
  Oligonucleotide for detection of SNP TSC0058453
atataacatatta

SEQ ID NO: 239621 - DNA, 13 bp, Artificial Sequence
  Oligonucleotide for detection of SNP TSC0058456
attattattttta

SEQ ID NO: 239622 - DNA, 13 bp, Artificial Sequence
  Oligonucleotide for detection of SNP TSC0058456
taaaaataataat

SEQ ID NO: 239623 - DNA, 13 bp, Artificial Sequence
  Oligonucleotide for detection of SNP TSC0058457
atggttgtttatt

SEQ ID NO: 239624 - DNA, 13 bp, Artificial Sequence
  Oligonucleotide for detection of SNP TSC0058457
aataaacaaccat

SEQ ID NO: 239625 - DNA, 13 bp, Artificial Sequence
  Oligonucleotide for detection of SNP TSC0058457
atggttatttatt

SEQ ID NO: 239626 - DNA, 13 bp, Artificial Sequence
  Oligonucleotide for detection of SNP TSC0058457
aataaataaccat

SEQ ID NO: 239627 - DNA, 13 bp, Artificial Sequence
  Oligonucleotide for detection of SNP TSC0058458
tgggagatgattg

SEQ ID NO: 239628 - DNA, 13 bp, Artificial Sequence
  Oligonucleotide for detection of SNP TSC0058458
caatcatctccca

SEQ ID NO: 239629 - DNA, 13 bp, Artificial Sequence
  Oligonucleotide for detection of SNP TSC0058458
tgggaggtgattg

SEQ ID NO: 239630 - DNA, 13 bp, Artificial Sequence
  Oligonucleotide for detection of SNP TSC0058458
caatcacctccca

SEQ ID NO: 239631 - DNA, 13 bp, Artificial Sequence
  Oligonucleotide for detection of SNP TSC0058459
tatataagatttt

SEQ ID NO: 239632 - DNA, 13 bp, Artificial Sequence
  Oligonucleotide for detection of SNP TSC0058459
aaaatcttatata

SEQ ID NO: 239633 - DNA, 13 bp, Artificial Sequence
  Oligonucleotide for detection of SNP TSC0058459
tatataggatttt

SEQ ID NO: 239634 - DNA, 13 bp, Artificial Sequence
  Oligonucleotide for detection of SNP TSC0058459
aaaatcctatata

SEQ ID NO: 239635 - DNA, 13 bp, Artificial Sequence
  Oligonucleotide for detection of SNP TSC0058460
atttttggtattt

SEQ ID NO: 239636 - DNA, 13 bp, Artificial Sequence
  Oligonucleotide for detection of SNP TSC0058460
aaataccaaaaat

SEQ ID NO: 239637 - DNA, 13 bp, Artificial Sequence
  Oligonucleotide for detection of SNP TSC0058460
attttcggtattt

SEQ ID NO: 239638 - DNA, 13 bp, Artificial Sequence
  Oligonucleotide for detection of SNP TSC0058460
aaataccgaaaat

SEQ ID NO: 239639 - DNA, 13 bp, Artificial Sequence
  Oligonucleotide for detection of SNP TSC0058460
aaatgtggaagat

SEQ ID NO: 239640 - DNA, 13 bp, Artificial Sequence
  Oligonucleotide for detection of SNP TSC0058460
atcttccacattt

SEQ ID NO: 239641 - DNA, 13 bp, Artificial Sequence
  Oligonucleotide for detection of SNP TSC0058460
aaatgttgaagat

SEQ ID NO: 239642 - DNA, 13 bp, Artificial Sequence
  Oligonucleotide for detection of SNP TSC0058460
atcttcaacattt

SEQ ID NO: 239643 - DNA, 13 bp, Artificial Sequence
  Oligonucleotide for detection of SNP TSC0058460
aaatgcggaagat

SEQ ID NO: 239644 - DNA, 13 bp, Artificial Sequence
  Oligonucleotide for detection of SNP TSC0058460
atcttccgcattt

SEQ ID NO: 239645 - DNA, 13 bp, Artificial Sequence
  Oligonucleotide for detection of SNP TSC0058460
aaatgtcgaagat

SEQ ID NO: 239646 - DNA, 13 bp, Artificial Sequence
  Oligonucleotide for detection of SNP TSC0058460
atcttcgacattt

SEQ ID NO: 239647 - DNA, 13 bp, Artificial Sequence
  Oligonucleotide for detection of SNP TSC0058463
tttttaaaattgt

SEQ ID NO: 239648 - DNA, 13 bp, Artificial Sequence
  Oligonucleotide for detection of SNP TSC0058463
acaattttaaaaa

SEQ ID NO: 239649 - DNA, 13 bp, Artificial Sequence
  Oligonucleotide for detection of SNP TSC0058463
tttttagaattgt

SEQ ID NO: 239650 - DNA, 13 bp, Artificial Sequence
  Oligonucleotide for detection of SNP TSC0058463
acaattctaaaaa

SEQ ID NO: 239651 - DNA, 13 bp, Artificial Sequence
  Oligonucleotide for detection of SNP TSC0058465
agtgtgatttagy

SEQ ID NO: 239652 - DNA, 13 bp, Artificial Sequence
  Oligonucleotide for detection of SNP TSC0058465
rctaaatcacact

SEQ ID NO: 239653 - DNA, 13 bp, Artificial Sequence
  Oligonucleotide for detection of SNP TSC0058465
agtgtggtttagy

SEQ ID NO: 239654 - DNA, 13 bp, Artificial Sequence
  Oligonucleotide for detection of SNP TSC0058465
rctaaaccacact

SEQ ID NO: 239655 - DNA, 13 bp, Artificial Sequence
  Oligonucleotide for detection of SNP TSC0058465
agcgtgatttagy

SEQ ID NO: 239656 - DNA, 13 bp, Artificial Sequence
  Oligonucleotide for detection of SNP TSC0058465
rctaaatcacgct

SEQ ID NO: 239657 - DNA, 13 bp, Artificial Sequence
  Oligonucleotide for detection of SNP TSC0058465
agcgtggtttagy

SEQ ID NO: 239658 - DNA, 13 bp, Artificial Sequence
  Oligonucleotide for detection of SNP TSC0058465
rctaaaccacgct

SEQ ID NO: 239659 - DNA, 13 bp, Artificial Sequence
  Oligonucleotide for detection of SNP TSC0058466
gaatgtatgatag

SEQ ID NO: 239660 - DNA, 13 bp, Artificial Sequence
  Oligonucleotide for detection of SNP TSC0058466
ctatcatacattc

SEQ ID NO: 239661 - DNA, 13 bp, Artificial Sequence
  Oligonucleotide for detection of SNP TSC0058466
gaatgtgtgatag

SEQ ID NO: 239662 - DNA, 13 bp, Artificial Sequence
  Oligonucleotide for detection of SNP TSC0058466
ctatcacacattc

SEQ ID NO: 239663 - DNA, 13 bp, Artificial Sequence
  Oligonucleotide for detection of SNP TSC0058466
gaatgcgtgatag

SEQ ID NO: 239664 - DNA, 13 bp, Artificial Sequence
  Oligonucleotide for detection of SNP TSC0058466
ctatcacgcattc

SEQ ID NO: 239665 - DNA, 13 bp, Artificial Sequence
  Oligonucleotide for detection of SNP TSC0058466
ttattatgtatty

SEQ ID NO: 239666 - DNA, 13 bp, Artificial Sequence
  Oligonucleotide for detection of SNP TSC0058466
raatacataataa

SEQ ID NO: 239667 - DNA, 13 bp, Artificial Sequence
  Oligonucleotide for detection of SNP TSC0058466
ttattacgtatty

SEQ ID NO: 239668 - DNA, 13 bp, Artificial Sequence
  Oligonucleotide for detection of SNP TSC0058466
raatacgtaataa

SEQ ID NO: 239669 - DNA, 13 bp, Artificial Sequence
  Oligonucleotide for detection of SNP TSC0058467
attatcgttttaa

SEQ ID NO: 239670 - DNA, 13 bp, Artificial Sequence
  Oligonucleotide for detection of SNP TSC0058467
ttaaaacgataat

SEQ ID NO: 239671 - DNA, 13 bp, Artificial Sequence
  Oligonucleotide for detection of SNP TSC0058467
ttgaggggatgat

SEQ ID NO: 239672 - DNA, 13 bp, Artificial Sequence
  Oligonucleotide for detection of SNP TSC0058467
atcatcccctcaa

SEQ ID NO: 239673 - DNA, 13 bp, Artificial Sequence
  Oligonucleotide for detection of SNP TSC0058467
ttgaggtgatgat

SEQ ID NO: 239674 - DNA, 13 bp, Artificial Sequence
  Oligonucleotide for detection of SNP TSC0058467
atcatcacctcaa

SEQ ID NO: 239675 - DNA, 13 bp, Artificial Sequence
  Oligonucleotide for detection of SNP TSC0058467
ttgaggcgatgat

SEQ ID NO: 239676 - DNA, 13 bp, Artificial Sequence
  Oligonucleotide for detection of SNP TSC0058467
atcatcgcctcaa

SEQ ID NO: 239677 - DNA, 13 bp, Artificial Sequence
  Oligonucleotide for detection of SNP TSC0058468
ggtttgaggaggy

SEQ ID NO: 239678 - DNA, 13 bp, Artificial Sequence
  Oligonucleotide for detection of SNP TSC0058468
rcctcctcaaacc

SEQ ID NO: 239679 - DNA, 13 bp, Artificial Sequence
  Oligonucleotide for detection of SNP TSC0058468
ggtttggggaggy

SEQ ID NO: 239680 - DNA, 13 bp, Artificial Sequence
  Oligonucleotide for detection of SNP TSC0058468
rcctccccaaacc

SEQ ID NO: 239681 - DNA, 13 bp, Artificial Sequence
  Oligonucleotide for detection of SNP TSC0058469
gttttagatagga

SEQ ID NO: 239682 - DNA, 13 bp, Artificial Sequence
  Oligonucleotide for detection of SNP TSC0058469
tcctatctaaaac

SEQ ID NO: 239683 - DNA, 13 bp, Artificial Sequence
  Oligonucleotide for detection of SNP TSC0058469
gttttaaatagga

SEQ ID NO: 239684 - DNA, 13 bp, Artificial Sequence
  Oligonucleotide for detection of SNP TSC0058469
tcctatttaaaac

SEQ ID NO: 239685 - DNA, 13 bp, Artificial Sequence
  Oligonucleotide for detection of SNP TSC0058471
ataaaaagtaata

SEQ ID NO: 239686 - DNA, 13 bp, Artificial Sequence
  Oligonucleotide for detection of SNP TSC0058471
tattactttttat

SEQ ID NO: 239687 - DNA, 13 bp, Artificial Sequence
  Oligonucleotide for detection of SNP TSC0058471
ataaaatgtaata

SEQ ID NO: 239688 - DNA, 13 bp, Artificial Sequence
  Oligonucleotide for detection of SNP TSC0058471
tattacattttat

SEQ ID NO: 239689 - DNA, 13 bp, Artificial Sequence
  Oligonucleotide for detection of SNP TSC0058471
tgttattttttat

SEQ ID NO: 239690 - DNA, 13 bp, Artificial Sequence
  Oligonucleotide for detection of SNP TSC0058471
ataaaaaataaca

SEQ ID NO: 239691 - DNA, 13 bp, Artificial Sequence
  Oligonucleotide for detection of SNP TSC0058471
tgttatattttat

SEQ ID NO: 239692 - DNA, 13 bp, Artificial Sequence
  Oligonucleotide for detection of SNP TSC0058471
ataaaatataaca

SEQ ID NO: 239693 - DNA, 13 bp, Artificial Sequence
  Oligonucleotide for detection of SNP TSC0058476
tatgtgattttaa

SEQ ID NO: 239694 - DNA, 13 bp, Artificial Sequence
  Oligonucleotide for detection of SNP TSC0058476
ttaaaatcacata

SEQ ID NO: 239695 - DNA, 13 bp, Artificial Sequence
  Oligonucleotide for detection of SNP TSC0058476
tatgtgtttttaa

SEQ ID NO: 239696 - DNA, 13 bp, Artificial Sequence
  Oligonucleotide for detection of SNP TSC0058476
ttaaaaacacata

SEQ ID NO: 239697 - DNA, 13 bp, Artificial Sequence
  Oligonucleotide for detection of SNP TSC0058476
ttagggttatatg

SEQ ID NO: 239698 - DNA, 13 bp, Artificial Sequence
  Oligonucleotide for detection of SNP TSC0058476
catataaccctaa

SEQ ID NO: 239699 - DNA, 13 bp, Artificial Sequence
  Oligonucleotide for detection of SNP TSC0058476
ttagggatatatg

SEQ ID NO: 239700 - DNA, 13 bp, Artificial Sequence
  Oligonucleotide for detection of SNP TSC0058476
catatatccctaa

SEQ ID NO: 239701 - DNA, 13 bp, Artificial Sequence
  Oligonucleotide for detection of SNP TSC0058477
attaatttttgtt

SEQ ID NO: 239702 - DNA, 13 bp, Artificial Sequence
  Oligonucleotide for detection of SNP TSC0058477
aacaaaaattaat

SEQ ID NO: 239703 - DNA, 13 bp, Artificial Sequence
  Oligonucleotide for detection of SNP TSC0058477
attaatgtttgtt

SEQ ID NO: 239704 - DNA, 13 bp, Artificial Sequence
  Oligonucleotide for detection of SNP TSC0058477
aacaaacattaat

SEQ ID NO: 239705 - DNA, 13 bp, Artificial Sequence
  Oligonucleotide for detection of SNP TSC0058477
attaacgtttgtt

SEQ ID NO: 239706 - DNA, 13 bp, Artificial Sequence
  Oligonucleotide for detection of SNP TSC0058477
aacaaacgttaat

SEQ ID NO: 239707 - DNA, 13 bp, Artificial Sequence
  Oligonucleotide for detection of SNP TSC0058477
aataagagttagt

SEQ ID NO: 239708 - DNA, 13 bp, Artificial Sequence
  Oligonucleotide for detection of SNP TSC0058477
actaactcttatt

SEQ ID NO: 239709 - DNA, 13 bp, Artificial Sequence
  Oligonucleotide for detection of SNP TSC0058477
aataagtgttagt

SEQ ID NO: 239710 - DNA, 13 bp, Artificial Sequence
  Oligonucleotide for detection of SNP TSC0058477
actaacacttatt

SEQ ID NO: 239711 - DNA, 13 bp, Artificial Sequence
  Oligonucleotide for detection of SNP TSC0058477
aataagcgttagt

SEQ ID NO: 239712 - DNA, 13 bp, Artificial Sequence
  Oligonucleotide for detection of SNP TSC0058477
actaacgcttatt

SEQ ID NO: 239713 - DNA, 13 bp, Artificial Sequence
  Oligonucleotide for detection of SNP TSC0058478
aagttaatttgtg

SEQ ID NO: 239714 - DNA, 13 bp, Artificial Sequence
  Oligonucleotide for detection of SNP TSC0058478
cacaaattaactt

SEQ ID NO: 239715 - DNA, 13 bp, Artificial Sequence
  Oligonucleotide for detection of SNP TSC0058478
aagttattttgtg

SEQ ID NO: 239716 - DNA, 13 bp, Artificial Sequence
  Oligonucleotide for detection of SNP TSC0058478
cacaaaataactt

SEQ ID NO: 239717 - DNA, 13 bp, Artificial Sequence
  Oligonucleotide for detection of SNP TSC0058478
tataagttgattt

SEQ ID NO: 239718 - DNA, 13 bp, Artificial Sequence
  Oligonucleotide for detection of SNP TSC0058478
aaatcaacttata

SEQ ID NO: 239719 - DNA, 13 bp, Artificial Sequence
  Oligonucleotide for detection of SNP TSC0058478
tataagatgattt

SEQ ID NO: 239720 - DNA, 13 bp, Artificial Sequence
  Oligonucleotide for detection of SNP TSC0058478
aaatcatcttata

SEQ ID NO: 239721 - DNA, 13 bp, Artificial Sequence
  Oligonucleotide for detection of SNP TSC0005044
gggttttgttttg

SEQ ID NO: 239722 - DNA, 13 bp, Artificial Sequence
  Oligonucleotide for detection of SNP TSC0005044
caaaacaaaaccc

SEQ ID NO: 239723 - DNA, 13 bp, Artificial Sequence
  Oligonucleotide for detection of SNP TSC0005044
gggtttcgttttg

SEQ ID NO: 239724 - DNA, 13 bp, Artificial Sequence
  Oligonucleotide for detection of SNP TSC0005044
caaaacgaaaccc

SEQ ID NO: 239725 - DNA, 13 bp, Artificial Sequence
  Oligonucleotide for detection of SNP TSC0058480
tgtaggtggttty

SEQ ID NO: 239726 - DNA, 13 bp, Artificial Sequence
  Oligonucleotide for detection of SNP TSC0058480
raaaccacctaca

SEQ ID NO: 239727 - DNA, 13 bp, Artificial Sequence
  Oligonucleotide for detection of SNP TSC0058480
tgtagggggttty

SEQ ID NO: 239728 - DNA, 13 bp, Artificial Sequence
  Oligonucleotide for detection of SNP TSC0058480
raaaccccctaca

SEQ ID NO: 239729 - DNA, 13 bp, Artificial Sequence
  Oligonucleotide for detection of SNP TSC0058480
tgtaggcggttty

SEQ ID NO: 239730 - DNA, 13 bp, Artificial Sequence
  Oligonucleotide for detection of SNP TSC0058480
raaaccgcctaca

SEQ ID NO: 239731 - DNA, 13 bp, Artificial Sequence
  Oligonucleotide for detection of SNP TSC0058480
gaggttgtttgta

SEQ ID NO: 239732 - DNA, 13 bp, Artificial Sequence
  Oligonucleotide for detection of SNP TSC0058480
tacaaacaacctc

SEQ ID NO: 239733 - DNA, 13 bp, Artificial Sequence
  Oligonucleotide for detection of SNP TSC0058480
gaggttttttgta

SEQ ID NO: 239734 - DNA, 13 bp, Artificial Sequence
  Oligonucleotide for detection of SNP TSC0058480
tacaaaaaacctc

SEQ ID NO: 239735 - DNA, 13 bp, Artificial Sequence
  Oligonucleotide for detection of SNP TSC0058480
gaggtcgtttgta

SEQ ID NO: 239736 - DNA, 13 bp, Artificial Sequence
  Oligonucleotide for detection of SNP TSC0058480
tacaaacgacctc

SEQ ID NO: 239737 - DNA, 13 bp, Artificial Sequence
  Oligonucleotide for detection of SNP TSC0058481
ttggggattaggg

SEQ ID NO: 239738 - DNA, 13 bp, Artificial Sequence
  Oligonucleotide for detection of SNP TSC0058481
ccctaatccccaa

SEQ ID NO: 239739 - DNA, 13 bp, Artificial Sequence
  Oligonucleotide for detection of SNP TSC0058481
ttgggggttaggg

SEQ ID NO: 239740 - DNA, 13 bp, Artificial Sequence
  Oligonucleotide for detection of SNP TSC0058481
ccctaacccccaa

SEQ ID NO: 239741 - DNA, 13 bp, Artificial Sequence
  Oligonucleotide for detection of SNP TSC0058482
ggtggtggtaaga

SEQ ID NO: 239742 - DNA, 13 bp, Artificial Sequence
  Oligonucleotide for detection of SNP TSC0058482
tcttaccaccacc

SEQ ID NO: 239743 - DNA, 13 bp, Artificial Sequence
  Oligonucleotide for detection of SNP TSC0058482
ggtggtagtaaga

SEQ ID NO: 239744 - DNA, 13 bp, Artificial Sequence
  Oligonucleotide for detection of SNP TSC0058482
tcttactaccacc

SEQ ID NO: 239745 - DNA, 13 bp, Artificial Sequence
  Oligonucleotide for detection of SNP TSC0058482
ggtggcggtaaga

SEQ ID NO: 239746 - DNA, 13 bp, Artificial Sequence
  Oligonucleotide for detection of SNP TSC0058482
tcttaccgccacc

SEQ ID NO: 239747 - DNA, 13 bp, Artificial Sequence
  Oligonucleotide for detection of SNP TSC0058483
gaaaggtgtatty

SEQ ID NO: 239748 - DNA, 13 bp, Artificial Sequence
  Oligonucleotide for detection of SNP TSC0058483
raatacacctttc

SEQ ID NO: 239749 - DNA, 13 bp, Artificial Sequence
  Oligonucleotide for detection of SNP TSC0058483
gaaaggggtatty

SEQ ID NO: 239750 - DNA, 13 bp, Artificial Sequence
  Oligonucleotide for detection of SNP TSC0058483
raatacccctttc

SEQ ID NO: 239751 - DNA, 13 bp, Artificial Sequence
  Oligonucleotide for detection of SNP TSC0058483
ggatatattttty

SEQ ID NO: 239752 - DNA, 13 bp, Artificial Sequence
  Oligonucleotide for detection of SNP TSC0058483
raaaaatatatcc

SEQ ID NO: 239753 - DNA, 13 bp, Artificial Sequence
  Oligonucleotide for detection of SNP TSC0058483
ggatattttttty

SEQ ID NO: 239754 - DNA, 13 bp, Artificial Sequence
  Oligonucleotide for detection of SNP TSC0058483
raaaaaaatatcc

SEQ ID NO: 239755 - DNA, 13 bp, Artificial Sequence
  Oligonucleotide for detection of SNP TSC0058484
aattggagtttty

SEQ ID NO: 239756 - DNA, 13 bp, Artificial Sequence
  Oligonucleotide for detection of SNP TSC0058484
raaaactccaatt

SEQ ID NO: 239757 - DNA, 13 bp, Artificial Sequence
  Oligonucleotide for detection of SNP TSC0058484
aattggtgtttty

SEQ ID NO: 239758 - DNA, 13 bp, Artificial Sequence
  Oligonucleotide for detection of SNP TSC0058484
raaaacaccaatt

SEQ ID NO: 239759 - DNA, 13 bp, Artificial Sequence
  Oligonucleotide for detection of SNP TSC0058484
gagggttttagtt

SEQ ID NO: 239760 - DNA, 13 bp, Artificial Sequence
  Oligonucleotide for detection of SNP TSC0058484
aactaaaaccctc

SEQ ID NO: 239761 - DNA, 13 bp, Artificial Sequence
  Oligonucleotide for detection of SNP TSC0058484
gagggtattagtt

SEQ ID NO: 239762 - DNA, 13 bp, Artificial Sequence
  Oligonucleotide for detection of SNP TSC0058484
aactaataccctc

SEQ ID NO: 239763 - DNA, 13 bp, Artificial Sequence
  Oligonucleotide for detection of SNP TSC0058485
atgaagtgttata

SEQ ID NO: 239764 - DNA, 13 bp, Artificial Sequence
  Oligonucleotide for detection of SNP TSC0058485
tataacacttcat

SEQ ID NO: 239765 - DNA, 13 bp, Artificial Sequence
  Oligonucleotide for detection of SNP TSC0058485
atgaagcgttata

SEQ ID NO: 239766 - DNA, 13 bp, Artificial Sequence
  Oligonucleotide for detection of SNP TSC0058485
tataacgcttcat

SEQ ID NO: 239767 - DNA, 13 bp, Artificial Sequence
  Oligonucleotide for detection of SNP TSC0058485
tataacgttttat

SEQ ID NO: 239768 - DNA, 13 bp, Artificial Sequence
  Oligonucleotide for detection of SNP TSC0058485
ataaaacgttata

SEQ ID NO: 239769 - DNA, 13 bp, Artificial Sequence
  Oligonucleotide for detection of SNP TSC0058486
agttaatgtaaay

SEQ ID NO: 239770 - DNA, 13 bp, Artificial Sequence
  Oligonucleotide for detection of SNP TSC0058486
rtttacattaact

SEQ ID NO: 239771 - DNA, 13 bp, Artificial Sequence
  Oligonucleotide for detection of SNP TSC0058486
agttaaggtaaay

SEQ ID NO: 239772 - DNA, 13 bp, Artificial Sequence
  Oligonucleotide for detection of SNP TSC0058486
rtttaccttaact

SEQ ID NO: 239773 - DNA, 13 bp, Artificial Sequence
  Oligonucleotide for detection of SNP TSC0058486
gtttatattaatt

SEQ ID NO: 239774 - DNA, 13 bp, Artificial Sequence
  Oligonucleotide for detection of SNP TSC0058486
aattaatataaac

SEQ ID NO: 239775 - DNA, 13 bp, Artificial Sequence
  Oligonucleotide for detection of SNP TSC0058486
gtttattttaatt

SEQ ID NO: 239776 - DNA, 13 bp, Artificial Sequence
  Oligonucleotide for detection of SNP TSC0058486
aattaaaataaac

SEQ ID NO: 239777 - DNA, 13 bp, Artificial Sequence
  Oligonucleotide for detection of SNP TSC0058487
attaaatatatat

SEQ ID NO: 239778 - DNA, 13 bp, Artificial Sequence
  Oligonucleotide for detection of SNP TSC0058487
atatatatttaat

SEQ ID NO: 239779 - DNA, 13 bp, Artificial Sequence
  Oligonucleotide for detection of SNP TSC0058487
attaaagatatat

SEQ ID NO: 239780 - DNA, 13 bp, Artificial Sequence
  Oligonucleotide for detection of SNP TSC0058487
atatatctttaat

SEQ ID NO: 239781 - DNA, 13 bp, Artificial Sequence
  Oligonucleotide for detection of SNP TSC0058487
atatatttttaat

SEQ ID NO: 239782 - DNA, 13 bp, Artificial Sequence
  Oligonucleotide for detection of SNP TSC0058487
attaaaaatatat

SEQ ID NO: 239783 - DNA, 13 bp, Artificial Sequence
  Oligonucleotide for detection of SNP TSC0006478
ttagagaaagtta

SEQ ID NO: 239784 - DNA, 13 bp, Artificial Sequence
  Oligonucleotide for detection of SNP TSC0006478
taactttctctaa

SEQ ID NO: 239785 - DNA, 13 bp, Artificial Sequence
  Oligonucleotide for detection of SNP TSC0006478
ttagagtaagtta

SEQ ID NO: 239786 - DNA, 13 bp, Artificial Sequence
  Oligonucleotide for detection of SNP TSC0006478
taacttactctaa

SEQ ID NO: 239787 - DNA, 13 bp, Artificial Sequence
  Oligonucleotide for detection of SNP TSC0006478
taatttgttttgg

SEQ ID NO: 239788 - DNA, 13 bp, Artificial Sequence
  Oligonucleotide for detection of SNP TSC0006478
ccaaaacaaatta

SEQ ID NO: 239789 - DNA, 13 bp, Artificial Sequence
  Oligonucleotide for detection of SNP TSC0058490
tatttatggtata

SEQ ID NO: 239790 - DNA, 13 bp, Artificial Sequence
  Oligonucleotide for detection of SNP TSC0058490
tataccataaata

SEQ ID NO: 239791 - DNA, 13 bp, Artificial Sequence
  Oligonucleotide for detection of SNP TSC0058490
tatttacggtata

SEQ ID NO: 239792 - DNA, 13 bp, Artificial Sequence
  Oligonucleotide for detection of SNP TSC0058490
tataccgtaaata

SEQ ID NO: 239793 - DNA, 13 bp, Artificial Sequence
  Oligonucleotide for detection of SNP TSC0058490
tgtgttgtaagta

SEQ ID NO: 239794 - DNA, 13 bp, Artificial Sequence
  Oligonucleotide for detection of SNP TSC0058490
tacttacaacaca

SEQ ID NO: 239795 - DNA, 13 bp, Artificial Sequence
  Oligonucleotide for detection of SNP TSC0058490
tgtgttataagta

SEQ ID NO: 239796 - DNA, 13 bp, Artificial Sequence
  Oligonucleotide for detection of SNP TSC0058490
tacttataacaca

SEQ ID NO: 239797 - DNA, 13 bp, Artificial Sequence
  Oligonucleotide for detection of SNP TSC0058490
tgtgtcgtaagta

SEQ ID NO: 239798 - DNA, 13 bp, Artificial Sequence
  Oligonucleotide for detection of SNP TSC0058490
tacttacgacaca

SEQ ID NO: 239799 - DNA, 13 bp, Artificial Sequence
  Oligonucleotide for detection of SNP TSC0058492
atatgatatttgg

SEQ ID NO: 239800 - DNA, 13 bp, Artificial Sequence
  Oligonucleotide for detection of SNP TSC0058492
ccaaatatcatat

SEQ ID NO: 239801 - DNA, 13 bp, Artificial Sequence
  Oligonucleotide for detection of SNP TSC0058492
atatgagatttgg

SEQ ID NO: 239802 - DNA, 13 bp, Artificial Sequence
  Oligonucleotide for detection of SNP TSC0058492
ccaaatctcatat

SEQ ID NO: 239803 - DNA, 13 bp, Artificial Sequence
  Oligonucleotide for detection of SNP TSC0058492
ttaaatattatgt

SEQ ID NO: 239804 - DNA, 13 bp, Artificial Sequence
  Oligonucleotide for detection of SNP TSC0058492
acataatatttaa

SEQ ID NO: 239805 - DNA, 13 bp, Artificial Sequence
  Oligonucleotide for detection of SNP TSC0058492
ttaaattttatgt

SEQ ID NO: 239806 - DNA, 13 bp, Artificial Sequence
  Oligonucleotide for detection of SNP TSC0058492
acataaaatttaa

SEQ ID NO: 239807 - DNA, 13 bp, Artificial Sequence
  Oligonucleotide for detection of SNP TSC0058495
aaggaagaaataa

SEQ ID NO: 239808 - DNA, 13 bp, Artificial Sequence
  Oligonucleotide for detection of SNP TSC0058495
ttatttcttcctt

SEQ ID NO: 239809 - DNA, 13 bp, Artificial Sequence
  Oligonucleotide for detection of SNP TSC0058495
aaggaaaaaataa

SEQ ID NO: 239810 - DNA, 13 bp, Artificial Sequence
  Oligonucleotide for detection of SNP TSC0058495
ttattttttcctt

SEQ ID NO: 239811 - DNA, 13 bp, Artificial Sequence
  Oligonucleotide for detection of SNP TSC0009067
atagagtgtttga

SEQ ID NO: 239812 - DNA, 13 bp, Artificial Sequence
  Oligonucleotide for detection of SNP TSC0009067
tcaaacactctat

SEQ ID NO: 239813 - DNA, 13 bp, Artificial Sequence
  Oligonucleotide for detection of SNP TSC0009067
atagagggtttga

SEQ ID NO: 239814 - DNA, 13 bp, Artificial Sequence
  Oligonucleotide for detection of SNP TSC0009067
tcaaaccctctat

SEQ ID NO: 239815 - DNA, 13 bp, Artificial Sequence
  Oligonucleotide for detection of SNP TSC0009067
ttagatattttgt

SEQ ID NO: 239816 - DNA, 13 bp, Artificial Sequence
  Oligonucleotide for detection of SNP TSC0009067
acaaaatatctaa

SEQ ID NO: 239817 - DNA, 13 bp, Artificial Sequence
  Oligonucleotide for detection of SNP TSC0009067
ttagattttttgt

SEQ ID NO: 239818 - DNA, 13 bp, Artificial Sequence
  Oligonucleotide for detection of SNP TSC0009067
acaaaaaatctaa

SEQ ID NO: 239819 - DNA, 13 bp, Artificial Sequence
  Oligonucleotide for detection of SNP TSC0009068
tatagtaaaatat

SEQ ID NO: 239820 - DNA, 13 bp, Artificial Sequence
  Oligonucleotide for detection of SNP TSC0009068
atattttactata

SEQ ID NO: 239821 - DNA, 13 bp, Artificial Sequence
  Oligonucleotide for detection of SNP TSC0009068
tatagtgaaatat

SEQ ID NO: 239822 - DNA, 13 bp, Artificial Sequence
  Oligonucleotide for detection of SNP TSC0009068
atatttcactata

SEQ ID NO: 239823 - DNA, 13 bp, Artificial Sequence
  Oligonucleotide for detection of SNP TSC0058496
gatgggattgtay

SEQ ID NO: 239824 - DNA, 13 bp, Artificial Sequence
  Oligonucleotide for detection of SNP TSC0058496
rtacaatcccatc

SEQ ID NO: 239825 - DNA, 13 bp, Artificial Sequence
  Oligonucleotide for detection of SNP TSC0058496
gatggggttgtay

SEQ ID NO: 239826 - DNA, 13 bp, Artificial Sequence
  Oligonucleotide for detection of SNP TSC0058496
rtacaaccccatc

SEQ ID NO: 239827 - DNA, 13 bp, Artificial Sequence
  Oligonucleotide for detection of SNP TSC0058498
tttatttggtggg

SEQ ID NO: 239828 - DNA, 13 bp, Artificial Sequence
  Oligonucleotide for detection of SNP TSC0058498
cccaccaaataaa

SEQ ID NO: 239829 - DNA, 13 bp, Artificial Sequence
  Oligonucleotide for detection of SNP TSC0058498
tttattcggtggg

SEQ ID NO: 239830 - DNA, 13 bp, Artificial Sequence
  Oligonucleotide for detection of SNP TSC0058498
cccaccgaataaa

SEQ ID NO: 239831 - DNA, 13 bp, Artificial Sequence
  Oligonucleotide for detection of SNP TSC0006218
atttttggaagta

SEQ ID NO: 239832 - DNA, 13 bp, Artificial Sequence
  Oligonucleotide for detection of SNP TSC0006218
tacttccaaaaat

SEQ ID NO: 239833 - DNA, 13 bp, Artificial Sequence
  Oligonucleotide for detection of SNP TSC0004682
ggtgttttataaa

SEQ ID NO: 239834 - DNA, 13 bp, Artificial Sequence
  Oligonucleotide for detection of SNP TSC0004682
tttataaaacacc

SEQ ID NO: 239835 - DNA, 13 bp, Artificial Sequence
  Oligonucleotide for detection of SNP TSC0004682
ggtgttgtataaa

SEQ ID NO: 239836 - DNA, 13 bp, Artificial Sequence
  Oligonucleotide for detection of SNP TSC0004682
tttatacaacacc

SEQ ID NO: 239837 - DNA, 13 bp, Artificial Sequence
  Oligonucleotide for detection of SNP TSC0004682
ggcgttttataaa

SEQ ID NO: 239838 - DNA, 13 bp, Artificial Sequence
  Oligonucleotide for detection of SNP TSC0004682
tttataaaacgcc

SEQ ID NO: 239839 - DNA, 13 bp, Artificial Sequence
  Oligonucleotide for detection of SNP TSC0004682
ggcgttgtataaa

SEQ ID NO: 239840 - DNA, 13 bp, Artificial Sequence
  Oligonucleotide for detection of SNP TSC0004682
tttatacaacgcc

SEQ ID NO: 239841 - DNA, 13 bp, Artificial Sequence
  Oligonucleotide for detection of SNP TSC0004682
tttatggaatgty

SEQ ID NO: 239842 - DNA, 13 bp, Artificial Sequence
  Oligonucleotide for detection of SNP TSC0004682
racattccataaa

SEQ ID NO: 239843 - DNA, 13 bp, Artificial Sequence
  Oligonucleotide for detection of SNP TSC0004682
tttatgtaatgty

SEQ ID NO: 239844 - DNA, 13 bp, Artificial Sequence
  Oligonucleotide for detection of SNP TSC0004682
racattacataaa

SEQ ID NO: 239845 - DNA, 13 bp, Artificial Sequence
  Oligonucleotide for detection of SNP TSC0004682
tttatggaacgty

SEQ ID NO: 239846 - DNA, 13 bp, Artificial Sequence
  Oligonucleotide for detection of SNP TSC0004682
racgttccataaa

SEQ ID NO: 239847 - DNA, 13 bp, Artificial Sequence
  Oligonucleotide for detection of SNP TSC0004682
tttatgtaacgty

SEQ ID NO: 239848 - DNA, 13 bp, Artificial Sequence
  Oligonucleotide for detection of SNP TSC0004682
racgttacataaa

SEQ ID NO: 239849 - DNA, 13 bp, Artificial Sequence
  Oligonucleotide for detection of SNP TSC0058502
atgtataaggata

SEQ ID NO: 239850 - DNA, 13 bp, Artificial Sequence
  Oligonucleotide for detection of SNP TSC0058502
tatccttatacat

SEQ ID NO: 239851 - DNA, 13 bp, Artificial Sequence
  Oligonucleotide for detection of SNP TSC0058502
atgtattaggata

SEQ ID NO: 239852 - DNA, 13 bp, Artificial Sequence
  Oligonucleotide for detection of SNP TSC0058502
tatcctaatacat

SEQ ID NO: 239853 - DNA, 13 bp, Artificial Sequence
  Oligonucleotide for detection of SNP TSC0058503
gtgtagcggtgtg

SEQ ID NO: 239854 - DNA, 13 bp, Artificial Sequence
  Oligonucleotide for detection of SNP TSC0058503
cacaccgctacac

SEQ ID NO: 239855 - DNA, 13 bp, Artificial Sequence
  Oligonucleotide for detection of SNP TSC0058503
gtgtagtggcgtg

SEQ ID NO: 239856 - DNA, 13 bp, Artificial Sequence
  Oligonucleotide for detection of SNP TSC0058503
cacgccactacac

SEQ ID NO: 239857 - DNA, 13 bp, Artificial Sequence
  Oligonucleotide for detection of SNP TSC0058503
gtgtagcggcgtg

SEQ ID NO: 239858 - DNA, 13 bp, Artificial Sequence
  Oligonucleotide for detection of SNP TSC0058503
cacgccgctacac

SEQ ID NO: 239859 - DNA, 13 bp, Artificial Sequence
  Oligonucleotide for detection of SNP TSC0058503
tatgtcgttgtay

SEQ ID NO: 239860 - DNA, 13 bp, Artificial Sequence
  Oligonucleotide for detection of SNP TSC0058503
rtacaacgacata

SEQ ID NO: 239861 - DNA, 13 bp, Artificial Sequence
  Oligonucleotide for detection of SNP TSC0058503
tacgtcgttgtay

SEQ ID NO: 239862 - DNA, 13 bp, Artificial Sequence
  Oligonucleotide for detection of SNP TSC0058503
rtacaacgacgta

SEQ ID NO: 239863 - DNA, 13 bp, Artificial Sequence
  Oligonucleotide for detection of SNP TSC0058504
tttttaatatagt

SEQ ID NO: 239864 - DNA, 13 bp, Artificial Sequence
  Oligonucleotide for detection of SNP TSC0058504
actatattaaaaa

SEQ ID NO: 239865 - DNA, 13 bp, Artificial Sequence
  Oligonucleotide for detection of SNP TSC0058504
tttttagtatagt

SEQ ID NO: 239866 - DNA, 13 bp, Artificial Sequence
  Oligonucleotide for detection of SNP TSC0058504
actatactaaaaa

SEQ ID NO: 239867 - DNA, 13 bp, Artificial Sequence
  Oligonucleotide for detection of SNP TSC0058505
ttttgtagtgaga

SEQ ID NO: 239868 - DNA, 13 bp, Artificial Sequence
  Oligonucleotide for detection of SNP TSC0058505
tctcactacaaaa

SEQ ID NO: 239869 - DNA, 13 bp, Artificial Sequence
  Oligonucleotide for detection of SNP TSC0058505
ttttgtggtgaga

SEQ ID NO: 239870 - DNA, 13 bp, Artificial Sequence
  Oligonucleotide for detection of SNP TSC0058505
tctcaccacaaaa

SEQ ID NO: 239871 - DNA, 13 bp, Artificial Sequence
  Oligonucleotide for detection of SNP TSC0058506
gttgttttgagat

SEQ ID NO: 239872 - DNA, 13 bp, Artificial Sequence
  Oligonucleotide for detection of SNP TSC0058506
atctcaaaacaac

SEQ ID NO: 239873 - DNA, 13 bp, Artificial Sequence
  Oligonucleotide for detection of SNP TSC0058506
gttgttgtgagat

SEQ ID NO: 239874 - DNA, 13 bp, Artificial Sequence
  Oligonucleotide for detection of SNP TSC0058506
atctcacaacaac

SEQ ID NO: 239875 - DNA, 13 bp, Artificial Sequence
  Oligonucleotide for detection of SNP TSC0058506
attttagaataay

SEQ ID NO: 239876 - DNA, 13 bp, Artificial Sequence
  Oligonucleotide for detection of SNP TSC0058506
rttattctaaaat

SEQ ID NO: 239877 - DNA, 13 bp, Artificial Sequence
  Oligonucleotide for detection of SNP TSC0058506
attttataataay

SEQ ID NO: 239878 - DNA, 13 bp, Artificial Sequence
  Oligonucleotide for detection of SNP TSC0058506
rttattataaaat

SEQ ID NO: 239879 - DNA, 13 bp, Artificial Sequence
  Oligonucleotide for detection of SNP TSC0058507
aaggttaatatag

SEQ ID NO: 239880 - DNA, 13 bp, Artificial Sequence
  Oligonucleotide for detection of SNP TSC0058507
ctatattaacctt

SEQ ID NO: 239881 - DNA, 13 bp, Artificial Sequence
  Oligonucleotide for detection of SNP TSC0058507
aaggttgatatag

SEQ ID NO: 239882 - DNA, 13 bp, Artificial Sequence
  Oligonucleotide for detection of SNP TSC0058507
ctatatcaacctt

SEQ ID NO: 239883 - DNA, 13 bp, Artificial Sequence
  Oligonucleotide for detection of SNP TSC0008514
attaaaaggaaaa

SEQ ID NO: 239884 - DNA, 13 bp, Artificial Sequence
  Oligonucleotide for detection of SNP TSC0008514
ttttccttttaat

SEQ ID NO: 239885 - DNA, 13 bp, Artificial Sequence
  Oligonucleotide for detection of SNP TSC0008514
attaaatggaaaa

SEQ ID NO: 239886 - DNA, 13 bp, Artificial Sequence
  Oligonucleotide for detection of SNP TSC0008514
ttttccatttaat

SEQ ID NO: 239887 - DNA, 13 bp, Artificial Sequence
  Oligonucleotide for detection of SNP TSC0058508
tttgtaagttttt

SEQ ID NO: 239888 - DNA, 13 bp, Artificial Sequence
  Oligonucleotide for detection of SNP TSC0058508
aaaaacttacaaa

SEQ ID NO: 239889 - DNA, 13 bp, Artificial Sequence
  Oligonucleotide for detection of SNP TSC0058508
tttgtaggttttt

SEQ ID NO: 239890 - DNA, 13 bp, Artificial Sequence
  Oligonucleotide for detection of SNP TSC0058508
aaaaacctacaaa

SEQ ID NO: 239891 - DNA, 13 bp, Artificial Sequence
  Oligonucleotide for detection of SNP TSC0058508
ttcgtaagttttt

SEQ ID NO: 239892 - DNA, 13 bp, Artificial Sequence
  Oligonucleotide for detection of SNP TSC0058508
aaaaacttacgaa

SEQ ID NO: 239893 - DNA, 13 bp, Artificial Sequence
  Oligonucleotide for detection of SNP TSC0058508
ttcgtaggttttt

SEQ ID NO: 239894 - DNA, 13 bp, Artificial Sequence
  Oligonucleotide for detection of SNP TSC0058508
aaaaacctacgaa

SEQ ID NO: 239895 - DNA, 13 bp, Artificial Sequence
  Oligonucleotide for detection of SNP TSC0058511
atggtagtgagta

SEQ ID NO: 239896 - DNA, 13 bp, Artificial Sequence
  Oligonucleotide for detection of SNP TSC0058511
tactcactaccat

SEQ ID NO: 239897 - DNA, 13 bp, Artificial Sequence
  Oligonucleotide for detection of SNP TSC0058511
atggtattgagta

SEQ ID NO: 239898 - DNA, 13 bp, Artificial Sequence
  Oligonucleotide for detection of SNP TSC0058511
tactcaataccat

SEQ ID NO: 239899 - DNA, 13 bp, Artificial Sequence
  Oligonucleotide for detection of SNP TSC0058512
tatgaaagagaaa

SEQ ID NO: 239900 - DNA, 13 bp, Artificial Sequence
  Oligonucleotide for detection of SNP TSC0058512
tttctctttcata

SEQ ID NO: 239901 - DNA, 13 bp, Artificial Sequence
  Oligonucleotide for detection of SNP TSC0058512
tatgaaggagaaa

SEQ ID NO: 239902 - DNA, 13 bp, Artificial Sequence
  Oligonucleotide for detection of SNP TSC0058512
tttctccttcata

SEQ ID NO: 239903 - DNA, 13 bp, Artificial Sequence
  Oligonucleotide for detection of SNP TSC0058513
ttgaagttaaggt

SEQ ID NO: 239904 - DNA, 13 bp, Artificial Sequence
  Oligonucleotide for detection of SNP TSC0058513
accttaacttcaa

SEQ ID NO: 239905 - DNA, 13 bp, Artificial Sequence
  Oligonucleotide for detection of SNP TSC0058513
ttgaaggtaaggt

SEQ ID NO: 239906 - DNA, 13 bp, Artificial Sequence
  Oligonucleotide for detection of SNP TSC0058513
accttaccttcaa

SEQ ID NO: 239907 - DNA, 13 bp, Artificial Sequence
  Oligonucleotide for detection of SNP TSC0058513
attttgattttag

SEQ ID NO: 239908 - DNA, 13 bp, Artificial Sequence
  Oligonucleotide for detection of SNP TSC0058513
ctaaaatcaaaat

SEQ ID NO: 239909 - DNA, 13 bp, Artificial Sequence
  Oligonucleotide for detection of SNP TSC0058513
attttgtttttag

SEQ ID NO: 239910 - DNA, 13 bp, Artificial Sequence
  Oligonucleotide for detection of SNP TSC0058513
ctaaaaacaaaat

SEQ ID NO: 239911 - DNA, 13 bp, Artificial Sequence
  Oligonucleotide for detection of SNP TSC0058514
tttttaatgtttg

SEQ ID NO: 239912 - DNA, 13 bp, Artificial Sequence
  Oligonucleotide for detection of SNP TSC0058514
caaacattaaaaa

SEQ ID NO: 239913 - DNA, 13 bp, Artificial Sequence
  Oligonucleotide for detection of SNP TSC0058515
attttagttgtaa

SEQ ID NO: 239914 - DNA, 13 bp, Artificial Sequence
  Oligonucleotide for detection of SNP TSC0058515
ttacaactaaaat

SEQ ID NO: 239915 - DNA, 13 bp, Artificial Sequence
  Oligonucleotide for detection of SNP TSC0058515
attttaattgtaa

SEQ ID NO: 239916 - DNA, 13 bp, Artificial Sequence
  Oligonucleotide for detection of SNP TSC0058515
ttacaattaaaat

SEQ ID NO: 239917 - DNA, 13 bp, Artificial Sequence
  Oligonucleotide for detection of SNP TSC0058516
tgggttagagata

SEQ ID NO: 239918 - DNA, 13 bp, Artificial Sequence
  Oligonucleotide for detection of SNP TSC0058516
tatctctaaccca

SEQ ID NO: 239919 - DNA, 13 bp, Artificial Sequence
  Oligonucleotide for detection of SNP TSC0058516
tgggttggagata

SEQ ID NO: 239920 - DNA, 13 bp, Artificial Sequence
  Oligonucleotide for detection of SNP TSC0058516
tatctccaaccca

SEQ ID NO: 239921 - DNA, 13 bp, Artificial Sequence
  Oligonucleotide for detection of SNP TSC0058517
tagagtagaataa

SEQ ID NO: 239922 - DNA, 13 bp, Artificial Sequence
  Oligonucleotide for detection of SNP TSC0058517
ttattctactcta

SEQ ID NO: 239923 - DNA, 13 bp, Artificial Sequence
  Oligonucleotide for detection of SNP TSC0058517
tagagtggaataa

SEQ ID NO: 239924 - DNA, 13 bp, Artificial Sequence
  Oligonucleotide for detection of SNP TSC0058517
ttattccactcta

SEQ ID NO: 239925 - DNA, 13 bp, Artificial Sequence
  Oligonucleotide for detection of SNP TSC0058517
tagagcggaataa

SEQ ID NO: 239926 - DNA, 13 bp, Artificial Sequence
  Oligonucleotide for detection of SNP TSC0058517
ttattccgctcta

SEQ ID NO: 239927 - DNA, 13 bp, Artificial Sequence
  Oligonucleotide for detection of SNP TSC0058518
taggtattaatgy

SEQ ID NO: 239928 - DNA, 13 bp, Artificial Sequence
  Oligonucleotide for detection of SNP TSC0058518
rcattaataccta

SEQ ID NO: 239929 - DNA, 13 bp, Artificial Sequence
  Oligonucleotide for detection of SNP TSC0058518
taggtagtaatgy

SEQ ID NO: 239930 - DNA, 13 bp, Artificial Sequence
  Oligonucleotide for detection of SNP TSC0058518
rcattactaccta

SEQ ID NO: 239931 - DNA, 13 bp, Artificial Sequence
  Oligonucleotide for detection of SNP TSC0058518
gtattagtgtttg

SEQ ID NO: 239932 - DNA, 13 bp, Artificial Sequence
  Oligonucleotide for detection of SNP TSC0058518
caaacactaatac

SEQ ID NO: 239933 - DNA, 13 bp, Artificial Sequence
  Oligonucleotide for detection of SNP TSC0058518
gtattattgtttg

SEQ ID NO: 239934 - DNA, 13 bp, Artificial Sequence
  Oligonucleotide for detection of SNP TSC0058518
caaacaataatac

SEQ ID NO: 239935 - DNA, 13 bp, Artificial Sequence
  Oligonucleotide for detection of SNP TSC0000791
atgattttattat

SEQ ID NO: 239936 - DNA, 13 bp, Artificial Sequence
  Oligonucleotide for detection of SNP TSC0000791
ataataaaatcat

SEQ ID NO: 239937 - DNA, 13 bp, Artificial Sequence
  Oligonucleotide for detection of SNP TSC0000791
atgattgtattat

SEQ ID NO: 239938 - DNA, 13 bp, Artificial Sequence
  Oligonucleotide for detection of SNP TSC0000791
ataatacaatcat

SEQ ID NO: 239939 - DNA, 13 bp, Artificial Sequence
  Oligonucleotide for detection of SNP TSC0000791
atgatagaattat

SEQ ID NO: 239940 - DNA, 13 bp, Artificial Sequence
  Oligonucleotide for detection of SNP TSC0000791
ataattctatcat

SEQ ID NO: 239941 - DNA, 13 bp, Artificial Sequence
  Oligonucleotide for detection of SNP TSC0000791
atgatataattat

SEQ ID NO: 239942 - DNA, 13 bp, Artificial Sequence
  Oligonucleotide for detection of SNP TSC0000791
ataattatatcat

SEQ ID NO: 239943 - DNA, 13 bp, Artificial Sequence
  Oligonucleotide for detection of SNP TSC0000792
aaaatatggatat

SEQ ID NO: 239944 - DNA, 13 bp, Artificial Sequence
  Oligonucleotide for detection of SNP TSC0000792
atatccatatttt

SEQ ID NO: 239945 - DNA, 13 bp, Artificial Sequence
  Oligonucleotide for detection of SNP TSC0000792
aaaatacggatat

SEQ ID NO: 239946 - DNA, 13 bp, Artificial Sequence
  Oligonucleotide for detection of SNP TSC0000792
atatccgtatttt

SEQ ID NO: 239947 - DNA, 13 bp, Artificial Sequence
  Oligonucleotide for detection of SNP TSC0000792
atatttgtgtttt

SEQ ID NO: 239948 - DNA, 13 bp, Artificial Sequence
  Oligonucleotide for detection of SNP TSC0000792
aaaacacaaatat

SEQ ID NO: 239949 - DNA, 13 bp, Artificial Sequence
  Oligonucleotide for detection of SNP TSC0000792
atatttatgtttt

SEQ ID NO: 239950 - DNA, 13 bp, Artificial Sequence
  Oligonucleotide for detection of SNP TSC0000792
aaaacataaatat

SEQ ID NO: 239951 - DNA, 13 bp, Artificial Sequence
  Oligonucleotide for detection of SNP TSC0000792
atattcgtgtttt

SEQ ID NO: 239952 - DNA, 13 bp, Artificial Sequence
  Oligonucleotide for detection of SNP TSC0000792
aaaacacgaatat

SEQ ID NO: 239953 - DNA, 13 bp, Artificial Sequence
  Oligonucleotide for detection of SNP TSC0000884
atagtaagaatta

SEQ ID NO: 239954 - DNA, 13 bp, Artificial Sequence
  Oligonucleotide for detection of SNP TSC0000884
taattcttactat

SEQ ID NO: 239955 - DNA, 13 bp, Artificial Sequence
  Oligonucleotide for detection of SNP TSC0000884
atagtatgaatta

SEQ ID NO: 239956 - DNA, 13 bp, Artificial Sequence
  Oligonucleotide for detection of SNP TSC0000884
taattcatactat

SEQ ID NO: 239957 - DNA, 13 bp, Artificial Sequence
  Oligonucleotide for detection of SNP TSC0000884
atagtacgaatta

SEQ ID NO: 239958 - DNA, 13 bp, Artificial Sequence
  Oligonucleotide for detection of SNP TSC0000884
taattcgtactat

SEQ ID NO: 239959 - DNA, 13 bp, Artificial Sequence
  Oligonucleotide for detection of SNP TSC0000884
taatttttattat

SEQ ID NO: 239960 - DNA, 13 bp, Artificial Sequence
  Oligonucleotide for detection of SNP TSC0000884
ataataaaaatta

SEQ ID NO: 239961 - DNA, 13 bp, Artificial Sequence
  Oligonucleotide for detection of SNP TSC0000884
taatttgtattat

SEQ ID NO: 239962 - DNA, 13 bp, Artificial Sequence
  Oligonucleotide for detection of SNP TSC0000884
ataatacaaatta

SEQ ID NO: 239963 - DNA, 13 bp, Artificial Sequence
  Oligonucleotide for detection of SNP TSC0000884
taattcgtattat

SEQ ID NO: 239964 - DNA, 13 bp, Artificial Sequence
  Oligonucleotide for detection of SNP TSC0000884
ataatacgaatta

SEQ ID NO: 239965 - DNA, 13 bp, Artificial Sequence
  Oligonucleotide for detection of SNP TSC0000885
gaagtagtagtta

SEQ ID NO: 239966 - DNA, 13 bp, Artificial Sequence
  Oligonucleotide for detection of SNP TSC0000885
taactactacttc

SEQ ID NO: 239967 - DNA, 13 bp, Artificial Sequence
  Oligonucleotide for detection of SNP TSC0000885
gaagtaatagtta

SEQ ID NO: 239968 - DNA, 13 bp, Artificial Sequence
  Oligonucleotide for detection of SNP TSC0000885
taactattacttc

SEQ ID NO: 239969 - DNA, 13 bp, Artificial Sequence
  Oligonucleotide for detection of SNP TSC0058524
gttgatagtgtty

SEQ ID NO: 239970 - DNA, 13 bp, Artificial Sequence
  Oligonucleotide for detection of SNP TSC0058524
raacactatcaac

SEQ ID NO: 239971 - DNA, 13 bp, Artificial Sequence
  Oligonucleotide for detection of SNP TSC0058524
gttgattgtgtty

SEQ ID NO: 239972 - DNA, 13 bp, Artificial Sequence
  Oligonucleotide for detection of SNP TSC0058524
raacacaatcaac

SEQ ID NO: 239973 - DNA, 13 bp, Artificial Sequence
  Oligonucleotide for detection of SNP TSC0058524
gttgatggtgtty

SEQ ID NO: 239974 - DNA, 13 bp, Artificial Sequence
  Oligonucleotide for detection of SNP TSC0058524
raacaccatcaac

SEQ ID NO: 239975 - DNA, 13 bp, Artificial Sequence
  Oligonucleotide for detection of SNP TSC0058524
gttgatcgtgtty

SEQ ID NO: 239976 - DNA, 13 bp, Artificial Sequence
  Oligonucleotide for detection of SNP TSC0058524
raacacgatcaac

SEQ ID NO: 239977 - DNA, 13 bp, Artificial Sequence
  Oligonucleotide for detection of SNP TSC0058524
gagtattattagy

SEQ ID NO: 239978 - DNA, 13 bp, Artificial Sequence
  Oligonucleotide for detection of SNP TSC0058524
rctaataatactc

SEQ ID NO: 239979 - DNA, 13 bp, Artificial Sequence
  Oligonucleotide for detection of SNP TSC0058525
atagtgatttgty

SEQ ID NO: 239980 - DNA, 13 bp, Artificial Sequence
  Oligonucleotide for detection of SNP TSC0058525
racaaatcactat

SEQ ID NO: 239981 - DNA, 13 bp, Artificial Sequence
  Oligonucleotide for detection of SNP TSC0058525
atagtgttttgty

SEQ ID NO: 239982 - DNA, 13 bp, Artificial Sequence
  Oligonucleotide for detection of SNP TSC0058525
racaaaacactat

SEQ ID NO: 239983 - DNA, 13 bp, Artificial Sequence
  Oligonucleotide for detection of SNP TSC0058525
atagtggtttgty

SEQ ID NO: 239984 - DNA, 13 bp, Artificial Sequence
  Oligonucleotide for detection of SNP TSC0058525
racaaaccactat

SEQ ID NO: 239985 - DNA, 13 bp, Artificial Sequence
  Oligonucleotide for detection of SNP TSC0058525
ggtagattattat

SEQ ID NO: 239986 - DNA, 13 bp, Artificial Sequence
  Oligonucleotide for detection of SNP TSC0058525
ataataatctacc

SEQ ID NO: 239987 - DNA, 13 bp, Artificial Sequence
  Oligonucleotide for detection of SNP TSC0058525
ggtagagtattat

SEQ ID NO: 239988 - DNA, 13 bp, Artificial Sequence
  Oligonucleotide for detection of SNP TSC0058525
ataatactctacc

SEQ ID NO: 239989 - DNA, 13 bp, Artificial Sequence
  Oligonucleotide for detection of SNP TSC0058525
ggtagaatattat

SEQ ID NO: 239990 - DNA, 13 bp, Artificial Sequence
  Oligonucleotide for detection of SNP TSC0058525
ataatattctacc

SEQ ID NO: 239991 - DNA, 13 bp, Artificial Sequence
  Oligonucleotide for detection of SNP TSC0000452
tttttgaaataag

SEQ ID NO: 239992 - DNA, 13 bp, Artificial Sequence
  Oligonucleotide for detection of SNP TSC0000452
cttatttcaaaaa

SEQ ID NO: 239993 - DNA, 13 bp, Artificial Sequence
  Oligonucleotide for detection of SNP TSC0000452
tttttggaataag

SEQ ID NO: 239994 - DNA, 13 bp, Artificial Sequence
  Oligonucleotide for detection of SNP TSC0000452
cttattccaaaaa

SEQ ID NO: 239995 - DNA, 13 bp, Artificial Sequence
  Oligonucleotide for detection of SNP TSC0058526
aaaaggtgtttgt

SEQ ID NO: 239996 - DNA, 13 bp, Artificial Sequence
  Oligonucleotide for detection of SNP TSC0058526
acaaacacctttt

SEQ ID NO: 239997 - DNA, 13 bp, Artificial Sequence
  Oligonucleotide for detection of SNP TSC0058526
aaaaggggtttgt

SEQ ID NO: 239998 - DNA, 13 bp, Artificial Sequence
  Oligonucleotide for detection of SNP TSC0058526
acaaacccctttt

SEQ ID NO: 239999 - DNA, 13 bp, Artificial Sequence
  Oligonucleotide for detection of SNP TSC0058529
ttagttatttaty

SEQ ID NO: 240000 - DNA, 13 bp, Artificial Sequence
  Oligonucleotide for detection of SNP TSC0058529
rataaataactaa

SEQ ID NO: 240001 - DNA, 13 bp, Artificial Sequence
  Oligonucleotide for detection of SNP TSC0058529
gatagatagttga

SEQ ID NO: 240002 - DNA, 13 bp, Artificial Sequence
  Oligonucleotide for detection of SNP TSC0058529
tcaactatctatc

SEQ ID NO: 240003 - DNA, 13 bp, Artificial Sequence
  Oligonucleotide for detection of SNP TSC0058529
gatagagagttga

SEQ ID NO: 240004 - DNA, 13 bp, Artificial Sequence
  Oligonucleotide for detection of SNP TSC0058529
tcaactctctatc

SEQ ID NO: 240005 - DNA, 13 bp, Artificial Sequence
  Oligonucleotide for detection of SNP TSC0058530
tatagtatttttg

SEQ ID NO: 240006 - DNA, 13 bp, Artificial Sequence
  Oligonucleotide for detection of SNP TSC0058530
caaaaatactata

SEQ ID NO: 240007 - DNA, 13 bp, Artificial Sequence
  Oligonucleotide for detection of SNP TSC0058530
tatagtgtttttg

SEQ ID NO: 240008 - DNA, 13 bp, Artificial Sequence
  Oligonucleotide for detection of SNP TSC0058530
caaaaacactata

SEQ ID NO: 240009 - DNA, 13 bp, Artificial Sequence
  Oligonucleotide for detection of SNP TSC0058530
tatagcgtttttg

SEQ ID NO: 240010 - DNA, 13 bp, Artificial Sequence
  Oligonucleotide for detection of SNP TSC0058530
caaaaacgctata

SEQ ID NO: 240011 - DNA, 13 bp, Artificial Sequence
  Oligonucleotide for detection of SNP TSC0058530
taaaagtgttatg

SEQ ID NO: 240012 - DNA, 13 bp, Artificial Sequence
  Oligonucleotide for detection of SNP TSC0058530
cataacactttta

SEQ ID NO: 240013 - DNA, 13 bp, Artificial Sequence
  Oligonucleotide for detection of SNP TSC0058530
taaaagcgttatg

SEQ ID NO: 240014 - DNA, 13 bp, Artificial Sequence
  Oligonucleotide for detection of SNP TSC0058530
cataacgctttta

SEQ ID NO: 240015 - DNA, 13 bp, Artificial Sequence
  Oligonucleotide for detection of SNP TSC0058531
tttttagtgttag

SEQ ID NO: 240016 - DNA, 13 bp, Artificial Sequence
  Oligonucleotide for detection of SNP TSC0058531
ctaacactaaaaa

SEQ ID NO: 240017 - DNA, 13 bp, Artificial Sequence
  Oligonucleotide for detection of SNP TSC0058531
tttttaatgttag

SEQ ID NO: 240018 - DNA, 13 bp, Artificial Sequence
  Oligonucleotide for detection of SNP TSC0058531
ctaacattaaaaa

SEQ ID NO: 240019 - DNA, 13 bp, Artificial Sequence
  Oligonucleotide for detection of SNP TSC0058532
aggttgtgttaaa

SEQ ID NO: 240020 - DNA, 13 bp, Artificial Sequence
  Oligonucleotide for detection of SNP TSC0058532
tttaacacaacct

SEQ ID NO: 240021 - DNA, 13 bp, Artificial Sequence
  Oligonucleotide for detection of SNP TSC0058532
aggttgcgttaaa

SEQ ID NO: 240022 - DNA, 13 bp, Artificial Sequence
  Oligonucleotide for detection of SNP TSC0058532
tttaacgcaacct

SEQ ID NO: 240023 - DNA, 13 bp, Artificial Sequence
  Oligonucleotide for detection of SNP TSC0058533
ttgttttggttta

SEQ ID NO: 240024 - DNA, 13 bp, Artificial Sequence
  Oligonucleotide for detection of SNP TSC0058533
taaaccaaaacaa

SEQ ID NO: 240025 - DNA, 13 bp, Artificial Sequence
  Oligonucleotide for detection of SNP TSC0058533
ttgtttgggttta

SEQ ID NO: 240026 - DNA, 13 bp, Artificial Sequence
  Oligonucleotide for detection of SNP TSC0058533
taaacccaaacaa

SEQ ID NO: 240027 - DNA, 13 bp, Artificial Sequence
  Oligonucleotide for detection of SNP TSC0058533
ttgtttcggttta

SEQ ID NO: 240028 - DNA, 13 bp, Artificial Sequence
  Oligonucleotide for detection of SNP TSC0058533
taaaccgaaacaa

SEQ ID NO: 240029 - DNA, 13 bp, Artificial Sequence
  Oligonucleotide for detection of SNP TSC0058533
ttgttcgggttta

SEQ ID NO: 240030 - DNA, 13 bp, Artificial Sequence
  Oligonucleotide for detection of SNP TSC0058533
taaacccgaacaa

SEQ ID NO: 240031 - DNA, 13 bp, Artificial Sequence
  Oligonucleotide for detection of SNP TSC0058533
taggttggggtag

SEQ ID NO: 240032 - DNA, 13 bp, Artificial Sequence
  Oligonucleotide for detection of SNP TSC0058533
ctaccccaaccta

SEQ ID NO: 240033 - DNA, 13 bp, Artificial Sequence
  Oligonucleotide for detection of SNP TSC0058533
taggtttgggtag

SEQ ID NO: 240034 - DNA, 13 bp, Artificial Sequence
  Oligonucleotide for detection of SNP TSC0058533
ctacccaaaccta

SEQ ID NO: 240035 - DNA, 13 bp, Artificial Sequence
  Oligonucleotide for detection of SNP TSC0058533
taggtcggggtag

SEQ ID NO: 240036 - DNA, 13 bp, Artificial Sequence
  Oligonucleotide for detection of SNP TSC0058533
ctaccccgaccta

SEQ ID NO: 240037 - DNA, 13 bp, Artificial Sequence
  Oligonucleotide for detection of SNP TSC0058533
taggttcgggtag

SEQ ID NO: 240038 - DNA, 13 bp, Artificial Sequence
  Oligonucleotide for detection of SNP TSC0058533
ctacccgaaccta

SEQ ID NO: 240039 - DNA, 13 bp, Artificial Sequence
  Oligonucleotide for detection of SNP TSC0058534
tttttggaggtta

SEQ ID NO: 240040 - DNA, 13 bp, Artificial Sequence
  Oligonucleotide for detection of SNP TSC0058534
taacctccaaaaa

SEQ ID NO: 240041 - DNA, 13 bp, Artificial Sequence
  Oligonucleotide for detection of SNP TSC0058534
tttttgaaggtta

SEQ ID NO: 240042 - DNA, 13 bp, Artificial Sequence
  Oligonucleotide for detection of SNP TSC0058534
taaccttcaaaaa

SEQ ID NO: 240043 - DNA, 13 bp, Artificial Sequence
  Oligonucleotide for detection of SNP TSC0058535
ggataattggatg

SEQ ID NO: 240044 - DNA, 13 bp, Artificial Sequence
  Oligonucleotide for detection of SNP TSC0058535
catccaattatcc

SEQ ID NO: 240045 - DNA, 13 bp, Artificial Sequence
  Oligonucleotide for detection of SNP TSC0058535
ggataaatggatg

SEQ ID NO: 240046 - DNA, 13 bp, Artificial Sequence
  Oligonucleotide for detection of SNP TSC0058535
catccatttatcc

SEQ ID NO: 240047 - DNA, 13 bp, Artificial Sequence
  Oligonucleotide for detection of SNP TSC0058537
gtatgtgtggaag

SEQ ID NO: 240048 - DNA, 13 bp, Artificial Sequence
  Oligonucleotide for detection of SNP TSC0058537
cttccacacatac

SEQ ID NO: 240049 - DNA, 13 bp, Artificial Sequence
  Oligonucleotide for detection of SNP TSC0058537
gtatgtatggaag

SEQ ID NO: 240050 - DNA, 13 bp, Artificial Sequence
  Oligonucleotide for detection of SNP TSC0058537
cttccatacatac

SEQ ID NO: 240051 - DNA, 13 bp, Artificial Sequence
  Oligonucleotide for detection of SNP TSC0058539
aatattattggtt

SEQ ID NO: 240052 - DNA, 13 bp, Artificial Sequence
  Oligonucleotide for detection of SNP TSC0058539
aaccaataatatt

SEQ ID NO: 240053 - DNA, 13 bp, Artificial Sequence
  Oligonucleotide for detection of SNP TSC0058539
aatattgttggtt

SEQ ID NO: 240054 - DNA, 13 bp, Artificial Sequence
  Oligonucleotide for detection of SNP TSC0058539
aaccaacaatatt

SEQ ID NO: 240055 - DNA, 13 bp, Artificial Sequence
  Oligonucleotide for detection of SNP TSC0058539
aatatcgttggtt

SEQ ID NO: 240056 - DNA, 13 bp, Artificial Sequence
  Oligonucleotide for detection of SNP TSC0058539
aaccaacgatatt

SEQ ID NO: 240057 - DNA, 13 bp, Artificial Sequence
  Oligonucleotide for detection of SNP TSC0058539
agttagtggtgtt

SEQ ID NO: 240058 - DNA, 13 bp, Artificial Sequence
  Oligonucleotide for detection of SNP TSC0058539
aacaccactaact

SEQ ID NO: 240059 - DNA, 13 bp, Artificial Sequence
  Oligonucleotide for detection of SNP TSC0058539
agttagcggtgtt

SEQ ID NO: 240060 - DNA, 13 bp, Artificial Sequence
  Oligonucleotide for detection of SNP TSC0058539
aacaccgctaact

SEQ ID NO: 240061 - DNA, 13 bp, Artificial Sequence
  Oligonucleotide for detection of SNP TSC0058540
aaaagtaaatttg

SEQ ID NO: 240062 - DNA, 13 bp, Artificial Sequence
  Oligonucleotide for detection of SNP TSC0058540
caaatttactttt

SEQ ID NO: 240063 - DNA, 13 bp, Artificial Sequence
  Oligonucleotide for detection of SNP TSC0058540
aaaagtgaatttg

SEQ ID NO: 240064 - DNA, 13 bp, Artificial Sequence
  Oligonucleotide for detection of SNP TSC0058540
caaattcactttt

SEQ ID NO: 240065 - DNA, 13 bp, Artificial Sequence
  Oligonucleotide for detection of SNP TSC0058540
aaaagcgaatttg

SEQ ID NO: 240066 - DNA, 13 bp, Artificial Sequence
  Oligonucleotide for detection of SNP TSC0058540
caaattcgctttt

SEQ ID NO: 240067 - DNA, 13 bp, Artificial Sequence
  Oligonucleotide for detection of SNP TSC0058541
ttttgatgtatgt

SEQ ID NO: 240068 - DNA, 13 bp, Artificial Sequence
  Oligonucleotide for detection of SNP TSC0058541
acatacatcaaaa

SEQ ID NO: 240069 - DNA, 13 bp, Artificial Sequence
  Oligonucleotide for detection of SNP TSC0058541
ttttgacgtatgt

SEQ ID NO: 240070 - DNA, 13 bp, Artificial Sequence
  Oligonucleotide for detection of SNP TSC0058541
acatacgtcaaaa

SEQ ID NO: 240071 - DNA, 13 bp, Artificial Sequence
  Oligonucleotide for detection of SNP TSC0058541
atatgtgttaaaa

SEQ ID NO: 240072 - DNA, 13 bp, Artificial Sequence
  Oligonucleotide for detection of SNP TSC0058541
ttttaacacatat

SEQ ID NO: 240073 - DNA, 13 bp, Artificial Sequence
  Oligonucleotide for detection of SNP TSC0058541
atatgtattaaaa

SEQ ID NO: 240074 - DNA, 13 bp, Artificial Sequence
  Oligonucleotide for detection of SNP TSC0058541
ttttaatacatat

SEQ ID NO: 240075 - DNA, 13 bp, Artificial Sequence
  Oligonucleotide for detection of SNP TSC0058541
atatgcgttaaaa

SEQ ID NO: 240076 - DNA, 13 bp, Artificial Sequence
  Oligonucleotide for detection of SNP TSC0058541
ttttaacgcatat

SEQ ID NO: 240077 - DNA, 13 bp, Artificial Sequence
  Oligonucleotide for detection of SNP TSC0058543
tattgttgtaggg

SEQ ID NO: 240078 - DNA, 13 bp, Artificial Sequence
  Oligonucleotide for detection of SNP TSC0058543
ccctacaacaata

SEQ ID NO: 240079 - DNA, 13 bp, Artificial Sequence
  Oligonucleotide for detection of SNP TSC0058543
tattgtcgtaggg

SEQ ID NO: 240080 - DNA, 13 bp, Artificial Sequence
  Oligonucleotide for detection of SNP TSC0058543
ccctacgacaata

SEQ ID NO: 240081 - DNA, 13 bp, Artificial Sequence
  Oligonucleotide for detection of SNP TSC0058543
ttttgtggtagta

SEQ ID NO: 240082 - DNA, 13 bp, Artificial Sequence
  Oligonucleotide for detection of SNP TSC0058543
tactaccacaaaa

SEQ ID NO: 240083 - DNA, 13 bp, Artificial Sequence
  Oligonucleotide for detection of SNP TSC0058543
ttttgtagtagta

SEQ ID NO: 240084 - DNA, 13 bp, Artificial Sequence
  Oligonucleotide for detection of SNP TSC0058543
tactactacaaaa

SEQ ID NO: 240085 - DNA, 13 bp, Artificial Sequence
  Oligonucleotide for detection of SNP TSC0058543
ttttgcggtagta

SEQ ID NO: 240086 - DNA, 13 bp, Artificial Sequence
  Oligonucleotide for detection of SNP TSC0058543
tactaccgcaaaa

SEQ ID NO: 240087 - DNA, 13 bp, Artificial Sequence
  Oligonucleotide for detection of SNP TSC0058550
ttaaatggtttga

SEQ ID NO: 240088 - DNA, 13 bp, Artificial Sequence
  Oligonucleotide for detection of SNP TSC0058550
tcaaaccatttaa

SEQ ID NO: 240089 - DNA, 13 bp, Artificial Sequence
  Oligonucleotide for detection of SNP TSC0058550
ttaaatagtttga

SEQ ID NO: 240090 - DNA, 13 bp, Artificial Sequence
  Oligonucleotide for detection of SNP TSC0058550
tcaaactatttaa

SEQ ID NO: 240091 - DNA, 13 bp, Artificial Sequence
  Oligonucleotide for detection of SNP TSC0058551
aaattagttgtag

SEQ ID NO: 240092 - DNA, 13 bp, Artificial Sequence
  Oligonucleotide for detection of SNP TSC0058551
ctacaactaattt

SEQ ID NO: 240093 - DNA, 13 bp, Artificial Sequence
  Oligonucleotide for detection of SNP TSC0058551
aaattaattgtag

SEQ ID NO: 240094 - DNA, 13 bp, Artificial Sequence
  Oligonucleotide for detection of SNP TSC0058551
ctacaattaattt

SEQ ID NO: 240095 - DNA, 13 bp, Artificial Sequence
  Oligonucleotide for detection of SNP TSC0058554
tttgatatttgat

SEQ ID NO: 240096 - DNA, 13 bp, Artificial Sequence
  Oligonucleotide for detection of SNP TSC0058554
atcaaatatcaaa

SEQ ID NO: 240097 - DNA, 13 bp, Artificial Sequence
  Oligonucleotide for detection of SNP TSC0058554
tttgatgtttgat

SEQ ID NO: 240098 - DNA, 13 bp, Artificial Sequence
  Oligonucleotide for detection of SNP TSC0058554
atcaaacatcaaa

SEQ ID NO: 240099 - DNA, 13 bp, Artificial Sequence
  Oligonucleotide for detection of SNP TSC0058554
tttgacgtttgat

SEQ ID NO: 240100 - DNA, 13 bp, Artificial Sequence
  Oligonucleotide for detection of SNP TSC0058554
atcaaacgtcaaa

SEQ ID NO: 240101 - DNA, 13 bp, Artificial Sequence
  Oligonucleotide for detection of SNP TSC0058559
gattatttatttt

SEQ ID NO: 240102 - DNA, 13 bp, Artificial Sequence
  Oligonucleotide for detection of SNP TSC0058559
aaaataaataatc

SEQ ID NO: 240103 - DNA, 13 bp, Artificial Sequence
  Oligonucleotide for detection of SNP TSC0058559
gattatgtatttt

SEQ ID NO: 240104 - DNA, 13 bp, Artificial Sequence
  Oligonucleotide for detection of SNP TSC0058559
aaaatacataatc

SEQ ID NO: 240105 - DNA, 13 bp, Artificial Sequence
  Oligonucleotide for detection of SNP TSC0058559
agaatgaatagty

SEQ ID NO: 240106 - DNA, 13 bp, Artificial Sequence
  Oligonucleotide for detection of SNP TSC0058559
ractattcattct

SEQ ID NO: 240107 - DNA, 13 bp, Artificial Sequence
  Oligonucleotide for detection of SNP TSC0058559
agaatgtatagty

SEQ ID NO: 240108 - DNA, 13 bp, Artificial Sequence
  Oligonucleotide for detection of SNP TSC0058559
ractatacattct

SEQ ID NO: 240109 - DNA, 13 bp, Artificial Sequence
  Oligonucleotide for detection of SNP TSC0058560
atgatttatttag

SEQ ID NO: 240110 - DNA, 13 bp, Artificial Sequence
  Oligonucleotide for detection of SNP TSC0058560
ctaaataaatcat

SEQ ID NO: 240111 - DNA, 13 bp, Artificial Sequence
  Oligonucleotide for detection of SNP TSC0058560
atgattgatttag

SEQ ID NO: 240112 - DNA, 13 bp, Artificial Sequence
  Oligonucleotide for detection of SNP TSC0058560
ctaaatcaatcat

SEQ ID NO: 240113 - DNA, 13 bp, Artificial Sequence
  Oligonucleotide for detection of SNP TSC0058560
ttggatgagttat

SEQ ID NO: 240114 - DNA, 13 bp, Artificial Sequence
  Oligonucleotide for detection of SNP TSC0058560
ataactcatccaa

SEQ ID NO: 240115 - DNA, 13 bp, Artificial Sequence
  Oligonucleotide for detection of SNP TSC0058560
ttggattagttat

SEQ ID NO: 240116 - DNA, 13 bp, Artificial Sequence
  Oligonucleotide for detection of SNP TSC0058560
ataactaatccaa

SEQ ID NO: 240117 - DNA, 13 bp, Artificial Sequence
  Oligonucleotide for detection of SNP TSC0058561
ttaagtaaatgaa

SEQ ID NO: 240118 - DNA, 13 bp, Artificial Sequence
  Oligonucleotide for detection of SNP TSC0058561
ttcatttacttaa

SEQ ID NO: 240119 - DNA, 13 bp, Artificial Sequence
  Oligonucleotide for detection of SNP TSC0058561
ttaagtgaatgaa

SEQ ID NO: 240120 - DNA, 13 bp, Artificial Sequence
  Oligonucleotide for detection of SNP TSC0058561
ttcattcacttaa

SEQ ID NO: 240121 - DNA, 13 bp, Artificial Sequence
  Oligonucleotide for detection of SNP TSC0058563
ggtttttgaatty

SEQ ID NO: 240122 - DNA, 13 bp, Artificial Sequence
  Oligonucleotide for detection of SNP TSC0058563
raattcaaaaacc

SEQ ID NO: 240123 - DNA, 13 bp, Artificial Sequence
  Oligonucleotide for detection of SNP TSC0058563
ggttttcgaatty

SEQ ID NO: 240124 - DNA, 13 bp, Artificial Sequence
  Oligonucleotide for detection of SNP TSC0058563
raattcgaaaacc

SEQ ID NO: 240125 - DNA, 13 bp, Artificial Sequence
  Oligonucleotide for detection of SNP TSC0058563
ggatttggaggty

SEQ ID NO: 240126 - DNA, 13 bp, Artificial Sequence
  Oligonucleotide for detection of SNP TSC0058563
racctccaaatcc

SEQ ID NO: 240127 - DNA, 13 bp, Artificial Sequence
  Oligonucleotide for detection of SNP TSC0058563
ggatttagaggty

SEQ ID NO: 240128 - DNA, 13 bp, Artificial Sequence
  Oligonucleotide for detection of SNP TSC0058563
racctctaaatcc

SEQ ID NO: 240129 - DNA, 13 bp, Artificial Sequence
  Oligonucleotide for detection of SNP TSC0058563
ggattcggaggty

SEQ ID NO: 240130 - DNA, 13 bp, Artificial Sequence
  Oligonucleotide for detection of SNP TSC0058563
racctccgaatcc

SEQ ID NO: 240131 - DNA, 13 bp, Artificial Sequence
  Oligonucleotide for detection of SNP TSC0058564
atttgaggtataa

SEQ ID NO: 240132 - DNA, 13 bp, Artificial Sequence
  Oligonucleotide for detection of SNP TSC0058564
ttatacctcaaat

SEQ ID NO: 240133 - DNA, 13 bp, Artificial Sequence
  Oligonucleotide for detection of SNP TSC0058564
atttgaagtataa

SEQ ID NO: 240134 - DNA, 13 bp, Artificial Sequence
  Oligonucleotide for detection of SNP TSC0058564
ttatacttcaaat

SEQ ID NO: 240135 - DNA, 13 bp, Artificial Sequence
  Oligonucleotide for detection of SNP TSC0058564
attcgaggtataa

SEQ ID NO: 240136 - DNA, 13 bp, Artificial Sequence
  Oligonucleotide for detection of SNP TSC0058564
ttatacctcgaat

SEQ ID NO: 240137 - DNA, 13 bp, Artificial Sequence
  Oligonucleotide for detection of SNP TSC0058564
attcgaagtataa

SEQ ID NO: 240138 - DNA, 13 bp, Artificial Sequence
  Oligonucleotide for detection of SNP TSC0058564
ttatacttcgaat

SEQ ID NO: 240139 - DNA, 13 bp, Artificial Sequence
  Oligonucleotide for detection of SNP TSC0058565
aacgttttttttt

SEQ ID NO: 240140 - DNA, 13 bp, Artificial Sequence
  Oligonucleotide for detection of SNP TSC0058565
aaaaaaaaacgtt

SEQ ID NO: 240141 - DNA, 13 bp, Artificial Sequence
  Oligonucleotide for detection of SNP TSC0058565
agaagaagatgtt

SEQ ID NO: 240142 - DNA, 13 bp, Artificial Sequence
  Oligonucleotide for detection of SNP TSC0058565
aacatcttcttct

SEQ ID NO: 240143 - DNA, 13 bp, Artificial Sequence
  Oligonucleotide for detection of SNP TSC0058565
agaagatgatgtt

SEQ ID NO: 240144 - DNA, 13 bp, Artificial Sequence
  Oligonucleotide for detection of SNP TSC0058565
aacatcatcttct

SEQ ID NO: 240145 - DNA, 13 bp, Artificial Sequence
  Oligonucleotide for detection of SNP TSC0058565
agaagaagacgtt

SEQ ID NO: 240146 - DNA, 13 bp, Artificial Sequence
  Oligonucleotide for detection of SNP TSC0058565
aacgtcttcttct

SEQ ID NO: 240147 - DNA, 13 bp, Artificial Sequence
  Oligonucleotide for detection of SNP TSC0058565
agaagacgatgtt

SEQ ID NO: 240148 - DNA, 13 bp, Artificial Sequence
  Oligonucleotide for detection of SNP TSC0058565
aacatcgtcttct

SEQ ID NO: 240149 - DNA, 13 bp, Artificial Sequence
  Oligonucleotide for detection of SNP TSC0058565
agaagatgacgtt

SEQ ID NO: 240150 - DNA, 13 bp, Artificial Sequence
  Oligonucleotide for detection of SNP TSC0058565
aacgtcatcttct

SEQ ID NO: 240151 - DNA, 13 bp, Artificial Sequence
  Oligonucleotide for detection of SNP TSC0058565
agaagacgacgtt

SEQ ID NO: 240152 - DNA, 13 bp, Artificial Sequence
  Oligonucleotide for detection of SNP TSC0058565
aacgtcgtcttct

SEQ ID NO: 240153 - DNA, 13 bp, Artificial Sequence
  Oligonucleotide for detection of SNP TSC0058566
tatatagttatta

SEQ ID NO: 240154 - DNA, 13 bp, Artificial Sequence
  Oligonucleotide for detection of SNP TSC0058566
taataactatata

SEQ ID NO: 240155 - DNA, 13 bp, Artificial Sequence
  Oligonucleotide for detection of SNP TSC0058566
tatataattatta

SEQ ID NO: 240156 - DNA, 13 bp, Artificial Sequence
  Oligonucleotide for detection of SNP TSC0058566
taataattatata

SEQ ID NO: 240157 - DNA, 13 bp, Artificial Sequence
  Oligonucleotide for detection of SNP TSC0058567
taaaaggataggt

SEQ ID NO: 240158 - DNA, 13 bp, Artificial Sequence
  Oligonucleotide for detection of SNP TSC0058567
acctatcctttta

SEQ ID NO: 240159 - DNA, 13 bp, Artificial Sequence
  Oligonucleotide for detection of SNP TSC0058567
taaaagaataggt

SEQ ID NO: 240160 - DNA, 13 bp, Artificial Sequence
  Oligonucleotide for detection of SNP TSC0058567
acctattctttta

SEQ ID NO: 240161 - DNA, 13 bp, Artificial Sequence
  Oligonucleotide for detection of SNP TSC0058569
ttaatatggatat

SEQ ID NO: 240162 - DNA, 13 bp, Artificial Sequence
  Oligonucleotide for detection of SNP TSC0058569
atatccatattaa

SEQ ID NO: 240163 - DNA, 13 bp, Artificial Sequence
  Oligonucleotide for detection of SNP TSC0058569
ttaatacggatat

SEQ ID NO: 240164 - DNA, 13 bp, Artificial Sequence
  Oligonucleotide for detection of SNP TSC0058569
atatccgtattaa

SEQ ID NO: 240165 - DNA, 13 bp, Artificial Sequence
  Oligonucleotide for detection of SNP TSC0058569
atatttgtgttaa

SEQ ID NO: 240166 - DNA, 13 bp, Artificial Sequence
  Oligonucleotide for detection of SNP TSC0058569
ttaacacaaatat

SEQ ID NO: 240167 - DNA, 13 bp, Artificial Sequence
  Oligonucleotide for detection of SNP TSC0058569
atatttatgttaa

SEQ ID NO: 240168 - DNA, 13 bp, Artificial Sequence
  Oligonucleotide for detection of SNP TSC0058569
ttaacataaatat

SEQ ID NO: 240169 - DNA, 13 bp, Artificial Sequence
  Oligonucleotide for detection of SNP TSC0058569
atattcgtgttaa

SEQ ID NO: 240170 - DNA, 13 bp, Artificial Sequence
  Oligonucleotide for detection of SNP TSC0058569
ttaacacgaatat

SEQ ID NO: 240171 - DNA, 13 bp, Artificial Sequence
  Oligonucleotide for detection of SNP TSC0058574
gtgtttttattty

SEQ ID NO: 240172 - DNA, 13 bp, Artificial Sequence
  Oligonucleotide for detection of SNP TSC0058574
raaataaaaacac

SEQ ID NO: 240173 - DNA, 13 bp, Artificial Sequence
  Oligonucleotide for detection of SNP TSC0058574
gtgtttgtattty

SEQ ID NO: 240174 - DNA, 13 bp, Artificial Sequence
  Oligonucleotide for detection of SNP TSC0058574
raaatacaaacac

SEQ ID NO: 240175 - DNA, 13 bp, Artificial Sequence
  Oligonucleotide for detection of SNP TSC0058574
gaaatagagatay

SEQ ID NO: 240176 - DNA, 13 bp, Artificial Sequence
  Oligonucleotide for detection of SNP TSC0058574
rtatctctatttc

SEQ ID NO: 240177 - DNA, 13 bp, Artificial Sequence
  Oligonucleotide for detection of SNP TSC0058574
gaaatatagatay

SEQ ID NO: 240178 - DNA, 13 bp, Artificial Sequence
  Oligonucleotide for detection of SNP TSC0058574
rtatctatatttc

SEQ ID NO: 240179 - DNA, 13 bp, Artificial Sequence
  Oligonucleotide for detection of SNP TSC0058575
atagtgtggtggy

SEQ ID NO: 240180 - DNA, 13 bp, Artificial Sequence
  Oligonucleotide for detection of SNP TSC0058575
rccaccacactat

SEQ ID NO: 240181 - DNA, 13 bp, Artificial Sequence
  Oligonucleotide for detection of SNP TSC0058575
atagtggggtggy

SEQ ID NO: 240182 - DNA, 13 bp, Artificial Sequence
  Oligonucleotide for detection of SNP TSC0058575
rccaccccactat

SEQ ID NO: 240183 - DNA, 13 bp, Artificial Sequence
  Oligonucleotide for detection of SNP TSC0058575
atagtgcggtggy

SEQ ID NO: 240184 - DNA, 13 bp, Artificial Sequence
  Oligonucleotide for detection of SNP TSC0058575
rccaccgcactat

SEQ ID NO: 240185 - DNA, 13 bp, Artificial Sequence
  Oligonucleotide for detection of SNP TSC0058575
gttattgtattgt

SEQ ID NO: 240186 - DNA, 13 bp, Artificial Sequence
  Oligonucleotide for detection of SNP TSC0058575
acaatacaataac

SEQ ID NO: 240187 - DNA, 13 bp, Artificial Sequence
  Oligonucleotide for detection of SNP TSC0058575
gttattttattgt

SEQ ID NO: 240188 - DNA, 13 bp, Artificial Sequence
  Oligonucleotide for detection of SNP TSC0058575
acaataaaataac

SEQ ID NO: 240189 - DNA, 13 bp, Artificial Sequence
  Oligonucleotide for detection of SNP TSC0058575
gttatcgtattgt

SEQ ID NO: 240190 - DNA, 13 bp, Artificial Sequence
  Oligonucleotide for detection of SNP TSC0058575
acaatacgataac

SEQ ID NO: 240191 - DNA, 13 bp, Artificial Sequence
  Oligonucleotide for detection of SNP TSC0058576
tggtgaaaggaga

SEQ ID NO: 240192 - DNA, 13 bp, Artificial Sequence
  Oligonucleotide for detection of SNP TSC0058576
tctcctttcacca

SEQ ID NO: 240193 - DNA, 13 bp, Artificial Sequence
  Oligonucleotide for detection of SNP TSC0058576
tggtgagaggaga

SEQ ID NO: 240194 - DNA, 13 bp, Artificial Sequence
  Oligonucleotide for detection of SNP TSC0058576
tctcctctcacca

SEQ ID NO: 240195 - DNA, 13 bp, Artificial Sequence
  Oligonucleotide for detection of SNP TSC0058577
agggttagatagt

SEQ ID NO: 240196 - DNA, 13 bp, Artificial Sequence
  Oligonucleotide for detection of SNP TSC0058577
actatctaaccct

SEQ ID NO: 240197 - DNA, 13 bp, Artificial Sequence
  Oligonucleotide for detection of SNP TSC0058577
agggttggatagt

SEQ ID NO: 240198 - DNA, 13 bp, Artificial Sequence
  Oligonucleotide for detection of SNP TSC0058577
actatccaaccct

SEQ ID NO: 240199 - DNA, 13 bp, Artificial Sequence
  Oligonucleotide for detection of SNP TSC0058578
tttttaagtttgg

SEQ ID NO: 240200 - DNA, 13 bp, Artificial Sequence
  Oligonucleotide for detection of SNP TSC0058578
ccaaacttaaaaa

SEQ ID NO: 240201 - DNA, 13 bp, Artificial Sequence
  Oligonucleotide for detection of SNP TSC0058579
gattttatagtay

SEQ ID NO: 240202 - DNA, 13 bp, Artificial Sequence
  Oligonucleotide for detection of SNP TSC0058579
rtactataaaatc

SEQ ID NO: 240203 - DNA, 13 bp, Artificial Sequence
  Oligonucleotide for detection of SNP TSC0058579
gattttttagtay

SEQ ID NO: 240204 - DNA, 13 bp, Artificial Sequence
  Oligonucleotide for detection of SNP TSC0058579
rtactaaaaaatc

SEQ ID NO: 240205 - DNA, 13 bp, Artificial Sequence
  Oligonucleotide for detection of SNP TSC0058579
gtgttatagaaty

SEQ ID NO: 240206 - DNA, 13 bp, Artificial Sequence
  Oligonucleotide for detection of SNP TSC0058579
rattctataacac

SEQ ID NO: 240207 - DNA, 13 bp, Artificial Sequence
  Oligonucleotide for detection of SNP TSC0058579
gtgttagagaaty

SEQ ID NO: 240208 - DNA, 13 bp, Artificial Sequence
  Oligonucleotide for detection of SNP TSC0058579
rattctctaacac

SEQ ID NO: 240209 - DNA, 13 bp, Artificial Sequence
  Oligonucleotide for detection of SNP TSC0058581
gaatgaattattt

SEQ ID NO: 240210 - DNA, 13 bp, Artificial Sequence
  Oligonucleotide for detection of SNP TSC0058581
aaataattcattc

SEQ ID NO: 240211 - DNA, 13 bp, Artificial Sequence
  Oligonucleotide for detection of SNP TSC0058581
gaatgatttattt

SEQ ID NO: 240212 - DNA, 13 bp, Artificial Sequence
  Oligonucleotide for detection of SNP TSC0058581
aaataaatcattc

SEQ ID NO: 240213 - DNA, 13 bp, Artificial Sequence
  Oligonucleotide for detection of SNP TSC0058581
aagtaagttatty

SEQ ID NO: 240214 - DNA, 13 bp, Artificial Sequence
  Oligonucleotide for detection of SNP TSC0058581
raataacttactt

SEQ ID NO: 240215 - DNA, 13 bp, Artificial Sequence
  Oligonucleotide for detection of SNP TSC0058582
ttaagaagaaagg

SEQ ID NO: 240216 - DNA, 13 bp, Artificial Sequence
  Oligonucleotide for detection of SNP TSC0058582
cctttcttcttaa

SEQ ID NO: 240217 - DNA, 13 bp, Artificial Sequence
  Oligonucleotide for detection of SNP TSC0058582
ttaagaggaaagg

SEQ ID NO: 240218 - DNA, 13 bp, Artificial Sequence
  Oligonucleotide for detection of SNP TSC0058582
cctttcctcttaa

SEQ ID NO: 240219 - DNA, 13 bp, Artificial Sequence
  Oligonucleotide for detection of SNP TSC0058583
tttaagatttaay

SEQ ID NO: 240220 - DNA, 13 bp, Artificial Sequence
  Oligonucleotide for detection of SNP TSC0058583
rttaaatcttaaa

SEQ ID NO: 240221 - DNA, 13 bp, Artificial Sequence
  Oligonucleotide for detection of SNP TSC0058583
tttaaggtttaay

SEQ ID NO: 240222 - DNA, 13 bp, Artificial Sequence
  Oligonucleotide for detection of SNP TSC0058583
rttaaaccttaaa

SEQ ID NO: 240223 - DNA, 13 bp, Artificial Sequence
  Oligonucleotide for detection of SNP TSC0058584
atttgtgagtgtt

SEQ ID NO: 240224 - DNA, 13 bp, Artificial Sequence
  Oligonucleotide for detection of SNP TSC0058584
aacactcacaaat

SEQ ID NO: 240225 - DNA, 13 bp, Artificial Sequence
  Oligonucleotide for detection of SNP TSC0058584
atttgtaagtgtt

SEQ ID NO: 240226 - DNA, 13 bp, Artificial Sequence
  Oligonucleotide for detection of SNP TSC0058584
aacacttacaaat

SEQ ID NO: 240227 - DNA, 13 bp, Artificial Sequence
  Oligonucleotide for detection of SNP TSC0058585
gatagaattttay

SEQ ID NO: 240228 - DNA, 13 bp, Artificial Sequence
  Oligonucleotide for detection of SNP TSC0058585
rtaaaattctatc

SEQ ID NO: 240229 - DNA, 13 bp, Artificial Sequence
  Oligonucleotide for detection of SNP TSC0058585
gatagagttttay

SEQ ID NO: 240230 - DNA, 13 bp, Artificial Sequence
  Oligonucleotide for detection of SNP TSC0058585
rtaaaactctatc

SEQ ID NO: 240231 - DNA, 13 bp, Artificial Sequence
  Oligonucleotide for detection of SNP TSC0058589
tagatttaataty

SEQ ID NO: 240232 - DNA, 13 bp, Artificial Sequence
  Oligonucleotide for detection of SNP TSC0058589
ratattaaatcta

SEQ ID NO: 240233 - DNA, 13 bp, Artificial Sequence
  Oligonucleotide for detection of SNP TSC0058589
tagattgaataty

SEQ ID NO: 240234 - DNA, 13 bp, Artificial Sequence
  Oligonucleotide for detection of SNP TSC0058589
ratattcaatcta

SEQ ID NO: 240235 - DNA, 13 bp, Artificial Sequence
  Oligonucleotide for detection of SNP TSC0058589
tagatcgaataty

SEQ ID NO: 240236 - DNA, 13 bp, Artificial Sequence
  Oligonucleotide for detection of SNP TSC0058589
ratattcgatcta

SEQ ID NO: 240237 - DNA, 13 bp, Artificial Sequence
  Oligonucleotide for detection of SNP TSC0058589
ggtgttgggtttg

SEQ ID NO: 240238 - DNA, 13 bp, Artificial Sequence
  Oligonucleotide for detection of SNP TSC0058589
caaacccaacacc

SEQ ID NO: 240239 - DNA, 13 bp, Artificial Sequence
  Oligonucleotide for detection of SNP TSC0058589
ggtgtttggtttg

SEQ ID NO: 240240 - DNA, 13 bp, Artificial Sequence
  Oligonucleotide for detection of SNP TSC0058589
caaaccaaacacc

SEQ ID NO: 240241 - DNA, 13 bp, Artificial Sequence
  Oligonucleotide for detection of SNP TSC0058589
ggtgttcggtttg

SEQ ID NO: 240242 - DNA, 13 bp, Artificial Sequence
  Oligonucleotide for detection of SNP TSC0058589
caaaccgaacacc

SEQ ID NO: 240243 - DNA, 13 bp, Artificial Sequence
  Oligonucleotide for detection of SNP TSC0058592
aaattgatggtat

SEQ ID NO: 240244 - DNA, 13 bp, Artificial Sequence
  Oligonucleotide for detection of SNP TSC0058592
ataccatcaattt

SEQ ID NO: 240245 - DNA, 13 bp, Artificial Sequence
  Oligonucleotide for detection of SNP TSC0058592
aaattggtggtat

SEQ ID NO: 240246 - DNA, 13 bp, Artificial Sequence
  Oligonucleotide for detection of SNP TSC0058592
ataccaccaattt

SEQ ID NO: 240247 - DNA, 13 bp, Artificial Sequence
  Oligonucleotide for detection of SNP TSC0058593
tataaagaataaa

SEQ ID NO: 240248 - DNA, 13 bp, Artificial Sequence
  Oligonucleotide for detection of SNP TSC0058593
tttattctttata

SEQ ID NO: 240249 - DNA, 13 bp, Artificial Sequence
  Oligonucleotide for detection of SNP TSC0058598
ttttaagattaay

SEQ ID NO: 240250 - DNA, 13 bp, Artificial Sequence
  Oligonucleotide for detection of SNP TSC0058598
rttaatcttaaaa

SEQ ID NO: 240251 - DNA, 13 bp, Artificial Sequence
  Oligonucleotide for detection of SNP TSC0058598
ttttaaaattaay

SEQ ID NO: 240252 - DNA, 13 bp, Artificial Sequence
  Oligonucleotide for detection of SNP TSC0058598
rttaattttaaaa

SEQ ID NO: 240253 - DNA, 13 bp, Artificial Sequence
  Oligonucleotide for detection of SNP TSC0058599
aataataattaty

SEQ ID NO: 240254 - DNA, 13 bp, Artificial Sequence
  Oligonucleotide for detection of SNP TSC0058599
rataattattatt

SEQ ID NO: 240255 - DNA, 13 bp, Artificial Sequence
  Oligonucleotide for detection of SNP TSC0058599
aataattattaty

SEQ ID NO: 240256 - DNA, 13 bp, Artificial Sequence
  Oligonucleotide for detection of SNP TSC0058599
rataataattatt

SEQ ID NO: 240257 - DNA, 13 bp, Artificial Sequence
  Oligonucleotide for detection of SNP TSC0058599
aataatgattaty

SEQ ID NO: 240258 - DNA, 13 bp, Artificial Sequence
  Oligonucleotide for detection of SNP TSC0058599
rataatcattatt

SEQ ID NO: 240259 - DNA, 13 bp, Artificial Sequence
  Oligonucleotide for detection of SNP TSC0058599
gatgattattatt

SEQ ID NO: 240260 - DNA, 13 bp, Artificial Sequence
  Oligonucleotide for detection of SNP TSC0058599
aataataatcatc

SEQ ID NO: 240261 - DNA, 13 bp, Artificial Sequence
  Oligonucleotide for detection of SNP TSC0058599
gatgatgattatt

SEQ ID NO: 240262 - DNA, 13 bp, Artificial Sequence
  Oligonucleotide for detection of SNP TSC0058599
aataatcatcatc

SEQ ID NO: 240263 - DNA, 13 bp, Artificial Sequence
  Oligonucleotide for detection of SNP TSC0058599
gatgataattatt

SEQ ID NO: 240264 - DNA, 13 bp, Artificial Sequence
  Oligonucleotide for detection of SNP TSC0058599
aataattatcatc

SEQ ID NO: 240265 - DNA, 13 bp, Artificial Sequence
  Oligonucleotide for detection of SNP TSC0058600
aaaagatgaaaat

SEQ ID NO: 240266 - DNA, 13 bp, Artificial Sequence
  Oligonucleotide for detection of SNP TSC0058600
attttcatctttt

SEQ ID NO: 240267 - DNA, 13 bp, Artificial Sequence
  Oligonucleotide for detection of SNP TSC0058600
aaaagaggaaaat

SEQ ID NO: 240268 - DNA, 13 bp, Artificial Sequence
  Oligonucleotide for detection of SNP TSC0058600
attttcctctttt

SEQ ID NO: 240269 - DNA, 13 bp, Artificial Sequence
  Oligonucleotide for detection of SNP TSC0058600
aaaagaagaaaat

SEQ ID NO: 240270 - DNA, 13 bp, Artificial Sequence
  Oligonucleotide for detection of SNP TSC0058600
attttcttctttt

SEQ ID NO: 240271 - DNA, 13 bp, Artificial Sequence
  Oligonucleotide for detection of SNP TSC0058601
taaatataatttt

SEQ ID NO: 240272 - DNA, 13 bp, Artificial Sequence
  Oligonucleotide for detection of SNP TSC0058601
aaaattatattta

SEQ ID NO: 240273 - DNA, 13 bp, Artificial Sequence
  Oligonucleotide for detection of SNP TSC0058601
taaatagaatttt

SEQ ID NO: 240274 - DNA, 13 bp, Artificial Sequence
  Oligonucleotide for detection of SNP TSC0058601
aaaattctattta

SEQ ID NO: 240275 - DNA, 13 bp, Artificial Sequence
  Oligonucleotide for detection of SNP TSC0058601
aaaattatatttg

SEQ ID NO: 240276 - DNA, 13 bp, Artificial Sequence
  Oligonucleotide for detection of SNP TSC0058601
caaatataatttt

SEQ ID NO: 240277 - DNA, 13 bp, Artificial Sequence
  Oligonucleotide for detection of SNP TSC0058601
aaaattttatttg

SEQ ID NO: 240278 - DNA, 13 bp, Artificial Sequence
  Oligonucleotide for detection of SNP TSC0058601
caaataaaatttt

SEQ ID NO: 240279 - DNA, 13 bp, Artificial Sequence
  Oligonucleotide for detection of SNP TSC0058604
ttattttgatggt

SEQ ID NO: 240280 - DNA, 13 bp, Artificial Sequence
  Oligonucleotide for detection of SNP TSC0058604
accatcaaaataa

SEQ ID NO: 240281 - DNA, 13 bp, Artificial Sequence
  Oligonucleotide for detection of SNP TSC0058604
ttatttcgatggt

SEQ ID NO: 240282 - DNA, 13 bp, Artificial Sequence
  Oligonucleotide for detection of SNP TSC0058604
accatcgaaataa

SEQ ID NO: 240283 - DNA, 13 bp, Artificial Sequence
  Oligonucleotide for detection of SNP TSC0058604
attattgaagtga

SEQ ID NO: 240284 - DNA, 13 bp, Artificial Sequence
  Oligonucleotide for detection of SNP TSC0058604
tcacttcaataat

SEQ ID NO: 240285 - DNA, 13 bp, Artificial Sequence
  Oligonucleotide for detection of SNP TSC0058604
attattaaagtga

SEQ ID NO: 240286 - DNA, 13 bp, Artificial Sequence
  Oligonucleotide for detection of SNP TSC0058604
tcactttaataat

SEQ ID NO: 240287 - DNA, 13 bp, Artificial Sequence
  Oligonucleotide for detection of SNP TSC0058604
attatcgaagtga

SEQ ID NO: 240288 - DNA, 13 bp, Artificial Sequence
  Oligonucleotide for detection of SNP TSC0058604
tcacttcgataat

SEQ ID NO: 240289 - DNA, 13 bp, Artificial Sequence
  Oligonucleotide for detection of SNP TSC0058605
attattttttata

SEQ ID NO: 240290 - DNA, 13 bp, Artificial Sequence
  Oligonucleotide for detection of SNP TSC0058605
tataaaaaataat

SEQ ID NO: 240291 - DNA, 13 bp, Artificial Sequence
  Oligonucleotide for detection of SNP TSC0058605
tgtagatagtggt

SEQ ID NO: 240292 - DNA, 13 bp, Artificial Sequence
  Oligonucleotide for detection of SNP TSC0058605
accactatctaca

SEQ ID NO: 240293 - DNA, 13 bp, Artificial Sequence
  Oligonucleotide for detection of SNP TSC0058605
tgtagagagtggt

SEQ ID NO: 240294 - DNA, 13 bp, Artificial Sequence
  Oligonucleotide for detection of SNP TSC0058605
accactctctaca

SEQ ID NO: 240295 - DNA, 13 bp, Artificial Sequence
  Oligonucleotide for detection of SNP TSC0058607
ttgttttgtttgt

SEQ ID NO: 240296 - DNA, 13 bp, Artificial Sequence
  Oligonucleotide for detection of SNP TSC0058607
acaaacaaaacaa

SEQ ID NO: 240297 - DNA, 13 bp, Artificial Sequence
  Oligonucleotide for detection of SNP TSC0058607
ttgtttggtttgt

SEQ ID NO: 240298 - DNA, 13 bp, Artificial Sequence
  Oligonucleotide for detection of SNP TSC0058607
acaaaccaaacaa

SEQ ID NO: 240299 - DNA, 13 bp, Artificial Sequence
  Oligonucleotide for detection of SNP TSC0058607
ataaataaaataa

SEQ ID NO: 240300 - DNA, 13 bp, Artificial Sequence
  Oligonucleotide for detection of SNP TSC0058607
ttattttatttat

SEQ ID NO: 240301 - DNA, 13 bp, Artificial Sequence
  Oligonucleotide for detection of SNP TSC0058607
ataaattaaataa

SEQ ID NO: 240302 - DNA, 13 bp, Artificial Sequence
  Oligonucleotide for detection of SNP TSC0058607
ttatttaatttat

SEQ ID NO: 240303 - DNA, 13 bp, Artificial Sequence
  Oligonucleotide for detection of SNP TSC0058614
tatttatttgtty

SEQ ID NO: 240304 - DNA, 13 bp, Artificial Sequence
  Oligonucleotide for detection of SNP TSC0058614
raacaaataaata

SEQ ID NO: 240305 - DNA, 13 bp, Artificial Sequence
  Oligonucleotide for detection of SNP TSC0058614
tatttagttgtty

SEQ ID NO: 240306 - DNA, 13 bp, Artificial Sequence
  Oligonucleotide for detection of SNP TSC0058614
raacaactaaata

SEQ ID NO: 240307 - DNA, 13 bp, Artificial Sequence
  Oligonucleotide for detection of SNP TSC0058614
gagtaagtgaatg

SEQ ID NO: 240308 - DNA, 13 bp, Artificial Sequence
  Oligonucleotide for detection of SNP TSC0058614
cattcacttactc

SEQ ID NO: 240309 - DNA, 13 bp, Artificial Sequence
  Oligonucleotide for detection of SNP TSC0058614
gagtaattgaatg

SEQ ID NO: 240310 - DNA, 13 bp, Artificial Sequence
  Oligonucleotide for detection of SNP TSC0058614
cattcaattactc

SEQ ID NO: 240311 - DNA, 13 bp, Artificial Sequence
  Oligonucleotide for detection of SNP TSC0058616
taagttaatatty

SEQ ID NO: 240312 - DNA, 13 bp, Artificial Sequence
  Oligonucleotide for detection of SNP TSC0058616
raatattaactta

SEQ ID NO: 240313 - DNA, 13 bp, Artificial Sequence
  Oligonucleotide for detection of SNP TSC0058616
taagttgatatty

SEQ ID NO: 240314 - DNA, 13 bp, Artificial Sequence
  Oligonucleotide for detection of SNP TSC0058616
raatatcaactta

SEQ ID NO: 240315 - DNA, 13 bp, Artificial Sequence
  Oligonucleotide for detection of SNP TSC0058620
tataatggatgtt

SEQ ID NO: 240316 - DNA, 13 bp, Artificial Sequence
  Oligonucleotide for detection of SNP TSC0058620
aacatccattata

SEQ ID NO: 240317 - DNA, 13 bp, Artificial Sequence
  Oligonucleotide for detection of SNP TSC0058620
tataatagatgtt

SEQ ID NO: 240318 - DNA, 13 bp, Artificial Sequence
  Oligonucleotide for detection of SNP TSC0058620
aacatctattata

SEQ ID NO: 240319 - DNA, 13 bp, Artificial Sequence
  Oligonucleotide for detection of SNP TSC0058620
tataacggatgtt

SEQ ID NO: 240320 - DNA, 13 bp, Artificial Sequence
  Oligonucleotide for detection of SNP TSC0058620
aacatccgttata

SEQ ID NO: 240321 - DNA, 13 bp, Artificial Sequence
  Oligonucleotide for detection of SNP TSC0058621
ggtattatggaga

SEQ ID NO: 240322 - DNA, 13 bp, Artificial Sequence
  Oligonucleotide for detection of SNP TSC0058621
tctccataatacc

SEQ ID NO: 240323 - DNA, 13 bp, Artificial Sequence
  Oligonucleotide for detection of SNP TSC0058621
ggtattttggaga

SEQ ID NO: 240324 - DNA, 13 bp, Artificial Sequence
  Oligonucleotide for detection of SNP TSC0058621
tctccaaaatacc

SEQ ID NO: 240325 - DNA, 13 bp, Artificial Sequence
  Oligonucleotide for detection of SNP TSC0058621
tttttatgatgty

SEQ ID NO: 240326 - DNA, 13 bp, Artificial Sequence
  Oligonucleotide for detection of SNP TSC0058621
racatcataaaaa

SEQ ID NO: 240327 - DNA, 13 bp, Artificial Sequence
  Oligonucleotide for detection of SNP TSC0058621
tttttaggatgty

SEQ ID NO: 240328 - DNA, 13 bp, Artificial Sequence
  Oligonucleotide for detection of SNP TSC0058621
racatcctaaaaa

SEQ ID NO: 240329 - DNA, 13 bp, Artificial Sequence
  Oligonucleotide for detection of SNP TSC0004731
tttttagtattgy

SEQ ID NO: 240330 - DNA, 13 bp, Artificial Sequence
  Oligonucleotide for detection of SNP TSC0004731
rcaatactaaaaa

SEQ ID NO: 240331 - DNA, 13 bp, Artificial Sequence
  Oligonucleotide for detection of SNP TSC0058627
tgaatttgaagag

SEQ ID NO: 240332 - DNA, 13 bp, Artificial Sequence
  Oligonucleotide for detection of SNP TSC0058627
ctcttcaaattca

SEQ ID NO: 240333 - DNA, 13 bp, Artificial Sequence
  Oligonucleotide for detection of SNP TSC0058627
tgaattggaagag

SEQ ID NO: 240334 - DNA, 13 bp, Artificial Sequence
  Oligonucleotide for detection of SNP TSC0058627
ctcttccaattca

SEQ ID NO: 240335 - DNA, 13 bp, Artificial Sequence
  Oligonucleotide for detection of SNP TSC0058628
tatgattgtgata

SEQ ID NO: 240336 - DNA, 13 bp, Artificial Sequence
  Oligonucleotide for detection of SNP TSC0058628
tatcacaatcata

SEQ ID NO: 240337 - DNA, 13 bp, Artificial Sequence
  Oligonucleotide for detection of SNP TSC0058628
tatgatcgtgata

SEQ ID NO: 240338 - DNA, 13 bp, Artificial Sequence
  Oligonucleotide for detection of SNP TSC0058628
tatcacgatcata

SEQ ID NO: 240339 - DNA, 13 bp, Artificial Sequence
  Oligonucleotide for detection of SNP TSC0058628
tgttatggttatg

SEQ ID NO: 240340 - DNA, 13 bp, Artificial Sequence
  Oligonucleotide for detection of SNP TSC0058628
cataaccataaca

SEQ ID NO: 240341 - DNA, 13 bp, Artificial Sequence
  Oligonucleotide for detection of SNP TSC0058628
tgttatagttatg

SEQ ID NO: 240342 - DNA, 13 bp, Artificial Sequence
  Oligonucleotide for detection of SNP TSC0058628
cataactataaca

SEQ ID NO: 240343 - DNA, 13 bp, Artificial Sequence
  Oligonucleotide for detection of SNP TSC0058628
tgttacggttatg

SEQ ID NO: 240344 - DNA, 13 bp, Artificial Sequence
  Oligonucleotide for detection of SNP TSC0058628
cataaccgtaaca

SEQ ID NO: 240345 - DNA, 13 bp, Artificial Sequence
  Oligonucleotide for detection of SNP TSC0058629
ttttgtaaaatta

SEQ ID NO: 240346 - DNA, 13 bp, Artificial Sequence
  Oligonucleotide for detection of SNP TSC0058629
taattttacaaaa

SEQ ID NO: 240347 - DNA, 13 bp, Artificial Sequence
  Oligonucleotide for detection of SNP TSC0058629
ttttgtgaaatta

SEQ ID NO: 240348 - DNA, 13 bp, Artificial Sequence
  Oligonucleotide for detection of SNP TSC0058629
taatttcacaaaa

SEQ ID NO: 240349 - DNA, 13 bp, Artificial Sequence
  Oligonucleotide for detection of SNP TSC0058631
ggaaataataata

SEQ ID NO: 240350 - DNA, 13 bp, Artificial Sequence
  Oligonucleotide for detection of SNP TSC0058631
tattattatttcc

SEQ ID NO: 240351 - DNA, 13 bp, Artificial Sequence
  Oligonucleotide for detection of SNP TSC0058631
ggaaatgataata

SEQ ID NO: 240352 - DNA, 13 bp, Artificial Sequence
  Oligonucleotide for detection of SNP TSC0058631
tattatcatttcc

SEQ ID NO: 240353 - DNA, 13 bp, Artificial Sequence
  Oligonucleotide for detection of SNP TSC0058632
gatttgatttgag

SEQ ID NO: 240354 - DNA, 13 bp, Artificial Sequence
  Oligonucleotide for detection of SNP TSC0058632
ctcaaatcaaatc

SEQ ID NO: 240355 - DNA, 13 bp, Artificial Sequence
  Oligonucleotide for detection of SNP TSC0058633
tgtatagagtagg

SEQ ID NO: 240356 - DNA, 13 bp, Artificial Sequence
  Oligonucleotide for detection of SNP TSC0058633
cctactctataca

SEQ ID NO: 240357 - DNA, 13 bp, Artificial Sequence
  Oligonucleotide for detection of SNP TSC0058633
tgtatatagtagg

SEQ ID NO: 240358 - DNA, 13 bp, Artificial Sequence
  Oligonucleotide for detection of SNP TSC0058633
cctactatataca

SEQ ID NO: 240359 - DNA, 13 bp, Artificial Sequence
  Oligonucleotide for detection of SNP TSC0058636
tagggaagaagta

SEQ ID NO: 240360 - DNA, 13 bp, Artificial Sequence
  Oligonucleotide for detection of SNP TSC0058636
tacttcttcccta

SEQ ID NO: 240361 - DNA, 13 bp, Artificial Sequence
  Oligonucleotide for detection of SNP TSC0058636
tagggatgaagta

SEQ ID NO: 240362 - DNA, 13 bp, Artificial Sequence
  Oligonucleotide for detection of SNP TSC0058636
tacttcatcccta

SEQ ID NO: 240363 - DNA, 13 bp, Artificial Sequence
  Oligonucleotide for detection of SNP TSC0058636
tagggaggaagta

SEQ ID NO: 240364 - DNA, 13 bp, Artificial Sequence
  Oligonucleotide for detection of SNP TSC0058636
tacttcctcccta

SEQ ID NO: 240365 - DNA, 13 bp, Artificial Sequence
  Oligonucleotide for detection of SNP TSC0058636
tagggacgaagta

SEQ ID NO: 240366 - DNA, 13 bp, Artificial Sequence
  Oligonucleotide for detection of SNP TSC0058636
tacttcgtcccta

SEQ ID NO: 240367 - DNA, 13 bp, Artificial Sequence
  Oligonucleotide for detection of SNP TSC0058637
atgatgataatat

SEQ ID NO: 240368 - DNA, 13 bp, Artificial Sequence
  Oligonucleotide for detection of SNP TSC0058637
atattatcatcat

SEQ ID NO: 240369 - DNA, 13 bp, Artificial Sequence
  Oligonucleotide for detection of SNP TSC0058637
atgatgttaatat

SEQ ID NO: 240370 - DNA, 13 bp, Artificial Sequence
  Oligonucleotide for detection of SNP TSC0058637
atattaacatcat

SEQ ID NO: 240371 - DNA, 13 bp, Artificial Sequence
  Oligonucleotide for detection of SNP TSC0058637
atattagtattat

SEQ ID NO: 240372 - DNA, 13 bp, Artificial Sequence
  Oligonucleotide for detection of SNP TSC0058637
ataatactaatat

SEQ ID NO: 240373 - DNA, 13 bp, Artificial Sequence
  Oligonucleotide for detection of SNP TSC0058637
atattaatattat

SEQ ID NO: 240374 - DNA, 13 bp, Artificial Sequence
  Oligonucleotide for detection of SNP TSC0058637
ataatattaatat

SEQ ID NO: 240375 - DNA, 13 bp, Artificial Sequence
  Oligonucleotide for detection of SNP TSC0058638
agattattgatty

SEQ ID NO: 240376 - DNA, 13 bp, Artificial Sequence
  Oligonucleotide for detection of SNP TSC0058638
raatcaataatct

SEQ ID NO: 240377 - DNA, 13 bp, Artificial Sequence
  Oligonucleotide for detection of SNP TSC0058638
agattagtgatty

SEQ ID NO: 240378 - DNA, 13 bp, Artificial Sequence
  Oligonucleotide for detection of SNP TSC0058638
raatcactaatct

SEQ ID NO: 240379 - DNA, 13 bp, Artificial Sequence
  Oligonucleotide for detection of SNP TSC0058638
agattatcgatty

SEQ ID NO: 240380 - DNA, 13 bp, Artificial Sequence
  Oligonucleotide for detection of SNP TSC0058638
raatcgataatct

SEQ ID NO: 240381 - DNA, 13 bp, Artificial Sequence
  Oligonucleotide for detection of SNP TSC0058638
agattagcgatty

SEQ ID NO: 240382 - DNA, 13 bp, Artificial Sequence
  Oligonucleotide for detection of SNP TSC0058638
raatcgctaatct

SEQ ID NO: 240383 - DNA, 13 bp, Artificial Sequence
  Oligonucleotide for detection of SNP TSC0058638
gaattgttaattt

SEQ ID NO: 240384 - DNA, 13 bp, Artificial Sequence
  Oligonucleotide for detection of SNP TSC0058638
aaattaacaattc

SEQ ID NO: 240385 - DNA, 13 bp, Artificial Sequence
  Oligonucleotide for detection of SNP TSC0058638
gaatcgataattt

SEQ ID NO: 240386 - DNA, 13 bp, Artificial Sequence
  Oligonucleotide for detection of SNP TSC0058638
aaattatcgattc

SEQ ID NO: 240387 - DNA, 13 bp, Artificial Sequence
  Oligonucleotide for detection of SNP TSC0058638
gaatcgttaattt

SEQ ID NO: 240388 - DNA, 13 bp, Artificial Sequence
  Oligonucleotide for detection of SNP TSC0058638
aaattaacgattc

SEQ ID NO: 240389 - DNA, 13 bp, Artificial Sequence
  Oligonucleotide for detection of SNP TSC0058639
tttgggttatttg

SEQ ID NO: 240390 - DNA, 13 bp, Artificial Sequence
  Oligonucleotide for detection of SNP TSC0058639
caaataacccaaa

SEQ ID NO: 240391 - DNA, 13 bp, Artificial Sequence
  Oligonucleotide for detection of SNP TSC0058639
tagatattttagg

SEQ ID NO: 240392 - DNA, 13 bp, Artificial Sequence
  Oligonucleotide for detection of SNP TSC0058639
cctaaaatatcta

SEQ ID NO: 240393 - DNA, 13 bp, Artificial Sequence
  Oligonucleotide for detection of SNP TSC0058639
tagataatttagg

SEQ ID NO: 240394 - DNA, 13 bp, Artificial Sequence
  Oligonucleotide for detection of SNP TSC0058639
cctaaattatcta

SEQ ID NO: 240395 - DNA, 13 bp, Artificial Sequence
  Oligonucleotide for detection of SNP TSC0058640
ttttggttttgty

SEQ ID NO: 240396 - DNA, 13 bp, Artificial Sequence
  Oligonucleotide for detection of SNP TSC0058640
racaaaaccaaaa

SEQ ID NO: 240397 - DNA, 13 bp, Artificial Sequence
  Oligonucleotide for detection of SNP TSC0058640
ttttgggtttgty

SEQ ID NO: 240398 - DNA, 13 bp, Artificial Sequence
  Oligonucleotide for detection of SNP TSC0058640
racaaacccaaaa

SEQ ID NO: 240399 - DNA, 13 bp, Artificial Sequence
  Oligonucleotide for detection of SNP TSC0058640
gatagaattaggg

SEQ ID NO: 240400 - DNA, 13 bp, Artificial Sequence
  Oligonucleotide for detection of SNP TSC0058640
ccctaattctatc

SEQ ID NO: 240401 - DNA, 13 bp, Artificial Sequence
  Oligonucleotide for detection of SNP TSC0058640
gatagatttaggg

SEQ ID NO: 240402 - DNA, 13 bp, Artificial Sequence
  Oligonucleotide for detection of SNP TSC0058640
ccctaaatctatc

SEQ ID NO: 240403 - DNA, 13 bp, Artificial Sequence
  Oligonucleotide for detection of SNP TSC0058641
ttgaatagagagt

SEQ ID NO: 240404 - DNA, 13 bp, Artificial Sequence
  Oligonucleotide for detection of SNP TSC0058641
actctctattcaa

SEQ ID NO: 240405 - DNA, 13 bp, Artificial Sequence
  Oligonucleotide for detection of SNP TSC0058641
ttgaatggagagt

SEQ ID NO: 240406 - DNA, 13 bp, Artificial Sequence
  Oligonucleotide for detection of SNP TSC0058641
actctccattcaa

SEQ ID NO: 240407 - DNA, 13 bp, Artificial Sequence
  Oligonucleotide for detection of SNP TSC0058641
ttgaacggagagt

SEQ ID NO: 240408 - DNA, 13 bp, Artificial Sequence
  Oligonucleotide for detection of SNP TSC0058641
actctccgttcaa

SEQ ID NO: 240409 - DNA, 13 bp, Artificial Sequence
  Oligonucleotide for detection of SNP TSC0058641
attttttgtttag

SEQ ID NO: 240410 - DNA, 13 bp, Artificial Sequence
  Oligonucleotide for detection of SNP TSC0058641
ctaaacaaaaaat

SEQ ID NO: 240411 - DNA, 13 bp, Artificial Sequence
  Oligonucleotide for detection of SNP TSC0058641
atttttcgtttag

SEQ ID NO: 240412 - DNA, 13 bp, Artificial Sequence
  Oligonucleotide for detection of SNP TSC0058641
ctaaacgaaaaat

SEQ ID NO: 240413 - DNA, 13 bp, Artificial Sequence
  Oligonucleotide for detection of SNP TSC0058644
ttaataataagay

SEQ ID NO: 240414 - DNA, 13 bp, Artificial Sequence
  Oligonucleotide for detection of SNP TSC0058644
rtcttattattaa

SEQ ID NO: 240415 - DNA, 13 bp, Artificial Sequence
  Oligonucleotide for detection of SNP TSC0058644
ttaatagtaagay

SEQ ID NO: 240416 - DNA, 13 bp, Artificial Sequence
  Oligonucleotide for detection of SNP TSC0058644
rtcttactattaa

SEQ ID NO: 240417 - DNA, 13 bp, Artificial Sequence
  Oligonucleotide for detection of SNP TSC0058645
ttatagtttgtag

SEQ ID NO: 240418 - DNA, 13 bp, Artificial Sequence
  Oligonucleotide for detection of SNP TSC0058645
ctacaaactataa

SEQ ID NO: 240419 - DNA, 13 bp, Artificial Sequence
  Oligonucleotide for detection of SNP TSC0058645
ttataggttgtag

SEQ ID NO: 240420 - DNA, 13 bp, Artificial Sequence
  Oligonucleotide for detection of SNP TSC0058645
ctacaacctataa

SEQ ID NO: 240421 - DNA, 13 bp, Artificial Sequence
  Oligonucleotide for detection of SNP TSC0058645
ttgtagattatga

SEQ ID NO: 240422 - DNA, 13 bp, Artificial Sequence
  Oligonucleotide for detection of SNP TSC0058645
tcataatctacaa

SEQ ID NO: 240423 - DNA, 13 bp, Artificial Sequence
  Oligonucleotide for detection of SNP TSC0058645
ttgtagtttatga

SEQ ID NO: 240424 - DNA, 13 bp, Artificial Sequence
  Oligonucleotide for detection of SNP TSC0058645
tcataaactacaa

SEQ ID NO: 240425 - DNA, 13 bp, Artificial Sequence
  Oligonucleotide for detection of SNP TSC0058646
ttatttggggtaa

SEQ ID NO: 240426 - DNA, 13 bp, Artificial Sequence
  Oligonucleotide for detection of SNP TSC0058646
ttaccccaaataa

SEQ ID NO: 240427 - DNA, 13 bp, Artificial Sequence
  Oligonucleotide for detection of SNP TSC0058646
ttatttagggtaa

SEQ ID NO: 240428 - DNA, 13 bp, Artificial Sequence
  Oligonucleotide for detection of SNP TSC0058646
ttaccctaaataa

SEQ ID NO: 240429 - DNA, 13 bp, Artificial Sequence
  Oligonucleotide for detection of SNP TSC0058646
ttattcggggtaa

SEQ ID NO: 240430 - DNA, 13 bp, Artificial Sequence
  Oligonucleotide for detection of SNP TSC0058646
ttaccccgaataa

SEQ ID NO: 240431 - DNA, 13 bp, Artificial Sequence
  Oligonucleotide for detection of SNP TSC0058647
aattaatgtatat

SEQ ID NO: 240432 - DNA, 13 bp, Artificial Sequence
  Oligonucleotide for detection of SNP TSC0058647
atatacattaatt

SEQ ID NO: 240433 - DNA, 13 bp, Artificial Sequence
  Oligonucleotide for detection of SNP TSC0058647
aattaacgtatat

SEQ ID NO: 240434 - DNA, 13 bp, Artificial Sequence
  Oligonucleotide for detection of SNP TSC0058647
atatacgttaatt

SEQ ID NO: 240435 - DNA, 13 bp, Artificial Sequence
  Oligonucleotide for detection of SNP TSC0058648
gatatagttattt

SEQ ID NO: 240436 - DNA, 13 bp, Artificial Sequence
  Oligonucleotide for detection of SNP TSC0058648
aaataactatatc

SEQ ID NO: 240437 - DNA, 13 bp, Artificial Sequence
  Oligonucleotide for detection of SNP TSC0005863
aaatagaatttta

SEQ ID NO: 240438 - DNA, 13 bp, Artificial Sequence
  Oligonucleotide for detection of SNP TSC0005863
taaaattctattt

SEQ ID NO: 240439 - DNA, 13 bp, Artificial Sequence
  Oligonucleotide for detection of SNP TSC0005863
aaatagtatttta

SEQ ID NO: 240440 - DNA, 13 bp, Artificial Sequence
  Oligonucleotide for detection of SNP TSC0005863
taaaatactattt

SEQ ID NO: 240441 - DNA, 13 bp, Artificial Sequence
  Oligonucleotide for detection of SNP TSC0005863
taaggttttgttt

SEQ ID NO: 240442 - DNA, 13 bp, Artificial Sequence
  Oligonucleotide for detection of SNP TSC0005863
aaacaaaacctta

SEQ ID NO: 240443 - DNA, 13 bp, Artificial Sequence
  Oligonucleotide for detection of SNP TSC0005863
taaggtgttgttt

SEQ ID NO: 240444 - DNA, 13 bp, Artificial Sequence
  Oligonucleotide for detection of SNP TSC0005863
aaacaacacctta

SEQ ID NO: 240445 - DNA, 13 bp, Artificial Sequence
  Oligonucleotide for detection of SNP TSC0005864
tagagatgatagg

SEQ ID NO: 240446 - DNA, 13 bp, Artificial Sequence
  Oligonucleotide for detection of SNP TSC0005864
cctatcatctcta

SEQ ID NO: 240447 - DNA, 13 bp, Artificial Sequence
  Oligonucleotide for detection of SNP TSC0005864
tagagacgatagg

SEQ ID NO: 240448 - DNA, 13 bp, Artificial Sequence
  Oligonucleotide for detection of SNP TSC0005864
cctatcgtctcta

SEQ ID NO: 240449 - DNA, 13 bp, Artificial Sequence
  Oligonucleotide for detection of SNP TSC0058655
atataaatgtagt

SEQ ID NO: 240450 - DNA, 13 bp, Artificial Sequence
  Oligonucleotide for detection of SNP TSC0058655
actacatttatat

SEQ ID NO: 240451 - DNA, 13 bp, Artificial Sequence
  Oligonucleotide for detection of SNP TSC0058655
atataagtgtagt

SEQ ID NO: 240452 - DNA, 13 bp, Artificial Sequence
  Oligonucleotide for detection of SNP TSC0058655
actacacttatat

SEQ ID NO: 240453 - DNA, 13 bp, Artificial Sequence
  Oligonucleotide for detection of SNP TSC0058658
gaataaaaaagty

SEQ ID NO: 240454 - DNA, 13 bp, Artificial Sequence
  Oligonucleotide for detection of SNP TSC0058658
racttttttattc

SEQ ID NO: 240455 - DNA, 13 bp, Artificial Sequence
  Oligonucleotide for detection of SNP TSC0058658
gaataataaagty

SEQ ID NO: 240456 - DNA, 13 bp, Artificial Sequence
  Oligonucleotide for detection of SNP TSC0058658
ractttattattc

SEQ ID NO: 240457 - DNA, 13 bp, Artificial Sequence
  Oligonucleotide for detection of SNP TSC0006335
ttttgaatgattt

SEQ ID NO: 240458 - DNA, 13 bp, Artificial Sequence
  Oligonucleotide for detection of SNP TSC0006335
aaatcattcaaaa

SEQ ID NO: 240459 - DNA, 13 bp, Artificial Sequence
  Oligonucleotide for detection of SNP TSC0006335
ttttgagtgattt

SEQ ID NO: 240460 - DNA, 13 bp, Artificial Sequence
  Oligonucleotide for detection of SNP TSC0006335
aaatcactcaaaa

SEQ ID NO: 240461 - DNA, 13 bp, Artificial Sequence
  Oligonucleotide for detection of SNP TSC0058662
ttgtagtggtatg

SEQ ID NO: 240462 - DNA, 13 bp, Artificial Sequence
  Oligonucleotide for detection of SNP TSC0058662
cataccactacaa

SEQ ID NO: 240463 - DNA, 13 bp, Artificial Sequence
  Oligonucleotide for detection of SNP TSC0058662
ttgtaggggtatg

SEQ ID NO: 240464 - DNA, 13 bp, Artificial Sequence
  Oligonucleotide for detection of SNP TSC0058662
catacccctacaa

SEQ ID NO: 240465 - DNA, 13 bp, Artificial Sequence
  Oligonucleotide for detection of SNP TSC0058664
taggagaatagtg

SEQ ID NO: 240466 - DNA, 13 bp, Artificial Sequence
  Oligonucleotide for detection of SNP TSC0058664
cactattctccta

SEQ ID NO: 240467 - DNA, 13 bp, Artificial Sequence
  Oligonucleotide for detection of SNP TSC0058664
taggaggatagtg

SEQ ID NO: 240468 - DNA, 13 bp, Artificial Sequence
  Oligonucleotide for detection of SNP TSC0058664
cactatcctccta

SEQ ID NO: 240469 - DNA, 13 bp, Artificial Sequence
  Oligonucleotide for detection of SNP TSC0058665
atattgatggagg

SEQ ID NO: 240470 - DNA, 13 bp, Artificial Sequence
  Oligonucleotide for detection of SNP TSC0058665
cctccatcaatat

SEQ ID NO: 240471 - DNA, 13 bp, Artificial Sequence
  Oligonucleotide for detection of SNP TSC0058665
atattgttggagg

SEQ ID NO: 240472 - DNA, 13 bp, Artificial Sequence
  Oligonucleotide for detection of SNP TSC0058665
cctccaacaatat

SEQ ID NO: 240473 - DNA, 13 bp, Artificial Sequence
  Oligonucleotide for detection of SNP TSC0058668
agtggaattttta

SEQ ID NO: 240474 - DNA, 13 bp, Artificial Sequence
  Oligonucleotide for detection of SNP TSC0058668
taaaaattccact

SEQ ID NO: 240475 - DNA, 13 bp, Artificial Sequence
  Oligonucleotide for detection of SNP TSC0058668
agtggatttttta

SEQ ID NO: 240476 - DNA, 13 bp, Artificial Sequence
  Oligonucleotide for detection of SNP TSC0058668
taaaaaatccact

SEQ ID NO: 240477 - DNA, 13 bp, Artificial Sequence
  Oligonucleotide for detection of SNP TSC0058668
tgagggttttatt

SEQ ID NO: 240478 - DNA, 13 bp, Artificial Sequence
  Oligonucleotide for detection of SNP TSC0058668
aataaaaccctca

SEQ ID NO: 240479 - DNA, 13 bp, Artificial Sequence
  Oligonucleotide for detection of SNP TSC0058668
tgaggggtttatt

SEQ ID NO: 240480 - DNA, 13 bp, Artificial Sequence
  Oligonucleotide for detection of SNP TSC0058668
aataaacccctca

SEQ ID NO: 240481 - DNA, 13 bp, Artificial Sequence
  Oligonucleotide for detection of SNP TSC0058669
gtgggaatttaaa

SEQ ID NO: 240482 - DNA, 13 bp, Artificial Sequence
  Oligonucleotide for detection of SNP TSC0058669
tttaaattcccac

SEQ ID NO: 240483 - DNA, 13 bp, Artificial Sequence
  Oligonucleotide for detection of SNP TSC0058669
gtgggagtttaaa

SEQ ID NO: 240484 - DNA, 13 bp, Artificial Sequence
  Oligonucleotide for detection of SNP TSC0058669
tttaaactcccac

SEQ ID NO: 240485 - DNA, 13 bp, Artificial Sequence
  Oligonucleotide for detection of SNP TSC0058670
tataatatttacg

SEQ ID NO: 240486 - DNA, 13 bp, Artificial Sequence
  Oligonucleotide for detection of SNP TSC0058670
cgtaaatattata

SEQ ID NO: 240487 - DNA, 13 bp, Artificial Sequence
  Oligonucleotide for detection of SNP TSC0058670
tataatgtttacg

SEQ ID NO: 240488 - DNA, 13 bp, Artificial Sequence
  Oligonucleotide for detection of SNP TSC0058670
cgtaaacattata

SEQ ID NO: 240489 - DNA, 13 bp, Artificial Sequence
  Oligonucleotide for detection of SNP TSC0058670
tataacgtttacg

SEQ ID NO: 240490 - DNA, 13 bp, Artificial Sequence
  Oligonucleotide for detection of SNP TSC0058670
cgtaaacgttata

SEQ ID NO: 240491 - DNA, 13 bp, Artificial Sequence
  Oligonucleotide for detection of SNP TSC0058670
tgtagatgttatg

SEQ ID NO: 240492 - DNA, 13 bp, Artificial Sequence
  Oligonucleotide for detection of SNP TSC0058670
cataacatctaca

SEQ ID NO: 240493 - DNA, 13 bp, Artificial Sequence
  Oligonucleotide for detection of SNP TSC0058670
cgtagatgttatg

SEQ ID NO: 240494 - DNA, 13 bp, Artificial Sequence
  Oligonucleotide for detection of SNP TSC0058670
cataacatctacg

SEQ ID NO: 240495 - DNA, 13 bp, Artificial Sequence
  Oligonucleotide for detection of SNP TSC0058670
tgtagacgttatg

SEQ ID NO: 240496 - DNA, 13 bp, Artificial Sequence
  Oligonucleotide for detection of SNP TSC0058670
cataacgtctaca

SEQ ID NO: 240497 - DNA, 13 bp, Artificial Sequence
  Oligonucleotide for detection of SNP TSC0058670
cgtagacgttatg

SEQ ID NO: 240498 - DNA, 13 bp, Artificial Sequence
  Oligonucleotide for detection of SNP TSC0058670
cataacgtctacg

SEQ ID NO: 240499 - DNA, 13 bp, Artificial Sequence
  Oligonucleotide for detection of SNP TSC0058671
tttgttggaaaga

SEQ ID NO: 240500 - DNA, 13 bp, Artificial Sequence
  Oligonucleotide for detection of SNP TSC0058671
tctttccaacaaa

SEQ ID NO: 240501 - DNA, 13 bp, Artificial Sequence
  Oligonucleotide for detection of SNP TSC0058671
tttgttagaaaga

SEQ ID NO: 240502 - DNA, 13 bp, Artificial Sequence
  Oligonucleotide for detection of SNP TSC0058671
tctttctaacaaa

SEQ ID NO: 240503 - DNA, 13 bp, Artificial Sequence
  Oligonucleotide for detection of SNP TSC0058672
ggaattatagtag

SEQ ID NO: 240504 - DNA, 13 bp, Artificial Sequence
  Oligonucleotide for detection of SNP TSC0058672
ctactataattcc

SEQ ID NO: 240505 - DNA, 13 bp, Artificial Sequence
  Oligonucleotide for detection of SNP TSC0058672
ggaattgtagtag

SEQ ID NO: 240506 - DNA, 13 bp, Artificial Sequence
  Oligonucleotide for detection of SNP TSC0058672
ctactacaattcc

SEQ ID NO: 240507 - DNA, 13 bp, Artificial Sequence
  Oligonucleotide for detection of SNP TSC0058676
tttttggttttga

SEQ ID NO: 240508 - DNA, 13 bp, Artificial Sequence
  Oligonucleotide for detection of SNP TSC0058676
tcaaaaccaaaaa

SEQ ID NO: 240509 - DNA, 13 bp, Artificial Sequence
  Oligonucleotide for detection of SNP TSC0009284
gtgttgatatata

SEQ ID NO: 240510 - DNA, 13 bp, Artificial Sequence
  Oligonucleotide for detection of SNP TSC0009284
tatatatcaacac

SEQ ID NO: 240511 - DNA, 13 bp, Artificial Sequence
  Oligonucleotide for detection of SNP TSC0009284
gtgttggtatata

SEQ ID NO: 240512 - DNA, 13 bp, Artificial Sequence
  Oligonucleotide for detection of SNP TSC0009284
tatataccaacac

SEQ ID NO: 240513 - DNA, 13 bp, Artificial Sequence
  Oligonucleotide for detection of SNP TSC0058679
ttatttattgtty

SEQ ID NO: 240514 - DNA, 13 bp, Artificial Sequence
  Oligonucleotide for detection of SNP TSC0058679
raacaataaataa

SEQ ID NO: 240515 - DNA, 13 bp, Artificial Sequence
  Oligonucleotide for detection of SNP TSC0058679
ttatttgttgtty

SEQ ID NO: 240516 - DNA, 13 bp, Artificial Sequence
  Oligonucleotide for detection of SNP TSC0058679
raacaacaaataa

SEQ ID NO: 240517 - DNA, 13 bp, Artificial Sequence
  Oligonucleotide for detection of SNP TSC0058680
tatatttattgty

SEQ ID NO: 240518 - DNA, 13 bp, Artificial Sequence
  Oligonucleotide for detection of SNP TSC0058680
racaataaatata

SEQ ID NO: 240519 - DNA, 13 bp, Artificial Sequence
  Oligonucleotide for detection of SNP TSC0058680
tatattgattgty

SEQ ID NO: 240520 - DNA, 13 bp, Artificial Sequence
  Oligonucleotide for detection of SNP TSC0058680
racaatcaatata

SEQ ID NO: 240521 - DNA, 13 bp, Artificial Sequence
  Oligonucleotide for detection of SNP TSC0058680
gataatgaatgtg

SEQ ID NO: 240522 - DNA, 13 bp, Artificial Sequence
  Oligonucleotide for detection of SNP TSC0058680
cacattcattatc

SEQ ID NO: 240523 - DNA, 13 bp, Artificial Sequence
  Oligonucleotide for detection of SNP TSC0058680
gataattaatgtg

SEQ ID NO: 240524 - DNA, 13 bp, Artificial Sequence
  Oligonucleotide for detection of SNP TSC0058680
cacattaattatc

SEQ ID NO: 240525 - DNA, 13 bp, Artificial Sequence
  Oligonucleotide for detection of SNP TSC0058681
tagtaataggggt

SEQ ID NO: 240526 - DNA, 13 bp, Artificial Sequence
  Oligonucleotide for detection of SNP TSC0058681
acccctattacta

SEQ ID NO: 240527 - DNA, 13 bp, Artificial Sequence
  Oligonucleotide for detection of SNP TSC0058681
tagtaagaggggt

SEQ ID NO: 240528 - DNA, 13 bp, Artificial Sequence
  Oligonucleotide for detection of SNP TSC0058681
acccctcttacta

SEQ ID NO: 240529 - DNA, 13 bp, Artificial Sequence
  Oligonucleotide for detection of SNP TSC0058682
tgttttaattggg

SEQ ID NO: 240530 - DNA, 13 bp, Artificial Sequence
  Oligonucleotide for detection of SNP TSC0058682
cccaattaaaaca

SEQ ID NO: 240531 - DNA, 13 bp, Artificial Sequence
  Oligonucleotide for detection of SNP TSC0058682
tgttttgattggg

SEQ ID NO: 240532 - DNA, 13 bp, Artificial Sequence
  Oligonucleotide for detection of SNP TSC0058682
cccaatcaaaaca

SEQ ID NO: 240533 - DNA, 13 bp, Artificial Sequence
  Oligonucleotide for detection of SNP TSC0058682
tgtttcgattggg

SEQ ID NO: 240534 - DNA, 13 bp, Artificial Sequence
  Oligonucleotide for detection of SNP TSC0058682
cccaatcgaaaca

SEQ ID NO: 240535 - DNA, 13 bp, Artificial Sequence
  Oligonucleotide for detection of SNP TSC0058682
tttagttggaata

SEQ ID NO: 240536 - DNA, 13 bp, Artificial Sequence
  Oligonucleotide for detection of SNP TSC0058682
tattccaactaaa

SEQ ID NO: 240537 - DNA, 13 bp, Artificial Sequence
  Oligonucleotide for detection of SNP TSC0058682
tttagtcggaata

SEQ ID NO: 240538 - DNA, 13 bp, Artificial Sequence
  Oligonucleotide for detection of SNP TSC0058682
tattccgactaaa

SEQ ID NO: 240539 - DNA, 13 bp, Artificial Sequence
  Oligonucleotide for detection of SNP TSC0005885
gttttgtgtaatt

SEQ ID NO: 240540 - DNA, 13 bp, Artificial Sequence
  Oligonucleotide for detection of SNP TSC0005885
aattacacaaaac

SEQ ID NO: 240541 - DNA, 13 bp, Artificial Sequence
  Oligonucleotide for detection of SNP TSC0005885
gttttgcgtaatt

SEQ ID NO: 240542 - DNA, 13 bp, Artificial Sequence
  Oligonucleotide for detection of SNP TSC0005885
aattacgcaaaac

SEQ ID NO: 240543 - DNA, 13 bp, Artificial Sequence
  Oligonucleotide for detection of SNP TSC0058686
gagtttaggatay

SEQ ID NO: 240544 - DNA, 13 bp, Artificial Sequence
  Oligonucleotide for detection of SNP TSC0058686
rtatcctaaactc

SEQ ID NO: 240545 - DNA, 13 bp, Artificial Sequence
  Oligonucleotide for detection of SNP TSC0058686
gagtttgggatay

SEQ ID NO: 240546 - DNA, 13 bp, Artificial Sequence
  Oligonucleotide for detection of SNP TSC0058686
rtatcccaaactc

SEQ ID NO: 240547 - DNA, 13 bp, Artificial Sequence
  Oligonucleotide for detection of SNP TSC0058686
gagttcgggatay

SEQ ID NO: 240548 - DNA, 13 bp, Artificial Sequence
  Oligonucleotide for detection of SNP TSC0058686
rtatcccgaactc

SEQ ID NO: 240549 - DNA, 13 bp, Artificial Sequence
  Oligonucleotide for detection of SNP TSC0058686
gtgttttgggtty

SEQ ID NO: 240550 - DNA, 13 bp, Artificial Sequence
  Oligonucleotide for detection of SNP TSC0058686
raacccaaaacac

SEQ ID NO: 240551 - DNA, 13 bp, Artificial Sequence
  Oligonucleotide for detection of SNP TSC0058686
gtgtttcgggtty

SEQ ID NO: 240552 - DNA, 13 bp, Artificial Sequence
  Oligonucleotide for detection of SNP TSC0058686
raacccgaaacac

SEQ ID NO: 240553 - DNA, 13 bp, Artificial Sequence
  Oligonucleotide for detection of SNP TSC0058687
agagtttgataga

SEQ ID NO: 240554 - DNA, 13 bp, Artificial Sequence
  Oligonucleotide for detection of SNP TSC0058687
tctatcaaactct

SEQ ID NO: 240555 - DNA, 13 bp, Artificial Sequence
  Oligonucleotide for detection of SNP TSC0058687
agagttggataga

SEQ ID NO: 240556 - DNA, 13 bp, Artificial Sequence
  Oligonucleotide for detection of SNP TSC0058687
tctatccaactct

SEQ ID NO: 240557 - DNA, 13 bp, Artificial Sequence
  Oligonucleotide for detection of SNP TSC0058687
agagtcggataga

SEQ ID NO: 240558 - DNA, 13 bp, Artificial Sequence
  Oligonucleotide for detection of SNP TSC0058687
tctatccgactct

SEQ ID NO: 240559 - DNA, 13 bp, Artificial Sequence
  Oligonucleotide for detection of SNP TSC0058687
tttgttaggtttt

SEQ ID NO: 240560 - DNA, 13 bp, Artificial Sequence
  Oligonucleotide for detection of SNP TSC0058687
aaaacctaacaaa

SEQ ID NO: 240561 - DNA, 13 bp, Artificial Sequence
  Oligonucleotide for detection of SNP TSC0058689
aggtagttataaa

SEQ ID NO: 240562 - DNA, 13 bp, Artificial Sequence
  Oligonucleotide for detection of SNP TSC0058689
tttataactacct

SEQ ID NO: 240563 - DNA, 13 bp, Artificial Sequence
  Oligonucleotide for detection of SNP TSC0058689
aggtaggtataaa

SEQ ID NO: 240564 - DNA, 13 bp, Artificial Sequence
  Oligonucleotide for detection of SNP TSC0058689
tttatacctacct

SEQ ID NO: 240565 - DNA, 13 bp, Artificial Sequence
  Oligonucleotide for detection of SNP TSC0058689
tttgtggttgttt

SEQ ID NO: 240566 - DNA, 13 bp, Artificial Sequence
  Oligonucleotide for detection of SNP TSC0058689
aaacaaccacaaa

SEQ ID NO: 240567 - DNA, 13 bp, Artificial Sequence
  Oligonucleotide for detection of SNP TSC0058689
tttgtgtttgttt

SEQ ID NO: 240568 - DNA, 13 bp, Artificial Sequence
  Oligonucleotide for detection of SNP TSC0058689
aaacaaacacaaa

SEQ ID NO: 240569 - DNA, 13 bp, Artificial Sequence
  Oligonucleotide for detection of SNP TSC0008608
gggtaatagagtg

SEQ ID NO: 240570 - DNA, 13 bp, Artificial Sequence
  Oligonucleotide for detection of SNP TSC0008608
cactctattaccc

SEQ ID NO: 240571 - DNA, 13 bp, Artificial Sequence
  Oligonucleotide for detection of SNP TSC0008608
gggtaagagagtg

SEQ ID NO: 240572 - DNA, 13 bp, Artificial Sequence
  Oligonucleotide for detection of SNP TSC0008608
cactctcttaccc

SEQ ID NO: 240573 - DNA, 13 bp, Artificial Sequence
  Oligonucleotide for detection of SNP TSC0058690
tattaagttatga

SEQ ID NO: 240574 - DNA, 13 bp, Artificial Sequence
  Oligonucleotide for detection of SNP TSC0058690
tcataacttaata

SEQ ID NO: 240575 - DNA, 13 bp, Artificial Sequence
  Oligonucleotide for detection of SNP TSC0058690
tattaaattatga

SEQ ID NO: 240576 - DNA, 13 bp, Artificial Sequence
  Oligonucleotide for detection of SNP TSC0058690
tcataatttaata

SEQ ID NO: 240577 - DNA, 13 bp, Artificial Sequence
  Oligonucleotide for detection of SNP TSC0058691
aagagtgggtgty

SEQ ID NO: 240578 - DNA, 13 bp, Artificial Sequence
  Oligonucleotide for detection of SNP TSC0058691
racacccactctt

SEQ ID NO: 240579 - DNA, 13 bp, Artificial Sequence
  Oligonucleotide for detection of SNP TSC0058691
aagagtaggtgty

SEQ ID NO: 240580 - DNA, 13 bp, Artificial Sequence
  Oligonucleotide for detection of SNP TSC0058691
racacctactctt

SEQ ID NO: 240581 - DNA, 13 bp, Artificial Sequence
  Oligonucleotide for detection of SNP TSC0058691
aagagcgggtgty

SEQ ID NO: 240582 - DNA, 13 bp, Artificial Sequence
  Oligonucleotide for detection of SNP TSC0058691
racacccgctctt

SEQ ID NO: 240583 - DNA, 13 bp, Artificial Sequence
  Oligonucleotide for detection of SNP TSC0058692
ttttttgggaggy

SEQ ID NO: 240584 - DNA, 13 bp, Artificial Sequence
  Oligonucleotide for detection of SNP TSC0058692
rcctcccaaaaaa

SEQ ID NO: 240585 - DNA, 13 bp, Artificial Sequence
  Oligonucleotide for detection of SNP TSC0058692
ttttttaggaggy

SEQ ID NO: 240586 - DNA, 13 bp, Artificial Sequence
  Oligonucleotide for detection of SNP TSC0058692
rcctcctaaaaaa

SEQ ID NO: 240587 - DNA, 13 bp, Artificial Sequence
  Oligonucleotide for detection of SNP TSC0058692
tttttcgggaggy

SEQ ID NO: 240588 - DNA, 13 bp, Artificial Sequence
  Oligonucleotide for detection of SNP TSC0058692
rcctcccgaaaaa

SEQ ID NO: 240589 - DNA, 13 bp, Artificial Sequence
  Oligonucleotide for detection of SNP TSC0058693
gtttgatttgtaa

SEQ ID NO: 240590 - DNA, 13 bp, Artificial Sequence
  Oligonucleotide for detection of SNP TSC0058693
ttacaaatcaaac

SEQ ID NO: 240591 - DNA, 13 bp, Artificial Sequence
  Oligonucleotide for detection of SNP TSC0058693
ttataatttaaay

SEQ ID NO: 240592 - DNA, 13 bp, Artificial Sequence
  Oligonucleotide for detection of SNP TSC0058693
rtttaaattataa

SEQ ID NO: 240593 - DNA, 13 bp, Artificial Sequence
  Oligonucleotide for detection of SNP TSC0058694
ttgattttaatga

SEQ ID NO: 240594 - DNA, 13 bp, Artificial Sequence
  Oligonucleotide for detection of SNP TSC0058694
tcattaaaatcaa

SEQ ID NO: 240595 - DNA, 13 bp, Artificial Sequence
  Oligonucleotide for detection of SNP TSC0058694
ttgattgtaatga

SEQ ID NO: 240596 - DNA, 13 bp, Artificial Sequence
  Oligonucleotide for detection of SNP TSC0058694
tcattacaatcaa

SEQ ID NO: 240597 - DNA, 13 bp, Artificial Sequence
  Oligonucleotide for detection of SNP TSC0058694
ttattaaagttaa

SEQ ID NO: 240598 - DNA, 13 bp, Artificial Sequence
  Oligonucleotide for detection of SNP TSC0058694
ttaactttaataa

SEQ ID NO: 240599 - DNA, 13 bp, Artificial Sequence
  Oligonucleotide for detection of SNP TSC0058694
ttattatagttaa

SEQ ID NO: 240600 - DNA, 13 bp, Artificial Sequence
  Oligonucleotide for detection of SNP TSC0058694
ttaactataataa

SEQ ID NO: 240601 - DNA, 13 bp, Artificial Sequence
  Oligonucleotide for detection of SNP TSC0058695
gtaaagaatttgt

SEQ ID NO: 240602 - DNA, 13 bp, Artificial Sequence
  Oligonucleotide for detection of SNP TSC0058695
acaaattctttac

SEQ ID NO: 240603 - DNA, 13 bp, Artificial Sequence
  Oligonucleotide for detection of SNP TSC0058695
gtaaaggatttgt

SEQ ID NO: 240604 - DNA, 13 bp, Artificial Sequence
  Oligonucleotide for detection of SNP TSC0058695
acaaatcctttac

SEQ ID NO: 240605 - DNA, 13 bp, Artificial Sequence
  Oligonucleotide for detection of SNP TSC0058696
gagaaatggttag

SEQ ID NO: 240606 - DNA, 13 bp, Artificial Sequence
  Oligonucleotide for detection of SNP TSC0058696
ctaaccatttctc

SEQ ID NO: 240607 - DNA, 13 bp, Artificial Sequence
  Oligonucleotide for detection of SNP TSC0058696
gagaaacggttag

SEQ ID NO: 240608 - DNA, 13 bp, Artificial Sequence
  Oligonucleotide for detection of SNP TSC0058696
ctaaccgtttctc

SEQ ID NO: 240609 - DNA, 13 bp, Artificial Sequence
  Oligonucleotide for detection of SNP TSC0058696
ttgatcgttttty

SEQ ID NO: 240610 - DNA, 13 bp, Artificial Sequence
  Oligonucleotide for detection of SNP TSC0058696
raaaaacgatcaa

SEQ ID NO: 240611 - DNA, 13 bp, Artificial Sequence
  Oligonucleotide for detection of SNP TSC0058697
gttttaagttagy

SEQ ID NO: 240612 - DNA, 13 bp, Artificial Sequence
  Oligonucleotide for detection of SNP TSC0058697
rctaacttaaaac

SEQ ID NO: 240613 - DNA, 13 bp, Artificial Sequence
  Oligonucleotide for detection of SNP TSC0058697
gttttaggttagy

SEQ ID NO: 240614 - DNA, 13 bp, Artificial Sequence
  Oligonucleotide for detection of SNP TSC0058697
rctaacctaaaac

SEQ ID NO: 240615 - DNA, 13 bp, Artificial Sequence
  Oligonucleotide for detection of SNP TSC0058699
gtgagttgtgaty

SEQ ID NO: 240616 - DNA, 13 bp, Artificial Sequence
  Oligonucleotide for detection of SNP TSC0058699
ratcacaactcac

SEQ ID NO: 240617 - DNA, 13 bp, Artificial Sequence
  Oligonucleotide for detection of SNP TSC0058699
gtgagtcgtgaty

SEQ ID NO: 240618 - DNA, 13 bp, Artificial Sequence
  Oligonucleotide for detection of SNP TSC0058699
ratcacgactcac

SEQ ID NO: 240619 - DNA, 13 bp, Artificial Sequence
  Oligonucleotide for detection of SNP TSC0058699
gattatggtttay

SEQ ID NO: 240620 - DNA, 13 bp, Artificial Sequence
  Oligonucleotide for detection of SNP TSC0058699
rtaaaccataatc

SEQ ID NO: 240621 - DNA, 13 bp, Artificial Sequence
  Oligonucleotide for detection of SNP TSC0058699
gattatagtttay

SEQ ID NO: 240622 - DNA, 13 bp, Artificial Sequence
  Oligonucleotide for detection of SNP TSC0058699
rtaaactataatc

SEQ ID NO: 240623 - DNA, 13 bp, Artificial Sequence
  Oligonucleotide for detection of SNP TSC0058699
gattacggtttay

SEQ ID NO: 240624 - DNA, 13 bp, Artificial Sequence
  Oligonucleotide for detection of SNP TSC0058699
rtaaaccgtaatc

SEQ ID NO: 240625 - DNA, 13 bp, Artificial Sequence
  Oligonucleotide for detection of SNP TSC0058701
ttatttaaaggtt

SEQ ID NO: 240626 - DNA, 13 bp, Artificial Sequence
  Oligonucleotide for detection of SNP TSC0058701
aacctttaaataa

SEQ ID NO: 240627 - DNA, 13 bp, Artificial Sequence
  Oligonucleotide for detection of SNP TSC0058701
ttatttgaaggtt

SEQ ID NO: 240628 - DNA, 13 bp, Artificial Sequence
  Oligonucleotide for detection of SNP TSC0058701
aaccttcaaataa

SEQ ID NO: 240629 - DNA, 13 bp, Artificial Sequence
  Oligonucleotide for detection of SNP TSC0058701
ttattcgaaggtt

SEQ ID NO: 240630 - DNA, 13 bp, Artificial Sequence
  Oligonucleotide for detection of SNP TSC0058701
aaccttcgaataa

SEQ ID NO: 240631 - DNA, 13 bp, Artificial Sequence
  Oligonucleotide for detection of SNP TSC0058701
agtttttggatga

SEQ ID NO: 240632 - DNA, 13 bp, Artificial Sequence
  Oligonucleotide for detection of SNP TSC0058701
tcatccaaaaact

SEQ ID NO: 240633 - DNA, 13 bp, Artificial Sequence
  Oligonucleotide for detection of SNP TSC0058701
agttttcggatga

SEQ ID NO: 240634 - DNA, 13 bp, Artificial Sequence
  Oligonucleotide for detection of SNP TSC0058701
tcatccgaaaact

SEQ ID NO: 240635 - DNA, 13 bp, Artificial Sequence
  Oligonucleotide for detection of SNP TSC0001104
atttagatgaggy

SEQ ID NO: 240636 - DNA, 13 bp, Artificial Sequence
  Oligonucleotide for detection of SNP TSC0001104
rcctcatctaaat

SEQ ID NO: 240637 - DNA, 13 bp, Artificial Sequence
  Oligonucleotide for detection of SNP TSC0058704
tttttaaagagtt

SEQ ID NO: 240638 - DNA, 13 bp, Artificial Sequence
  Oligonucleotide for detection of SNP TSC0058704
aactctttaaaaa

SEQ ID NO: 240639 - DNA, 13 bp, Artificial Sequence
  Oligonucleotide for detection of SNP TSC0058704
tttttatagagtt

SEQ ID NO: 240640 - DNA, 13 bp, Artificial Sequence
  Oligonucleotide for detection of SNP TSC0058704
aactctataaaaa

SEQ ID NO: 240641 - DNA, 13 bp, Artificial Sequence
  Oligonucleotide for detection of SNP TSC0058704
tttttagagagtt

SEQ ID NO: 240642 - DNA, 13 bp, Artificial Sequence
  Oligonucleotide for detection of SNP TSC0058704
aactctctaaaaa

SEQ ID NO: 240643 - DNA, 13 bp, Artificial Sequence
  Oligonucleotide for detection of SNP TSC0058704
agttttttgaaaa

SEQ ID NO: 240644 - DNA, 13 bp, Artificial Sequence
  Oligonucleotide for detection of SNP TSC0058704
ttttcaaaaaact

SEQ ID NO: 240645 - DNA, 13 bp, Artificial Sequence
  Oligonucleotide for detection of SNP TSC0058704
agttttgtgaaaa

SEQ ID NO: 240646 - DNA, 13 bp, Artificial Sequence
  Oligonucleotide for detection of SNP TSC0058704
ttttcacaaaact

SEQ ID NO: 240647 - DNA, 13 bp, Artificial Sequence
  Oligonucleotide for detection of SNP TSC0058705
aagggattagtgy

SEQ ID NO: 240648 - DNA, 13 bp, Artificial Sequence
  Oligonucleotide for detection of SNP TSC0058705
rcactaatccctt

SEQ ID NO: 240649 - DNA, 13 bp, Artificial Sequence
  Oligonucleotide for detection of SNP TSC0058705
aagggagtagtgy

SEQ ID NO: 240650 - DNA, 13 bp, Artificial Sequence
  Oligonucleotide for detection of SNP TSC0058705
rcactactccctt

SEQ ID NO: 240651 - DNA, 13 bp, Artificial Sequence
  Oligonucleotide for detection of SNP TSC0058708
gaagtttaagatt

SEQ ID NO: 240652 - DNA, 13 bp, Artificial Sequence
  Oligonucleotide for detection of SNP TSC0058708
aatcttaaacttc

SEQ ID NO: 240653 - DNA, 13 bp, Artificial Sequence
  Oligonucleotide for detection of SNP TSC0058708
gaagttgaagatt

SEQ ID NO: 240654 - DNA, 13 bp, Artificial Sequence
  Oligonucleotide for detection of SNP TSC0058708
aatcttcaacttc

SEQ ID NO: 240655 - DNA, 13 bp, Artificial Sequence
  Oligonucleotide for detection of SNP TSC0058708
aattttgaattty

SEQ ID NO: 240656 - DNA, 13 bp, Artificial Sequence
  Oligonucleotide for detection of SNP TSC0058708
raaattcaaaatt

SEQ ID NO: 240657 - DNA, 13 bp, Artificial Sequence
  Oligonucleotide for detection of SNP TSC0058710
tgtgattgtgagt

SEQ ID NO: 240658 - DNA, 13 bp, Artificial Sequence
  Oligonucleotide for detection of SNP TSC0058710
actcacaatcaca

SEQ ID NO: 240659 - DNA, 13 bp, Artificial Sequence
  Oligonucleotide for detection of SNP TSC0058710
tgtgatggtgagt

SEQ ID NO: 240660 - DNA, 13 bp, Artificial Sequence
  Oligonucleotide for detection of SNP TSC0058710
actcaccatcaca

SEQ ID NO: 240661 - DNA, 13 bp, Artificial Sequence
  Oligonucleotide for detection of SNP TSC0058710
tgtgatcgtgagt

SEQ ID NO: 240662 - DNA, 13 bp, Artificial Sequence
  Oligonucleotide for detection of SNP TSC0058710
actcacgatcaca

SEQ ID NO: 240663 - DNA, 13 bp, Artificial Sequence
  Oligonucleotide for detection of SNP TSC0058710
atttatgattata

SEQ ID NO: 240664 - DNA, 13 bp, Artificial Sequence
  Oligonucleotide for detection of SNP TSC0058710
tataatcataaat

SEQ ID NO: 240665 - DNA, 13 bp, Artificial Sequence
  Oligonucleotide for detection of SNP TSC0058710
atttattattata

SEQ ID NO: 240666 - DNA, 13 bp, Artificial Sequence
  Oligonucleotide for detection of SNP TSC0058710
tataataataaat

SEQ ID NO: 240667 - DNA, 13 bp, Artificial Sequence
  Oligonucleotide for detection of SNP TSC0058710
atttacgattata

SEQ ID NO: 240668 - DNA, 13 bp, Artificial Sequence
  Oligonucleotide for detection of SNP TSC0058710
tataatcgtaaat

SEQ ID NO: 240669 - DNA, 13 bp, Artificial Sequence
  Oligonucleotide for detection of SNP TSC0058712
tttgtaggtgtty

SEQ ID NO: 240670 - DNA, 13 bp, Artificial Sequence
  Oligonucleotide for detection of SNP TSC0058712
raacacctacaaa

SEQ ID NO: 240671 - DNA, 13 bp, Artificial Sequence
  Oligonucleotide for detection of SNP TSC0058712
tttgtaagtgtty

SEQ ID NO: 240672 - DNA, 13 bp, Artificial Sequence
  Oligonucleotide for detection of SNP TSC0058712
raacacttacaaa

SEQ ID NO: 240673 - DNA, 13 bp, Artificial Sequence
  Oligonucleotide for detection of SNP TSC0058712
tttgtaggcgtty

SEQ ID NO: 240674 - DNA, 13 bp, Artificial Sequence
  Oligonucleotide for detection of SNP TSC0058712
raacgcctacaaa

SEQ ID NO: 240675 - DNA, 13 bp, Artificial Sequence
  Oligonucleotide for detection of SNP TSC0058712
tttgtaagcgtty

SEQ ID NO: 240676 - DNA, 13 bp, Artificial Sequence
  Oligonucleotide for detection of SNP TSC0058712
raacgcttacaaa

SEQ ID NO: 240677 - DNA, 13 bp, Artificial Sequence
  Oligonucleotide for detection of SNP TSC0058713
gtttttaataatt

SEQ ID NO: 240678 - DNA, 13 bp, Artificial Sequence
  Oligonucleotide for detection of SNP TSC0058713
aattattaaaaac

SEQ ID NO: 240679 - DNA, 13 bp, Artificial Sequence
  Oligonucleotide for detection of SNP TSC0058713
gttttttataatt

SEQ ID NO: 240680 - DNA, 13 bp, Artificial Sequence
  Oligonucleotide for detection of SNP TSC0058713
aattataaaaaac

SEQ ID NO: 240681 - DNA, 13 bp, Artificial Sequence
  Oligonucleotide for detection of SNP TSC0058713
aattattaaaagy

SEQ ID NO: 240682 - DNA, 13 bp, Artificial Sequence
  Oligonucleotide for detection of SNP TSC0058713
rcttttaataatt

SEQ ID NO: 240683 - DNA, 13 bp, Artificial Sequence
  Oligonucleotide for detection of SNP TSC0058713
aattataaaaagy

SEQ ID NO: 240684 - DNA, 13 bp, Artificial Sequence
  Oligonucleotide for detection of SNP TSC0058713
rctttttataatt

SEQ ID NO: 240685 - DNA, 13 bp, Artificial Sequence
  Oligonucleotide for detection of SNP TSC0058714
tttttaattagga

SEQ ID NO: 240686 - DNA, 13 bp, Artificial Sequence
  Oligonucleotide for detection of SNP TSC0058714
tcctaattaaaaa

SEQ ID NO: 240687 - DNA, 13 bp, Artificial Sequence
  Oligonucleotide for detection of SNP TSC0058714
tttttatttagga

SEQ ID NO: 240688 - DNA, 13 bp, Artificial Sequence
  Oligonucleotide for detection of SNP TSC0058714
tcctaaataaaaa

SEQ ID NO: 240689 - DNA, 13 bp, Artificial Sequence
  Oligonucleotide for detection of SNP TSC0058714
ttttaattaaaga

SEQ ID NO: 240690 - DNA, 13 bp, Artificial Sequence
  Oligonucleotide for detection of SNP TSC0058714
tctttaattaaaa

SEQ ID NO: 240691 - DNA, 13 bp, Artificial Sequence
  Oligonucleotide for detection of SNP TSC0000262
tgggtaatttttt

SEQ ID NO: 240692 - DNA, 13 bp, Artificial Sequence
  Oligonucleotide for detection of SNP TSC0000262
aaaaaattaccca

SEQ ID NO: 240693 - DNA, 13 bp, Artificial Sequence
  Oligonucleotide for detection of SNP TSC0000262
tgggtagtttttt

SEQ ID NO: 240694 - DNA, 13 bp, Artificial Sequence
  Oligonucleotide for detection of SNP TSC0000262
aaaaaactaccca

SEQ ID NO: 240695 - DNA, 13 bp, Artificial Sequence
  Oligonucleotide for detection of SNP TSC0000262
cgggtaatttttt

SEQ ID NO: 240696 - DNA, 13 bp, Artificial Sequence
  Oligonucleotide for detection of SNP TSC0000262
aaaaaattacccg

SEQ ID NO: 240697 - DNA, 13 bp, Artificial Sequence
  Oligonucleotide for detection of SNP TSC0000262
cgggtagtttttt

SEQ ID NO: 240698 - DNA, 13 bp, Artificial Sequence
  Oligonucleotide for detection of SNP TSC0000262
aaaaaactacccg

SEQ ID NO: 240699 - DNA, 13 bp, Artificial Sequence
  Oligonucleotide for detection of SNP TSC0000263
ggggaatgggggg

SEQ ID NO: 240700 - DNA, 13 bp, Artificial Sequence
  Oligonucleotide for detection of SNP TSC0000263
ccccccattcccc

SEQ ID NO: 240701 - DNA, 13 bp, Artificial Sequence
  Oligonucleotide for detection of SNP TSC0000263
ggggaaggggggg

SEQ ID NO: 240702 - DNA, 13 bp, Artificial Sequence
  Oligonucleotide for detection of SNP TSC0000263
cccccccttcccc

SEQ ID NO: 240703 - DNA, 13 bp, Artificial Sequence
  Oligonucleotide for detection of SNP TSC0058716
attttgaagggga

SEQ ID NO: 240704 - DNA, 13 bp, Artificial Sequence
  Oligonucleotide for detection of SNP TSC0058716
tccccttcaaaat

SEQ ID NO: 240705 - DNA, 13 bp, Artificial Sequence
  Oligonucleotide for detection of SNP TSC0058716
attttggagggga

SEQ ID NO: 240706 - DNA, 13 bp, Artificial Sequence
  Oligonucleotide for detection of SNP TSC0058716
tcccctccaaaat

SEQ ID NO: 240707 - DNA, 13 bp, Artificial Sequence
  Oligonucleotide for detection of SNP TSC0058717
ttttggaggggay

SEQ ID NO: 240708 - DNA, 13 bp, Artificial Sequence
  Oligonucleotide for detection of SNP TSC0058717
rtcccctccaaaa

SEQ ID NO: 240709 - DNA, 13 bp, Artificial Sequence
  Oligonucleotide for detection of SNP TSC0058717
ttttgggggggay

SEQ ID NO: 240710 - DNA, 13 bp, Artificial Sequence
  Oligonucleotide for detection of SNP TSC0058717
rtcccccccaaaa

SEQ ID NO: 240711 - DNA, 13 bp, Artificial Sequence
  Oligonucleotide for detection of SNP TSC0001143
atagtgtggttta

SEQ ID NO: 240712 - DNA, 13 bp, Artificial Sequence
  Oligonucleotide for detection of SNP TSC0001143
taaaccacactat

SEQ ID NO: 240713 - DNA, 13 bp, Artificial Sequence
  Oligonucleotide for detection of SNP TSC0001143
atagtgcggttta

SEQ ID NO: 240714 - DNA, 13 bp, Artificial Sequence
  Oligonucleotide for detection of SNP TSC0001143
taaaccgcactat

SEQ ID NO: 240715 - DNA, 13 bp, Artificial Sequence
  Oligonucleotide for detection of SNP TSC0001143
tgagttgtattgt

SEQ ID NO: 240716 - DNA, 13 bp, Artificial Sequence
  Oligonucleotide for detection of SNP TSC0001143
acaatacaactca

SEQ ID NO: 240717 - DNA, 13 bp, Artificial Sequence
  Oligonucleotide for detection of SNP TSC0001143
tgagttatattgt

SEQ ID NO: 240718 - DNA, 13 bp, Artificial Sequence
  Oligonucleotide for detection of SNP TSC0001143
acaatataactca

SEQ ID NO: 240719 - DNA, 13 bp, Artificial Sequence
  Oligonucleotide for detection of SNP TSC0001143
tgagtcgtattgt

SEQ ID NO: 240720 - DNA, 13 bp, Artificial Sequence
  Oligonucleotide for detection of SNP TSC0001143
acaatacgactca

SEQ ID NO: 240721 - DNA, 13 bp, Artificial Sequence
  Oligonucleotide for detection of SNP TSC0001144
gtttgagttttag

SEQ ID NO: 240722 - DNA, 13 bp, Artificial Sequence
  Oligonucleotide for detection of SNP TSC0001144
ctaaaactcaaac

SEQ ID NO: 240723 - DNA, 13 bp, Artificial Sequence
  Oligonucleotide for detection of SNP TSC0001144
gtttgaattttag

SEQ ID NO: 240724 - DNA, 13 bp, Artificial Sequence
  Oligonucleotide for detection of SNP TSC0001144
ctaaaattcaaac

SEQ ID NO: 240725 - DNA, 13 bp, Artificial Sequence
  Oligonucleotide for detection of SNP TSC0000277
attaagatgaata

SEQ ID NO: 240726 - DNA, 13 bp, Artificial Sequence
  Oligonucleotide for detection of SNP TSC0000277
tattcatcttaat

SEQ ID NO: 240727 - DNA, 13 bp, Artificial Sequence
  Oligonucleotide for detection of SNP TSC0000277
attaagttgaata

SEQ ID NO: 240728 - DNA, 13 bp, Artificial Sequence
  Oligonucleotide for detection of SNP TSC0000277
tattcaacttaat

SEQ ID NO: 240729 - DNA, 13 bp, Artificial Sequence
  Oligonucleotide for detection of SNP TSC0000277
tatttattttggt

SEQ ID NO: 240730 - DNA, 13 bp, Artificial Sequence
  Oligonucleotide for detection of SNP TSC0000277
accaaaataaata

SEQ ID NO: 240731 - DNA, 13 bp, Artificial Sequence
  Oligonucleotide for detection of SNP TSC0000277
tatttaatttggt

SEQ ID NO: 240732 - DNA, 13 bp, Artificial Sequence
  Oligonucleotide for detection of SNP TSC0000277
accaaattaaata

SEQ ID NO: 240733 - DNA, 13 bp, Artificial Sequence
  Oligonucleotide for detection of SNP TSC0058718
taaattaagggaa

SEQ ID NO: 240734 - DNA, 13 bp, Artificial Sequence
  Oligonucleotide for detection of SNP TSC0058718
ttcccttaattta

SEQ ID NO: 240735 - DNA, 13 bp, Artificial Sequence
  Oligonucleotide for detection of SNP TSC0058718
taaattgagggaa

SEQ ID NO: 240736 - DNA, 13 bp, Artificial Sequence
  Oligonucleotide for detection of SNP TSC0058718
ttccctcaattta

SEQ ID NO: 240737 - DNA, 13 bp, Artificial Sequence
  Oligonucleotide for detection of SNP TSC0058718
taaatcgagggaa

SEQ ID NO: 240738 - DNA, 13 bp, Artificial Sequence
  Oligonucleotide for detection of SNP TSC0058718
ttccctcgattta

SEQ ID NO: 240739 - DNA, 13 bp, Artificial Sequence
  Oligonucleotide for detection of SNP TSC0058718
tttttttgatttg

SEQ ID NO: 240740 - DNA, 13 bp, Artificial Sequence
  Oligonucleotide for detection of SNP TSC0058718
caaatcaaaaaaa

SEQ ID NO: 240741 - DNA, 13 bp, Artificial Sequence
  Oligonucleotide for detection of SNP TSC0058718
ttttttcgatttg

SEQ ID NO: 240742 - DNA, 13 bp, Artificial Sequence
  Oligonucleotide for detection of SNP TSC0058718
caaatcgaaaaaa

SEQ ID NO: 240743 - DNA, 13 bp, Artificial Sequence
  Oligonucleotide for detection of SNP TSC0058721
ggattttggatta

SEQ ID NO: 240744 - DNA, 13 bp, Artificial Sequence
  Oligonucleotide for detection of SNP TSC0058721
taatccaaaatcc

SEQ ID NO: 240745 - DNA, 13 bp, Artificial Sequence
  Oligonucleotide for detection of SNP TSC0058721
ggatttcggatta

SEQ ID NO: 240746 - DNA, 13 bp, Artificial Sequence
  Oligonucleotide for detection of SNP TSC0058721
taatccgaaatcc

SEQ ID NO: 240747 - DNA, 13 bp, Artificial Sequence
  Oligonucleotide for detection of SNP TSC0058721
tagtttgggatty

SEQ ID NO: 240748 - DNA, 13 bp, Artificial Sequence
  Oligonucleotide for detection of SNP TSC0058721
raatcccaaacta

SEQ ID NO: 240749 - DNA, 13 bp, Artificial Sequence
  Oligonucleotide for detection of SNP TSC0058721
tagtttaggatty

SEQ ID NO: 240750 - DNA, 13 bp, Artificial Sequence
  Oligonucleotide for detection of SNP TSC0058721
raatcctaaacta

SEQ ID NO: 240751 - DNA, 13 bp, Artificial Sequence
  Oligonucleotide for detection of SNP TSC0058721
tagttcgggatty

SEQ ID NO: 240752 - DNA, 13 bp, Artificial Sequence
  Oligonucleotide for detection of SNP TSC0058721
raatcccgaacta

SEQ ID NO: 240753 - DNA, 13 bp, Artificial Sequence
  Oligonucleotide for detection of SNP TSC0058722
attgtaaataaat

SEQ ID NO: 240754 - DNA, 13 bp, Artificial Sequence
  Oligonucleotide for detection of SNP TSC0058722
atttatttacaat

SEQ ID NO: 240755 - DNA, 13 bp, Artificial Sequence
  Oligonucleotide for detection of SNP TSC0058722
attgtagataaat

SEQ ID NO: 240756 - DNA, 13 bp, Artificial Sequence
  Oligonucleotide for detection of SNP TSC0058722
atttatctacaat

SEQ ID NO: 240757 - DNA, 13 bp, Artificial Sequence
  Oligonucleotide for detection of SNP TSC0058722
atcgtaaataaat

SEQ ID NO: 240758 - DNA, 13 bp, Artificial Sequence
  Oligonucleotide for detection of SNP TSC0058722
atttatttacgat

SEQ ID NO: 240759 - DNA, 13 bp, Artificial Sequence
  Oligonucleotide for detection of SNP TSC0058722
atcgtagataaat

SEQ ID NO: 240760 - DNA, 13 bp, Artificial Sequence
  Oligonucleotide for detection of SNP TSC0058722
atttatctacgat

SEQ ID NO: 240761 - DNA, 13 bp, Artificial Sequence
  Oligonucleotide for detection of SNP TSC0058723
gataaaatttgaa

SEQ ID NO: 240762 - DNA, 13 bp, Artificial Sequence
  Oligonucleotide for detection of SNP TSC0058723
ttcaaattttatc

SEQ ID NO: 240763 - DNA, 13 bp, Artificial Sequence
  Oligonucleotide for detection of SNP TSC0058723
gataaattttgaa

SEQ ID NO: 240764 - DNA, 13 bp, Artificial Sequence
  Oligonucleotide for detection of SNP TSC0058723
ttcaaaatttatc

SEQ ID NO: 240765 - DNA, 13 bp, Artificial Sequence
  Oligonucleotide for detection of SNP TSC0058723
tttaagttttgty

SEQ ID NO: 240766 - DNA, 13 bp, Artificial Sequence
  Oligonucleotide for detection of SNP TSC0058723
racaaaacttaaa

SEQ ID NO: 240767 - DNA, 13 bp, Artificial Sequence
  Oligonucleotide for detection of SNP TSC0058723
tttaaggtttgty

SEQ ID NO: 240768 - DNA, 13 bp, Artificial Sequence
  Oligonucleotide for detection of SNP TSC0058723
racaaaccttaaa

SEQ ID NO: 240769 - DNA, 13 bp, Artificial Sequence
  Oligonucleotide for detection of SNP TSC0058724
tttttaaatgaat

SEQ ID NO: 240770 - DNA, 13 bp, Artificial Sequence
  Oligonucleotide for detection of SNP TSC0058724
attcatttaaaaa

SEQ ID NO: 240771 - DNA, 13 bp, Artificial Sequence
  Oligonucleotide for detection of SNP TSC0058724
tttttagatgaat

SEQ ID NO: 240772 - DNA, 13 bp, Artificial Sequence
  Oligonucleotide for detection of SNP TSC0058724
attcatctaaaaa

SEQ ID NO: 240773 - DNA, 13 bp, Artificial Sequence
  Oligonucleotide for detection of SNP TSC0058726
tttggatgttgtg

SEQ ID NO: 240774 - DNA, 13 bp, Artificial Sequence
  Oligonucleotide for detection of SNP TSC0058726
cacaacatccaaa

SEQ ID NO: 240775 - DNA, 13 bp, Artificial Sequence
  Oligonucleotide for detection of SNP TSC0058726
tttggacgttgtg

SEQ ID NO: 240776 - DNA, 13 bp, Artificial Sequence
  Oligonucleotide for detection of SNP TSC0058726
cacaacgtccaaa

SEQ ID NO: 240777 - DNA, 13 bp, Artificial Sequence
  Oligonucleotide for detection of SNP TSC0058726
tttggatgttgcg

SEQ ID NO: 240778 - DNA, 13 bp, Artificial Sequence
  Oligonucleotide for detection of SNP TSC0058726
cgcaacatccaaa

SEQ ID NO: 240779 - DNA, 13 bp, Artificial Sequence
  Oligonucleotide for detection of SNP TSC0058726
tttggacgttgcg

SEQ ID NO: 240780 - DNA, 13 bp, Artificial Sequence
  Oligonucleotide for detection of SNP TSC0058726
cgcaacgtccaaa

SEQ ID NO: 240781 - DNA, 13 bp, Artificial Sequence
  Oligonucleotide for detection of SNP TSC0058726
tgtagtgtttaga

SEQ ID NO: 240782 - DNA, 13 bp, Artificial Sequence
  Oligonucleotide for detection of SNP TSC0058726
tctaaacactaca

SEQ ID NO: 240783 - DNA, 13 bp, Artificial Sequence
  Oligonucleotide for detection of SNP TSC0058726
tgtagtatttaga

SEQ ID NO: 240784 - DNA, 13 bp, Artificial Sequence
  Oligonucleotide for detection of SNP TSC0058726
tctaaatactaca

SEQ ID NO: 240785 - DNA, 13 bp, Artificial Sequence
  Oligonucleotide for detection of SNP TSC0058726
cgtagtgtttaga

SEQ ID NO: 240786 - DNA, 13 bp, Artificial Sequence
  Oligonucleotide for detection of SNP TSC0058726
tctaaacactacg

SEQ ID NO: 240787 - DNA, 13 bp, Artificial Sequence
  Oligonucleotide for detection of SNP TSC0058726
cgtagtatttaga

SEQ ID NO: 240788 - DNA, 13 bp, Artificial Sequence
  Oligonucleotide for detection of SNP TSC0058726
tctaaatactacg

SEQ ID NO: 240789 - DNA, 13 bp, Artificial Sequence
  Oligonucleotide for detection of SNP TSC0058726
tgtagcgtttaga

SEQ ID NO: 240790 - DNA, 13 bp, Artificial Sequence
  Oligonucleotide for detection of SNP TSC0058726
tctaaacgctaca

SEQ ID NO: 240791 - DNA, 13 bp, Artificial Sequence
  Oligonucleotide for detection of SNP TSC0058726
cgtagcgtttaga

SEQ ID NO: 240792 - DNA, 13 bp, Artificial Sequence
  Oligonucleotide for detection of SNP TSC0058726
tctaaacgctacg

SEQ ID NO: 240793 - DNA, 13 bp, Artificial Sequence
  Oligonucleotide for detection of SNP TSC0058727
gtgtttagtattg

SEQ ID NO: 240794 - DNA, 13 bp, Artificial Sequence
  Oligonucleotide for detection of SNP TSC0058727
caatactaaacac

SEQ ID NO: 240795 - DNA, 13 bp, Artificial Sequence
  Oligonucleotide for detection of SNP TSC0058727
gtgttttgtattg

SEQ ID NO: 240796 - DNA, 13 bp, Artificial Sequence
  Oligonucleotide for detection of SNP TSC0058727
caatacaaaacac

SEQ ID NO: 240797 - DNA, 13 bp, Artificial Sequence
  Oligonucleotide for detection of SNP TSC0058727
gcgtttagtattg

SEQ ID NO: 240798 - DNA, 13 bp, Artificial Sequence
  Oligonucleotide for detection of SNP TSC0058727
caatactaaacgc

SEQ ID NO: 240799 - DNA, 13 bp, Artificial Sequence
  Oligonucleotide for detection of SNP TSC0058727
gcgttttgtattg

SEQ ID NO: 240800 - DNA, 13 bp, Artificial Sequence
  Oligonucleotide for detection of SNP TSC0058727
caatacaaaacgc

SEQ ID NO: 240801 - DNA, 13 bp, Artificial Sequence
  Oligonucleotide for detection of SNP TSC0058727
tagtgttgggtgy

SEQ ID NO: 240802 - DNA, 13 bp, Artificial Sequence
  Oligonucleotide for detection of SNP TSC0058727
rcacccaacacta

SEQ ID NO: 240803 - DNA, 13 bp, Artificial Sequence
  Oligonucleotide for detection of SNP TSC0058727
tagtgtagggtgy

SEQ ID NO: 240804 - DNA, 13 bp, Artificial Sequence
  Oligonucleotide for detection of SNP TSC0058727
rcaccctacacta

SEQ ID NO: 240805 - DNA, 13 bp, Artificial Sequence
  Oligonucleotide for detection of SNP TSC0058727
tagtgttgggcgy

SEQ ID NO: 240806 - DNA, 13 bp, Artificial Sequence
  Oligonucleotide for detection of SNP TSC0058727
rcgcccaacacta

SEQ ID NO: 240807 - DNA, 13 bp, Artificial Sequence
  Oligonucleotide for detection of SNP TSC0058727
tagtgtagggcgy

SEQ ID NO: 240808 - DNA, 13 bp, Artificial Sequence
  Oligonucleotide for detection of SNP TSC0058727
rcgccctacacta

SEQ ID NO: 240809 - DNA, 13 bp, Artificial Sequence
  Oligonucleotide for detection of SNP TSC0058728
ttgtatataataa

SEQ ID NO: 240810 - DNA, 13 bp, Artificial Sequence
  Oligonucleotide for detection of SNP TSC0058728
ttattatatacaa

SEQ ID NO: 240811 - DNA, 13 bp, Artificial Sequence
  Oligonucleotide for detection of SNP TSC0058728
ttgtatgtaataa

SEQ ID NO: 240812 - DNA, 13 bp, Artificial Sequence
  Oligonucleotide for detection of SNP TSC0058728
ttattacatacaa

SEQ ID NO: 240813 - DNA, 13 bp, Artificial Sequence
  Oligonucleotide for detection of SNP TSC0058729
agtggatattttt

SEQ ID NO: 240814 - DNA, 13 bp, Artificial Sequence
  Oligonucleotide for detection of SNP TSC0058729
aaaaatatccact

SEQ ID NO: 240815 - DNA, 13 bp, Artificial Sequence
  Oligonucleotide for detection of SNP TSC0058729
agtggagattttt

SEQ ID NO: 240816 - DNA, 13 bp, Artificial Sequence
  Oligonucleotide for detection of SNP TSC0058729
aaaaatctccact

SEQ ID NO: 240817 - DNA, 13 bp, Artificial Sequence
  Oligonucleotide for detection of SNP TSC0058729
aagagtttttatt

SEQ ID NO: 240818 - DNA, 13 bp, Artificial Sequence
  Oligonucleotide for detection of SNP TSC0058729
aataaaaactctt

SEQ ID NO: 240819 - DNA, 13 bp, Artificial Sequence
  Oligonucleotide for detection of SNP TSC0058734
attttgtgttata

SEQ ID NO: 240820 - DNA, 13 bp, Artificial Sequence
  Oligonucleotide for detection of SNP TSC0058734
tataacacaaaat

SEQ ID NO: 240821 - DNA, 13 bp, Artificial Sequence
  Oligonucleotide for detection of SNP TSC0058734
attttgcgttata

SEQ ID NO: 240822 - DNA, 13 bp, Artificial Sequence
  Oligonucleotide for detection of SNP TSC0058734
tataacgcaaaat

SEQ ID NO: 240823 - DNA, 13 bp, Artificial Sequence
  Oligonucleotide for detection of SNP TSC0058734
tgtagtgtaagat

SEQ ID NO: 240824 - DNA, 13 bp, Artificial Sequence
  Oligonucleotide for detection of SNP TSC0058734
atcttacactaca

SEQ ID NO: 240825 - DNA, 13 bp, Artificial Sequence
  Oligonucleotide for detection of SNP TSC0058734
tgtagtataagat

SEQ ID NO: 240826 - DNA, 13 bp, Artificial Sequence
  Oligonucleotide for detection of SNP TSC0058734
atcttatactaca

SEQ ID NO: 240827 - DNA, 13 bp, Artificial Sequence
  Oligonucleotide for detection of SNP TSC0058734
tgtagcgtaagat

SEQ ID NO: 240828 - DNA, 13 bp, Artificial Sequence
  Oligonucleotide for detection of SNP TSC0058734
atcttacgctaca

SEQ ID NO: 240829 - DNA, 13 bp, Artificial Sequence
  Oligonucleotide for detection of SNP TSC0058735
tagatttttgttt

SEQ ID NO: 240830 - DNA, 13 bp, Artificial Sequence
  Oligonucleotide for detection of SNP TSC0058735
aaacaaaaatcta

SEQ ID NO: 240831 - DNA, 13 bp, Artificial Sequence
  Oligonucleotide for detection of SNP TSC0058735
tagattgttgttt

SEQ ID NO: 240832 - DNA, 13 bp, Artificial Sequence
  Oligonucleotide for detection of SNP TSC0058735
aaacaacaatcta

SEQ ID NO: 240833 - DNA, 13 bp, Artificial Sequence
  Oligonucleotide for detection of SNP TSC0058735
aaataaaaattta

SEQ ID NO: 240834 - DNA, 13 bp, Artificial Sequence
  Oligonucleotide for detection of SNP TSC0058735
taaatttttattt

SEQ ID NO: 240835 - DNA, 13 bp, Artificial Sequence
  Oligonucleotide for detection of SNP TSC0058735
aaataataattta

SEQ ID NO: 240836 - DNA, 13 bp, Artificial Sequence
  Oligonucleotide for detection of SNP TSC0058735
taaattattattt

SEQ ID NO: 240837 - DNA, 13 bp, Artificial Sequence
  Oligonucleotide for detection of SNP TSC0058736
aaggtatgtaaag

SEQ ID NO: 240838 - DNA, 13 bp, Artificial Sequence
  Oligonucleotide for detection of SNP TSC0058736
ctttacatacctt

SEQ ID NO: 240839 - DNA, 13 bp, Artificial Sequence
  Oligonucleotide for detection of SNP TSC0058736
aaggtaggtaaag

SEQ ID NO: 240840 - DNA, 13 bp, Artificial Sequence
  Oligonucleotide for detection of SNP TSC0058736
ctttacctacctt

SEQ ID NO: 240841 - DNA, 13 bp, Artificial Sequence
  Oligonucleotide for detection of SNP TSC0058738
ataaggtgggtga

SEQ ID NO: 240842 - DNA, 13 bp, Artificial Sequence
  Oligonucleotide for detection of SNP TSC0058738
tcacccaccttat

SEQ ID NO: 240843 - DNA, 13 bp, Artificial Sequence
  Oligonucleotide for detection of SNP TSC0058738
ataaggagggtga

SEQ ID NO: 240844 - DNA, 13 bp, Artificial Sequence
  Oligonucleotide for detection of SNP TSC0058738
tcaccctccttat

SEQ ID NO: 240845 - DNA, 13 bp, Artificial Sequence
  Oligonucleotide for detection of SNP TSC0058739
agatagtaggtaa

SEQ ID NO: 240846 - DNA, 13 bp, Artificial Sequence
  Oligonucleotide for detection of SNP TSC0058739
ttacctactatct

SEQ ID NO: 240847 - DNA, 13 bp, Artificial Sequence
  Oligonucleotide for detection of SNP TSC0058739
agataggaggtaa

SEQ ID NO: 240848 - DNA, 13 bp, Artificial Sequence
  Oligonucleotide for detection of SNP TSC0058739
ttacctcctatct

SEQ ID NO: 240849 - DNA, 13 bp, Artificial Sequence
  Oligonucleotide for detection of SNP TSC0058741
aggatgtaaaaat

SEQ ID NO: 240850 - DNA, 13 bp, Artificial Sequence
  Oligonucleotide for detection of SNP TSC0058741
atttttacatcct

SEQ ID NO: 240851 - DNA, 13 bp, Artificial Sequence
  Oligonucleotide for detection of SNP TSC0058741
aggatggaaaaat

SEQ ID NO: 240852 - DNA, 13 bp, Artificial Sequence
  Oligonucleotide for detection of SNP TSC0058741
atttttccatcct

SEQ ID NO: 240853 - DNA, 13 bp, Artificial Sequence
  Oligonucleotide for detection of SNP TSC0058743
taagtaatttttt

SEQ ID NO: 240854 - DNA, 13 bp, Artificial Sequence
  Oligonucleotide for detection of SNP TSC0058743
aaaaaattactta

SEQ ID NO: 240855 - DNA, 13 bp, Artificial Sequence
  Oligonucleotide for detection of SNP TSC0058744
tatattaggttty

SEQ ID NO: 240856 - DNA, 13 bp, Artificial Sequence
  Oligonucleotide for detection of SNP TSC0058744
raaacctaatata

SEQ ID NO: 240857 - DNA, 13 bp, Artificial Sequence
  Oligonucleotide for detection of SNP TSC0058744
tatatttggttty

SEQ ID NO: 240858 - DNA, 13 bp, Artificial Sequence
  Oligonucleotide for detection of SNP TSC0058744
raaaccaaatata

SEQ ID NO: 240859 - DNA, 13 bp, Artificial Sequence
  Oligonucleotide for detection of SNP TSC0058744
gagatttgatata

SEQ ID NO: 240860 - DNA, 13 bp, Artificial Sequence
  Oligonucleotide for detection of SNP TSC0058744
tatatcaaatctc

SEQ ID NO: 240861 - DNA, 13 bp, Artificial Sequence
  Oligonucleotide for detection of SNP TSC0058744
gagattagatata

SEQ ID NO: 240862 - DNA, 13 bp, Artificial Sequence
  Oligonucleotide for detection of SNP TSC0058744
tatatctaatctc

SEQ ID NO: 240863 - DNA, 13 bp, Artificial Sequence
  Oligonucleotide for detection of SNP TSC0058745
tataaatgtgggg

SEQ ID NO: 240864 - DNA, 13 bp, Artificial Sequence
  Oligonucleotide for detection of SNP TSC0058745
ccccacatttata

SEQ ID NO: 240865 - DNA, 13 bp, Artificial Sequence
  Oligonucleotide for detection of SNP TSC0058745
tataaacgtgggg

SEQ ID NO: 240866 - DNA, 13 bp, Artificial Sequence
  Oligonucleotide for detection of SNP TSC0058745
ccccacgtttata

SEQ ID NO: 240867 - DNA, 13 bp, Artificial Sequence
  Oligonucleotide for detection of SNP TSC0058746
tgtaggatgtatt

SEQ ID NO: 240868 - DNA, 13 bp, Artificial Sequence
  Oligonucleotide for detection of SNP TSC0058746
aatacatcctaca

SEQ ID NO: 240869 - DNA, 13 bp, Artificial Sequence
  Oligonucleotide for detection of SNP TSC0058746
tgtaggttgtatt

SEQ ID NO: 240870 - DNA, 13 bp, Artificial Sequence
  Oligonucleotide for detection of SNP TSC0058746
aatacaacctaca

SEQ ID NO: 240871 - DNA, 13 bp, Artificial Sequence
  Oligonucleotide for detection of SNP TSC0058746
aatgtattttgta

SEQ ID NO: 240872 - DNA, 13 bp, Artificial Sequence
  Oligonucleotide for detection of SNP TSC0058746
tacaaaatacatt

SEQ ID NO: 240873 - DNA, 13 bp, Artificial Sequence
  Oligonucleotide for detection of SNP TSC0058746
aatgtagtttgta

SEQ ID NO: 240874 - DNA, 13 bp, Artificial Sequence
  Oligonucleotide for detection of SNP TSC0058746
tacaaactacatt

SEQ ID NO: 240875 - DNA, 13 bp, Artificial Sequence
  Oligonucleotide for detection of SNP TSC0058747
aaaatgaaaggaa

SEQ ID NO: 240876 - DNA, 13 bp, Artificial Sequence
  Oligonucleotide for detection of SNP TSC0058747
ttcctttcatttt

SEQ ID NO: 240877 - DNA, 13 bp, Artificial Sequence
  Oligonucleotide for detection of SNP TSC0058747
aaaatggaaggaa

SEQ ID NO: 240878 - DNA, 13 bp, Artificial Sequence
  Oligonucleotide for detection of SNP TSC0058747
ttccttccatttt

SEQ ID NO: 240879 - DNA, 13 bp, Artificial Sequence
  Oligonucleotide for detection of SNP TSC0058748
tttaaagaaatay

SEQ ID NO: 240880 - DNA, 13 bp, Artificial Sequence
  Oligonucleotide for detection of SNP TSC0058748
rtatttctttaaa

SEQ ID NO: 240881 - DNA, 13 bp, Artificial Sequence
  Oligonucleotide for detection of SNP TSC0058748
tttaaaaaaatay

SEQ ID NO: 240882 - DNA, 13 bp, Artificial Sequence
  Oligonucleotide for detection of SNP TSC0058748
rtatttttttaaa

SEQ ID NO: 240883 - DNA, 13 bp, Artificial Sequence
  Oligonucleotide for detection of SNP TSC0058751
gttttataataty

SEQ ID NO: 240884 - DNA, 13 bp, Artificial Sequence
  Oligonucleotide for detection of SNP TSC0058751
ratattataaaac

SEQ ID NO: 240885 - DNA, 13 bp, Artificial Sequence
  Oligonucleotide for detection of SNP TSC0058751
gttttagaataty

SEQ ID NO: 240886 - DNA, 13 bp, Artificial Sequence
  Oligonucleotide for detection of SNP TSC0058751
ratattctaaaac

SEQ ID NO: 240887 - DNA, 13 bp, Artificial Sequence
  Oligonucleotide for detection of SNP TSC0058751
gatgttataaggy

SEQ ID NO: 240888 - DNA, 13 bp, Artificial Sequence
  Oligonucleotide for detection of SNP TSC0058751
rccttataacatc

SEQ ID NO: 240889 - DNA, 13 bp, Artificial Sequence
  Oligonucleotide for detection of SNP TSC0058751
gatgttttaaggy

SEQ ID NO: 240890 - DNA, 13 bp, Artificial Sequence
  Oligonucleotide for detection of SNP TSC0058751
rccttaaaacatc

SEQ ID NO: 240891 - DNA, 13 bp, Artificial Sequence
  Oligonucleotide for detection of SNP TSC0058752
taaagtatgttaa

SEQ ID NO: 240892 - DNA, 13 bp, Artificial Sequence
  Oligonucleotide for detection of SNP TSC0058752
ttaacatacttta

SEQ ID NO: 240893 - DNA, 13 bp, Artificial Sequence
  Oligonucleotide for detection of SNP TSC0058752
taaagtttgttaa

SEQ ID NO: 240894 - DNA, 13 bp, Artificial Sequence
  Oligonucleotide for detection of SNP TSC0058752
ttaacaaacttta

SEQ ID NO: 240895 - DNA, 13 bp, Artificial Sequence
  Oligonucleotide for detection of SNP TSC0058752
ttggtatgttttg

SEQ ID NO: 240896 - DNA, 13 bp, Artificial Sequence
  Oligonucleotide for detection of SNP TSC0058752
caaaacataccaa

SEQ ID NO: 240897 - DNA, 13 bp, Artificial Sequence
  Oligonucleotide for detection of SNP TSC0058752
ttggtaggttttg

SEQ ID NO: 240898 - DNA, 13 bp, Artificial Sequence
  Oligonucleotide for detection of SNP TSC0058752
caaaacctaccaa

SEQ ID NO: 240899 - DNA, 13 bp, Artificial Sequence
  Oligonucleotide for detection of SNP TSC0058753
attaaatttaatt

SEQ ID NO: 240900 - DNA, 13 bp, Artificial Sequence
  Oligonucleotide for detection of SNP TSC0058753
aattaaatttaat

SEQ ID NO: 240901 - DNA, 13 bp, Artificial Sequence
  Oligonucleotide for detection of SNP TSC0058753
attaaagttaatt

SEQ ID NO: 240902 - DNA, 13 bp, Artificial Sequence
  Oligonucleotide for detection of SNP TSC0058753
aattaactttaat

SEQ ID NO: 240903 - DNA, 13 bp, Artificial Sequence
  Oligonucleotide for detection of SNP TSC0058753
aattaattttaat

SEQ ID NO: 240904 - DNA, 13 bp, Artificial Sequence
  Oligonucleotide for detection of SNP TSC0058753
attaaaattaatt

SEQ ID NO: 240905 - DNA, 13 bp, Artificial Sequence
  Oligonucleotide for detection of SNP TSC0058755
tatgtgttttata

SEQ ID NO: 240906 - DNA, 13 bp, Artificial Sequence
  Oligonucleotide for detection of SNP TSC0058755
tataaaacacata

SEQ ID NO: 240907 - DNA, 13 bp, Artificial Sequence
  Oligonucleotide for detection of SNP TSC0058755
tatgtggtttata

SEQ ID NO: 240908 - DNA, 13 bp, Artificial Sequence
  Oligonucleotide for detection of SNP TSC0058755
tataaaccacata

SEQ ID NO: 240909 - DNA, 13 bp, Artificial Sequence
  Oligonucleotide for detection of SNP TSC0058755
tgtaagatatata

SEQ ID NO: 240910 - DNA, 13 bp, Artificial Sequence
  Oligonucleotide for detection of SNP TSC0058755
tatatatcttaca

SEQ ID NO: 240911 - DNA, 13 bp, Artificial Sequence
  Oligonucleotide for detection of SNP TSC0058755
tgtaagttatata

SEQ ID NO: 240912 - DNA, 13 bp, Artificial Sequence
  Oligonucleotide for detection of SNP TSC0058755
tatataacttaca

SEQ ID NO: 240913 - DNA, 13 bp, Artificial Sequence
  Oligonucleotide for detection of SNP TSC0058756
tggtaataggtaa

SEQ ID NO: 240914 - DNA, 13 bp, Artificial Sequence
  Oligonucleotide for detection of SNP TSC0058756
ttacctattacca

SEQ ID NO: 240915 - DNA, 13 bp, Artificial Sequence
  Oligonucleotide for detection of SNP TSC0058756
tggtaagaggtaa

SEQ ID NO: 240916 - DNA, 13 bp, Artificial Sequence
  Oligonucleotide for detection of SNP TSC0058756
ttacctcttacca

SEQ ID NO: 240917 - DNA, 13 bp, Artificial Sequence
  Oligonucleotide for detection of SNP TSC0058757
taatatgtttgtg

SEQ ID NO: 240918 - DNA, 13 bp, Artificial Sequence
  Oligonucleotide for detection of SNP TSC0058757
cacaaacatatta

SEQ ID NO: 240919 - DNA, 13 bp, Artificial Sequence
  Oligonucleotide for detection of SNP TSC0058757
tataagaatgtta

SEQ ID NO: 240920 - DNA, 13 bp, Artificial Sequence
  Oligonucleotide for detection of SNP TSC0058757
taacattcttata

SEQ ID NO: 240921 - DNA, 13 bp, Artificial Sequence
  Oligonucleotide for detection of SNP TSC0058757
tataagtatgtta

SEQ ID NO: 240922 - DNA, 13 bp, Artificial Sequence
  Oligonucleotide for detection of SNP TSC0058757
taacatacttata

SEQ ID NO: 240923 - DNA, 13 bp, Artificial Sequence
  Oligonucleotide for detection of SNP TSC0058758
ttaaataagattt

SEQ ID NO: 240924 - DNA, 13 bp, Artificial Sequence
  Oligonucleotide for detection of SNP TSC0058758
aaatcttatttaa

SEQ ID NO: 240925 - DNA, 13 bp, Artificial Sequence
  Oligonucleotide for detection of SNP TSC0058758
ttaaatgagattt

SEQ ID NO: 240926 - DNA, 13 bp, Artificial Sequence
  Oligonucleotide for detection of SNP TSC0058758
aaatctcatttaa

SEQ ID NO: 240927 - DNA, 13 bp, Artificial Sequence
  Oligonucleotide for detection of SNP TSC0058758
ttaaacgagattt

SEQ ID NO: 240928 - DNA, 13 bp, Artificial Sequence
  Oligonucleotide for detection of SNP TSC0058758
aaatctcgtttaa

SEQ ID NO: 240929 - DNA, 13 bp, Artificial Sequence
  Oligonucleotide for detection of SNP TSC0058758
aaattttgtttaa

SEQ ID NO: 240930 - DNA, 13 bp, Artificial Sequence
  Oligonucleotide for detection of SNP TSC0058758
ttaaacaaaattt

SEQ ID NO: 240931 - DNA, 13 bp, Artificial Sequence
  Oligonucleotide for detection of SNP TSC0058758
aaatttcgtttaa

SEQ ID NO: 240932 - DNA, 13 bp, Artificial Sequence
  Oligonucleotide for detection of SNP TSC0058758
ttaaacgaaattt

SEQ ID NO: 240933 - DNA, 13 bp, Artificial Sequence
  Oligonucleotide for detection of SNP TSC0058759
gataggattttay

SEQ ID NO: 240934 - DNA, 13 bp, Artificial Sequence
  Oligonucleotide for detection of SNP TSC0058759
rtaaaatcctatc

SEQ ID NO: 240935 - DNA, 13 bp, Artificial Sequence
  Oligonucleotide for detection of SNP TSC0058760
ggtatttgaaaty

SEQ ID NO: 240936 - DNA, 13 bp, Artificial Sequence
  Oligonucleotide for detection of SNP TSC0058760
ratttcaaatacc

SEQ ID NO: 240937 - DNA, 13 bp, Artificial Sequence
  Oligonucleotide for detection of SNP TSC0058760
ggtattggaaaty

SEQ ID NO: 240938 - DNA, 13 bp, Artificial Sequence
  Oligonucleotide for detection of SNP TSC0058760
ratttccaatacc

SEQ ID NO: 240939 - DNA, 13 bp, Artificial Sequence
  Oligonucleotide for detection of SNP TSC0058760
ggtattcgaaaty

SEQ ID NO: 240940 - DNA, 13 bp, Artificial Sequence
  Oligonucleotide for detection of SNP TSC0058760
ratttcgaatacc

SEQ ID NO: 240941 - DNA, 13 bp, Artificial Sequence
  Oligonucleotide for detection of SNP TSC0058760
ggtatcggaaaty

SEQ ID NO: 240942 - DNA, 13 bp, Artificial Sequence
  Oligonucleotide for detection of SNP TSC0058760
ratttccgatacc

SEQ ID NO: 240943 - DNA, 13 bp, Artificial Sequence
  Oligonucleotide for detection of SNP TSC0058760
gattttggatgty

SEQ ID NO: 240944 - DNA, 13 bp, Artificial Sequence
  Oligonucleotide for detection of SNP TSC0058760
racatccaaaatc

SEQ ID NO: 240945 - DNA, 13 bp, Artificial Sequence
  Oligonucleotide for detection of SNP TSC0058760
gatttttgatgty

SEQ ID NO: 240946 - DNA, 13 bp, Artificial Sequence
  Oligonucleotide for detection of SNP TSC0058760
racatcaaaaatc

SEQ ID NO: 240947 - DNA, 13 bp, Artificial Sequence
  Oligonucleotide for detection of SNP TSC0058760
gatttcggatgty

SEQ ID NO: 240948 - DNA, 13 bp, Artificial Sequence
  Oligonucleotide for detection of SNP TSC0058760
racatccgaaatc

SEQ ID NO: 240949 - DNA, 13 bp, Artificial Sequence
  Oligonucleotide for detection of SNP TSC0058760
gattttcgatgty

SEQ ID NO: 240950 - DNA, 13 bp, Artificial Sequence
  Oligonucleotide for detection of SNP TSC0058760
racatcgaaaatc

SEQ ID NO: 240951 - DNA, 13 bp, Artificial Sequence
  Oligonucleotide for detection of SNP TSC0058761
gaaggtattttty

SEQ ID NO: 240952 - DNA, 13 bp, Artificial Sequence
  Oligonucleotide for detection of SNP TSC0058761
raaaaataccttc

SEQ ID NO: 240953 - DNA, 13 bp, Artificial Sequence
  Oligonucleotide for detection of SNP TSC0058761
gaaggtgttttty

SEQ ID NO: 240954 - DNA, 13 bp, Artificial Sequence
  Oligonucleotide for detection of SNP TSC0058761
raaaaacaccttc

SEQ ID NO: 240955 - DNA, 13 bp, Artificial Sequence
  Oligonucleotide for detection of SNP TSC0058761
gaaggcgttttty

SEQ ID NO: 240956 - DNA, 13 bp, Artificial Sequence
  Oligonucleotide for detection of SNP TSC0058761
raaaaacgccttc

SEQ ID NO: 240957 - DNA, 13 bp, Artificial Sequence
  Oligonucleotide for detection of SNP TSC0058761
gaaggatgtttty

SEQ ID NO: 240958 - DNA, 13 bp, Artificial Sequence
  Oligonucleotide for detection of SNP TSC0058761
raaaacatccttc

SEQ ID NO: 240959 - DNA, 13 bp, Artificial Sequence
  Oligonucleotide for detection of SNP TSC0058761
gaaggacgtttty

SEQ ID NO: 240960 - DNA, 13 bp, Artificial Sequence
  Oligonucleotide for detection of SNP TSC0058761
raaaacgtccttc

SEQ ID NO: 240961 - DNA, 13 bp, Artificial Sequence
  Oligonucleotide for detection of SNP TSC0058762
tttagaaaattaa

SEQ ID NO: 240962 - DNA, 13 bp, Artificial Sequence
  Oligonucleotide for detection of SNP TSC0058762
ttaattttctaaa

SEQ ID NO: 240963 - DNA, 13 bp, Artificial Sequence
  Oligonucleotide for detection of SNP TSC0058763
aaggagtgatgta

SEQ ID NO: 240964 - DNA, 13 bp, Artificial Sequence
  Oligonucleotide for detection of SNP TSC0058763
tacatcactcctt

SEQ ID NO: 240965 - DNA, 13 bp, Artificial Sequence
  Oligonucleotide for detection of SNP TSC0058763
aaggagcgatgta

SEQ ID NO: 240966 - DNA, 13 bp, Artificial Sequence
  Oligonucleotide for detection of SNP TSC0058763
tacatcgctcctt

SEQ ID NO: 240967 - DNA, 13 bp, Artificial Sequence
  Oligonucleotide for detection of SNP TSC0058764
tgatgtatgttta

SEQ ID NO: 240968 - DNA, 13 bp, Artificial Sequence
  Oligonucleotide for detection of SNP TSC0058764
taaacatacatca

SEQ ID NO: 240969 - DNA, 13 bp, Artificial Sequence
  Oligonucleotide for detection of SNP TSC0058764
tgatgtgtgttta

SEQ ID NO: 240970 - DNA, 13 bp, Artificial Sequence
  Oligonucleotide for detection of SNP TSC0058764
taaacacacatca

SEQ ID NO: 240971 - DNA, 13 bp, Artificial Sequence
  Oligonucleotide for detection of SNP TSC0058767
tttttaaggtaag

SEQ ID NO: 240972 - DNA, 13 bp, Artificial Sequence
  Oligonucleotide for detection of SNP TSC0058767
cttaccttaaaaa

SEQ ID NO: 240973 - DNA, 13 bp, Artificial Sequence
  Oligonucleotide for detection of SNP TSC0058767
tttttagggtaag

SEQ ID NO: 240974 - DNA, 13 bp, Artificial Sequence
  Oligonucleotide for detection of SNP TSC0058767
cttaccctaaaaa

SEQ ID NO: 240975 - DNA, 13 bp, Artificial Sequence
  Oligonucleotide for detection of SNP TSC0058768
tatttagtgttgy

SEQ ID NO: 240976 - DNA, 13 bp, Artificial Sequence
  Oligonucleotide for detection of SNP TSC0058768
rcaacactaaata

SEQ ID NO: 240977 - DNA, 13 bp, Artificial Sequence
  Oligonucleotide for detection of SNP TSC0058768
tatttaatgttgy

SEQ ID NO: 240978 - DNA, 13 bp, Artificial Sequence
  Oligonucleotide for detection of SNP TSC0058768
rcaacattaaata

SEQ ID NO: 240979 - DNA, 13 bp, Artificial Sequence
  Oligonucleotide for detection of SNP TSC0058772
aatttaatttatt

SEQ ID NO: 240980 - DNA, 13 bp, Artificial Sequence
  Oligonucleotide for detection of SNP TSC0058772
aataaattaaatt

SEQ ID NO: 240981 - DNA, 13 bp, Artificial Sequence
  Oligonucleotide for detection of SNP TSC0058772
aatttagtttatt

SEQ ID NO: 240982 - DNA, 13 bp, Artificial Sequence
  Oligonucleotide for detection of SNP TSC0058772
aataaactaaatt

SEQ ID NO: 240983 - DNA, 13 bp, Artificial Sequence
  Oligonucleotide for detection of SNP TSC0058773
gttttgagaatag

SEQ ID NO: 240984 - DNA, 13 bp, Artificial Sequence
  Oligonucleotide for detection of SNP TSC0058773
ctattctcaaaac

SEQ ID NO: 240985 - DNA, 13 bp, Artificial Sequence
  Oligonucleotide for detection of SNP TSC0058773
gttttgggaatag

SEQ ID NO: 240986 - DNA, 13 bp, Artificial Sequence
  Oligonucleotide for detection of SNP TSC0058773
ctattcccaaaac

SEQ ID NO: 240987 - DNA, 13 bp, Artificial Sequence
  Oligonucleotide for detection of SNP TSC0058775
tttatgtggattt

SEQ ID NO: 240988 - DNA, 13 bp, Artificial Sequence
  Oligonucleotide for detection of SNP TSC0058775
aaatccacataaa

SEQ ID NO: 240989 - DNA, 13 bp, Artificial Sequence
  Oligonucleotide for detection of SNP TSC0058775
tttatgcggattt

SEQ ID NO: 240990 - DNA, 13 bp, Artificial Sequence
  Oligonucleotide for detection of SNP TSC0058775
aaatccgcataaa

SEQ ID NO: 240991 - DNA, 13 bp, Artificial Sequence
  Oligonucleotide for detection of SNP TSC0058775
aaatttgtatgag

SEQ ID NO: 240992 - DNA, 13 bp, Artificial Sequence
  Oligonucleotide for detection of SNP TSC0058775
ctcatacaaattt

SEQ ID NO: 240993 - DNA, 13 bp, Artificial Sequence
  Oligonucleotide for detection of SNP TSC0058775
aaatttatatgag

SEQ ID NO: 240994 - DNA, 13 bp, Artificial Sequence
  Oligonucleotide for detection of SNP TSC0058775
ctcatataaattt

SEQ ID NO: 240995 - DNA, 13 bp, Artificial Sequence
  Oligonucleotide for detection of SNP TSC0058775
aaattcgtatgag

SEQ ID NO: 240996 - DNA, 13 bp, Artificial Sequence
  Oligonucleotide for detection of SNP TSC0058775
ctcatacgaattt

SEQ ID NO: 240997 - DNA, 13 bp, Artificial Sequence
  Oligonucleotide for detection of SNP TSC0058776
aggaaaatgaata

SEQ ID NO: 240998 - DNA, 13 bp, Artificial Sequence
  Oligonucleotide for detection of SNP TSC0058776
tattcattttcct

SEQ ID NO: 240999 - DNA, 13 bp, Artificial Sequence
  Oligonucleotide for detection of SNP TSC0058776
aggaaagtgaata

SEQ ID NO: 241000 - DNA, 13 bp, Artificial Sequence
  Oligonucleotide for detection of SNP TSC0058776
tattcactttcct

SEQ ID NO: 241001 - DNA, 13 bp, Artificial Sequence
  Oligonucleotide for detection of SNP TSC0058780
agattatggtgtt

SEQ ID NO: 241002 - DNA, 13 bp, Artificial Sequence
  Oligonucleotide for detection of SNP TSC0058780
aacaccataatct

SEQ ID NO: 241003 - DNA, 13 bp, Artificial Sequence
  Oligonucleotide for detection of SNP TSC0058780
agattacggtgtt

SEQ ID NO: 241004 - DNA, 13 bp, Artificial Sequence
  Oligonucleotide for detection of SNP TSC0058780
aacaccgtaatct

SEQ ID NO: 241005 - DNA, 13 bp, Artificial Sequence
  Oligonucleotide for detection of SNP TSC0058780
agattatggcgtt

SEQ ID NO: 241006 - DNA, 13 bp, Artificial Sequence
  Oligonucleotide for detection of SNP TSC0058780
aacgccataatct

SEQ ID NO: 241007 - DNA, 13 bp, Artificial Sequence
  Oligonucleotide for detection of SNP TSC0058780
agattacggcgtt

SEQ ID NO: 241008 - DNA, 13 bp, Artificial Sequence
  Oligonucleotide for detection of SNP TSC0058780
aacgccgtaatct

SEQ ID NO: 241009 - DNA, 13 bp, Artificial Sequence
  Oligonucleotide for detection of SNP TSC0058780
agtgttgtggttt

SEQ ID NO: 241010 - DNA, 13 bp, Artificial Sequence
  Oligonucleotide for detection of SNP TSC0058780
aaaccacaacact

SEQ ID NO: 241011 - DNA, 13 bp, Artificial Sequence
  Oligonucleotide for detection of SNP TSC0058780
agtgttatggttt

SEQ ID NO: 241012 - DNA, 13 bp, Artificial Sequence
  Oligonucleotide for detection of SNP TSC0058780
aaaccataacact

SEQ ID NO: 241013 - DNA, 13 bp, Artificial Sequence
  Oligonucleotide for detection of SNP TSC0058780
agcgttgtggttt

SEQ ID NO: 241014 - DNA, 13 bp, Artificial Sequence
  Oligonucleotide for detection of SNP TSC0058780
aaaccacaacgct

SEQ ID NO: 241015 - DNA, 13 bp, Artificial Sequence
  Oligonucleotide for detection of SNP TSC0058780
agcgttatggttt

SEQ ID NO: 241016 - DNA, 13 bp, Artificial Sequence
  Oligonucleotide for detection of SNP TSC0058780
aaaccataacgct

SEQ ID NO: 241017 - DNA, 13 bp, Artificial Sequence
  Oligonucleotide for detection of SNP TSC0058780
agtgtcgtggttt

SEQ ID NO: 241018 - DNA, 13 bp, Artificial Sequence
  Oligonucleotide for detection of SNP TSC0058780
aaaccacgacact

SEQ ID NO: 241019 - DNA, 13 bp, Artificial Sequence
  Oligonucleotide for detection of SNP TSC0058780
agcgtcgtggttt

SEQ ID NO: 241020 - DNA, 13 bp, Artificial Sequence
  Oligonucleotide for detection of SNP TSC0058780
aaaccacgacgct

SEQ ID NO: 241021 - DNA, 13 bp, Artificial Sequence
  Oligonucleotide for detection of SNP TSC0058781
atatggatagtag

SEQ ID NO: 241022 - DNA, 13 bp, Artificial Sequence
  Oligonucleotide for detection of SNP TSC0058781
ctactatccatat

SEQ ID NO: 241023 - DNA, 13 bp, Artificial Sequence
  Oligonucleotide for detection of SNP TSC0058781
atatgggtagtag

SEQ ID NO: 241024 - DNA, 13 bp, Artificial Sequence
  Oligonucleotide for detection of SNP TSC0058781
ctactacccatat

SEQ ID NO: 241025 - DNA, 13 bp, Artificial Sequence
  Oligonucleotide for detection of SNP TSC0058782
ttatggtgttggg

SEQ ID NO: 241026 - DNA, 13 bp, Artificial Sequence
  Oligonucleotide for detection of SNP TSC0058782
cccaacaccataa

SEQ ID NO: 241027 - DNA, 13 bp, Artificial Sequence
  Oligonucleotide for detection of SNP TSC0058782
ttatggggttggg

SEQ ID NO: 241028 - DNA, 13 bp, Artificial Sequence
  Oligonucleotide for detection of SNP TSC0058782
cccaaccccataa

SEQ ID NO: 241029 - DNA, 13 bp, Artificial Sequence
  Oligonucleotide for detection of SNP TSC0058782
ttatggcgttggg

SEQ ID NO: 241030 - DNA, 13 bp, Artificial Sequence
  Oligonucleotide for detection of SNP TSC0058782
cccaacgccataa

SEQ ID NO: 241031 - DNA, 13 bp, Artificial Sequence
  Oligonucleotide for detection of SNP TSC0058782
tttagtgttatgg

SEQ ID NO: 241032 - DNA, 13 bp, Artificial Sequence
  Oligonucleotide for detection of SNP TSC0058782
ccataacactaaa

SEQ ID NO: 241033 - DNA, 13 bp, Artificial Sequence
  Oligonucleotide for detection of SNP TSC0058782
tttagttttatgg

SEQ ID NO: 241034 - DNA, 13 bp, Artificial Sequence
  Oligonucleotide for detection of SNP TSC0058782
ccataaaactaaa

SEQ ID NO: 241035 - DNA, 13 bp, Artificial Sequence
  Oligonucleotide for detection of SNP TSC0058782
tttagcgttatgg

SEQ ID NO: 241036 - DNA, 13 bp, Artificial Sequence
  Oligonucleotide for detection of SNP TSC0058782
ccataacgctaaa

SEQ ID NO: 241037 - DNA, 13 bp, Artificial Sequence
  Oligonucleotide for detection of SNP TSC0058784
aaatgggttaatg

SEQ ID NO: 241038 - DNA, 13 bp, Artificial Sequence
  Oligonucleotide for detection of SNP TSC0058784
cattaacccattt

SEQ ID NO: 241039 - DNA, 13 bp, Artificial Sequence
  Oligonucleotide for detection of SNP TSC0058784
aaatggattaatg

SEQ ID NO: 241040 - DNA, 13 bp, Artificial Sequence
  Oligonucleotide for detection of SNP TSC0058784
cattaatccattt

SEQ ID NO: 241041 - DNA, 13 bp, Artificial Sequence
  Oligonucleotide for detection of SNP TSC0058786
ttatgtgttattg

SEQ ID NO: 241042 - DNA, 13 bp, Artificial Sequence
  Oligonucleotide for detection of SNP TSC0058786
caataacacataa

SEQ ID NO: 241043 - DNA, 13 bp, Artificial Sequence
  Oligonucleotide for detection of SNP TSC0058786
ttatgtattattg

SEQ ID NO: 241044 - DNA, 13 bp, Artificial Sequence
  Oligonucleotide for detection of SNP TSC0058786
caataatacataa

SEQ ID NO: 241045 - DNA, 13 bp, Artificial Sequence
  Oligonucleotide for detection of SNP TSC0058792
ggtgtgttggtty

SEQ ID NO: 241046 - DNA, 13 bp, Artificial Sequence
  Oligonucleotide for detection of SNP TSC0058792
raaccaacacacc

SEQ ID NO: 241047 - DNA, 13 bp, Artificial Sequence
  Oligonucleotide for detection of SNP TSC0058792
gagttagtataty

SEQ ID NO: 241048 - DNA, 13 bp, Artificial Sequence
  Oligonucleotide for detection of SNP TSC0058792
ratatactaactc

SEQ ID NO: 241049 - DNA, 13 bp, Artificial Sequence
  Oligonucleotide for detection of SNP TSC0058792
gagttattataty

SEQ ID NO: 241050 - DNA, 13 bp, Artificial Sequence
  Oligonucleotide for detection of SNP TSC0058792
ratataataactc

SEQ ID NO: 241051 - DNA, 13 bp, Artificial Sequence
  Oligonucleotide for detection of SNP TSC0058794
ggatgatgtggty

SEQ ID NO: 241052 - DNA, 13 bp, Artificial Sequence
  Oligonucleotide for detection of SNP TSC0058794
raccacatcatcc

SEQ ID NO: 241053 - DNA, 13 bp, Artificial Sequence
  Oligonucleotide for detection of SNP TSC0058794
ggatgacgtggty

SEQ ID NO: 241054 - DNA, 13 bp, Artificial Sequence
  Oligonucleotide for detection of SNP TSC0058794
raccacgtcatcc

SEQ ID NO: 241055 - DNA, 13 bp, Artificial Sequence
  Oligonucleotide for detection of SNP TSC0058794
ggttatgttatty

SEQ ID NO: 241056 - DNA, 13 bp, Artificial Sequence
  Oligonucleotide for detection of SNP TSC0058794
raataacataacc

SEQ ID NO: 241057 - DNA, 13 bp, Artificial Sequence
  Oligonucleotide for detection of SNP TSC0058794
ggttatattatty

SEQ ID NO: 241058 - DNA, 13 bp, Artificial Sequence
  Oligonucleotide for detection of SNP TSC0058794
raataatataacc

SEQ ID NO: 241059 - DNA, 13 bp, Artificial Sequence
  Oligonucleotide for detection of SNP TSC0058794
ggttacgttatty

SEQ ID NO: 241060 - DNA, 13 bp, Artificial Sequence
  Oligonucleotide for detection of SNP TSC0058794
raataacgtaacc

SEQ ID NO: 241061 - DNA, 13 bp, Artificial Sequence
  Oligonucleotide for detection of SNP TSC0058796
taatggaaattta

SEQ ID NO: 241062 - DNA, 13 bp, Artificial Sequence
  Oligonucleotide for detection of SNP TSC0058796
taaatttccatta

SEQ ID NO: 241063 - DNA, 13 bp, Artificial Sequence
  Oligonucleotide for detection of SNP TSC0058796
taatgggaattta

SEQ ID NO: 241064 - DNA, 13 bp, Artificial Sequence
  Oligonucleotide for detection of SNP TSC0058796
taaattcccatta

SEQ ID NO: 241065 - DNA, 13 bp, Artificial Sequence
  Oligonucleotide for detection of SNP TSC0058799
gattgtataatta

SEQ ID NO: 241066 - DNA, 13 bp, Artificial Sequence
  Oligonucleotide for detection of SNP TSC0058799
taattatacaatc

SEQ ID NO: 241067 - DNA, 13 bp, Artificial Sequence
  Oligonucleotide for detection of SNP TSC0058799
gattgtgtaatta

SEQ ID NO: 241068 - DNA, 13 bp, Artificial Sequence
  Oligonucleotide for detection of SNP TSC0058799
taattacacaatc

SEQ ID NO: 241069 - DNA, 13 bp, Artificial Sequence
  Oligonucleotide for detection of SNP TSC0058799
gatcgtataatta

SEQ ID NO: 241070 - DNA, 13 bp, Artificial Sequence
  Oligonucleotide for detection of SNP TSC0058799
taattatacgatc

SEQ ID NO: 241071 - DNA, 13 bp, Artificial Sequence
  Oligonucleotide for detection of SNP TSC0058799
gatcgtgtaatta

SEQ ID NO: 241072 - DNA, 13 bp, Artificial Sequence
  Oligonucleotide for detection of SNP TSC0058799
taattacacgatc

SEQ ID NO: 241073 - DNA, 13 bp, Artificial Sequence
  Oligonucleotide for detection of SNP TSC0058799
gattgcgtaatta

SEQ ID NO: 241074 - DNA, 13 bp, Artificial Sequence
  Oligonucleotide for detection of SNP TSC0058799
taattacgcaatc

SEQ ID NO: 241075 - DNA, 13 bp, Artificial Sequence
  Oligonucleotide for detection of SNP TSC0058799
gatcgcgtaatta

SEQ ID NO: 241076 - DNA, 13 bp, Artificial Sequence
  Oligonucleotide for detection of SNP TSC0058799
taattacgcgatc

SEQ ID NO: 241077 - DNA, 13 bp, Artificial Sequence
  Oligonucleotide for detection of SNP TSC0058799
tgattatgtggty

SEQ ID NO: 241078 - DNA, 13 bp, Artificial Sequence
  Oligonucleotide for detection of SNP TSC0058799
raccacataatca

SEQ ID NO: 241079 - DNA, 13 bp, Artificial Sequence
  Oligonucleotide for detection of SNP TSC0058799
tgattatgcggty

SEQ ID NO: 241080 - DNA, 13 bp, Artificial Sequence
  Oligonucleotide for detection of SNP TSC0058799
raccgcataatca

SEQ ID NO: 241081 - DNA, 13 bp, Artificial Sequence
  Oligonucleotide for detection of SNP TSC0058799
tgattacgtggty

SEQ ID NO: 241082 - DNA, 13 bp, Artificial Sequence
  Oligonucleotide for detection of SNP TSC0058799
raccacgtaatca

SEQ ID NO: 241083 - DNA, 13 bp, Artificial Sequence
  Oligonucleotide for detection of SNP TSC0058799
tgattacgcggty

SEQ ID NO: 241084 - DNA, 13 bp, Artificial Sequence
  Oligonucleotide for detection of SNP TSC0058799
raccgcgtaatca

SEQ ID NO: 241085 - DNA, 13 bp, Artificial Sequence
  Oligonucleotide for detection of SNP TSC0058802
ttatttgagaaag

SEQ ID NO: 241086 - DNA, 13 bp, Artificial Sequence
  Oligonucleotide for detection of SNP TSC0058802
ctttctcaaataa

SEQ ID NO: 241087 - DNA, 13 bp, Artificial Sequence
  Oligonucleotide for detection of SNP TSC0058802
ttatttaagaaag

SEQ ID NO: 241088 - DNA, 13 bp, Artificial Sequence
  Oligonucleotide for detection of SNP TSC0058802
ctttcttaaataa

SEQ ID NO: 241089 - DNA, 13 bp, Artificial Sequence
  Oligonucleotide for detection of SNP TSC0058803
tttagtggtttga

SEQ ID NO: 241090 - DNA, 13 bp, Artificial Sequence
  Oligonucleotide for detection of SNP TSC0058803
tcaaaccactaaa

SEQ ID NO: 241091 - DNA, 13 bp, Artificial Sequence
  Oligonucleotide for detection of SNP TSC0058804
ggaaataaaaaag

SEQ ID NO: 241092 - DNA, 13 bp, Artificial Sequence
  Oligonucleotide for detection of SNP TSC0058804
cttttttatttcc

SEQ ID NO: 241093 - DNA, 13 bp, Artificial Sequence
  Oligonucleotide for detection of SNP TSC0058804
ggaaattaaaaag

SEQ ID NO: 241094 - DNA, 13 bp, Artificial Sequence
  Oligonucleotide for detection of SNP TSC0058804
ctttttaatttcc

SEQ ID NO: 241095 - DNA, 13 bp, Artificial Sequence
  Oligonucleotide for detection of SNP TSC0058805
taagagaaagaga

SEQ ID NO: 241096 - DNA, 13 bp, Artificial Sequence
  Oligonucleotide for detection of SNP TSC0058805
tctctttctctta

SEQ ID NO: 241097 - DNA, 13 bp, Artificial Sequence
  Oligonucleotide for detection of SNP TSC0058805
taagagtaagaga

SEQ ID NO: 241098 - DNA, 13 bp, Artificial Sequence
  Oligonucleotide for detection of SNP TSC0058805
tctcttactctta

SEQ ID NO: 241099 - DNA, 13 bp, Artificial Sequence
  Oligonucleotide for detection of SNP TSC0058807
gttattattaaty

SEQ ID NO: 241100 - DNA, 13 bp, Artificial Sequence
  Oligonucleotide for detection of SNP TSC0058807
rattaataataac

SEQ ID NO: 241101 - DNA, 13 bp, Artificial Sequence
  Oligonucleotide for detection of SNP TSC0058807
gttattgttaaty

SEQ ID NO: 241102 - DNA, 13 bp, Artificial Sequence
  Oligonucleotide for detection of SNP TSC0058807
rattaacaataac

SEQ ID NO: 241103 - DNA, 13 bp, Artificial Sequence
  Oligonucleotide for detection of SNP TSC0058808
ggtattggtatta

SEQ ID NO: 241104 - DNA, 13 bp, Artificial Sequence
  Oligonucleotide for detection of SNP TSC0058808
taataccaatacc

SEQ ID NO: 241105 - DNA, 13 bp, Artificial Sequence
  Oligonucleotide for detection of SNP TSC0058808
ggtattagtatta

SEQ ID NO: 241106 - DNA, 13 bp, Artificial Sequence
  Oligonucleotide for detection of SNP TSC0058808
taatactaatacc

SEQ ID NO: 241107 - DNA, 13 bp, Artificial Sequence
  Oligonucleotide for detection of SNP TSC0058813
ggaaaatataggy

SEQ ID NO: 241108 - DNA, 13 bp, Artificial Sequence
  Oligonucleotide for detection of SNP TSC0058813
rcctatattttcc

SEQ ID NO: 241109 - DNA, 13 bp, Artificial Sequence
  Oligonucleotide for detection of SNP TSC0058813
ggaaaagataggy

SEQ ID NO: 241110 - DNA, 13 bp, Artificial Sequence
  Oligonucleotide for detection of SNP TSC0058813
rcctatcttttcc

SEQ ID NO: 241111 - DNA, 13 bp, Artificial Sequence
  Oligonucleotide for detection of SNP TSC0058814
aattaagatttat

SEQ ID NO: 241112 - DNA, 13 bp, Artificial Sequence
  Oligonucleotide for detection of SNP TSC0058814
ataaatcttaatt

SEQ ID NO: 241113 - DNA, 13 bp, Artificial Sequence
  Oligonucleotide for detection of SNP TSC0058814
aattaaaatttat

SEQ ID NO: 241114 - DNA, 13 bp, Artificial Sequence
  Oligonucleotide for detection of SNP TSC0058814
ataaattttaatt

SEQ ID NO: 241115 - DNA, 13 bp, Artificial Sequence
  Oligonucleotide for detection of SNP TSC0058815
atgaagggagtat

SEQ ID NO: 241116 - DNA, 13 bp, Artificial Sequence
  Oligonucleotide for detection of SNP TSC0058815
atactcccttcat

SEQ ID NO: 241117 - DNA, 13 bp, Artificial Sequence
  Oligonucleotide for detection of SNP TSC0058815
atgaagagagtat

SEQ ID NO: 241118 - DNA, 13 bp, Artificial Sequence
  Oligonucleotide for detection of SNP TSC0058815
atactctcttcat

SEQ ID NO: 241119 - DNA, 13 bp, Artificial Sequence
  Oligonucleotide for detection of SNP TSC0058818
tgtttaaaattgy

SEQ ID NO: 241120 - DNA, 13 bp, Artificial Sequence
  Oligonucleotide for detection of SNP TSC0058818
rcaattttaaaca

SEQ ID NO: 241121 - DNA, 13 bp, Artificial Sequence
  Oligonucleotide for detection of SNP TSC0058818
tgtttagaattgy

SEQ ID NO: 241122 - DNA, 13 bp, Artificial Sequence
  Oligonucleotide for detection of SNP TSC0058818
rcaattctaaaca

SEQ ID NO: 241123 - DNA, 13 bp, Artificial Sequence
  Oligonucleotide for detection of SNP TSC0058819
ttgtatatggtaa

SEQ ID NO: 241124 - DNA, 13 bp, Artificial Sequence
  Oligonucleotide for detection of SNP TSC0058819
ttaccatatacaa

SEQ ID NO: 241125 - DNA, 13 bp, Artificial Sequence
  Oligonucleotide for detection of SNP TSC0058819
ttgtatgtggtaa

SEQ ID NO: 241126 - DNA, 13 bp, Artificial Sequence
  Oligonucleotide for detection of SNP TSC0058819
ttaccacatacaa

SEQ ID NO: 241127 - DNA, 13 bp, Artificial Sequence
  Oligonucleotide for detection of SNP TSC0058820
tattaaaatgtta

SEQ ID NO: 241128 - DNA, 13 bp, Artificial Sequence
  Oligonucleotide for detection of SNP TSC0058820
taacattttaata

SEQ ID NO: 241129 - DNA, 13 bp, Artificial Sequence
  Oligonucleotide for detection of SNP TSC0058820
tattaagatgtta

SEQ ID NO: 241130 - DNA, 13 bp, Artificial Sequence
  Oligonucleotide for detection of SNP TSC0058820
taacatcttaata

SEQ ID NO: 241131 - DNA, 13 bp, Artificial Sequence
  Oligonucleotide for detection of SNP TSC0058821
aatttaaaaaata

SEQ ID NO: 241132 - DNA, 13 bp, Artificial Sequence
  Oligonucleotide for detection of SNP TSC0058821
tattttttaaatt

SEQ ID NO: 241133 - DNA, 13 bp, Artificial Sequence
  Oligonucleotide for detection of SNP TSC0058821
aatttagaaaata

SEQ ID NO: 241134 - DNA, 13 bp, Artificial Sequence
  Oligonucleotide for detection of SNP TSC0058821
tattttctaaatt

SEQ ID NO: 241135 - DNA, 13 bp, Artificial Sequence
  Oligonucleotide for detection of SNP TSC0058822
tttatattgggga

SEQ ID NO: 241136 - DNA, 13 bp, Artificial Sequence
  Oligonucleotide for detection of SNP TSC0058822
tccccaatataaa

SEQ ID NO: 241137 - DNA, 13 bp, Artificial Sequence
  Oligonucleotide for detection of SNP TSC0058822
tttatagtgggga

SEQ ID NO: 241138 - DNA, 13 bp, Artificial Sequence
  Oligonucleotide for detection of SNP TSC0058822
tccccactataaa

SEQ ID NO: 241139 - DNA, 13 bp, Artificial Sequence
  Oligonucleotide for detection of SNP TSC0058822
tttttagtataaa

SEQ ID NO: 241140 - DNA, 13 bp, Artificial Sequence
  Oligonucleotide for detection of SNP TSC0058822
tttatactaaaaa

SEQ ID NO: 241141 - DNA, 13 bp, Artificial Sequence
  Oligonucleotide for detection of SNP TSC0058822
tttttattataaa

SEQ ID NO: 241142 - DNA, 13 bp, Artificial Sequence
  Oligonucleotide for detection of SNP TSC0058822
tttataataaaaa

SEQ ID NO: 241143 - DNA, 13 bp, Artificial Sequence
  Oligonucleotide for detection of SNP TSC0058823
tatggtatgagag

SEQ ID NO: 241144 - DNA, 13 bp, Artificial Sequence
  Oligonucleotide for detection of SNP TSC0058823
ctctcataccata

SEQ ID NO: 241145 - DNA, 13 bp, Artificial Sequence
  Oligonucleotide for detection of SNP TSC0058823
tatggtttgagag

SEQ ID NO: 241146 - DNA, 13 bp, Artificial Sequence
  Oligonucleotide for detection of SNP TSC0058823
ctctcaaaccata

SEQ ID NO: 241147 - DNA, 13 bp, Artificial Sequence
  Oligonucleotide for detection of SNP TSC0058823
tacggtatgagag

SEQ ID NO: 241148 - DNA, 13 bp, Artificial Sequence
  Oligonucleotide for detection of SNP TSC0058823
ctctcataccgta

SEQ ID NO: 241149 - DNA, 13 bp, Artificial Sequence
  Oligonucleotide for detection of SNP TSC0058823
tacggtttgagag

SEQ ID NO: 241150 - DNA, 13 bp, Artificial Sequence
  Oligonucleotide for detection of SNP TSC0058823
ctctcaaaccgta

SEQ ID NO: 241151 - DNA, 13 bp, Artificial Sequence
  Oligonucleotide for detection of SNP TSC0058823
tttttatattgtg

SEQ ID NO: 241152 - DNA, 13 bp, Artificial Sequence
  Oligonucleotide for detection of SNP TSC0058823
cacaatataaaaa

SEQ ID NO: 241153 - DNA, 13 bp, Artificial Sequence
  Oligonucleotide for detection of SNP TSC0058823
tttttaaattgtg

SEQ ID NO: 241154 - DNA, 13 bp, Artificial Sequence
  Oligonucleotide for detection of SNP TSC0058823
cacaatttaaaaa

SEQ ID NO: 241155 - DNA, 13 bp, Artificial Sequence
  Oligonucleotide for detection of SNP TSC0058823
tttttatatcgtg

SEQ ID NO: 241156 - DNA, 13 bp, Artificial Sequence
  Oligonucleotide for detection of SNP TSC0058823
cacgatataaaaa

SEQ ID NO: 241157 - DNA, 13 bp, Artificial Sequence
  Oligonucleotide for detection of SNP TSC0058823
tttttaaatcgtg

SEQ ID NO: 241158 - DNA, 13 bp, Artificial Sequence
  Oligonucleotide for detection of SNP TSC0058823
cacgatttaaaaa

SEQ ID NO: 241159 - DNA, 13 bp, Artificial Sequence
  Oligonucleotide for detection of SNP TSC0058824
tttatatgaataa

SEQ ID NO: 241160 - DNA, 13 bp, Artificial Sequence
  Oligonucleotide for detection of SNP TSC0058824
ttattcatataaa

SEQ ID NO: 241161 - DNA, 13 bp, Artificial Sequence
  Oligonucleotide for detection of SNP TSC0058824
tttatacgaataa

SEQ ID NO: 241162 - DNA, 13 bp, Artificial Sequence
  Oligonucleotide for detection of SNP TSC0058824
ttattcgtataaa

SEQ ID NO: 241163 - DNA, 13 bp, Artificial Sequence
  Oligonucleotide for detection of SNP TSC0058824
ttgtttgtataga

SEQ ID NO: 241164 - DNA, 13 bp, Artificial Sequence
  Oligonucleotide for detection of SNP TSC0058824
tctatacaaacaa

SEQ ID NO: 241165 - DNA, 13 bp, Artificial Sequence
  Oligonucleotide for detection of SNP TSC0058824
ttgtttatataga

SEQ ID NO: 241166 - DNA, 13 bp, Artificial Sequence
  Oligonucleotide for detection of SNP TSC0058824
tctatataaacaa

SEQ ID NO: 241167 - DNA, 13 bp, Artificial Sequence
  Oligonucleotide for detection of SNP TSC0058824
ttgttcgtataga

SEQ ID NO: 241168 - DNA, 13 bp, Artificial Sequence
  Oligonucleotide for detection of SNP TSC0058824
tctatacgaacaa

SEQ ID NO: 241169 - DNA, 13 bp, Artificial Sequence
  Oligonucleotide for detection of SNP TSC0004685
attttatggggtt

SEQ ID NO: 241170 - DNA, 13 bp, Artificial Sequence
  Oligonucleotide for detection of SNP TSC0004685
aaccccataaaat

SEQ ID NO: 241171 - DNA, 13 bp, Artificial Sequence
  Oligonucleotide for detection of SNP TSC0004685
attttacggggtt

SEQ ID NO: 241172 - DNA, 13 bp, Artificial Sequence
  Oligonucleotide for detection of SNP TSC0004685
aaccccgtaaaat

SEQ ID NO: 241173 - DNA, 13 bp, Artificial Sequence
  Oligonucleotide for detection of SNP TSC0004685
agttttgtggagt

SEQ ID NO: 241174 - DNA, 13 bp, Artificial Sequence
  Oligonucleotide for detection of SNP TSC0004685
actccacaaaact

SEQ ID NO: 241175 - DNA, 13 bp, Artificial Sequence
  Oligonucleotide for detection of SNP TSC0004685
agttttatggagt

SEQ ID NO: 241176 - DNA, 13 bp, Artificial Sequence
  Oligonucleotide for detection of SNP TSC0004685
actccataaaact

SEQ ID NO: 241177 - DNA, 13 bp, Artificial Sequence
  Oligonucleotide for detection of SNP TSC0004685
agtttcgtggagt

SEQ ID NO: 241178 - DNA, 13 bp, Artificial Sequence
  Oligonucleotide for detection of SNP TSC0004685
actccacgaaact

SEQ ID NO: 241179 - DNA, 13 bp, Artificial Sequence
  Oligonucleotide for detection of SNP TSC0058830
ttgtttaagggat

SEQ ID NO: 241180 - DNA, 13 bp, Artificial Sequence
  Oligonucleotide for detection of SNP TSC0058830
atcccttaaacaa

SEQ ID NO: 241181 - DNA, 13 bp, Artificial Sequence
  Oligonucleotide for detection of SNP TSC0058830
ttgtttgagggat

SEQ ID NO: 241182 - DNA, 13 bp, Artificial Sequence
  Oligonucleotide for detection of SNP TSC0058830
atccctcaaacaa

SEQ ID NO: 241183 - DNA, 13 bp, Artificial Sequence
  Oligonucleotide for detection of SNP TSC0058830
tcgtttaagggat

SEQ ID NO: 241184 - DNA, 13 bp, Artificial Sequence
  Oligonucleotide for detection of SNP TSC0058830
atcccttaaacga

SEQ ID NO: 241185 - DNA, 13 bp, Artificial Sequence
  Oligonucleotide for detection of SNP TSC0058830
tcgtttgagggat

SEQ ID NO: 241186 - DNA, 13 bp, Artificial Sequence
  Oligonucleotide for detection of SNP TSC0058830
atccctcaaacga

SEQ ID NO: 241187 - DNA, 13 bp, Artificial Sequence
  Oligonucleotide for detection of SNP TSC0058831
aagtgataaatta

SEQ ID NO: 241188 - DNA, 13 bp, Artificial Sequence
  Oligonucleotide for detection of SNP TSC0058831
taatttatcactt

SEQ ID NO: 241189 - DNA, 13 bp, Artificial Sequence
  Oligonucleotide for detection of SNP TSC0058831
aagtgagaaatta

SEQ ID NO: 241190 - DNA, 13 bp, Artificial Sequence
  Oligonucleotide for detection of SNP TSC0058831
taatttctcactt

SEQ ID NO: 241191 - DNA, 13 bp, Artificial Sequence
  Oligonucleotide for detection of SNP TSC0005982
tttttattttatg

SEQ ID NO: 241192 - DNA, 13 bp, Artificial Sequence
  Oligonucleotide for detection of SNP TSC0005982
cataaaataaaaa

SEQ ID NO: 241193 - DNA, 13 bp, Artificial Sequence
  Oligonucleotide for detection of SNP TSC0005982
tttttagtttatg

SEQ ID NO: 241194 - DNA, 13 bp, Artificial Sequence
  Oligonucleotide for detection of SNP TSC0005982
cataaactaaaaa

SEQ ID NO: 241195 - DNA, 13 bp, Artificial Sequence
  Oligonucleotide for detection of SNP TSC0005982
tataaaatgggga

SEQ ID NO: 241196 - DNA, 13 bp, Artificial Sequence
  Oligonucleotide for detection of SNP TSC0005982
tccccattttata

SEQ ID NO: 241197 - DNA, 13 bp, Artificial Sequence
  Oligonucleotide for detection of SNP TSC0005982
tataaattgggga

SEQ ID NO: 241198 - DNA, 13 bp, Artificial Sequence
  Oligonucleotide for detection of SNP TSC0005982
tccccaatttata

SEQ ID NO: 241199 - DNA, 13 bp, Artificial Sequence
  Oligonucleotide for detection of SNP TSC0005983
gtagtgggaaaty

SEQ ID NO: 241200 - DNA, 13 bp, Artificial Sequence
  Oligonucleotide for detection of SNP TSC0005983
ratttcccactac

SEQ ID NO: 241201 - DNA, 13 bp, Artificial Sequence
  Oligonucleotide for detection of SNP TSC0005983
gtagtgagaaaty

SEQ ID NO: 241202 - DNA, 13 bp, Artificial Sequence
  Oligonucleotide for detection of SNP TSC0005983
ratttctcactac

SEQ ID NO: 241203 - DNA, 13 bp, Artificial Sequence
  Oligonucleotide for detection of SNP TSC0058835
agtaataggttag

SEQ ID NO: 241204 - DNA, 13 bp, Artificial Sequence
  Oligonucleotide for detection of SNP TSC0058835
ctaacctattact

SEQ ID NO: 241205 - DNA, 13 bp, Artificial Sequence
  Oligonucleotide for detection of SNP TSC0058835
agtaattggttag

SEQ ID NO: 241206 - DNA, 13 bp, Artificial Sequence
  Oligonucleotide for detection of SNP TSC0058835
ctaaccaattact

SEQ ID NO: 241207 - DNA, 13 bp, Artificial Sequence
  Oligonucleotide for detection of SNP TSC0058835
agtaatcggttag

SEQ ID NO: 241208 - DNA, 13 bp, Artificial Sequence
  Oligonucleotide for detection of SNP TSC0058835
ctaaccgattact

SEQ ID NO: 241209 - DNA, 13 bp, Artificial Sequence
  Oligonucleotide for detection of SNP TSC0058835
ttgatttattatt

SEQ ID NO: 241210 - DNA, 13 bp, Artificial Sequence
  Oligonucleotide for detection of SNP TSC0058835
aataataaatcaa

SEQ ID NO: 241211 - DNA, 13 bp, Artificial Sequence
  Oligonucleotide for detection of SNP TSC0058835
ttgattgattatt

SEQ ID NO: 241212 - DNA, 13 bp, Artificial Sequence
  Oligonucleotide for detection of SNP TSC0058835
aataatcaatcaa

SEQ ID NO: 241213 - DNA, 13 bp, Artificial Sequence
  Oligonucleotide for detection of SNP TSC0058835
ttgatcgattatt

SEQ ID NO: 241214 - DNA, 13 bp, Artificial Sequence
  Oligonucleotide for detection of SNP TSC0058835
aataatcgatcaa

SEQ ID NO: 241215 - DNA, 13 bp, Artificial Sequence
  Oligonucleotide for detection of SNP TSC0058838
agtgagtgtaagy

SEQ ID NO: 241216 - DNA, 13 bp, Artificial Sequence
  Oligonucleotide for detection of SNP TSC0058838
rcttacactcact

SEQ ID NO: 241217 - DNA, 13 bp, Artificial Sequence
  Oligonucleotide for detection of SNP TSC0058838
agtgagcgtaagy

SEQ ID NO: 241218 - DNA, 13 bp, Artificial Sequence
  Oligonucleotide for detection of SNP TSC0058838
rcttacgctcact

SEQ ID NO: 241219 - DNA, 13 bp, Artificial Sequence
  Oligonucleotide for detection of SNP TSC0058838
gtttatatttatt

SEQ ID NO: 241220 - DNA, 13 bp, Artificial Sequence
  Oligonucleotide for detection of SNP TSC0058838
aataaatataaac

SEQ ID NO: 241221 - DNA, 13 bp, Artificial Sequence
  Oligonucleotide for detection of SNP TSC0058838
gtttatgtttatt

SEQ ID NO: 241222 - DNA, 13 bp, Artificial Sequence
  Oligonucleotide for detection of SNP TSC0058838
aataaacataaac

SEQ ID NO: 241223 - DNA, 13 bp, Artificial Sequence
  Oligonucleotide for detection of SNP TSC0058838
gtttacgtttatt

SEQ ID NO: 241224 - DNA, 13 bp, Artificial Sequence
  Oligonucleotide for detection of SNP TSC0058838
aataaacgtaaac

SEQ ID NO: 241225 - DNA, 13 bp, Artificial Sequence
  Oligonucleotide for detection of SNP TSC0058839
gggaggataggty

SEQ ID NO: 241226 - DNA, 13 bp, Artificial Sequence
  Oligonucleotide for detection of SNP TSC0058839
racctatcctccc

SEQ ID NO: 241227 - DNA, 13 bp, Artificial Sequence
  Oligonucleotide for detection of SNP TSC0058839
gggaggttaggty

SEQ ID NO: 241228 - DNA, 13 bp, Artificial Sequence
  Oligonucleotide for detection of SNP TSC0058839
racctaacctccc

SEQ ID NO: 241229 - DNA, 13 bp, Artificial Sequence
  Oligonucleotide for detection of SNP TSC0058839
ggtttaattttty

SEQ ID NO: 241230 - DNA, 13 bp, Artificial Sequence
  Oligonucleotide for detection of SNP TSC0058839
raaaaattaaacc

SEQ ID NO: 241231 - DNA, 13 bp, Artificial Sequence
  Oligonucleotide for detection of SNP TSC0058841
aaaatttgtagty

SEQ ID NO: 241232 - DNA, 13 bp, Artificial Sequence
  Oligonucleotide for detection of SNP TSC0058841
ractacaaatttt

SEQ ID NO: 241233 - DNA, 13 bp, Artificial Sequence
  Oligonucleotide for detection of SNP TSC0058841
aaaattcgtagty

SEQ ID NO: 241234 - DNA, 13 bp, Artificial Sequence
  Oligonucleotide for detection of SNP TSC0058841
ractacgaatttt

SEQ ID NO: 241235 - DNA, 13 bp, Artificial Sequence
  Oligonucleotide for detection of SNP TSC0058841
ggttatgagtttt

SEQ ID NO: 241236 - DNA, 13 bp, Artificial Sequence
  Oligonucleotide for detection of SNP TSC0058841
aaaactcataacc

SEQ ID NO: 241237 - DNA, 13 bp, Artificial Sequence
  Oligonucleotide for detection of SNP TSC0058841
ggttataagtttt

SEQ ID NO: 241238 - DNA, 13 bp, Artificial Sequence
  Oligonucleotide for detection of SNP TSC0058841
aaaacttataacc

SEQ ID NO: 241239 - DNA, 13 bp, Artificial Sequence
  Oligonucleotide for detection of SNP TSC0058841
ggttacgagtttt

SEQ ID NO: 241240 - DNA, 13 bp, Artificial Sequence
  Oligonucleotide for detection of SNP TSC0058841
aaaactcgtaacc

SEQ ID NO: 241241 - DNA, 13 bp, Artificial Sequence
  Oligonucleotide for detection of SNP TSC0058842
gaagatgatattt

SEQ ID NO: 241242 - DNA, 13 bp, Artificial Sequence
  Oligonucleotide for detection of SNP TSC0058842
aaatatcatcttc

SEQ ID NO: 241243 - DNA, 13 bp, Artificial Sequence
  Oligonucleotide for detection of SNP TSC0058842
gaagataatattt

SEQ ID NO: 241244 - DNA, 13 bp, Artificial Sequence
  Oligonucleotide for detection of SNP TSC0058842
aaatattatcttc

SEQ ID NO: 241245 - DNA, 13 bp, Artificial Sequence
  Oligonucleotide for detection of SNP TSC0058843
ttttttattaagg

SEQ ID NO: 241246 - DNA, 13 bp, Artificial Sequence
  Oligonucleotide for detection of SNP TSC0058843
ccttaataaaaaa

SEQ ID NO: 241247 - DNA, 13 bp, Artificial Sequence
  Oligonucleotide for detection of SNP TSC0058843
ttttttgttaagg

SEQ ID NO: 241248 - DNA, 13 bp, Artificial Sequence
  Oligonucleotide for detection of SNP TSC0058843
ccttaacaaaaaa

SEQ ID NO: 241249 - DNA, 13 bp, Artificial Sequence
  Oligonucleotide for detection of SNP TSC0058844
gagtttttgtagg

SEQ ID NO: 241250 - DNA, 13 bp, Artificial Sequence
  Oligonucleotide for detection of SNP TSC0058844
cctacaaaaactc

SEQ ID NO: 241251 - DNA, 13 bp, Artificial Sequence
  Oligonucleotide for detection of SNP TSC0058845
gattaagaaatty

SEQ ID NO: 241252 - DNA, 13 bp, Artificial Sequence
  Oligonucleotide for detection of SNP TSC0058845
raatttcttaatc

SEQ ID NO: 241253 - DNA, 13 bp, Artificial Sequence
  Oligonucleotide for detection of SNP TSC0058845
gattaaaaaatty

SEQ ID NO: 241254 - DNA, 13 bp, Artificial Sequence
  Oligonucleotide for detection of SNP TSC0058845
raattttttaatc

SEQ ID NO: 241255 - DNA, 13 bp, Artificial Sequence
  Oligonucleotide for detection of SNP TSC0058846
aaaatgtttttag

SEQ ID NO: 241256 - DNA, 13 bp, Artificial Sequence
  Oligonucleotide for detection of SNP TSC0058846
ctaaaaacatttt

SEQ ID NO: 241257 - DNA, 13 bp, Artificial Sequence
  Oligonucleotide for detection of SNP TSC0058846
aaaatggttttag

SEQ ID NO: 241258 - DNA, 13 bp, Artificial Sequence
  Oligonucleotide for detection of SNP TSC0058846
ctaaaaccatttt

SEQ ID NO: 241259 - DNA, 13 bp, Artificial Sequence
  Oligonucleotide for detection of SNP TSC0058846
ttgaaggtatttt

SEQ ID NO: 241260 - DNA, 13 bp, Artificial Sequence
  Oligonucleotide for detection of SNP TSC0058846
aaaataccttcaa

SEQ ID NO: 241261 - DNA, 13 bp, Artificial Sequence
  Oligonucleotide for detection of SNP TSC0058846
ttgaagttatttt

SEQ ID NO: 241262 - DNA, 13 bp, Artificial Sequence
  Oligonucleotide for detection of SNP TSC0058846
aaaataacttcaa

SEQ ID NO: 241263 - DNA, 13 bp, Artificial Sequence
  Oligonucleotide for detection of SNP TSC0058850
atagattaattaa

SEQ ID NO: 241264 - DNA, 13 bp, Artificial Sequence
  Oligonucleotide for detection of SNP TSC0058850
ttaattaatctat

SEQ ID NO: 241265 - DNA, 13 bp, Artificial Sequence
  Oligonucleotide for detection of SNP TSC0058850
atagatgaattaa

SEQ ID NO: 241266 - DNA, 13 bp, Artificial Sequence
  Oligonucleotide for detection of SNP TSC0058850
ttaattcatctat

SEQ ID NO: 241267 - DNA, 13 bp, Artificial Sequence
  Oligonucleotide for detection of SNP TSC0058850
ttggtttatttat

SEQ ID NO: 241268 - DNA, 13 bp, Artificial Sequence
  Oligonucleotide for detection of SNP TSC0058850
ataaataaaccaa

SEQ ID NO: 241269 - DNA, 13 bp, Artificial Sequence
  Oligonucleotide for detection of SNP TSC0058851
ttattaatttatt

SEQ ID NO: 241270 - DNA, 13 bp, Artificial Sequence
  Oligonucleotide for detection of SNP TSC0058851
aataaattaataa

SEQ ID NO: 241271 - DNA, 13 bp, Artificial Sequence
  Oligonucleotide for detection of SNP TSC0058851
ttattattttatt

SEQ ID NO: 241272 - DNA, 13 bp, Artificial Sequence
  Oligonucleotide for detection of SNP TSC0058851
aataaaataataa

SEQ ID NO: 241273 - DNA, 13 bp, Artificial Sequence
  Oligonucleotide for detection of SNP TSC0058851
agtagattaataa

SEQ ID NO: 241274 - DNA, 13 bp, Artificial Sequence
  Oligonucleotide for detection of SNP TSC0058851
ttattaatctact

SEQ ID NO: 241275 - DNA, 13 bp, Artificial Sequence
  Oligonucleotide for detection of SNP TSC0058851
agtagaataataa

SEQ ID NO: 241276 - DNA, 13 bp, Artificial Sequence
  Oligonucleotide for detection of SNP TSC0058851
ttattattctact

SEQ ID NO: 241277 - DNA, 13 bp, Artificial Sequence
  Oligonucleotide for detection of SNP TSC0058852
agggataaatgta

SEQ ID NO: 241278 - DNA, 13 bp, Artificial Sequence
  Oligonucleotide for detection of SNP TSC0058852
tacatttatccct

SEQ ID NO: 241279 - DNA, 13 bp, Artificial Sequence
  Oligonucleotide for detection of SNP TSC0058852
agggattaatgta

SEQ ID NO: 241280 - DNA, 13 bp, Artificial Sequence
  Oligonucleotide for detection of SNP TSC0058852
tacattaatccct

SEQ ID NO: 241281 - DNA, 13 bp, Artificial Sequence
  Oligonucleotide for detection of SNP TSC0058855
gtaattttagtay

SEQ ID NO: 241282 - DNA, 13 bp, Artificial Sequence
  Oligonucleotide for detection of SNP TSC0058855
rtactaaaattac

SEQ ID NO: 241283 - DNA, 13 bp, Artificial Sequence
  Oligonucleotide for detection of SNP TSC0058855
gtaattgtagtay

SEQ ID NO: 241284 - DNA, 13 bp, Artificial Sequence
  Oligonucleotide for detection of SNP TSC0058855
rtactacaattac

SEQ ID NO: 241285 - DNA, 13 bp, Artificial Sequence
  Oligonucleotide for detection of SNP TSC0058855
gtaatcgtagtay

SEQ ID NO: 241286 - DNA, 13 bp, Artificial Sequence
  Oligonucleotide for detection of SNP TSC0058855
rtactacgattac

SEQ ID NO: 241287 - DNA, 13 bp, Artificial Sequence
  Oligonucleotide for detection of SNP TSC0058855
gtgttgtgattay

SEQ ID NO: 241288 - DNA, 13 bp, Artificial Sequence
  Oligonucleotide for detection of SNP TSC0058855
rtaatcacaacac

SEQ ID NO: 241289 - DNA, 13 bp, Artificial Sequence
  Oligonucleotide for detection of SNP TSC0058855
gtgttgcgattay

SEQ ID NO: 241290 - DNA, 13 bp, Artificial Sequence
  Oligonucleotide for detection of SNP TSC0058855
rtaatcgcaacac

SEQ ID NO: 241291 - DNA, 13 bp, Artificial Sequence
  Oligonucleotide for detection of SNP TSC0058856
aagaaaagaataa

SEQ ID NO: 241292 - DNA, 13 bp, Artificial Sequence
  Oligonucleotide for detection of SNP TSC0058856
ttattcttttctt

SEQ ID NO: 241293 - DNA, 13 bp, Artificial Sequence
  Oligonucleotide for detection of SNP TSC0058856
aagaaatgaataa

SEQ ID NO: 241294 - DNA, 13 bp, Artificial Sequence
  Oligonucleotide for detection of SNP TSC0058856
ttattcatttctt

SEQ ID NO: 241295 - DNA, 13 bp, Artificial Sequence
  Oligonucleotide for detection of SNP TSC0058856
aagaaacgaataa

SEQ ID NO: 241296 - DNA, 13 bp, Artificial Sequence
  Oligonucleotide for detection of SNP TSC0058856
ttattcgtttctt

SEQ ID NO: 241297 - DNA, 13 bp, Artificial Sequence
  Oligonucleotide for detection of SNP TSC0058858
ggggttgtttttt

SEQ ID NO: 241298 - DNA, 13 bp, Artificial Sequence
  Oligonucleotide for detection of SNP TSC0058858
aaaaaacaacccc

SEQ ID NO: 241299 - DNA, 13 bp, Artificial Sequence
  Oligonucleotide for detection of SNP TSC0058858
agaaaaaagttty

SEQ ID NO: 241300 - DNA, 13 bp, Artificial Sequence
  Oligonucleotide for detection of SNP TSC0058858
raaacttttttct

SEQ ID NO: 241301 - DNA, 13 bp, Artificial Sequence
  Oligonucleotide for detection of SNP TSC0058858
agaaaatagttty

SEQ ID NO: 241302 - DNA, 13 bp, Artificial Sequence
  Oligonucleotide for detection of SNP TSC0058858
raaactattttct

SEQ ID NO: 241303 - DNA, 13 bp, Artificial Sequence
  Oligonucleotide for detection of SNP TSC0058859
taaattaattatt

SEQ ID NO: 241304 - DNA, 13 bp, Artificial Sequence
  Oligonucleotide for detection of SNP TSC0058859
aataattaattta

SEQ ID NO: 241305 - DNA, 13 bp, Artificial Sequence
  Oligonucleotide for detection of SNP TSC0058865
ttgtaagtaatta

SEQ ID NO: 241306 - DNA, 13 bp, Artificial Sequence
  Oligonucleotide for detection of SNP TSC0058865
taattacttacaa

SEQ ID NO: 241307 - DNA, 13 bp, Artificial Sequence
  Oligonucleotide for detection of SNP TSC0058865
tggttggttgtag

SEQ ID NO: 241308 - DNA, 13 bp, Artificial Sequence
  Oligonucleotide for detection of SNP TSC0058865
ctacaaccaacca

SEQ ID NO: 241309 - DNA, 13 bp, Artificial Sequence
  Oligonucleotide for detection of SNP TSC0058865
tggttgtttgtag

SEQ ID NO: 241310 - DNA, 13 bp, Artificial Sequence
  Oligonucleotide for detection of SNP TSC0058865
ctacaaacaacca

SEQ ID NO: 241311 - DNA, 13 bp, Artificial Sequence
  Oligonucleotide for detection of SNP TSC0058866
tgtttatttttag

SEQ ID NO: 241312 - DNA, 13 bp, Artificial Sequence
  Oligonucleotide for detection of SNP TSC0058866
ctaaaaataaaca

SEQ ID NO: 241313 - DNA, 13 bp, Artificial Sequence
  Oligonucleotide for detection of SNP TSC0058866
tgtttagttttag

SEQ ID NO: 241314 - DNA, 13 bp, Artificial Sequence
  Oligonucleotide for detection of SNP TSC0058866
ctaaaactaaaca

SEQ ID NO: 241315 - DNA, 13 bp, Artificial Sequence
  Oligonucleotide for detection of SNP TSC0058866
ttggaagtaggta

SEQ ID NO: 241316 - DNA, 13 bp, Artificial Sequence
  Oligonucleotide for detection of SNP TSC0058866
tacctacttccaa

SEQ ID NO: 241317 - DNA, 13 bp, Artificial Sequence
  Oligonucleotide for detection of SNP TSC0058866
ttggaattaggta

SEQ ID NO: 241318 - DNA, 13 bp, Artificial Sequence
  Oligonucleotide for detection of SNP TSC0058866
tacctaattccaa

SEQ ID NO: 241319 - DNA, 13 bp, Artificial Sequence
  Oligonucleotide for detection of SNP TSC0058867
tgtatataaaaag

SEQ ID NO: 241320 - DNA, 13 bp, Artificial Sequence
  Oligonucleotide for detection of SNP TSC0058867
ctttttatataca

SEQ ID NO: 241321 - DNA, 13 bp, Artificial Sequence
  Oligonucleotide for detection of SNP TSC0058867
tgtatagaaaaag

SEQ ID NO: 241322 - DNA, 13 bp, Artificial Sequence
  Oligonucleotide for detection of SNP TSC0058867
ctttttctataca

SEQ ID NO: 241323 - DNA, 13 bp, Artificial Sequence
  Oligonucleotide for detection of SNP TSC0007688
aaatgtattgtaa

SEQ ID NO: 241324 - DNA, 13 bp, Artificial Sequence
  Oligonucleotide for detection of SNP TSC0007688
ttacaatacattt

SEQ ID NO: 241325 - DNA, 13 bp, Artificial Sequence
  Oligonucleotide for detection of SNP TSC0007688
aaatgtgttgtaa

SEQ ID NO: 241326 - DNA, 13 bp, Artificial Sequence
  Oligonucleotide for detection of SNP TSC0007688
ttacaacacattt

SEQ ID NO: 241327 - DNA, 13 bp, Artificial Sequence
  Oligonucleotide for detection of SNP TSC0058871
tttattagatata

SEQ ID NO: 241328 - DNA, 13 bp, Artificial Sequence
  Oligonucleotide for detection of SNP TSC0058871
tatatctaataaa

SEQ ID NO: 241329 - DNA, 13 bp, Artificial Sequence
  Oligonucleotide for detection of SNP TSC0058871
tttattggatata

SEQ ID NO: 241330 - DNA, 13 bp, Artificial Sequence
  Oligonucleotide for detection of SNP TSC0058871
tatatccaataaa

SEQ ID NO: 241331 - DNA, 13 bp, Artificial Sequence
  Oligonucleotide for detection of SNP TSC0058871
tttatcggatata

SEQ ID NO: 241332 - DNA, 13 bp, Artificial Sequence
  Oligonucleotide for detection of SNP TSC0058871
tatatccgataaa

SEQ ID NO: 241333 - DNA, 13 bp, Artificial Sequence
  Oligonucleotide for detection of SNP TSC0058871
tatatttgatagg

SEQ ID NO: 241334 - DNA, 13 bp, Artificial Sequence
  Oligonucleotide for detection of SNP TSC0058871
cctatcaaatata

SEQ ID NO: 241335 - DNA, 13 bp, Artificial Sequence
  Oligonucleotide for detection of SNP TSC0058871
tatattcgatagg

SEQ ID NO: 241336 - DNA, 13 bp, Artificial Sequence
  Oligonucleotide for detection of SNP TSC0058871
cctatcgaatata

SEQ ID NO: 241337 - DNA, 13 bp, Artificial Sequence
  Oligonucleotide for detection of SNP TSC0058872
aaaaatgtggtta

SEQ ID NO: 241338 - DNA, 13 bp, Artificial Sequence
  Oligonucleotide for detection of SNP TSC0058872
taaccacattttt

SEQ ID NO: 241339 - DNA, 13 bp, Artificial Sequence
  Oligonucleotide for detection of SNP TSC0058872
aaaaatatggtta

SEQ ID NO: 241340 - DNA, 13 bp, Artificial Sequence
  Oligonucleotide for detection of SNP TSC0058872
taaccatattttt

SEQ ID NO: 241341 - DNA, 13 bp, Artificial Sequence
  Oligonucleotide for detection of SNP TSC0058872
aaaaatgcggtta

SEQ ID NO: 241342 - DNA, 13 bp, Artificial Sequence
  Oligonucleotide for detection of SNP TSC0058872
taaccgcattttt

SEQ ID NO: 241343 - DNA, 13 bp, Artificial Sequence
  Oligonucleotide for detection of SNP TSC0058872
aaaaatacggtta

SEQ ID NO: 241344 - DNA, 13 bp, Artificial Sequence
  Oligonucleotide for detection of SNP TSC0058872
taaccgtattttt

SEQ ID NO: 241345 - DNA, 13 bp, Artificial Sequence
  Oligonucleotide for detection of SNP TSC0058874
gtattgaaagtga

SEQ ID NO: 241346 - DNA, 13 bp, Artificial Sequence
  Oligonucleotide for detection of SNP TSC0058874
tcactttcaatac

SEQ ID NO: 241347 - DNA, 13 bp, Artificial Sequence
  Oligonucleotide for detection of SNP TSC0058874
gtattgtaagtga

SEQ ID NO: 241348 - DNA, 13 bp, Artificial Sequence
  Oligonucleotide for detection of SNP TSC0058874
tcacttacaatac

SEQ ID NO: 241349 - DNA, 13 bp, Artificial Sequence
  Oligonucleotide for detection of SNP TSC0058874
ttatttatagtay

SEQ ID NO: 241350 - DNA, 13 bp, Artificial Sequence
  Oligonucleotide for detection of SNP TSC0058874
rtactataaataa

SEQ ID NO: 241351 - DNA, 13 bp, Artificial Sequence
  Oligonucleotide for detection of SNP TSC0058877
agagggttggttg

SEQ ID NO: 241352 - DNA, 13 bp, Artificial Sequence
  Oligonucleotide for detection of SNP TSC0058877
caaccaaccctct

SEQ ID NO: 241353 - DNA, 13 bp, Artificial Sequence
  Oligonucleotide for detection of SNP TSC0058877
agaggggtggttg

SEQ ID NO: 241354 - DNA, 13 bp, Artificial Sequence
  Oligonucleotide for detection of SNP TSC0058877
caaccacccctct

SEQ ID NO: 241355 - DNA, 13 bp, Artificial Sequence
  Oligonucleotide for detection of SNP TSC0058878
gttgttatattgg

SEQ ID NO: 241356 - DNA, 13 bp, Artificial Sequence
  Oligonucleotide for detection of SNP TSC0058878
ccaatataacaac

SEQ ID NO: 241357 - DNA, 13 bp, Artificial Sequence
  Oligonucleotide for detection of SNP TSC0058878
gttgttgtattgg

SEQ ID NO: 241358 - DNA, 13 bp, Artificial Sequence
  Oligonucleotide for detection of SNP TSC0058878
ccaatacaacaac

SEQ ID NO: 241359 - DNA, 13 bp, Artificial Sequence
  Oligonucleotide for detection of SNP TSC0058878
gttgtcgtattgg

SEQ ID NO: 241360 - DNA, 13 bp, Artificial Sequence
  Oligonucleotide for detection of SNP TSC0058878
ccaatacgacaac

SEQ ID NO: 241361 - DNA, 13 bp, Artificial Sequence
  Oligonucleotide for detection of SNP TSC0058878
ttagtgtggtaay

SEQ ID NO: 241362 - DNA, 13 bp, Artificial Sequence
  Oligonucleotide for detection of SNP TSC0058878
rttaccacactaa

SEQ ID NO: 241363 - DNA, 13 bp, Artificial Sequence
  Oligonucleotide for detection of SNP TSC0058878
ttagtgcggtaay

SEQ ID NO: 241364 - DNA, 13 bp, Artificial Sequence
  Oligonucleotide for detection of SNP TSC0058878
rttaccgcactaa

SEQ ID NO: 241365 - DNA, 13 bp, Artificial Sequence
  Oligonucleotide for detection of SNP TSC0007968
gttagggttattt

SEQ ID NO: 241366 - DNA, 13 bp, Artificial Sequence
  Oligonucleotide for detection of SNP TSC0007968
aaataaccctaac

SEQ ID NO: 241367 - DNA, 13 bp, Artificial Sequence
  Oligonucleotide for detection of SNP TSC0007968
aggtgaatttgay

SEQ ID NO: 241368 - DNA, 13 bp, Artificial Sequence
  Oligonucleotide for detection of SNP TSC0007968
rtcaaattcacct

SEQ ID NO: 241369 - DNA, 13 bp, Artificial Sequence
  Oligonucleotide for detection of SNP TSC0007968
aggtgattttgay

SEQ ID NO: 241370 - DNA, 13 bp, Artificial Sequence
  Oligonucleotide for detection of SNP TSC0007968
rtcaaaatcacct

SEQ ID NO: 241371 - DNA, 13 bp, Artificial Sequence
  Oligonucleotide for detection of SNP TSC0058879
gttaattttgttt

SEQ ID NO: 241372 - DNA, 13 bp, Artificial Sequence
  Oligonucleotide for detection of SNP TSC0058879
aaacaaaattaac

SEQ ID NO: 241373 - DNA, 13 bp, Artificial Sequence
  Oligonucleotide for detection of SNP TSC0058879
gttaatgttgttt

SEQ ID NO: 241374 - DNA, 13 bp, Artificial Sequence
  Oligonucleotide for detection of SNP TSC0058879
aaacaacattaac

SEQ ID NO: 241375 - DNA, 13 bp, Artificial Sequence
  Oligonucleotide for detection of SNP TSC0058879
gttaacgttgttt

SEQ ID NO: 241376 - DNA, 13 bp, Artificial Sequence
  Oligonucleotide for detection of SNP TSC0058879
aaacaacgttaac

SEQ ID NO: 241377 - DNA, 13 bp, Artificial Sequence
  Oligonucleotide for detection of SNP TSC0058879
aagtaaggttaay

SEQ ID NO: 241378 - DNA, 13 bp, Artificial Sequence
  Oligonucleotide for detection of SNP TSC0058879
rttaaccttactt

SEQ ID NO: 241379 - DNA, 13 bp, Artificial Sequence
  Oligonucleotide for detection of SNP TSC0058879
aagtaatgttaay

SEQ ID NO: 241380 - DNA, 13 bp, Artificial Sequence
  Oligonucleotide for detection of SNP TSC0058879
rttaacattactt

SEQ ID NO: 241381 - DNA, 13 bp, Artificial Sequence
  Oligonucleotide for detection of SNP TSC0058879
aagtaacgttaay

SEQ ID NO: 241382 - DNA, 13 bp, Artificial Sequence
  Oligonucleotide for detection of SNP TSC0058879
rttaacgttactt

SEQ ID NO: 241383 - DNA, 13 bp, Artificial Sequence
  Oligonucleotide for detection of SNP TSC0008135
agtgataagttty

SEQ ID NO: 241384 - DNA, 13 bp, Artificial Sequence
  Oligonucleotide for detection of SNP TSC0008135
raaacttatcact

SEQ ID NO: 241385 - DNA, 13 bp, Artificial Sequence
  Oligonucleotide for detection of SNP TSC0008135
agtgatgagttty

SEQ ID NO: 241386 - DNA, 13 bp, Artificial Sequence
  Oligonucleotide for detection of SNP TSC0008135
raaactcatcact

SEQ ID NO: 241387 - DNA, 13 bp, Artificial Sequence
  Oligonucleotide for detection of SNP TSC0009230
agtggtatttatt

SEQ ID NO: 241388 - DNA, 13 bp, Artificial Sequence
  Oligonucleotide for detection of SNP TSC0009230
aataaataccact

SEQ ID NO: 241389 - DNA, 13 bp, Artificial Sequence
  Oligonucleotide for detection of SNP TSC0009230
agtggtgtttatt

SEQ ID NO: 241390 - DNA, 13 bp, Artificial Sequence
  Oligonucleotide for detection of SNP TSC0009230
aataaacaccact

SEQ ID NO: 241391 - DNA, 13 bp, Artificial Sequence
  Oligonucleotide for detection of SNP TSC0058883
ttgttataaatgy

SEQ ID NO: 241392 - DNA, 13 bp, Artificial Sequence
  Oligonucleotide for detection of SNP TSC0058883
rcatttataacaa

SEQ ID NO: 241393 - DNA, 13 bp, Artificial Sequence
  Oligonucleotide for detection of SNP TSC0058883
ttgttagaaatgy

SEQ ID NO: 241394 - DNA, 13 bp, Artificial Sequence
  Oligonucleotide for detection of SNP TSC0058883
rcatttctaacaa

SEQ ID NO: 241395 - DNA, 13 bp, Artificial Sequence
  Oligonucleotide for detection of SNP TSC0058884
gttatttattggy

SEQ ID NO: 241396 - DNA, 13 bp, Artificial Sequence
  Oligonucleotide for detection of SNP TSC0058884
rccaataaataac

SEQ ID NO: 241397 - DNA, 13 bp, Artificial Sequence
  Oligonucleotide for detection of SNP TSC0058884
gttaattaataay

SEQ ID NO: 241398 - DNA, 13 bp, Artificial Sequence
  Oligonucleotide for detection of SNP TSC0058884
rttattaattaac

SEQ ID NO: 241399 - DNA, 13 bp, Artificial Sequence
  Oligonucleotide for detection of SNP TSC0058884
gttaatgaataay

SEQ ID NO: 241400 - DNA, 13 bp, Artificial Sequence
  Oligonucleotide for detection of SNP TSC0058884
rttattcattaac

SEQ ID NO: 241401 - DNA, 13 bp, Artificial Sequence
  Oligonucleotide for detection of SNP TSC0058885
ttttgcggtataa

SEQ ID NO: 241402 - DNA, 13 bp, Artificial Sequence
  Oligonucleotide for detection of SNP TSC0058885
ttataccgcaaaa

SEQ ID NO: 241403 - DNA, 13 bp, Artificial Sequence
  Oligonucleotide for detection of SNP TSC0058886
ttattaattaagt

SEQ ID NO: 241404 - DNA, 13 bp, Artificial Sequence
  Oligonucleotide for detection of SNP TSC0058886
acttaattaataa

SEQ ID NO: 241405 - DNA, 13 bp, Artificial Sequence
  Oligonucleotide for detection of SNP TSC0058886
ttattagttaagt

SEQ ID NO: 241406 - DNA, 13 bp, Artificial Sequence
  Oligonucleotide for detection of SNP TSC0058886
acttaactaataa

SEQ ID NO: 241407 - DNA, 13 bp, Artificial Sequence
  Oligonucleotide for detection of SNP TSC0058887
ataattatattgg

SEQ ID NO: 241408 - DNA, 13 bp, Artificial Sequence
  Oligonucleotide for detection of SNP TSC0058887
ccaatataattat

SEQ ID NO: 241409 - DNA, 13 bp, Artificial Sequence
  Oligonucleotide for detection of SNP TSC0058887
ataattgtattgg

SEQ ID NO: 241410 - DNA, 13 bp, Artificial Sequence
  Oligonucleotide for detection of SNP TSC0058887
ccaatacaattat

SEQ ID NO: 241411 - DNA, 13 bp, Artificial Sequence
  Oligonucleotide for detection of SNP TSC0058888
ggattacgaggty

SEQ ID NO: 241412 - DNA, 13 bp, Artificial Sequence
  Oligonucleotide for detection of SNP TSC0058888
racctcgtaatcc

SEQ ID NO: 241413 - DNA, 13 bp, Artificial Sequence
  Oligonucleotide for detection of SNP TSC0058888
gattttgtgatty

SEQ ID NO: 241414 - DNA, 13 bp, Artificial Sequence
  Oligonucleotide for detection of SNP TSC0058888
raatcacaaaatc

SEQ ID NO: 241415 - DNA, 13 bp, Artificial Sequence
  Oligonucleotide for detection of SNP TSC0058888
gattttatgatty

SEQ ID NO: 241416 - DNA, 13 bp, Artificial Sequence
  Oligonucleotide for detection of SNP TSC0058888
raatcataaaatc

SEQ ID NO: 241417 - DNA, 13 bp, Artificial Sequence
  Oligonucleotide for detection of SNP TSC0058888
gatttcgtgatty

SEQ ID NO: 241418 - DNA, 13 bp, Artificial Sequence
  Oligonucleotide for detection of SNP TSC0058888
raatcacgaaatc

SEQ ID NO: 241419 - DNA, 13 bp, Artificial Sequence
  Oligonucleotide for detection of SNP TSC0058890
aggtagatagtgy

SEQ ID NO: 241420 - DNA, 13 bp, Artificial Sequence
  Oligonucleotide for detection of SNP TSC0058890
rcactatctacct

SEQ ID NO: 241421 - DNA, 13 bp, Artificial Sequence
  Oligonucleotide for detection of SNP TSC0058890
aggtagttagtgy

SEQ ID NO: 241422 - DNA, 13 bp, Artificial Sequence
  Oligonucleotide for detection of SNP TSC0058890
rcactaactacct

SEQ ID NO: 241423 - DNA, 13 bp, Artificial Sequence
  Oligonucleotide for detection of SNP TSC0058890
gtattgtttgttt

SEQ ID NO: 241424 - DNA, 13 bp, Artificial Sequence
  Oligonucleotide for detection of SNP TSC0058890
aaacaaacaatac

SEQ ID NO: 241425 - DNA, 13 bp, Artificial Sequence
  Oligonucleotide for detection of SNP TSC0058890
gtattggttgttt

SEQ ID NO: 241426 - DNA, 13 bp, Artificial Sequence
  Oligonucleotide for detection of SNP TSC0058890
aaacaaccaatac

SEQ ID NO: 241427 - DNA, 13 bp, Artificial Sequence
  Oligonucleotide for detection of SNP TSC0058891
gtggtttggagtg

SEQ ID NO: 241428 - DNA, 13 bp, Artificial Sequence
  Oligonucleotide for detection of SNP TSC0058891
cactccaaaccac

SEQ ID NO: 241429 - DNA, 13 bp, Artificial Sequence
  Oligonucleotide for detection of SNP TSC0058891
gtggttcggagtg

SEQ ID NO: 241430 - DNA, 13 bp, Artificial Sequence
  Oligonucleotide for detection of SNP TSC0058891
cactccgaaccac

SEQ ID NO: 241431 - DNA, 13 bp, Artificial Sequence
  Oligonucleotide for detection of SNP TSC0058891
tattttgggttay

SEQ ID NO: 241432 - DNA, 13 bp, Artificial Sequence
  Oligonucleotide for detection of SNP TSC0058891
rtaacccaaaata

SEQ ID NO: 241433 - DNA, 13 bp, Artificial Sequence
  Oligonucleotide for detection of SNP TSC0058891
tatttcgggttay

SEQ ID NO: 241434 - DNA, 13 bp, Artificial Sequence
  Oligonucleotide for detection of SNP TSC0058891
rtaacccgaaata

SEQ ID NO: 241435 - DNA, 13 bp, Artificial Sequence
  Oligonucleotide for detection of SNP TSC0058893
aagttaagttgaa

SEQ ID NO: 241436 - DNA, 13 bp, Artificial Sequence
  Oligonucleotide for detection of SNP TSC0058893
ttcaacttaactt

SEQ ID NO: 241437 - DNA, 13 bp, Artificial Sequence
  Oligonucleotide for detection of SNP TSC0058893
aagttaggttgaa

SEQ ID NO: 241438 - DNA, 13 bp, Artificial Sequence
  Oligonucleotide for detection of SNP TSC0058893
ttcaacctaactt

SEQ ID NO: 241439 - DNA, 13 bp, Artificial Sequence
  Oligonucleotide for detection of SNP TSC0007988
tttatagaagtay

SEQ ID NO: 241440 - DNA, 13 bp, Artificial Sequence
  Oligonucleotide for detection of SNP TSC0007988
rtacttctataaa

SEQ ID NO: 241441 - DNA, 13 bp, Artificial Sequence
  Oligonucleotide for detection of SNP TSC0007988
tttataaaagtay

SEQ ID NO: 241442 - DNA, 13 bp, Artificial Sequence
  Oligonucleotide for detection of SNP TSC0007988
rtacttttataaa

SEQ ID NO: 241443 - DNA, 13 bp, Artificial Sequence
  Oligonucleotide for detection of SNP TSC0058894
tagtgatgtttty

SEQ ID NO: 241444 - DNA, 13 bp, Artificial Sequence
  Oligonucleotide for detection of SNP TSC0058894
raaaacatcacta

SEQ ID NO: 241445 - DNA, 13 bp, Artificial Sequence
  Oligonucleotide for detection of SNP TSC0058894
tagtgacgtttty

SEQ ID NO: 241446 - DNA, 13 bp, Artificial Sequence
  Oligonucleotide for detection of SNP TSC0058894
raaaacgtcacta

SEQ ID NO: 241447 - DNA, 13 bp, Artificial Sequence
  Oligonucleotide for detection of SNP TSC0058894
gaggatgttattg

SEQ ID NO: 241448 - DNA, 13 bp, Artificial Sequence
  Oligonucleotide for detection of SNP TSC0058894
caataacatcctc

SEQ ID NO: 241449 - DNA, 13 bp, Artificial Sequence
  Oligonucleotide for detection of SNP TSC0058894
gaggatattattg

SEQ ID NO: 241450 - DNA, 13 bp, Artificial Sequence
  Oligonucleotide for detection of SNP TSC0058894
caataatatcctc

SEQ ID NO: 241451 - DNA, 13 bp, Artificial Sequence
  Oligonucleotide for detection of SNP TSC0058894
gaggacgttattg

SEQ ID NO: 241452 - DNA, 13 bp, Artificial Sequence
  Oligonucleotide for detection of SNP TSC0058894
caataacgtcctc

SEQ ID NO: 241453 - DNA, 13 bp, Artificial Sequence
  Oligonucleotide for detection of SNP TSC0001145
tggaattggaggy

SEQ ID NO: 241454 - DNA, 13 bp, Artificial Sequence
  Oligonucleotide for detection of SNP TSC0001145
rcctccaattcca

SEQ ID NO: 241455 - DNA, 13 bp, Artificial Sequence
  Oligonucleotide for detection of SNP TSC0001145
tggaatcggaggy

SEQ ID NO: 241456 - DNA, 13 bp, Artificial Sequence
  Oligonucleotide for detection of SNP TSC0001145
rcctccgattcca

SEQ ID NO: 241457 - DNA, 13 bp, Artificial Sequence
  Oligonucleotide for detection of SNP TSC0058895
ttttagataatga

SEQ ID NO: 241458 - DNA, 13 bp, Artificial Sequence
  Oligonucleotide for detection of SNP TSC0058895
tcattatctaaaa

SEQ ID NO: 241459 - DNA, 13 bp, Artificial Sequence
  Oligonucleotide for detection of SNP TSC0058895
ttttagttaatga

SEQ ID NO: 241460 - DNA, 13 bp, Artificial Sequence
  Oligonucleotide for detection of SNP TSC0058895
tcattaactaaaa

SEQ ID NO: 241461 - DNA, 13 bp, Artificial Sequence
  Oligonucleotide for detection of SNP TSC0058895
ttattgtttaaaa

SEQ ID NO: 241462 - DNA, 13 bp, Artificial Sequence
  Oligonucleotide for detection of SNP TSC0058895
ttttaaacaataa

SEQ ID NO: 241463 - DNA, 13 bp, Artificial Sequence
  Oligonucleotide for detection of SNP TSC0058895
ttattgattaaaa

SEQ ID NO: 241464 - DNA, 13 bp, Artificial Sequence
  Oligonucleotide for detection of SNP TSC0058895
ttttaatcaataa

SEQ ID NO: 241465 - DNA, 13 bp, Artificial Sequence
  Oligonucleotide for detection of SNP TSC0058897
gaaaagaatatta

SEQ ID NO: 241466 - DNA, 13 bp, Artificial Sequence
  Oligonucleotide for detection of SNP TSC0058897
taatattcttttc

SEQ ID NO: 241467 - DNA, 13 bp, Artificial Sequence
  Oligonucleotide for detection of SNP TSC0058897
gaaaaggatatta

SEQ ID NO: 241468 - DNA, 13 bp, Artificial Sequence
  Oligonucleotide for detection of SNP TSC0058897
taatatccttttc

SEQ ID NO: 241469 - DNA, 13 bp, Artificial Sequence
  Oligonucleotide for detection of SNP TSC0001719
ttatgttttttgy

SEQ ID NO: 241470 - DNA, 13 bp, Artificial Sequence
  Oligonucleotide for detection of SNP TSC0001719
rcaaaaaacataa

SEQ ID NO: 241471 - DNA, 13 bp, Artificial Sequence
  Oligonucleotide for detection of SNP TSC0001719
ttatgtgttttgy

SEQ ID NO: 241472 - DNA, 13 bp, Artificial Sequence
  Oligonucleotide for detection of SNP TSC0001719
rcaaaacacataa

SEQ ID NO: 241473 - DNA, 13 bp, Artificial Sequence
  Oligonucleotide for detection of SNP TSC0001719
ttatgtttttcgy

SEQ ID NO: 241474 - DNA, 13 bp, Artificial Sequence
  Oligonucleotide for detection of SNP TSC0001719
rcgaaaaacataa

SEQ ID NO: 241475 - DNA, 13 bp, Artificial Sequence
  Oligonucleotide for detection of SNP TSC0001719
ttatgtgtttcgy

SEQ ID NO: 241476 - DNA, 13 bp, Artificial Sequence
  Oligonucleotide for detection of SNP TSC0001719
rcgaaacacataa

SEQ ID NO: 241477 - DNA, 13 bp, Artificial Sequence
  Oligonucleotide for detection of SNP TSC0001719
gtggagaatataa

SEQ ID NO: 241478 - DNA, 13 bp, Artificial Sequence
  Oligonucleotide for detection of SNP TSC0001719
ttatattctccac

SEQ ID NO: 241479 - DNA, 13 bp, Artificial Sequence
  Oligonucleotide for detection of SNP TSC0001719
gtggagtatataa

SEQ ID NO: 241480 - DNA, 13 bp, Artificial Sequence
  Oligonucleotide for detection of SNP TSC0001719
ttatatactccac

SEQ ID NO: 241481 - DNA, 13 bp, Artificial Sequence
  Oligonucleotide for detection of SNP TSC0001719
gcggagaatataa

SEQ ID NO: 241482 - DNA, 13 bp, Artificial Sequence
  Oligonucleotide for detection of SNP TSC0001719
ttatattctccgc

SEQ ID NO: 241483 - DNA, 13 bp, Artificial Sequence
  Oligonucleotide for detection of SNP TSC0001719
gcggagtatataa

SEQ ID NO: 241484 - DNA, 13 bp, Artificial Sequence
  Oligonucleotide for detection of SNP TSC0001719
ttatatactccgc

SEQ ID NO: 241485 - DNA, 13 bp, Artificial Sequence
  Oligonucleotide for detection of SNP TSC0009763
tttatatggttgg

SEQ ID NO: 241486 - DNA, 13 bp, Artificial Sequence
  Oligonucleotide for detection of SNP TSC0009763
ccaaccatataaa

SEQ ID NO: 241487 - DNA, 13 bp, Artificial Sequence
  Oligonucleotide for detection of SNP TSC0009763
tttatagggttgg

SEQ ID NO: 241488 - DNA, 13 bp, Artificial Sequence
  Oligonucleotide for detection of SNP TSC0009763
ccaaccctataaa

SEQ ID NO: 241489 - DNA, 13 bp, Artificial Sequence
  Oligonucleotide for detection of SNP TSC0009763
ttagttatgtgga

SEQ ID NO: 241490 - DNA, 13 bp, Artificial Sequence
  Oligonucleotide for detection of SNP TSC0009763
tccacataactaa

SEQ ID NO: 241491 - DNA, 13 bp, Artificial Sequence
  Oligonucleotide for detection of SNP TSC0009763
ttagttttgtgga

SEQ ID NO: 241492 - DNA, 13 bp, Artificial Sequence
  Oligonucleotide for detection of SNP TSC0009763
tccacaaaactaa

SEQ ID NO: 241493 - DNA, 13 bp, Artificial Sequence
  Oligonucleotide for detection of SNP TSC0000146
ttgtttttttgta

SEQ ID NO: 241494 - DNA, 13 bp, Artificial Sequence
  Oligonucleotide for detection of SNP TSC0000146
tacaaaaaaacaa

SEQ ID NO: 241495 - DNA, 13 bp, Artificial Sequence
  Oligonucleotide for detection of SNP TSC0000146
tgtagatggatag

SEQ ID NO: 241496 - DNA, 13 bp, Artificial Sequence
  Oligonucleotide for detection of SNP TSC0000146
ctatccatctaca

SEQ ID NO: 241497 - DNA, 13 bp, Artificial Sequence
  Oligonucleotide for detection of SNP TSC0000146
tgtagagggatag

SEQ ID NO: 241498 - DNA, 13 bp, Artificial Sequence
  Oligonucleotide for detection of SNP TSC0000146
ctatccctctaca

SEQ ID NO: 241499 - DNA, 13 bp, Artificial Sequence
  Oligonucleotide for detection of SNP TSC0058899
taggtaattagtg

SEQ ID NO: 241500 - DNA, 13 bp, Artificial Sequence
  Oligonucleotide for detection of SNP TSC0058899
cactaattaccta

SEQ ID NO: 241501 - DNA, 13 bp, Artificial Sequence
  Oligonucleotide for detection of SNP TSC0058899
taggtagttagtg

SEQ ID NO: 241502 - DNA, 13 bp, Artificial Sequence
  Oligonucleotide for detection of SNP TSC0058899
cactaactaccta

SEQ ID NO: 241503 - DNA, 13 bp, Artificial Sequence
  Oligonucleotide for detection of SNP TSC0058901
gttgttttatgta

SEQ ID NO: 241504 - DNA, 13 bp, Artificial Sequence
  Oligonucleotide for detection of SNP TSC0058901
tacataaaacaac

SEQ ID NO: 241505 - DNA, 13 bp, Artificial Sequence
  Oligonucleotide for detection of SNP TSC0058901
gttgtcgtatgta

SEQ ID NO: 241506 - DNA, 13 bp, Artificial Sequence
  Oligonucleotide for detection of SNP TSC0058901
tacatacgacaac

SEQ ID NO: 241507 - DNA, 13 bp, Artificial Sequence
  Oligonucleotide for detection of SNP TSC0058901
tgtataaggtagy

SEQ ID NO: 241508 - DNA, 13 bp, Artificial Sequence
  Oligonucleotide for detection of SNP TSC0058901
rctaccttataca

SEQ ID NO: 241509 - DNA, 13 bp, Artificial Sequence
  Oligonucleotide for detection of SNP TSC0058901
tgtatatggtagy

SEQ ID NO: 241510 - DNA, 13 bp, Artificial Sequence
  Oligonucleotide for detection of SNP TSC0058901
rctaccatataca

SEQ ID NO: 241511 - DNA, 13 bp, Artificial Sequence
  Oligonucleotide for detection of SNP TSC0058901
tgtatacggtagy

SEQ ID NO: 241512 - DNA, 13 bp, Artificial Sequence
  Oligonucleotide for detection of SNP TSC0058901
rctaccgtataca

SEQ ID NO: 241513 - DNA, 13 bp, Artificial Sequence
  Oligonucleotide for detection of SNP TSC0058902
tagtttagtgttt

SEQ ID NO: 241514 - DNA, 13 bp, Artificial Sequence
  Oligonucleotide for detection of SNP TSC0058902
aaacactaaacta

SEQ ID NO: 241515 - DNA, 13 bp, Artificial Sequence
  Oligonucleotide for detection of SNP TSC0058902
tagtttggtgttt

SEQ ID NO: 241516 - DNA, 13 bp, Artificial Sequence
  Oligonucleotide for detection of SNP TSC0058902
aaacaccaaacta

SEQ ID NO: 241517 - DNA, 13 bp, Artificial Sequence
  Oligonucleotide for detection of SNP TSC0058902
tagttcggtgttt

SEQ ID NO: 241518 - DNA, 13 bp, Artificial Sequence
  Oligonucleotide for detection of SNP TSC0058902
aaacaccgaacta

SEQ ID NO: 241519 - DNA, 13 bp, Artificial Sequence
  Oligonucleotide for detection of SNP TSC0058902
aaatattgagtta

SEQ ID NO: 241520 - DNA, 13 bp, Artificial Sequence
  Oligonucleotide for detection of SNP TSC0058902
taactcaatattt

SEQ ID NO: 241521 - DNA, 13 bp, Artificial Sequence
  Oligonucleotide for detection of SNP TSC0058902
aaatatcgagtta

SEQ ID NO: 241522 - DNA, 13 bp, Artificial Sequence
  Oligonucleotide for detection of SNP TSC0058902
taactcgatattt

SEQ ID NO: 241523 - DNA, 13 bp, Artificial Sequence
  Oligonucleotide for detection of SNP TSC0058903
aagtgtataaagt

SEQ ID NO: 241524 - DNA, 13 bp, Artificial Sequence
  Oligonucleotide for detection of SNP TSC0058903
actttatacactt

SEQ ID NO: 241525 - DNA, 13 bp, Artificial Sequence
  Oligonucleotide for detection of SNP TSC0058903
aagtgtgtaaagt

SEQ ID NO: 241526 - DNA, 13 bp, Artificial Sequence
  Oligonucleotide for detection of SNP TSC0058903
actttacacactt

SEQ ID NO: 241527 - DNA, 13 bp, Artificial Sequence
  Oligonucleotide for detection of SNP TSC0001312
gtaaaggggttaa

SEQ ID NO: 241528 - DNA, 13 bp, Artificial Sequence
  Oligonucleotide for detection of SNP TSC0001312
ttaacccctttac

SEQ ID NO: 241529 - DNA, 13 bp, Artificial Sequence
  Oligonucleotide for detection of SNP TSC0001312
gtaaagaggttaa

SEQ ID NO: 241530 - DNA, 13 bp, Artificial Sequence
  Oligonucleotide for detection of SNP TSC0001312
ttaacctctttac

SEQ ID NO: 241531 - DNA, 13 bp, Artificial Sequence
  Oligonucleotide for detection of SNP TSC0058904
ggtttaaggtaat

SEQ ID NO: 241532 - DNA, 13 bp, Artificial Sequence
  Oligonucleotide for detection of SNP TSC0058904
attaccttaaacc

SEQ ID NO: 241533 - DNA, 13 bp, Artificial Sequence
  Oligonucleotide for detection of SNP TSC0058904
ggtttagggtaat

SEQ ID NO: 241534 - DNA, 13 bp, Artificial Sequence
  Oligonucleotide for detection of SNP TSC0058904
attaccctaaacc

SEQ ID NO: 241535 - DNA, 13 bp, Artificial Sequence
  Oligonucleotide for detection of SNP TSC0009671
ttattggttatay

SEQ ID NO: 241536 - DNA, 13 bp, Artificial Sequence
  Oligonucleotide for detection of SNP TSC0009671
rtataaccaataa

SEQ ID NO: 241537 - DNA, 13 bp, Artificial Sequence
  Oligonucleotide for detection of SNP TSC0009671
ttattgattatay

SEQ ID NO: 241538 - DNA, 13 bp, Artificial Sequence
  Oligonucleotide for detection of SNP TSC0009671
rtataatcaataa

SEQ ID NO: 241539 - DNA, 13 bp, Artificial Sequence
  Oligonucleotide for detection of SNP TSC0001480
gttaatgtattag

SEQ ID NO: 241540 - DNA, 13 bp, Artificial Sequence
  Oligonucleotide for detection of SNP TSC0001480
ctaatacattaac

SEQ ID NO: 241541 - DNA, 13 bp, Artificial Sequence
  Oligonucleotide for detection of SNP TSC0001480
gttaatatattag

SEQ ID NO: 241542 - DNA, 13 bp, Artificial Sequence
  Oligonucleotide for detection of SNP TSC0001480
ctaatatattaac

SEQ ID NO: 241543 - DNA, 13 bp, Artificial Sequence
  Oligonucleotide for detection of SNP TSC0001481
agaagtatattty

SEQ ID NO: 241544 - DNA, 13 bp, Artificial Sequence
  Oligonucleotide for detection of SNP TSC0001481
raaatatacttct

SEQ ID NO: 241545 - DNA, 13 bp, Artificial Sequence
  Oligonucleotide for detection of SNP TSC0001481
agaagtgtattty

SEQ ID NO: 241546 - DNA, 13 bp, Artificial Sequence
  Oligonucleotide for detection of SNP TSC0001481
raaatacacttct

SEQ ID NO: 241547 - DNA, 13 bp, Artificial Sequence
  Oligonucleotide for detection of SNP TSC0001481
agaagcgtattty

SEQ ID NO: 241548 - DNA, 13 bp, Artificial Sequence
  Oligonucleotide for detection of SNP TSC0001481
raaatacgcttct

SEQ ID NO: 241549 - DNA, 13 bp, Artificial Sequence
  Oligonucleotide for detection of SNP TSC0001481
gagatgtgttttt

SEQ ID NO: 241550 - DNA, 13 bp, Artificial Sequence
  Oligonucleotide for detection of SNP TSC0001481
aaaaacacatctc

SEQ ID NO: 241551 - DNA, 13 bp, Artificial Sequence
  Oligonucleotide for detection of SNP TSC0001481
gagatgcgttttt

SEQ ID NO: 241552 - DNA, 13 bp, Artificial Sequence
  Oligonucleotide for detection of SNP TSC0001481
aaaaacgcatctc

SEQ ID NO: 241553 - DNA, 13 bp, Artificial Sequence
  Oligonucleotide for detection of SNP TSC0001482
tagtatagtgtag

SEQ ID NO: 241554 - DNA, 13 bp, Artificial Sequence
  Oligonucleotide for detection of SNP TSC0001482
ctacactatacta

SEQ ID NO: 241555 - DNA, 13 bp, Artificial Sequence
  Oligonucleotide for detection of SNP TSC0001482
tagtatggtgtag

SEQ ID NO: 241556 - DNA, 13 bp, Artificial Sequence
  Oligonucleotide for detection of SNP TSC0001482
ctacaccatacta

SEQ ID NO: 241557 - DNA, 13 bp, Artificial Sequence
  Oligonucleotide for detection of SNP TSC0001482
tagtacggtgtag

SEQ ID NO: 241558 - DNA, 13 bp, Artificial Sequence
  Oligonucleotide for detection of SNP TSC0001482
ctacaccgtacta

SEQ ID NO: 241559 - DNA, 13 bp, Artificial Sequence
  Oligonucleotide for detection of SNP TSC0001482
ttgtattgtattg

SEQ ID NO: 241560 - DNA, 13 bp, Artificial Sequence
  Oligonucleotide for detection of SNP TSC0001482
caatacaatacaa

SEQ ID NO: 241561 - DNA, 13 bp, Artificial Sequence
  Oligonucleotide for detection of SNP TSC0001482
ttgtatcgtattg

SEQ ID NO: 241562 - DNA, 13 bp, Artificial Sequence
  Oligonucleotide for detection of SNP TSC0001482
caatacgatacaa

SEQ ID NO: 241563 - DNA, 13 bp, Artificial Sequence
  Oligonucleotide for detection of SNP TSC0000538
tttgggagatata

SEQ ID NO: 241564 - DNA, 13 bp, Artificial Sequence
  Oligonucleotide for detection of SNP TSC0000538
tatatctcccaaa

SEQ ID NO: 241565 - DNA, 13 bp, Artificial Sequence
  Oligonucleotide for detection of SNP TSC0000538
tttgggggatata

SEQ ID NO: 241566 - DNA, 13 bp, Artificial Sequence
  Oligonucleotide for detection of SNP TSC0000538
tatatcccccaaa

SEQ ID NO: 241567 - DNA, 13 bp, Artificial Sequence
  Oligonucleotide for detection of SNP TSC0000540
tttataatgtgtt

SEQ ID NO: 241568 - DNA, 13 bp, Artificial Sequence
  Oligonucleotide for detection of SNP TSC0000540
aacacattataaa

SEQ ID NO: 241569 - DNA, 13 bp, Artificial Sequence
  Oligonucleotide for detection of SNP TSC0000540
tttatagtgtgtt

SEQ ID NO: 241570 - DNA, 13 bp, Artificial Sequence
  Oligonucleotide for detection of SNP TSC0000540
aacacactataaa

SEQ ID NO: 241571 - DNA, 13 bp, Artificial Sequence
  Oligonucleotide for detection of SNP TSC0058911
tttatggtttgaa

SEQ ID NO: 241572 - DNA, 13 bp, Artificial Sequence
  Oligonucleotide for detection of SNP TSC0058911
ttcaaaccataaa

SEQ ID NO: 241573 - DNA, 13 bp, Artificial Sequence
  Oligonucleotide for detection of SNP TSC0058912
ttataattagtgt

SEQ ID NO: 241574 - DNA, 13 bp, Artificial Sequence
  Oligonucleotide for detection of SNP TSC0058912
acactaattataa

SEQ ID NO: 241575 - DNA, 13 bp, Artificial Sequence
  Oligonucleotide for detection of SNP TSC0058912
ttataagtagtgt

SEQ ID NO: 241576 - DNA, 13 bp, Artificial Sequence
  Oligonucleotide for detection of SNP TSC0058912
acactacttataa

SEQ ID NO: 241577 - DNA, 13 bp, Artificial Sequence
  Oligonucleotide for detection of SNP TSC0058912
atattggttatag

SEQ ID NO: 241578 - DNA, 13 bp, Artificial Sequence
  Oligonucleotide for detection of SNP TSC0058912
ctataaccaatat

SEQ ID NO: 241579 - DNA, 13 bp, Artificial Sequence
  Oligonucleotide for detection of SNP TSC0058912
atattgtttatag

SEQ ID NO: 241580 - DNA, 13 bp, Artificial Sequence
  Oligonucleotide for detection of SNP TSC0058912
ctataaacaatat

SEQ ID NO: 241581 - DNA, 13 bp, Artificial Sequence
  Oligonucleotide for detection of SNP TSC0058913
gagatagtgttta

SEQ ID NO: 241582 - DNA, 13 bp, Artificial Sequence
  Oligonucleotide for detection of SNP TSC0058913
taaacactatctc

SEQ ID NO: 241583 - DNA, 13 bp, Artificial Sequence
  Oligonucleotide for detection of SNP TSC0058913
gagataatgttta

SEQ ID NO: 241584 - DNA, 13 bp, Artificial Sequence
  Oligonucleotide for detection of SNP TSC0058913
taaacattatctc

SEQ ID NO: 241585 - DNA, 13 bp, Artificial Sequence
  Oligonucleotide for detection of SNP TSC0058914
taagtattgtgtt

SEQ ID NO: 241586 - DNA, 13 bp, Artificial Sequence
  Oligonucleotide for detection of SNP TSC0058914
aacacaatactta

SEQ ID NO: 241587 - DNA, 13 bp, Artificial Sequence
  Oligonucleotide for detection of SNP TSC0058914
taagtagtgtgtt

SEQ ID NO: 241588 - DNA, 13 bp, Artificial Sequence
  Oligonucleotide for detection of SNP TSC0058914
aacacactactta

SEQ ID NO: 241589 - DNA, 13 bp, Artificial Sequence
  Oligonucleotide for detection of SNP TSC0058914
agtatagtgttta

SEQ ID NO: 241590 - DNA, 13 bp, Artificial Sequence
  Oligonucleotide for detection of SNP TSC0058914
taaacactatact

SEQ ID NO: 241591 - DNA, 13 bp, Artificial Sequence
  Oligonucleotide for detection of SNP TSC0058914
agtatattgttta

SEQ ID NO: 241592 - DNA, 13 bp, Artificial Sequence
  Oligonucleotide for detection of SNP TSC0058914
taaacaatatact

SEQ ID NO: 241593 - DNA, 13 bp, Artificial Sequence
  Oligonucleotide for detection of SNP TSC0000752
ttttatatgaggy

SEQ ID NO: 241594 - DNA, 13 bp, Artificial Sequence
  Oligonucleotide for detection of SNP TSC0000752
rcctcatataaaa

SEQ ID NO: 241595 - DNA, 13 bp, Artificial Sequence
  Oligonucleotide for detection of SNP TSC0000752
ttttatgtgaggy

SEQ ID NO: 241596 - DNA, 13 bp, Artificial Sequence
  Oligonucleotide for detection of SNP TSC0000752
rcctcacataaaa

SEQ ID NO: 241597 - DNA, 13 bp, Artificial Sequence
  Oligonucleotide for detection of SNP TSC0009681
gtataagttattg

SEQ ID NO: 241598 - DNA, 13 bp, Artificial Sequence
  Oligonucleotide for detection of SNP TSC0009681
caataacttatac

SEQ ID NO: 241599 - DNA, 13 bp, Artificial Sequence
  Oligonucleotide for detection of SNP TSC0009681
gtataaattattg

SEQ ID NO: 241600 - DNA, 13 bp, Artificial Sequence
  Oligonucleotide for detection of SNP TSC0009681
caataatttatac

SEQ ID NO: 241601 - DNA, 13 bp, Artificial Sequence
  Oligonucleotide for detection of SNP TSC0058917
tttttagaggtag

SEQ ID NO: 241602 - DNA, 13 bp, Artificial Sequence
  Oligonucleotide for detection of SNP TSC0058917
ctacctctaaaaa

SEQ ID NO: 241603 - DNA, 13 bp, Artificial Sequence
  Oligonucleotide for detection of SNP TSC0058917
tttttaaaggtag

SEQ ID NO: 241604 - DNA, 13 bp, Artificial Sequence
  Oligonucleotide for detection of SNP TSC0058917
ctacctttaaaaa

SEQ ID NO: 241605 - DNA, 13 bp, Artificial Sequence
  Oligonucleotide for detection of SNP TSC0058918
attgtgatttgtg

SEQ ID NO: 241606 - DNA, 13 bp, Artificial Sequence
  Oligonucleotide for detection of SNP TSC0058918
cacaaatcacaat

SEQ ID NO: 241607 - DNA, 13 bp, Artificial Sequence
  Oligonucleotide for detection of SNP TSC0058918
atcgtgatttgtg

SEQ ID NO: 241608 - DNA, 13 bp, Artificial Sequence
  Oligonucleotide for detection of SNP TSC0058918
cacaaatcacgat

SEQ ID NO: 241609 - DNA, 13 bp, Artificial Sequence
  Oligonucleotide for detection of SNP TSC0058918
atcgtggtttgtg

SEQ ID NO: 241610 - DNA, 13 bp, Artificial Sequence
  Oligonucleotide for detection of SNP TSC0058918
cacaaaccacgat

SEQ ID NO: 241611 - DNA, 13 bp, Artificial Sequence
  Oligonucleotide for detection of SNP TSC0058918
attgcgatttgtg

SEQ ID NO: 241612 - DNA, 13 bp, Artificial Sequence
  Oligonucleotide for detection of SNP TSC0058918
cacaaatcgcaat

SEQ ID NO: 241613 - DNA, 13 bp, Artificial Sequence
  Oligonucleotide for detection of SNP TSC0058918
atcgcgatttgtg

SEQ ID NO: 241614 - DNA, 13 bp, Artificial Sequence
  Oligonucleotide for detection of SNP TSC0058918
cacaaatcgcgat

SEQ ID NO: 241615 - DNA, 13 bp, Artificial Sequence
  Oligonucleotide for detection of SNP TSC0058918
atcgcggtttgtg

SEQ ID NO: 241616 - DNA, 13 bp, Artificial Sequence
  Oligonucleotide for detection of SNP TSC0058918
cacaaaccgcgat

SEQ ID NO: 241617 - DNA, 13 bp, Artificial Sequence
  Oligonucleotide for detection of SNP TSC0001567
attttgtgaagtt

SEQ ID NO: 241618 - DNA, 13 bp, Artificial Sequence
  Oligonucleotide for detection of SNP TSC0001567
aacttcacaaaat

SEQ ID NO: 241619 - DNA, 13 bp, Artificial Sequence
  Oligonucleotide for detection of SNP TSC0001567
attttgggaagtt

SEQ ID NO: 241620 - DNA, 13 bp, Artificial Sequence
  Oligonucleotide for detection of SNP TSC0001567
aacttcccaaaat

SEQ ID NO: 241621 - DNA, 13 bp, Artificial Sequence
  Oligonucleotide for detection of SNP TSC0001567
aattttataaaat

SEQ ID NO: 241622 - DNA, 13 bp, Artificial Sequence
  Oligonucleotide for detection of SNP TSC0001567
attttataaaatt

SEQ ID NO: 241623 - DNA, 13 bp, Artificial Sequence
  Oligonucleotide for detection of SNP TSC0001567
aattttttaaaat

SEQ ID NO: 241624 - DNA, 13 bp, Artificial Sequence
  Oligonucleotide for detection of SNP TSC0001567
attttaaaaaatt

SEQ ID NO: 241625 - DNA, 13 bp, Artificial Sequence
  Oligonucleotide for detection of SNP TSC0001568
gattttgttttat

SEQ ID NO: 241626 - DNA, 13 bp, Artificial Sequence
  Oligonucleotide for detection of SNP TSC0001568
ataaaacaaaatc

SEQ ID NO: 241627 - DNA, 13 bp, Artificial Sequence
  Oligonucleotide for detection of SNP TSC0001569
tttgtgtagttaa

SEQ ID NO: 241628 - DNA, 13 bp, Artificial Sequence
  Oligonucleotide for detection of SNP TSC0001569
ttaactacacaaa

SEQ ID NO: 241629 - DNA, 13 bp, Artificial Sequence
  Oligonucleotide for detection of SNP TSC0001569
tttgtggagttaa

SEQ ID NO: 241630 - DNA, 13 bp, Artificial Sequence
  Oligonucleotide for detection of SNP TSC0001569
ttaactccacaaa

SEQ ID NO: 241631 - DNA, 13 bp, Artificial Sequence
  Oligonucleotide for detection of SNP TSC0001569
ttaattttataaa

SEQ ID NO: 241632 - DNA, 13 bp, Artificial Sequence
  Oligonucleotide for detection of SNP TSC0001569
tttataaaattaa

SEQ ID NO: 241633 - DNA, 13 bp, Artificial Sequence
  Oligonucleotide for detection of SNP TSC0058919
ttgtgtagttaat

SEQ ID NO: 241634 - DNA, 13 bp, Artificial Sequence
  Oligonucleotide for detection of SNP TSC0058919
attaactacacaa

SEQ ID NO: 241635 - DNA, 13 bp, Artificial Sequence
  Oligonucleotide for detection of SNP TSC0058919
ttgtgtggttaat

SEQ ID NO: 241636 - DNA, 13 bp, Artificial Sequence
  Oligonucleotide for detection of SNP TSC0058919
attaaccacacaa

SEQ ID NO: 241637 - DNA, 13 bp, Artificial Sequence
  Oligonucleotide for detection of SNP TSC0058921
aggttatttatgt

SEQ ID NO: 241638 - DNA, 13 bp, Artificial Sequence
  Oligonucleotide for detection of SNP TSC0058921
acataaataacct

SEQ ID NO: 241639 - DNA, 13 bp, Artificial Sequence
  Oligonucleotide for detection of SNP TSC0058921
aggttagttatgt

SEQ ID NO: 241640 - DNA, 13 bp, Artificial Sequence
  Oligonucleotide for detection of SNP TSC0058921
acataactaacct

SEQ ID NO: 241641 - DNA, 13 bp, Artificial Sequence
  Oligonucleotide for detection of SNP TSC0058921
atatgggtggttt

SEQ ID NO: 241642 - DNA, 13 bp, Artificial Sequence
  Oligonucleotide for detection of SNP TSC0058921
aaaccacccatat

SEQ ID NO: 241643 - DNA, 13 bp, Artificial Sequence
  Oligonucleotide for detection of SNP TSC0058921
atatggttggttt

SEQ ID NO: 241644 - DNA, 13 bp, Artificial Sequence
  Oligonucleotide for detection of SNP TSC0058921
aaaccaaccatat

SEQ ID NO: 241645 - DNA, 13 bp, Artificial Sequence
  Oligonucleotide for detection of SNP TSC0058922
gatattatattta

SEQ ID NO: 241646 - DNA, 13 bp, Artificial Sequence
  Oligonucleotide for detection of SNP TSC0058922
taaatataatatc

SEQ ID NO: 241647 - DNA, 13 bp, Artificial Sequence
  Oligonucleotide for detection of SNP TSC0058922
gatattgtattta

SEQ ID NO: 241648 - DNA, 13 bp, Artificial Sequence
  Oligonucleotide for detection of SNP TSC0058922
taaatacaatatc

SEQ ID NO: 241649 - DNA, 13 bp, Artificial Sequence
  Oligonucleotide for detection of SNP TSC0058922
gatatcgtattta

SEQ ID NO: 241650 - DNA, 13 bp, Artificial Sequence
  Oligonucleotide for detection of SNP TSC0058922
taaatacgatatc

SEQ ID NO: 241651 - DNA, 13 bp, Artificial Sequence
  Oligonucleotide for detection of SNP TSC0058922
taaatatgataty

SEQ ID NO: 241652 - DNA, 13 bp, Artificial Sequence
  Oligonucleotide for detection of SNP TSC0058922
ratatcatattta

SEQ ID NO: 241653 - DNA, 13 bp, Artificial Sequence
  Oligonucleotide for detection of SNP TSC0058922
taaatacgataty

SEQ ID NO: 241654 - DNA, 13 bp, Artificial Sequence
  Oligonucleotide for detection of SNP TSC0058922
ratatcgtattta

SEQ ID NO: 241655 - DNA, 13 bp, Artificial Sequence
  Oligonucleotide for detection of SNP TSC0058925
ttttgggtttaty

SEQ ID NO: 241656 - DNA, 13 bp, Artificial Sequence
  Oligonucleotide for detection of SNP TSC0058925
rataaacccaaaa

SEQ ID NO: 241657 - DNA, 13 bp, Artificial Sequence
  Oligonucleotide for detection of SNP TSC0058925
ttttggatttaty

SEQ ID NO: 241658 - DNA, 13 bp, Artificial Sequence
  Oligonucleotide for detection of SNP TSC0058925
rataaatccaaaa

SEQ ID NO: 241659 - DNA, 13 bp, Artificial Sequence
  Oligonucleotide for detection of SNP TSC0058926
tattatgaaggay

SEQ ID NO: 241660 - DNA, 13 bp, Artificial Sequence
  Oligonucleotide for detection of SNP TSC0058926
rtccttcataata

SEQ ID NO: 241661 - DNA, 13 bp, Artificial Sequence
  Oligonucleotide for detection of SNP TSC0058926
tattataaaggay

SEQ ID NO: 241662 - DNA, 13 bp, Artificial Sequence
  Oligonucleotide for detection of SNP TSC0058926
rtcctttataata

SEQ ID NO: 241663 - DNA, 13 bp, Artificial Sequence
  Oligonucleotide for detection of SNP TSC0058927
taagtatagagay

SEQ ID NO: 241664 - DNA, 13 bp, Artificial Sequence
  Oligonucleotide for detection of SNP TSC0058927
rtctctatactta

SEQ ID NO: 241665 - DNA, 13 bp, Artificial Sequence
  Oligonucleotide for detection of SNP TSC0058927
taagtagagagay

SEQ ID NO: 241666 - DNA, 13 bp, Artificial Sequence
  Oligonucleotide for detection of SNP TSC0058927
rtctctctactta

SEQ ID NO: 241667 - DNA, 13 bp, Artificial Sequence
  Oligonucleotide for detection of SNP TSC0058927
gtttttttatttg

SEQ ID NO: 241668 - DNA, 13 bp, Artificial Sequence
  Oligonucleotide for detection of SNP TSC0058927
caaataaaaaaac

SEQ ID NO: 241669 - DNA, 13 bp, Artificial Sequence
  Oligonucleotide for detection of SNP TSC0058930
tttattggaaagg

SEQ ID NO: 241670 - DNA, 13 bp, Artificial Sequence
  Oligonucleotide for detection of SNP TSC0058930
cctttccaataaa

SEQ ID NO: 241671 - DNA, 13 bp, Artificial Sequence
  Oligonucleotide for detection of SNP TSC0058930
tttattagaaagg

SEQ ID NO: 241672 - DNA, 13 bp, Artificial Sequence
  Oligonucleotide for detection of SNP TSC0058930
cctttctaataaa

SEQ ID NO: 241673 - DNA, 13 bp, Artificial Sequence
  Oligonucleotide for detection of SNP TSC0058930
tttatcggaaagg

SEQ ID NO: 241674 - DNA, 13 bp, Artificial Sequence
  Oligonucleotide for detection of SNP TSC0058930
cctttccgataaa

SEQ ID NO: 241675 - DNA, 13 bp, Artificial Sequence
  Oligonucleotide for detection of SNP TSC0058931
ataataaataaty

SEQ ID NO: 241676 - DNA, 13 bp, Artificial Sequence
  Oligonucleotide for detection of SNP TSC0058931
rattatttattat

SEQ ID NO: 241677 - DNA, 13 bp, Artificial Sequence
  Oligonucleotide for detection of SNP TSC0058931
ataatagataaty

SEQ ID NO: 241678 - DNA, 13 bp, Artificial Sequence
  Oligonucleotide for detection of SNP TSC0058931
rattatctattat

SEQ ID NO: 241679 - DNA, 13 bp, Artificial Sequence
  Oligonucleotide for detection of SNP TSC0058933
gtaagtatgatgg

SEQ ID NO: 241680 - DNA, 13 bp, Artificial Sequence
  Oligonucleotide for detection of SNP TSC0058933
ccatcatacttac

SEQ ID NO: 241681 - DNA, 13 bp, Artificial Sequence
  Oligonucleotide for detection of SNP TSC0058933
gtaagtgtgatgg

SEQ ID NO: 241682 - DNA, 13 bp, Artificial Sequence
  Oligonucleotide for detection of SNP TSC0058933
ccatcacacttac

SEQ ID NO: 241683 - DNA, 13 bp, Artificial Sequence
  Oligonucleotide for detection of SNP TSC0058934
tagtggaagatag

SEQ ID NO: 241684 - DNA, 13 bp, Artificial Sequence
  Oligonucleotide for detection of SNP TSC0058934
ctatcttccacta

SEQ ID NO: 241685 - DNA, 13 bp, Artificial Sequence
  Oligonucleotide for detection of SNP TSC0058934
tagtgggagatag

SEQ ID NO: 241686 - DNA, 13 bp, Artificial Sequence
  Oligonucleotide for detection of SNP TSC0058934
ctatctcccacta

SEQ ID NO: 241687 - DNA, 13 bp, Artificial Sequence
  Oligonucleotide for detection of SNP TSC0058938
tggtggtggagtg

SEQ ID NO: 241688 - DNA, 13 bp, Artificial Sequence
  Oligonucleotide for detection of SNP TSC0058938
cactccaccacca

SEQ ID NO: 241689 - DNA, 13 bp, Artificial Sequence
  Oligonucleotide for detection of SNP TSC0058938
tggtggcggagtg

SEQ ID NO: 241690 - DNA, 13 bp, Artificial Sequence
  Oligonucleotide for detection of SNP TSC0058938
cactccgccacca

SEQ ID NO: 241691 - DNA, 13 bp, Artificial Sequence
  Oligonucleotide for detection of SNP TSC0058943
tggtgtatttgtt

SEQ ID NO: 241692 - DNA, 13 bp, Artificial Sequence
  Oligonucleotide for detection of SNP TSC0058943
aacaaatacacca

SEQ ID NO: 241693 - DNA, 13 bp, Artificial Sequence
  Oligonucleotide for detection of SNP TSC0058944
taaggtaaattta

SEQ ID NO: 241694 - DNA, 13 bp, Artificial Sequence
  Oligonucleotide for detection of SNP TSC0058944
taaatttacctta

SEQ ID NO: 241695 - DNA, 13 bp, Artificial Sequence
  Oligonucleotide for detection of SNP TSC0058944
taaggtgaattta

SEQ ID NO: 241696 - DNA, 13 bp, Artificial Sequence
  Oligonucleotide for detection of SNP TSC0058944
taaattcacctta

SEQ ID NO: 241697 - DNA, 13 bp, Artificial Sequence
  Oligonucleotide for detection of SNP TSC0058944
taaggcgaattta

SEQ ID NO: 241698 - DNA, 13 bp, Artificial Sequence
  Oligonucleotide for detection of SNP TSC0058944
taaattcgcctta

SEQ ID NO: 241699 - DNA, 13 bp, Artificial Sequence
  Oligonucleotide for detection of SNP TSC0058944
tgaatttgttttg

SEQ ID NO: 241700 - DNA, 13 bp, Artificial Sequence
  Oligonucleotide for detection of SNP TSC0058944
caaaacaaattca

SEQ ID NO: 241701 - DNA, 13 bp, Artificial Sequence
  Oligonucleotide for detection of SNP TSC0058944
tgaattcgttttg

SEQ ID NO: 241702 - DNA, 13 bp, Artificial Sequence
  Oligonucleotide for detection of SNP TSC0058944
caaaacgaattca

SEQ ID NO: 241703 - DNA, 13 bp, Artificial Sequence
  Oligonucleotide for detection of SNP TSC0058945
ataattgttatta

SEQ ID NO: 241704 - DNA, 13 bp, Artificial Sequence
  Oligonucleotide for detection of SNP TSC0058945
taataacaattat

SEQ ID NO: 241705 - DNA, 13 bp, Artificial Sequence
  Oligonucleotide for detection of SNP TSC0058945
ataattattatta

SEQ ID NO: 241706 - DNA, 13 bp, Artificial Sequence
  Oligonucleotide for detection of SNP TSC0058945
taataataattat

SEQ ID NO: 241707 - DNA, 13 bp, Artificial Sequence
  Oligonucleotide for detection of SNP TSC0058946
tatttttgtaatg

SEQ ID NO: 241708 - DNA, 13 bp, Artificial Sequence
  Oligonucleotide for detection of SNP TSC0058946
cattacaaaaata

SEQ ID NO: 241709 - DNA, 13 bp, Artificial Sequence
  Oligonucleotide for detection of SNP TSC0058946
tattttggtaatg

SEQ ID NO: 241710 - DNA, 13 bp, Artificial Sequence
  Oligonucleotide for detection of SNP TSC0058946
cattaccaaaata

SEQ ID NO: 241711 - DNA, 13 bp, Artificial Sequence
  Oligonucleotide for detection of SNP TSC0058946
tatttcggtaatg

SEQ ID NO: 241712 - DNA, 13 bp, Artificial Sequence
  Oligonucleotide for detection of SNP TSC0058946
cattaccgaaata

SEQ ID NO: 241713 - DNA, 13 bp, Artificial Sequence
  Oligonucleotide for detection of SNP TSC0058946
tattatagaagta

SEQ ID NO: 241714 - DNA, 13 bp, Artificial Sequence
  Oligonucleotide for detection of SNP TSC0058946
tacttctataata

SEQ ID NO: 241715 - DNA, 13 bp, Artificial Sequence
  Oligonucleotide for detection of SNP TSC0058946
tattattgaagta

SEQ ID NO: 241716 - DNA, 13 bp, Artificial Sequence
  Oligonucleotide for detection of SNP TSC0058946
tacttcaataata

SEQ ID NO: 241717 - DNA, 13 bp, Artificial Sequence
  Oligonucleotide for detection of SNP TSC0058946
tattatcgaagta

SEQ ID NO: 241718 - DNA, 13 bp, Artificial Sequence
  Oligonucleotide for detection of SNP TSC0058946
tacttcgataata

SEQ ID NO: 241719 - DNA, 13 bp, Artificial Sequence
  Oligonucleotide for detection of SNP TSC0058947
aaattggaaataa

SEQ ID NO: 241720 - DNA, 13 bp, Artificial Sequence
  Oligonucleotide for detection of SNP TSC0058947
ttatttccaattt

SEQ ID NO: 241721 - DNA, 13 bp, Artificial Sequence
  Oligonucleotide for detection of SNP TSC0058947
aaattgaaaataa

SEQ ID NO: 241722 - DNA, 13 bp, Artificial Sequence
  Oligonucleotide for detection of SNP TSC0058947
ttattttcaattt

SEQ ID NO: 241723 - DNA, 13 bp, Artificial Sequence
  Oligonucleotide for detection of SNP TSC0058948
tgtttttgatggg

SEQ ID NO: 241724 - DNA, 13 bp, Artificial Sequence
  Oligonucleotide for detection of SNP TSC0058948
cccatcaaaaaca

SEQ ID NO: 241725 - DNA, 13 bp, Artificial Sequence
  Oligonucleotide for detection of SNP TSC0058948
tgttttcgatggg

SEQ ID NO: 241726 - DNA, 13 bp, Artificial Sequence
  Oligonucleotide for detection of SNP TSC0058948
cccatcgaaaaca

SEQ ID NO: 241727 - DNA, 13 bp, Artificial Sequence
  Oligonucleotide for detection of SNP TSC0058948
tttattgagaata

SEQ ID NO: 241728 - DNA, 13 bp, Artificial Sequence
  Oligonucleotide for detection of SNP TSC0058948
tattctcaataaa

SEQ ID NO: 241729 - DNA, 13 bp, Artificial Sequence
  Oligonucleotide for detection of SNP TSC0058948
tttattaagaata

SEQ ID NO: 241730 - DNA, 13 bp, Artificial Sequence
  Oligonucleotide for detection of SNP TSC0058948
tattcttaataaa

SEQ ID NO: 241731 - DNA, 13 bp, Artificial Sequence
  Oligonucleotide for detection of SNP TSC0058948
tttatcgagaata

SEQ ID NO: 241732 - DNA, 13 bp, Artificial Sequence
  Oligonucleotide for detection of SNP TSC0058948
tattctcgataaa

SEQ ID NO: 241733 - DNA, 13 bp, Artificial Sequence
  Oligonucleotide for detection of SNP TSC0058949
gaaggaggaggga

SEQ ID NO: 241734 - DNA, 13 bp, Artificial Sequence
  Oligonucleotide for detection of SNP TSC0058949
tccctcctccttc

SEQ ID NO: 241735 - DNA, 13 bp, Artificial Sequence
  Oligonucleotide for detection of SNP TSC0058949
gaaggaagaggga

SEQ ID NO: 241736 - DNA, 13 bp, Artificial Sequence
  Oligonucleotide for detection of SNP TSC0058949
tccctcttccttc

SEQ ID NO: 241737 - DNA, 13 bp, Artificial Sequence
  Oligonucleotide for detection of SNP TSC0058950
gggtagatttaty

SEQ ID NO: 241738 - DNA, 13 bp, Artificial Sequence
  Oligonucleotide for detection of SNP TSC0058950
rataaatctaccc

SEQ ID NO: 241739 - DNA, 13 bp, Artificial Sequence
  Oligonucleotide for detection of SNP TSC0058950
gggtagttttaty

SEQ ID NO: 241740 - DNA, 13 bp, Artificial Sequence
  Oligonucleotide for detection of SNP TSC0058950
rataaaactaccc

SEQ ID NO: 241741 - DNA, 13 bp, Artificial Sequence
  Oligonucleotide for detection of SNP TSC0058950
ggtggatttatty

SEQ ID NO: 241742 - DNA, 13 bp, Artificial Sequence
  Oligonucleotide for detection of SNP TSC0058950
raataaatccacc

SEQ ID NO: 241743 - DNA, 13 bp, Artificial Sequence
  Oligonucleotide for detection of SNP TSC0058950
ggtggagttatty

SEQ ID NO: 241744 - DNA, 13 bp, Artificial Sequence
  Oligonucleotide for detection of SNP TSC0058950
raataactccacc

SEQ ID NO: 241745 - DNA, 13 bp, Artificial Sequence
  Oligonucleotide for detection of SNP TSC0058951
tttagttgtttty

SEQ ID NO: 241746 - DNA, 13 bp, Artificial Sequence
  Oligonucleotide for detection of SNP TSC0058951
raaaacaactaaa

SEQ ID NO: 241747 - DNA, 13 bp, Artificial Sequence
  Oligonucleotide for detection of SNP TSC0058951
tttagcggtttty

SEQ ID NO: 241748 - DNA, 13 bp, Artificial Sequence
  Oligonucleotide for detection of SNP TSC0058951
raaaaccgctaaa

SEQ ID NO: 241749 - DNA, 13 bp, Artificial Sequence
  Oligonucleotide for detection of SNP TSC0058951
gaaagtagttggg

SEQ ID NO: 241750 - DNA, 13 bp, Artificial Sequence
  Oligonucleotide for detection of SNP TSC0058951
cccaactactttc

SEQ ID NO: 241751 - DNA, 13 bp, Artificial Sequence
  Oligonucleotide for detection of SNP TSC0058951
gaaagttgttggg

SEQ ID NO: 241752 - DNA, 13 bp, Artificial Sequence
  Oligonucleotide for detection of SNP TSC0058951
cccaacaactttc

SEQ ID NO: 241753 - DNA, 13 bp, Artificial Sequence
  Oligonucleotide for detection of SNP TSC0058951
gaaagtcgttggg

SEQ ID NO: 241754 - DNA, 13 bp, Artificial Sequence
  Oligonucleotide for detection of SNP TSC0058951
cccaacgactttc

SEQ ID NO: 241755 - DNA, 13 bp, Artificial Sequence
  Oligonucleotide for detection of SNP TSC0058952
ggatttaaattty

SEQ ID NO: 241756 - DNA, 13 bp, Artificial Sequence
  Oligonucleotide for detection of SNP TSC0058952
raaatttaaatcc

SEQ ID NO: 241757 - DNA, 13 bp, Artificial Sequence
  Oligonucleotide for detection of SNP TSC0058952
ggattttaattty

SEQ ID NO: 241758 - DNA, 13 bp, Artificial Sequence
  Oligonucleotide for detection of SNP TSC0058952
raaattaaaatcc

SEQ ID NO: 241759 - DNA, 13 bp, Artificial Sequence
  Oligonucleotide for detection of SNP TSC0058952
gaggtttaagtty

SEQ ID NO: 241760 - DNA, 13 bp, Artificial Sequence
  Oligonucleotide for detection of SNP TSC0058952
raacttaaacctc

SEQ ID NO: 241761 - DNA, 13 bp, Artificial Sequence
  Oligonucleotide for detection of SNP TSC0058952
gaggttgaagtty

SEQ ID NO: 241762 - DNA, 13 bp, Artificial Sequence
  Oligonucleotide for detection of SNP TSC0058952
raacttcaacctc

SEQ ID NO: 241763 - DNA, 13 bp, Artificial Sequence
  Oligonucleotide for detection of SNP TSC0058953
gttatgatagaga

SEQ ID NO: 241764 - DNA, 13 bp, Artificial Sequence
  Oligonucleotide for detection of SNP TSC0058953
tctctatcataac

SEQ ID NO: 241765 - DNA, 13 bp, Artificial Sequence
  Oligonucleotide for detection of SNP TSC0058953
gttatggtagaga

SEQ ID NO: 241766 - DNA, 13 bp, Artificial Sequence
  Oligonucleotide for detection of SNP TSC0058953
tctctaccataac

SEQ ID NO: 241767 - DNA, 13 bp, Artificial Sequence
  Oligonucleotide for detection of SNP TSC0058957
agttgtattatta

SEQ ID NO: 241768 - DNA, 13 bp, Artificial Sequence
  Oligonucleotide for detection of SNP TSC0058957
taataatacaact

SEQ ID NO: 241769 - DNA, 13 bp, Artificial Sequence
  Oligonucleotide for detection of SNP TSC0058957
agttgtgttatta

SEQ ID NO: 241770 - DNA, 13 bp, Artificial Sequence
  Oligonucleotide for detection of SNP TSC0058957
taataacacaact

SEQ ID NO: 241771 - DNA, 13 bp, Artificial Sequence
  Oligonucleotide for detection of SNP TSC0058957
agttgcgttatta

SEQ ID NO: 241772 - DNA, 13 bp, Artificial Sequence
  Oligonucleotide for detection of SNP TSC0058957
taataacgcaact

SEQ ID NO: 241773 - DNA, 13 bp, Artificial Sequence
  Oligonucleotide for detection of SNP TSC0058957
tgatggtgtaatt

SEQ ID NO: 241774 - DNA, 13 bp, Artificial Sequence
  Oligonucleotide for detection of SNP TSC0058957
aattacaccatca

SEQ ID NO: 241775 - DNA, 13 bp, Artificial Sequence
  Oligonucleotide for detection of SNP TSC0058957
tgatggcgtaatt

SEQ ID NO: 241776 - DNA, 13 bp, Artificial Sequence
  Oligonucleotide for detection of SNP TSC0058957
aattacgccatca

SEQ ID NO: 241777 - DNA, 13 bp, Artificial Sequence
  Oligonucleotide for detection of SNP TSC0058958
aaaaatatttatt

SEQ ID NO: 241778 - DNA, 13 bp, Artificial Sequence
  Oligonucleotide for detection of SNP TSC0058958
aataaatattttt

SEQ ID NO: 241779 - DNA, 13 bp, Artificial Sequence
  Oligonucleotide for detection of SNP TSC0058958
aaaaacgtttatt

SEQ ID NO: 241780 - DNA, 13 bp, Artificial Sequence
  Oligonucleotide for detection of SNP TSC0058958
aataaacgttttt

SEQ ID NO: 241781 - DNA, 13 bp, Artificial Sequence
  Oligonucleotide for detection of SNP TSC0058958
aataaatgttttt

SEQ ID NO: 241782 - DNA, 13 bp, Artificial Sequence
  Oligonucleotide for detection of SNP TSC0058958
aaaaacatttatt

SEQ ID NO: 241783 - DNA, 13 bp, Artificial Sequence
  Oligonucleotide for detection of SNP TSC0058959
ttttgatatatga

SEQ ID NO: 241784 - DNA, 13 bp, Artificial Sequence
  Oligonucleotide for detection of SNP TSC0058959
tcatatatcaaaa

SEQ ID NO: 241785 - DNA, 13 bp, Artificial Sequence
  Oligonucleotide for detection of SNP TSC0058959
ttttgagatatga

SEQ ID NO: 241786 - DNA, 13 bp, Artificial Sequence
  Oligonucleotide for detection of SNP TSC0058959
tcatatctcaaaa

SEQ ID NO: 241787 - DNA, 13 bp, Artificial Sequence
  Oligonucleotide for detection of SNP TSC0058959
ttatatattaagg

SEQ ID NO: 241788 - DNA, 13 bp, Artificial Sequence
  Oligonucleotide for detection of SNP TSC0058959
ccttaatatataa

SEQ ID NO: 241789 - DNA, 13 bp, Artificial Sequence
  Oligonucleotide for detection of SNP TSC0058959
ttatattttaagg

SEQ ID NO: 241790 - DNA, 13 bp, Artificial Sequence
  Oligonucleotide for detection of SNP TSC0058959
ccttaaaatataa

SEQ ID NO: 241791 - DNA, 13 bp, Artificial Sequence
  Oligonucleotide for detection of SNP TSC0058960
tgtattagtttty

SEQ ID NO: 241792 - DNA, 13 bp, Artificial Sequence
  Oligonucleotide for detection of SNP TSC0058960
raaaactaataca

SEQ ID NO: 241793 - DNA, 13 bp, Artificial Sequence
  Oligonucleotide for detection of SNP TSC0058960
ggaaattaatata

SEQ ID NO: 241794 - DNA, 13 bp, Artificial Sequence
  Oligonucleotide for detection of SNP TSC0058960
tatattaatttcc

SEQ ID NO: 241795 - DNA, 13 bp, Artificial Sequence
  Oligonucleotide for detection of SNP TSC0058960
ggaaatgaatata

SEQ ID NO: 241796 - DNA, 13 bp, Artificial Sequence
  Oligonucleotide for detection of SNP TSC0058960
tatattcatttcc

SEQ ID NO: 241797 - DNA, 13 bp, Artificial Sequence
  Oligonucleotide for detection of SNP TSC0058960
ggaaacgaatata

SEQ ID NO: 241798 - DNA, 13 bp, Artificial Sequence
  Oligonucleotide for detection of SNP TSC0058960
tatattcgtttcc

SEQ ID NO: 241799 - DNA, 13 bp, Artificial Sequence
  Oligonucleotide for detection of SNP TSC0058962
taattagtgttgt

SEQ ID NO: 241800 - DNA, 13 bp, Artificial Sequence
  Oligonucleotide for detection of SNP TSC0058962
acaacactaatta

SEQ ID NO: 241801 - DNA, 13 bp, Artificial Sequence
  Oligonucleotide for detection of SNP TSC0058962
taattaatgttgt

SEQ ID NO: 241802 - DNA, 13 bp, Artificial Sequence
  Oligonucleotide for detection of SNP TSC0058962
acaacattaatta

SEQ ID NO: 241803 - DNA, 13 bp, Artificial Sequence
  Oligonucleotide for detection of SNP TSC0058963
tttttttatttgy

SEQ ID NO: 241804 - DNA, 13 bp, Artificial Sequence
  Oligonucleotide for detection of SNP TSC0058963
rcaaataaaaaaa

SEQ ID NO: 241805 - DNA, 13 bp, Artificial Sequence
  Oligonucleotide for detection of SNP TSC0058963
gtagattaggggg

SEQ ID NO: 241806 - DNA, 13 bp, Artificial Sequence
  Oligonucleotide for detection of SNP TSC0058963
ccccctaatctac

SEQ ID NO: 241807 - DNA, 13 bp, Artificial Sequence
  Oligonucleotide for detection of SNP TSC0058963
gtagatgaggggg

SEQ ID NO: 241808 - DNA, 13 bp, Artificial Sequence
  Oligonucleotide for detection of SNP TSC0058963
ccccctcatctac

SEQ ID NO: 241809 - DNA, 13 bp, Artificial Sequence
  Oligonucleotide for detection of SNP TSC0058964
ttgtaggtttata

SEQ ID NO: 241810 - DNA, 13 bp, Artificial Sequence
  Oligonucleotide for detection of SNP TSC0058964
tataaacctacaa

SEQ ID NO: 241811 - DNA, 13 bp, Artificial Sequence
  Oligonucleotide for detection of SNP TSC0058965
attaatgtttaty

SEQ ID NO: 241812 - DNA, 13 bp, Artificial Sequence
  Oligonucleotide for detection of SNP TSC0058965
rataaacattaat

SEQ ID NO: 241813 - DNA, 13 bp, Artificial Sequence
  Oligonucleotide for detection of SNP TSC0058965
attaatatttaty

SEQ ID NO: 241814 - DNA, 13 bp, Artificial Sequence
  Oligonucleotide for detection of SNP TSC0058965
rataaatattaat

SEQ ID NO: 241815 - DNA, 13 bp, Artificial Sequence
  Oligonucleotide for detection of SNP TSC0058966
agttgagtatttt

SEQ ID NO: 241816 - DNA, 13 bp, Artificial Sequence
  Oligonucleotide for detection of SNP TSC0058966
aaaatactcaact

SEQ ID NO: 241817 - DNA, 13 bp, Artificial Sequence
  Oligonucleotide for detection of SNP TSC0058966
agttgaatatttt

SEQ ID NO: 241818 - DNA, 13 bp, Artificial Sequence
  Oligonucleotide for detection of SNP TSC0058966
aaaatattcaact

SEQ ID NO: 241819 - DNA, 13 bp, Artificial Sequence
  Oligonucleotide for detection of SNP TSC0058969
tatataaaaaaay

SEQ ID NO: 241820 - DNA, 13 bp, Artificial Sequence
  Oligonucleotide for detection of SNP TSC0058969
rtttttttatata

SEQ ID NO: 241821 - DNA, 13 bp, Artificial Sequence
  Oligonucleotide for detection of SNP TSC0058969
tatatataaaaay

SEQ ID NO: 241822 - DNA, 13 bp, Artificial Sequence
  Oligonucleotide for detection of SNP TSC0058969
rtttttatatata

SEQ ID NO: 241823 - DNA, 13 bp, Artificial Sequence
  Oligonucleotide for detection of SNP TSC0058975
aggttaagggaag

SEQ ID NO: 241824 - DNA, 13 bp, Artificial Sequence
  Oligonucleotide for detection of SNP TSC0058975
cttcccttaacct

SEQ ID NO: 241825 - DNA, 13 bp, Artificial Sequence
  Oligonucleotide for detection of SNP TSC0058975
aggttaggggaag

SEQ ID NO: 241826 - DNA, 13 bp, Artificial Sequence
  Oligonucleotide for detection of SNP TSC0058975
cttcccctaacct

SEQ ID NO: 241827 - DNA, 13 bp, Artificial Sequence
  Oligonucleotide for detection of SNP TSC0058976
attatatggttag

SEQ ID NO: 241828 - DNA, 13 bp, Artificial Sequence
  Oligonucleotide for detection of SNP TSC0058976
ctaaccatataat

SEQ ID NO: 241829 - DNA, 13 bp, Artificial Sequence
  Oligonucleotide for detection of SNP TSC0058976
attatacggttag

SEQ ID NO: 241830 - DNA, 13 bp, Artificial Sequence
  Oligonucleotide for detection of SNP TSC0058976
ctaaccgtataat

SEQ ID NO: 241831 - DNA, 13 bp, Artificial Sequence
  Oligonucleotide for detection of SNP TSC0058976
ttgattgtgtaat

SEQ ID NO: 241832 - DNA, 13 bp, Artificial Sequence
  Oligonucleotide for detection of SNP TSC0058976
attacacaatcaa

SEQ ID NO: 241833 - DNA, 13 bp, Artificial Sequence
  Oligonucleotide for detection of SNP TSC0058976
ttgattatgtaat

SEQ ID NO: 241834 - DNA, 13 bp, Artificial Sequence
  Oligonucleotide for detection of SNP TSC0058976
attacataatcaa

SEQ ID NO: 241835 - DNA, 13 bp, Artificial Sequence
  Oligonucleotide for detection of SNP TSC0058976
ttgatcgtgtaat

SEQ ID NO: 241836 - DNA, 13 bp, Artificial Sequence
  Oligonucleotide for detection of SNP TSC0058976
attacacgatcaa

SEQ ID NO: 241837 - DNA, 13 bp, Artificial Sequence
  Oligonucleotide for detection of SNP TSC0058977
gagatgtgtttta

SEQ ID NO: 241838 - DNA, 13 bp, Artificial Sequence
  Oligonucleotide for detection of SNP TSC0058977
taaaacacatctc

SEQ ID NO: 241839 - DNA, 13 bp, Artificial Sequence
  Oligonucleotide for detection of SNP TSC0058977
gagatgcgtttta

SEQ ID NO: 241840 - DNA, 13 bp, Artificial Sequence
  Oligonucleotide for detection of SNP TSC0058977
taaaacgcatctc

SEQ ID NO: 241841 - DNA, 13 bp, Artificial Sequence
  Oligonucleotide for detection of SNP TSC0058978
attgtggtataat

SEQ ID NO: 241842 - DNA, 13 bp, Artificial Sequence
  Oligonucleotide for detection of SNP TSC0058978
attataccacaat

SEQ ID NO: 241843 - DNA, 13 bp, Artificial Sequence
  Oligonucleotide for detection of SNP TSC0058978
attgtgatataat

SEQ ID NO: 241844 - DNA, 13 bp, Artificial Sequence
  Oligonucleotide for detection of SNP TSC0058978
attatatcacaat

SEQ ID NO: 241845 - DNA, 13 bp, Artificial Sequence
  Oligonucleotide for detection of SNP TSC0058981
ttttttaatgtga

SEQ ID NO: 241846 - DNA, 13 bp, Artificial Sequence
  Oligonucleotide for detection of SNP TSC0058981
tcacattaaaaaa

SEQ ID NO: 241847 - DNA, 13 bp, Artificial Sequence
  Oligonucleotide for detection of SNP TSC0058981
tttttttatgtga

SEQ ID NO: 241848 - DNA, 13 bp, Artificial Sequence
  Oligonucleotide for detection of SNP TSC0058981
tcacataaaaaaa

SEQ ID NO: 241849 - DNA, 13 bp, Artificial Sequence
  Oligonucleotide for detection of SNP TSC0058981
ttatattgaagga

SEQ ID NO: 241850 - DNA, 13 bp, Artificial Sequence
  Oligonucleotide for detection of SNP TSC0058981
tccttcaatataa

SEQ ID NO: 241851 - DNA, 13 bp, Artificial Sequence
  Oligonucleotide for detection of SNP TSC0058981
ttatatggaagga

SEQ ID NO: 241852 - DNA, 13 bp, Artificial Sequence
  Oligonucleotide for detection of SNP TSC0058981
tccttccatataa

SEQ ID NO: 241853 - DNA, 13 bp, Artificial Sequence
  Oligonucleotide for detection of SNP TSC0058982
tagattattttgg

SEQ ID NO: 241854 - DNA, 13 bp, Artificial Sequence
  Oligonucleotide for detection of SNP TSC0058982
ccaaaataatcta

SEQ ID NO: 241855 - DNA, 13 bp, Artificial Sequence
  Oligonucleotide for detection of SNP TSC0058982
tagattgttttgg

SEQ ID NO: 241856 - DNA, 13 bp, Artificial Sequence
  Oligonucleotide for detection of SNP TSC0058982
ccaaaacaatcta

SEQ ID NO: 241857 - DNA, 13 bp, Artificial Sequence
  Oligonucleotide for detection of SNP TSC0058982
tagatcgttttgg

SEQ ID NO: 241858 - DNA, 13 bp, Artificial Sequence
  Oligonucleotide for detection of SNP TSC0058982
ccaaaacgatcta

SEQ ID NO: 241859 - DNA, 13 bp, Artificial Sequence
  Oligonucleotide for detection of SNP TSC0058982
ttagaatggttta

SEQ ID NO: 241860 - DNA, 13 bp, Artificial Sequence
  Oligonucleotide for detection of SNP TSC0058982
taaaccattctaa

SEQ ID NO: 241861 - DNA, 13 bp, Artificial Sequence
  Oligonucleotide for detection of SNP TSC0058982
ttagaacggttta

SEQ ID NO: 241862 - DNA, 13 bp, Artificial Sequence
  Oligonucleotide for detection of SNP TSC0058982
taaaccgttctaa

SEQ ID NO: 241863 - DNA, 13 bp, Artificial Sequence
  Oligonucleotide for detection of SNP TSC0058985
tatattatgttgt

SEQ ID NO: 241864 - DNA, 13 bp, Artificial Sequence
  Oligonucleotide for detection of SNP TSC0058985
acaacataatata

SEQ ID NO: 241865 - DNA, 13 bp, Artificial Sequence
  Oligonucleotide for detection of SNP TSC0058985
tatattgtgttgt

SEQ ID NO: 241866 - DNA, 13 bp, Artificial Sequence
  Oligonucleotide for detection of SNP TSC0058985
acaacacaatata

SEQ ID NO: 241867 - DNA, 13 bp, Artificial Sequence
  Oligonucleotide for detection of SNP TSC0058987
agtaagttgatty

SEQ ID NO: 241868 - DNA, 13 bp, Artificial Sequence
  Oligonucleotide for detection of SNP TSC0058987
raatcaacttact

SEQ ID NO: 241869 - DNA, 13 bp, Artificial Sequence
  Oligonucleotide for detection of SNP TSC0058987
agtaaggtgatty

SEQ ID NO: 241870 - DNA, 13 bp, Artificial Sequence
  Oligonucleotide for detection of SNP TSC0058987
raatcaccttact

SEQ ID NO: 241871 - DNA, 13 bp, Artificial Sequence
  Oligonucleotide for detection of SNP TSC0058987
gaattagtttgtt

SEQ ID NO: 241872 - DNA, 13 bp, Artificial Sequence
  Oligonucleotide for detection of SNP TSC0058987
aacaaactaattc

SEQ ID NO: 241873 - DNA, 13 bp, Artificial Sequence
  Oligonucleotide for detection of SNP TSC0058987
gaattattttgtt

SEQ ID NO: 241874 - DNA, 13 bp, Artificial Sequence
  Oligonucleotide for detection of SNP TSC0058987
aacaaaataattc

SEQ ID NO: 241875 - DNA, 13 bp, Artificial Sequence
  Oligonucleotide for detection of SNP TSC0058988
attaagaataggt

SEQ ID NO: 241876 - DNA, 13 bp, Artificial Sequence
  Oligonucleotide for detection of SNP TSC0058988
acctattcttaat

SEQ ID NO: 241877 - DNA, 13 bp, Artificial Sequence
  Oligonucleotide for detection of SNP TSC0058988
attaaggataggt

SEQ ID NO: 241878 - DNA, 13 bp, Artificial Sequence
  Oligonucleotide for detection of SNP TSC0058988
acctatccttaat

SEQ ID NO: 241879 - DNA, 13 bp, Artificial Sequence
  Oligonucleotide for detection of SNP TSC0058989
ttgaatttgtaga

SEQ ID NO: 241880 - DNA, 13 bp, Artificial Sequence
  Oligonucleotide for detection of SNP TSC0058989
tctacaaattcaa

SEQ ID NO: 241881 - DNA, 13 bp, Artificial Sequence
  Oligonucleotide for detection of SNP TSC0058989
ttgaatgtgtaga

SEQ ID NO: 241882 - DNA, 13 bp, Artificial Sequence
  Oligonucleotide for detection of SNP TSC0058989
tctacacattcaa

SEQ ID NO: 241883 - DNA, 13 bp, Artificial Sequence
  Oligonucleotide for detection of SNP TSC0058989
tttatagatttaa

SEQ ID NO: 241884 - DNA, 13 bp, Artificial Sequence
  Oligonucleotide for detection of SNP TSC0058989
ttaaatctataaa

SEQ ID NO: 241885 - DNA, 13 bp, Artificial Sequence
  Oligonucleotide for detection of SNP TSC0058989
tttatatatttaa

SEQ ID NO: 241886 - DNA, 13 bp, Artificial Sequence
  Oligonucleotide for detection of SNP TSC0058989
ttaaatatataaa

SEQ ID NO: 241887 - DNA, 13 bp, Artificial Sequence
  Oligonucleotide for detection of SNP TSC0058990
gttattaatattg

SEQ ID NO: 241888 - DNA, 13 bp, Artificial Sequence
  Oligonucleotide for detection of SNP TSC0058990
caatattaataac

SEQ ID NO: 241889 - DNA, 13 bp, Artificial Sequence
  Oligonucleotide for detection of SNP TSC0058990
gttattgatattg

SEQ ID NO: 241890 - DNA, 13 bp, Artificial Sequence
  Oligonucleotide for detection of SNP TSC0058990
caatatcaataac

SEQ ID NO: 241891 - DNA, 13 bp, Artificial Sequence
  Oligonucleotide for detection of SNP TSC0058990
gttatcgatattg

SEQ ID NO: 241892 - DNA, 13 bp, Artificial Sequence
  Oligonucleotide for detection of SNP TSC0058990
caatatcgataac

SEQ ID NO: 241893 - DNA, 13 bp, Artificial Sequence
  Oligonucleotide for detection of SNP TSC0058990
tagtattggtggy

SEQ ID NO: 241894 - DNA, 13 bp, Artificial Sequence
  Oligonucleotide for detection of SNP TSC0058990
rccaccaatacta

SEQ ID NO: 241895 - DNA, 13 bp, Artificial Sequence
  Oligonucleotide for detection of SNP TSC0058990
tagtatcggtggy

SEQ ID NO: 241896 - DNA, 13 bp, Artificial Sequence
  Oligonucleotide for detection of SNP TSC0058990
rccaccgatacta

SEQ ID NO: 241897 - DNA, 13 bp, Artificial Sequence
  Oligonucleotide for detection of SNP TSC0058991
ttaatcgtttagy

SEQ ID NO: 241898 - DNA, 13 bp, Artificial Sequence
  Oligonucleotide for detection of SNP TSC0058991
rctaaacgattaa

SEQ ID NO: 241899 - DNA, 13 bp, Artificial Sequence
  Oligonucleotide for detection of SNP TSC0058991
gttggatgattaa

SEQ ID NO: 241900 - DNA, 13 bp, Artificial Sequence
  Oligonucleotide for detection of SNP TSC0058991
ttaatcatccaac

SEQ ID NO: 241901 - DNA, 13 bp, Artificial Sequence
  Oligonucleotide for detection of SNP TSC0058991
gttggacgattaa

SEQ ID NO: 241902 - DNA, 13 bp, Artificial Sequence
  Oligonucleotide for detection of SNP TSC0058991
ttaatcgtccaac

SEQ ID NO: 241903 - DNA, 13 bp, Artificial Sequence
  Oligonucleotide for detection of SNP TSC0058992
ttgttattatttg

SEQ ID NO: 241904 - DNA, 13 bp, Artificial Sequence
  Oligonucleotide for detection of SNP TSC0058992
caaataataacaa

SEQ ID NO: 241905 - DNA, 13 bp, Artificial Sequence
  Oligonucleotide for detection of SNP TSC0058992
ttgttattattcg

SEQ ID NO: 241906 - DNA, 13 bp, Artificial Sequence
  Oligonucleotide for detection of SNP TSC0058992
cgaataataacaa

SEQ ID NO: 241907 - DNA, 13 bp, Artificial Sequence
  Oligonucleotide for detection of SNP TSC0058992
ttgttagtattcg

SEQ ID NO: 241908 - DNA, 13 bp, Artificial Sequence
  Oligonucleotide for detection of SNP TSC0058992
cgaatactaacaa

SEQ ID NO: 241909 - DNA, 13 bp, Artificial Sequence
  Oligonucleotide for detection of SNP TSC0058992
tggataatagtag

SEQ ID NO: 241910 - DNA, 13 bp, Artificial Sequence
  Oligonucleotide for detection of SNP TSC0058992
ctactattatcca

SEQ ID NO: 241911 - DNA, 13 bp, Artificial Sequence
  Oligonucleotide for detection of SNP TSC0058992
tggatattagtag

SEQ ID NO: 241912 - DNA, 13 bp, Artificial Sequence
  Oligonucleotide for detection of SNP TSC0058992
ctactaatatcca

SEQ ID NO: 241913 - DNA, 13 bp, Artificial Sequence
  Oligonucleotide for detection of SNP TSC0058992
cggataatagtag

SEQ ID NO: 241914 - DNA, 13 bp, Artificial Sequence
  Oligonucleotide for detection of SNP TSC0058992
ctactattatccg

SEQ ID NO: 241915 - DNA, 13 bp, Artificial Sequence
  Oligonucleotide for detection of SNP TSC0058992
cggatattagtag

SEQ ID NO: 241916 - DNA, 13 bp, Artificial Sequence
  Oligonucleotide for detection of SNP TSC0058992
ctactaatatccg

SEQ ID NO: 241917 - DNA, 13 bp, Artificial Sequence
  Oligonucleotide for detection of SNP TSC0058995
tattttaaaaata

SEQ ID NO: 241918 - DNA, 13 bp, Artificial Sequence
  Oligonucleotide for detection of SNP TSC0058995
tatttttaaaata

SEQ ID NO: 241919 - DNA, 13 bp, Artificial Sequence
  Oligonucleotide for detection of SNP TSC0058995
tatttttaaagtg

SEQ ID NO: 241920 - DNA, 13 bp, Artificial Sequence
  Oligonucleotide for detection of SNP TSC0058995
cactttaaaaata

SEQ ID NO: 241921 - DNA, 13 bp, Artificial Sequence
  Oligonucleotide for detection of SNP TSC0058995
tattttaaaagtg

SEQ ID NO: 241922 - DNA, 13 bp, Artificial Sequence
  Oligonucleotide for detection of SNP TSC0058995
cacttttaaaata

SEQ ID NO: 241923 - DNA, 13 bp, Artificial Sequence
  Oligonucleotide for detection of SNP TSC0058999
taatgtataatat

SEQ ID NO: 241924 - DNA, 13 bp, Artificial Sequence
  Oligonucleotide for detection of SNP TSC0058999
atattatacatta

SEQ ID NO: 241925 - DNA, 13 bp, Artificial Sequence
  Oligonucleotide for detection of SNP TSC0058999
taatgtgtaatat

SEQ ID NO: 241926 - DNA, 13 bp, Artificial Sequence
  Oligonucleotide for detection of SNP TSC0058999
atattacacatta

SEQ ID NO: 241927 - DNA, 13 bp, Artificial Sequence
  Oligonucleotide for detection of SNP TSC0058999
taatgcgtaatat

SEQ ID NO: 241928 - DNA, 13 bp, Artificial Sequence
  Oligonucleotide for detection of SNP TSC0058999
atattacgcatta

SEQ ID NO: 241929 - DNA, 13 bp, Artificial Sequence
  Oligonucleotide for detection of SNP TSC0058999
atgttatgtattg

SEQ ID NO: 241930 - DNA, 13 bp, Artificial Sequence
  Oligonucleotide for detection of SNP TSC0058999
caatacataacat

SEQ ID NO: 241931 - DNA, 13 bp, Artificial Sequence
  Oligonucleotide for detection of SNP TSC0058999
atgttacgtattg

SEQ ID NO: 241932 - DNA, 13 bp, Artificial Sequence
  Oligonucleotide for detection of SNP TSC0058999
caatacgtaacat

SEQ ID NO: 241933 - DNA, 13 bp, Artificial Sequence
  Oligonucleotide for detection of SNP TSC0059005
ttattgaaatttg

SEQ ID NO: 241934 - DNA, 13 bp, Artificial Sequence
  Oligonucleotide for detection of SNP TSC0059005
caaatttcaataa

SEQ ID NO: 241935 - DNA, 13 bp, Artificial Sequence
  Oligonucleotide for detection of SNP TSC0059005
ttattggaatttg

SEQ ID NO: 241936 - DNA, 13 bp, Artificial Sequence
  Oligonucleotide for detection of SNP TSC0059005
caaattccaataa

SEQ ID NO: 241937 - DNA, 13 bp, Artificial Sequence
  Oligonucleotide for detection of SNP TSC0059006
tggagtgaggtgg

SEQ ID NO: 241938 - DNA, 13 bp, Artificial Sequence
  Oligonucleotide for detection of SNP TSC0059006
ccacctcactcca

SEQ ID NO: 241939 - DNA, 13 bp, Artificial Sequence
  Oligonucleotide for detection of SNP TSC0059006
tggagtaaggtgg

SEQ ID NO: 241940 - DNA, 13 bp, Artificial Sequence
  Oligonucleotide for detection of SNP TSC0059006
ccaccttactcca

SEQ ID NO: 241941 - DNA, 13 bp, Artificial Sequence
  Oligonucleotide for detection of SNP TSC0059007
gaagaaaagtttt

SEQ ID NO: 241942 - DNA, 13 bp, Artificial Sequence
  Oligonucleotide for detection of SNP TSC0059007
aaaacttttcttc

SEQ ID NO: 241943 - DNA, 13 bp, Artificial Sequence
  Oligonucleotide for detection of SNP TSC0059007
gaagaatagtttt

SEQ ID NO: 241944 - DNA, 13 bp, Artificial Sequence
  Oligonucleotide for detection of SNP TSC0059007
aaaactattcttc

SEQ ID NO: 241945 - DNA, 13 bp, Artificial Sequence
  Oligonucleotide for detection of SNP TSC0059007
agaatttttttty

SEQ ID NO: 241946 - DNA, 13 bp, Artificial Sequence
  Oligonucleotide for detection of SNP TSC0059007
raaaaaaaattct

SEQ ID NO: 241947 - DNA, 13 bp, Artificial Sequence
  Oligonucleotide for detection of SNP TSC0059007
agaattgttttty

SEQ ID NO: 241948 - DNA, 13 bp, Artificial Sequence
  Oligonucleotide for detection of SNP TSC0059007
raaaaacaattct

SEQ ID NO: 241949 - DNA, 13 bp, Artificial Sequence
  Oligonucleotide for detection of SNP TSC0059013
agtgtaatagtay

SEQ ID NO: 241950 - DNA, 13 bp, Artificial Sequence
  Oligonucleotide for detection of SNP TSC0059013
rtactattacact

SEQ ID NO: 241951 - DNA, 13 bp, Artificial Sequence
  Oligonucleotide for detection of SNP TSC0059013
agtgtagtagtay

SEQ ID NO: 241952 - DNA, 13 bp, Artificial Sequence
  Oligonucleotide for detection of SNP TSC0059013
rtactactacact

SEQ ID NO: 241953 - DNA, 13 bp, Artificial Sequence
  Oligonucleotide for detection of SNP TSC0059013
agcgtaatagtay

SEQ ID NO: 241954 - DNA, 13 bp, Artificial Sequence
  Oligonucleotide for detection of SNP TSC0059013
rtactattacgct

SEQ ID NO: 241955 - DNA, 13 bp, Artificial Sequence
  Oligonucleotide for detection of SNP TSC0059013
agcgtagtagtay

SEQ ID NO: 241956 - DNA, 13 bp, Artificial Sequence
  Oligonucleotide for detection of SNP TSC0059013
rtactactacgct

SEQ ID NO: 241957 - DNA, 13 bp, Artificial Sequence
  Oligonucleotide for detection of SNP TSC0059014
taaataaatttag

SEQ ID NO: 241958 - DNA, 13 bp, Artificial Sequence
  Oligonucleotide for detection of SNP TSC0059014
ctaaatttattta

SEQ ID NO: 241959 - DNA, 13 bp, Artificial Sequence
  Oligonucleotide for detection of SNP TSC0059018
aattgttgatgtt

SEQ ID NO: 241960 - DNA, 13 bp, Artificial Sequence
  Oligonucleotide for detection of SNP TSC0059018
aacatcaacaatt

SEQ ID NO: 241961 - DNA, 13 bp, Artificial Sequence
  Oligonucleotide for detection of SNP TSC0059018
aattgtggatgtt

SEQ ID NO: 241962 - DNA, 13 bp, Artificial Sequence
  Oligonucleotide for detection of SNP TSC0059018
aacatccacaatt

SEQ ID NO: 241963 - DNA, 13 bp, Artificial Sequence
  Oligonucleotide for detection of SNP TSC0059018
aatattaatagtt

SEQ ID NO: 241964 - DNA, 13 bp, Artificial Sequence
  Oligonucleotide for detection of SNP TSC0059018
aactattaatatt

SEQ ID NO: 241965 - DNA, 13 bp, Artificial Sequence
  Oligonucleotide for detection of SNP TSC0059018
aatatttatagtt

SEQ ID NO: 241966 - DNA, 13 bp, Artificial Sequence
  Oligonucleotide for detection of SNP TSC0059018
aactataaatatt

SEQ ID NO: 241967 - DNA, 13 bp, Artificial Sequence
  Oligonucleotide for detection of SNP TSC0059019
gattttttttaag

SEQ ID NO: 241968 - DNA, 13 bp, Artificial Sequence
  Oligonucleotide for detection of SNP TSC0059019
cttaaaaaaaatc

SEQ ID NO: 241969 - DNA, 13 bp, Artificial Sequence
  Oligonucleotide for detection of SNP TSC0059019
gattttgtttaag

SEQ ID NO: 241970 - DNA, 13 bp, Artificial Sequence
  Oligonucleotide for detection of SNP TSC0059019
cttaaacaaaatc

SEQ ID NO: 241971 - DNA, 13 bp, Artificial Sequence
  Oligonucleotide for detection of SNP TSC0059019
tttggagagagty

SEQ ID NO: 241972 - DNA, 13 bp, Artificial Sequence
  Oligonucleotide for detection of SNP TSC0059019
ractctctccaaa

SEQ ID NO: 241973 - DNA, 13 bp, Artificial Sequence
  Oligonucleotide for detection of SNP TSC0059019
tttggatagagty

SEQ ID NO: 241974 - DNA, 13 bp, Artificial Sequence
  Oligonucleotide for detection of SNP TSC0059019
ractctatccaaa

SEQ ID NO: 241975 - DNA, 13 bp, Artificial Sequence
  Oligonucleotide for detection of SNP TSC0059020
tattgttttgaga

SEQ ID NO: 241976 - DNA, 13 bp, Artificial Sequence
  Oligonucleotide for detection of SNP TSC0059020
tctcaaaacaata

SEQ ID NO: 241977 - DNA, 13 bp, Artificial Sequence
  Oligonucleotide for detection of SNP TSC0059020
tattgtgttgaga

SEQ ID NO: 241978 - DNA, 13 bp, Artificial Sequence
  Oligonucleotide for detection of SNP TSC0059020
tctcaacacaata

SEQ ID NO: 241979 - DNA, 13 bp, Artificial Sequence
  Oligonucleotide for detection of SNP TSC0059020
ttttaggatagtg

SEQ ID NO: 241980 - DNA, 13 bp, Artificial Sequence
  Oligonucleotide for detection of SNP TSC0059020
cactatcctaaaa

SEQ ID NO: 241981 - DNA, 13 bp, Artificial Sequence
  Oligonucleotide for detection of SNP TSC0059020
ttttagtatagtg

SEQ ID NO: 241982 - DNA, 13 bp, Artificial Sequence
  Oligonucleotide for detection of SNP TSC0059020
cactatactaaaa

SEQ ID NO: 241983 - DNA, 13 bp, Artificial Sequence
  Oligonucleotide for detection of SNP TSC0059025
ttttatttaatta

SEQ ID NO: 241984 - DNA, 13 bp, Artificial Sequence
  Oligonucleotide for detection of SNP TSC0059025
taattaaataaaa

SEQ ID NO: 241985 - DNA, 13 bp, Artificial Sequence
  Oligonucleotide for detection of SNP TSC0059025
ttttatgtaatta

SEQ ID NO: 241986 - DNA, 13 bp, Artificial Sequence
  Oligonucleotide for detection of SNP TSC0059025
taattacataaaa

SEQ ID NO: 241987 - DNA, 13 bp, Artificial Sequence
  Oligonucleotide for detection of SNP TSC0059025
taattagataaaa

SEQ ID NO: 241988 - DNA, 13 bp, Artificial Sequence
  Oligonucleotide for detection of SNP TSC0059025
ttttatctaatta

SEQ ID NO: 241989 - DNA, 13 bp, Artificial Sequence
  Oligonucleotide for detection of SNP TSC0059025
taattatataaaa

SEQ ID NO: 241990 - DNA, 13 bp, Artificial Sequence
  Oligonucleotide for detection of SNP TSC0059025
ttttatataatta

SEQ ID NO: 241991 - DNA, 13 bp, Artificial Sequence
  Oligonucleotide for detection of SNP TSC0059026
atatattttttag

SEQ ID NO: 241992 - DNA, 13 bp, Artificial Sequence
  Oligonucleotide for detection of SNP TSC0059026
ctaaaaaatatat

SEQ ID NO: 241993 - DNA, 13 bp, Artificial Sequence
  Oligonucleotide for detection of SNP TSC0059026
atatatgttttag

SEQ ID NO: 241994 - DNA, 13 bp, Artificial Sequence
  Oligonucleotide for detection of SNP TSC0059026
ctaaaacatatat

SEQ ID NO: 241995 - DNA, 13 bp, Artificial Sequence
  Oligonucleotide for detection of SNP TSC0059026
atatacgttttag

SEQ ID NO: 241996 - DNA, 13 bp, Artificial Sequence
  Oligonucleotide for detection of SNP TSC0059026
ctaaaacgtatat

SEQ ID NO: 241997 - DNA, 13 bp, Artificial Sequence
  Oligonucleotide for detection of SNP TSC0059026
ttgaaaggtatat

SEQ ID NO: 241998 - DNA, 13 bp, Artificial Sequence
  Oligonucleotide for detection of SNP TSC0059026
atatacctttcaa

SEQ ID NO: 241999 - DNA, 13 bp, Artificial Sequence
  Oligonucleotide for detection of SNP TSC0059026
ttgaaaagtatat

SEQ ID NO: 242000 - DNA, 13 bp, Artificial Sequence
  Oligonucleotide for detection of SNP TSC0059026
atatacttttcaa

SEQ ID NO: 242001 - DNA, 13 bp, Artificial Sequence
  Oligonucleotide for detection of SNP TSC0059026
ttgaaatgtatat

SEQ ID NO: 242002 - DNA, 13 bp, Artificial Sequence
  Oligonucleotide for detection of SNP TSC0059026
atatacatttcaa

SEQ ID NO: 242003 - DNA, 13 bp, Artificial Sequence
  Oligonucleotide for detection of SNP TSC0059026
ttgaaacgtatat

SEQ ID NO: 242004 - DNA, 13 bp, Artificial Sequence
  Oligonucleotide for detection of SNP TSC0059026
atatacgtttcaa

SEQ ID NO: 242005 - DNA, 13 bp, Artificial Sequence
  Oligonucleotide for detection of SNP TSC0059027
tttaacgtgtatt

SEQ ID NO: 242006 - DNA, 13 bp, Artificial Sequence
  Oligonucleotide for detection of SNP TSC0059027
aatacacgttaaa

SEQ ID NO: 242007 - DNA, 13 bp, Artificial Sequence
  Oligonucleotide for detection of SNP TSC0059027
aatgtatgttgga

SEQ ID NO: 242008 - DNA, 13 bp, Artificial Sequence
  Oligonucleotide for detection of SNP TSC0059027
tccaacatacatt

SEQ ID NO: 242009 - DNA, 13 bp, Artificial Sequence
  Oligonucleotide for detection of SNP TSC0059027
aatgtacgttgga

SEQ ID NO: 242010 - DNA, 13 bp, Artificial Sequence
  Oligonucleotide for detection of SNP TSC0059027
tccaacgtacatt

SEQ ID NO: 242011 - DNA, 13 bp, Artificial Sequence
  Oligonucleotide for detection of SNP TSC0059028
gatataaaaaaat

SEQ ID NO: 242012 - DNA, 13 bp, Artificial Sequence
  Oligonucleotide for detection of SNP TSC0059028
atttttttatatc

SEQ ID NO: 242013 - DNA, 13 bp, Artificial Sequence
  Oligonucleotide for detection of SNP TSC0059028
gatatataaaaat

SEQ ID NO: 242014 - DNA, 13 bp, Artificial Sequence
  Oligonucleotide for detection of SNP TSC0059028
atttttatatatc

SEQ ID NO: 242015 - DNA, 13 bp, Artificial Sequence
  Oligonucleotide for detection of SNP TSC0059029
tttagggtatatg

SEQ ID NO: 242016 - DNA, 13 bp, Artificial Sequence
  Oligonucleotide for detection of SNP TSC0059029
catataccctaaa

SEQ ID NO: 242017 - DNA, 13 bp, Artificial Sequence
  Oligonucleotide for detection of SNP TSC0059029
tatgtaatttaga

SEQ ID NO: 242018 - DNA, 13 bp, Artificial Sequence
  Oligonucleotide for detection of SNP TSC0059029
tctaaattacata

SEQ ID NO: 242019 - DNA, 13 bp, Artificial Sequence
  Oligonucleotide for detection of SNP TSC0059029
tatgtattttaga

SEQ ID NO: 242020 - DNA, 13 bp, Artificial Sequence
  Oligonucleotide for detection of SNP TSC0059029
tctaaaatacata

SEQ ID NO: 242021 - DNA, 13 bp, Artificial Sequence
  Oligonucleotide for detection of SNP TSC0059032
tgggttagagaag

SEQ ID NO: 242022 - DNA, 13 bp, Artificial Sequence
  Oligonucleotide for detection of SNP TSC0059032
cttctctaaccca

SEQ ID NO: 242023 - DNA, 13 bp, Artificial Sequence
  Oligonucleotide for detection of SNP TSC0059032
tgggttggagaag

SEQ ID NO: 242024 - DNA, 13 bp, Artificial Sequence
  Oligonucleotide for detection of SNP TSC0059032
cttctccaaccca

SEQ ID NO: 242025 - DNA, 13 bp, Artificial Sequence
  Oligonucleotide for detection of SNP TSC0059034
tttagggaaaaga

SEQ ID NO: 242026 - DNA, 13 bp, Artificial Sequence
  Oligonucleotide for detection of SNP TSC0059034
tcttttccctaaa

SEQ ID NO: 242027 - DNA, 13 bp, Artificial Sequence
  Oligonucleotide for detection of SNP TSC0059034
tttaggaaaaaga

SEQ ID NO: 242028 - DNA, 13 bp, Artificial Sequence
  Oligonucleotide for detection of SNP TSC0059034
tctttttcctaaa

SEQ ID NO: 242029 - DNA, 13 bp, Artificial Sequence
  Oligonucleotide for detection of SNP TSC0059038
taaagataaggta

SEQ ID NO: 242030 - DNA, 13 bp, Artificial Sequence
  Oligonucleotide for detection of SNP TSC0059038
taccttatcttta

SEQ ID NO: 242031 - DNA, 13 bp, Artificial Sequence
  Oligonucleotide for detection of SNP TSC0059038
taaagagaaggta

SEQ ID NO: 242032 - DNA, 13 bp, Artificial Sequence
  Oligonucleotide for detection of SNP TSC0059038
taccttctcttta

SEQ ID NO: 242033 - DNA, 13 bp, Artificial Sequence
  Oligonucleotide for detection of SNP TSC0059039
gaaataaaaagtt

SEQ ID NO: 242034 - DNA, 13 bp, Artificial Sequence
  Oligonucleotide for detection of SNP TSC0059039
aactttttatttc

SEQ ID NO: 242035 - DNA, 13 bp, Artificial Sequence
  Oligonucleotide for detection of SNP TSC0059039
gaaatagaaagtt

SEQ ID NO: 242036 - DNA, 13 bp, Artificial Sequence
  Oligonucleotide for detection of SNP TSC0059039
aactttctatttc

SEQ ID NO: 242037 - DNA, 13 bp, Artificial Sequence
  Oligonucleotide for detection of SNP TSC0059040
tagtagtttattt

SEQ ID NO: 242038 - DNA, 13 bp, Artificial Sequence
  Oligonucleotide for detection of SNP TSC0059040
aaataaactacta

SEQ ID NO: 242039 - DNA, 13 bp, Artificial Sequence
  Oligonucleotide for detection of SNP TSC0059040
tagtaggttattt

SEQ ID NO: 242040 - DNA, 13 bp, Artificial Sequence
  Oligonucleotide for detection of SNP TSC0059040
aaataacctacta

SEQ ID NO: 242041 - DNA, 13 bp, Artificial Sequence
  Oligonucleotide for detection of SNP TSC0059040
aagtaagttgtta

SEQ ID NO: 242042 - DNA, 13 bp, Artificial Sequence
  Oligonucleotide for detection of SNP TSC0059040
taacaacttactt

SEQ ID NO: 242043 - DNA, 13 bp, Artificial Sequence
  Oligonucleotide for detection of SNP TSC0059040
aagtaatttgtta

SEQ ID NO: 242044 - DNA, 13 bp, Artificial Sequence
  Oligonucleotide for detection of SNP TSC0059040
taacaaattactt

SEQ ID NO: 242045 - DNA, 13 bp, Artificial Sequence
  Oligonucleotide for detection of SNP TSC0059041
atttagagtgata

SEQ ID NO: 242046 - DNA, 13 bp, Artificial Sequence
  Oligonucleotide for detection of SNP TSC0059041
tatcactctaaat

SEQ ID NO: 242047 - DNA, 13 bp, Artificial Sequence
  Oligonucleotide for detection of SNP TSC0059041
atttagggtgata

SEQ ID NO: 242048 - DNA, 13 bp, Artificial Sequence
  Oligonucleotide for detection of SNP TSC0059041
tatcaccctaaat

SEQ ID NO: 242049 - DNA, 13 bp, Artificial Sequence
  Oligonucleotide for detection of SNP TSC0059045
tatattaggagtt

SEQ ID NO: 242050 - DNA, 13 bp, Artificial Sequence
  Oligonucleotide for detection of SNP TSC0059045
aactcctaatata

SEQ ID NO: 242051 - DNA, 13 bp, Artificial Sequence
  Oligonucleotide for detection of SNP TSC0059045
tatattgggagtt

SEQ ID NO: 242052 - DNA, 13 bp, Artificial Sequence
  Oligonucleotide for detection of SNP TSC0059045
aactcccaatata

SEQ ID NO: 242053 - DNA, 13 bp, Artificial Sequence
  Oligonucleotide for detection of SNP TSC0059048
taaaatatagtta

SEQ ID NO: 242054 - DNA, 13 bp, Artificial Sequence
  Oligonucleotide for detection of SNP TSC0059048
taactatatttta

SEQ ID NO: 242055 - DNA, 13 bp, Artificial Sequence
  Oligonucleotide for detection of SNP TSC0059048
taaaatttagtta

SEQ ID NO: 242056 - DNA, 13 bp, Artificial Sequence
  Oligonucleotide for detection of SNP TSC0059048
taactaaatttta

SEQ ID NO: 242057 - DNA, 13 bp, Artificial Sequence
  Oligonucleotide for detection of SNP TSC0059048
tagttgtgttttg

SEQ ID NO: 242058 - DNA, 13 bp, Artificial Sequence
  Oligonucleotide for detection of SNP TSC0059048
caaaacacaacta

SEQ ID NO: 242059 - DNA, 13 bp, Artificial Sequence
  Oligonucleotide for detection of SNP TSC0059048
tagttgggttttg

SEQ ID NO: 242060 - DNA, 13 bp, Artificial Sequence
  Oligonucleotide for detection of SNP TSC0059048
caaaacccaacta

SEQ ID NO: 242061 - DNA, 13 bp, Artificial Sequence
  Oligonucleotide for detection of SNP TSC0005624
tataagataagag

SEQ ID NO: 242062 - DNA, 13 bp, Artificial Sequence
  Oligonucleotide for detection of SNP TSC0005624
ctcttatcttata

SEQ ID NO: 242063 - DNA, 13 bp, Artificial Sequence
  Oligonucleotide for detection of SNP TSC0005624
tataaggtaagag

SEQ ID NO: 242064 - DNA, 13 bp, Artificial Sequence
  Oligonucleotide for detection of SNP TSC0005624
ctcttaccttata

SEQ ID NO: 242065 - DNA, 13 bp, Artificial Sequence
  Oligonucleotide for detection of SNP TSC0004573
attagtgtattag

SEQ ID NO: 242066 - DNA, 13 bp, Artificial Sequence
  Oligonucleotide for detection of SNP TSC0004573
ctaatacactaat

SEQ ID NO: 242067 - DNA, 13 bp, Artificial Sequence
  Oligonucleotide for detection of SNP TSC0004573
attagtatattag

SEQ ID NO: 242068 - DNA, 13 bp, Artificial Sequence
  Oligonucleotide for detection of SNP TSC0004573
ctaatatactaat

SEQ ID NO: 242069 - DNA, 13 bp, Artificial Sequence
  Oligonucleotide for detection of SNP TSC0004943
gagtgttgagaty

SEQ ID NO: 242070 - DNA, 13 bp, Artificial Sequence
  Oligonucleotide for detection of SNP TSC0004943
ratctcaacactc

SEQ ID NO: 242071 - DNA, 13 bp, Artificial Sequence
  Oligonucleotide for detection of SNP TSC0004943
gagtgtcgagaty

SEQ ID NO: 242072 - DNA, 13 bp, Artificial Sequence
  Oligonucleotide for detection of SNP TSC0004943
ratctcgacactc

SEQ ID NO: 242073 - DNA, 13 bp, Artificial Sequence
  Oligonucleotide for detection of SNP TSC0059051
ttaggtaaggtgg

SEQ ID NO: 242074 - DNA, 13 bp, Artificial Sequence
  Oligonucleotide for detection of SNP TSC0059051
ccaccttacctaa

SEQ ID NO: 242075 - DNA, 13 bp, Artificial Sequence
  Oligonucleotide for detection of SNP TSC0059051
ttaggtgaggtgg

SEQ ID NO: 242076 - DNA, 13 bp, Artificial Sequence
  Oligonucleotide for detection of SNP TSC0059051
ccacctcacctaa

SEQ ID NO: 242077 - DNA, 13 bp, Artificial Sequence
  Oligonucleotide for detection of SNP TSC0059051
ttaggtaaggcgg

SEQ ID NO: 242078 - DNA, 13 bp, Artificial Sequence
  Oligonucleotide for detection of SNP TSC0059051
ccgccttacctaa

SEQ ID NO: 242079 - DNA, 13 bp, Artificial Sequence
  Oligonucleotide for detection of SNP TSC0059051
ttaggcgaggtgg

SEQ ID NO: 242080 - DNA, 13 bp, Artificial Sequence
  Oligonucleotide for detection of SNP TSC0059051
ccacctcgcctaa

SEQ ID NO: 242081 - DNA, 13 bp, Artificial Sequence
  Oligonucleotide for detection of SNP TSC0059051
ttaggtgaggcgg

SEQ ID NO: 242082 - DNA, 13 bp, Artificial Sequence
  Oligonucleotide for detection of SNP TSC0059051
ccgcctcacctaa

SEQ ID NO: 242083 - DNA, 13 bp, Artificial Sequence
  Oligonucleotide for detection of SNP TSC0059051
ttaggcgaggcgg

SEQ ID NO: 242084 - DNA, 13 bp, Artificial Sequence
  Oligonucleotide for detection of SNP TSC0059051
ccgcctcgcctaa

SEQ ID NO: 242085 - DNA, 13 bp, Artificial Sequence
  Oligonucleotide for detection of SNP TSC0059052
tgtttttagtgta

SEQ ID NO: 242086 - DNA, 13 bp, Artificial Sequence
  Oligonucleotide for detection of SNP TSC0059052
tacactaaaaaca

SEQ ID NO: 242087 - DNA, 13 bp, Artificial Sequence
  Oligonucleotide for detection of SNP TSC0059052
tgttttgagtgta

SEQ ID NO: 242088 - DNA, 13 bp, Artificial Sequence
  Oligonucleotide for detection of SNP TSC0059052
tacactcaaaaca

SEQ ID NO: 242089 - DNA, 13 bp, Artificial Sequence
  Oligonucleotide for detection of SNP TSC0059052
tatattgaaagta

SEQ ID NO: 242090 - DNA, 13 bp, Artificial Sequence
  Oligonucleotide for detection of SNP TSC0059052
tactttcaatata

SEQ ID NO: 242091 - DNA, 13 bp, Artificial Sequence
  Oligonucleotide for detection of SNP TSC0059052
tatatttaaagta

SEQ ID NO: 242092 - DNA, 13 bp, Artificial Sequence
  Oligonucleotide for detection of SNP TSC0059052
tactttaaatata

SEQ ID NO: 242093 - DNA, 13 bp, Artificial Sequence
  Oligonucleotide for detection of SNP TSC0059054
tgaattttttttt

SEQ ID NO: 242094 - DNA, 13 bp, Artificial Sequence
  Oligonucleotide for detection of SNP TSC0059054
aaaaaaaaattca

SEQ ID NO: 242095 - DNA, 13 bp, Artificial Sequence
  Oligonucleotide for detection of SNP TSC0059054
aaaaaatggttta

SEQ ID NO: 242096 - DNA, 13 bp, Artificial Sequence
  Oligonucleotide for detection of SNP TSC0059054
taaaccatttttt

SEQ ID NO: 242097 - DNA, 13 bp, Artificial Sequence
  Oligonucleotide for detection of SNP TSC0059054
aaaaaagggttta

SEQ ID NO: 242098 - DNA, 13 bp, Artificial Sequence
  Oligonucleotide for detection of SNP TSC0059054
taaaccctttttt

SEQ ID NO: 242099 - DNA, 13 bp, Artificial Sequence
  Oligonucleotide for detection of SNP TSC0059056
gtttatttagtty

SEQ ID NO: 242100 - DNA, 13 bp, Artificial Sequence
  Oligonucleotide for detection of SNP TSC0059056
raactaaataaac

SEQ ID NO: 242101 - DNA, 13 bp, Artificial Sequence
  Oligonucleotide for detection of SNP TSC0059056
gtttatgtagtty

SEQ ID NO: 242102 - DNA, 13 bp, Artificial Sequence
  Oligonucleotide for detection of SNP TSC0059056
raactacataaac

SEQ ID NO: 242103 - DNA, 13 bp, Artificial Sequence
  Oligonucleotide for detection of SNP TSC0059056
gtttacgtagtty

SEQ ID NO: 242104 - DNA, 13 bp, Artificial Sequence
  Oligonucleotide for detection of SNP TSC0059056
raactacgtaaac

SEQ ID NO: 242105 - DNA, 13 bp, Artificial Sequence
  Oligonucleotide for detection of SNP TSC0059056
gggttgggtggay

SEQ ID NO: 242106 - DNA, 13 bp, Artificial Sequence
  Oligonucleotide for detection of SNP TSC0059056
rtccacccaaccc

SEQ ID NO: 242107 - DNA, 13 bp, Artificial Sequence
  Oligonucleotide for detection of SNP TSC0059056
gggttgtgtggay

SEQ ID NO: 242108 - DNA, 13 bp, Artificial Sequence
  Oligonucleotide for detection of SNP TSC0059056
rtccacacaaccc

SEQ ID NO: 242109 - DNA, 13 bp, Artificial Sequence
  Oligonucleotide for detection of SNP TSC0059056
gggttgcgtggay

SEQ ID NO: 242110 - DNA, 13 bp, Artificial Sequence
  Oligonucleotide for detection of SNP TSC0059056
rtccacgcaaccc

SEQ ID NO: 242111 - DNA, 13 bp, Artificial Sequence
  Oligonucleotide for detection of SNP TSC0059057
aaggtagtttata

SEQ ID NO: 242112 - DNA, 13 bp, Artificial Sequence
  Oligonucleotide for detection of SNP TSC0059057
tataaactacctt

SEQ ID NO: 242113 - DNA, 13 bp, Artificial Sequence
  Oligonucleotide for detection of SNP TSC0059057
aaggtaatttata

SEQ ID NO: 242114 - DNA, 13 bp, Artificial Sequence
  Oligonucleotide for detection of SNP TSC0059057
tataaattacctt

SEQ ID NO: 242115 - DNA, 13 bp, Artificial Sequence
  Oligonucleotide for detection of SNP TSC0059058
gtatttttgaatg

SEQ ID NO: 242116 - DNA, 13 bp, Artificial Sequence
  Oligonucleotide for detection of SNP TSC0059058
cattcaaaaatac

SEQ ID NO: 242117 - DNA, 13 bp, Artificial Sequence
  Oligonucleotide for detection of SNP TSC0059058
gtatttgtgaatg

SEQ ID NO: 242118 - DNA, 13 bp, Artificial Sequence
  Oligonucleotide for detection of SNP TSC0059058
cattcacaaatac

SEQ ID NO: 242119 - DNA, 13 bp, Artificial Sequence
  Oligonucleotide for detection of SNP TSC0059058
tatttagagatay

SEQ ID NO: 242120 - DNA, 13 bp, Artificial Sequence
  Oligonucleotide for detection of SNP TSC0059058
rtatctctaaata

SEQ ID NO: 242121 - DNA, 13 bp, Artificial Sequence
  Oligonucleotide for detection of SNP TSC0059058
tatttatagatay

SEQ ID NO: 242122 - DNA, 13 bp, Artificial Sequence
  Oligonucleotide for detection of SNP TSC0059058
rtatctataaata

SEQ ID NO: 242123 - DNA, 13 bp, Artificial Sequence
  Oligonucleotide for detection of SNP TSC0059059
aaaggtgtaaata

SEQ ID NO: 242124 - DNA, 13 bp, Artificial Sequence
  Oligonucleotide for detection of SNP TSC0059059
tatttacaccttt

SEQ ID NO: 242125 - DNA, 13 bp, Artificial Sequence
  Oligonucleotide for detection of SNP TSC0059059
aaaggtataaata

SEQ ID NO: 242126 - DNA, 13 bp, Artificial Sequence
  Oligonucleotide for detection of SNP TSC0059059
tatttataccttt

SEQ ID NO: 242127 - DNA, 13 bp, Artificial Sequence
  Oligonucleotide for detection of SNP TSC0059060
aatggttaagagg

SEQ ID NO: 242128 - DNA, 13 bp, Artificial Sequence
  Oligonucleotide for detection of SNP TSC0059060
cctcttaaccatt

SEQ ID NO: 242129 - DNA, 13 bp, Artificial Sequence
  Oligonucleotide for detection of SNP TSC0059060
aatggtgaagagg

SEQ ID NO: 242130 - DNA, 13 bp, Artificial Sequence
  Oligonucleotide for detection of SNP TSC0059060
cctcttcaccatt

SEQ ID NO: 242131 - DNA, 13 bp, Artificial Sequence
  Oligonucleotide for detection of SNP TSC0059060
ttttttgattatt

SEQ ID NO: 242132 - DNA, 13 bp, Artificial Sequence
  Oligonucleotide for detection of SNP TSC0059060
aataatcaaaaaa

SEQ ID NO: 242133 - DNA, 13 bp, Artificial Sequence
  Oligonucleotide for detection of SNP TSC0059061
aaaaaggagatga

SEQ ID NO: 242134 - DNA, 13 bp, Artificial Sequence
  Oligonucleotide for detection of SNP TSC0059061
tcatctccttttt

SEQ ID NO: 242135 - DNA, 13 bp, Artificial Sequence
  Oligonucleotide for detection of SNP TSC0059061
aaaaagaagatga

SEQ ID NO: 242136 - DNA, 13 bp, Artificial Sequence
  Oligonucleotide for detection of SNP TSC0059061
tcatcttcttttt

SEQ ID NO: 242137 - DNA, 13 bp, Artificial Sequence
  Oligonucleotide for detection of SNP TSC0059062
taatgggatagta

SEQ ID NO: 242138 - DNA, 13 bp, Artificial Sequence
  Oligonucleotide for detection of SNP TSC0059062
tactatcccatta

SEQ ID NO: 242139 - DNA, 13 bp, Artificial Sequence
  Oligonucleotide for detection of SNP TSC0059062
taatggaatagta

SEQ ID NO: 242140 - DNA, 13 bp, Artificial Sequence
  Oligonucleotide for detection of SNP TSC0059062
tactattccatta

SEQ ID NO: 242141 - DNA, 13 bp, Artificial Sequence
  Oligonucleotide for detection of SNP TSC0059063
gttattattgttt

SEQ ID NO: 242142 - DNA, 13 bp, Artificial Sequence
  Oligonucleotide for detection of SNP TSC0059063
aaacaataataac

SEQ ID NO: 242143 - DNA, 13 bp, Artificial Sequence
  Oligonucleotide for detection of SNP TSC0059063
gttatttttgttt

SEQ ID NO: 242144 - DNA, 13 bp, Artificial Sequence
  Oligonucleotide for detection of SNP TSC0059063
aaacaaaaataac

SEQ ID NO: 242145 - DNA, 13 bp, Artificial Sequence
  Oligonucleotide for detection of SNP TSC0059063
aaatagtaataay

SEQ ID NO: 242146 - DNA, 13 bp, Artificial Sequence
  Oligonucleotide for detection of SNP TSC0059063
rttattactattt

SEQ ID NO: 242147 - DNA, 13 bp, Artificial Sequence
  Oligonucleotide for detection of SNP TSC0059063
aaataggaataay

SEQ ID NO: 242148 - DNA, 13 bp, Artificial Sequence
  Oligonucleotide for detection of SNP TSC0059063
rttattcctattt

SEQ ID NO: 242149 - DNA, 13 bp, Artificial Sequence
  Oligonucleotide for detection of SNP TSC0059064
tgttaagaaagta

SEQ ID NO: 242150 - DNA, 13 bp, Artificial Sequence
  Oligonucleotide for detection of SNP TSC0059064
tactttcttaaca

SEQ ID NO: 242151 - DNA, 13 bp, Artificial Sequence
  Oligonucleotide for detection of SNP TSC0059064
tgttaataaagta

SEQ ID NO: 242152 - DNA, 13 bp, Artificial Sequence
  Oligonucleotide for detection of SNP TSC0059064
tactttattaaca

SEQ ID NO: 242153 - DNA, 13 bp, Artificial Sequence
  Oligonucleotide for detection of SNP TSC0059065
agtttaatgggtt

SEQ ID NO: 242154 - DNA, 13 bp, Artificial Sequence
  Oligonucleotide for detection of SNP TSC0059065
aacccattaaact

SEQ ID NO: 242155 - DNA, 13 bp, Artificial Sequence
  Oligonucleotide for detection of SNP TSC0059065
agtttagtgggtt

SEQ ID NO: 242156 - DNA, 13 bp, Artificial Sequence
  Oligonucleotide for detection of SNP TSC0059065
aacccactaaact

SEQ ID NO: 242157 - DNA, 13 bp, Artificial Sequence
  Oligonucleotide for detection of SNP TSC0059066
ttaaatataagag

SEQ ID NO: 242158 - DNA, 13 bp, Artificial Sequence
  Oligonucleotide for detection of SNP TSC0059066
ctcttatatttaa

SEQ ID NO: 242159 - DNA, 13 bp, Artificial Sequence
  Oligonucleotide for detection of SNP TSC0059067
tgttgttgttttg

SEQ ID NO: 242160 - DNA, 13 bp, Artificial Sequence
  Oligonucleotide for detection of SNP TSC0059067
caaaacaacaaca

SEQ ID NO: 242161 - DNA, 13 bp, Artificial Sequence
  Oligonucleotide for detection of SNP TSC0059067
tgttgtcgttttg

SEQ ID NO: 242162 - DNA, 13 bp, Artificial Sequence
  Oligonucleotide for detection of SNP TSC0059067
caaaacgacaaca

SEQ ID NO: 242163 - DNA, 13 bp, Artificial Sequence
  Oligonucleotide for detection of SNP TSC0059067
taggatggtagta

SEQ ID NO: 242164 - DNA, 13 bp, Artificial Sequence
  Oligonucleotide for detection of SNP TSC0059067
tactaccatccta

SEQ ID NO: 242165 - DNA, 13 bp, Artificial Sequence
  Oligonucleotide for detection of SNP TSC0059067
taggatagtagta

SEQ ID NO: 242166 - DNA, 13 bp, Artificial Sequence
  Oligonucleotide for detection of SNP TSC0059067
tactactatccta

SEQ ID NO: 242167 - DNA, 13 bp, Artificial Sequence
  Oligonucleotide for detection of SNP TSC0059067
taggacggtagta

SEQ ID NO: 242168 - DNA, 13 bp, Artificial Sequence
  Oligonucleotide for detection of SNP TSC0059067
tactaccgtccta

SEQ ID NO: 242169 - DNA, 13 bp, Artificial Sequence
  Oligonucleotide for detection of SNP TSC0059070
tatatagttgtty

SEQ ID NO: 242170 - DNA, 13 bp, Artificial Sequence
  Oligonucleotide for detection of SNP TSC0059070
raacaactatata

SEQ ID NO: 242171 - DNA, 13 bp, Artificial Sequence
  Oligonucleotide for detection of SNP TSC0059070
tatataattgtty

SEQ ID NO: 242172 - DNA, 13 bp, Artificial Sequence
  Oligonucleotide for detection of SNP TSC0059070
raacaattatata

SEQ ID NO: 242173 - DNA, 13 bp, Artificial Sequence
  Oligonucleotide for detection of SNP TSC0008468
aatagttaaaaag

SEQ ID NO: 242174 - DNA, 13 bp, Artificial Sequence
  Oligonucleotide for detection of SNP TSC0008468
ctttttaactatt

SEQ ID NO: 242175 - DNA, 13 bp, Artificial Sequence
  Oligonucleotide for detection of SNP TSC0008468
aatagtaaaaaag

SEQ ID NO: 242176 - DNA, 13 bp, Artificial Sequence
  Oligonucleotide for detection of SNP TSC0008468
cttttttactatt

SEQ ID NO: 242177 - DNA, 13 bp, Artificial Sequence
  Oligonucleotide for detection of SNP TSC0004948
aaataaatattgt

SEQ ID NO: 242178 - DNA, 13 bp, Artificial Sequence
  Oligonucleotide for detection of SNP TSC0004948
acaatatttattt

SEQ ID NO: 242179 - DNA, 13 bp, Artificial Sequence
  Oligonucleotide for detection of SNP TSC0004948
aaataattattgt

SEQ ID NO: 242180 - DNA, 13 bp, Artificial Sequence
  Oligonucleotide for detection of SNP TSC0004948
acaataattattt

SEQ ID NO: 242181 - DNA, 13 bp, Artificial Sequence
  Oligonucleotide for detection of SNP TSC0004948
atagtgtttgttt

SEQ ID NO: 242182 - DNA, 13 bp, Artificial Sequence
  Oligonucleotide for detection of SNP TSC0004948
aaacaaacactat

SEQ ID NO: 242183 - DNA, 13 bp, Artificial Sequence
  Oligonucleotide for detection of SNP TSC0059071
aaggttgaggtgg

SEQ ID NO: 242184 - DNA, 13 bp, Artificial Sequence
  Oligonucleotide for detection of SNP TSC0059071
ccacctcaacctt

SEQ ID NO: 242185 - DNA, 13 bp, Artificial Sequence
  Oligonucleotide for detection of SNP TSC0059071
aaggttaaggtgg

SEQ ID NO: 242186 - DNA, 13 bp, Artificial Sequence
  Oligonucleotide for detection of SNP TSC0059071
ccaccttaacctt

SEQ ID NO: 242187 - DNA, 13 bp, Artificial Sequence
  Oligonucleotide for detection of SNP TSC0059072
taaaaaaatttat

SEQ ID NO: 242188 - DNA, 13 bp, Artificial Sequence
  Oligonucleotide for detection of SNP TSC0059072
ataaattttttta

SEQ ID NO: 242189 - DNA, 13 bp, Artificial Sequence
  Oligonucleotide for detection of SNP TSC0059072
taaaaatatttat

SEQ ID NO: 242190 - DNA, 13 bp, Artificial Sequence
  Oligonucleotide for detection of SNP TSC0059072
ataaatattttta

SEQ ID NO: 242191 - DNA, 13 bp, Artificial Sequence
  Oligonucleotide for detection of SNP TSC0059072
ataagttttttta

SEQ ID NO: 242192 - DNA, 13 bp, Artificial Sequence
  Oligonucleotide for detection of SNP TSC0059072
taaaaaaacttat

SEQ ID NO: 242193 - DNA, 13 bp, Artificial Sequence
  Oligonucleotide for detection of SNP TSC0059072
ataagtgttttta

SEQ ID NO: 242194 - DNA, 13 bp, Artificial Sequence
  Oligonucleotide for detection of SNP TSC0059072
taaaaacacttat

SEQ ID NO: 242195 - DNA, 13 bp, Artificial Sequence
  Oligonucleotide for detection of SNP TSC0059073
ttataaatagtag

SEQ ID NO: 242196 - DNA, 13 bp, Artificial Sequence
  Oligonucleotide for detection of SNP TSC0059073
ctactatttataa

SEQ ID NO: 242197 - DNA, 13 bp, Artificial Sequence
  Oligonucleotide for detection of SNP TSC0059073
ttataagtagtag

SEQ ID NO: 242198 - DNA, 13 bp, Artificial Sequence
  Oligonucleotide for detection of SNP TSC0059073
ctactacttataa

SEQ ID NO: 242199 - DNA, 13 bp, Artificial Sequence
  Oligonucleotide for detection of SNP TSC0004636
ttggtgtgtaggg

SEQ ID NO: 242200 - DNA, 13 bp, Artificial Sequence
  Oligonucleotide for detection of SNP TSC0004636
ccctacacaccaa

SEQ ID NO: 242201 - DNA, 13 bp, Artificial Sequence
  Oligonucleotide for detection of SNP TSC0004636
ttggtgcgtaggg

SEQ ID NO: 242202 - DNA, 13 bp, Artificial Sequence
  Oligonucleotide for detection of SNP TSC0004636
ccctacgcaccaa

SEQ ID NO: 242203 - DNA, 13 bp, Artificial Sequence
  Oligonucleotide for detection of SNP TSC0004636
ttttgtatattag

SEQ ID NO: 242204 - DNA, 13 bp, Artificial Sequence
  Oligonucleotide for detection of SNP TSC0004636
ctaatatacaaaa

SEQ ID NO: 242205 - DNA, 13 bp, Artificial Sequence
  Oligonucleotide for detection of SNP TSC0004611
ttgtgaataatgy

SEQ ID NO: 242206 - DNA, 13 bp, Artificial Sequence
  Oligonucleotide for detection of SNP TSC0004611
rcattattcacaa

SEQ ID NO: 242207 - DNA, 13 bp, Artificial Sequence
  Oligonucleotide for detection of SNP TSC0004611
ttgtgagtaatgy

SEQ ID NO: 242208 - DNA, 13 bp, Artificial Sequence
  Oligonucleotide for detection of SNP TSC0004611
rcattactcacaa

SEQ ID NO: 242209 - DNA, 13 bp, Artificial Sequence
  Oligonucleotide for detection of SNP TSC0059074
gtgtggttatgag

SEQ ID NO: 242210 - DNA, 13 bp, Artificial Sequence
  Oligonucleotide for detection of SNP TSC0059074
ctcataaccacac

SEQ ID NO: 242211 - DNA, 13 bp, Artificial Sequence
  Oligonucleotide for detection of SNP TSC0059074
gtgtgggtatgag

SEQ ID NO: 242212 - DNA, 13 bp, Artificial Sequence
  Oligonucleotide for detection of SNP TSC0059074
ctcatacccacac

SEQ ID NO: 242213 - DNA, 13 bp, Artificial Sequence
  Oligonucleotide for detection of SNP TSC0059074
tttataattatay

SEQ ID NO: 242214 - DNA, 13 bp, Artificial Sequence
  Oligonucleotide for detection of SNP TSC0059074
rtataattataaa

SEQ ID NO: 242215 - DNA, 13 bp, Artificial Sequence
  Oligonucleotide for detection of SNP TSC0059074
tttatatttatay

SEQ ID NO: 242216 - DNA, 13 bp, Artificial Sequence
  Oligonucleotide for detection of SNP TSC0059074
rtataaatataaa

SEQ ID NO: 242217 - DNA, 13 bp, Artificial Sequence
  Oligonucleotide for detection of SNP TSC0059075
taaatcgaaaaaa

SEQ ID NO: 242218 - DNA, 13 bp, Artificial Sequence
  Oligonucleotide for detection of SNP TSC0059075
ttttttcgattta

SEQ ID NO: 242219 - DNA, 13 bp, Artificial Sequence
  Oligonucleotide for detection of SNP TSC0059076
ttaaaagtattat

SEQ ID NO: 242220 - DNA, 13 bp, Artificial Sequence
  Oligonucleotide for detection of SNP TSC0059076
ataatacttttaa

SEQ ID NO: 242221 - DNA, 13 bp, Artificial Sequence
  Oligonucleotide for detection of SNP TSC0059076
ttaaaaatattat

SEQ ID NO: 242222 - DNA, 13 bp, Artificial Sequence
  Oligonucleotide for detection of SNP TSC0059076
ataatatttttaa

SEQ ID NO: 242223 - DNA, 13 bp, Artificial Sequence
  Oligonucleotide for detection of SNP TSC0059077
aatattgttttty

SEQ ID NO: 242224 - DNA, 13 bp, Artificial Sequence
  Oligonucleotide for detection of SNP TSC0059077
raaaaacaatatt

SEQ ID NO: 242225 - DNA, 13 bp, Artificial Sequence
  Oligonucleotide for detection of SNP TSC0059077
aatatcgttttty

SEQ ID NO: 242226 - DNA, 13 bp, Artificial Sequence
  Oligonucleotide for detection of SNP TSC0059077
raaaaacgatatt

SEQ ID NO: 242227 - DNA, 13 bp, Artificial Sequence
  Oligonucleotide for detection of SNP TSC0059077
gggaagggatgtt

SEQ ID NO: 242228 - DNA, 13 bp, Artificial Sequence
  Oligonucleotide for detection of SNP TSC0059077
aacatcccttccc

SEQ ID NO: 242229 - DNA, 13 bp, Artificial Sequence
  Oligonucleotide for detection of SNP TSC0059077
gggaagtgatgtt

SEQ ID NO: 242230 - DNA, 13 bp, Artificial Sequence
  Oligonucleotide for detection of SNP TSC0059077
aacatcacttccc

SEQ ID NO: 242231 - DNA, 13 bp, Artificial Sequence
  Oligonucleotide for detection of SNP TSC0059077
gggaagcgatgtt

SEQ ID NO: 242232 - DNA, 13 bp, Artificial Sequence
  Oligonucleotide for detection of SNP TSC0059077
aacatcgcttccc

SEQ ID NO: 242233 - DNA, 13 bp, Artificial Sequence
  Oligonucleotide for detection of SNP TSC0059078
tttattattttgg

SEQ ID NO: 242234 - DNA, 13 bp, Artificial Sequence
  Oligonucleotide for detection of SNP TSC0059078
ccaaaataataaa

SEQ ID NO: 242235 - DNA, 13 bp, Artificial Sequence
  Oligonucleotide for detection of SNP TSC0059078
tttattgttttgg

SEQ ID NO: 242236 - DNA, 13 bp, Artificial Sequence
  Oligonucleotide for detection of SNP TSC0059078
ccaaaacaataaa

SEQ ID NO: 242237 - DNA, 13 bp, Artificial Sequence
  Oligonucleotide for detection of SNP TSC0059078
tttatcgttttgg

SEQ ID NO: 242238 - DNA, 13 bp, Artificial Sequence
  Oligonucleotide for detection of SNP TSC0059078
ccaaaacgataaa

SEQ ID NO: 242239 - DNA, 13 bp, Artificial Sequence
  Oligonucleotide for detection of SNP TSC0059078
ttagaatggtaga

SEQ ID NO: 242240 - DNA, 13 bp, Artificial Sequence
  Oligonucleotide for detection of SNP TSC0059078
tctaccattctaa

SEQ ID NO: 242241 - DNA, 13 bp, Artificial Sequence
  Oligonucleotide for detection of SNP TSC0059078
ttagaacggtaga

SEQ ID NO: 242242 - DNA, 13 bp, Artificial Sequence
  Oligonucleotide for detection of SNP TSC0059078
tctaccgttctaa

SEQ ID NO: 242243 - DNA, 13 bp, Artificial Sequence
  Oligonucleotide for detection of SNP TSC0059079
attatagttattg

SEQ ID NO: 242244 - DNA, 13 bp, Artificial Sequence
  Oligonucleotide for detection of SNP TSC0059079
caataactataat

SEQ ID NO: 242245 - DNA, 13 bp, Artificial Sequence
  Oligonucleotide for detection of SNP TSC0059079
attataattattg

SEQ ID NO: 242246 - DNA, 13 bp, Artificial Sequence
  Oligonucleotide for detection of SNP TSC0059079
caataattataat

SEQ ID NO: 242247 - DNA, 13 bp, Artificial Sequence
  Oligonucleotide for detection of SNP TSC0059080
atttttatatgga

SEQ ID NO: 242248 - DNA, 13 bp, Artificial Sequence
  Oligonucleotide for detection of SNP TSC0059080
tccatataaaaat

SEQ ID NO: 242249 - DNA, 13 bp, Artificial Sequence
  Oligonucleotide for detection of SNP TSC0059080
atttttgtatgga

SEQ ID NO: 242250 - DNA, 13 bp, Artificial Sequence
  Oligonucleotide for detection of SNP TSC0059080
tccatacaaaaat

SEQ ID NO: 242251 - DNA, 13 bp, Artificial Sequence
  Oligonucleotide for detection of SNP TSC0059081
ttgtttgtattty

SEQ ID NO: 242252 - DNA, 13 bp, Artificial Sequence
  Oligonucleotide for detection of SNP TSC0059081
raaatacaaacaa

SEQ ID NO: 242253 - DNA, 13 bp, Artificial Sequence
  Oligonucleotide for detection of SNP TSC0059081
ttgtttatattty

SEQ ID NO: 242254 - DNA, 13 bp, Artificial Sequence
  Oligonucleotide for detection of SNP TSC0059081
raaatataaacaa

SEQ ID NO: 242255 - DNA, 13 bp, Artificial Sequence
  Oligonucleotide for detection of SNP TSC0059083
tagtgagtgtgty

SEQ ID NO: 242256 - DNA, 13 bp, Artificial Sequence
  Oligonucleotide for detection of SNP TSC0059083
racacactcacta

SEQ ID NO: 242257 - DNA, 13 bp, Artificial Sequence
  Oligonucleotide for detection of SNP TSC0059083
tagtgaatgtgty

SEQ ID NO: 242258 - DNA, 13 bp, Artificial Sequence
  Oligonucleotide for detection of SNP TSC0059083
racacattcacta

SEQ ID NO: 242259 - DNA, 13 bp, Artificial Sequence
  Oligonucleotide for detection of SNP TSC0059083
tagtgagtgcgty

SEQ ID NO: 242260 - DNA, 13 bp, Artificial Sequence
  Oligonucleotide for detection of SNP TSC0059083
racgcactcacta

SEQ ID NO: 242261 - DNA, 13 bp, Artificial Sequence
  Oligonucleotide for detection of SNP TSC0059083
tagtgaatgcgty

SEQ ID NO: 242262 - DNA, 13 bp, Artificial Sequence
  Oligonucleotide for detection of SNP TSC0059083
racgcattcacta

SEQ ID NO: 242263 - DNA, 13 bp, Artificial Sequence
  Oligonucleotide for detection of SNP TSC0059085
gatatagttttty

SEQ ID NO: 242264 - DNA, 13 bp, Artificial Sequence
  Oligonucleotide for detection of SNP TSC0059085
raaaaactatatc

SEQ ID NO: 242265 - DNA, 13 bp, Artificial Sequence
  Oligonucleotide for detection of SNP TSC0059085
gatataattttty

SEQ ID NO: 242266 - DNA, 13 bp, Artificial Sequence
  Oligonucleotide for detection of SNP TSC0059085
raaaaattatatc

SEQ ID NO: 242267 - DNA, 13 bp, Artificial Sequence
  Oligonucleotide for detection of SNP TSC0059086
agatagtggatat

SEQ ID NO: 242268 - DNA, 13 bp, Artificial Sequence
  Oligonucleotide for detection of SNP TSC0059086
atatccactatct

SEQ ID NO: 242269 - DNA, 13 bp, Artificial Sequence
  Oligonucleotide for detection of SNP TSC0059086
agatagcggatat

SEQ ID NO: 242270 - DNA, 13 bp, Artificial Sequence
  Oligonucleotide for detection of SNP TSC0059086
atatccgctatct

SEQ ID NO: 242271 - DNA, 13 bp, Artificial Sequence
  Oligonucleotide for detection of SNP TSC0059088
ggtaatatggtat

SEQ ID NO: 242272 - DNA, 13 bp, Artificial Sequence
  Oligonucleotide for detection of SNP TSC0059088
ataccatattacc

SEQ ID NO: 242273 - DNA, 13 bp, Artificial Sequence
  Oligonucleotide for detection of SNP TSC0059088
ggtaatgtggtat

SEQ ID NO: 242274 - DNA, 13 bp, Artificial Sequence
  Oligonucleotide for detection of SNP TSC0059088
ataccacattacc

SEQ ID NO: 242275 - DNA, 13 bp, Artificial Sequence
  Oligonucleotide for detection of SNP TSC0059089
aatttaagttttt

SEQ ID NO: 242276 - DNA, 13 bp, Artificial Sequence
  Oligonucleotide for detection of SNP TSC0059089
aaaaacttaaatt

SEQ ID NO: 242277 - DNA, 13 bp, Artificial Sequence
  Oligonucleotide for detection of SNP TSC0059089
aatttaggttttt

SEQ ID NO: 242278 - DNA, 13 bp, Artificial Sequence
  Oligonucleotide for detection of SNP TSC0059089
aaaaacctaaatt

SEQ ID NO: 242279 - DNA, 13 bp, Artificial Sequence
  Oligonucleotide for detection of SNP TSC0059090
agaaatgagatta

SEQ ID NO: 242280 - DNA, 13 bp, Artificial Sequence
  Oligonucleotide for detection of SNP TSC0059090
taatctcatttct

SEQ ID NO: 242281 - DNA, 13 bp, Artificial Sequence
  Oligonucleotide for detection of SNP TSC0059090
agaaataagatta

SEQ ID NO: 242282 - DNA, 13 bp, Artificial Sequence
  Oligonucleotide for detection of SNP TSC0059090
taatcttatttct

SEQ ID NO: 242283 - DNA, 13 bp, Artificial Sequence
  Oligonucleotide for detection of SNP TSC0059090
agaaacgagatta

SEQ ID NO: 242284 - DNA, 13 bp, Artificial Sequence
  Oligonucleotide for detection of SNP TSC0059090
taatctcgtttct

SEQ ID NO: 242285 - DNA, 13 bp, Artificial Sequence
  Oligonucleotide for detection of SNP TSC0059091
tagtttgaaaaga

SEQ ID NO: 242286 - DNA, 13 bp, Artificial Sequence
  Oligonucleotide for detection of SNP TSC0059091
tcttttcaaacta

SEQ ID NO: 242287 - DNA, 13 bp, Artificial Sequence
  Oligonucleotide for detection of SNP TSC0059091
tagtttaaaaaga

SEQ ID NO: 242288 - DNA, 13 bp, Artificial Sequence
  Oligonucleotide for detection of SNP TSC0059091
tctttttaaacta

SEQ ID NO: 242289 - DNA, 13 bp, Artificial Sequence
  Oligonucleotide for detection of SNP TSC0004836
tttgggaggttaa

SEQ ID NO: 242290 - DNA, 13 bp, Artificial Sequence
  Oligonucleotide for detection of SNP TSC0004836
ttaacctcccaaa

SEQ ID NO: 242291 - DNA, 13 bp, Artificial Sequence
  Oligonucleotide for detection of SNP TSC0004836
tttggggggttaa

SEQ ID NO: 242292 - DNA, 13 bp, Artificial Sequence
  Oligonucleotide for detection of SNP TSC0004836
ttaaccccccaaa

SEQ ID NO: 242293 - DNA, 13 bp, Artificial Sequence
  Oligonucleotide for detection of SNP TSC0059092
gtggttatggtga

SEQ ID NO: 242294 - DNA, 13 bp, Artificial Sequence
  Oligonucleotide for detection of SNP TSC0059092
tcaccataaccac

SEQ ID NO: 242295 - DNA, 13 bp, Artificial Sequence
  Oligonucleotide for detection of SNP TSC0059092
gtggttgtggtga

SEQ ID NO: 242296 - DNA, 13 bp, Artificial Sequence
  Oligonucleotide for detection of SNP TSC0059092
tcaccacaaccac

SEQ ID NO: 242297 - DNA, 13 bp, Artificial Sequence
  Oligonucleotide for detection of SNP TSC0059092
gtggttacggtga

SEQ ID NO: 242298 - DNA, 13 bp, Artificial Sequence
  Oligonucleotide for detection of SNP TSC0059092
tcaccgtaaccac

SEQ ID NO: 242299 - DNA, 13 bp, Artificial Sequence
  Oligonucleotide for detection of SNP TSC0059092
gtggttgcggtga

SEQ ID NO: 242300 - DNA, 13 bp, Artificial Sequence
  Oligonucleotide for detection of SNP TSC0059092
tcaccgcaaccac

SEQ ID NO: 242301 - DNA, 13 bp, Artificial Sequence
  Oligonucleotide for detection of SNP TSC0059093
tttttgaaggtgg

SEQ ID NO: 242302 - DNA, 13 bp, Artificial Sequence
  Oligonucleotide for detection of SNP TSC0059093
ccaccttcaaaaa

SEQ ID NO: 242303 - DNA, 13 bp, Artificial Sequence
  Oligonucleotide for detection of SNP TSC0059093
tttttggaggtgg

SEQ ID NO: 242304 - DNA, 13 bp, Artificial Sequence
  Oligonucleotide for detection of SNP TSC0059093
ccacctccaaaaa

SEQ ID NO: 242305 - DNA, 13 bp, Artificial Sequence
  Oligonucleotide for detection of SNP TSC0059094
aggttattaattg

SEQ ID NO: 242306 - DNA, 13 bp, Artificial Sequence
  Oligonucleotide for detection of SNP TSC0059094
caattaataacct

SEQ ID NO: 242307 - DNA, 13 bp, Artificial Sequence
  Oligonucleotide for detection of SNP TSC0059094
aggttagtaattg

SEQ ID NO: 242308 - DNA, 13 bp, Artificial Sequence
  Oligonucleotide for detection of SNP TSC0059094
caattactaacct

SEQ ID NO: 242309 - DNA, 13 bp, Artificial Sequence
  Oligonucleotide for detection of SNP TSC0059094
tagttattgattt

SEQ ID NO: 242310 - DNA, 13 bp, Artificial Sequence
  Oligonucleotide for detection of SNP TSC0059094
aaatcaataacta

SEQ ID NO: 242311 - DNA, 13 bp, Artificial Sequence
  Oligonucleotide for detection of SNP TSC0059095
gttttatgttgat

SEQ ID NO: 242312 - DNA, 13 bp, Artificial Sequence
  Oligonucleotide for detection of SNP TSC0059095
atcaacataaaac

SEQ ID NO: 242313 - DNA, 13 bp, Artificial Sequence
  Oligonucleotide for detection of SNP TSC0059095
gttttaggttgat

SEQ ID NO: 242314 - DNA, 13 bp, Artificial Sequence
  Oligonucleotide for detection of SNP TSC0059095
atcaacctaaaac

SEQ ID NO: 242315 - DNA, 13 bp, Artificial Sequence
  Oligonucleotide for detection of SNP TSC0059095
attagtatgaggy

SEQ ID NO: 242316 - DNA, 13 bp, Artificial Sequence
  Oligonucleotide for detection of SNP TSC0059095
rcctcatactaat

SEQ ID NO: 242317 - DNA, 13 bp, Artificial Sequence
  Oligonucleotide for detection of SNP TSC0059095
attagtttgaggy

SEQ ID NO: 242318 - DNA, 13 bp, Artificial Sequence
  Oligonucleotide for detection of SNP TSC0059095
rcctcaaactaat

SEQ ID NO: 242319 - DNA, 13 bp, Artificial Sequence
  Oligonucleotide for detection of SNP TSC0059097
agagttgtggtat

SEQ ID NO: 242320 - DNA, 13 bp, Artificial Sequence
  Oligonucleotide for detection of SNP TSC0059097
ataccacaactct

SEQ ID NO: 242321 - DNA, 13 bp, Artificial Sequence
  Oligonucleotide for detection of SNP TSC0059097
agagttatggtat

SEQ ID NO: 242322 - DNA, 13 bp, Artificial Sequence
  Oligonucleotide for detection of SNP TSC0059097
ataccataactct

SEQ ID NO: 242323 - DNA, 13 bp, Artificial Sequence
  Oligonucleotide for detection of SNP TSC0059097
agagtcgtggtat

SEQ ID NO: 242324 - DNA, 13 bp, Artificial Sequence
  Oligonucleotide for detection of SNP TSC0059097
ataccacgactct

SEQ ID NO: 242325 - DNA, 13 bp, Artificial Sequence
  Oligonucleotide for detection of SNP TSC0059098
ttgtattgaaata

SEQ ID NO: 242326 - DNA, 13 bp, Artificial Sequence
  Oligonucleotide for detection of SNP TSC0059098
tatttcaatacaa

SEQ ID NO: 242327 - DNA, 13 bp, Artificial Sequence
  Oligonucleotide for detection of SNP TSC0059098
ttgtatcgaaata

SEQ ID NO: 242328 - DNA, 13 bp, Artificial Sequence
  Oligonucleotide for detection of SNP TSC0059098
tatttcgatacaa

SEQ ID NO: 242329 - DNA, 13 bp, Artificial Sequence
  Oligonucleotide for detection of SNP TSC0059098
tgttttgatgtag

SEQ ID NO: 242330 - DNA, 13 bp, Artificial Sequence
  Oligonucleotide for detection of SNP TSC0059098
ctacatcaaaaca

SEQ ID NO: 242331 - DNA, 13 bp, Artificial Sequence
  Oligonucleotide for detection of SNP TSC0059098
tgttttaatgtag

SEQ ID NO: 242332 - DNA, 13 bp, Artificial Sequence
  Oligonucleotide for detection of SNP TSC0059098
ctacattaaaaca

SEQ ID NO: 242333 - DNA, 13 bp, Artificial Sequence
  Oligonucleotide for detection of SNP TSC0059098
tgtttcgatgtag

SEQ ID NO: 242334 - DNA, 13 bp, Artificial Sequence
  Oligonucleotide for detection of SNP TSC0059098
ctacatcgaaaca

SEQ ID NO: 242335 - DNA, 13 bp, Artificial Sequence
  Oligonucleotide for detection of SNP TSC0059099
attatggtagaaa

SEQ ID NO: 242336 - DNA, 13 bp, Artificial Sequence
  Oligonucleotide for detection of SNP TSC0059099
tttctaccataat

SEQ ID NO: 242337 - DNA, 13 bp, Artificial Sequence
  Oligonucleotide for detection of SNP TSC0059099
attatgatagaaa

SEQ ID NO: 242338 - DNA, 13 bp, Artificial Sequence
  Oligonucleotide for detection of SNP TSC0059099
tttctatcataat

SEQ ID NO: 242339 - DNA, 13 bp, Artificial Sequence
  Oligonucleotide for detection of SNP TSC0059100
gttaagaattgaa

SEQ ID NO: 242340 - DNA, 13 bp, Artificial Sequence
  Oligonucleotide for detection of SNP TSC0059100
ttcaattcttaac

SEQ ID NO: 242341 - DNA, 13 bp, Artificial Sequence
  Oligonucleotide for detection of SNP TSC0059100
gttaagtattgaa

SEQ ID NO: 242342 - DNA, 13 bp, Artificial Sequence
  Oligonucleotide for detection of SNP TSC0059100
ttcaatacttaac

SEQ ID NO: 242343 - DNA, 13 bp, Artificial Sequence
  Oligonucleotide for detection of SNP TSC0059100
tttaatttttggy

SEQ ID NO: 242344 - DNA, 13 bp, Artificial Sequence
  Oligonucleotide for detection of SNP TSC0059100
rccaaaaattaaa

SEQ ID NO: 242345 - DNA, 13 bp, Artificial Sequence
  Oligonucleotide for detection of SNP TSC0059100
tttaatatttggy

SEQ ID NO: 242346 - DNA, 13 bp, Artificial Sequence
  Oligonucleotide for detection of SNP TSC0059100
rccaaatattaaa

SEQ ID NO: 242347 - DNA, 13 bp, Artificial Sequence
  Oligonucleotide for detection of SNP TSC0059101
tgttgaaatgttt

SEQ ID NO: 242348 - DNA, 13 bp, Artificial Sequence
  Oligonucleotide for detection of SNP TSC0059101
aaacatttcaaca

SEQ ID NO: 242349 - DNA, 13 bp, Artificial Sequence
  Oligonucleotide for detection of SNP TSC0059101
tgttgatatgttt

SEQ ID NO: 242350 - DNA, 13 bp, Artificial Sequence
  Oligonucleotide for detection of SNP TSC0059101
aaacatatcaaca

SEQ ID NO: 242351 - DNA, 13 bp, Artificial Sequence
  Oligonucleotide for detection of SNP TSC0059101
agatattttaata

SEQ ID NO: 242352 - DNA, 13 bp, Artificial Sequence
  Oligonucleotide for detection of SNP TSC0059101
tattaaaatatct

SEQ ID NO: 242353 - DNA, 13 bp, Artificial Sequence
  Oligonucleotide for detection of SNP TSC0059101
agatatgttaata

SEQ ID NO: 242354 - DNA, 13 bp, Artificial Sequence
  Oligonucleotide for detection of SNP TSC0059101
tattaacatatct

SEQ ID NO: 242355 - DNA, 13 bp, Artificial Sequence
  Oligonucleotide for detection of SNP TSC0059102
ggattgagattty

SEQ ID NO: 242356 - DNA, 13 bp, Artificial Sequence
  Oligonucleotide for detection of SNP TSC0059102
raaatctcaatcc

SEQ ID NO: 242357 - DNA, 13 bp, Artificial Sequence
  Oligonucleotide for detection of SNP TSC0059102
ggattgggattty

SEQ ID NO: 242358 - DNA, 13 bp, Artificial Sequence
  Oligonucleotide for detection of SNP TSC0059102
raaatcccaatcc

SEQ ID NO: 242359 - DNA, 13 bp, Artificial Sequence
  Oligonucleotide for detection of SNP TSC0059102
ggatcgagattty

SEQ ID NO: 242360 - DNA, 13 bp, Artificial Sequence
  Oligonucleotide for detection of SNP TSC0059102
raaatctcgatcc

SEQ ID NO: 242361 - DNA, 13 bp, Artificial Sequence
  Oligonucleotide for detection of SNP TSC0059102
ggatcgggattty

SEQ ID NO: 242362 - DNA, 13 bp, Artificial Sequence
  Oligonucleotide for detection of SNP TSC0059102
raaatcccgatcc

SEQ ID NO: 242363 - DNA, 13 bp, Artificial Sequence
  Oligonucleotide for detection of SNP TSC0000793
ttgtttgtatttg

SEQ ID NO: 242364 - DNA, 13 bp, Artificial Sequence
  Oligonucleotide for detection of SNP TSC0000793
caaatacaaacaa

SEQ ID NO: 242365 - DNA, 13 bp, Artificial Sequence
  Oligonucleotide for detection of SNP TSC0000793
taaatgaaaataa

SEQ ID NO: 242366 - DNA, 13 bp, Artificial Sequence
  Oligonucleotide for detection of SNP TSC0000793
ttattttcattta

SEQ ID NO: 242367 - DNA, 13 bp, Artificial Sequence
  Oligonucleotide for detection of SNP TSC0000793
taaatgtaaataa

SEQ ID NO: 242368 - DNA, 13 bp, Artificial Sequence
  Oligonucleotide for detection of SNP TSC0000793
ttatttacattta

SEQ ID NO: 242369 - DNA, 13 bp, Artificial Sequence
  Oligonucleotide for detection of SNP TSC0009990
aattgaagaagga

SEQ ID NO: 242370 - DNA, 13 bp, Artificial Sequence
  Oligonucleotide for detection of SNP TSC0009990
tccttcttcaatt

SEQ ID NO: 242371 - DNA, 13 bp, Artificial Sequence
  Oligonucleotide for detection of SNP TSC0009990
aattgatgaagga

SEQ ID NO: 242372 - DNA, 13 bp, Artificial Sequence
  Oligonucleotide for detection of SNP TSC0009990
tccttcatcaatt

SEQ ID NO: 242373 - DNA, 13 bp, Artificial Sequence
  Oligonucleotide for detection of SNP TSC0059104
gaagaagggatat

SEQ ID NO: 242374 - DNA, 13 bp, Artificial Sequence
  Oligonucleotide for detection of SNP TSC0059104
atatcccttcttc

SEQ ID NO: 242375 - DNA, 13 bp, Artificial Sequence
  Oligonucleotide for detection of SNP TSC0059104
gaagaaaggatat

SEQ ID NO: 242376 - DNA, 13 bp, Artificial Sequence
  Oligonucleotide for detection of SNP TSC0059104
atatcctttcttc

SEQ ID NO: 242377 - DNA, 13 bp, Artificial Sequence
  Oligonucleotide for detection of SNP TSC0059105
tttttaataaggg

SEQ ID NO: 242378 - DNA, 13 bp, Artificial Sequence
  Oligonucleotide for detection of SNP TSC0059105
cccttattaaaaa

SEQ ID NO: 242379 - DNA, 13 bp, Artificial Sequence
  Oligonucleotide for detection of SNP TSC0059105
tttttagtaaggg

SEQ ID NO: 242380 - DNA, 13 bp, Artificial Sequence
  Oligonucleotide for detection of SNP TSC0059105
cccttactaaaaa

SEQ ID NO: 242381 - DNA, 13 bp, Artificial Sequence
  Oligonucleotide for detection of SNP TSC0001330
gattttgtgatga

SEQ ID NO: 242382 - DNA, 13 bp, Artificial Sequence
  Oligonucleotide for detection of SNP TSC0001330
tcatcacaaaatc

SEQ ID NO: 242383 - DNA, 13 bp, Artificial Sequence
  Oligonucleotide for detection of SNP TSC0001330
gattttatgatga

SEQ ID NO: 242384 - DNA, 13 bp, Artificial Sequence
  Oligonucleotide for detection of SNP TSC0001330
tcatcataaaatc

SEQ ID NO: 242385 - DNA, 13 bp, Artificial Sequence
  Oligonucleotide for detection of SNP TSC0000651
gtatacgttttty

SEQ ID NO: 242386 - DNA, 13 bp, Artificial Sequence
  Oligonucleotide for detection of SNP TSC0000651
raaaaacgtatac

SEQ ID NO: 242387 - DNA, 13 bp, Artificial Sequence
  Oligonucleotide for detection of SNP TSC0000651
gggaaatgtgtay

SEQ ID NO: 242388 - DNA, 13 bp, Artificial Sequence
  Oligonucleotide for detection of SNP TSC0000651
rtacacatttccc

SEQ ID NO: 242389 - DNA, 13 bp, Artificial Sequence
  Oligonucleotide for detection of SNP TSC0000651
gggaaacgtgtay

SEQ ID NO: 242390 - DNA, 13 bp, Artificial Sequence
  Oligonucleotide for detection of SNP TSC0000651
rtacacgtttccc

SEQ ID NO: 242391 - DNA, 13 bp, Artificial Sequence
  Oligonucleotide for detection of SNP TSC0059106
tttttgaaagtta

SEQ ID NO: 242392 - DNA, 13 bp, Artificial Sequence
  Oligonucleotide for detection of SNP TSC0059106
taactttcaaaaa

SEQ ID NO: 242393 - DNA, 13 bp, Artificial Sequence
  Oligonucleotide for detection of SNP TSC0059106
tttttggaagtta

SEQ ID NO: 242394 - DNA, 13 bp, Artificial Sequence
  Oligonucleotide for detection of SNP TSC0059106
taacttccaaaaa

SEQ ID NO: 242395 - DNA, 13 bp, Artificial Sequence
  Oligonucleotide for detection of SNP TSC0001182
tgaaagatgaatg

SEQ ID NO: 242396 - DNA, 13 bp, Artificial Sequence
  Oligonucleotide for detection of SNP TSC0001182
cattcatctttca

SEQ ID NO: 242397 - DNA, 13 bp, Artificial Sequence
  Oligonucleotide for detection of SNP TSC0000742
gtatttttgttaa

SEQ ID NO: 242398 - DNA, 13 bp, Artificial Sequence
  Oligonucleotide for detection of SNP TSC0000742
ttaacaaaaatac

SEQ ID NO: 242399 - DNA, 13 bp, Artificial Sequence
  Oligonucleotide for detection of SNP TSC0000742
gtatttgtgttaa

SEQ ID NO: 242400 - DNA, 13 bp, Artificial Sequence
  Oligonucleotide for detection of SNP TSC0000742
ttaacacaaatac

SEQ ID NO: 242401 - DNA, 13 bp, Artificial Sequence
  Oligonucleotide for detection of SNP TSC0000742
ttaataaaagtgy

SEQ ID NO: 242402 - DNA, 13 bp, Artificial Sequence
  Oligonucleotide for detection of SNP TSC0000742
rcacttttattaa

SEQ ID NO: 242403 - DNA, 13 bp, Artificial Sequence
  Oligonucleotide for detection of SNP TSC0000742
ttaatataagtgy

SEQ ID NO: 242404 - DNA, 13 bp, Artificial Sequence
  Oligonucleotide for detection of SNP TSC0000742
rcacttatattaa

SEQ ID NO: 242405 - DNA, 13 bp, Artificial Sequence
  Oligonucleotide for detection of SNP TSC0059110
gttgggaatttta

SEQ ID NO: 242406 - DNA, 13 bp, Artificial Sequence
  Oligonucleotide for detection of SNP TSC0059110
taaaattcccaac

SEQ ID NO: 242407 - DNA, 13 bp, Artificial Sequence
  Oligonucleotide for detection of SNP TSC0059110
gttggggatttta

SEQ ID NO: 242408 - DNA, 13 bp, Artificial Sequence
  Oligonucleotide for detection of SNP TSC0059110
taaaatccccaac

SEQ ID NO: 242409 - DNA, 13 bp, Artificial Sequence
  Oligonucleotide for detection of SNP TSC0000433
tttgggtgaggay

SEQ ID NO: 242410 - DNA, 13 bp, Artificial Sequence
  Oligonucleotide for detection of SNP TSC0000433
rtcctcacccaaa

SEQ ID NO: 242411 - DNA, 13 bp, Artificial Sequence
  Oligonucleotide for detection of SNP TSC0000433
tttgggcgaggay

SEQ ID NO: 242412 - DNA, 13 bp, Artificial Sequence
  Oligonucleotide for detection of SNP TSC0000433
rtcctcgcccaaa

SEQ ID NO: 242413 - DNA, 13 bp, Artificial Sequence
  Oligonucleotide for detection of SNP TSC0000434
atttatgtggttt

SEQ ID NO: 242414 - DNA, 13 bp, Artificial Sequence
  Oligonucleotide for detection of SNP TSC0000434
aaaccacataaat

SEQ ID NO: 242415 - DNA, 13 bp, Artificial Sequence
  Oligonucleotide for detection of SNP TSC0000774
aaggaagtaaggy

SEQ ID NO: 242416 - DNA, 13 bp, Artificial Sequence
  Oligonucleotide for detection of SNP TSC0000774
rccttacttcctt

SEQ ID NO: 242417 - DNA, 13 bp, Artificial Sequence
  Oligonucleotide for detection of SNP TSC0000774
aaggaaataaggy

SEQ ID NO: 242418 - DNA, 13 bp, Artificial Sequence
  Oligonucleotide for detection of SNP TSC0000774
rccttatttcctt

SEQ ID NO: 242419 - DNA, 13 bp, Artificial Sequence
  Oligonucleotide for detection of SNP TSC0001090
gtaggatgttata

SEQ ID NO: 242420 - DNA, 13 bp, Artificial Sequence
  Oligonucleotide for detection of SNP TSC0001090
tataacatcctac

SEQ ID NO: 242421 - DNA, 13 bp, Artificial Sequence
  Oligonucleotide for detection of SNP TSC0001090
gtaggacgttata

SEQ ID NO: 242422 - DNA, 13 bp, Artificial Sequence
  Oligonucleotide for detection of SNP TSC0001090
tataacgtcctac

SEQ ID NO: 242423 - DNA, 13 bp, Artificial Sequence
  Oligonucleotide for detection of SNP TSC0001090
tgtgatgttttgy

SEQ ID NO: 242424 - DNA, 13 bp, Artificial Sequence
  Oligonucleotide for detection of SNP TSC0001090
rcaaaacatcaca

SEQ ID NO: 242425 - DNA, 13 bp, Artificial Sequence
  Oligonucleotide for detection of SNP TSC0001090
tgtgatattttgy

SEQ ID NO: 242426 - DNA, 13 bp, Artificial Sequence
  Oligonucleotide for detection of SNP TSC0001090
rcaaaatatcaca

SEQ ID NO: 242427 - DNA, 13 bp, Artificial Sequence
  Oligonucleotide for detection of SNP TSC0001090
tgtgacgttttgy

SEQ ID NO: 242428 - DNA, 13 bp, Artificial Sequence
  Oligonucleotide for detection of SNP TSC0001090
rcaaaacgtcaca

SEQ ID NO: 242429 - DNA, 13 bp, Artificial Sequence
  Oligonucleotide for detection of SNP TSC0059116
ggatgtgtaatga

SEQ ID NO: 242430 - DNA, 13 bp, Artificial Sequence
  Oligonucleotide for detection of SNP TSC0059116
tcattacacatcc

SEQ ID NO: 242431 - DNA, 13 bp, Artificial Sequence
  Oligonucleotide for detection of SNP TSC0059116
ggatgtataatga

SEQ ID NO: 242432 - DNA, 13 bp, Artificial Sequence
  Oligonucleotide for detection of SNP TSC0059116
tcattatacatcc

SEQ ID NO: 242433 - DNA, 13 bp, Artificial Sequence
  Oligonucleotide for detection of SNP TSC0059116
ggatgcgtaatga

SEQ ID NO: 242434 - DNA, 13 bp, Artificial Sequence
  Oligonucleotide for detection of SNP TSC0059116
tcattacgcatcc

SEQ ID NO: 242435 - DNA, 13 bp, Artificial Sequence
  Oligonucleotide for detection of SNP TSC0059117
taggtggttatgg

SEQ ID NO: 242436 - DNA, 13 bp, Artificial Sequence
  Oligonucleotide for detection of SNP TSC0059117
ccataaccaccta

SEQ ID NO: 242437 - DNA, 13 bp, Artificial Sequence
  Oligonucleotide for detection of SNP TSC0059117
taggtgattatgg

SEQ ID NO: 242438 - DNA, 13 bp, Artificial Sequence
  Oligonucleotide for detection of SNP TSC0059117
ccataatcaccta

SEQ ID NO: 242439 - DNA, 13 bp, Artificial Sequence
  Oligonucleotide for detection of SNP TSC0000278
gggtgtgatttat

SEQ ID NO: 242440 - DNA, 13 bp, Artificial Sequence
  Oligonucleotide for detection of SNP TSC0000278
ataaatcacaccc

SEQ ID NO: 242441 - DNA, 13 bp, Artificial Sequence
  Oligonucleotide for detection of SNP TSC0000278
gggtgtaatttat

SEQ ID NO: 242442 - DNA, 13 bp, Artificial Sequence
  Oligonucleotide for detection of SNP TSC0000278
ataaattacaccc

SEQ ID NO: 242443 - DNA, 13 bp, Artificial Sequence
  Oligonucleotide for detection of SNP TSC0000278
gggcgtgatttat

SEQ ID NO: 242444 - DNA, 13 bp, Artificial Sequence
  Oligonucleotide for detection of SNP TSC0000278
ataaatcacgccc

SEQ ID NO: 242445 - DNA, 13 bp, Artificial Sequence
  Oligonucleotide for detection of SNP TSC0000278
gggcgtaatttat

SEQ ID NO: 242446 - DNA, 13 bp, Artificial Sequence
  Oligonucleotide for detection of SNP TSC0000278
ataaattacgccc

SEQ ID NO: 242447 - DNA, 13 bp, Artificial Sequence
  Oligonucleotide for detection of SNP TSC0000161
atagggtggaggy

SEQ ID NO: 242448 - DNA, 13 bp, Artificial Sequence
  Oligonucleotide for detection of SNP TSC0000161
rcctccaccctat

SEQ ID NO: 242449 - DNA, 13 bp, Artificial Sequence
  Oligonucleotide for detection of SNP TSC0000161
atagggcggaggy

SEQ ID NO: 242450 - DNA, 13 bp, Artificial Sequence
  Oligonucleotide for detection of SNP TSC0000161
rcctccgccctat

SEQ ID NO: 242451 - DNA, 13 bp, Artificial Sequence
  Oligonucleotide for detection of SNP TSC0000919
ttaaggagattag

SEQ ID NO: 242452 - DNA, 13 bp, Artificial Sequence
  Oligonucleotide for detection of SNP TSC0000919
ctaatctccttaa

SEQ ID NO: 242453 - DNA, 13 bp, Artificial Sequence
  Oligonucleotide for detection of SNP TSC0000919
ttaaggggattag

SEQ ID NO: 242454 - DNA, 13 bp, Artificial Sequence
  Oligonucleotide for detection of SNP TSC0000919
ctaatccccttaa

SEQ ID NO: 242455 - DNA, 13 bp, Artificial Sequence
  Oligonucleotide for detection of SNP TSC0059123
taattgtttttat

SEQ ID NO: 242456 - DNA, 13 bp, Artificial Sequence
  Oligonucleotide for detection of SNP TSC0059123
ataaaaacaatta

SEQ ID NO: 242457 - DNA, 13 bp, Artificial Sequence
  Oligonucleotide for detection of SNP TSC0059123
taattggttttat

SEQ ID NO: 242458 - DNA, 13 bp, Artificial Sequence
  Oligonucleotide for detection of SNP TSC0059123
ataaaaccaatta

SEQ ID NO: 242459 - DNA, 13 bp, Artificial Sequence
  Oligonucleotide for detection of SNP TSC0059123
atgagggtaatta

SEQ ID NO: 242460 - DNA, 13 bp, Artificial Sequence
  Oligonucleotide for detection of SNP TSC0059123
taattaccctcat

SEQ ID NO: 242461 - DNA, 13 bp, Artificial Sequence
  Oligonucleotide for detection of SNP TSC0059123
atgaggttaatta

SEQ ID NO: 242462 - DNA, 13 bp, Artificial Sequence
  Oligonucleotide for detection of SNP TSC0059123
taattaacctcat

SEQ ID NO: 242463 - DNA, 13 bp, Artificial Sequence
  Oligonucleotide for detection of SNP TSC0000977
taatattgatata

SEQ ID NO: 242464 - DNA, 13 bp, Artificial Sequence
  Oligonucleotide for detection of SNP TSC0000977
tatatcaatatta

SEQ ID NO: 242465 - DNA, 13 bp, Artificial Sequence
  Oligonucleotide for detection of SNP TSC0000977
taatatcgatata

SEQ ID NO: 242466 - DNA, 13 bp, Artificial Sequence
  Oligonucleotide for detection of SNP TSC0000977
tatatcgatatta

SEQ ID NO: 242467 - DNA, 13 bp, Artificial Sequence
  Oligonucleotide for detection of SNP TSC0000977
tatgttggtatta

SEQ ID NO: 242468 - DNA, 13 bp, Artificial Sequence
  Oligonucleotide for detection of SNP TSC0000977
taataccaacata

SEQ ID NO: 242469 - DNA, 13 bp, Artificial Sequence
  Oligonucleotide for detection of SNP TSC0000977
tatgttagtatta

SEQ ID NO: 242470 - DNA, 13 bp, Artificial Sequence
  Oligonucleotide for detection of SNP TSC0000977
taatactaacata

SEQ ID NO: 242471 - DNA, 13 bp, Artificial Sequence
  Oligonucleotide for detection of SNP TSC0000977
tatgtcggtatta

SEQ ID NO: 242472 - DNA, 13 bp, Artificial Sequence
  Oligonucleotide for detection of SNP TSC0000977
taataccgacata

SEQ ID NO: 242473 - DNA, 13 bp, Artificial Sequence
  Oligonucleotide for detection of SNP TSC0000503
gagtatgtggagg

SEQ ID NO: 242474 - DNA, 13 bp, Artificial Sequence
  Oligonucleotide for detection of SNP TSC0000503
cctccacatactc

SEQ ID NO: 242475 - DNA, 13 bp, Artificial Sequence
  Oligonucleotide for detection of SNP TSC0000503
gagtatatggagg

SEQ ID NO: 242476 - DNA, 13 bp, Artificial Sequence
  Oligonucleotide for detection of SNP TSC0000503
cctccatatactc

SEQ ID NO: 242477 - DNA, 13 bp, Artificial Sequence
  Oligonucleotide for detection of SNP TSC0000326
ttttggaagttay

SEQ ID NO: 242478 - DNA, 13 bp, Artificial Sequence
  Oligonucleotide for detection of SNP TSC0000326
rtaacttccaaaa

SEQ ID NO: 242479 - DNA, 13 bp, Artificial Sequence
  Oligonucleotide for detection of SNP TSC0000326
ttttggtagttay

SEQ ID NO: 242480 - DNA, 13 bp, Artificial Sequence
  Oligonucleotide for detection of SNP TSC0000326
rtaactaccaaaa

SEQ ID NO: 242481 - DNA, 13 bp, Artificial Sequence
  Oligonucleotide for detection of SNP TSC0000326
gtaatttttagag

SEQ ID NO: 242482 - DNA, 13 bp, Artificial Sequence
  Oligonucleotide for detection of SNP TSC0000326
ctctaaaaattac

SEQ ID NO: 242483 - DNA, 13 bp, Artificial Sequence
  Oligonucleotide for detection of SNP TSC0000326
gtaattgttagag

SEQ ID NO: 242484 - DNA, 13 bp, Artificial Sequence
  Oligonucleotide for detection of SNP TSC0000326
ctctaacaattac

SEQ ID NO: 242485 - DNA, 13 bp, Artificial Sequence
  Oligonucleotide for detection of SNP TSC0000198
atttttgattttg

SEQ ID NO: 242486 - DNA, 13 bp, Artificial Sequence
  Oligonucleotide for detection of SNP TSC0000198
caaaatcaaaaat

SEQ ID NO: 242487 - DNA, 13 bp, Artificial Sequence
  Oligonucleotide for detection of SNP TSC0000198
atttttaattttg

SEQ ID NO: 242488 - DNA, 13 bp, Artificial Sequence
  Oligonucleotide for detection of SNP TSC0000198
caaaattaaaaat

SEQ ID NO: 242489 - DNA, 13 bp, Artificial Sequence
  Oligonucleotide for detection of SNP TSC0059133
aatgggttttggt

SEQ ID NO: 242490 - DNA, 13 bp, Artificial Sequence
  Oligonucleotide for detection of SNP TSC0059133
accaaaacccatt

SEQ ID NO: 242491 - DNA, 13 bp, Artificial Sequence
  Oligonucleotide for detection of SNP TSC0059133
aatggggtttggt

SEQ ID NO: 242492 - DNA, 13 bp, Artificial Sequence
  Oligonucleotide for detection of SNP TSC0059133
accaaaccccatt

SEQ ID NO: 242493 - DNA, 13 bp, Artificial Sequence
  Oligonucleotide for detection of SNP TSC0059133
attagattttatt

SEQ ID NO: 242494 - DNA, 13 bp, Artificial Sequence
  Oligonucleotide for detection of SNP TSC0059133
aataaaatctaat

SEQ ID NO: 242495 - DNA, 13 bp, Artificial Sequence
  Oligonucleotide for detection of SNP TSC0059134
tgaagagtttata

SEQ ID NO: 242496 - DNA, 13 bp, Artificial Sequence
  Oligonucleotide for detection of SNP TSC0059134
tataaactcttca

SEQ ID NO: 242497 - DNA, 13 bp, Artificial Sequence
  Oligonucleotide for detection of SNP TSC0059134
tgaagaatttata

SEQ ID NO: 242498 - DNA, 13 bp, Artificial Sequence
  Oligonucleotide for detection of SNP TSC0059134
tataaattcttca

SEQ ID NO: 242499 - DNA, 13 bp, Artificial Sequence
  Oligonucleotide for detection of SNP TSC0059135
taaatatgttgag

SEQ ID NO: 242500 - DNA, 13 bp, Artificial Sequence
  Oligonucleotide for detection of SNP TSC0059135
ctcaacatattta

SEQ ID NO: 242501 - DNA, 13 bp, Artificial Sequence
  Oligonucleotide for detection of SNP TSC0059135
taaatacgttgag

SEQ ID NO: 242502 - DNA, 13 bp, Artificial Sequence
  Oligonucleotide for detection of SNP TSC0059135
ctcaacgtattta

SEQ ID NO: 242503 - DNA, 13 bp, Artificial Sequence
  Oligonucleotide for detection of SNP TSC0059137
tttatagagtttg

SEQ ID NO: 242504 - DNA, 13 bp, Artificial Sequence
  Oligonucleotide for detection of SNP TSC0059137
caaactctataaa

SEQ ID NO: 242505 - DNA, 13 bp, Artificial Sequence
  Oligonucleotide for detection of SNP TSC0059137
tttataaagtttg

SEQ ID NO: 242506 - DNA, 13 bp, Artificial Sequence
  Oligonucleotide for detection of SNP TSC0059137
caaactttataaa

SEQ ID NO: 242507 - DNA, 13 bp, Artificial Sequence
  Oligonucleotide for detection of SNP TSC0059138
gatattgaagtaa

SEQ ID NO: 242508 - DNA, 13 bp, Artificial Sequence
  Oligonucleotide for detection of SNP TSC0059138
ttacttcaatatc

SEQ ID NO: 242509 - DNA, 13 bp, Artificial Sequence
  Oligonucleotide for detection of SNP TSC0059138
gatattaaagtaa

SEQ ID NO: 242510 - DNA, 13 bp, Artificial Sequence
  Oligonucleotide for detection of SNP TSC0059138
ttactttaatatc

SEQ ID NO: 242511 - DNA, 13 bp, Artificial Sequence
  Oligonucleotide for detection of SNP TSC0059139
ggattaattagtg

SEQ ID NO: 242512 - DNA, 13 bp, Artificial Sequence
  Oligonucleotide for detection of SNP TSC0059139
cactaattaatcc

SEQ ID NO: 242513 - DNA, 13 bp, Artificial Sequence
  Oligonucleotide for detection of SNP TSC0059139
ggattagttagtg

SEQ ID NO: 242514 - DNA, 13 bp, Artificial Sequence
  Oligonucleotide for detection of SNP TSC0059139
cactaactaatcc

SEQ ID NO: 242515 - DNA, 13 bp, Artificial Sequence
  Oligonucleotide for detection of SNP TSC0059140
ttattagggaaga

SEQ ID NO: 242516 - DNA, 13 bp, Artificial Sequence
  Oligonucleotide for detection of SNP TSC0059140
tcttccctaataa

SEQ ID NO: 242517 - DNA, 13 bp, Artificial Sequence
  Oligonucleotide for detection of SNP TSC0059140
ttattaaggaaga

SEQ ID NO: 242518 - DNA, 13 bp, Artificial Sequence
  Oligonucleotide for detection of SNP TSC0059140
tcttccttaataa

SEQ ID NO: 242519 - DNA, 13 bp, Artificial Sequence
  Oligonucleotide for detection of SNP TSC0059141
ttttttatgtaga

SEQ ID NO: 242520 - DNA, 13 bp, Artificial Sequence
  Oligonucleotide for detection of SNP TSC0059141
tctacataaaaaa

SEQ ID NO: 242521 - DNA, 13 bp, Artificial Sequence
  Oligonucleotide for detection of SNP TSC0059142
ataagtttattat

SEQ ID NO: 242522 - DNA, 13 bp, Artificial Sequence
  Oligonucleotide for detection of SNP TSC0059142
ataataaacttat

SEQ ID NO: 242523 - DNA, 13 bp, Artificial Sequence
  Oligonucleotide for detection of SNP TSC0059142
ataagtgtattat

SEQ ID NO: 242524 - DNA, 13 bp, Artificial Sequence
  Oligonucleotide for detection of SNP TSC0059142
ataatacacttat

SEQ ID NO: 242525 - DNA, 13 bp, Artificial Sequence
  Oligonucleotide for detection of SNP TSC0059142
atgataaatttat

SEQ ID NO: 242526 - DNA, 13 bp, Artificial Sequence
  Oligonucleotide for detection of SNP TSC0059142
ataaatttatcat

SEQ ID NO: 242527 - DNA, 13 bp, Artificial Sequence
  Oligonucleotide for detection of SNP TSC0059142
atgatatatttat

SEQ ID NO: 242528 - DNA, 13 bp, Artificial Sequence
  Oligonucleotide for detection of SNP TSC0059142
ataaatatatcat

SEQ ID NO: 242529 - DNA, 13 bp, Artificial Sequence
  Oligonucleotide for detection of SNP TSC0059143
tttgagattaatt

SEQ ID NO: 242530 - DNA, 13 bp, Artificial Sequence
  Oligonucleotide for detection of SNP TSC0059143
aattaatctcaaa

SEQ ID NO: 242531 - DNA, 13 bp, Artificial Sequence
  Oligonucleotide for detection of SNP TSC0059144
atatgtgttggag

SEQ ID NO: 242532 - DNA, 13 bp, Artificial Sequence
  Oligonucleotide for detection of SNP TSC0059144
ctccaacacatat

SEQ ID NO: 242533 - DNA, 13 bp, Artificial Sequence
  Oligonucleotide for detection of SNP TSC0059144
atatgtattggag

SEQ ID NO: 242534 - DNA, 13 bp, Artificial Sequence
  Oligonucleotide for detection of SNP TSC0059144
ctccaatacatat

SEQ ID NO: 242535 - DNA, 13 bp, Artificial Sequence
  Oligonucleotide for detection of SNP TSC0059144
atatgcgttggag

SEQ ID NO: 242536 - DNA, 13 bp, Artificial Sequence
  Oligonucleotide for detection of SNP TSC0059144
ctccaacgcatat

SEQ ID NO: 242537 - DNA, 13 bp, Artificial Sequence
  Oligonucleotide for detection of SNP TSC0059145
ttttatgtggttg

SEQ ID NO: 242538 - DNA, 13 bp, Artificial Sequence
  Oligonucleotide for detection of SNP TSC0059145
caaccacataaaa

SEQ ID NO: 242539 - DNA, 13 bp, Artificial Sequence
  Oligonucleotide for detection of SNP TSC0059145
ttttacgtggttg

SEQ ID NO: 242540 - DNA, 13 bp, Artificial Sequence
  Oligonucleotide for detection of SNP TSC0059145
caaccacgtaaaa

SEQ ID NO: 242541 - DNA, 13 bp, Artificial Sequence
  Oligonucleotide for detection of SNP TSC0059145
tagttatgtaggg

SEQ ID NO: 242542 - DNA, 13 bp, Artificial Sequence
  Oligonucleotide for detection of SNP TSC0059145
ccctacataacta

SEQ ID NO: 242543 - DNA, 13 bp, Artificial Sequence
  Oligonucleotide for detection of SNP TSC0059145
tagttacgtaggg

SEQ ID NO: 242544 - DNA, 13 bp, Artificial Sequence
  Oligonucleotide for detection of SNP TSC0059145
ccctacgtaacta

SEQ ID NO: 242545 - DNA, 13 bp, Artificial Sequence
  Oligonucleotide for detection of SNP TSC0059152
ttaagaaagatty

SEQ ID NO: 242546 - DNA, 13 bp, Artificial Sequence
  Oligonucleotide for detection of SNP TSC0059152
raatctttcttaa

SEQ ID NO: 242547 - DNA, 13 bp, Artificial Sequence
  Oligonucleotide for detection of SNP TSC0059152
ttaagagagatty

SEQ ID NO: 242548 - DNA, 13 bp, Artificial Sequence
  Oligonucleotide for detection of SNP TSC0059152
raatctctcttaa

SEQ ID NO: 242549 - DNA, 13 bp, Artificial Sequence
  Oligonucleotide for detection of SNP TSC0059154
tttaggtgtggty

SEQ ID NO: 242550 - DNA, 13 bp, Artificial Sequence
  Oligonucleotide for detection of SNP TSC0059154
raccacacctaaa

SEQ ID NO: 242551 - DNA, 13 bp, Artificial Sequence
  Oligonucleotide for detection of SNP TSC0059154
tttaggcgtggty

SEQ ID NO: 242552 - DNA, 13 bp, Artificial Sequence
  Oligonucleotide for detection of SNP TSC0059154
raccacgcctaaa

SEQ ID NO: 242553 - DNA, 13 bp, Artificial Sequence
  Oligonucleotide for detection of SNP TSC0059154
gattatgtttgga

SEQ ID NO: 242554 - DNA, 13 bp, Artificial Sequence
  Oligonucleotide for detection of SNP TSC0059154
tccaaacataatc

SEQ ID NO: 242555 - DNA, 13 bp, Artificial Sequence
  Oligonucleotide for detection of SNP TSC0059154
gattatatttgga

SEQ ID NO: 242556 - DNA, 13 bp, Artificial Sequence
  Oligonucleotide for detection of SNP TSC0059154
tccaaatataatc

SEQ ID NO: 242557 - DNA, 13 bp, Artificial Sequence
  Oligonucleotide for detection of SNP TSC0059154
gattacgtttgga

SEQ ID NO: 242558 - DNA, 13 bp, Artificial Sequence
  Oligonucleotide for detection of SNP TSC0059154
tccaaacgtaatc

SEQ ID NO: 242559 - DNA, 13 bp, Artificial Sequence
  Oligonucleotide for detection of SNP TSC0059160
tgaaaaattttty

SEQ ID NO: 242560 - DNA, 13 bp, Artificial Sequence
  Oligonucleotide for detection of SNP TSC0059160
raaaaatttttca

SEQ ID NO: 242561 - DNA, 13 bp, Artificial Sequence
  Oligonucleotide for detection of SNP TSC0059160
tgaaaatttttty

SEQ ID NO: 242562 - DNA, 13 bp, Artificial Sequence
  Oligonucleotide for detection of SNP TSC0059160
raaaaaattttca

SEQ ID NO: 242563 - DNA, 13 bp, Artificial Sequence
  Oligonucleotide for detection of SNP TSC0059160
gaaaggtttttta

SEQ ID NO: 242564 - DNA, 13 bp, Artificial Sequence
  Oligonucleotide for detection of SNP TSC0059160
taaaaaacctttc

SEQ ID NO: 242565 - DNA, 13 bp, Artificial Sequence
  Oligonucleotide for detection of SNP TSC0059160
gaaagggttttta

SEQ ID NO: 242566 - DNA, 13 bp, Artificial Sequence
  Oligonucleotide for detection of SNP TSC0059160
taaaaaccctttc

SEQ ID NO: 242567 - DNA, 13 bp, Artificial Sequence
  Oligonucleotide for detection of SNP TSC0059161
atataagtttaaa

SEQ ID NO: 242568 - DNA, 13 bp, Artificial Sequence
  Oligonucleotide for detection of SNP TSC0059161
tttaaacttatat

SEQ ID NO: 242569 - DNA, 13 bp, Artificial Sequence
  Oligonucleotide for detection of SNP TSC0059161
atataaatttaaa

SEQ ID NO: 242570 - DNA, 13 bp, Artificial Sequence
  Oligonucleotide for detection of SNP TSC0059161
tttaaatttatat

SEQ ID NO: 242571 - DNA, 13 bp, Artificial Sequence
  Oligonucleotide for detection of SNP TSC0059164
tatgaaaatatat

SEQ ID NO: 242572 - DNA, 13 bp, Artificial Sequence
  Oligonucleotide for detection of SNP TSC0059164
atatattttcata

SEQ ID NO: 242573 - DNA, 13 bp, Artificial Sequence
  Oligonucleotide for detection of SNP TSC0059164
tatgaagatatat

SEQ ID NO: 242574 - DNA, 13 bp, Artificial Sequence
  Oligonucleotide for detection of SNP TSC0059164
atatatcttcata

SEQ ID NO: 242575 - DNA, 13 bp, Artificial Sequence
  Oligonucleotide for detection of SNP TSC0059165
tgtttaattttaa

SEQ ID NO: 242576 - DNA, 13 bp, Artificial Sequence
  Oligonucleotide for detection of SNP TSC0059165
ttaaaattaaaca

SEQ ID NO: 242577 - DNA, 13 bp, Artificial Sequence
  Oligonucleotide for detection of SNP TSC0059165
tgtttagttttaa

SEQ ID NO: 242578 - DNA, 13 bp, Artificial Sequence
  Oligonucleotide for detection of SNP TSC0059165
ttaaaactaaaca

SEQ ID NO: 242579 - DNA, 13 bp, Artificial Sequence
  Oligonucleotide for detection of SNP TSC0059166
atgtttaggtata

SEQ ID NO: 242580 - DNA, 13 bp, Artificial Sequence
  Oligonucleotide for detection of SNP TSC0059166
tatacctaaacat

SEQ ID NO: 242581 - DNA, 13 bp, Artificial Sequence
  Oligonucleotide for detection of SNP TSC0059166
atgtttgggtata

SEQ ID NO: 242582 - DNA, 13 bp, Artificial Sequence
  Oligonucleotide for detection of SNP TSC0059166
tatacccaaacat

SEQ ID NO: 242583 - DNA, 13 bp, Artificial Sequence
  Oligonucleotide for detection of SNP TSC0059166
atgttcgggtata

SEQ ID NO: 242584 - DNA, 13 bp, Artificial Sequence
  Oligonucleotide for detection of SNP TSC0059166
tatacccgaacat

SEQ ID NO: 242585 - DNA, 13 bp, Artificial Sequence
  Oligonucleotide for detection of SNP TSC0059166
tatatttggatat

SEQ ID NO: 242586 - DNA, 13 bp, Artificial Sequence
  Oligonucleotide for detection of SNP TSC0059166
atatccaaatata

SEQ ID NO: 242587 - DNA, 13 bp, Artificial Sequence
  Oligonucleotide for detection of SNP TSC0059166
tatattcggatat

SEQ ID NO: 242588 - DNA, 13 bp, Artificial Sequence
  Oligonucleotide for detection of SNP TSC0059166
atatccgaatata

SEQ ID NO: 242589 - DNA, 13 bp, Artificial Sequence
  Oligonucleotide for detection of SNP TSC0059167
aaattgattttgg

SEQ ID NO: 242590 - DNA, 13 bp, Artificial Sequence
  Oligonucleotide for detection of SNP TSC0059167
ccaaaatcaattt

SEQ ID NO: 242591 - DNA, 13 bp, Artificial Sequence
  Oligonucleotide for detection of SNP TSC0059167
aaattggttttgg

SEQ ID NO: 242592 - DNA, 13 bp, Artificial Sequence
  Oligonucleotide for detection of SNP TSC0059167
ccaaaaccaattt

SEQ ID NO: 242593 - DNA, 13 bp, Artificial Sequence
  Oligonucleotide for detection of SNP TSC0059170
tatagtgatatta

SEQ ID NO: 242594 - DNA, 13 bp, Artificial Sequence
  Oligonucleotide for detection of SNP TSC0059170
taatatcactata

SEQ ID NO: 242595 - DNA, 13 bp, Artificial Sequence
  Oligonucleotide for detection of SNP TSC0059170
tatagtaatatta

SEQ ID NO: 242596 - DNA, 13 bp, Artificial Sequence
  Oligonucleotide for detection of SNP TSC0059170
taatattactata

SEQ ID NO: 242597 - DNA, 13 bp, Artificial Sequence
  Oligonucleotide for detection of SNP TSC0059173
ttagaggtatata

SEQ ID NO: 242598 - DNA, 13 bp, Artificial Sequence
  Oligonucleotide for detection of SNP TSC0059173
tatatacctctaa

SEQ ID NO: 242599 - DNA, 13 bp, Artificial Sequence
  Oligonucleotide for detection of SNP TSC0059173
ttagagatatata

SEQ ID NO: 242600 - DNA, 13 bp, Artificial Sequence
  Oligonucleotide for detection of SNP TSC0059173
tatatatctctaa

SEQ ID NO: 242601 - DNA, 13 bp, Artificial Sequence
  Oligonucleotide for detection of SNP TSC0059174
attaaaatatgtt

SEQ ID NO: 242602 - DNA, 13 bp, Artificial Sequence
  Oligonucleotide for detection of SNP TSC0059174
aacatattttaat

SEQ ID NO: 242603 - DNA, 13 bp, Artificial Sequence
  Oligonucleotide for detection of SNP TSC0059174
attaaagtatgtt

SEQ ID NO: 242604 - DNA, 13 bp, Artificial Sequence
  Oligonucleotide for detection of SNP TSC0059174
aacatactttaat

SEQ ID NO: 242605 - DNA, 13 bp, Artificial Sequence
  Oligonucleotide for detection of SNP TSC0059175
taaaaaaataagt

SEQ ID NO: 242606 - DNA, 13 bp, Artificial Sequence
  Oligonucleotide for detection of SNP TSC0059175
acttattttttta

SEQ ID NO: 242607 - DNA, 13 bp, Artificial Sequence
  Oligonucleotide for detection of SNP TSC0059175
taaaaatataagt

SEQ ID NO: 242608 - DNA, 13 bp, Artificial Sequence
  Oligonucleotide for detection of SNP TSC0059175
acttatattttta

SEQ ID NO: 242609 - DNA, 13 bp, Artificial Sequence
  Oligonucleotide for detection of SNP TSC0059184
gagaagaaaaaty

SEQ ID NO: 242610 - DNA, 13 bp, Artificial Sequence
  Oligonucleotide for detection of SNP TSC0059184
ratttttcttctc

SEQ ID NO: 242611 - DNA, 13 bp, Artificial Sequence
  Oligonucleotide for detection of SNP TSC0059184
gagaagtaaaaty

SEQ ID NO: 242612 - DNA, 13 bp, Artificial Sequence
  Oligonucleotide for detection of SNP TSC0059184
rattttacttctc

SEQ ID NO: 242613 - DNA, 13 bp, Artificial Sequence
  Oligonucleotide for detection of SNP TSC0059185
gtggacggtgtat

SEQ ID NO: 242614 - DNA, 13 bp, Artificial Sequence
  Oligonucleotide for detection of SNP TSC0059185
atacaccgtccac

SEQ ID NO: 242615 - DNA, 13 bp, Artificial Sequence
  Oligonucleotide for detection of SNP TSC0059185
atgtattgtttay

SEQ ID NO: 242616 - DNA, 13 bp, Artificial Sequence
  Oligonucleotide for detection of SNP TSC0059185
rtaaacaatacat

SEQ ID NO: 242617 - DNA, 13 bp, Artificial Sequence
  Oligonucleotide for detection of SNP TSC0059185
atgtatcgtttay

SEQ ID NO: 242618 - DNA, 13 bp, Artificial Sequence
  Oligonucleotide for detection of SNP TSC0059185
rtaaacgatacat

SEQ ID NO: 242619 - DNA, 13 bp, Artificial Sequence
  Oligonucleotide for detection of SNP TSC0059186
aagttattttatt

SEQ ID NO: 242620 - DNA, 13 bp, Artificial Sequence
  Oligonucleotide for detection of SNP TSC0059186
aataaaataactt

SEQ ID NO: 242621 - DNA, 13 bp, Artificial Sequence
  Oligonucleotide for detection of SNP TSC0059186
agtagggtaattt

SEQ ID NO: 242622 - DNA, 13 bp, Artificial Sequence
  Oligonucleotide for detection of SNP TSC0059186
aaattaccctact

SEQ ID NO: 242623 - DNA, 13 bp, Artificial Sequence
  Oligonucleotide for detection of SNP TSC0059186
agtaggttaattt

SEQ ID NO: 242624 - DNA, 13 bp, Artificial Sequence
  Oligonucleotide for detection of SNP TSC0059186
aaattaacctact

SEQ ID NO: 242625 - DNA, 13 bp, Artificial Sequence
  Oligonucleotide for detection of SNP TSC0059188
atgtttgtatgta

SEQ ID NO: 242626 - DNA, 13 bp, Artificial Sequence
  Oligonucleotide for detection of SNP TSC0059188
tacatacaaacat

SEQ ID NO: 242627 - DNA, 13 bp, Artificial Sequence
  Oligonucleotide for detection of SNP TSC0059188
atgtttatatgta

SEQ ID NO: 242628 - DNA, 13 bp, Artificial Sequence
  Oligonucleotide for detection of SNP TSC0059188
tacatataaacat

SEQ ID NO: 242629 - DNA, 13 bp, Artificial Sequence
  Oligonucleotide for detection of SNP TSC0059189
ataataagttgtt

SEQ ID NO: 242630 - DNA, 13 bp, Artificial Sequence
  Oligonucleotide for detection of SNP TSC0059189
aacaacttattat

SEQ ID NO: 242631 - DNA, 13 bp, Artificial Sequence
  Oligonucleotide for detection of SNP TSC0059189
ataataggttgtt

SEQ ID NO: 242632 - DNA, 13 bp, Artificial Sequence
  Oligonucleotide for detection of SNP TSC0059189
aacaacctattat

SEQ ID NO: 242633 - DNA, 13 bp, Artificial Sequence
  Oligonucleotide for detection of SNP TSC0059191
agtatatgtaggy

SEQ ID NO: 242634 - DNA, 13 bp, Artificial Sequence
  Oligonucleotide for detection of SNP TSC0059191
rcctacatatact

SEQ ID NO: 242635 - DNA, 13 bp, Artificial Sequence
  Oligonucleotide for detection of SNP TSC0059191
agtatacgtaggy

SEQ ID NO: 242636 - DNA, 13 bp, Artificial Sequence
  Oligonucleotide for detection of SNP TSC0059191
rcctacgtatact

SEQ ID NO: 242637 - DNA, 13 bp, Artificial Sequence
  Oligonucleotide for detection of SNP TSC0059191
gtttatgtgtgtt

SEQ ID NO: 242638 - DNA, 13 bp, Artificial Sequence
  Oligonucleotide for detection of SNP TSC0059191
aacacacataaac

SEQ ID NO: 242639 - DNA, 13 bp, Artificial Sequence
  Oligonucleotide for detection of SNP TSC0059191
gtttatatgtgtt

SEQ ID NO: 242640 - DNA, 13 bp, Artificial Sequence
  Oligonucleotide for detection of SNP TSC0059191
aacacatataaac

SEQ ID NO: 242641 - DNA, 13 bp, Artificial Sequence
  Oligonucleotide for detection of SNP TSC0059191
gtttacgtgtgtt

SEQ ID NO: 242642 - DNA, 13 bp, Artificial Sequence
  Oligonucleotide for detection of SNP TSC0059191
aacacacgtaaac

SEQ ID NO: 242643 - DNA, 13 bp, Artificial Sequence
  Oligonucleotide for detection of SNP TSC0059193
aaattaaggtagt

SEQ ID NO: 242644 - DNA, 13 bp, Artificial Sequence
  Oligonucleotide for detection of SNP TSC0059193
actaccttaattt

SEQ ID NO: 242645 - DNA, 13 bp, Artificial Sequence
  Oligonucleotide for detection of SNP TSC0059193
aaattagggtagt

SEQ ID NO: 242646 - DNA, 13 bp, Artificial Sequence
  Oligonucleotide for detection of SNP TSC0059193
actaccctaattt

SEQ ID NO: 242647 - DNA, 13 bp, Artificial Sequence
  Oligonucleotide for detection of SNP TSC0059194
tattagattttgy

SEQ ID NO: 242648 - DNA, 13 bp, Artificial Sequence
  Oligonucleotide for detection of SNP TSC0059194
rcaaaatctaata

SEQ ID NO: 242649 - DNA, 13 bp, Artificial Sequence
  Oligonucleotide for detection of SNP TSC0059197
taagttgtaaatt

SEQ ID NO: 242650 - DNA, 13 bp, Artificial Sequence
  Oligonucleotide for detection of SNP TSC0059197
aatttacaactta

SEQ ID NO: 242651 - DNA, 13 bp, Artificial Sequence
  Oligonucleotide for detection of SNP TSC0059197
taagttataaatt

SEQ ID NO: 242652 - DNA, 13 bp, Artificial Sequence
  Oligonucleotide for detection of SNP TSC0059197
aatttataactta

SEQ ID NO: 242653 - DNA, 13 bp, Artificial Sequence
  Oligonucleotide for detection of SNP TSC0059200
aggagggaaataa

SEQ ID NO: 242654 - DNA, 13 bp, Artificial Sequence
  Oligonucleotide for detection of SNP TSC0059200
ttatttccctcct

SEQ ID NO: 242655 - DNA, 13 bp, Artificial Sequence
  Oligonucleotide for detection of SNP TSC0059200
aggaggaaaataa

SEQ ID NO: 242656 - DNA, 13 bp, Artificial Sequence
  Oligonucleotide for detection of SNP TSC0059200
ttattttcctcct

SEQ ID NO: 242657 - DNA, 13 bp, Artificial Sequence
  Oligonucleotide for detection of SNP TSC0059205
gttatggtgtata

SEQ ID NO: 242658 - DNA, 13 bp, Artificial Sequence
  Oligonucleotide for detection of SNP TSC0059205
tatacaccataac

SEQ ID NO: 242659 - DNA, 13 bp, Artificial Sequence
  Oligonucleotide for detection of SNP TSC0059205
gttatgatgtata

SEQ ID NO: 242660 - DNA, 13 bp, Artificial Sequence
  Oligonucleotide for detection of SNP TSC0059205
tatacatcataac

SEQ ID NO: 242661 - DNA, 13 bp, Artificial Sequence
  Oligonucleotide for detection of SNP TSC0059206
tttatagaataaa

SEQ ID NO: 242662 - DNA, 13 bp, Artificial Sequence
  Oligonucleotide for detection of SNP TSC0059206
tttattctataaa

SEQ ID NO: 242663 - DNA, 13 bp, Artificial Sequence
  Oligonucleotide for detection of SNP TSC0059206
tttgttttgtgaa

SEQ ID NO: 242664 - DNA, 13 bp, Artificial Sequence
  Oligonucleotide for detection of SNP TSC0059206
ttcacaaaacaaa

SEQ ID NO: 242665 - DNA, 13 bp, Artificial Sequence
  Oligonucleotide for detection of SNP TSC0059210
tgtatgataatay

SEQ ID NO: 242666 - DNA, 13 bp, Artificial Sequence
  Oligonucleotide for detection of SNP TSC0059210
rtattatcataca

SEQ ID NO: 242667 - DNA, 13 bp, Artificial Sequence
  Oligonucleotide for detection of SNP TSC0059210
tgtatggtaatay

SEQ ID NO: 242668 - DNA, 13 bp, Artificial Sequence
  Oligonucleotide for detection of SNP TSC0059210
rtattaccataca

SEQ ID NO: 242669 - DNA, 13 bp, Artificial Sequence
  Oligonucleotide for detection of SNP TSC0059213
agggatagataga

SEQ ID NO: 242670 - DNA, 13 bp, Artificial Sequence
  Oligonucleotide for detection of SNP TSC0059213
tctatctatccct

SEQ ID NO: 242671 - DNA, 13 bp, Artificial Sequence
  Oligonucleotide for detection of SNP TSC0059213
agggatggataga

SEQ ID NO: 242672 - DNA, 13 bp, Artificial Sequence
  Oligonucleotide for detection of SNP TSC0059213
tctatccatccct

SEQ ID NO: 242673 - DNA, 13 bp, Artificial Sequence
  Oligonucleotide for detection of SNP TSC0059214
tagaaattgaaat

SEQ ID NO: 242674 - DNA, 13 bp, Artificial Sequence
  Oligonucleotide for detection of SNP TSC0059214
atttcaatttcta

SEQ ID NO: 242675 - DNA, 13 bp, Artificial Sequence
  Oligonucleotide for detection of SNP TSC0059214
tagaaaatgaaat

SEQ ID NO: 242676 - DNA, 13 bp, Artificial Sequence
  Oligonucleotide for detection of SNP TSC0059214
atttcattttcta

SEQ ID NO: 242677 - DNA, 13 bp, Artificial Sequence
  Oligonucleotide for detection of SNP TSC0059221
atatttgggtgat

SEQ ID NO: 242678 - DNA, 13 bp, Artificial Sequence
  Oligonucleotide for detection of SNP TSC0059221
atcacccaaatat

SEQ ID NO: 242679 - DNA, 13 bp, Artificial Sequence
  Oligonucleotide for detection of SNP TSC0059221
atattcgggtgat

SEQ ID NO: 242680 - DNA, 13 bp, Artificial Sequence
  Oligonucleotide for detection of SNP TSC0059221
atcacccgaatat

SEQ ID NO: 242681 - DNA, 13 bp, Artificial Sequence
  Oligonucleotide for detection of SNP TSC0059221
attattagagtgt

SEQ ID NO: 242682 - DNA, 13 bp, Artificial Sequence
  Oligonucleotide for detection of SNP TSC0059221
acactctaataat

SEQ ID NO: 242683 - DNA, 13 bp, Artificial Sequence
  Oligonucleotide for detection of SNP TSC0059221
attatttgagtgt

SEQ ID NO: 242684 - DNA, 13 bp, Artificial Sequence
  Oligonucleotide for detection of SNP TSC0059221
acactcaaataat

SEQ ID NO: 242685 - DNA, 13 bp, Artificial Sequence
  Oligonucleotide for detection of SNP TSC0059221
attattcgagtgt

SEQ ID NO: 242686 - DNA, 13 bp, Artificial Sequence
  Oligonucleotide for detection of SNP TSC0059221
acactcgaataat

SEQ ID NO: 242687 - DNA, 13 bp, Artificial Sequence
  Oligonucleotide for detection of SNP TSC0059224
gttttggttgtag

SEQ ID NO: 242688 - DNA, 13 bp, Artificial Sequence
  Oligonucleotide for detection of SNP TSC0059224
ctacaaccaaaac

SEQ ID NO: 242689 - DNA, 13 bp, Artificial Sequence
  Oligonucleotide for detection of SNP TSC0059224
gttttgattgtag

SEQ ID NO: 242690 - DNA, 13 bp, Artificial Sequence
  Oligonucleotide for detection of SNP TSC0059224
ctacaatcaaaac

SEQ ID NO: 242691 - DNA, 13 bp, Artificial Sequence
  Oligonucleotide for detection of SNP TSC0059225
tatagtttattgt

SEQ ID NO: 242692 - DNA, 13 bp, Artificial Sequence
  Oligonucleotide for detection of SNP TSC0059225
acaataaactata

SEQ ID NO: 242693 - DNA, 13 bp, Artificial Sequence
  Oligonucleotide for detection of SNP TSC0059225
tatagtgtattgt

SEQ ID NO: 242694 - DNA, 13 bp, Artificial Sequence
  Oligonucleotide for detection of SNP TSC0059225
acaatacactata

SEQ ID NO: 242695 - DNA, 13 bp, Artificial Sequence
  Oligonucleotide for detection of SNP TSC0059225
tatagtttatcgt

SEQ ID NO: 242696 - DNA, 13 bp, Artificial Sequence
  Oligonucleotide for detection of SNP TSC0059225
acgataaactata

SEQ ID NO: 242697 - DNA, 13 bp, Artificial Sequence
  Oligonucleotide for detection of SNP TSC0059225
tatagtgtatcgt

SEQ ID NO: 242698 - DNA, 13 bp, Artificial Sequence
  Oligonucleotide for detection of SNP TSC0059225
acgatacactata

SEQ ID NO: 242699 - DNA, 13 bp, Artificial Sequence
  Oligonucleotide for detection of SNP TSC0059225
atggtaaattata

SEQ ID NO: 242700 - DNA, 13 bp, Artificial Sequence
  Oligonucleotide for detection of SNP TSC0059225
tataatttaccat

SEQ ID NO: 242701 - DNA, 13 bp, Artificial Sequence
  Oligonucleotide for detection of SNP TSC0059225
atggtatattata

SEQ ID NO: 242702 - DNA, 13 bp, Artificial Sequence
  Oligonucleotide for detection of SNP TSC0059225
tataatataccat

SEQ ID NO: 242703 - DNA, 13 bp, Artificial Sequence
  Oligonucleotide for detection of SNP TSC0059225
acggtaaattata

SEQ ID NO: 242704 - DNA, 13 bp, Artificial Sequence
  Oligonucleotide for detection of SNP TSC0059225
tataatttaccgt

SEQ ID NO: 242705 - DNA, 13 bp, Artificial Sequence
  Oligonucleotide for detection of SNP TSC0059225
acggtatattata

SEQ ID NO: 242706 - DNA, 13 bp, Artificial Sequence
  Oligonucleotide for detection of SNP TSC0059225
tataatataccgt

SEQ ID NO: 242707 - DNA, 13 bp, Artificial Sequence
  Oligonucleotide for detection of SNP TSC0006892
aatgtatgtatay

SEQ ID NO: 242708 - DNA, 13 bp, Artificial Sequence
  Oligonucleotide for detection of SNP TSC0006892
rtatacatacatt

SEQ ID NO: 242709 - DNA, 13 bp, Artificial Sequence
  Oligonucleotide for detection of SNP TSC0006892
aatgtacgtatay

SEQ ID NO: 242710 - DNA, 13 bp, Artificial Sequence
  Oligonucleotide for detection of SNP TSC0006892
rtatacgtacatt

SEQ ID NO: 242711 - DNA, 13 bp, Artificial Sequence
  Oligonucleotide for detection of SNP TSC0006892
gtgtgtgtgtatt

SEQ ID NO: 242712 - DNA, 13 bp, Artificial Sequence
  Oligonucleotide for detection of SNP TSC0006892
aatacacacacac

SEQ ID NO: 242713 - DNA, 13 bp, Artificial Sequence
  Oligonucleotide for detection of SNP TSC0006892
gtgtgtatgtatt

SEQ ID NO: 242714 - DNA, 13 bp, Artificial Sequence
  Oligonucleotide for detection of SNP TSC0006892
aatacatacacac

SEQ ID NO: 242715 - DNA, 13 bp, Artificial Sequence
  Oligonucleotide for detection of SNP TSC0006892
gtgtgcgtgtatt

SEQ ID NO: 242716 - DNA, 13 bp, Artificial Sequence
  Oligonucleotide for detection of SNP TSC0006892
aatacacgcacac

SEQ ID NO: 242717 - DNA, 13 bp, Artificial Sequence
  Oligonucleotide for detection of SNP TSC0009053
aagaaatgatggt

SEQ ID NO: 242718 - DNA, 13 bp, Artificial Sequence
  Oligonucleotide for detection of SNP TSC0009053
accatcatttctt

SEQ ID NO: 242719 - DNA, 13 bp, Artificial Sequence
  Oligonucleotide for detection of SNP TSC0009053
aagaaaggatggt

SEQ ID NO: 242720 - DNA, 13 bp, Artificial Sequence
  Oligonucleotide for detection of SNP TSC0009053
accatcctttctt

SEQ ID NO: 242721 - DNA, 13 bp, Artificial Sequence
  Oligonucleotide for detection of SNP TSC0009053
aagaaacgatggt

SEQ ID NO: 242722 - DNA, 13 bp, Artificial Sequence
  Oligonucleotide for detection of SNP TSC0009053
accatcgtttctt

SEQ ID NO: 242723 - DNA, 13 bp, Artificial Sequence
  Oligonucleotide for detection of SNP TSC0009053
aagaaaggacggt

SEQ ID NO: 242724 - DNA, 13 bp, Artificial Sequence
  Oligonucleotide for detection of SNP TSC0009053
accgtcctttctt

SEQ ID NO: 242725 - DNA, 13 bp, Artificial Sequence
  Oligonucleotide for detection of SNP TSC0009053
aagaaatgacggt

SEQ ID NO: 242726 - DNA, 13 bp, Artificial Sequence
  Oligonucleotide for detection of SNP TSC0009053
accgtcatttctt

SEQ ID NO: 242727 - DNA, 13 bp, Artificial Sequence
  Oligonucleotide for detection of SNP TSC0009053
aagaaacgacggt

SEQ ID NO: 242728 - DNA, 13 bp, Artificial Sequence
  Oligonucleotide for detection of SNP TSC0009053
accgtcgtttctt

SEQ ID NO: 242729 - DNA, 13 bp, Artificial Sequence
  Oligonucleotide for detection of SNP TSC0009053
atcgttgtttttt

SEQ ID NO: 242730 - DNA, 13 bp, Artificial Sequence
  Oligonucleotide for detection of SNP TSC0009053
aaaaaacaacgat

SEQ ID NO: 242731 - DNA, 13 bp, Artificial Sequence
  Oligonucleotide for detection of SNP TSC0009053
atcgttttttttt

SEQ ID NO: 242732 - DNA, 13 bp, Artificial Sequence
  Oligonucleotide for detection of SNP TSC0009053
aaaaaaaaacgat

SEQ ID NO: 242733 - DNA, 13 bp, Artificial Sequence
  Oligonucleotide for detection of SNP TSC0009053
atcgtcgtttttt

SEQ ID NO: 242734 - DNA, 13 bp, Artificial Sequence
  Oligonucleotide for detection of SNP TSC0009053
aaaaaacgacgat

SEQ ID NO: 242735 - DNA, 13 bp, Artificial Sequence
  Oligonucleotide for detection of SNP TSC0059226
gaggtatttttgg

SEQ ID NO: 242736 - DNA, 13 bp, Artificial Sequence
  Oligonucleotide for detection of SNP TSC0059226
ccaaaaatacctc

SEQ ID NO: 242737 - DNA, 13 bp, Artificial Sequence
  Oligonucleotide for detection of SNP TSC0059226
ttaggagtgttty

SEQ ID NO: 242738 - DNA, 13 bp, Artificial Sequence
  Oligonucleotide for detection of SNP TSC0059226
raaacactcctaa

SEQ ID NO: 242739 - DNA, 13 bp, Artificial Sequence
  Oligonucleotide for detection of SNP TSC0059226
ttaggattgttty

SEQ ID NO: 242740 - DNA, 13 bp, Artificial Sequence
  Oligonucleotide for detection of SNP TSC0059226
raaacaatcctaa

SEQ ID NO: 242741 - DNA, 13 bp, Artificial Sequence
  Oligonucleotide for detection of SNP TSC0059227
taaagaaatataa

SEQ ID NO: 242742 - DNA, 13 bp, Artificial Sequence
  Oligonucleotide for detection of SNP TSC0059227
ttatatttcttta

SEQ ID NO: 242743 - DNA, 13 bp, Artificial Sequence
  Oligonucleotide for detection of SNP TSC0059227
taaagatatataa

SEQ ID NO: 242744 - DNA, 13 bp, Artificial Sequence
  Oligonucleotide for detection of SNP TSC0059227
ttatatatcttta

SEQ ID NO: 242745 - DNA, 13 bp, Artificial Sequence
  Oligonucleotide for detection of SNP TSC0059228
tttgttgagttta

SEQ ID NO: 242746 - DNA, 13 bp, Artificial Sequence
  Oligonucleotide for detection of SNP TSC0059228
taaactcaacaaa

SEQ ID NO: 242747 - DNA, 13 bp, Artificial Sequence
  Oligonucleotide for detection of SNP TSC0059228
tttgttaagttta

SEQ ID NO: 242748 - DNA, 13 bp, Artificial Sequence
  Oligonucleotide for detection of SNP TSC0059228
taaacttaacaaa

SEQ ID NO: 242749 - DNA, 13 bp, Artificial Sequence
  Oligonucleotide for detection of SNP TSC0059229
gataatatgattt

SEQ ID NO: 242750 - DNA, 13 bp, Artificial Sequence
  Oligonucleotide for detection of SNP TSC0059229
aaatcatattatc

SEQ ID NO: 242751 - DNA, 13 bp, Artificial Sequence
  Oligonucleotide for detection of SNP TSC0059229
gataatgtgattt

SEQ ID NO: 242752 - DNA, 13 bp, Artificial Sequence
  Oligonucleotide for detection of SNP TSC0059229
aaatcacattatc

SEQ ID NO: 242753 - DNA, 13 bp, Artificial Sequence
  Oligonucleotide for detection of SNP TSC0059229
gataatacgattt

SEQ ID NO: 242754 - DNA, 13 bp, Artificial Sequence
  Oligonucleotide for detection of SNP TSC0059229
aaatcgtattatc

SEQ ID NO: 242755 - DNA, 13 bp, Artificial Sequence
  Oligonucleotide for detection of SNP TSC0059229
gataacgtgattt

SEQ ID NO: 242756 - DNA, 13 bp, Artificial Sequence
  Oligonucleotide for detection of SNP TSC0059229
aaatcacgttatc

SEQ ID NO: 242757 - DNA, 13 bp, Artificial Sequence
  Oligonucleotide for detection of SNP TSC0059229
gataatgcgattt

SEQ ID NO: 242758 - DNA, 13 bp, Artificial Sequence
  Oligonucleotide for detection of SNP TSC0059229
aaatcgcattatc

SEQ ID NO: 242759 - DNA, 13 bp, Artificial Sequence
  Oligonucleotide for detection of SNP TSC0059229
gataacgcgattt

SEQ ID NO: 242760 - DNA, 13 bp, Artificial Sequence
  Oligonucleotide for detection of SNP TSC0059229
aaatcgcgttatc

SEQ ID NO: 242761 - DNA, 13 bp, Artificial Sequence
  Oligonucleotide for detection of SNP TSC0059229
aaattgtgttaty

SEQ ID NO: 242762 - DNA, 13 bp, Artificial Sequence
  Oligonucleotide for detection of SNP TSC0059229
rataacacaattt

SEQ ID NO: 242763 - DNA, 13 bp, Artificial Sequence
  Oligonucleotide for detection of SNP TSC0059229
aaatcgtgttaty

SEQ ID NO: 242764 - DNA, 13 bp, Artificial Sequence
  Oligonucleotide for detection of SNP TSC0059229
rataacacgattt

SEQ ID NO: 242765 - DNA, 13 bp, Artificial Sequence
  Oligonucleotide for detection of SNP TSC0059229
aaattgcgttaty

SEQ ID NO: 242766 - DNA, 13 bp, Artificial Sequence
  Oligonucleotide for detection of SNP TSC0059229
rataacgcaattt

SEQ ID NO: 242767 - DNA, 13 bp, Artificial Sequence
  Oligonucleotide for detection of SNP TSC0059229
aaatcgcgttaty

SEQ ID NO: 242768 - DNA, 13 bp, Artificial Sequence
  Oligonucleotide for detection of SNP TSC0059229
rataacgcgattt

SEQ ID NO: 242769 - DNA, 13 bp, Artificial Sequence
  Oligonucleotide for detection of SNP TSC0059231
gtttaaattaata

SEQ ID NO: 242770 - DNA, 13 bp, Artificial Sequence
  Oligonucleotide for detection of SNP TSC0059231
tattaatttaaac

SEQ ID NO: 242771 - DNA, 13 bp, Artificial Sequence
  Oligonucleotide for detection of SNP TSC0059232
tgggtaaaagaty

SEQ ID NO: 242772 - DNA, 13 bp, Artificial Sequence
  Oligonucleotide for detection of SNP TSC0059232
ratcttttaccca

SEQ ID NO: 242773 - DNA, 13 bp, Artificial Sequence
  Oligonucleotide for detection of SNP TSC0059232
tgggtataagaty

SEQ ID NO: 242774 - DNA, 13 bp, Artificial Sequence
  Oligonucleotide for detection of SNP TSC0059232
ratcttataccca

SEQ ID NO: 242775 - DNA, 13 bp, Artificial Sequence
  Oligonucleotide for detection of SNP TSC0059232
ggttttttgttta

SEQ ID NO: 242776 - DNA, 13 bp, Artificial Sequence
  Oligonucleotide for detection of SNP TSC0059232
taaacaaaaaacc

SEQ ID NO: 242777 - DNA, 13 bp, Artificial Sequence
  Oligonucleotide for detection of SNP TSC0059233
aagattagataty

SEQ ID NO: 242778 - DNA, 13 bp, Artificial Sequence
  Oligonucleotide for detection of SNP TSC0059233
ratatctaatctt

SEQ ID NO: 242779 - DNA, 13 bp, Artificial Sequence
  Oligonucleotide for detection of SNP TSC0059233
aagatttgataty

SEQ ID NO: 242780 - DNA, 13 bp, Artificial Sequence
  Oligonucleotide for detection of SNP TSC0059233
ratatcaaatctt

SEQ ID NO: 242781 - DNA, 13 bp, Artificial Sequence
  Oligonucleotide for detection of SNP TSC0059233
gatatttggtttt

SEQ ID NO: 242782 - DNA, 13 bp, Artificial Sequence
  Oligonucleotide for detection of SNP TSC0059233
aaaaccaaatatc

SEQ ID NO: 242783 - DNA, 13 bp, Artificial Sequence
  Oligonucleotide for detection of SNP TSC0059233
gatattaggtttt

SEQ ID NO: 242784 - DNA, 13 bp, Artificial Sequence
  Oligonucleotide for detection of SNP TSC0059233
aaaacctaatatc

SEQ ID NO: 242785 - DNA, 13 bp, Artificial Sequence
  Oligonucleotide for detection of SNP TSC0059243
ggaatgaagtggy

SEQ ID NO: 242786 - DNA, 13 bp, Artificial Sequence
  Oligonucleotide for detection of SNP TSC0059243
rccacttcattcc

SEQ ID NO: 242787 - DNA, 13 bp, Artificial Sequence
  Oligonucleotide for detection of SNP TSC0059243
ggaatgtagtggy

SEQ ID NO: 242788 - DNA, 13 bp, Artificial Sequence
  Oligonucleotide for detection of SNP TSC0059243
rccactacattcc

SEQ ID NO: 242789 - DNA, 13 bp, Artificial Sequence
  Oligonucleotide for detection of SNP TSC0059244
agttaggtgagag

SEQ ID NO: 242790 - DNA, 13 bp, Artificial Sequence
  Oligonucleotide for detection of SNP TSC0059244
ctctcacctaact

SEQ ID NO: 242791 - DNA, 13 bp, Artificial Sequence
  Oligonucleotide for detection of SNP TSC0059244
agttagatgagag

SEQ ID NO: 242792 - DNA, 13 bp, Artificial Sequence
  Oligonucleotide for detection of SNP TSC0059244
ctctcatctaact

SEQ ID NO: 242793 - DNA, 13 bp, Artificial Sequence
  Oligonucleotide for detection of SNP TSC0059245
gatttattattag

SEQ ID NO: 242794 - DNA, 13 bp, Artificial Sequence
  Oligonucleotide for detection of SNP TSC0059245
ctaataataaatc

SEQ ID NO: 242795 - DNA, 13 bp, Artificial Sequence
  Oligonucleotide for detection of SNP TSC0059245
gatttagtattag

SEQ ID NO: 242796 - DNA, 13 bp, Artificial Sequence
  Oligonucleotide for detection of SNP TSC0059245
ctaatactaaatc

SEQ ID NO: 242797 - DNA, 13 bp, Artificial Sequence
  Oligonucleotide for detection of SNP TSC0059245
ttgatgatgaaty

SEQ ID NO: 242798 - DNA, 13 bp, Artificial Sequence
  Oligonucleotide for detection of SNP TSC0059245
rattcatcatcaa

SEQ ID NO: 242799 - DNA, 13 bp, Artificial Sequence
  Oligonucleotide for detection of SNP TSC0059245
ttgatgttgaaty

SEQ ID NO: 242800 - DNA, 13 bp, Artificial Sequence
  Oligonucleotide for detection of SNP TSC0059245
rattcaacatcaa

SEQ ID NO: 242801 - DNA, 13 bp, Artificial Sequence
  Oligonucleotide for detection of SNP TSC0059252
ttatgtgggattg

SEQ ID NO: 242802 - DNA, 13 bp, Artificial Sequence
  Oligonucleotide for detection of SNP TSC0059252
caatcccacataa

SEQ ID NO: 242803 - DNA, 13 bp, Artificial Sequence
  Oligonucleotide for detection of SNP TSC0059252
ttatgtaggattg

SEQ ID NO: 242804 - DNA, 13 bp, Artificial Sequence
  Oligonucleotide for detection of SNP TSC0059252
caatcctacataa

SEQ ID NO: 242805 - DNA, 13 bp, Artificial Sequence
  Oligonucleotide for detection of SNP TSC0059252
ttacgtgggattg

SEQ ID NO: 242806 - DNA, 13 bp, Artificial Sequence
  Oligonucleotide for detection of SNP TSC0059252
caatcccacgtaa

SEQ ID NO: 242807 - DNA, 13 bp, Artificial Sequence
  Oligonucleotide for detection of SNP TSC0059252
ttacgtaggattg

SEQ ID NO: 242808 - DNA, 13 bp, Artificial Sequence
  Oligonucleotide for detection of SNP TSC0059252
caatcctacgtaa

SEQ ID NO: 242809 - DNA, 13 bp, Artificial Sequence
  Oligonucleotide for detection of SNP TSC0059258
atatgaagtatty

SEQ ID NO: 242810 - DNA, 13 bp, Artificial Sequence
  Oligonucleotide for detection of SNP TSC0059258
raatacttcatat

SEQ ID NO: 242811 - DNA, 13 bp, Artificial Sequence
  Oligonucleotide for detection of SNP TSC0059258
ggatgttttatgt

SEQ ID NO: 242812 - DNA, 13 bp, Artificial Sequence
  Oligonucleotide for detection of SNP TSC0059258
acataaaacatcc

SEQ ID NO: 242813 - DNA, 13 bp, Artificial Sequence
  Oligonucleotide for detection of SNP TSC0059260
gtataagtagggy

SEQ ID NO: 242814 - DNA, 13 bp, Artificial Sequence
  Oligonucleotide for detection of SNP TSC0059260
rccctacttatac

SEQ ID NO: 242815 - DNA, 13 bp, Artificial Sequence
  Oligonucleotide for detection of SNP TSC0059260
gtataaatagggy

SEQ ID NO: 242816 - DNA, 13 bp, Artificial Sequence
  Oligonucleotide for detection of SNP TSC0059260
rccctatttatac

SEQ ID NO: 242817 - DNA, 13 bp, Artificial Sequence
  Oligonucleotide for detection of SNP TSC0059262
aatagatgtttga

SEQ ID NO: 242818 - DNA, 13 bp, Artificial Sequence
  Oligonucleotide for detection of SNP TSC0059262
tcaaacatctatt

SEQ ID NO: 242819 - DNA, 13 bp, Artificial Sequence
  Oligonucleotide for detection of SNP TSC0059262
aatagacgtttga

SEQ ID NO: 242820 - DNA, 13 bp, Artificial Sequence
  Oligonucleotide for detection of SNP TSC0059262
tcaaacgtctatt

SEQ ID NO: 242821 - DNA, 13 bp, Artificial Sequence
  Oligonucleotide for detection of SNP TSC0059262
ttaaatgtttatt

SEQ ID NO: 242822 - DNA, 13 bp, Artificial Sequence
  Oligonucleotide for detection of SNP TSC0059262
aataaacatttaa

SEQ ID NO: 242823 - DNA, 13 bp, Artificial Sequence
  Oligonucleotide for detection of SNP TSC0059262
ttaaatatttatt

SEQ ID NO: 242824 - DNA, 13 bp, Artificial Sequence
  Oligonucleotide for detection of SNP TSC0059262
aataaatatttaa

SEQ ID NO: 242825 - DNA, 13 bp, Artificial Sequence
  Oligonucleotide for detection of SNP TSC0059263
tttattagtagaa

SEQ ID NO: 242826 - DNA, 13 bp, Artificial Sequence
  Oligonucleotide for detection of SNP TSC0059263
ttctactaataaa

SEQ ID NO: 242827 - DNA, 13 bp, Artificial Sequence
  Oligonucleotide for detection of SNP TSC0059263
tttattggtagaa

SEQ ID NO: 242828 - DNA, 13 bp, Artificial Sequence
  Oligonucleotide for detection of SNP TSC0059263
ttctaccaataaa

SEQ ID NO: 242829 - DNA, 13 bp, Artificial Sequence
  Oligonucleotide for detection of SNP TSC0059264
tgttgaaaaggtt

SEQ ID NO: 242830 - DNA, 13 bp, Artificial Sequence
  Oligonucleotide for detection of SNP TSC0059264
aaccttttcaaca

SEQ ID NO: 242831 - DNA, 13 bp, Artificial Sequence
  Oligonucleotide for detection of SNP TSC0059264
tgttgataaggtt

SEQ ID NO: 242832 - DNA, 13 bp, Artificial Sequence
  Oligonucleotide for detection of SNP TSC0059264
aaccttatcaaca

SEQ ID NO: 242833 - DNA, 13 bp, Artificial Sequence
  Oligonucleotide for detection of SNP TSC0059267
gtgtgatatatgt

SEQ ID NO: 242834 - DNA, 13 bp, Artificial Sequence
  Oligonucleotide for detection of SNP TSC0059267
acatatatcacac

SEQ ID NO: 242835 - DNA, 13 bp, Artificial Sequence
  Oligonucleotide for detection of SNP TSC0059267
gtgtgagatatgt

SEQ ID NO: 242836 - DNA, 13 bp, Artificial Sequence
  Oligonucleotide for detection of SNP TSC0059267
acatatctcacac

SEQ ID NO: 242837 - DNA, 13 bp, Artificial Sequence
  Oligonucleotide for detection of SNP TSC0059267
atatattttatay

SEQ ID NO: 242838 - DNA, 13 bp, Artificial Sequence
  Oligonucleotide for detection of SNP TSC0059267
rtataaaatatat

SEQ ID NO: 242839 - DNA, 13 bp, Artificial Sequence
  Oligonucleotide for detection of SNP TSC0059268
tttgtatgaaatg

SEQ ID NO: 242840 - DNA, 13 bp, Artificial Sequence
  Oligonucleotide for detection of SNP TSC0059268
catttcatacaaa

SEQ ID NO: 242841 - DNA, 13 bp, Artificial Sequence
  Oligonucleotide for detection of SNP TSC0059268
tttgtacgaaatg

SEQ ID NO: 242842 - DNA, 13 bp, Artificial Sequence
  Oligonucleotide for detection of SNP TSC0059268
catttcgtacaaa

SEQ ID NO: 242843 - DNA, 13 bp, Artificial Sequence
  Oligonucleotide for detection of SNP TSC0059268
tattttgtataag

SEQ ID NO: 242844 - DNA, 13 bp, Artificial Sequence
  Oligonucleotide for detection of SNP TSC0059268
cttatacaaaata

SEQ ID NO: 242845 - DNA, 13 bp, Artificial Sequence
  Oligonucleotide for detection of SNP TSC0059268
tattttatataag

SEQ ID NO: 242846 - DNA, 13 bp, Artificial Sequence
  Oligonucleotide for detection of SNP TSC0059268
cttatataaaata

SEQ ID NO: 242847 - DNA, 13 bp, Artificial Sequence
  Oligonucleotide for detection of SNP TSC0059268
tatttcgtataag

SEQ ID NO: 242848 - DNA, 13 bp, Artificial Sequence
  Oligonucleotide for detection of SNP TSC0059268
cttatacgaaata

SEQ ID NO: 242849 - DNA, 13 bp, Artificial Sequence
  Oligonucleotide for detection of SNP TSC0059272
taagagaataaat

SEQ ID NO: 242850 - DNA, 13 bp, Artificial Sequence
  Oligonucleotide for detection of SNP TSC0059272
atttattctctta

SEQ ID NO: 242851 - DNA, 13 bp, Artificial Sequence
  Oligonucleotide for detection of SNP TSC0059272
taagagtataaat

SEQ ID NO: 242852 - DNA, 13 bp, Artificial Sequence
  Oligonucleotide for detection of SNP TSC0059272
atttatactctta

SEQ ID NO: 242853 - DNA, 13 bp, Artificial Sequence
  Oligonucleotide for detection of SNP TSC0059273
atgaaatgttttt

SEQ ID NO: 242854 - DNA, 13 bp, Artificial Sequence
  Oligonucleotide for detection of SNP TSC0059273
aaaaacatttcat

SEQ ID NO: 242855 - DNA, 13 bp, Artificial Sequence
  Oligonucleotide for detection of SNP TSC0059273
atgaaacgttttt

SEQ ID NO: 242856 - DNA, 13 bp, Artificial Sequence
  Oligonucleotide for detection of SNP TSC0059273
aaaaacgtttcat

SEQ ID NO: 242857 - DNA, 13 bp, Artificial Sequence
  Oligonucleotide for detection of SNP TSC0059273
aggggtgttttat

SEQ ID NO: 242858 - DNA, 13 bp, Artificial Sequence
  Oligonucleotide for detection of SNP TSC0059273
ataaaacacccct

SEQ ID NO: 242859 - DNA, 13 bp, Artificial Sequence
  Oligonucleotide for detection of SNP TSC0059273
aggggtattttat

SEQ ID NO: 242860 - DNA, 13 bp, Artificial Sequence
  Oligonucleotide for detection of SNP TSC0059273
ataaaatacccct

SEQ ID NO: 242861 - DNA, 13 bp, Artificial Sequence
  Oligonucleotide for detection of SNP TSC0059273
aggggcgttttat

SEQ ID NO: 242862 - DNA, 13 bp, Artificial Sequence
  Oligonucleotide for detection of SNP TSC0059273
ataaaacgcccct

SEQ ID NO: 242863 - DNA, 13 bp, Artificial Sequence
  Oligonucleotide for detection of SNP TSC0059274
gatattgaagatt

SEQ ID NO: 242864 - DNA, 13 bp, Artificial Sequence
  Oligonucleotide for detection of SNP TSC0059274
aatcttcaatatc

SEQ ID NO: 242865 - DNA, 13 bp, Artificial Sequence
  Oligonucleotide for detection of SNP TSC0059274
gatattaaagatt

SEQ ID NO: 242866 - DNA, 13 bp, Artificial Sequence
  Oligonucleotide for detection of SNP TSC0059274
aatctttaatatc

SEQ ID NO: 242867 - DNA, 13 bp, Artificial Sequence
  Oligonucleotide for detection of SNP TSC0059275
tattatggaatay

SEQ ID NO: 242868 - DNA, 13 bp, Artificial Sequence
  Oligonucleotide for detection of SNP TSC0059275
rtattccataata

SEQ ID NO: 242869 - DNA, 13 bp, Artificial Sequence
  Oligonucleotide for detection of SNP TSC0059275
tattatagaatay

SEQ ID NO: 242870 - DNA, 13 bp, Artificial Sequence
  Oligonucleotide for detection of SNP TSC0059275
rtattctataata

SEQ ID NO: 242871 - DNA, 13 bp, Artificial Sequence
  Oligonucleotide for detection of SNP TSC0059278
attatatgtgtga

SEQ ID NO: 242872 - DNA, 13 bp, Artificial Sequence
  Oligonucleotide for detection of SNP TSC0059278
tcacacatataat

SEQ ID NO: 242873 - DNA, 13 bp, Artificial Sequence
  Oligonucleotide for detection of SNP TSC0059278
attatacgtgtga

SEQ ID NO: 242874 - DNA, 13 bp, Artificial Sequence
  Oligonucleotide for detection of SNP TSC0059278
tcacacgtataat

SEQ ID NO: 242875 - DNA, 13 bp, Artificial Sequence
  Oligonucleotide for detection of SNP TSC0059278
ttatatgtgtaat

SEQ ID NO: 242876 - DNA, 13 bp, Artificial Sequence
  Oligonucleotide for detection of SNP TSC0059278
attacacatataa

SEQ ID NO: 242877 - DNA, 13 bp, Artificial Sequence
  Oligonucleotide for detection of SNP TSC0059278
ttatacgtgtaat

SEQ ID NO: 242878 - DNA, 13 bp, Artificial Sequence
  Oligonucleotide for detection of SNP TSC0059278
attacacgtataa

SEQ ID NO: 242879 - DNA, 13 bp, Artificial Sequence
  Oligonucleotide for detection of SNP TSC0006527
atttaaatgaaaa

SEQ ID NO: 242880 - DNA, 13 bp, Artificial Sequence
  Oligonucleotide for detection of SNP TSC0006527
ttttcatttaaat

SEQ ID NO: 242881 - DNA, 13 bp, Artificial Sequence
  Oligonucleotide for detection of SNP TSC0006527
atttaagtgaaaa

SEQ ID NO: 242882 - DNA, 13 bp, Artificial Sequence
  Oligonucleotide for detection of SNP TSC0006527
ttttcacttaaat

SEQ ID NO: 242883 - DNA, 13 bp, Artificial Sequence
  Oligonucleotide for detection of SNP TSC0006527
atttaaacgaaaa

SEQ ID NO: 242884 - DNA, 13 bp, Artificial Sequence
  Oligonucleotide for detection of SNP TSC0006527
ttttcgtttaaat

SEQ ID NO: 242885 - DNA, 13 bp, Artificial Sequence
  Oligonucleotide for detection of SNP TSC0006527
atttaagcgaaaa

SEQ ID NO: 242886 - DNA, 13 bp, Artificial Sequence
  Oligonucleotide for detection of SNP TSC0006527
ttttcgcttaaat

SEQ ID NO: 242887 - DNA, 13 bp, Artificial Sequence
  Oligonucleotide for detection of SNP TSC0059279
gattttttaaaga

SEQ ID NO: 242888 - DNA, 13 bp, Artificial Sequence
  Oligonucleotide for detection of SNP TSC0059279
tctttaaaaaatc

SEQ ID NO: 242889 - DNA, 13 bp, Artificial Sequence
  Oligonucleotide for detection of SNP TSC0059279
gattttgtaaaga

SEQ ID NO: 242890 - DNA, 13 bp, Artificial Sequence
  Oligonucleotide for detection of SNP TSC0059279
tctttacaaaatc

SEQ ID NO: 242891 - DNA, 13 bp, Artificial Sequence
  Oligonucleotide for detection of SNP TSC0059279
gatttcgtaaaga

SEQ ID NO: 242892 - DNA, 13 bp, Artificial Sequence
  Oligonucleotide for detection of SNP TSC0059279
tctttacgaaatc

SEQ ID NO: 242893 - DNA, 13 bp, Artificial Sequence
  Oligonucleotide for detection of SNP TSC0059279
tttttgtggggty

SEQ ID NO: 242894 - DNA, 13 bp, Artificial Sequence
  Oligonucleotide for detection of SNP TSC0059279
raccccacaaaaa

SEQ ID NO: 242895 - DNA, 13 bp, Artificial Sequence
  Oligonucleotide for detection of SNP TSC0059279
tttttgcggggty

SEQ ID NO: 242896 - DNA, 13 bp, Artificial Sequence
  Oligonucleotide for detection of SNP TSC0059279
raccccgcaaaaa

SEQ ID NO: 242897 - DNA, 13 bp, Artificial Sequence
  Oligonucleotide for detection of SNP TSC0000705
gttggaggttgta

SEQ ID NO: 242898 - DNA, 13 bp, Artificial Sequence
  Oligonucleotide for detection of SNP TSC0000705
tacaacctccaac

SEQ ID NO: 242899 - DNA, 13 bp, Artificial Sequence
  Oligonucleotide for detection of SNP TSC0000705
gttggaagttgta

SEQ ID NO: 242900 - DNA, 13 bp, Artificial Sequence
  Oligonucleotide for detection of SNP TSC0000705
tacaacttccaac

SEQ ID NO: 242901 - DNA, 13 bp, Artificial Sequence
  Oligonucleotide for detection of SNP TSC0000706
ggggatagagttt

SEQ ID NO: 242902 - DNA, 13 bp, Artificial Sequence
  Oligonucleotide for detection of SNP TSC0000706
aaactctatcccc

SEQ ID NO: 242903 - DNA, 13 bp, Artificial Sequence
  Oligonucleotide for detection of SNP TSC0000706
ggggatggagttt

SEQ ID NO: 242904 - DNA, 13 bp, Artificial Sequence
  Oligonucleotide for detection of SNP TSC0000706
aaactccatcccc

SEQ ID NO: 242905 - DNA, 13 bp, Artificial Sequence
  Oligonucleotide for detection of SNP TSC0000706
ggggacggagttt

SEQ ID NO: 242906 - DNA, 13 bp, Artificial Sequence
  Oligonucleotide for detection of SNP TSC0000706
aaactccgtcccc

SEQ ID NO: 242907 - DNA, 13 bp, Artificial Sequence
  Oligonucleotide for detection of SNP TSC0000707
gagtatagtggta

SEQ ID NO: 242908 - DNA, 13 bp, Artificial Sequence
  Oligonucleotide for detection of SNP TSC0000707
taccactatactc

SEQ ID NO: 242909 - DNA, 13 bp, Artificial Sequence
  Oligonucleotide for detection of SNP TSC0000707
gagtatggtggta

SEQ ID NO: 242910 - DNA, 13 bp, Artificial Sequence
  Oligonucleotide for detection of SNP TSC0000707
taccaccatactc

SEQ ID NO: 242911 - DNA, 13 bp, Artificial Sequence
  Oligonucleotide for detection of SNP TSC0000707
gagtacggtggta

SEQ ID NO: 242912 - DNA, 13 bp, Artificial Sequence
  Oligonucleotide for detection of SNP TSC0000707
taccaccgtactc

SEQ ID NO: 242913 - DNA, 13 bp, Artificial Sequence
  Oligonucleotide for detection of SNP TSC0000966
aggtgtagtgttt

SEQ ID NO: 242914 - DNA, 13 bp, Artificial Sequence
  Oligonucleotide for detection of SNP TSC0000966
aaacactacacct

SEQ ID NO: 242915 - DNA, 13 bp, Artificial Sequence
  Oligonucleotide for detection of SNP TSC0000966
aggtgtggtgttt

SEQ ID NO: 242916 - DNA, 13 bp, Artificial Sequence
  Oligonucleotide for detection of SNP TSC0000966
aaacaccacacct

SEQ ID NO: 242917 - DNA, 13 bp, Artificial Sequence
  Oligonucleotide for detection of SNP TSC0000966
aggcgtagtgttt

SEQ ID NO: 242918 - DNA, 13 bp, Artificial Sequence
  Oligonucleotide for detection of SNP TSC0000966
aaacactacgcct

SEQ ID NO: 242919 - DNA, 13 bp, Artificial Sequence
  Oligonucleotide for detection of SNP TSC0000966
aggcgtggtgttt

SEQ ID NO: 242920 - DNA, 13 bp, Artificial Sequence
  Oligonucleotide for detection of SNP TSC0000966
aaacaccacgcct

SEQ ID NO: 242921 - DNA, 13 bp, Artificial Sequence
  Oligonucleotide for detection of SNP TSC0000966
aggtgcggtgttt

SEQ ID NO: 242922 - DNA, 13 bp, Artificial Sequence
  Oligonucleotide for detection of SNP TSC0000966
aaacaccgcacct

SEQ ID NO: 242923 - DNA, 13 bp, Artificial Sequence
  Oligonucleotide for detection of SNP TSC0000966
aggcgcggtgttt

SEQ ID NO: 242924 - DNA, 13 bp, Artificial Sequence
  Oligonucleotide for detection of SNP TSC0000966
aaacaccgcgcct

SEQ ID NO: 242925 - DNA, 13 bp, Artificial Sequence
  Oligonucleotide for detection of SNP TSC0000966
aggtattgtgttt

SEQ ID NO: 242926 - DNA, 13 bp, Artificial Sequence
  Oligonucleotide for detection of SNP TSC0000966
aaacacaatacct

SEQ ID NO: 242927 - DNA, 13 bp, Artificial Sequence
  Oligonucleotide for detection of SNP TSC0000966
aggtattgcgttt

SEQ ID NO: 242928 - DNA, 13 bp, Artificial Sequence
  Oligonucleotide for detection of SNP TSC0000966
aaacgcaatacct

SEQ ID NO: 242929 - DNA, 13 bp, Artificial Sequence
  Oligonucleotide for detection of SNP TSC0000966
aggtatcgtgttt

SEQ ID NO: 242930 - DNA, 13 bp, Artificial Sequence
  Oligonucleotide for detection of SNP TSC0000966
aaacacgatacct

SEQ ID NO: 242931 - DNA, 13 bp, Artificial Sequence
  Oligonucleotide for detection of SNP TSC0000966
aggtatcgcgttt

SEQ ID NO: 242932 - DNA, 13 bp, Artificial Sequence
  Oligonucleotide for detection of SNP TSC0000966
aaacgcgatacct

SEQ ID NO: 242933 - DNA, 13 bp, Artificial Sequence
  Oligonucleotide for detection of SNP TSC0001688
atttttgatagty

SEQ ID NO: 242934 - DNA, 13 bp, Artificial Sequence
  Oligonucleotide for detection of SNP TSC0001688
ractatcaaaaat

SEQ ID NO: 242935 - DNA, 13 bp, Artificial Sequence
  Oligonucleotide for detection of SNP TSC0001688
atttttaatagty

SEQ ID NO: 242936 - DNA, 13 bp, Artificial Sequence
  Oligonucleotide for detection of SNP TSC0001688
ractattaaaaat

SEQ ID NO: 242937 - DNA, 13 bp, Artificial Sequence
  Oligonucleotide for detection of SNP TSC0001690
ttgtattaaaaaa

SEQ ID NO: 242938 - DNA, 13 bp, Artificial Sequence
  Oligonucleotide for detection of SNP TSC0001690
ttttttaatacaa

SEQ ID NO: 242939 - DNA, 13 bp, Artificial Sequence
  Oligonucleotide for detection of SNP TSC0001690
ttgtataaaaaaa

SEQ ID NO: 242940 - DNA, 13 bp, Artificial Sequence
  Oligonucleotide for detection of SNP TSC0001690
tttttttatacaa

SEQ ID NO: 242941 - DNA, 13 bp, Artificial Sequence
  Oligonucleotide for detection of SNP TSC0059280
aagattggggtgg

SEQ ID NO: 242942 - DNA, 13 bp, Artificial Sequence
  Oligonucleotide for detection of SNP TSC0059280
ccaccccaatctt

SEQ ID NO: 242943 - DNA, 13 bp, Artificial Sequence
  Oligonucleotide for detection of SNP TSC0059280
aagattagggtgg

SEQ ID NO: 242944 - DNA, 13 bp, Artificial Sequence
  Oligonucleotide for detection of SNP TSC0059280
ccaccctaatctt

SEQ ID NO: 242945 - DNA, 13 bp, Artificial Sequence
  Oligonucleotide for detection of SNP TSC0059280
aagatcggggtgg

SEQ ID NO: 242946 - DNA, 13 bp, Artificial Sequence
  Oligonucleotide for detection of SNP TSC0059280
ccaccccgatctt

SEQ ID NO: 242947 - DNA, 13 bp, Artificial Sequence
  Oligonucleotide for detection of SNP TSC0059281
atttgagtgagtg

SEQ ID NO: 242948 - DNA, 13 bp, Artificial Sequence
  Oligonucleotide for detection of SNP TSC0059281
cactcactcaaat

SEQ ID NO: 242949 - DNA, 13 bp, Artificial Sequence
  Oligonucleotide for detection of SNP TSC0059281
atttgaatgagtg

SEQ ID NO: 242950 - DNA, 13 bp, Artificial Sequence
  Oligonucleotide for detection of SNP TSC0059281
cactcattcaaat

SEQ ID NO: 242951 - DNA, 13 bp, Artificial Sequence
  Oligonucleotide for detection of SNP TSC0059281
atttgagcgagtg

SEQ ID NO: 242952 - DNA, 13 bp, Artificial Sequence
  Oligonucleotide for detection of SNP TSC0059281
cactcgctcaaat

SEQ ID NO: 242953 - DNA, 13 bp, Artificial Sequence
  Oligonucleotide for detection of SNP TSC0059281
atttgaacgagtg

SEQ ID NO: 242954 - DNA, 13 bp, Artificial Sequence
  Oligonucleotide for detection of SNP TSC0059281
cactcgttcaaat

SEQ ID NO: 242955 - DNA, 13 bp, Artificial Sequence
  Oligonucleotide for detection of SNP TSC0059282
tatatttgtttty

SEQ ID NO: 242956 - DNA, 13 bp, Artificial Sequence
  Oligonucleotide for detection of SNP TSC0059282
raaaacaaatata

SEQ ID NO: 242957 - DNA, 13 bp, Artificial Sequence
  Oligonucleotide for detection of SNP TSC0059282
tatattcgtttty

SEQ ID NO: 242958 - DNA, 13 bp, Artificial Sequence
  Oligonucleotide for detection of SNP TSC0059282
raaaacgaatata

SEQ ID NO: 242959 - DNA, 13 bp, Artificial Sequence
  Oligonucleotide for detection of SNP TSC0059282
gaggatgggtgtg

SEQ ID NO: 242960 - DNA, 13 bp, Artificial Sequence
  Oligonucleotide for detection of SNP TSC0059282
cacacccatcctc

SEQ ID NO: 242961 - DNA, 13 bp, Artificial Sequence
  Oligonucleotide for detection of SNP TSC0059282
gaggataggtgtg

SEQ ID NO: 242962 - DNA, 13 bp, Artificial Sequence
  Oligonucleotide for detection of SNP TSC0059282
cacacctatcctc

SEQ ID NO: 242963 - DNA, 13 bp, Artificial Sequence
  Oligonucleotide for detection of SNP TSC0059282
gaggacgggtgtg

SEQ ID NO: 242964 - DNA, 13 bp, Artificial Sequence
  Oligonucleotide for detection of SNP TSC0059282
cacacccgtcctc

SEQ ID NO: 242965 - DNA, 13 bp, Artificial Sequence
  Oligonucleotide for detection of SNP TSC0059283
ttttagtggtgay

SEQ ID NO: 242966 - DNA, 13 bp, Artificial Sequence
  Oligonucleotide for detection of SNP TSC0059283
rtcaccactaaaa

SEQ ID NO: 242967 - DNA, 13 bp, Artificial Sequence
  Oligonucleotide for detection of SNP TSC0059283
ttttagcggtgay

SEQ ID NO: 242968 - DNA, 13 bp, Artificial Sequence
  Oligonucleotide for detection of SNP TSC0059283
rtcaccgctaaaa

SEQ ID NO: 242969 - DNA, 13 bp, Artificial Sequence
  Oligonucleotide for detection of SNP TSC0059283
gttattgttaaga

SEQ ID NO: 242970 - DNA, 13 bp, Artificial Sequence
  Oligonucleotide for detection of SNP TSC0059283
tcttaacaataac

SEQ ID NO: 242971 - DNA, 13 bp, Artificial Sequence
  Oligonucleotide for detection of SNP TSC0059283
gttattattaaga

SEQ ID NO: 242972 - DNA, 13 bp, Artificial Sequence
  Oligonucleotide for detection of SNP TSC0059283
tcttaataataac

SEQ ID NO: 242973 - DNA, 13 bp, Artificial Sequence
  Oligonucleotide for detection of SNP TSC0059283
gttatcgttaaga

SEQ ID NO: 242974 - DNA, 13 bp, Artificial Sequence
  Oligonucleotide for detection of SNP TSC0059283
tcttaacgataac

SEQ ID NO: 242975 - DNA, 13 bp, Artificial Sequence
  Oligonucleotide for detection of SNP TSC0059284
aataaagaaattt

SEQ ID NO: 242976 - DNA, 13 bp, Artificial Sequence
  Oligonucleotide for detection of SNP TSC0059284
aaatttctttatt

SEQ ID NO: 242977 - DNA, 13 bp, Artificial Sequence
  Oligonucleotide for detection of SNP TSC0059285
aagaaataaataa

SEQ ID NO: 242978 - DNA, 13 bp, Artificial Sequence
  Oligonucleotide for detection of SNP TSC0059285
ttatttatttctt

SEQ ID NO: 242979 - DNA, 13 bp, Artificial Sequence
  Oligonucleotide for detection of SNP TSC0059285
aagaaagaaataa

SEQ ID NO: 242980 - DNA, 13 bp, Artificial Sequence
  Oligonucleotide for detection of SNP TSC0059285
ttatttctttctt

SEQ ID NO: 242981 - DNA, 13 bp, Artificial Sequence
  Oligonucleotide for detection of SNP TSC0000239
ggtagatttttta

SEQ ID NO: 242982 - DNA, 13 bp, Artificial Sequence
  Oligonucleotide for detection of SNP TSC0000239
taaaaaatctacc

SEQ ID NO: 242983 - DNA, 13 bp, Artificial Sequence
  Oligonucleotide for detection of SNP TSC0000239
ggtagagttttta

SEQ ID NO: 242984 - DNA, 13 bp, Artificial Sequence
  Oligonucleotide for detection of SNP TSC0000239
taaaaactctacc

SEQ ID NO: 242985 - DNA, 13 bp, Artificial Sequence
  Oligonucleotide for detection of SNP TSC0000239
tgagaagtttgty

SEQ ID NO: 242986 - DNA, 13 bp, Artificial Sequence
  Oligonucleotide for detection of SNP TSC0000239
racaaacttctca

SEQ ID NO: 242987 - DNA, 13 bp, Artificial Sequence
  Oligonucleotide for detection of SNP TSC0000239
tgagaattttgty

SEQ ID NO: 242988 - DNA, 13 bp, Artificial Sequence
  Oligonucleotide for detection of SNP TSC0000239
racaaaattctca

SEQ ID NO: 242989 - DNA, 13 bp, Artificial Sequence
  Oligonucleotide for detection of SNP TSC0000240
agattgggtaatt

SEQ ID NO: 242990 - DNA, 13 bp, Artificial Sequence
  Oligonucleotide for detection of SNP TSC0000240
aattacccaatct

SEQ ID NO: 242991 - DNA, 13 bp, Artificial Sequence
  Oligonucleotide for detection of SNP TSC0000240
agattgagtaatt

SEQ ID NO: 242992 - DNA, 13 bp, Artificial Sequence
  Oligonucleotide for detection of SNP TSC0000240
aattactcaatct

SEQ ID NO: 242993 - DNA, 13 bp, Artificial Sequence
  Oligonucleotide for detection of SNP TSC0001486
taaaatatgagtt

SEQ ID NO: 242994 - DNA, 13 bp, Artificial Sequence
  Oligonucleotide for detection of SNP TSC0001486
aactcatatttta

SEQ ID NO: 242995 - DNA, 13 bp, Artificial Sequence
  Oligonucleotide for detection of SNP TSC0001486
taaaatttgagtt

SEQ ID NO: 242996 - DNA, 13 bp, Artificial Sequence
  Oligonucleotide for detection of SNP TSC0001486
aactcaaatttta

SEQ ID NO: 242997 - DNA, 13 bp, Artificial Sequence
  Oligonucleotide for detection of SNP TSC0001486
aatttaaattttg

SEQ ID NO: 242998 - DNA, 13 bp, Artificial Sequence
  Oligonucleotide for detection of SNP TSC0001486
caaaatttaaatt

SEQ ID NO: 242999 - DNA, 13 bp, Artificial Sequence
  Oligonucleotide for detection of SNP TSC0001091
agaaaagtgaggg

SEQ ID NO: 243000 - DNA, 13 bp, Artificial Sequence
  Oligonucleotide for detection of SNP TSC0001091
ccctcacttttct

SEQ ID NO: 243001 - DNA, 13 bp, Artificial Sequence
  Oligonucleotide for detection of SNP TSC0001091
agaaaaatgaggg

SEQ ID NO: 243002 - DNA, 13 bp, Artificial Sequence
  Oligonucleotide for detection of SNP TSC0001091
ccctcatttttct

SEQ ID NO: 243003 - DNA, 13 bp, Artificial Sequence
  Oligonucleotide for detection of SNP TSC0000681
tggagaaaatttt

SEQ ID NO: 243004 - DNA, 13 bp, Artificial Sequence
  Oligonucleotide for detection of SNP TSC0000681
aaaattttctcca

SEQ ID NO: 243005 - DNA, 13 bp, Artificial Sequence
  Oligonucleotide for detection of SNP TSC0000681
tggagataatttt

SEQ ID NO: 243006 - DNA, 13 bp, Artificial Sequence
  Oligonucleotide for detection of SNP TSC0000681
aaaattatctcca

SEQ ID NO: 243007 - DNA, 13 bp, Artificial Sequence
  Oligonucleotide for detection of SNP TSC0059289
ttgttatgagtty

SEQ ID NO: 243008 - DNA, 13 bp, Artificial Sequence
  Oligonucleotide for detection of SNP TSC0059289
raactcataacaa

SEQ ID NO: 243009 - DNA, 13 bp, Artificial Sequence
  Oligonucleotide for detection of SNP TSC0059289
ttgttacgagtty

SEQ ID NO: 243010 - DNA, 13 bp, Artificial Sequence
  Oligonucleotide for detection of SNP TSC0059289
raactcgtaacaa

SEQ ID NO: 243011 - DNA, 13 bp, Artificial Sequence
  Oligonucleotide for detection of SNP TSC0059289
gggtttgtggtaa

SEQ ID NO: 243012 - DNA, 13 bp, Artificial Sequence
  Oligonucleotide for detection of SNP TSC0059289
ttaccacaaaccc

SEQ ID NO: 243013 - DNA, 13 bp, Artificial Sequence
  Oligonucleotide for detection of SNP TSC0059289
gggtttatggtaa

SEQ ID NO: 243014 - DNA, 13 bp, Artificial Sequence
  Oligonucleotide for detection of SNP TSC0059289
ttaccataaaccc

SEQ ID NO: 243015 - DNA, 13 bp, Artificial Sequence
  Oligonucleotide for detection of SNP TSC0059289
gggttcgtggtaa

SEQ ID NO: 243016 - DNA, 13 bp, Artificial Sequence
  Oligonucleotide for detection of SNP TSC0059289
ttaccacgaaccc

SEQ ID NO: 243017 - DNA, 13 bp, Artificial Sequence
  Oligonucleotide for detection of SNP TSC0001466
aatattagttgaa

SEQ ID NO: 243018 - DNA, 13 bp, Artificial Sequence
  Oligonucleotide for detection of SNP TSC0001466
ttcaactaatatt

SEQ ID NO: 243019 - DNA, 13 bp, Artificial Sequence
  Oligonucleotide for detection of SNP TSC0001466
aatatttgttgaa

SEQ ID NO: 243020 - DNA, 13 bp, Artificial Sequence
  Oligonucleotide for detection of SNP TSC0001466
ttcaacaaatatt

SEQ ID NO: 243021 - DNA, 13 bp, Artificial Sequence
  Oligonucleotide for detection of SNP TSC0001466
tttagttgatgtt

SEQ ID NO: 243022 - DNA, 13 bp, Artificial Sequence
  Oligonucleotide for detection of SNP TSC0001466
aacatcaactaaa

SEQ ID NO: 243023 - DNA, 13 bp, Artificial Sequence
  Oligonucleotide for detection of SNP TSC0001466
tttagtagatgtt

SEQ ID NO: 243024 - DNA, 13 bp, Artificial Sequence
  Oligonucleotide for detection of SNP TSC0001466
aacatctactaaa

SEQ ID NO: 243025 - DNA, 13 bp, Artificial Sequence
  Oligonucleotide for detection of SNP TSC0000438
tggtttagtaatg

SEQ ID NO: 243026 - DNA, 13 bp, Artificial Sequence
  Oligonucleotide for detection of SNP TSC0000438
cattactaaacca

SEQ ID NO: 243027 - DNA, 13 bp, Artificial Sequence
  Oligonucleotide for detection of SNP TSC0000438
tggtttggtaatg

SEQ ID NO: 243028 - DNA, 13 bp, Artificial Sequence
  Oligonucleotide for detection of SNP TSC0000438
cattaccaaacca

SEQ ID NO: 243029 - DNA, 13 bp, Artificial Sequence
  Oligonucleotide for detection of SNP TSC0000438
tggtttagtaacg

SEQ ID NO: 243030 - DNA, 13 bp, Artificial Sequence
  Oligonucleotide for detection of SNP TSC0000438
cgttactaaacca

SEQ ID NO: 243031 - DNA, 13 bp, Artificial Sequence
  Oligonucleotide for detection of SNP TSC0000438
tggttcggtaatg

SEQ ID NO: 243032 - DNA, 13 bp, Artificial Sequence
  Oligonucleotide for detection of SNP TSC0000438
cattaccgaacca

SEQ ID NO: 243033 - DNA, 13 bp, Artificial Sequence
  Oligonucleotide for detection of SNP TSC0000438
tggtttggtaacg

SEQ ID NO: 243034 - DNA, 13 bp, Artificial Sequence
  Oligonucleotide for detection of SNP TSC0000438
cgttaccaaacca

SEQ ID NO: 243035 - DNA, 13 bp, Artificial Sequence
  Oligonucleotide for detection of SNP TSC0000438
tggttcggtaacg

SEQ ID NO: 243036 - DNA, 13 bp, Artificial Sequence
  Oligonucleotide for detection of SNP TSC0000438
cgttaccgaacca

SEQ ID NO: 243037 - DNA, 13 bp, Artificial Sequence
  Oligonucleotide for detection of SNP TSC0000438
tgttattgagtta

SEQ ID NO: 243038 - DNA, 13 bp, Artificial Sequence
  Oligonucleotide for detection of SNP TSC0000438
taactcaataaca

SEQ ID NO: 243039 - DNA, 13 bp, Artificial Sequence
  Oligonucleotide for detection of SNP TSC0000438
cgttattgagtta

SEQ ID NO: 243040 - DNA, 13 bp, Artificial Sequence
  Oligonucleotide for detection of SNP TSC0000438
taactcaataacg

SEQ ID NO: 243041 - DNA, 13 bp, Artificial Sequence
  Oligonucleotide for detection of SNP TSC0000438
tgttatcgagtta

SEQ ID NO: 243042 - DNA, 13 bp, Artificial Sequence
  Oligonucleotide for detection of SNP TSC0000438
taactcgataaca

SEQ ID NO: 243043 - DNA, 13 bp, Artificial Sequence
  Oligonucleotide for detection of SNP TSC0000438
cgttatcgagtta

SEQ ID NO: 243044 - DNA, 13 bp, Artificial Sequence
  Oligonucleotide for detection of SNP TSC0000438
taactcgataacg

SEQ ID NO: 243045 - DNA, 13 bp, Artificial Sequence
  Oligonucleotide for detection of SNP TSC0059290
aaggttgaggtgt

SEQ ID NO: 243046 - DNA, 13 bp, Artificial Sequence
  Oligonucleotide for detection of SNP TSC0059290
acacctcaacctt

SEQ ID NO: 243047 - DNA, 13 bp, Artificial Sequence
  Oligonucleotide for detection of SNP TSC0059290
aaggttaaggtgt

SEQ ID NO: 243048 - DNA, 13 bp, Artificial Sequence
  Oligonucleotide for detection of SNP TSC0059290
acaccttaacctt

SEQ ID NO: 243049 - DNA, 13 bp, Artificial Sequence
  Oligonucleotide for detection of SNP TSC0059291
ttatattgtatgy

SEQ ID NO: 243050 - DNA, 13 bp, Artificial Sequence
  Oligonucleotide for detection of SNP TSC0059291
rcatacaatataa

SEQ ID NO: 243051 - DNA, 13 bp, Artificial Sequence
  Oligonucleotide for detection of SNP TSC0059291
ttatatcgtatgy

SEQ ID NO: 243052 - DNA, 13 bp, Artificial Sequence
  Oligonucleotide for detection of SNP TSC0059291
rcatacgatataa

SEQ ID NO: 243053 - DNA, 13 bp, Artificial Sequence
  Oligonucleotide for detection of SNP TSC0059291
gtatatggtatga

SEQ ID NO: 243054 - DNA, 13 bp, Artificial Sequence
  Oligonucleotide for detection of SNP TSC0059291
tcataccatatac

SEQ ID NO: 243055 - DNA, 13 bp, Artificial Sequence
  Oligonucleotide for detection of SNP TSC0059291
gtatatagtatga

SEQ ID NO: 243056 - DNA, 13 bp, Artificial Sequence
  Oligonucleotide for detection of SNP TSC0059291
tcatactatatac

SEQ ID NO: 243057 - DNA, 13 bp, Artificial Sequence
  Oligonucleotide for detection of SNP TSC0059291
gtatacggtatga

SEQ ID NO: 243058 - DNA, 13 bp, Artificial Sequence
  Oligonucleotide for detection of SNP TSC0059291
tcataccgtatac

SEQ ID NO: 243059 - DNA, 13 bp, Artificial Sequence
  Oligonucleotide for detection of SNP TSC0000641
ttattgtggattt

SEQ ID NO: 243060 - DNA, 13 bp, Artificial Sequence
  Oligonucleotide for detection of SNP TSC0000641
aaatccacaataa

SEQ ID NO: 243061 - DNA, 13 bp, Artificial Sequence
  Oligonucleotide for detection of SNP TSC0000641
ttattggggattt

SEQ ID NO: 243062 - DNA, 13 bp, Artificial Sequence
  Oligonucleotide for detection of SNP TSC0000641
aaatccccaataa

SEQ ID NO: 243063 - DNA, 13 bp, Artificial Sequence
  Oligonucleotide for detection of SNP TSC0000641
ttattgcggattt

SEQ ID NO: 243064 - DNA, 13 bp, Artificial Sequence
  Oligonucleotide for detection of SNP TSC0000641
aaatccgcaataa

SEQ ID NO: 243065 - DNA, 13 bp, Artificial Sequence
  Oligonucleotide for detection of SNP TSC0000641
agatttgtagtgg

SEQ ID NO: 243066 - DNA, 13 bp, Artificial Sequence
  Oligonucleotide for detection of SNP TSC0000641
ccactacaaatct

SEQ ID NO: 243067 - DNA, 13 bp, Artificial Sequence
  Oligonucleotide for detection of SNP TSC0000641
agatttttagtgg

SEQ ID NO: 243068 - DNA, 13 bp, Artificial Sequence
  Oligonucleotide for detection of SNP TSC0000641
ccactaaaaatct

SEQ ID NO: 243069 - DNA, 13 bp, Artificial Sequence
  Oligonucleotide for detection of SNP TSC0000641
agattcgtagtgg

SEQ ID NO: 243070 - DNA, 13 bp, Artificial Sequence
  Oligonucleotide for detection of SNP TSC0000641
ccactacgaatct

SEQ ID NO: 243071 - DNA, 13 bp, Artificial Sequence
  Oligonucleotide for detection of SNP TSC0000642
aaatataaaaaag

SEQ ID NO: 243072 - DNA, 13 bp, Artificial Sequence
  Oligonucleotide for detection of SNP TSC0000642
cttttttatattt

SEQ ID NO: 243073 - DNA, 13 bp, Artificial Sequence
  Oligonucleotide for detection of SNP TSC0000642
aaatattaaaaag

SEQ ID NO: 243074 - DNA, 13 bp, Artificial Sequence
  Oligonucleotide for detection of SNP TSC0000642
ctttttaatattt

SEQ ID NO: 243075 - DNA, 13 bp, Artificial Sequence
  Oligonucleotide for detection of SNP TSC0000642
tttttttatattt

SEQ ID NO: 243076 - DNA, 13 bp, Artificial Sequence
  Oligonucleotide for detection of SNP TSC0000642
aaatataaaaaaa

SEQ ID NO: 243077 - DNA, 13 bp, Artificial Sequence
  Oligonucleotide for detection of SNP TSC0059293
gttttataggtaa

SEQ ID NO: 243078 - DNA, 13 bp, Artificial Sequence
  Oligonucleotide for detection of SNP TSC0059293
ttacctataaaac

SEQ ID NO: 243079 - DNA, 13 bp, Artificial Sequence
  Oligonucleotide for detection of SNP TSC0059293
gttttagaggtaa

SEQ ID NO: 243080 - DNA, 13 bp, Artificial Sequence
  Oligonucleotide for detection of SNP TSC0059293
ttacctctaaaac

SEQ ID NO: 243081 - DNA, 13 bp, Artificial Sequence
  Oligonucleotide for detection of SNP TSC0059293
ttgtttatgaggy

SEQ ID NO: 243082 - DNA, 13 bp, Artificial Sequence
  Oligonucleotide for detection of SNP TSC0059293
rcctcataaacaa

SEQ ID NO: 243083 - DNA, 13 bp, Artificial Sequence
  Oligonucleotide for detection of SNP TSC0059293
ttgtttttgaggy

SEQ ID NO: 243084 - DNA, 13 bp, Artificial Sequence
  Oligonucleotide for detection of SNP TSC0059293
rcctcaaaaacaa

SEQ ID NO: 243085 - DNA, 13 bp, Artificial Sequence
  Oligonucleotide for detection of SNP TSC0059294
gtaagatgttttg

SEQ ID NO: 243086 - DNA, 13 bp, Artificial Sequence
  Oligonucleotide for detection of SNP TSC0059294
caaaacatcttac

SEQ ID NO: 243087 - DNA, 13 bp, Artificial Sequence
  Oligonucleotide for detection of SNP TSC0059294
gtaagacgttttg

SEQ ID NO: 243088 - DNA, 13 bp, Artificial Sequence
  Oligonucleotide for detection of SNP TSC0059294
caaaacgtcttac

SEQ ID NO: 243089 - DNA, 13 bp, Artificial Sequence
  Oligonucleotide for detection of SNP TSC0059294
tagggtgttttgy

SEQ ID NO: 243090 - DNA, 13 bp, Artificial Sequence
  Oligonucleotide for detection of SNP TSC0059294
rcaaaacacccta

SEQ ID NO: 243091 - DNA, 13 bp, Artificial Sequence
  Oligonucleotide for detection of SNP TSC0059294
tagggtattttgy

SEQ ID NO: 243092 - DNA, 13 bp, Artificial Sequence
  Oligonucleotide for detection of SNP TSC0059294
rcaaaatacccta

SEQ ID NO: 243093 - DNA, 13 bp, Artificial Sequence
  Oligonucleotide for detection of SNP TSC0059294
tagggcgttttgy

SEQ ID NO: 243094 - DNA, 13 bp, Artificial Sequence
  Oligonucleotide for detection of SNP TSC0059294
rcaaaacgcccta

SEQ ID NO: 243095 - DNA, 13 bp, Artificial Sequence
  Oligonucleotide for detection of SNP TSC0059298
attttattatgty

SEQ ID NO: 243096 - DNA, 13 bp, Artificial Sequence
  Oligonucleotide for detection of SNP TSC0059298
racataataaaat

SEQ ID NO: 243097 - DNA, 13 bp, Artificial Sequence
  Oligonucleotide for detection of SNP TSC0059298
ggtataatgagat

SEQ ID NO: 243098 - DNA, 13 bp, Artificial Sequence
  Oligonucleotide for detection of SNP TSC0059298
atctcattatacc

SEQ ID NO: 243099 - DNA, 13 bp, Artificial Sequence
  Oligonucleotide for detection of SNP TSC0059298
ggtatattgagat

SEQ ID NO: 243100 - DNA, 13 bp, Artificial Sequence
  Oligonucleotide for detection of SNP TSC0059298
atctcaatatacc

SEQ ID NO: 243101 - DNA, 13 bp, Artificial Sequence
  Oligonucleotide for detection of SNP TSC0059302
ttgttggtgggaa

SEQ ID NO: 243102 - DNA, 13 bp, Artificial Sequence
  Oligonucleotide for detection of SNP TSC0059302
ttcccaccaacaa

SEQ ID NO: 243103 - DNA, 13 bp, Artificial Sequence
  Oligonucleotide for detection of SNP TSC0059302
ttgttgatgggaa

SEQ ID NO: 243104 - DNA, 13 bp, Artificial Sequence
  Oligonucleotide for detection of SNP TSC0059302
ttcccatcaacaa

SEQ ID NO: 243105 - DNA, 13 bp, Artificial Sequence
  Oligonucleotide for detection of SNP TSC0059303
aatattgtaagat

SEQ ID NO: 243106 - DNA, 13 bp, Artificial Sequence
  Oligonucleotide for detection of SNP TSC0059303
atcttacaatatt

SEQ ID NO: 243107 - DNA, 13 bp, Artificial Sequence
  Oligonucleotide for detection of SNP TSC0059303
aatattataagat

SEQ ID NO: 243108 - DNA, 13 bp, Artificial Sequence
  Oligonucleotide for detection of SNP TSC0059303
atcttataatatt

SEQ ID NO: 243109 - DNA, 13 bp, Artificial Sequence
  Oligonucleotide for detection of SNP TSC0059304
tattatataatat

SEQ ID NO: 243110 - DNA, 13 bp, Artificial Sequence
  Oligonucleotide for detection of SNP TSC0059304
atattatataata

SEQ ID NO: 243111 - DNA, 13 bp, Artificial Sequence
  Oligonucleotide for detection of SNP TSC0059304
tattatgtaatat

SEQ ID NO: 243112 - DNA, 13 bp, Artificial Sequence
  Oligonucleotide for detection of SNP TSC0059304
atattacataata

SEQ ID NO: 243113 - DNA, 13 bp, Artificial Sequence
  Oligonucleotide for detection of SNP TSC0059304
tattacgtaatat

SEQ ID NO: 243114 - DNA, 13 bp, Artificial Sequence
  Oligonucleotide for detection of SNP TSC0059304
atattacgtaata

SEQ ID NO: 243115 - DNA, 13 bp, Artificial Sequence
  Oligonucleotide for detection of SNP TSC0059304
atgttatgtaata

SEQ ID NO: 243116 - DNA, 13 bp, Artificial Sequence
  Oligonucleotide for detection of SNP TSC0059304
tattacataacat

SEQ ID NO: 243117 - DNA, 13 bp, Artificial Sequence
  Oligonucleotide for detection of SNP TSC0059304
atgttacgtaata

SEQ ID NO: 243118 - DNA, 13 bp, Artificial Sequence
  Oligonucleotide for detection of SNP TSC0059304
tattacgtaacat

SEQ ID NO: 243119 - DNA, 13 bp, Artificial Sequence
  Oligonucleotide for detection of SNP TSC0059305
tggttaggatttt

SEQ ID NO: 243120 - DNA, 13 bp, Artificial Sequence
  Oligonucleotide for detection of SNP TSC0059305
aaaatcctaacca

SEQ ID NO: 243121 - DNA, 13 bp, Artificial Sequence
  Oligonucleotide for detection of SNP TSC0059305
tggttaagatttt

SEQ ID NO: 243122 - DNA, 13 bp, Artificial Sequence
  Oligonucleotide for detection of SNP TSC0059305
aaaatcttaacca

SEQ ID NO: 243123 - DNA, 13 bp, Artificial Sequence
  Oligonucleotide for detection of SNP TSC0059306
ttggttatatttt

SEQ ID NO: 243124 - DNA, 13 bp, Artificial Sequence
  Oligonucleotide for detection of SNP TSC0059306
aaaatataaccaa

SEQ ID NO: 243125 - DNA, 13 bp, Artificial Sequence
  Oligonucleotide for detection of SNP TSC0059306
ttggttgtatttt

SEQ ID NO: 243126 - DNA, 13 bp, Artificial Sequence
  Oligonucleotide for detection of SNP TSC0059306
aaaatacaaccaa

SEQ ID NO: 243127 - DNA, 13 bp, Artificial Sequence
  Oligonucleotide for detection of SNP TSC0059306
ttggtcgtatttt

SEQ ID NO: 243128 - DNA, 13 bp, Artificial Sequence
  Oligonucleotide for detection of SNP TSC0059306
aaaatacgaccaa

SEQ ID NO: 243129 - DNA, 13 bp, Artificial Sequence
  Oligonucleotide for detection of SNP TSC0059306
agaatatggttaa

SEQ ID NO: 243130 - DNA, 13 bp, Artificial Sequence
  Oligonucleotide for detection of SNP TSC0059306
ttaaccatattct

SEQ ID NO: 243131 - DNA, 13 bp, Artificial Sequence
  Oligonucleotide for detection of SNP TSC0059306
agaatacggttaa

SEQ ID NO: 243132 - DNA, 13 bp, Artificial Sequence
  Oligonucleotide for detection of SNP TSC0059306
ttaaccgtattct

SEQ ID NO: 243133 - DNA, 13 bp, Artificial Sequence
  Oligonucleotide for detection of SNP TSC0059307
tagagagaagaay

SEQ ID NO: 243134 - DNA, 13 bp, Artificial Sequence
  Oligonucleotide for detection of SNP TSC0059307
rttcttctctcta

SEQ ID NO: 243135 - DNA, 13 bp, Artificial Sequence
  Oligonucleotide for detection of SNP TSC0059307
tagagataagaay

SEQ ID NO: 243136 - DNA, 13 bp, Artificial Sequence
  Oligonucleotide for detection of SNP TSC0059307
rttcttatctcta

SEQ ID NO: 243137 - DNA, 13 bp, Artificial Sequence
  Oligonucleotide for detection of SNP TSC0059308
ttatttttgtggy

SEQ ID NO: 243138 - DNA, 13 bp, Artificial Sequence
  Oligonucleotide for detection of SNP TSC0059308
rccacaaaaataa

SEQ ID NO: 243139 - DNA, 13 bp, Artificial Sequence
  Oligonucleotide for detection of SNP TSC0059308
gttatagaagtga

SEQ ID NO: 243140 - DNA, 13 bp, Artificial Sequence
  Oligonucleotide for detection of SNP TSC0059308
tcacttctataac

SEQ ID NO: 243141 - DNA, 13 bp, Artificial Sequence
  Oligonucleotide for detection of SNP TSC0059308
gttatataagtga

SEQ ID NO: 243142 - DNA, 13 bp, Artificial Sequence
  Oligonucleotide for detection of SNP TSC0059308
tcacttatataac

SEQ ID NO: 243143 - DNA, 13 bp, Artificial Sequence
  Oligonucleotide for detection of SNP TSC0059314
gaaataattatta

SEQ ID NO: 243144 - DNA, 13 bp, Artificial Sequence
  Oligonucleotide for detection of SNP TSC0059314
taataattatttc

SEQ ID NO: 243145 - DNA, 13 bp, Artificial Sequence
  Oligonucleotide for detection of SNP TSC0059314
gaaatatttatta

SEQ ID NO: 243146 - DNA, 13 bp, Artificial Sequence
  Oligonucleotide for detection of SNP TSC0059314
taataaatatttc

SEQ ID NO: 243147 - DNA, 13 bp, Artificial Sequence
  Oligonucleotide for detection of SNP TSC0059314
tggtggttattty

SEQ ID NO: 243148 - DNA, 13 bp, Artificial Sequence
  Oligonucleotide for detection of SNP TSC0059314
raaataaccacca

SEQ ID NO: 243149 - DNA, 13 bp, Artificial Sequence
  Oligonucleotide for detection of SNP TSC0059314
tggtgggtattty

SEQ ID NO: 243150 - DNA, 13 bp, Artificial Sequence
  Oligonucleotide for detection of SNP TSC0059314
raaatacccacca

SEQ ID NO: 243151 - DNA, 13 bp, Artificial Sequence
  Oligonucleotide for detection of SNP TSC0059315
attttaagttttt

SEQ ID NO: 243152 - DNA, 13 bp, Artificial Sequence
  Oligonucleotide for detection of SNP TSC0059315
aaaaacttaaaat

SEQ ID NO: 243153 - DNA, 13 bp, Artificial Sequence
  Oligonucleotide for detection of SNP TSC0059315
agaagtttaaggt

SEQ ID NO: 243154 - DNA, 13 bp, Artificial Sequence
  Oligonucleotide for detection of SNP TSC0059315
accttaaacttct

SEQ ID NO: 243155 - DNA, 13 bp, Artificial Sequence
  Oligonucleotide for detection of SNP TSC0059315
agaagtgtaaggt

SEQ ID NO: 243156 - DNA, 13 bp, Artificial Sequence
  Oligonucleotide for detection of SNP TSC0059315
accttacacttct

SEQ ID NO: 243157 - DNA, 13 bp, Artificial Sequence
  Oligonucleotide for detection of SNP TSC0059315
agaagcgtaaggt

SEQ ID NO: 243158 - DNA, 13 bp, Artificial Sequence
  Oligonucleotide for detection of SNP TSC0059315
accttacgcttct

SEQ ID NO: 243159 - DNA, 13 bp, Artificial Sequence
  Oligonucleotide for detection of SNP TSC0059316
gattttgttgatt

SEQ ID NO: 243160 - DNA, 13 bp, Artificial Sequence
  Oligonucleotide for detection of SNP TSC0059316
aatcaacaaaatc

SEQ ID NO: 243161 - DNA, 13 bp, Artificial Sequence
  Oligonucleotide for detection of SNP TSC0059316
gattttattgatt

SEQ ID NO: 243162 - DNA, 13 bp, Artificial Sequence
  Oligonucleotide for detection of SNP TSC0059316
aatcaataaaatc

SEQ ID NO: 243163 - DNA, 13 bp, Artificial Sequence
  Oligonucleotide for detection of SNP TSC0059317
atttgagtgtaag

SEQ ID NO: 243164 - DNA, 13 bp, Artificial Sequence
  Oligonucleotide for detection of SNP TSC0059317
cttacactcaaat

SEQ ID NO: 243165 - DNA, 13 bp, Artificial Sequence
  Oligonucleotide for detection of SNP TSC0059317
atttgaatgtaag

SEQ ID NO: 243166 - DNA, 13 bp, Artificial Sequence
  Oligonucleotide for detection of SNP TSC0059317
cttacattcaaat

SEQ ID NO: 243167 - DNA, 13 bp, Artificial Sequence
  Oligonucleotide for detection of SNP TSC0059318
agttatatggggy

SEQ ID NO: 243168 - DNA, 13 bp, Artificial Sequence
  Oligonucleotide for detection of SNP TSC0059318
rccccatataact

SEQ ID NO: 243169 - DNA, 13 bp, Artificial Sequence
  Oligonucleotide for detection of SNP TSC0059318
agttatgtggggy

SEQ ID NO: 243170 - DNA, 13 bp, Artificial Sequence
  Oligonucleotide for detection of SNP TSC0059318
rccccacataact

SEQ ID NO: 243171 - DNA, 13 bp, Artificial Sequence
  Oligonucleotide for detection of SNP TSC0059318
agttacgtggggy

SEQ ID NO: 243172 - DNA, 13 bp, Artificial Sequence
  Oligonucleotide for detection of SNP TSC0059318
rccccacgtaact

SEQ ID NO: 243173 - DNA, 13 bp, Artificial Sequence
  Oligonucleotide for detection of SNP TSC0059318
gttttatgtaatt

SEQ ID NO: 243174 - DNA, 13 bp, Artificial Sequence
  Oligonucleotide for detection of SNP TSC0059318
aattacataaaac

SEQ ID NO: 243175 - DNA, 13 bp, Artificial Sequence
  Oligonucleotide for detection of SNP TSC0059318
gttttacgtaatt

SEQ ID NO: 243176 - DNA, 13 bp, Artificial Sequence
  Oligonucleotide for detection of SNP TSC0059318
aattacgtaaaac

SEQ ID NO: 243177 - DNA, 13 bp, Artificial Sequence
  Oligonucleotide for detection of SNP TSC0059319
ttagtagtgagtg

SEQ ID NO: 243178 - DNA, 13 bp, Artificial Sequence
  Oligonucleotide for detection of SNP TSC0059319
cactcactactaa

SEQ ID NO: 243179 - DNA, 13 bp, Artificial Sequence
  Oligonucleotide for detection of SNP TSC0059319
ttagtaatgagtg

SEQ ID NO: 243180 - DNA, 13 bp, Artificial Sequence
  Oligonucleotide for detection of SNP TSC0059319
cactcattactaa

SEQ ID NO: 243181 - DNA, 13 bp, Artificial Sequence
  Oligonucleotide for detection of SNP TSC0059322
ggtaaggagtaga

SEQ ID NO: 243182 - DNA, 13 bp, Artificial Sequence
  Oligonucleotide for detection of SNP TSC0059322
tctactccttacc

SEQ ID NO: 243183 - DNA, 13 bp, Artificial Sequence
  Oligonucleotide for detection of SNP TSC0059322
ggtaagaagtaga

SEQ ID NO: 243184 - DNA, 13 bp, Artificial Sequence
  Oligonucleotide for detection of SNP TSC0059322
tctacttcttacc

SEQ ID NO: 243185 - DNA, 13 bp, Artificial Sequence
  Oligonucleotide for detection of SNP TSC0059323
ggtggtatttttt

SEQ ID NO: 243186 - DNA, 13 bp, Artificial Sequence
  Oligonucleotide for detection of SNP TSC0059323
aaaaaataccacc

SEQ ID NO: 243187 - DNA, 13 bp, Artificial Sequence
  Oligonucleotide for detection of SNP TSC0059323
ggtggtgtttttt

SEQ ID NO: 243188 - DNA, 13 bp, Artificial Sequence
  Oligonucleotide for detection of SNP TSC0059323
aaaaaacaccacc

SEQ ID NO: 243189 - DNA, 13 bp, Artificial Sequence
  Oligonucleotide for detection of SNP TSC0059323
ggtggcgtttttt

SEQ ID NO: 243190 - DNA, 13 bp, Artificial Sequence
  Oligonucleotide for detection of SNP TSC0059323
aaaaaacgccacc

SEQ ID NO: 243191 - DNA, 13 bp, Artificial Sequence
  Oligonucleotide for detection of SNP TSC0059323
aaggaatgttaty

SEQ ID NO: 243192 - DNA, 13 bp, Artificial Sequence
  Oligonucleotide for detection of SNP TSC0059323
rataacattcctt

SEQ ID NO: 243193 - DNA, 13 bp, Artificial Sequence
  Oligonucleotide for detection of SNP TSC0059323
aaggaacgttaty

SEQ ID NO: 243194 - DNA, 13 bp, Artificial Sequence
  Oligonucleotide for detection of SNP TSC0059323
rataacgttcctt

SEQ ID NO: 243195 - DNA, 13 bp, Artificial Sequence
  Oligonucleotide for detection of SNP TSC0059324
ggtttttggggga

SEQ ID NO: 243196 - DNA, 13 bp, Artificial Sequence
  Oligonucleotide for detection of SNP TSC0059324
tcccccaaaaacc

SEQ ID NO: 243197 - DNA, 13 bp, Artificial Sequence
  Oligonucleotide for detection of SNP TSC0059324
ggttttcggggga

SEQ ID NO: 243198 - DNA, 13 bp, Artificial Sequence
  Oligonucleotide for detection of SNP TSC0059324
tcccccgaaaacc

SEQ ID NO: 243199 - DNA, 13 bp, Artificial Sequence
  Oligonucleotide for detection of SNP TSC0059324
tttttttagagty

SEQ ID NO: 243200 - DNA, 13 bp, Artificial Sequence
  Oligonucleotide for detection of SNP TSC0059324
ractctaaaaaaa

SEQ ID NO: 243201 - DNA, 13 bp, Artificial Sequence
  Oligonucleotide for detection of SNP TSC0059325
gggaattgttttg

SEQ ID NO: 243202 - DNA, 13 bp, Artificial Sequence
  Oligonucleotide for detection of SNP TSC0059325
caaaacaattccc

SEQ ID NO: 243203 - DNA, 13 bp, Artificial Sequence
  Oligonucleotide for detection of SNP TSC0059325
gggaatcgttttg

SEQ ID NO: 243204 - DNA, 13 bp, Artificial Sequence
  Oligonucleotide for detection of SNP TSC0059325
caaaacgattccc

SEQ ID NO: 243205 - DNA, 13 bp, Artificial Sequence
  Oligonucleotide for detection of SNP TSC0059325
tagaatgatttty

SEQ ID NO: 243206 - DNA, 13 bp, Artificial Sequence
  Oligonucleotide for detection of SNP TSC0059325
raaaatcattcta

SEQ ID NO: 243207 - DNA, 13 bp, Artificial Sequence
  Oligonucleotide for detection of SNP TSC0059325
tagaataatttty

SEQ ID NO: 243208 - DNA, 13 bp, Artificial Sequence
  Oligonucleotide for detection of SNP TSC0059325
raaaattattcta

SEQ ID NO: 243209 - DNA, 13 bp, Artificial Sequence
  Oligonucleotide for detection of SNP TSC0059325
tagaacgatttty

SEQ ID NO: 243210 - DNA, 13 bp, Artificial Sequence
  Oligonucleotide for detection of SNP TSC0059325
raaaatcgttcta

SEQ ID NO: 243211 - DNA, 13 bp, Artificial Sequence
  Oligonucleotide for detection of SNP TSC0059327
gtataaatgtggg

SEQ ID NO: 243212 - DNA, 13 bp, Artificial Sequence
  Oligonucleotide for detection of SNP TSC0059327
cccacatttatac

SEQ ID NO: 243213 - DNA, 13 bp, Artificial Sequence
  Oligonucleotide for detection of SNP TSC0059327
gtataattgtggg

SEQ ID NO: 243214 - DNA, 13 bp, Artificial Sequence
  Oligonucleotide for detection of SNP TSC0059327
cccacaattatac

SEQ ID NO: 243215 - DNA, 13 bp, Artificial Sequence
  Oligonucleotide for detection of SNP TSC0059327
tttatatttatgy

SEQ ID NO: 243216 - DNA, 13 bp, Artificial Sequence
  Oligonucleotide for detection of SNP TSC0059327
rcataaatataaa

SEQ ID NO: 243217 - DNA, 13 bp, Artificial Sequence
  Oligonucleotide for detection of SNP TSC0059327
tttatagttatgy

SEQ ID NO: 243218 - DNA, 13 bp, Artificial Sequence
  Oligonucleotide for detection of SNP TSC0059327
rcataactataaa

SEQ ID NO: 243219 - DNA, 13 bp, Artificial Sequence
  Oligonucleotide for detection of SNP TSC0059328
gggaataagaaag

SEQ ID NO: 243220 - DNA, 13 bp, Artificial Sequence
  Oligonucleotide for detection of SNP TSC0059328
ctttcttattccc

SEQ ID NO: 243221 - DNA, 13 bp, Artificial Sequence
  Oligonucleotide for detection of SNP TSC0059328
gggaattagaaag

SEQ ID NO: 243222 - DNA, 13 bp, Artificial Sequence
  Oligonucleotide for detection of SNP TSC0059328
ctttctaattccc

SEQ ID NO: 243223 - DNA, 13 bp, Artificial Sequence
  Oligonucleotide for detection of SNP TSC0059329
aaatttgatgtaa

SEQ ID NO: 243224 - DNA, 13 bp, Artificial Sequence
  Oligonucleotide for detection of SNP TSC0059329
ttacatcaaattt

SEQ ID NO: 243225 - DNA, 13 bp, Artificial Sequence
  Oligonucleotide for detection of SNP TSC0059329
aaatttaatgtaa

SEQ ID NO: 243226 - DNA, 13 bp, Artificial Sequence
  Oligonucleotide for detection of SNP TSC0059329
ttacattaaattt

SEQ ID NO: 243227 - DNA, 13 bp, Artificial Sequence
  Oligonucleotide for detection of SNP TSC0059331
gttgtttggtttt

SEQ ID NO: 243228 - DNA, 13 bp, Artificial Sequence
  Oligonucleotide for detection of SNP TSC0059331
aaaaccaaacaac

SEQ ID NO: 243229 - DNA, 13 bp, Artificial Sequence
  Oligonucleotide for detection of SNP TSC0059331
gttgttcggtttt

SEQ ID NO: 243230 - DNA, 13 bp, Artificial Sequence
  Oligonucleotide for detection of SNP TSC0059331
aaaaccgaacaac

SEQ ID NO: 243231 - DNA, 13 bp, Artificial Sequence
  Oligonucleotide for detection of SNP TSC0059331
aagattgagtagy

SEQ ID NO: 243232 - DNA, 13 bp, Artificial Sequence
  Oligonucleotide for detection of SNP TSC0059331
rctactcaatctt

SEQ ID NO: 243233 - DNA, 13 bp, Artificial Sequence
  Oligonucleotide for detection of SNP TSC0059331
aagattaagtagy

SEQ ID NO: 243234 - DNA, 13 bp, Artificial Sequence
  Oligonucleotide for detection of SNP TSC0059331
rctacttaatctt

SEQ ID NO: 243235 - DNA, 13 bp, Artificial Sequence
  Oligonucleotide for detection of SNP TSC0059331
aagatcgagtagy

SEQ ID NO: 243236 - DNA, 13 bp, Artificial Sequence
  Oligonucleotide for detection of SNP TSC0059331
rctactcgatctt

SEQ ID NO: 243237 - DNA, 13 bp, Artificial Sequence
  Oligonucleotide for detection of SNP TSC0059334
gaaggtatgagag

SEQ ID NO: 243238 - DNA, 13 bp, Artificial Sequence
  Oligonucleotide for detection of SNP TSC0059334
ctctcataccttc

SEQ ID NO: 243239 - DNA, 13 bp, Artificial Sequence
  Oligonucleotide for detection of SNP TSC0059334
gaaggtgtgagag

SEQ ID NO: 243240 - DNA, 13 bp, Artificial Sequence
  Oligonucleotide for detection of SNP TSC0059334
ctctcacaccttc

SEQ ID NO: 243241 - DNA, 13 bp, Artificial Sequence
  Oligonucleotide for detection of SNP TSC0059334
gaaggcgtgagag

SEQ ID NO: 243242 - DNA, 13 bp, Artificial Sequence
  Oligonucleotide for detection of SNP TSC0059334
ctctcacgccttc

SEQ ID NO: 243243 - DNA, 13 bp, Artificial Sequence
  Oligonucleotide for detection of SNP TSC0059339
gatgaaagattgy

SEQ ID NO: 243244 - DNA, 13 bp, Artificial Sequence
  Oligonucleotide for detection of SNP TSC0059339
rcaatctttcatc

SEQ ID NO: 243245 - DNA, 13 bp, Artificial Sequence
  Oligonucleotide for detection of SNP TSC0059339
gatgaatgattgy

SEQ ID NO: 243246 - DNA, 13 bp, Artificial Sequence
  Oligonucleotide for detection of SNP TSC0059339
rcaatcattcatc

SEQ ID NO: 243247 - DNA, 13 bp, Artificial Sequence
  Oligonucleotide for detection of SNP TSC0059339
gtaattttttaty

SEQ ID NO: 243248 - DNA, 13 bp, Artificial Sequence
  Oligonucleotide for detection of SNP TSC0059339
rataaaaaattac

SEQ ID NO: 243249 - DNA, 13 bp, Artificial Sequence
  Oligonucleotide for detection of SNP TSC0059339
gtaattatttaty

SEQ ID NO: 243250 - DNA, 13 bp, Artificial Sequence
  Oligonucleotide for detection of SNP TSC0059339
rataaataattac

SEQ ID NO: 243251 - DNA, 13 bp, Artificial Sequence
  Oligonucleotide for detection of SNP TSC0059341
tggtatgtattgy

SEQ ID NO: 243252 - DNA, 13 bp, Artificial Sequence
  Oligonucleotide for detection of SNP TSC0059341
rcaatacatacca

SEQ ID NO: 243253 - DNA, 13 bp, Artificial Sequence
  Oligonucleotide for detection of SNP TSC0059341
tggtatatattgy

SEQ ID NO: 243254 - DNA, 13 bp, Artificial Sequence
  Oligonucleotide for detection of SNP TSC0059341
rcaatatatacca

SEQ ID NO: 243255 - DNA, 13 bp, Artificial Sequence
  Oligonucleotide for detection of SNP TSC0059342
ttttgaaagaaga

SEQ ID NO: 243256 - DNA, 13 bp, Artificial Sequence
  Oligonucleotide for detection of SNP TSC0059342
tcttctttcaaaa

SEQ ID NO: 243257 - DNA, 13 bp, Artificial Sequence
  Oligonucleotide for detection of SNP TSC0059342
ttttgatagaaga

SEQ ID NO: 243258 - DNA, 13 bp, Artificial Sequence
  Oligonucleotide for detection of SNP TSC0059342
tcttctatcaaaa

SEQ ID NO: 243259 - DNA, 13 bp, Artificial Sequence
  Oligonucleotide for detection of SNP TSC0059342
tttcgaaagaaga

SEQ ID NO: 243260 - DNA, 13 bp, Artificial Sequence
  Oligonucleotide for detection of SNP TSC0059342
tcttctttcgaaa

SEQ ID NO: 243261 - DNA, 13 bp, Artificial Sequence
  Oligonucleotide for detection of SNP TSC0059342
tttcgatagaaga

SEQ ID NO: 243262 - DNA, 13 bp, Artificial Sequence
  Oligonucleotide for detection of SNP TSC0059342
tcttctatcgaaa

SEQ ID NO: 243263 - DNA, 13 bp, Artificial Sequence
  Oligonucleotide for detection of SNP TSC0059342
tttttttttgagg

SEQ ID NO: 243264 - DNA, 13 bp, Artificial Sequence
  Oligonucleotide for detection of SNP TSC0059342
cctcaaaaaaaaa

SEQ ID NO: 243265 - DNA, 13 bp, Artificial Sequence
  Oligonucleotide for detection of SNP TSC0059342
ttttttgttgagg

SEQ ID NO: 243266 - DNA, 13 bp, Artificial Sequence
  Oligonucleotide for detection of SNP TSC0059342
cctcaacaaaaaa

SEQ ID NO: 243267 - DNA, 13 bp, Artificial Sequence
  Oligonucleotide for detection of SNP TSC0059342
ttttttttcgagg

SEQ ID NO: 243268 - DNA, 13 bp, Artificial Sequence
  Oligonucleotide for detection of SNP TSC0059342
cctcgaaaaaaaa

SEQ ID NO: 243269 - DNA, 13 bp, Artificial Sequence
  Oligonucleotide for detection of SNP TSC0059342
ttttttgtcgagg

SEQ ID NO: 243270 - DNA, 13 bp, Artificial Sequence
  Oligonucleotide for detection of SNP TSC0059342
cctcgacaaaaaa

SEQ ID NO: 243271 - DNA, 13 bp, Artificial Sequence
  Oligonucleotide for detection of SNP TSC0059343
tggatgataaatg

SEQ ID NO: 243272 - DNA, 13 bp, Artificial Sequence
  Oligonucleotide for detection of SNP TSC0059343
catttatcatcca

SEQ ID NO: 243273 - DNA, 13 bp, Artificial Sequence
  Oligonucleotide for detection of SNP TSC0059343
tggatggtaaatg

SEQ ID NO: 243274 - DNA, 13 bp, Artificial Sequence
  Oligonucleotide for detection of SNP TSC0059343
catttaccatcca

SEQ ID NO: 243275 - DNA, 13 bp, Artificial Sequence
  Oligonucleotide for detection of SNP TSC0059345
agagtttgtgagy

SEQ ID NO: 243276 - DNA, 13 bp, Artificial Sequence
  Oligonucleotide for detection of SNP TSC0059345
rctcacaaactct

SEQ ID NO: 243277 - DNA, 13 bp, Artificial Sequence
  Oligonucleotide for detection of SNP TSC0059345
agagttcgtgagy

SEQ ID NO: 243278 - DNA, 13 bp, Artificial Sequence
  Oligonucleotide for detection of SNP TSC0059345
rctcacgaactct

SEQ ID NO: 243279 - DNA, 13 bp, Artificial Sequence
  Oligonucleotide for detection of SNP TSC0059345
gtttataggtttt

SEQ ID NO: 243280 - DNA, 13 bp, Artificial Sequence
  Oligonucleotide for detection of SNP TSC0059345
aaaacctataaac

SEQ ID NO: 243281 - DNA, 13 bp, Artificial Sequence
  Oligonucleotide for detection of SNP TSC0059345
gtttacgggtttt

SEQ ID NO: 243282 - DNA, 13 bp, Artificial Sequence
  Oligonucleotide for detection of SNP TSC0059345
aaaacccgtaaac

SEQ ID NO: 243283 - DNA, 13 bp, Artificial Sequence
  Oligonucleotide for detection of SNP TSC0059351
tttagggttaata

SEQ ID NO: 243284 - DNA, 13 bp, Artificial Sequence
  Oligonucleotide for detection of SNP TSC0059351
tattaaccctaaa

SEQ ID NO: 243285 - DNA, 13 bp, Artificial Sequence
  Oligonucleotide for detection of SNP TSC0059351
tttaggattaata

SEQ ID NO: 243286 - DNA, 13 bp, Artificial Sequence
  Oligonucleotide for detection of SNP TSC0059351
tattaatcctaaa

SEQ ID NO: 243287 - DNA, 13 bp, Artificial Sequence
  Oligonucleotide for detection of SNP TSC0059354
gtgtaggggcgtg

SEQ ID NO: 243288 - DNA, 13 bp, Artificial Sequence
  Oligonucleotide for detection of SNP TSC0059354
cacgcccctacac

SEQ ID NO: 243289 - DNA, 13 bp, Artificial Sequence
  Oligonucleotide for detection of SNP TSC0059354
tatgtttttgtay

SEQ ID NO: 243290 - DNA, 13 bp, Artificial Sequence
  Oligonucleotide for detection of SNP TSC0059354
rtacaaaaacata

SEQ ID NO: 243291 - DNA, 13 bp, Artificial Sequence
  Oligonucleotide for detection of SNP TSC0059354
tacgtttttgtay

SEQ ID NO: 243292 - DNA, 13 bp, Artificial Sequence
  Oligonucleotide for detection of SNP TSC0059354
rtacaaaaacgta

SEQ ID NO: 243293 - DNA, 13 bp, Artificial Sequence
  Oligonucleotide for detection of SNP TSC0059355
ggaggtgttagat

SEQ ID NO: 243294 - DNA, 13 bp, Artificial Sequence
  Oligonucleotide for detection of SNP TSC0059355
atctaacacctcc

SEQ ID NO: 243295 - DNA, 13 bp, Artificial Sequence
  Oligonucleotide for detection of SNP TSC0059355
ggaggtattagat

SEQ ID NO: 243296 - DNA, 13 bp, Artificial Sequence
  Oligonucleotide for detection of SNP TSC0059355
atctaatacctcc

SEQ ID NO: 243297 - DNA, 13 bp, Artificial Sequence
  Oligonucleotide for detection of SNP TSC0059355
ggaggcgttagat

SEQ ID NO: 243298 - DNA, 13 bp, Artificial Sequence
  Oligonucleotide for detection of SNP TSC0059355
atctaacgcctcc

SEQ ID NO: 243299 - DNA, 13 bp, Artificial Sequence
  Oligonucleotide for detection of SNP TSC0059356
gtaaaaattttga

SEQ ID NO: 243300 - DNA, 13 bp, Artificial Sequence
  Oligonucleotide for detection of SNP TSC0059356
tcaaaatttttac

SEQ ID NO: 243301 - DNA, 13 bp, Artificial Sequence
  Oligonucleotide for detection of SNP TSC0059356
gtaaaatttttga

SEQ ID NO: 243302 - DNA, 13 bp, Artificial Sequence
  Oligonucleotide for detection of SNP TSC0059356
tcaaaaattttac

SEQ ID NO: 243303 - DNA, 13 bp, Artificial Sequence
  Oligonucleotide for detection of SNP TSC0059356
gtaaaaatttcga

SEQ ID NO: 243304 - DNA, 13 bp, Artificial Sequence
  Oligonucleotide for detection of SNP TSC0059356
tcgaaatttttac

SEQ ID NO: 243305 - DNA, 13 bp, Artificial Sequence
  Oligonucleotide for detection of SNP TSC0059356
gtaaaattttcga

SEQ ID NO: 243306 - DNA, 13 bp, Artificial Sequence
  Oligonucleotide for detection of SNP TSC0059356
tcgaaaattttac

SEQ ID NO: 243307 - DNA, 13 bp, Artificial Sequence
  Oligonucleotide for detection of SNP TSC0059356
ttggaatttttgy

SEQ ID NO: 243308 - DNA, 13 bp, Artificial Sequence
  Oligonucleotide for detection of SNP TSC0059356
rcaaaaattccaa

SEQ ID NO: 243309 - DNA, 13 bp, Artificial Sequence
  Oligonucleotide for detection of SNP TSC0059356
ttggaagttttgy

SEQ ID NO: 243310 - DNA, 13 bp, Artificial Sequence
  Oligonucleotide for detection of SNP TSC0059356
rcaaaacttccaa

SEQ ID NO: 243311 - DNA, 13 bp, Artificial Sequence
  Oligonucleotide for detection of SNP TSC0059356
tcggaatttttgy

SEQ ID NO: 243312 - DNA, 13 bp, Artificial Sequence
  Oligonucleotide for detection of SNP TSC0059356
rcaaaaattccga

SEQ ID NO: 243313 - DNA, 13 bp, Artificial Sequence
  Oligonucleotide for detection of SNP TSC0059356
tcggaagttttgy

SEQ ID NO: 243314 - DNA, 13 bp, Artificial Sequence
  Oligonucleotide for detection of SNP TSC0059356
rcaaaacttccga

SEQ ID NO: 243315 - DNA, 13 bp, Artificial Sequence
  Oligonucleotide for detection of SNP TSC0059358
ttggttatttgtt

SEQ ID NO: 243316 - DNA, 13 bp, Artificial Sequence
  Oligonucleotide for detection of SNP TSC0059358
aacaaataaccaa

SEQ ID NO: 243317 - DNA, 13 bp, Artificial Sequence
  Oligonucleotide for detection of SNP TSC0059358
ttggttgtttgtt

SEQ ID NO: 243318 - DNA, 13 bp, Artificial Sequence
  Oligonucleotide for detection of SNP TSC0059358
aacaaacaaccaa

SEQ ID NO: 243319 - DNA, 13 bp, Artificial Sequence
  Oligonucleotide for detection of SNP TSC0059358
ttggtcgtttgtt

SEQ ID NO: 243320 - DNA, 13 bp, Artificial Sequence
  Oligonucleotide for detection of SNP TSC0059358
aacaaacgaccaa

SEQ ID NO: 243321 - DNA, 13 bp, Artificial Sequence
  Oligonucleotide for detection of SNP TSC0059358
aataaatggttag

SEQ ID NO: 243322 - DNA, 13 bp, Artificial Sequence
  Oligonucleotide for detection of SNP TSC0059358
ctaaccatttatt

SEQ ID NO: 243323 - DNA, 13 bp, Artificial Sequence
  Oligonucleotide for detection of SNP TSC0059358
aataaacggttag

SEQ ID NO: 243324 - DNA, 13 bp, Artificial Sequence
  Oligonucleotide for detection of SNP TSC0059358
ctaaccgtttatt

SEQ ID NO: 243325 - DNA, 13 bp, Artificial Sequence
  Oligonucleotide for detection of SNP TSC0059359
aagtaatttattt

SEQ ID NO: 243326 - DNA, 13 bp, Artificial Sequence
  Oligonucleotide for detection of SNP TSC0059359
aaataaattactt

SEQ ID NO: 243327 - DNA, 13 bp, Artificial Sequence
  Oligonucleotide for detection of SNP TSC0059359
aagtaagttattt

SEQ ID NO: 243328 - DNA, 13 bp, Artificial Sequence
  Oligonucleotide for detection of SNP TSC0059359
aaataacttactt

SEQ ID NO: 243329 - DNA, 13 bp, Artificial Sequence
  Oligonucleotide for detection of SNP TSC0059359
agatgagttgttt

SEQ ID NO: 243330 - DNA, 13 bp, Artificial Sequence
  Oligonucleotide for detection of SNP TSC0059359
aaacaactcatct

SEQ ID NO: 243331 - DNA, 13 bp, Artificial Sequence
  Oligonucleotide for detection of SNP TSC0059359
agatgatttgttt

SEQ ID NO: 243332 - DNA, 13 bp, Artificial Sequence
  Oligonucleotide for detection of SNP TSC0059359
aaacaaatcatct

SEQ ID NO: 243333 - DNA, 13 bp, Artificial Sequence
  Oligonucleotide for detection of SNP TSC0059362
gatgttaagttta

SEQ ID NO: 243334 - DNA, 13 bp, Artificial Sequence
  Oligonucleotide for detection of SNP TSC0059362
taaacttaacatc

SEQ ID NO: 243335 - DNA, 13 bp, Artificial Sequence
  Oligonucleotide for detection of SNP TSC0059362
gatgttgagttta

SEQ ID NO: 243336 - DNA, 13 bp, Artificial Sequence
  Oligonucleotide for detection of SNP TSC0059362
taaactcaacatc

SEQ ID NO: 243337 - DNA, 13 bp, Artificial Sequence
  Oligonucleotide for detection of SNP TSC0059363
tagtttaaatttg

SEQ ID NO: 243338 - DNA, 13 bp, Artificial Sequence
  Oligonucleotide for detection of SNP TSC0059363
caaatttaaacta

SEQ ID NO: 243339 - DNA, 13 bp, Artificial Sequence
  Oligonucleotide for detection of SNP TSC0059363
tagtttgaatttg

SEQ ID NO: 243340 - DNA, 13 bp, Artificial Sequence
  Oligonucleotide for detection of SNP TSC0059363
caaattcaaacta

SEQ ID NO: 243341 - DNA, 13 bp, Artificial Sequence
  Oligonucleotide for detection of SNP TSC0059363
tagttcgaatttg

SEQ ID NO: 243342 - DNA, 13 bp, Artificial Sequence
  Oligonucleotide for detection of SNP TSC0059363
caaattcgaacta

SEQ ID NO: 243343 - DNA, 13 bp, Artificial Sequence
  Oligonucleotide for detection of SNP TSC0059363
taggtttggatta

SEQ ID NO: 243344 - DNA, 13 bp, Artificial Sequence
  Oligonucleotide for detection of SNP TSC0059363
taatccaaaccta

SEQ ID NO: 243345 - DNA, 13 bp, Artificial Sequence
  Oligonucleotide for detection of SNP TSC0059363
taggttcggatta

SEQ ID NO: 243346 - DNA, 13 bp, Artificial Sequence
  Oligonucleotide for detection of SNP TSC0059363
taatccgaaccta

SEQ ID NO: 243347 - DNA, 13 bp, Artificial Sequence
  Oligonucleotide for detection of SNP TSC0059366
tagaggttaaata

SEQ ID NO: 243348 - DNA, 13 bp, Artificial Sequence
  Oligonucleotide for detection of SNP TSC0059366
tatttaacctcta

SEQ ID NO: 243349 - DNA, 13 bp, Artificial Sequence
  Oligonucleotide for detection of SNP TSC0059366
tagaggataaata

SEQ ID NO: 243350 - DNA, 13 bp, Artificial Sequence
  Oligonucleotide for detection of SNP TSC0059366
tatttatcctcta

SEQ ID NO: 243351 - DNA, 13 bp, Artificial Sequence
  Oligonucleotide for detection of SNP TSC0059367
ttaaatagataga

SEQ ID NO: 243352 - DNA, 13 bp, Artificial Sequence
  Oligonucleotide for detection of SNP TSC0059367
tctatctatttaa

SEQ ID NO: 243353 - DNA, 13 bp, Artificial Sequence
  Oligonucleotide for detection of SNP TSC0059367
ttaaattgataga

SEQ ID NO: 243354 - DNA, 13 bp, Artificial Sequence
  Oligonucleotide for detection of SNP TSC0059367
tctatcaatttaa

SEQ ID NO: 243355 - DNA, 13 bp, Artificial Sequence
  Oligonucleotide for detection of SNP TSC0059367
ttaaatcgataga

SEQ ID NO: 243356 - DNA, 13 bp, Artificial Sequence
  Oligonucleotide for detection of SNP TSC0059367
tctatcgatttaa

SEQ ID NO: 243357 - DNA, 13 bp, Artificial Sequence
  Oligonucleotide for detection of SNP TSC0059367
tttatttgtttaa

SEQ ID NO: 243358 - DNA, 13 bp, Artificial Sequence
  Oligonucleotide for detection of SNP TSC0059367
ttaaacaaataaa

SEQ ID NO: 243359 - DNA, 13 bp, Artificial Sequence
  Oligonucleotide for detection of SNP TSC0059367
tttatcggtttaa

SEQ ID NO: 243360 - DNA, 13 bp, Artificial Sequence
  Oligonucleotide for detection of SNP TSC0059367
ttaaaccgataaa

SEQ ID NO: 243361 - DNA, 13 bp, Artificial Sequence
  Oligonucleotide for detection of SNP TSC0059368
attttataaaaag

SEQ ID NO: 243362 - DNA, 13 bp, Artificial Sequence
  Oligonucleotide for detection of SNP TSC0059368
ctttttataaaat

SEQ ID NO: 243363 - DNA, 13 bp, Artificial Sequence
  Oligonucleotide for detection of SNP TSC0059368
ttttttgtagggt

SEQ ID NO: 243364 - DNA, 13 bp, Artificial Sequence
  Oligonucleotide for detection of SNP TSC0059368
accctacaaaaaa

SEQ ID NO: 243365 - DNA, 13 bp, Artificial Sequence
  Oligonucleotide for detection of SNP TSC0059371
gaataagaaatta

SEQ ID NO: 243366 - DNA, 13 bp, Artificial Sequence
  Oligonucleotide for detection of SNP TSC0059371
taatttcttattc

SEQ ID NO: 243367 - DNA, 13 bp, Artificial Sequence
  Oligonucleotide for detection of SNP TSC0059371
gaataaaaaatta

SEQ ID NO: 243368 - DNA, 13 bp, Artificial Sequence
  Oligonucleotide for detection of SNP TSC0059371
taattttttattc

SEQ ID NO: 243369 - DNA, 13 bp, Artificial Sequence
  Oligonucleotide for detection of SNP TSC0059372
ttttagaggttgg

SEQ ID NO: 243370 - DNA, 13 bp, Artificial Sequence
  Oligonucleotide for detection of SNP TSC0059372
ccaacctctaaaa

SEQ ID NO: 243371 - DNA, 13 bp, Artificial Sequence
  Oligonucleotide for detection of SNP TSC0059372
ttttagtggttgg

SEQ ID NO: 243372 - DNA, 13 bp, Artificial Sequence
  Oligonucleotide for detection of SNP TSC0059372
ccaaccactaaaa

SEQ ID NO: 243373 - DNA, 13 bp, Artificial Sequence
  Oligonucleotide for detection of SNP TSC0059372
ttagtttttggag

SEQ ID NO: 243374 - DNA, 13 bp, Artificial Sequence
  Oligonucleotide for detection of SNP TSC0059372
ctccaaaaactaa

SEQ ID NO: 243375 - DNA, 13 bp, Artificial Sequence
  Oligonucleotide for detection of SNP TSC0059372
ttagttattggag

SEQ ID NO: 243376 - DNA, 13 bp, Artificial Sequence
  Oligonucleotide for detection of SNP TSC0059372
ctccaataactaa

SEQ ID NO: 243377 - DNA, 13 bp, Artificial Sequence
  Oligonucleotide for detection of SNP TSC0059378
aattatgaggtat

SEQ ID NO: 243378 - DNA, 13 bp, Artificial Sequence
  Oligonucleotide for detection of SNP TSC0059378
atacctcataatt

SEQ ID NO: 243379 - DNA, 13 bp, Artificial Sequence
  Oligonucleotide for detection of SNP TSC0059378
aattataaggtat

SEQ ID NO: 243380 - DNA, 13 bp, Artificial Sequence
  Oligonucleotide for detection of SNP TSC0059378
ataccttataatt

SEQ ID NO: 243381 - DNA, 13 bp, Artificial Sequence
  Oligonucleotide for detection of SNP TSC0059379
ggaagatagtggt

SEQ ID NO: 243382 - DNA, 13 bp, Artificial Sequence
  Oligonucleotide for detection of SNP TSC0059379
accactatcttcc

SEQ ID NO: 243383 - DNA, 13 bp, Artificial Sequence
  Oligonucleotide for detection of SNP TSC0059379
ggaagagagtggt

SEQ ID NO: 243384 - DNA, 13 bp, Artificial Sequence
  Oligonucleotide for detection of SNP TSC0059379
accactctcttcc

SEQ ID NO: 243385 - DNA, 13 bp, Artificial Sequence
  Oligonucleotide for detection of SNP TSC0059380
tattaaggtagty

SEQ ID NO: 243386 - DNA, 13 bp, Artificial Sequence
  Oligonucleotide for detection of SNP TSC0059380
ractaccttaata

SEQ ID NO: 243387 - DNA, 13 bp, Artificial Sequence
  Oligonucleotide for detection of SNP TSC0059380
tattaaagtagty

SEQ ID NO: 243388 - DNA, 13 bp, Artificial Sequence
  Oligonucleotide for detection of SNP TSC0059380
ractactttaata

SEQ ID NO: 243389 - DNA, 13 bp, Artificial Sequence
  Oligonucleotide for detection of SNP TSC0059381
tgtggaaagaaty

SEQ ID NO: 243390 - DNA, 13 bp, Artificial Sequence
  Oligonucleotide for detection of SNP TSC0059381
rattctttccaca

SEQ ID NO: 243391 - DNA, 13 bp, Artificial Sequence
  Oligonucleotide for detection of SNP TSC0059381
tgtggatagaaty

SEQ ID NO: 243392 - DNA, 13 bp, Artificial Sequence
  Oligonucleotide for detection of SNP TSC0059381
rattctatccaca

SEQ ID NO: 243393 - DNA, 13 bp, Artificial Sequence
  Oligonucleotide for detection of SNP TSC0059383
attatatagttta

SEQ ID NO: 243394 - DNA, 13 bp, Artificial Sequence
  Oligonucleotide for detection of SNP TSC0059383
taaactatataat

SEQ ID NO: 243395 - DNA, 13 bp, Artificial Sequence
  Oligonucleotide for detection of SNP TSC0059383
attatagagttta

SEQ ID NO: 243396 - DNA, 13 bp, Artificial Sequence
  Oligonucleotide for detection of SNP TSC0059383
taaactctataat

SEQ ID NO: 243397 - DNA, 13 bp, Artificial Sequence
  Oligonucleotide for detection of SNP TSC0059383
taaattttataat

SEQ ID NO: 243398 - DNA, 13 bp, Artificial Sequence
  Oligonucleotide for detection of SNP TSC0059383
attataaaattta

SEQ ID NO: 243399 - DNA, 13 bp, Artificial Sequence
  Oligonucleotide for detection of SNP TSC0059384
atagaaggtagaa

SEQ ID NO: 243400 - DNA, 13 bp, Artificial Sequence
  Oligonucleotide for detection of SNP TSC0059384
ttctaccttctat

SEQ ID NO: 243401 - DNA, 13 bp, Artificial Sequence
  Oligonucleotide for detection of SNP TSC0059384
atagaaagtagaa

SEQ ID NO: 243402 - DNA, 13 bp, Artificial Sequence
  Oligonucleotide for detection of SNP TSC0059384
ttctactttctat

SEQ ID NO: 243403 - DNA, 13 bp, Artificial Sequence
  Oligonucleotide for detection of SNP TSC0059388
tggttatgggagy

SEQ ID NO: 243404 - DNA, 13 bp, Artificial Sequence
  Oligonucleotide for detection of SNP TSC0059388
rctcccataacca

SEQ ID NO: 243405 - DNA, 13 bp, Artificial Sequence
  Oligonucleotide for detection of SNP TSC0059388
tggttacgggagy

SEQ ID NO: 243406 - DNA, 13 bp, Artificial Sequence
  Oligonucleotide for detection of SNP TSC0059388
rctcccgtaacca

SEQ ID NO: 243407 - DNA, 13 bp, Artificial Sequence
  Oligonucleotide for detection of SNP TSC0010229
tagtgatgttgag

SEQ ID NO: 243408 - DNA, 13 bp, Artificial Sequence
  Oligonucleotide for detection of SNP TSC0010229
ctcaacatcacta

SEQ ID NO: 243409 - DNA, 13 bp, Artificial Sequence
  Oligonucleotide for detection of SNP TSC0010229
tagtgacgttgag

SEQ ID NO: 243410 - DNA, 13 bp, Artificial Sequence
  Oligonucleotide for detection of SNP TSC0010229
ctcaacgtcacta

SEQ ID NO: 243411 - DNA, 13 bp, Artificial Sequence
  Oligonucleotide for detection of SNP TSC0010229
tttaacgttatta

SEQ ID NO: 243412 - DNA, 13 bp, Artificial Sequence
  Oligonucleotide for detection of SNP TSC0010229
taataacgttaaa

SEQ ID NO: 243413 - DNA, 13 bp, Artificial Sequence
  Oligonucleotide for detection of SNP TSC0010230
tattggtgtaaag

SEQ ID NO: 243414 - DNA, 13 bp, Artificial Sequence
  Oligonucleotide for detection of SNP TSC0010230
ctttacaccaata

SEQ ID NO: 243415 - DNA, 13 bp, Artificial Sequence
  Oligonucleotide for detection of SNP TSC0010230
tattggggtaaag

SEQ ID NO: 243416 - DNA, 13 bp, Artificial Sequence
  Oligonucleotide for detection of SNP TSC0010230
ctttaccccaata

SEQ ID NO: 243417 - DNA, 13 bp, Artificial Sequence
  Oligonucleotide for detection of SNP TSC0010230
tattggcgtaaag

SEQ ID NO: 243418 - DNA, 13 bp, Artificial Sequence
  Oligonucleotide for detection of SNP TSC0010230
ctttacgccaata

SEQ ID NO: 243419 - DNA, 13 bp, Artificial Sequence
  Oligonucleotide for detection of SNP TSC0010230
ttttatgttagta

SEQ ID NO: 243420 - DNA, 13 bp, Artificial Sequence
  Oligonucleotide for detection of SNP TSC0010230
tactaacataaaa

SEQ ID NO: 243421 - DNA, 13 bp, Artificial Sequence
  Oligonucleotide for detection of SNP TSC0010230
ttttattttagta

SEQ ID NO: 243422 - DNA, 13 bp, Artificial Sequence
  Oligonucleotide for detection of SNP TSC0010230
tactaaaataaaa

SEQ ID NO: 243423 - DNA, 13 bp, Artificial Sequence
  Oligonucleotide for detection of SNP TSC0010230
ttttacgttagta

SEQ ID NO: 243424 - DNA, 13 bp, Artificial Sequence
  Oligonucleotide for detection of SNP TSC0010230
tactaacgtaaaa

SEQ ID NO: 243425 - DNA, 13 bp, Artificial Sequence
  Oligonucleotide for detection of SNP TSC0010231
atggttgttttta

SEQ ID NO: 243426 - DNA, 13 bp, Artificial Sequence
  Oligonucleotide for detection of SNP TSC0010231
taaaaacaaccat

SEQ ID NO: 243427 - DNA, 13 bp, Artificial Sequence
  Oligonucleotide for detection of SNP TSC0010231
atggttattttta

SEQ ID NO: 243428 - DNA, 13 bp, Artificial Sequence
  Oligonucleotide for detection of SNP TSC0010231
taaaaataaccat

SEQ ID NO: 243429 - DNA, 13 bp, Artificial Sequence
  Oligonucleotide for detection of SNP TSC0010231
atggtcgttttta

SEQ ID NO: 243430 - DNA, 13 bp, Artificial Sequence
  Oligonucleotide for detection of SNP TSC0010231
taaaaacgaccat

SEQ ID NO: 243431 - DNA, 13 bp, Artificial Sequence
  Oligonucleotide for detection of SNP TSC0059389
ttaaatgtaaatt

SEQ ID NO: 243432 - DNA, 13 bp, Artificial Sequence
  Oligonucleotide for detection of SNP TSC0059389
aatttacatttaa

SEQ ID NO: 243433 - DNA, 13 bp, Artificial Sequence
  Oligonucleotide for detection of SNP TSC0059393
tgaattaggagag

SEQ ID NO: 243434 - DNA, 13 bp, Artificial Sequence
  Oligonucleotide for detection of SNP TSC0059393
ctctcctaattca

SEQ ID NO: 243435 - DNA, 13 bp, Artificial Sequence
  Oligonucleotide for detection of SNP TSC0059393
tgaattgggagag

SEQ ID NO: 243436 - DNA, 13 bp, Artificial Sequence
  Oligonucleotide for detection of SNP TSC0059393
ctctcccaattca

SEQ ID NO: 243437 - DNA, 13 bp, Artificial Sequence
  Oligonucleotide for detection of SNP TSC0059393
tgaatcgggagag

SEQ ID NO: 243438 - DNA, 13 bp, Artificial Sequence
  Oligonucleotide for detection of SNP TSC0059393
ctctcccgattca

SEQ ID NO: 243439 - DNA, 13 bp, Artificial Sequence
  Oligonucleotide for detection of SNP TSC0059394
tttttttagtatg

SEQ ID NO: 243440 - DNA, 13 bp, Artificial Sequence
  Oligonucleotide for detection of SNP TSC0059394
catactaaaaaaa

SEQ ID NO: 243441 - DNA, 13 bp, Artificial Sequence
  Oligonucleotide for detection of SNP TSC0059394
tatatttgaagaa

SEQ ID NO: 243442 - DNA, 13 bp, Artificial Sequence
  Oligonucleotide for detection of SNP TSC0059394
ttcttcaaatata

SEQ ID NO: 243443 - DNA, 13 bp, Artificial Sequence
  Oligonucleotide for detection of SNP TSC0059394
tatattggaagaa

SEQ ID NO: 243444 - DNA, 13 bp, Artificial Sequence
  Oligonucleotide for detection of SNP TSC0059394
ttcttccaatata

SEQ ID NO: 243445 - DNA, 13 bp, Artificial Sequence
  Oligonucleotide for detection of SNP TSC0059395
ttgattatatgty

SEQ ID NO: 243446 - DNA, 13 bp, Artificial Sequence
  Oligonucleotide for detection of SNP TSC0059395
racatataatcaa

SEQ ID NO: 243447 - DNA, 13 bp, Artificial Sequence
  Oligonucleotide for detection of SNP TSC0059395
ttgattttatgty

SEQ ID NO: 243448 - DNA, 13 bp, Artificial Sequence
  Oligonucleotide for detection of SNP TSC0059395
racataaaatcaa

SEQ ID NO: 243449 - DNA, 13 bp, Artificial Sequence
  Oligonucleotide for detection of SNP TSC0059395
ggtatgtaattaa

SEQ ID NO: 243450 - DNA, 13 bp, Artificial Sequence
  Oligonucleotide for detection of SNP TSC0059395
ttaattacatacc

SEQ ID NO: 243451 - DNA, 13 bp, Artificial Sequence
  Oligonucleotide for detection of SNP TSC0059395
ggtatggaattaa

SEQ ID NO: 243452 - DNA, 13 bp, Artificial Sequence
  Oligonucleotide for detection of SNP TSC0059395
ttaattccatacc

SEQ ID NO: 243453 - DNA, 13 bp, Artificial Sequence
  Oligonucleotide for detection of SNP TSC0059396
gtatattgagaag

SEQ ID NO: 243454 - DNA, 13 bp, Artificial Sequence
  Oligonucleotide for detection of SNP TSC0059396
cttctcaatatac

SEQ ID NO: 243455 - DNA, 13 bp, Artificial Sequence
  Oligonucleotide for detection of SNP TSC0059396
gtatatcgagaag

SEQ ID NO: 243456 - DNA, 13 bp, Artificial Sequence
  Oligonucleotide for detection of SNP TSC0059396
cttctcgatatac

SEQ ID NO: 243457 - DNA, 13 bp, Artificial Sequence
  Oligonucleotide for detection of SNP TSC0059396
tttttcggtatay

SEQ ID NO: 243458 - DNA, 13 bp, Artificial Sequence
  Oligonucleotide for detection of SNP TSC0059396
rtataccgaaaaa

SEQ ID NO: 243459 - DNA, 13 bp, Artificial Sequence
  Oligonucleotide for detection of SNP TSC0059397
tagatgtgtgtta

SEQ ID NO: 243460 - DNA, 13 bp, Artificial Sequence
  Oligonucleotide for detection of SNP TSC0059397
taacacacatcta

SEQ ID NO: 243461 - DNA, 13 bp, Artificial Sequence
  Oligonucleotide for detection of SNP TSC0059397
tagatgcgtgtta

SEQ ID NO: 243462 - DNA, 13 bp, Artificial Sequence
  Oligonucleotide for detection of SNP TSC0059397
taacacgcatcta

SEQ ID NO: 243463 - DNA, 13 bp, Artificial Sequence
  Oligonucleotide for detection of SNP TSC0059398
tttgggaaaaatg

SEQ ID NO: 243464 - DNA, 13 bp, Artificial Sequence
  Oligonucleotide for detection of SNP TSC0059398
catttttcccaaa

SEQ ID NO: 243465 - DNA, 13 bp, Artificial Sequence
  Oligonucleotide for detection of SNP TSC0059398
tttgggtaaaatg

SEQ ID NO: 243466 - DNA, 13 bp, Artificial Sequence
  Oligonucleotide for detection of SNP TSC0059398
cattttacccaaa

SEQ ID NO: 243467 - DNA, 13 bp, Artificial Sequence
  Oligonucleotide for detection of SNP TSC0059399
gtgttgagatttt

SEQ ID NO: 243468 - DNA, 13 bp, Artificial Sequence
  Oligonucleotide for detection of SNP TSC0059399
aaaatctcaacac

SEQ ID NO: 243469 - DNA, 13 bp, Artificial Sequence
  Oligonucleotide for detection of SNP TSC0059399
gtgttgggatttt

SEQ ID NO: 243470 - DNA, 13 bp, Artificial Sequence
  Oligonucleotide for detection of SNP TSC0059399
aaaatcccaacac

SEQ ID NO: 243471 - DNA, 13 bp, Artificial Sequence
  Oligonucleotide for detection of SNP TSC0059400
aggttttagggat

SEQ ID NO: 243472 - DNA, 13 bp, Artificial Sequence
  Oligonucleotide for detection of SNP TSC0059400
atccctaaaacct

SEQ ID NO: 243473 - DNA, 13 bp, Artificial Sequence
  Oligonucleotide for detection of SNP TSC0059400
aggtttgagggat

SEQ ID NO: 243474 - DNA, 13 bp, Artificial Sequence
  Oligonucleotide for detection of SNP TSC0059400
atccctcaaacct

SEQ ID NO: 243475 - DNA, 13 bp, Artificial Sequence
  Oligonucleotide for detection of SNP TSC0059401
attatataggaay

SEQ ID NO: 243476 - DNA, 13 bp, Artificial Sequence
  Oligonucleotide for detection of SNP TSC0059401
rttcctatataat

SEQ ID NO: 243477 - DNA, 13 bp, Artificial Sequence
  Oligonucleotide for detection of SNP TSC0059401
attatagaggaay

SEQ ID NO: 243478 - DNA, 13 bp, Artificial Sequence
  Oligonucleotide for detection of SNP TSC0059401
rttcctctataat

SEQ ID NO: 243479 - DNA, 13 bp, Artificial Sequence
  Oligonucleotide for detection of SNP TSC0059401
gtttttatgtgat

SEQ ID NO: 243480 - DNA, 13 bp, Artificial Sequence
  Oligonucleotide for detection of SNP TSC0059401
atcacataaaaac

SEQ ID NO: 243481 - DNA, 13 bp, Artificial Sequence
  Oligonucleotide for detection of SNP TSC0059401
gtttttttgtgat

SEQ ID NO: 243482 - DNA, 13 bp, Artificial Sequence
  Oligonucleotide for detection of SNP TSC0059401
atcacaaaaaaac

SEQ ID NO: 243483 - DNA, 13 bp, Artificial Sequence
  Oligonucleotide for detection of SNP TSC0059402
attaaggtgatty

SEQ ID NO: 243484 - DNA, 13 bp, Artificial Sequence
  Oligonucleotide for detection of SNP TSC0059402
raatcaccttaat

SEQ ID NO: 243485 - DNA, 13 bp, Artificial Sequence
  Oligonucleotide for detection of SNP TSC0059402
attaagatgatty

SEQ ID NO: 243486 - DNA, 13 bp, Artificial Sequence
  Oligonucleotide for detection of SNP TSC0059402
raatcatcttaat

SEQ ID NO: 243487 - DNA, 13 bp, Artificial Sequence
  Oligonucleotide for detection of SNP TSC0059404
tttagaataaatg

SEQ ID NO: 243488 - DNA, 13 bp, Artificial Sequence
  Oligonucleotide for detection of SNP TSC0059404
catttattctaaa

SEQ ID NO: 243489 - DNA, 13 bp, Artificial Sequence
  Oligonucleotide for detection of SNP TSC0059404
tttagagtaaatg

SEQ ID NO: 243490 - DNA, 13 bp, Artificial Sequence
  Oligonucleotide for detection of SNP TSC0059404
catttactctaaa

SEQ ID NO: 243491 - DNA, 13 bp, Artificial Sequence
  Oligonucleotide for detection of SNP TSC0059405
gaaaaataatata

SEQ ID NO: 243492 - DNA, 13 bp, Artificial Sequence
  Oligonucleotide for detection of SNP TSC0059405
tatattatttttc

SEQ ID NO: 243493 - DNA, 13 bp, Artificial Sequence
  Oligonucleotide for detection of SNP TSC0059405
gaaaaagaatata

SEQ ID NO: 243494 - DNA, 13 bp, Artificial Sequence
  Oligonucleotide for detection of SNP TSC0059405
tatattctttttc

SEQ ID NO: 243495 - DNA, 13 bp, Artificial Sequence
  Oligonucleotide for detection of SNP TSC0059406
aaatatattttty

SEQ ID NO: 243496 - DNA, 13 bp, Artificial Sequence
  Oligonucleotide for detection of SNP TSC0059406
raaaaatatattt

SEQ ID NO: 243497 - DNA, 13 bp, Artificial Sequence
  Oligonucleotide for detection of SNP TSC0059406
aaatatgttttty

SEQ ID NO: 243498 - DNA, 13 bp, Artificial Sequence
  Oligonucleotide for detection of SNP TSC0059406
raaaaacatattt

SEQ ID NO: 243499 - DNA, 13 bp, Artificial Sequence
  Oligonucleotide for detection of SNP TSC0059408
ttgttatttgtta

SEQ ID NO: 243500 - DNA, 13 bp, Artificial Sequence
  Oligonucleotide for detection of SNP TSC0059408
taacaaataacaa

SEQ ID NO: 243501 - DNA, 13 bp, Artificial Sequence
  Oligonucleotide for detection of SNP TSC0059408
tagtagttggtag

SEQ ID NO: 243502 - DNA, 13 bp, Artificial Sequence
  Oligonucleotide for detection of SNP TSC0059408
ctaccaactacta

SEQ ID NO: 243503 - DNA, 13 bp, Artificial Sequence
  Oligonucleotide for detection of SNP TSC0059408
tagtaggtggtag

SEQ ID NO: 243504 - DNA, 13 bp, Artificial Sequence
  Oligonucleotide for detection of SNP TSC0059408
ctaccacctacta

SEQ ID NO: 243505 - DNA, 13 bp, Artificial Sequence
  Oligonucleotide for detection of SNP TSC0059409
tgggtggggttty

SEQ ID NO: 243506 - DNA, 13 bp, Artificial Sequence
  Oligonucleotide for detection of SNP TSC0059409
raaaccccaccca

SEQ ID NO: 243507 - DNA, 13 bp, Artificial Sequence
  Oligonucleotide for detection of SNP TSC0059409
tgggtgaggttty

SEQ ID NO: 243508 - DNA, 13 bp, Artificial Sequence
  Oligonucleotide for detection of SNP TSC0059409
raaacctcaccca

SEQ ID NO: 243509 - DNA, 13 bp, Artificial Sequence
  Oligonucleotide for detection of SNP TSC0059409
tgggcggggttty

SEQ ID NO: 243510 - DNA, 13 bp, Artificial Sequence
  Oligonucleotide for detection of SNP TSC0059409
raaaccccgccca

SEQ ID NO: 243511 - DNA, 13 bp, Artificial Sequence
  Oligonucleotide for detection of SNP TSC0059409
tgggcgaggttty

SEQ ID NO: 243512 - DNA, 13 bp, Artificial Sequence
  Oligonucleotide for detection of SNP TSC0059409
raaacctcgccca

SEQ ID NO: 243513 - DNA, 13 bp, Artificial Sequence
  Oligonucleotide for detection of SNP TSC0059410
tggggagggattt

SEQ ID NO: 243514 - DNA, 13 bp, Artificial Sequence
  Oligonucleotide for detection of SNP TSC0059410
aaatccctcccca

SEQ ID NO: 243515 - DNA, 13 bp, Artificial Sequence
  Oligonucleotide for detection of SNP TSC0059410
tggggaaggattt

SEQ ID NO: 243516 - DNA, 13 bp, Artificial Sequence
  Oligonucleotide for detection of SNP TSC0059410
aaatccttcccca

SEQ ID NO: 243517 - DNA, 13 bp, Artificial Sequence
  Oligonucleotide for detection of SNP TSC0059411
taaaatgaaaata

SEQ ID NO: 243518 - DNA, 13 bp, Artificial Sequence
  Oligonucleotide for detection of SNP TSC0059411
tattttcatttta

SEQ ID NO: 243519 - DNA, 13 bp, Artificial Sequence
  Oligonucleotide for detection of SNP TSC0059412
tatgaagttaaaa

SEQ ID NO: 243520 - DNA, 13 bp, Artificial Sequence
  Oligonucleotide for detection of SNP TSC0059412
ttttaacttcata

SEQ ID NO: 243521 - DNA, 13 bp, Artificial Sequence
  Oligonucleotide for detection of SNP TSC0059412
tatgaaattaaaa

SEQ ID NO: 243522 - DNA, 13 bp, Artificial Sequence
  Oligonucleotide for detection of SNP TSC0059412
ttttaatttcata

SEQ ID NO: 243523 - DNA, 13 bp, Artificial Sequence
  Oligonucleotide for detection of SNP TSC0059413
gaagagtgataga

SEQ ID NO: 243524 - DNA, 13 bp, Artificial Sequence
  Oligonucleotide for detection of SNP TSC0059413
tctatcactcttc

SEQ ID NO: 243525 - DNA, 13 bp, Artificial Sequence
  Oligonucleotide for detection of SNP TSC0059413
gaagagggataga

SEQ ID NO: 243526 - DNA, 13 bp, Artificial Sequence
  Oligonucleotide for detection of SNP TSC0059413
tctatccctcttc

SEQ ID NO: 243527 - DNA, 13 bp, Artificial Sequence
  Oligonucleotide for detection of SNP TSC0059413
gaagagcgataga

SEQ ID NO: 243528 - DNA, 13 bp, Artificial Sequence
  Oligonucleotide for detection of SNP TSC0059413
tctatcgctcttc

SEQ ID NO: 243529 - DNA, 13 bp, Artificial Sequence
  Oligonucleotide for detection of SNP TSC0059414
gtaaatatgggtg

SEQ ID NO: 243530 - DNA, 13 bp, Artificial Sequence
  Oligonucleotide for detection of SNP TSC0059414
cacccatatttac

SEQ ID NO: 243531 - DNA, 13 bp, Artificial Sequence
  Oligonucleotide for detection of SNP TSC0059414
gtaaatgtgggtg

SEQ ID NO: 243532 - DNA, 13 bp, Artificial Sequence
  Oligonucleotide for detection of SNP TSC0059414
cacccacatttac

SEQ ID NO: 243533 - DNA, 13 bp, Artificial Sequence
  Oligonucleotide for detection of SNP TSC0059414
gtaaatatgggcg

SEQ ID NO: 243534 - DNA, 13 bp, Artificial Sequence
  Oligonucleotide for detection of SNP TSC0059414
cgcccatatttac

SEQ ID NO: 243535 - DNA, 13 bp, Artificial Sequence
  Oligonucleotide for detection of SNP TSC0059414
gtaaacgtgggtg

SEQ ID NO: 243536 - DNA, 13 bp, Artificial Sequence
  Oligonucleotide for detection of SNP TSC0059414
cacccacgtttac

SEQ ID NO: 243537 - DNA, 13 bp, Artificial Sequence
  Oligonucleotide for detection of SNP TSC0059414
gtaaatgtgggcg

SEQ ID NO: 243538 - DNA, 13 bp, Artificial Sequence
  Oligonucleotide for detection of SNP TSC0059414
cgcccacatttac

SEQ ID NO: 243539 - DNA, 13 bp, Artificial Sequence
  Oligonucleotide for detection of SNP TSC0059414
gtaaacgtgggcg

SEQ ID NO: 243540 - DNA, 13 bp, Artificial Sequence
  Oligonucleotide for detection of SNP TSC0059414
cgcccacgtttac

SEQ ID NO: 243541 - DNA, 13 bp, Artificial Sequence
  Oligonucleotide for detection of SNP TSC0059414
cgtttatgtttgy

SEQ ID NO: 243542 - DNA, 13 bp, Artificial Sequence
  Oligonucleotide for detection of SNP TSC0059414
rcaaacataaacg

SEQ ID NO: 243543 - DNA, 13 bp, Artificial Sequence
  Oligonucleotide for detection of SNP TSC0059414
cgtttacgtttgy

SEQ ID NO: 243544 - DNA, 13 bp, Artificial Sequence
  Oligonucleotide for detection of SNP TSC0059414
rcaaacgtaaacg

SEQ ID NO: 243545 - DNA, 13 bp, Artificial Sequence
  Oligonucleotide for detection of SNP TSC0059415
attagttaattgt

SEQ ID NO: 243546 - DNA, 13 bp, Artificial Sequence
  Oligonucleotide for detection of SNP TSC0059415
acaattaactaat

SEQ ID NO: 243547 - DNA, 13 bp, Artificial Sequence
  Oligonucleotide for detection of SNP TSC0059415
attagtgaattgt

SEQ ID NO: 243548 - DNA, 13 bp, Artificial Sequence
  Oligonucleotide for detection of SNP TSC0059415
acaattcactaat

SEQ ID NO: 243549 - DNA, 13 bp, Artificial Sequence
  Oligonucleotide for detection of SNP TSC0059415
ataattaattagt

SEQ ID NO: 243550 - DNA, 13 bp, Artificial Sequence
  Oligonucleotide for detection of SNP TSC0059415
actaattaattat

SEQ ID NO: 243551 - DNA, 13 bp, Artificial Sequence
  Oligonucleotide for detection of SNP TSC0059415
ataatttattagt

SEQ ID NO: 243552 - DNA, 13 bp, Artificial Sequence
  Oligonucleotide for detection of SNP TSC0059415
actaataaattat

SEQ ID NO: 243553 - DNA, 13 bp, Artificial Sequence
  Oligonucleotide for detection of SNP TSC0059416
gaggtaaaggtag

SEQ ID NO: 243554 - DNA, 13 bp, Artificial Sequence
  Oligonucleotide for detection of SNP TSC0059416
ctacctttacctc

SEQ ID NO: 243555 - DNA, 13 bp, Artificial Sequence
  Oligonucleotide for detection of SNP TSC0059416
gaggtagaggtag

SEQ ID NO: 243556 - DNA, 13 bp, Artificial Sequence
  Oligonucleotide for detection of SNP TSC0059416
ctacctctacctc

SEQ ID NO: 243557 - DNA, 13 bp, Artificial Sequence
  Oligonucleotide for detection of SNP TSC0059417
gagattatggggy

SEQ ID NO: 243558 - DNA, 13 bp, Artificial Sequence
  Oligonucleotide for detection of SNP TSC0059417
rccccataatctc

SEQ ID NO: 243559 - DNA, 13 bp, Artificial Sequence
  Oligonucleotide for detection of SNP TSC0059417
gagattgtggggy

SEQ ID NO: 243560 - DNA, 13 bp, Artificial Sequence
  Oligonucleotide for detection of SNP TSC0059417
rccccacaatctc

SEQ ID NO: 243561 - DNA, 13 bp, Artificial Sequence
  Oligonucleotide for detection of SNP TSC0059417
gagatcgtggggy

SEQ ID NO: 243562 - DNA, 13 bp, Artificial Sequence
  Oligonucleotide for detection of SNP TSC0059417
rccccacgatctc

SEQ ID NO: 243563 - DNA, 13 bp, Artificial Sequence
  Oligonucleotide for detection of SNP TSC0059417
gttttatggttty

SEQ ID NO: 243564 - DNA, 13 bp, Artificial Sequence
  Oligonucleotide for detection of SNP TSC0059417
raaaccataaaac

SEQ ID NO: 243565 - DNA, 13 bp, Artificial Sequence
  Oligonucleotide for detection of SNP TSC0059417
gttttacggttty

SEQ ID NO: 243566 - DNA, 13 bp, Artificial Sequence
  Oligonucleotide for detection of SNP TSC0059417
raaaccgtaaaac

SEQ ID NO: 243567 - DNA, 13 bp, Artificial Sequence
  Oligonucleotide for detection of SNP TSC0059418
tggaggtgaaggt

SEQ ID NO: 243568 - DNA, 13 bp, Artificial Sequence
  Oligonucleotide for detection of SNP TSC0059418
accttcacctcca

SEQ ID NO: 243569 - DNA, 13 bp, Artificial Sequence
  Oligonucleotide for detection of SNP TSC0059418
tggaggcgaaggt

SEQ ID NO: 243570 - DNA, 13 bp, Artificial Sequence
  Oligonucleotide for detection of SNP TSC0059418
accttcgcctcca

SEQ ID NO: 243571 - DNA, 13 bp, Artificial Sequence
  Oligonucleotide for detection of SNP TSC0059419
agttttgggttty

SEQ ID NO: 243572 - DNA, 13 bp, Artificial Sequence
  Oligonucleotide for detection of SNP TSC0059419
raaacccaaaact

SEQ ID NO: 243573 - DNA, 13 bp, Artificial Sequence
  Oligonucleotide for detection of SNP TSC0059419
agtttcgggttty

SEQ ID NO: 243574 - DNA, 13 bp, Artificial Sequence
  Oligonucleotide for detection of SNP TSC0059419
raaacccgaaact

SEQ ID NO: 243575 - DNA, 13 bp, Artificial Sequence
  Oligonucleotide for detection of SNP TSC0059419
gggatttgagatt

SEQ ID NO: 243576 - DNA, 13 bp, Artificial Sequence
  Oligonucleotide for detection of SNP TSC0059419
aatctcaaatccc

SEQ ID NO: 243577 - DNA, 13 bp, Artificial Sequence
  Oligonucleotide for detection of SNP TSC0059419
gggattcgagatt

SEQ ID NO: 243578 - DNA, 13 bp, Artificial Sequence
  Oligonucleotide for detection of SNP TSC0059419
aatctcgaatccc

SEQ ID NO: 243579 - DNA, 13 bp, Artificial Sequence
  Oligonucleotide for detection of SNP TSC0059420
ggggggagttttg

SEQ ID NO: 243580 - DNA, 13 bp, Artificial Sequence
  Oligonucleotide for detection of SNP TSC0059420
caaaactcccccc

SEQ ID NO: 243581 - DNA, 13 bp, Artificial Sequence
  Oligonucleotide for detection of SNP TSC0059420
ggggggtgttttg

SEQ ID NO: 243582 - DNA, 13 bp, Artificial Sequence
  Oligonucleotide for detection of SNP TSC0059420
caaaacacccccc

SEQ ID NO: 243583 - DNA, 13 bp, Artificial Sequence
  Oligonucleotide for detection of SNP TSC0059420
taggatattttty

SEQ ID NO: 243584 - DNA, 13 bp, Artificial Sequence
  Oligonucleotide for detection of SNP TSC0059420
raaaaatatccta

SEQ ID NO: 243585 - DNA, 13 bp, Artificial Sequence
  Oligonucleotide for detection of SNP TSC0059421
gtttgtatttagg

SEQ ID NO: 243586 - DNA, 13 bp, Artificial Sequence
  Oligonucleotide for detection of SNP TSC0059421
cctaaatacaaac

SEQ ID NO: 243587 - DNA, 13 bp, Artificial Sequence
  Oligonucleotide for detection of SNP TSC0059421
gtttgtgtttagg

SEQ ID NO: 243588 - DNA, 13 bp, Artificial Sequence
  Oligonucleotide for detection of SNP TSC0059421
cctaaacacaaac

SEQ ID NO: 243589 - DNA, 13 bp, Artificial Sequence
  Oligonucleotide for detection of SNP TSC0059421
gtttgcgtttagg

SEQ ID NO: 243590 - DNA, 13 bp, Artificial Sequence
  Oligonucleotide for detection of SNP TSC0059421
cctaaacgcaaac

SEQ ID NO: 243591 - DNA, 13 bp, Artificial Sequence
  Oligonucleotide for detection of SNP TSC0059421
tttgagtgtaggy

SEQ ID NO: 243592 - DNA, 13 bp, Artificial Sequence
  Oligonucleotide for detection of SNP TSC0059421
rcctacactcaaa

SEQ ID NO: 243593 - DNA, 13 bp, Artificial Sequence
  Oligonucleotide for detection of SNP TSC0059421
tttgagcgtaggy

SEQ ID NO: 243594 - DNA, 13 bp, Artificial Sequence
  Oligonucleotide for detection of SNP TSC0059421
rcctacgctcaaa

SEQ ID NO: 243595 - DNA, 13 bp, Artificial Sequence
  Oligonucleotide for detection of SNP TSC0059422
ttgagtgtttagt

SEQ ID NO: 243596 - DNA, 13 bp, Artificial Sequence
  Oligonucleotide for detection of SNP TSC0059422
actaaacactcaa

SEQ ID NO: 243597 - DNA, 13 bp, Artificial Sequence
  Oligonucleotide for detection of SNP TSC0059422
ttgagtatttagt

SEQ ID NO: 243598 - DNA, 13 bp, Artificial Sequence
  Oligonucleotide for detection of SNP TSC0059422
actaaatactcaa

SEQ ID NO: 243599 - DNA, 13 bp, Artificial Sequence
  Oligonucleotide for detection of SNP TSC0059423
gggggaggtttta

SEQ ID NO: 243600 - DNA, 13 bp, Artificial Sequence
  Oligonucleotide for detection of SNP TSC0059423
taaaacctccccc

SEQ ID NO: 243601 - DNA, 13 bp, Artificial Sequence
  Oligonucleotide for detection of SNP TSC0059424
tttttattatata

SEQ ID NO: 243602 - DNA, 13 bp, Artificial Sequence
  Oligonucleotide for detection of SNP TSC0059424
tatataataaaaa

SEQ ID NO: 243603 - DNA, 13 bp, Artificial Sequence
  Oligonucleotide for detection of SNP TSC0059424
tgtgtgttgggga

SEQ ID NO: 243604 - DNA, 13 bp, Artificial Sequence
  Oligonucleotide for detection of SNP TSC0059424
tccccaacacaca

SEQ ID NO: 243605 - DNA, 13 bp, Artificial Sequence
  Oligonucleotide for detection of SNP TSC0059424
tgtgtggtgggga

SEQ ID NO: 243606 - DNA, 13 bp, Artificial Sequence
  Oligonucleotide for detection of SNP TSC0059424
tccccaccacaca

SEQ ID NO: 243607 - DNA, 13 bp, Artificial Sequence
  Oligonucleotide for detection of SNP TSC0059425
attttataagtga

SEQ ID NO: 243608 - DNA, 13 bp, Artificial Sequence
  Oligonucleotide for detection of SNP TSC0059425
tcacttataaaat

SEQ ID NO: 243609 - DNA, 13 bp, Artificial Sequence
  Oligonucleotide for detection of SNP TSC0059425
attttagaagtga

SEQ ID NO: 243610 - DNA, 13 bp, Artificial Sequence
  Oligonucleotide for detection of SNP TSC0059425
tcacttctaaaat

SEQ ID NO: 243611 - DNA, 13 bp, Artificial Sequence
  Oligonucleotide for detection of SNP TSC0059425
ttatttataggat

SEQ ID NO: 243612 - DNA, 13 bp, Artificial Sequence
  Oligonucleotide for detection of SNP TSC0059425
atcctataaataa

SEQ ID NO: 243613 - DNA, 13 bp, Artificial Sequence
  Oligonucleotide for detection of SNP TSC0059425
ttatttttaggat

SEQ ID NO: 243614 - DNA, 13 bp, Artificial Sequence
  Oligonucleotide for detection of SNP TSC0059425
atcctaaaaataa

SEQ ID NO: 243615 - DNA, 13 bp, Artificial Sequence
  Oligonucleotide for detection of SNP TSC0059426
gttattagagaaa

SEQ ID NO: 243616 - DNA, 13 bp, Artificial Sequence
  Oligonucleotide for detection of SNP TSC0059426
tttctctaataac

SEQ ID NO: 243617 - DNA, 13 bp, Artificial Sequence
  Oligonucleotide for detection of SNP TSC0059426
gttattggagaaa

SEQ ID NO: 243618 - DNA, 13 bp, Artificial Sequence
  Oligonucleotide for detection of SNP TSC0059426
tttctccaataac

SEQ ID NO: 243619 - DNA, 13 bp, Artificial Sequence
  Oligonucleotide for detection of SNP TSC0059426
gttatcggagaaa

SEQ ID NO: 243620 - DNA, 13 bp, Artificial Sequence
  Oligonucleotide for detection of SNP TSC0059426
tttctccgataac

SEQ ID NO: 243621 - DNA, 13 bp, Artificial Sequence
  Oligonucleotide for detection of SNP TSC0059426
tttttttgatggy

SEQ ID NO: 243622 - DNA, 13 bp, Artificial Sequence
  Oligonucleotide for detection of SNP TSC0059426
rccatcaaaaaaa

SEQ ID NO: 243623 - DNA, 13 bp, Artificial Sequence
  Oligonucleotide for detection of SNP TSC0059426
ttttttcgatggy

SEQ ID NO: 243624 - DNA, 13 bp, Artificial Sequence
  Oligonucleotide for detection of SNP TSC0059426
rccatcgaaaaaa

SEQ ID NO: 243625 - DNA, 13 bp, Artificial Sequence
  Oligonucleotide for detection of SNP TSC0059427
ttatgagtttatg

SEQ ID NO: 243626 - DNA, 13 bp, Artificial Sequence
  Oligonucleotide for detection of SNP TSC0059427
cataaactcataa

SEQ ID NO: 243627 - DNA, 13 bp, Artificial Sequence
  Oligonucleotide for detection of SNP TSC0059427
ttatgaatttatg

SEQ ID NO: 243628 - DNA, 13 bp, Artificial Sequence
  Oligonucleotide for detection of SNP TSC0059427
cataaattcataa

SEQ ID NO: 243629 - DNA, 13 bp, Artificial Sequence
  Oligonucleotide for detection of SNP TSC0059428
gaaaatttaagga

SEQ ID NO: 243630 - DNA, 13 bp, Artificial Sequence
  Oligonucleotide for detection of SNP TSC0059428
tccttaaattttc

SEQ ID NO: 243631 - DNA, 13 bp, Artificial Sequence
  Oligonucleotide for detection of SNP TSC0059428
gaaaatataagga

SEQ ID NO: 243632 - DNA, 13 bp, Artificial Sequence
  Oligonucleotide for detection of SNP TSC0059428
tccttatattttc

SEQ ID NO: 243633 - DNA, 13 bp, Artificial Sequence
  Oligonucleotide for detection of SNP TSC0059434
tgttttaataatt

SEQ ID NO: 243634 - DNA, 13 bp, Artificial Sequence
  Oligonucleotide for detection of SNP TSC0059434
aattattaaaaca

SEQ ID NO: 243635 - DNA, 13 bp, Artificial Sequence
  Oligonucleotide for detection of SNP TSC0059434
tgttttgataatt

SEQ ID NO: 243636 - DNA, 13 bp, Artificial Sequence
  Oligonucleotide for detection of SNP TSC0059434
aattatcaaaaca

SEQ ID NO: 243637 - DNA, 13 bp, Artificial Sequence
  Oligonucleotide for detection of SNP TSC0059437
ggtatgagtgaga

SEQ ID NO: 243638 - DNA, 13 bp, Artificial Sequence
  Oligonucleotide for detection of SNP TSC0059437
tctcactcatacc

SEQ ID NO: 243639 - DNA, 13 bp, Artificial Sequence
  Oligonucleotide for detection of SNP TSC0059437
ggtatgggtgaga

SEQ ID NO: 243640 - DNA, 13 bp, Artificial Sequence
  Oligonucleotide for detection of SNP TSC0059437
tctcacccatacc

SEQ ID NO: 243641 - DNA, 13 bp, Artificial Sequence
  Oligonucleotide for detection of SNP TSC0059438
tggttggagagtg

SEQ ID NO: 243642 - DNA, 13 bp, Artificial Sequence
  Oligonucleotide for detection of SNP TSC0059438
cactctccaacca

SEQ ID NO: 243643 - DNA, 13 bp, Artificial Sequence
  Oligonucleotide for detection of SNP TSC0059438
tggttgtagagtg

SEQ ID NO: 243644 - DNA, 13 bp, Artificial Sequence
  Oligonucleotide for detection of SNP TSC0059438
cactctacaacca

SEQ ID NO: 243645 - DNA, 13 bp, Artificial Sequence
  Oligonucleotide for detection of SNP TSC0059439
aaaggtattttty

SEQ ID NO: 243646 - DNA, 13 bp, Artificial Sequence
  Oligonucleotide for detection of SNP TSC0059439
raaaaataccttt

SEQ ID NO: 243647 - DNA, 13 bp, Artificial Sequence
  Oligonucleotide for detection of SNP TSC0059439
aaaggtgttttty

SEQ ID NO: 243648 - DNA, 13 bp, Artificial Sequence
  Oligonucleotide for detection of SNP TSC0059439
raaaaacaccttt

SEQ ID NO: 243649 - DNA, 13 bp, Artificial Sequence
  Oligonucleotide for detection of SNP TSC0059440
gaatttttgtatt

SEQ ID NO: 243650 - DNA, 13 bp, Artificial Sequence
  Oligonucleotide for detection of SNP TSC0059440
aatacaaaaattc

SEQ ID NO: 243651 - DNA, 13 bp, Artificial Sequence
  Oligonucleotide for detection of SNP TSC0059440
gaatttgtgtatt

SEQ ID NO: 243652 - DNA, 13 bp, Artificial Sequence
  Oligonucleotide for detection of SNP TSC0059440
aatacacaaattc

SEQ ID NO: 243653 - DNA, 13 bp, Artificial Sequence
  Oligonucleotide for detection of SNP TSC0059440
aatatagagatty

SEQ ID NO: 243654 - DNA, 13 bp, Artificial Sequence
  Oligonucleotide for detection of SNP TSC0059440
raatctctatatt

SEQ ID NO: 243655 - DNA, 13 bp, Artificial Sequence
  Oligonucleotide for detection of SNP TSC0059440
aatatatagatty

SEQ ID NO: 243656 - DNA, 13 bp, Artificial Sequence
  Oligonucleotide for detection of SNP TSC0059440
raatctatatatt

SEQ ID NO: 243657 - DNA, 13 bp, Artificial Sequence
  Oligonucleotide for detection of SNP TSC0059441
attaatattttay

SEQ ID NO: 243658 - DNA, 13 bp, Artificial Sequence
  Oligonucleotide for detection of SNP TSC0059441
rtaaaatattaat

SEQ ID NO: 243659 - DNA, 13 bp, Artificial Sequence
  Oligonucleotide for detection of SNP TSC0059441
attaattttttay

SEQ ID NO: 243660 - DNA, 13 bp, Artificial Sequence
  Oligonucleotide for detection of SNP TSC0059441
rtaaaaaattaat

SEQ ID NO: 243661 - DNA, 13 bp, Artificial Sequence
  Oligonucleotide for detection of SNP TSC0059441
gtgaaatattaat

SEQ ID NO: 243662 - DNA, 13 bp, Artificial Sequence
  Oligonucleotide for detection of SNP TSC0059441
attaatatttcac

SEQ ID NO: 243663 - DNA, 13 bp, Artificial Sequence
  Oligonucleotide for detection of SNP TSC0059441
gtgaaagattaat

SEQ ID NO: 243664 - DNA, 13 bp, Artificial Sequence
  Oligonucleotide for detection of SNP TSC0059441
attaatctttcac

SEQ ID NO: 243665 - DNA, 13 bp, Artificial Sequence
  Oligonucleotide for detection of SNP TSC0059442
ataattatagagt

SEQ ID NO: 243666 - DNA, 13 bp, Artificial Sequence
  Oligonucleotide for detection of SNP TSC0059442
actctataattat

SEQ ID NO: 243667 - DNA, 13 bp, Artificial Sequence
  Oligonucleotide for detection of SNP TSC0059442
ataattgtagagt

SEQ ID NO: 243668 - DNA, 13 bp, Artificial Sequence
  Oligonucleotide for detection of SNP TSC0059442
actctacaattat

SEQ ID NO: 243669 - DNA, 13 bp, Artificial Sequence
  Oligonucleotide for detection of SNP TSC0059443
gtgtagaaatatt

SEQ ID NO: 243670 - DNA, 13 bp, Artificial Sequence
  Oligonucleotide for detection of SNP TSC0059443
aatatttctacac

SEQ ID NO: 243671 - DNA, 13 bp, Artificial Sequence
  Oligonucleotide for detection of SNP TSC0059443
gtgtaggaatatt

SEQ ID NO: 243672 - DNA, 13 bp, Artificial Sequence
  Oligonucleotide for detection of SNP TSC0059443
aatattcctacac

SEQ ID NO: 243673 - DNA, 13 bp, Artificial Sequence
  Oligonucleotide for detection of SNP TSC0059445
atattagtatttg

SEQ ID NO: 243674 - DNA, 13 bp, Artificial Sequence
  Oligonucleotide for detection of SNP TSC0059445
caaatactaatat

SEQ ID NO: 243675 - DNA, 13 bp, Artificial Sequence
  Oligonucleotide for detection of SNP TSC0059445
atattaatatttg

SEQ ID NO: 243676 - DNA, 13 bp, Artificial Sequence
  Oligonucleotide for detection of SNP TSC0059445
caaatattaatat

SEQ ID NO: 243677 - DNA, 13 bp, Artificial Sequence
  Oligonucleotide for detection of SNP TSC0059448
ataaaatggatga

SEQ ID NO: 243678 - DNA, 13 bp, Artificial Sequence
  Oligonucleotide for detection of SNP TSC0059448
tcatccattttat

SEQ ID NO: 243679 - DNA, 13 bp, Artificial Sequence
  Oligonucleotide for detection of SNP TSC0059448
ataaaacggatga

SEQ ID NO: 243680 - DNA, 13 bp, Artificial Sequence
  Oligonucleotide for detection of SNP TSC0059448
tcatccgttttat

SEQ ID NO: 243681 - DNA, 13 bp, Artificial Sequence
  Oligonucleotide for detection of SNP TSC0059450
tttatatggtggy

SEQ ID NO: 243682 - DNA, 13 bp, Artificial Sequence
  Oligonucleotide for detection of SNP TSC0059450
rccaccatataaa

SEQ ID NO: 243683 - DNA, 13 bp, Artificial Sequence
  Oligonucleotide for detection of SNP TSC0059450
tttatacggtggy

SEQ ID NO: 243684 - DNA, 13 bp, Artificial Sequence
  Oligonucleotide for detection of SNP TSC0059450
rccaccgtataaa

SEQ ID NO: 243685 - DNA, 13 bp, Artificial Sequence
  Oligonucleotide for detection of SNP TSC0059450
tttatatggcggy

SEQ ID NO: 243686 - DNA, 13 bp, Artificial Sequence
  Oligonucleotide for detection of SNP TSC0059450
rccgccatataaa

SEQ ID NO: 243687 - DNA, 13 bp, Artificial Sequence
  Oligonucleotide for detection of SNP TSC0059450
tttatacggcggy

SEQ ID NO: 243688 - DNA, 13 bp, Artificial Sequence
  Oligonucleotide for detection of SNP TSC0059450
rccgccgtataaa

SEQ ID NO: 243689 - DNA, 13 bp, Artificial Sequence
  Oligonucleotide for detection of SNP TSC0059450
gttgttgtgtaag

SEQ ID NO: 243690 - DNA, 13 bp, Artificial Sequence
  Oligonucleotide for detection of SNP TSC0059450
cttacacaacaac

SEQ ID NO: 243691 - DNA, 13 bp, Artificial Sequence
  Oligonucleotide for detection of SNP TSC0059450
gttgttatgtaag

SEQ ID NO: 243692 - DNA, 13 bp, Artificial Sequence
  Oligonucleotide for detection of SNP TSC0059450
cttacataacaac

SEQ ID NO: 243693 - DNA, 13 bp, Artificial Sequence
  Oligonucleotide for detection of SNP TSC0059450
gtcgttgtgtaag

SEQ ID NO: 243694 - DNA, 13 bp, Artificial Sequence
  Oligonucleotide for detection of SNP TSC0059450
cttacacaacgac

SEQ ID NO: 243695 - DNA, 13 bp, Artificial Sequence
  Oligonucleotide for detection of SNP TSC0059450
gtcgttatgtaag

SEQ ID NO: 243696 - DNA, 13 bp, Artificial Sequence
  Oligonucleotide for detection of SNP TSC0059450
cttacataacgac

SEQ ID NO: 243697 - DNA, 13 bp, Artificial Sequence
  Oligonucleotide for detection of SNP TSC0059450
gttgtcgtgtaag

SEQ ID NO: 243698 - DNA, 13 bp, Artificial Sequence
  Oligonucleotide for detection of SNP TSC0059450
cttacacgacaac

SEQ ID NO: 243699 - DNA, 13 bp, Artificial Sequence
  Oligonucleotide for detection of SNP TSC0059450
gtcgtcgtgtaag

SEQ ID NO: 243700 - DNA, 13 bp, Artificial Sequence
  Oligonucleotide for detection of SNP TSC0059450
cttacacgacgac

SEQ ID NO: 243701 - DNA, 13 bp, Artificial Sequence
  Oligonucleotide for detection of SNP TSC0059452
aggtttaattatt

SEQ ID NO: 243702 - DNA, 13 bp, Artificial Sequence
  Oligonucleotide for detection of SNP TSC0059452
aataattaaacct

SEQ ID NO: 243703 - DNA, 13 bp, Artificial Sequence
  Oligonucleotide for detection of SNP TSC0059452
aggtttgattatt

SEQ ID NO: 243704 - DNA, 13 bp, Artificial Sequence
  Oligonucleotide for detection of SNP TSC0059452
aataatcaaacct

SEQ ID NO: 243705 - DNA, 13 bp, Artificial Sequence
  Oligonucleotide for detection of SNP TSC0059455
ggtagagtatgtg

SEQ ID NO: 243706 - DNA, 13 bp, Artificial Sequence
  Oligonucleotide for detection of SNP TSC0059455
cacatactctacc

SEQ ID NO: 243707 - DNA, 13 bp, Artificial Sequence
  Oligonucleotide for detection of SNP TSC0059455
ggtagaatatgtg

SEQ ID NO: 243708 - DNA, 13 bp, Artificial Sequence
  Oligonucleotide for detection of SNP TSC0059455
cacatattctacc

SEQ ID NO: 243709 - DNA, 13 bp, Artificial Sequence
  Oligonucleotide for detection of SNP TSC0059456
attgggggaatty

SEQ ID NO: 243710 - DNA, 13 bp, Artificial Sequence
  Oligonucleotide for detection of SNP TSC0059456
raattcccccaat

SEQ ID NO: 243711 - DNA, 13 bp, Artificial Sequence
  Oligonucleotide for detection of SNP TSC0059456
attgggagaatty

SEQ ID NO: 243712 - DNA, 13 bp, Artificial Sequence
  Oligonucleotide for detection of SNP TSC0059456
raattctcccaat

SEQ ID NO: 243713 - DNA, 13 bp, Artificial Sequence
  Oligonucleotide for detection of SNP TSC0059457
ttttatataaatg

SEQ ID NO: 243714 - DNA, 13 bp, Artificial Sequence
  Oligonucleotide for detection of SNP TSC0059457
catttatataaaa

SEQ ID NO: 243715 - DNA, 13 bp, Artificial Sequence
  Oligonucleotide for detection of SNP TSC0059457
ttttatgtaaatg

SEQ ID NO: 243716 - DNA, 13 bp, Artificial Sequence
  Oligonucleotide for detection of SNP TSC0059457
catttacataaaa

SEQ ID NO: 243717 - DNA, 13 bp, Artificial Sequence
  Oligonucleotide for detection of SNP TSC0059459
gtttatatattty

SEQ ID NO: 243718 - DNA, 13 bp, Artificial Sequence
  Oligonucleotide for detection of SNP TSC0059459
raaatatataaac

SEQ ID NO: 243719 - DNA, 13 bp, Artificial Sequence
  Oligonucleotide for detection of SNP TSC0059459
gtttatgtattty

SEQ ID NO: 243720 - DNA, 13 bp, Artificial Sequence
  Oligonucleotide for detection of SNP TSC0059459
raaatacataaac

SEQ ID NO: 243721 - DNA, 13 bp, Artificial Sequence
  Oligonucleotide for detection of SNP TSC0059462
atgttatgggttt

SEQ ID NO: 243722 - DNA, 13 bp, Artificial Sequence
  Oligonucleotide for detection of SNP TSC0059462
aaacccataacat

SEQ ID NO: 243723 - DNA, 13 bp, Artificial Sequence
  Oligonucleotide for detection of SNP TSC0059462
atgttacgggttt

SEQ ID NO: 243724 - DNA, 13 bp, Artificial Sequence
  Oligonucleotide for detection of SNP TSC0059462
aaacccgtaacat

SEQ ID NO: 243725 - DNA, 13 bp, Artificial Sequence
  Oligonucleotide for detection of SNP TSC0059462
aagtttgtaatat

SEQ ID NO: 243726 - DNA, 13 bp, Artificial Sequence
  Oligonucleotide for detection of SNP TSC0059462
atattacaaactt

SEQ ID NO: 243727 - DNA, 13 bp, Artificial Sequence
  Oligonucleotide for detection of SNP TSC0059462
aagttcgtaatat

SEQ ID NO: 243728 - DNA, 13 bp, Artificial Sequence
  Oligonucleotide for detection of SNP TSC0059462
atattacgaactt

SEQ ID NO: 243729 - DNA, 13 bp, Artificial Sequence
  Oligonucleotide for detection of SNP TSC0059463
taagaaattttaa

SEQ ID NO: 243730 - DNA, 13 bp, Artificial Sequence
  Oligonucleotide for detection of SNP TSC0059463
ttaaaatttctta

SEQ ID NO: 243731 - DNA, 13 bp, Artificial Sequence
  Oligonucleotide for detection of SNP TSC0059463
taagaatttttaa

SEQ ID NO: 243732 - DNA, 13 bp, Artificial Sequence
  Oligonucleotide for detection of SNP TSC0059463
ttaaaaattctta

SEQ ID NO: 243733 - DNA, 13 bp, Artificial Sequence
  Oligonucleotide for detection of SNP TSC0059463
ttggaattttttg

SEQ ID NO: 243734 - DNA, 13 bp, Artificial Sequence
  Oligonucleotide for detection of SNP TSC0059463
caaaaaattccaa

SEQ ID NO: 243735 - DNA, 13 bp, Artificial Sequence
  Oligonucleotide for detection of SNP TSC0059463
ttggaagtttttg

SEQ ID NO: 243736 - DNA, 13 bp, Artificial Sequence
  Oligonucleotide for detection of SNP TSC0059463
caaaaacttccaa

SEQ ID NO: 243737 - DNA, 13 bp, Artificial Sequence
  Oligonucleotide for detection of SNP TSC0059464
aatggttgtggaa

SEQ ID NO: 243738 - DNA, 13 bp, Artificial Sequence
  Oligonucleotide for detection of SNP TSC0059464
ttccacaaccatt

SEQ ID NO: 243739 - DNA, 13 bp, Artificial Sequence
  Oligonucleotide for detection of SNP TSC0059464
aatggtcgtggaa

SEQ ID NO: 243740 - DNA, 13 bp, Artificial Sequence
  Oligonucleotide for detection of SNP TSC0059464
ttccacgaccatt

SEQ ID NO: 243741 - DNA, 13 bp, Artificial Sequence
  Oligonucleotide for detection of SNP TSC0059465
ttaggaatttata

SEQ ID NO: 243742 - DNA, 13 bp, Artificial Sequence
  Oligonucleotide for detection of SNP TSC0059465
tataaattcctaa

SEQ ID NO: 243743 - DNA, 13 bp, Artificial Sequence
  Oligonucleotide for detection of SNP TSC0059465
ttaggagtttata

SEQ ID NO: 243744 - DNA, 13 bp, Artificial Sequence
  Oligonucleotide for detection of SNP TSC0059465
tataaactcctaa

SEQ ID NO: 243745 - DNA, 13 bp, Artificial Sequence
  Oligonucleotide for detection of SNP TSC0059467
ttttgcgtttatt

SEQ ID NO: 243746 - DNA, 13 bp, Artificial Sequence
  Oligonucleotide for detection of SNP TSC0059467
aataaacgcaaaa

SEQ ID NO: 243747 - DNA, 13 bp, Artificial Sequence
  Oligonucleotide for detection of SNP TSC0059467
tttcgcgtttatt

SEQ ID NO: 243748 - DNA, 13 bp, Artificial Sequence
  Oligonucleotide for detection of SNP TSC0059467
aataaacgcgaaa

SEQ ID NO: 243749 - DNA, 13 bp, Artificial Sequence
  Oligonucleotide for detection of SNP TSC0059467
agtagaggtgggg

SEQ ID NO: 243750 - DNA, 13 bp, Artificial Sequence
  Oligonucleotide for detection of SNP TSC0059467
ccccacctctact

SEQ ID NO: 243751 - DNA, 13 bp, Artificial Sequence
  Oligonucleotide for detection of SNP TSC0059467
agtagatgtgggg

SEQ ID NO: 243752 - DNA, 13 bp, Artificial Sequence
  Oligonucleotide for detection of SNP TSC0059467
ccccacatctact

SEQ ID NO: 243753 - DNA, 13 bp, Artificial Sequence
  Oligonucleotide for detection of SNP TSC0059467
agtagaggcgggg

SEQ ID NO: 243754 - DNA, 13 bp, Artificial Sequence
  Oligonucleotide for detection of SNP TSC0059467
ccccgcctctact

SEQ ID NO: 243755 - DNA, 13 bp, Artificial Sequence
  Oligonucleotide for detection of SNP TSC0059467
agtagacgtgggg

SEQ ID NO: 243756 - DNA, 13 bp, Artificial Sequence
  Oligonucleotide for detection of SNP TSC0059467
ccccacgtctact

SEQ ID NO: 243757 - DNA, 13 bp, Artificial Sequence
  Oligonucleotide for detection of SNP TSC0059467
agtagatgcgggg

SEQ ID NO: 243758 - DNA, 13 bp, Artificial Sequence
  Oligonucleotide for detection of SNP TSC0059467
ccccgcatctact

SEQ ID NO: 243759 - DNA, 13 bp, Artificial Sequence
  Oligonucleotide for detection of SNP TSC0059467
agtagacgcgggg

SEQ ID NO: 243760 - DNA, 13 bp, Artificial Sequence
  Oligonucleotide for detection of SNP TSC0059467
ccccgcgtctact

SEQ ID NO: 243761 - DNA, 13 bp, Artificial Sequence
  Oligonucleotide for detection of SNP TSC0059469
ggtggtagataty

SEQ ID NO: 243762 - DNA, 13 bp, Artificial Sequence
  Oligonucleotide for detection of SNP TSC0059469
ratatctaccacc

SEQ ID NO: 243763 - DNA, 13 bp, Artificial Sequence
  Oligonucleotide for detection of SNP TSC0059469
ggtggtggataty

SEQ ID NO: 243764 - DNA, 13 bp, Artificial Sequence
  Oligonucleotide for detection of SNP TSC0059469
ratatccaccacc

SEQ ID NO: 243765 - DNA, 13 bp, Artificial Sequence
  Oligonucleotide for detection of SNP TSC0059469
ggtggcggataty

SEQ ID NO: 243766 - DNA, 13 bp, Artificial Sequence
  Oligonucleotide for detection of SNP TSC0059469
ratatccgccacc

SEQ ID NO: 243767 - DNA, 13 bp, Artificial Sequence
  Oligonucleotide for detection of SNP TSC0059472
gtattataatatg

SEQ ID NO: 243768 - DNA, 13 bp, Artificial Sequence
  Oligonucleotide for detection of SNP TSC0059472
catattataatac

SEQ ID NO: 243769 - DNA, 13 bp, Artificial Sequence
  Oligonucleotide for detection of SNP TSC0059472
gtattagaatatg

SEQ ID NO: 243770 - DNA, 13 bp, Artificial Sequence
  Oligonucleotide for detection of SNP TSC0059472
catattctaatac

SEQ ID NO: 243771 - DNA, 13 bp, Artificial Sequence
  Oligonucleotide for detection of SNP TSC0059472
tatattgtgatgy

SEQ ID NO: 243772 - DNA, 13 bp, Artificial Sequence
  Oligonucleotide for detection of SNP TSC0059472
rcatcacaatata

SEQ ID NO: 243773 - DNA, 13 bp, Artificial Sequence
  Oligonucleotide for detection of SNP TSC0059472
tatattttgatgy

SEQ ID NO: 243774 - DNA, 13 bp, Artificial Sequence
  Oligonucleotide for detection of SNP TSC0059472
rcatcaaaatata

SEQ ID NO: 243775 - DNA, 13 bp, Artificial Sequence
  Oligonucleotide for detection of SNP TSC0059475
agggtatgagaay

SEQ ID NO: 243776 - DNA, 13 bp, Artificial Sequence
  Oligonucleotide for detection of SNP TSC0059475
rttctcataccct

SEQ ID NO: 243777 - DNA, 13 bp, Artificial Sequence
  Oligonucleotide for detection of SNP TSC0059475
agggtaggagaay

SEQ ID NO: 243778 - DNA, 13 bp, Artificial Sequence
  Oligonucleotide for detection of SNP TSC0059475
rttctcctaccct

SEQ ID NO: 243779 - DNA, 13 bp, Artificial Sequence
  Oligonucleotide for detection of SNP TSC0059477
atgagtggataty

SEQ ID NO: 243780 - DNA, 13 bp, Artificial Sequence
  Oligonucleotide for detection of SNP TSC0059477
ratatccactcat

SEQ ID NO: 243781 - DNA, 13 bp, Artificial Sequence
  Oligonucleotide for detection of SNP TSC0059477
atgagtagataty

SEQ ID NO: 243782 - DNA, 13 bp, Artificial Sequence
  Oligonucleotide for detection of SNP TSC0059477
ratatctactcat

SEQ ID NO: 243783 - DNA, 13 bp, Artificial Sequence
  Oligonucleotide for detection of SNP TSC0059478
aggtgtgttttty

SEQ ID NO: 243784 - DNA, 13 bp, Artificial Sequence
  Oligonucleotide for detection of SNP TSC0059478
raaaaacacacct

SEQ ID NO: 243785 - DNA, 13 bp, Artificial Sequence
  Oligonucleotide for detection of SNP TSC0059478
aggtgtattttty

SEQ ID NO: 243786 - DNA, 13 bp, Artificial Sequence
  Oligonucleotide for detection of SNP TSC0059478
raaaaatacacct

SEQ ID NO: 243787 - DNA, 13 bp, Artificial Sequence
  Oligonucleotide for detection of SNP TSC0059481
ttttattgtggga

SEQ ID NO: 243788 - DNA, 13 bp, Artificial Sequence
  Oligonucleotide for detection of SNP TSC0059481
tcccacaataaaa

SEQ ID NO: 243789 - DNA, 13 bp, Artificial Sequence
  Oligonucleotide for detection of SNP TSC0059481
ttttatggtggga

SEQ ID NO: 243790 - DNA, 13 bp, Artificial Sequence
  Oligonucleotide for detection of SNP TSC0059481
tcccaccataaaa

SEQ ID NO: 243791 - DNA, 13 bp, Artificial Sequence
  Oligonucleotide for detection of SNP TSC0059481
ttttatcgtggga

SEQ ID NO: 243792 - DNA, 13 bp, Artificial Sequence
  Oligonucleotide for detection of SNP TSC0059481
tcccacgataaaa

SEQ ID NO: 243793 - DNA, 13 bp, Artificial Sequence
  Oligonucleotide for detection of SNP TSC0059481
ttttatggcggga

SEQ ID NO: 243794 - DNA, 13 bp, Artificial Sequence
  Oligonucleotide for detection of SNP TSC0059481
tcccgccataaaa

SEQ ID NO: 243795 - DNA, 13 bp, Artificial Sequence
  Oligonucleotide for detection of SNP TSC0059481
ttttattgcggga

SEQ ID NO: 243796 - DNA, 13 bp, Artificial Sequence
  Oligonucleotide for detection of SNP TSC0059481
tcccgcaataaaa

SEQ ID NO: 243797 - DNA, 13 bp, Artificial Sequence
  Oligonucleotide for detection of SNP TSC0059481
ttttatcgcggga

SEQ ID NO: 243798 - DNA, 13 bp, Artificial Sequence
  Oligonucleotide for detection of SNP TSC0059481
tcccgcgataaaa

SEQ ID NO: 243799 - DNA, 13 bp, Artificial Sequence
  Oligonucleotide for detection of SNP TSC0059481
ttttgtgatgagg

SEQ ID NO: 243800 - DNA, 13 bp, Artificial Sequence
  Oligonucleotide for detection of SNP TSC0059481
cctcatcacaaaa

SEQ ID NO: 243801 - DNA, 13 bp, Artificial Sequence
  Oligonucleotide for detection of SNP TSC0059481
ttttgttatgagg

SEQ ID NO: 243802 - DNA, 13 bp, Artificial Sequence
  Oligonucleotide for detection of SNP TSC0059481
cctcataacaaaa

SEQ ID NO: 243803 - DNA, 13 bp, Artificial Sequence
  Oligonucleotide for detection of SNP TSC0059481
tttcgtgatgagg

SEQ ID NO: 243804 - DNA, 13 bp, Artificial Sequence
  Oligonucleotide for detection of SNP TSC0059481
cctcatcacgaaa

SEQ ID NO: 243805 - DNA, 13 bp, Artificial Sequence
  Oligonucleotide for detection of SNP TSC0059481
tttcgttatgagg

SEQ ID NO: 243806 - DNA, 13 bp, Artificial Sequence
  Oligonucleotide for detection of SNP TSC0059481
cctcataacgaaa

SEQ ID NO: 243807 - DNA, 13 bp, Artificial Sequence
  Oligonucleotide for detection of SNP TSC0059481
ttttgcgatgagg

SEQ ID NO: 243808 - DNA, 13 bp, Artificial Sequence
  Oligonucleotide for detection of SNP TSC0059481
cctcatcgcaaaa

SEQ ID NO: 243809 - DNA, 13 bp, Artificial Sequence
  Oligonucleotide for detection of SNP TSC0059481
tttcgcgatgagg

SEQ ID NO: 243810 - DNA, 13 bp, Artificial Sequence
  Oligonucleotide for detection of SNP TSC0059481
cctcatcgcgaaa

SEQ ID NO: 243811 - DNA, 13 bp, Artificial Sequence
  Oligonucleotide for detection of SNP TSC0059485
atataggaatgtg

SEQ ID NO: 243812 - DNA, 13 bp, Artificial Sequence
  Oligonucleotide for detection of SNP TSC0059485
cacattcctatat

SEQ ID NO: 243813 - DNA, 13 bp, Artificial Sequence
  Oligonucleotide for detection of SNP TSC0059485
atatagaaatgtg

SEQ ID NO: 243814 - DNA, 13 bp, Artificial Sequence
  Oligonucleotide for detection of SNP TSC0059485
cacatttctatat

SEQ ID NO: 243815 - DNA, 13 bp, Artificial Sequence
  Oligonucleotide for detection of SNP TSC0059486
aataaaaataaay

SEQ ID NO: 243816 - DNA, 13 bp, Artificial Sequence
  Oligonucleotide for detection of SNP TSC0059486
rtttatttttatt

SEQ ID NO: 243817 - DNA, 13 bp, Artificial Sequence
  Oligonucleotide for detection of SNP TSC0059486
aataaagataaay

SEQ ID NO: 243818 - DNA, 13 bp, Artificial Sequence
  Oligonucleotide for detection of SNP TSC0059486
rtttatctttatt

SEQ ID NO: 243819 - DNA, 13 bp, Artificial Sequence
  Oligonucleotide for detection of SNP TSC0059488
aaatatattttgt

SEQ ID NO: 243820 - DNA, 13 bp, Artificial Sequence
  Oligonucleotide for detection of SNP TSC0059488
acaaaatatattt

SEQ ID NO: 243821 - DNA, 13 bp, Artificial Sequence
  Oligonucleotide for detection of SNP TSC0059488
aaatatgttttgt

SEQ ID NO: 243822 - DNA, 13 bp, Artificial Sequence
  Oligonucleotide for detection of SNP TSC0059488
acaaaacatattt

SEQ ID NO: 243823 - DNA, 13 bp, Artificial Sequence
  Oligonucleotide for detection of SNP TSC0059490
aattatatataty

SEQ ID NO: 243824 - DNA, 13 bp, Artificial Sequence
  Oligonucleotide for detection of SNP TSC0059490
ratatatataatt

SEQ ID NO: 243825 - DNA, 13 bp, Artificial Sequence
  Oligonucleotide for detection of SNP TSC0059490
aattatgtataty

SEQ ID NO: 243826 - DNA, 13 bp, Artificial Sequence
  Oligonucleotide for detection of SNP TSC0059490
ratatacataatt

SEQ ID NO: 243827 - DNA, 13 bp, Artificial Sequence
  Oligonucleotide for detection of SNP TSC0059491
aaaattttagtat

SEQ ID NO: 243828 - DNA, 13 bp, Artificial Sequence
  Oligonucleotide for detection of SNP TSC0059491
atactaaaatttt

SEQ ID NO: 243829 - DNA, 13 bp, Artificial Sequence
  Oligonucleotide for detection of SNP TSC0059491
atattgggatttt

SEQ ID NO: 243830 - DNA, 13 bp, Artificial Sequence
  Oligonucleotide for detection of SNP TSC0059491
aaaatcccaatat

SEQ ID NO: 243831 - DNA, 13 bp, Artificial Sequence
  Oligonucleotide for detection of SNP TSC0059491
atattgtgatttt

SEQ ID NO: 243832 - DNA, 13 bp, Artificial Sequence
  Oligonucleotide for detection of SNP TSC0059491
aaaatcacaatat

SEQ ID NO: 243833 - DNA, 13 bp, Artificial Sequence
  Oligonucleotide for detection of SNP TSC0059491
atattgcgatttt

SEQ ID NO: 243834 - DNA, 13 bp, Artificial Sequence
  Oligonucleotide for detection of SNP TSC0059491
aaaatcgcaatat

SEQ ID NO: 243835 - DNA, 13 bp, Artificial Sequence
  Oligonucleotide for detection of SNP TSC0059495
atgagtaaattta

SEQ ID NO: 243836 - DNA, 13 bp, Artificial Sequence
  Oligonucleotide for detection of SNP TSC0059495
taaatttactcat

SEQ ID NO: 243837 - DNA, 13 bp, Artificial Sequence
  Oligonucleotide for detection of SNP TSC0059495
atgagttaattta

SEQ ID NO: 243838 - DNA, 13 bp, Artificial Sequence
  Oligonucleotide for detection of SNP TSC0059495
taaattaactcat

SEQ ID NO: 243839 - DNA, 13 bp, Artificial Sequence
  Oligonucleotide for detection of SNP TSC0059495
tggatttgtttat

SEQ ID NO: 243840 - DNA, 13 bp, Artificial Sequence
  Oligonucleotide for detection of SNP TSC0059495
ataaacaaatcca

SEQ ID NO: 243841 - DNA, 13 bp, Artificial Sequence
  Oligonucleotide for detection of SNP TSC0059495
tggattagtttat

SEQ ID NO: 243842 - DNA, 13 bp, Artificial Sequence
  Oligonucleotide for detection of SNP TSC0059495
ataaactaatcca

SEQ ID NO: 243843 - DNA, 13 bp, Artificial Sequence
  Oligonucleotide for detection of SNP TSC0059496
gggtgaatttgtg

SEQ ID NO: 243844 - DNA, 13 bp, Artificial Sequence
  Oligonucleotide for detection of SNP TSC0059496
cacaaattcaccc

SEQ ID NO: 243845 - DNA, 13 bp, Artificial Sequence
  Oligonucleotide for detection of SNP TSC0059496
gggtgagtttgtg

SEQ ID NO: 243846 - DNA, 13 bp, Artificial Sequence
  Oligonucleotide for detection of SNP TSC0059496
cacaaactcaccc

SEQ ID NO: 243847 - DNA, 13 bp, Artificial Sequence
  Oligonucleotide for detection of SNP TSC0059496
gggcgaatttgtg

SEQ ID NO: 243848 - DNA, 13 bp, Artificial Sequence
  Oligonucleotide for detection of SNP TSC0059496
cacaaattcgccc

SEQ ID NO: 243849 - DNA, 13 bp, Artificial Sequence
  Oligonucleotide for detection of SNP TSC0059496
gggcgagtttgtg

SEQ ID NO: 243850 - DNA, 13 bp, Artificial Sequence
  Oligonucleotide for detection of SNP TSC0059496
cacaaactcgccc

SEQ ID NO: 243851 - DNA, 13 bp, Artificial Sequence
  Oligonucleotide for detection of SNP TSC0059496
gggtgaattcgtg

SEQ ID NO: 243852 - DNA, 13 bp, Artificial Sequence
  Oligonucleotide for detection of SNP TSC0059496
cacgaattcaccc

SEQ ID NO: 243853 - DNA, 13 bp, Artificial Sequence
  Oligonucleotide for detection of SNP TSC0059496
gggtgagttcgtg

SEQ ID NO: 243854 - DNA, 13 bp, Artificial Sequence
  Oligonucleotide for detection of SNP TSC0059496
cacgaactcaccc

SEQ ID NO: 243855 - DNA, 13 bp, Artificial Sequence
  Oligonucleotide for detection of SNP TSC0059496
gggtgaatttgcg

SEQ ID NO: 243856 - DNA, 13 bp, Artificial Sequence
  Oligonucleotide for detection of SNP TSC0059496
cgcaaattcaccc

SEQ ID NO: 243857 - DNA, 13 bp, Artificial Sequence
  Oligonucleotide for detection of SNP TSC0059496
gggtgagtttgcg

SEQ ID NO: 243858 - DNA, 13 bp, Artificial Sequence
  Oligonucleotide for detection of SNP TSC0059496
cgcaaactcaccc

SEQ ID NO: 243859 - DNA, 13 bp, Artificial Sequence
  Oligonucleotide for detection of SNP TSC0059496
gggcgaattcgtg

SEQ ID NO: 243860 - DNA, 13 bp, Artificial Sequence
  Oligonucleotide for detection of SNP TSC0059496
cacgaattcgccc

SEQ ID NO: 243861 - DNA, 13 bp, Artificial Sequence
  Oligonucleotide for detection of SNP TSC0059496
gggcgagttcgtg

SEQ ID NO: 243862 - DNA, 13 bp, Artificial Sequence
  Oligonucleotide for detection of SNP TSC0059496
cacgaactcgccc

SEQ ID NO: 243863 - DNA, 13 bp, Artificial Sequence
  Oligonucleotide for detection of SNP TSC0059496
gggcgaatttgcg

SEQ ID NO: 243864 - DNA, 13 bp, Artificial Sequence
  Oligonucleotide for detection of SNP TSC0059496
cgcaaattcgccc

SEQ ID NO: 243865 - DNA, 13 bp, Artificial Sequence
  Oligonucleotide for detection of SNP TSC0059496
gggcgagtttgcg

SEQ ID NO: 243866 - DNA, 13 bp, Artificial Sequence
  Oligonucleotide for detection of SNP TSC0059496
cgcaaactcgccc

SEQ ID NO: 243867 - DNA, 13 bp, Artificial Sequence
  Oligonucleotide for detection of SNP TSC0059496
gggtgaattcgcg

SEQ ID NO: 243868 - DNA, 13 bp, Artificial Sequence
  Oligonucleotide for detection of SNP TSC0059496
cgcgaattcaccc

SEQ ID NO: 243869 - DNA, 13 bp, Artificial Sequence
  Oligonucleotide for detection of SNP TSC0059496
gggtgagttcgcg

SEQ ID NO: 243870 - DNA, 13 bp, Artificial Sequence
  Oligonucleotide for detection of SNP TSC0059496
cgcgaactcaccc

SEQ ID NO: 243871 - DNA, 13 bp, Artificial Sequence
  Oligonucleotide for detection of SNP TSC0059496
gggcgaattcgcg

SEQ ID NO: 243872 - DNA, 13 bp, Artificial Sequence
  Oligonucleotide for detection of SNP TSC0059496
cgcgaattcgccc

SEQ ID NO: 243873 - DNA, 13 bp, Artificial Sequence
  Oligonucleotide for detection of SNP TSC0059496
gggcgagttcgcg

SEQ ID NO: 243874 - DNA, 13 bp, Artificial Sequence
  Oligonucleotide for detection of SNP TSC0059496
cgcgaactcgccc

SEQ ID NO: 243875 - DNA, 13 bp, Artificial Sequence
  Oligonucleotide for detection of SNP TSC0059497
tattttttaaaga

SEQ ID NO: 243876 - DNA, 13 bp, Artificial Sequence
  Oligonucleotide for detection of SNP TSC0059497
tctttaaaaaata

SEQ ID NO: 243877 - DNA, 13 bp, Artificial Sequence
  Oligonucleotide for detection of SNP TSC0059497
tattttgtaaaga

SEQ ID NO: 243878 - DNA, 13 bp, Artificial Sequence
  Oligonucleotide for detection of SNP TSC0059497
tctttacaaaata

SEQ ID NO: 243879 - DNA, 13 bp, Artificial Sequence
  Oligonucleotide for detection of SNP TSC0059497
tttttggaaaatg

SEQ ID NO: 243880 - DNA, 13 bp, Artificial Sequence
  Oligonucleotide for detection of SNP TSC0059497
cattttccaaaaa

SEQ ID NO: 243881 - DNA, 13 bp, Artificial Sequence
  Oligonucleotide for detection of SNP TSC0059497
tttttgtaaaatg

SEQ ID NO: 243882 - DNA, 13 bp, Artificial Sequence
  Oligonucleotide for detection of SNP TSC0059497
cattttacaaaaa

SEQ ID NO: 243883 - DNA, 13 bp, Artificial Sequence
  Oligonucleotide for detection of SNP TSC0059498
ttgaaatgtgata

SEQ ID NO: 243884 - DNA, 13 bp, Artificial Sequence
  Oligonucleotide for detection of SNP TSC0059498
tatcacatttcaa

SEQ ID NO: 243885 - DNA, 13 bp, Artificial Sequence
  Oligonucleotide for detection of SNP TSC0059498
ttgaaacgtgata

SEQ ID NO: 243886 - DNA, 13 bp, Artificial Sequence
  Oligonucleotide for detection of SNP TSC0059498
tatcacgtttcaa

SEQ ID NO: 243887 - DNA, 13 bp, Artificial Sequence
  Oligonucleotide for detection of SNP TSC0059498
tgttatgttttaa

SEQ ID NO: 243888 - DNA, 13 bp, Artificial Sequence
  Oligonucleotide for detection of SNP TSC0059498
ttaaaacataaca

SEQ ID NO: 243889 - DNA, 13 bp, Artificial Sequence
  Oligonucleotide for detection of SNP TSC0059498
tgttatattttaa

SEQ ID NO: 243890 - DNA, 13 bp, Artificial Sequence
  Oligonucleotide for detection of SNP TSC0059498
ttaaaatataaca

SEQ ID NO: 243891 - DNA, 13 bp, Artificial Sequence
  Oligonucleotide for detection of SNP TSC0059498
tgttacgttttaa

SEQ ID NO: 243892 - DNA, 13 bp, Artificial Sequence
  Oligonucleotide for detection of SNP TSC0059498
ttaaaacgtaaca

SEQ ID NO: 243893 - DNA, 13 bp, Artificial Sequence
  Oligonucleotide for detection of SNP TSC0059499
taaaaatggtatt

SEQ ID NO: 243894 - DNA, 13 bp, Artificial Sequence
  Oligonucleotide for detection of SNP TSC0059499
aataccattttta

SEQ ID NO: 243895 - DNA, 13 bp, Artificial Sequence
  Oligonucleotide for detection of SNP TSC0059499
taaaaacggtatt

SEQ ID NO: 243896 - DNA, 13 bp, Artificial Sequence
  Oligonucleotide for detection of SNP TSC0059499
aataccgttttta

SEQ ID NO: 243897 - DNA, 13 bp, Artificial Sequence
  Oligonucleotide for detection of SNP TSC0059499
aatgttatttttg

SEQ ID NO: 243898 - DNA, 13 bp, Artificial Sequence
  Oligonucleotide for detection of SNP TSC0059499
caaaaataacatt

SEQ ID NO: 243899 - DNA, 13 bp, Artificial Sequence
  Oligonucleotide for detection of SNP TSC0059499
aatgtcgtttttg

SEQ ID NO: 243900 - DNA, 13 bp, Artificial Sequence
  Oligonucleotide for detection of SNP TSC0059499
caaaaacgacatt

SEQ ID NO: 243901 - DNA, 13 bp, Artificial Sequence
  Oligonucleotide for detection of SNP TSC0059501
tgtatatagtaga

SEQ ID NO: 243902 - DNA, 13 bp, Artificial Sequence
  Oligonucleotide for detection of SNP TSC0059501
tctactatataca

SEQ ID NO: 243903 - DNA, 13 bp, Artificial Sequence
  Oligonucleotide for detection of SNP TSC0059501
tgtatagagtaga

SEQ ID NO: 243904 - DNA, 13 bp, Artificial Sequence
  Oligonucleotide for detection of SNP TSC0059501
tctactctataca

SEQ ID NO: 243905 - DNA, 13 bp, Artificial Sequence
  Oligonucleotide for detection of SNP TSC0059502
gtattgagagagt

SEQ ID NO: 243906 - DNA, 13 bp, Artificial Sequence
  Oligonucleotide for detection of SNP TSC0059502
actctctcaatac

SEQ ID NO: 243907 - DNA, 13 bp, Artificial Sequence
  Oligonucleotide for detection of SNP TSC0059502
gtattgtgagagt

SEQ ID NO: 243908 - DNA, 13 bp, Artificial Sequence
  Oligonucleotide for detection of SNP TSC0059502
actctcacaatac

SEQ ID NO: 243909 - DNA, 13 bp, Artificial Sequence
  Oligonucleotide for detection of SNP TSC0059502
gtattgcgagagt

SEQ ID NO: 243910 - DNA, 13 bp, Artificial Sequence
  Oligonucleotide for detection of SNP TSC0059502
actctcgcaatac

SEQ ID NO: 243911 - DNA, 13 bp, Artificial Sequence
  Oligonucleotide for detection of SNP TSC0059502
atttttttaatgy

SEQ ID NO: 243912 - DNA, 13 bp, Artificial Sequence
  Oligonucleotide for detection of SNP TSC0059502
rcattaaaaaaat

SEQ ID NO: 243913 - DNA, 13 bp, Artificial Sequence
  Oligonucleotide for detection of SNP TSC0059502
atttttgtaatgy

SEQ ID NO: 243914 - DNA, 13 bp, Artificial Sequence
  Oligonucleotide for detection of SNP TSC0059502
rcattacaaaaat

SEQ ID NO: 243915 - DNA, 13 bp, Artificial Sequence
  Oligonucleotide for detection of SNP TSC0059502
attttcgtaatgy

SEQ ID NO: 243916 - DNA, 13 bp, Artificial Sequence
  Oligonucleotide for detection of SNP TSC0059502
rcattacgaaaat

SEQ ID NO: 243917 - DNA, 13 bp, Artificial Sequence
  Oligonucleotide for detection of SNP TSC0059503
tattagaataagt

SEQ ID NO: 243918 - DNA, 13 bp, Artificial Sequence
  Oligonucleotide for detection of SNP TSC0059503
acttattctaata

SEQ ID NO: 243919 - DNA, 13 bp, Artificial Sequence
  Oligonucleotide for detection of SNP TSC0059503
tattaggataagt

SEQ ID NO: 243920 - DNA, 13 bp, Artificial Sequence
  Oligonucleotide for detection of SNP TSC0059503
acttatcctaata

SEQ ID NO: 243921 - DNA, 13 bp, Artificial Sequence
  Oligonucleotide for detection of SNP TSC0059505
tttagcgtttgtt

SEQ ID NO: 243922 - DNA, 13 bp, Artificial Sequence
  Oligonucleotide for detection of SNP TSC0059505
aacaaacgctaaa

SEQ ID NO: 243923 - DNA, 13 bp, Artificial Sequence
  Oligonucleotide for detection of SNP TSC0059505
agtagatgttgga

SEQ ID NO: 243924 - DNA, 13 bp, Artificial Sequence
  Oligonucleotide for detection of SNP TSC0059505
tccaacatctact

SEQ ID NO: 243925 - DNA, 13 bp, Artificial Sequence
  Oligonucleotide for detection of SNP TSC0059505
agtagacgttgga

SEQ ID NO: 243926 - DNA, 13 bp, Artificial Sequence
  Oligonucleotide for detection of SNP TSC0059505
tccaacgtctact

SEQ ID NO: 243927 - DNA, 13 bp, Artificial Sequence
  Oligonucleotide for detection of SNP TSC0059506
ttaatagtgtgta

SEQ ID NO: 243928 - DNA, 13 bp, Artificial Sequence
  Oligonucleotide for detection of SNP TSC0059506
tacacactattaa

SEQ ID NO: 243929 - DNA, 13 bp, Artificial Sequence
  Oligonucleotide for detection of SNP TSC0059506
ttaataatgtgta

SEQ ID NO: 243930 - DNA, 13 bp, Artificial Sequence
  Oligonucleotide for detection of SNP TSC0059506
tacacattattaa

SEQ ID NO: 243931 - DNA, 13 bp, Artificial Sequence
  Oligonucleotide for detection of SNP TSC0059507
aaaattgttgagy

SEQ ID NO: 243932 - DNA, 13 bp, Artificial Sequence
  Oligonucleotide for detection of SNP TSC0059507
rctcaacaatttt

SEQ ID NO: 243933 - DNA, 13 bp, Artificial Sequence
  Oligonucleotide for detection of SNP TSC0059507
aaaattattgagy

SEQ ID NO: 243934 - DNA, 13 bp, Artificial Sequence
  Oligonucleotide for detection of SNP TSC0059507
rctcaataatttt

SEQ ID NO: 243935 - DNA, 13 bp, Artificial Sequence
  Oligonucleotide for detection of SNP TSC0059509
aagaaggaaaaat

SEQ ID NO: 243936 - DNA, 13 bp, Artificial Sequence
  Oligonucleotide for detection of SNP TSC0059509
atttttccttctt

SEQ ID NO: 243937 - DNA, 13 bp, Artificial Sequence
  Oligonucleotide for detection of SNP TSC0059509
aagaagaaaaaat

SEQ ID NO: 243938 - DNA, 13 bp, Artificial Sequence
  Oligonucleotide for detection of SNP TSC0059509
attttttcttctt

SEQ ID NO: 243939 - DNA, 13 bp, Artificial Sequence
  Oligonucleotide for detection of SNP TSC0059511
gggttttggaaay

SEQ ID NO: 243940 - DNA, 13 bp, Artificial Sequence
  Oligonucleotide for detection of SNP TSC0059511
rtttccaaaaccc

SEQ ID NO: 243941 - DNA, 13 bp, Artificial Sequence
  Oligonucleotide for detection of SNP TSC0059511
gggtttcggaaay

SEQ ID NO: 243942 - DNA, 13 bp, Artificial Sequence
  Oligonucleotide for detection of SNP TSC0059511
rtttccgaaaccc

SEQ ID NO: 243943 - DNA, 13 bp, Artificial Sequence
  Oligonucleotide for detection of SNP TSC0059512
gatgtggttttty

SEQ ID NO: 243944 - DNA, 13 bp, Artificial Sequence
  Oligonucleotide for detection of SNP TSC0059512
raaaaaccacatc

SEQ ID NO: 243945 - DNA, 13 bp, Artificial Sequence
  Oligonucleotide for detection of SNP TSC0059513
agagagattttty

SEQ ID NO: 243946 - DNA, 13 bp, Artificial Sequence
  Oligonucleotide for detection of SNP TSC0059513
raaaaatctctct

SEQ ID NO: 243947 - DNA, 13 bp, Artificial Sequence
  Oligonucleotide for detection of SNP TSC0059513
agagagtttttty

SEQ ID NO: 243948 - DNA, 13 bp, Artificial Sequence
  Oligonucleotide for detection of SNP TSC0059513
raaaaaactctct

SEQ ID NO: 243949 - DNA, 13 bp, Artificial Sequence
  Oligonucleotide for detection of SNP TSC0059513
ggaaggttttttt

SEQ ID NO: 243950 - DNA, 13 bp, Artificial Sequence
  Oligonucleotide for detection of SNP TSC0059513
aaaaaaaccttcc

SEQ ID NO: 243951 - DNA, 13 bp, Artificial Sequence
  Oligonucleotide for detection of SNP TSC0059513
ggaagggtttttt

SEQ ID NO: 243952 - DNA, 13 bp, Artificial Sequence
  Oligonucleotide for detection of SNP TSC0059513
aaaaaacccttcc

SEQ ID NO: 243953 - DNA, 13 bp, Artificial Sequence
  Oligonucleotide for detection of SNP TSC0059514
tttattataagtg

SEQ ID NO: 243954 - DNA, 13 bp, Artificial Sequence
  Oligonucleotide for detection of SNP TSC0059514
cacttataataaa

SEQ ID NO: 243955 - DNA, 13 bp, Artificial Sequence
  Oligonucleotide for detection of SNP TSC0059514
tttattttaagtg

SEQ ID NO: 243956 - DNA, 13 bp, Artificial Sequence
  Oligonucleotide for detection of SNP TSC0059514
cacttaaaataaa

SEQ ID NO: 243957 - DNA, 13 bp, Artificial Sequence
  Oligonucleotide for detection of SNP TSC0059514
tttattataagcg

SEQ ID NO: 243958 - DNA, 13 bp, Artificial Sequence
  Oligonucleotide for detection of SNP TSC0059514
cgcttataataaa

SEQ ID NO: 243959 - DNA, 13 bp, Artificial Sequence
  Oligonucleotide for detection of SNP TSC0059514
tttattttaagcg

SEQ ID NO: 243960 - DNA, 13 bp, Artificial Sequence
  Oligonucleotide for detection of SNP TSC0059514
cgcttaaaataaa

SEQ ID NO: 243961 - DNA, 13 bp, Artificial Sequence
  Oligonucleotide for detection of SNP TSC0059514
tgtttatggtgaa

SEQ ID NO: 243962 - DNA, 13 bp, Artificial Sequence
  Oligonucleotide for detection of SNP TSC0059514
ttcaccataaaca

SEQ ID NO: 243963 - DNA, 13 bp, Artificial Sequence
  Oligonucleotide for detection of SNP TSC0059514
tgtttagggtgaa

SEQ ID NO: 243964 - DNA, 13 bp, Artificial Sequence
  Oligonucleotide for detection of SNP TSC0059514
ttcaccctaaaca

SEQ ID NO: 243965 - DNA, 13 bp, Artificial Sequence
  Oligonucleotide for detection of SNP TSC0059514
cgtttatggtgaa

SEQ ID NO: 243966 - DNA, 13 bp, Artificial Sequence
  Oligonucleotide for detection of SNP TSC0059514
ttcaccataaacg

SEQ ID NO: 243967 - DNA, 13 bp, Artificial Sequence
  Oligonucleotide for detection of SNP TSC0059514
cgtttagggtgaa

SEQ ID NO: 243968 - DNA, 13 bp, Artificial Sequence
  Oligonucleotide for detection of SNP TSC0059514
ttcaccctaaacg

SEQ ID NO: 243969 - DNA, 13 bp, Artificial Sequence
  Oligonucleotide for detection of SNP TSC0059515
tgatttattgtat

SEQ ID NO: 243970 - DNA, 13 bp, Artificial Sequence
  Oligonucleotide for detection of SNP TSC0059515
atacaataaatca

SEQ ID NO: 243971 - DNA, 13 bp, Artificial Sequence
  Oligonucleotide for detection of SNP TSC0059515
tgatttgttgtat

SEQ ID NO: 243972 - DNA, 13 bp, Artificial Sequence
  Oligonucleotide for detection of SNP TSC0059515
atacaacaaatca

SEQ ID NO: 243973 - DNA, 13 bp, Artificial Sequence
  Oligonucleotide for detection of SNP TSC0059516
attataagtgtgy

SEQ ID NO: 243974 - DNA, 13 bp, Artificial Sequence
  Oligonucleotide for detection of SNP TSC0059516
rcacacttataat

SEQ ID NO: 243975 - DNA, 13 bp, Artificial Sequence
  Oligonucleotide for detection of SNP TSC0059516
attataggtgtgy

SEQ ID NO: 243976 - DNA, 13 bp, Artificial Sequence
  Oligonucleotide for detection of SNP TSC0059516
rcacacctataat

SEQ ID NO: 243977 - DNA, 13 bp, Artificial Sequence
  Oligonucleotide for detection of SNP TSC0059516
attataagcgtgy

SEQ ID NO: 243978 - DNA, 13 bp, Artificial Sequence
  Oligonucleotide for detection of SNP TSC0059516
rcacgcttataat

SEQ ID NO: 243979 - DNA, 13 bp, Artificial Sequence
  Oligonucleotide for detection of SNP TSC0059516
attataggcgtgy

SEQ ID NO: 243980 - DNA, 13 bp, Artificial Sequence
  Oligonucleotide for detection of SNP TSC0059516
rcacgcctataat

SEQ ID NO: 243981 - DNA, 13 bp, Artificial Sequence
  Oligonucleotide for detection of SNP TSC0059519
atgtgatgtttat

SEQ ID NO: 243982 - DNA, 13 bp, Artificial Sequence
  Oligonucleotide for detection of SNP TSC0059519
ataaacatcacat

SEQ ID NO: 243983 - DNA, 13 bp, Artificial Sequence
  Oligonucleotide for detection of SNP TSC0059519
atgtgaggtttat

SEQ ID NO: 243984 - DNA, 13 bp, Artificial Sequence
  Oligonucleotide for detection of SNP TSC0059519
ataaacctcacat

SEQ ID NO: 243985 - DNA, 13 bp, Artificial Sequence
  Oligonucleotide for detection of SNP TSC0059519
atggatattatat

SEQ ID NO: 243986 - DNA, 13 bp, Artificial Sequence
  Oligonucleotide for detection of SNP TSC0059519
atataatatccat

SEQ ID NO: 243987 - DNA, 13 bp, Artificial Sequence
  Oligonucleotide for detection of SNP TSC0059519
atggattttatat

SEQ ID NO: 243988 - DNA, 13 bp, Artificial Sequence
  Oligonucleotide for detection of SNP TSC0059519
atataaaatccat

SEQ ID NO: 243989 - DNA, 13 bp, Artificial Sequence
  Oligonucleotide for detection of SNP TSC0059520
gttgttataatta

SEQ ID NO: 243990 - DNA, 13 bp, Artificial Sequence
  Oligonucleotide for detection of SNP TSC0059520
taattataacaac

SEQ ID NO: 243991 - DNA, 13 bp, Artificial Sequence
  Oligonucleotide for detection of SNP TSC0059520
gttgttgtaatta

SEQ ID NO: 243992 - DNA, 13 bp, Artificial Sequence
  Oligonucleotide for detection of SNP TSC0059520
taattacaacaac

SEQ ID NO: 243993 - DNA, 13 bp, Artificial Sequence
  Oligonucleotide for detection of SNP TSC0059522
aaaaaaattggtt

SEQ ID NO: 243994 - DNA, 13 bp, Artificial Sequence
  Oligonucleotide for detection of SNP TSC0059522
aaccaattttttt

SEQ ID NO: 243995 - DNA, 13 bp, Artificial Sequence
  Oligonucleotide for detection of SNP TSC0059522
aaaaaatttggtt

SEQ ID NO: 243996 - DNA, 13 bp, Artificial Sequence
  Oligonucleotide for detection of SNP TSC0059522
aaccaaatttttt

SEQ ID NO: 243997 - DNA, 13 bp, Artificial Sequence
  Oligonucleotide for detection of SNP TSC0059522
aattaattttttt

SEQ ID NO: 243998 - DNA, 13 bp, Artificial Sequence
  Oligonucleotide for detection of SNP TSC0059522
aaaaaaattaatt

SEQ ID NO: 243999 - DNA, 13 bp, Artificial Sequence
  Oligonucleotide for detection of SNP TSC0059526
ttgtatattttag

SEQ ID NO: 244000 - DNA, 13 bp, Artificial Sequence
  Oligonucleotide for detection of SNP TSC0059526
ctaaaatatacaa

SEQ ID NO: 244001 - DNA, 13 bp, Artificial Sequence
  Oligonucleotide for detection of SNP TSC0059526
ttgtattttttag

SEQ ID NO: 244002 - DNA, 13 bp, Artificial Sequence
  Oligonucleotide for detection of SNP TSC0059526
ctaaaaaatacaa

SEQ ID NO: 244003 - DNA, 13 bp, Artificial Sequence
  Oligonucleotide for detection of SNP TSC0059526
ttgggatatgtag

SEQ ID NO: 244004 - DNA, 13 bp, Artificial Sequence
  Oligonucleotide for detection of SNP TSC0059526
ctacatatcccaa

SEQ ID NO: 244005 - DNA, 13 bp, Artificial Sequence
  Oligonucleotide for detection of SNP TSC0059526
ttgggagatgtag

SEQ ID NO: 244006 - DNA, 13 bp, Artificial Sequence
  Oligonucleotide for detection of SNP TSC0059526
ctacatctcccaa

SEQ ID NO: 244007 - DNA, 13 bp, Artificial Sequence
  Oligonucleotide for detection of SNP TSC0059528
aaggttgataaag

SEQ ID NO: 244008 - DNA, 13 bp, Artificial Sequence
  Oligonucleotide for detection of SNP TSC0059528
ctttatcaacctt

SEQ ID NO: 244009 - DNA, 13 bp, Artificial Sequence
  Oligonucleotide for detection of SNP TSC0059528
aaggttaataaag

SEQ ID NO: 244010 - DNA, 13 bp, Artificial Sequence
  Oligonucleotide for detection of SNP TSC0059528
ctttattaacctt

SEQ ID NO: 244011 - DNA, 13 bp, Artificial Sequence
  Oligonucleotide for detection of SNP TSC0059529
ttaattgattaty

SEQ ID NO: 244012 - DNA, 13 bp, Artificial Sequence
  Oligonucleotide for detection of SNP TSC0059529
rataatcaattaa

SEQ ID NO: 244013 - DNA, 13 bp, Artificial Sequence
  Oligonucleotide for detection of SNP TSC0059530
aatttaagatttg

SEQ ID NO: 244014 - DNA, 13 bp, Artificial Sequence
  Oligonucleotide for detection of SNP TSC0059530
caaatcttaaatt

SEQ ID NO: 244015 - DNA, 13 bp, Artificial Sequence
  Oligonucleotide for detection of SNP TSC0059530
aatttatgatttg

SEQ ID NO: 244016 - DNA, 13 bp, Artificial Sequence
  Oligonucleotide for detection of SNP TSC0059530
caaatcataaatt

SEQ ID NO: 244017 - DNA, 13 bp, Artificial Sequence
  Oligonucleotide for detection of SNP TSC0059530
taggttttagatt

SEQ ID NO: 244018 - DNA, 13 bp, Artificial Sequence
  Oligonucleotide for detection of SNP TSC0059530
aatctaaaaccta

SEQ ID NO: 244019 - DNA, 13 bp, Artificial Sequence
  Oligonucleotide for detection of SNP TSC0059530
taggttatagatt

SEQ ID NO: 244020 - DNA, 13 bp, Artificial Sequence
  Oligonucleotide for detection of SNP TSC0059530
aatctataaccta

SEQ ID NO: 244021 - DNA, 13 bp, Artificial Sequence
  Oligonucleotide for detection of SNP TSC0059537
tatagtgagtatt

SEQ ID NO: 244022 - DNA, 13 bp, Artificial Sequence
  Oligonucleotide for detection of SNP TSC0059537
aatactcactata

SEQ ID NO: 244023 - DNA, 13 bp, Artificial Sequence
  Oligonucleotide for detection of SNP TSC0059537
tatagtaagtatt

SEQ ID NO: 244024 - DNA, 13 bp, Artificial Sequence
  Oligonucleotide for detection of SNP TSC0059537
aatacttactata

SEQ ID NO: 244025 - DNA, 13 bp, Artificial Sequence
  Oligonucleotide for detection of SNP TSC0059540
ggaaaagaagtgy

SEQ ID NO: 244026 - DNA, 13 bp, Artificial Sequence
  Oligonucleotide for detection of SNP TSC0059540
rcacttcttttcc

SEQ ID NO: 244027 - DNA, 13 bp, Artificial Sequence
  Oligonucleotide for detection of SNP TSC0059540
ggaaaataagtgy

SEQ ID NO: 244028 - DNA, 13 bp, Artificial Sequence
  Oligonucleotide for detection of SNP TSC0059540
rcacttattttcc

SEQ ID NO: 244029 - DNA, 13 bp, Artificial Sequence
  Oligonucleotide for detection of SNP TSC0059543
tgaatattataty

SEQ ID NO: 244030 - DNA, 13 bp, Artificial Sequence
  Oligonucleotide for detection of SNP TSC0059543
ratataatattca

SEQ ID NO: 244031 - DNA, 13 bp, Artificial Sequence
  Oligonucleotide for detection of SNP TSC0059543
tgaatagtataty

SEQ ID NO: 244032 - DNA, 13 bp, Artificial Sequence
  Oligonucleotide for detection of SNP TSC0059543
ratatactattca

SEQ ID NO: 244033 - DNA, 13 bp, Artificial Sequence
  Oligonucleotide for detection of SNP TSC0059543
ggtgtaatattta

SEQ ID NO: 244034 - DNA, 13 bp, Artificial Sequence
  Oligonucleotide for detection of SNP TSC0059543
taaatattacacc

SEQ ID NO: 244035 - DNA, 13 bp, Artificial Sequence
  Oligonucleotide for detection of SNP TSC0059543
ggtgtattattta

SEQ ID NO: 244036 - DNA, 13 bp, Artificial Sequence
  Oligonucleotide for detection of SNP TSC0059543
taaataatacacc

SEQ ID NO: 244037 - DNA, 13 bp, Artificial Sequence
  Oligonucleotide for detection of SNP TSC0059545
aggattttaagta

SEQ ID NO: 244038 - DNA, 13 bp, Artificial Sequence
  Oligonucleotide for detection of SNP TSC0059545
tacttaaaatcct

SEQ ID NO: 244039 - DNA, 13 bp, Artificial Sequence
  Oligonucleotide for detection of SNP TSC0059545
aggattgtaagta

SEQ ID NO: 244040 - DNA, 13 bp, Artificial Sequence
  Oligonucleotide for detection of SNP TSC0059545
tacttacaatcct

SEQ ID NO: 244041 - DNA, 13 bp, Artificial Sequence
  Oligonucleotide for detection of SNP TSC0059545
tatttaaagtttt

SEQ ID NO: 244042 - DNA, 13 bp, Artificial Sequence
  Oligonucleotide for detection of SNP TSC0059545
aaaactttaaata

SEQ ID NO: 244043 - DNA, 13 bp, Artificial Sequence
  Oligonucleotide for detection of SNP TSC0059545
tatttatagtttt

SEQ ID NO: 244044 - DNA, 13 bp, Artificial Sequence
  Oligonucleotide for detection of SNP TSC0059545
aaaactataaata

SEQ ID NO: 244045 - DNA, 13 bp, Artificial Sequence
  Oligonucleotide for detection of SNP TSC0059546
tattattttattt

SEQ ID NO: 244046 - DNA, 13 bp, Artificial Sequence
  Oligonucleotide for detection of SNP TSC0059546
aaataaaataata

SEQ ID NO: 244047 - DNA, 13 bp, Artificial Sequence
  Oligonucleotide for detection of SNP TSC0059546
aaataatatagta

SEQ ID NO: 244048 - DNA, 13 bp, Artificial Sequence
  Oligonucleotide for detection of SNP TSC0059546
tactatattattt

SEQ ID NO: 244049 - DNA, 13 bp, Artificial Sequence
  Oligonucleotide for detection of SNP TSC0059546
aaataaaatagta

SEQ ID NO: 244050 - DNA, 13 bp, Artificial Sequence
  Oligonucleotide for detection of SNP TSC0059546
tactattttattt

SEQ ID NO: 244051 - DNA, 13 bp, Artificial Sequence
  Oligonucleotide for detection of SNP TSC0059548
tataattgtatay

SEQ ID NO: 244052 - DNA, 13 bp, Artificial Sequence
  Oligonucleotide for detection of SNP TSC0059548
rtatacaattata

SEQ ID NO: 244053 - DNA, 13 bp, Artificial Sequence
  Oligonucleotide for detection of SNP TSC0059548
tataatcgtatay

SEQ ID NO: 244054 - DNA, 13 bp, Artificial Sequence
  Oligonucleotide for detection of SNP TSC0059548
rtatacgattata

SEQ ID NO: 244055 - DNA, 13 bp, Artificial Sequence
  Oligonucleotide for detection of SNP TSC0059548
gtgtgtggttata

SEQ ID NO: 244056 - DNA, 13 bp, Artificial Sequence
  Oligonucleotide for detection of SNP TSC0059548
tataaccacacac

SEQ ID NO: 244057 - DNA, 13 bp, Artificial Sequence
  Oligonucleotide for detection of SNP TSC0059548
gtgtgtagttata

SEQ ID NO: 244058 - DNA, 13 bp, Artificial Sequence
  Oligonucleotide for detection of SNP TSC0059548
tataactacacac

SEQ ID NO: 244059 - DNA, 13 bp, Artificial Sequence
  Oligonucleotide for detection of SNP TSC0059548
gtgtgcggttata

SEQ ID NO: 244060 - DNA, 13 bp, Artificial Sequence
  Oligonucleotide for detection of SNP TSC0059548
tataaccgcacac

SEQ ID NO: 244061 - DNA, 13 bp, Artificial Sequence
  Oligonucleotide for detection of SNP TSC0059551
atgttaataatta

SEQ ID NO: 244062 - DNA, 13 bp, Artificial Sequence
  Oligonucleotide for detection of SNP TSC0059551
taattattaacat

SEQ ID NO: 244063 - DNA, 13 bp, Artificial Sequence
  Oligonucleotide for detection of SNP TSC0059551
atgttagtaatta

SEQ ID NO: 244064 - DNA, 13 bp, Artificial Sequence
  Oligonucleotide for detection of SNP TSC0059551
taattactaacat

SEQ ID NO: 244065 - DNA, 13 bp, Artificial Sequence
  Oligonucleotide for detection of SNP TSC0059556
tatatagaattat

SEQ ID NO: 244066 - DNA, 13 bp, Artificial Sequence
  Oligonucleotide for detection of SNP TSC0059556
ataattctatata

SEQ ID NO: 244067 - DNA, 13 bp, Artificial Sequence
  Oligonucleotide for detection of SNP TSC0059557
ttatattgaatgy

SEQ ID NO: 244068 - DNA, 13 bp, Artificial Sequence
  Oligonucleotide for detection of SNP TSC0059557
rcattcaatataa

SEQ ID NO: 244069 - DNA, 13 bp, Artificial Sequence
  Oligonucleotide for detection of SNP TSC0059557
ttatatcgaatgy

SEQ ID NO: 244070 - DNA, 13 bp, Artificial Sequence
  Oligonucleotide for detection of SNP TSC0059557
rcattcgatataa

SEQ ID NO: 244071 - DNA, 13 bp, Artificial Sequence
  Oligonucleotide for detection of SNP TSC0059557
gtatttgatatag

SEQ ID NO: 244072 - DNA, 13 bp, Artificial Sequence
  Oligonucleotide for detection of SNP TSC0059557
ctatatcaaatac

SEQ ID NO: 244073 - DNA, 13 bp, Artificial Sequence
  Oligonucleotide for detection of SNP TSC0059557
gtatttaatatag

SEQ ID NO: 244074 - DNA, 13 bp, Artificial Sequence
  Oligonucleotide for detection of SNP TSC0059557
ctatattaaatac

SEQ ID NO: 244075 - DNA, 13 bp, Artificial Sequence
  Oligonucleotide for detection of SNP TSC0059557
gtattcgatatag

SEQ ID NO: 244076 - DNA, 13 bp, Artificial Sequence
  Oligonucleotide for detection of SNP TSC0059557
ctatatcgaatac

SEQ ID NO: 244077 - DNA, 13 bp, Artificial Sequence
  Oligonucleotide for detection of SNP TSC0059558
gtaaagttgtgat

SEQ ID NO: 244078 - DNA, 13 bp, Artificial Sequence
  Oligonucleotide for detection of SNP TSC0059558
atcacaactttac

SEQ ID NO: 244079 - DNA, 13 bp, Artificial Sequence
  Oligonucleotide for detection of SNP TSC0059558
gtaaaggtgtgat

SEQ ID NO: 244080 - DNA, 13 bp, Artificial Sequence
  Oligonucleotide for detection of SNP TSC0059558
atcacacctttac

SEQ ID NO: 244081 - DNA, 13 bp, Artificial Sequence
  Oligonucleotide for detection of SNP TSC0059558
attataattttay

SEQ ID NO: 244082 - DNA, 13 bp, Artificial Sequence
  Oligonucleotide for detection of SNP TSC0059558
rtaaaattataat

SEQ ID NO: 244083 - DNA, 13 bp, Artificial Sequence
  Oligonucleotide for detection of SNP TSC0059558
attatatttttay

SEQ ID NO: 244084 - DNA, 13 bp, Artificial Sequence
  Oligonucleotide for detection of SNP TSC0059558
rtaaaaatataat

SEQ ID NO: 244085 - DNA, 13 bp, Artificial Sequence
  Oligonucleotide for detection of SNP TSC0059559
ttttttaagggag

SEQ ID NO: 244086 - DNA, 13 bp, Artificial Sequence
  Oligonucleotide for detection of SNP TSC0059559
ctcccttaaaaaa

SEQ ID NO: 244087 - DNA, 13 bp, Artificial Sequence
  Oligonucleotide for detection of SNP TSC0059559
ttttttgagggag

SEQ ID NO: 244088 - DNA, 13 bp, Artificial Sequence
  Oligonucleotide for detection of SNP TSC0059559
ctccctcaaaaaa

SEQ ID NO: 244089 - DNA, 13 bp, Artificial Sequence
  Oligonucleotide for detection of SNP TSC0059560
tttaaaatggaty

SEQ ID NO: 244090 - DNA, 13 bp, Artificial Sequence
  Oligonucleotide for detection of SNP TSC0059560
ratccattttaaa

SEQ ID NO: 244091 - DNA, 13 bp, Artificial Sequence
  Oligonucleotide for detection of SNP TSC0059560
tttaaagtggaty

SEQ ID NO: 244092 - DNA, 13 bp, Artificial Sequence
  Oligonucleotide for detection of SNP TSC0059560
ratccactttaaa

SEQ ID NO: 244093 - DNA, 13 bp, Artificial Sequence
  Oligonucleotide for detection of SNP TSC0059562
ttataatggtatt

SEQ ID NO: 244094 - DNA, 13 bp, Artificial Sequence
  Oligonucleotide for detection of SNP TSC0059562
aataccattataa

SEQ ID NO: 244095 - DNA, 13 bp, Artificial Sequence
  Oligonucleotide for detection of SNP TSC0059562
ttataacggtatt

SEQ ID NO: 244096 - DNA, 13 bp, Artificial Sequence
  Oligonucleotide for detection of SNP TSC0059562
aataccgttataa

SEQ ID NO: 244097 - DNA, 13 bp, Artificial Sequence
  Oligonucleotide for detection of SNP TSC0059562
aatattgttgtgg

SEQ ID NO: 244098 - DNA, 13 bp, Artificial Sequence
  Oligonucleotide for detection of SNP TSC0059562
ccacaacaatatt

SEQ ID NO: 244099 - DNA, 13 bp, Artificial Sequence
  Oligonucleotide for detection of SNP TSC0059562
aatattattgtgg

SEQ ID NO: 244100 - DNA, 13 bp, Artificial Sequence
  Oligonucleotide for detection of SNP TSC0059562
ccacaataatatt

SEQ ID NO: 244101 - DNA, 13 bp, Artificial Sequence
  Oligonucleotide for detection of SNP TSC0059562
aatatcgttgtgg

SEQ ID NO: 244102 - DNA, 13 bp, Artificial Sequence
  Oligonucleotide for detection of SNP TSC0059562
ccacaacgatatt

SEQ ID NO: 244103 - DNA, 13 bp, Artificial Sequence
  Oligonucleotide for detection of SNP TSC0059564
ggtgtatgttaty

SEQ ID NO: 244104 - DNA, 13 bp, Artificial Sequence
  Oligonucleotide for detection of SNP TSC0059564
rataacatacacc

SEQ ID NO: 244105 - DNA, 13 bp, Artificial Sequence
  Oligonucleotide for detection of SNP TSC0059564
ggtgtacgttaty

SEQ ID NO: 244106 - DNA, 13 bp, Artificial Sequence
  Oligonucleotide for detection of SNP TSC0059564
rataacgtacacc

SEQ ID NO: 244107 - DNA, 13 bp, Artificial Sequence
  Oligonucleotide for detection of SNP TSC0059565
ttaggtaatttty

SEQ ID NO: 244108 - DNA, 13 bp, Artificial Sequence
  Oligonucleotide for detection of SNP TSC0059565
raaaattacctaa

SEQ ID NO: 244109 - DNA, 13 bp, Artificial Sequence
  Oligonucleotide for detection of SNP TSC0059565
ttaggcgatttty

SEQ ID NO: 244110 - DNA, 13 bp, Artificial Sequence
  Oligonucleotide for detection of SNP TSC0059565
raaaatcgcctaa

SEQ ID NO: 244111 - DNA, 13 bp, Artificial Sequence
  Oligonucleotide for detection of SNP TSC0059568
taattatgtaagy

SEQ ID NO: 244112 - DNA, 13 bp, Artificial Sequence
  Oligonucleotide for detection of SNP TSC0059568
rcttacataatta

SEQ ID NO: 244113 - DNA, 13 bp, Artificial Sequence
  Oligonucleotide for detection of SNP TSC0059568
taattacgtaagy

SEQ ID NO: 244114 - DNA, 13 bp, Artificial Sequence
  Oligonucleotide for detection of SNP TSC0059568
rcttacgtaatta

SEQ ID NO: 244115 - DNA, 13 bp, Artificial Sequence
  Oligonucleotide for detection of SNP TSC0059569
gatgatattggta

SEQ ID NO: 244116 - DNA, 13 bp, Artificial Sequence
  Oligonucleotide for detection of SNP TSC0059569
taccaatatcatc

SEQ ID NO: 244117 - DNA, 13 bp, Artificial Sequence
  Oligonucleotide for detection of SNP TSC0059569
gatgatgttggta

SEQ ID NO: 244118 - DNA, 13 bp, Artificial Sequence
  Oligonucleotide for detection of SNP TSC0059569
taccaacatcatc

SEQ ID NO: 244119 - DNA, 13 bp, Artificial Sequence
  Oligonucleotide for detection of SNP TSC0059569
gatgacgttggta

SEQ ID NO: 244120 - DNA, 13 bp, Artificial Sequence
  Oligonucleotide for detection of SNP TSC0059569
taccaacgtcatc

SEQ ID NO: 244121 - DNA, 13 bp, Artificial Sequence
  Oligonucleotide for detection of SNP TSC0059569
tgttaatgttaty

SEQ ID NO: 244122 - DNA, 13 bp, Artificial Sequence
  Oligonucleotide for detection of SNP TSC0059569
rataacattaaca

SEQ ID NO: 244123 - DNA, 13 bp, Artificial Sequence
  Oligonucleotide for detection of SNP TSC0059569
tgttaacgttaty

SEQ ID NO: 244124 - DNA, 13 bp, Artificial Sequence
  Oligonucleotide for detection of SNP TSC0059569
rataacgttaaca

SEQ ID NO: 244125 - DNA, 13 bp, Artificial Sequence
  Oligonucleotide for detection of SNP TSC0059570
atgtaaagagaag

SEQ ID NO: 244126 - DNA, 13 bp, Artificial Sequence
  Oligonucleotide for detection of SNP TSC0059570
cttctctttacat

SEQ ID NO: 244127 - DNA, 13 bp, Artificial Sequence
  Oligonucleotide for detection of SNP TSC0059570
atgtaaggagaag

SEQ ID NO: 244128 - DNA, 13 bp, Artificial Sequence
  Oligonucleotide for detection of SNP TSC0059570
cttctccttacat

SEQ ID NO: 244129 - DNA, 13 bp, Artificial Sequence
  Oligonucleotide for detection of SNP TSC0059571
agggttaggagat

SEQ ID NO: 244130 - DNA, 13 bp, Artificial Sequence
  Oligonucleotide for detection of SNP TSC0059571
atctcctaaccct

SEQ ID NO: 244131 - DNA, 13 bp, Artificial Sequence
  Oligonucleotide for detection of SNP TSC0059571
agggttgggagat

SEQ ID NO: 244132 - DNA, 13 bp, Artificial Sequence
  Oligonucleotide for detection of SNP TSC0059571
atctcccaaccct

SEQ ID NO: 244133 - DNA, 13 bp, Artificial Sequence
  Oligonucleotide for detection of SNP TSC0059572
agataggataata

SEQ ID NO: 244134 - DNA, 13 bp, Artificial Sequence
  Oligonucleotide for detection of SNP TSC0059572
tattatcctatct

SEQ ID NO: 244135 - DNA, 13 bp, Artificial Sequence
  Oligonucleotide for detection of SNP TSC0059572
agatagaataata

SEQ ID NO: 244136 - DNA, 13 bp, Artificial Sequence
  Oligonucleotide for detection of SNP TSC0059572
tattattctatct

SEQ ID NO: 244137 - DNA, 13 bp, Artificial Sequence
  Oligonucleotide for detection of SNP TSC0059575
gtataaatgatag

SEQ ID NO: 244138 - DNA, 13 bp, Artificial Sequence
  Oligonucleotide for detection of SNP TSC0059575
ctatcatttatac

SEQ ID NO: 244139 - DNA, 13 bp, Artificial Sequence
  Oligonucleotide for detection of SNP TSC0059575
gtataagtgatag

SEQ ID NO: 244140 - DNA, 13 bp, Artificial Sequence
  Oligonucleotide for detection of SNP TSC0059575
ctatcacttatac

SEQ ID NO: 244141 - DNA, 13 bp, Artificial Sequence
  Oligonucleotide for detection of SNP TSC0059576
agtttaagggtta

SEQ ID NO: 244142 - DNA, 13 bp, Artificial Sequence
  Oligonucleotide for detection of SNP TSC0059576
taacccttaaact

SEQ ID NO: 244143 - DNA, 13 bp, Artificial Sequence
  Oligonucleotide for detection of SNP TSC0059576
agtttaggggtta

SEQ ID NO: 244144 - DNA, 13 bp, Artificial Sequence
  Oligonucleotide for detection of SNP TSC0059576
taacccctaaact

SEQ ID NO: 244145 - DNA, 13 bp, Artificial Sequence
  Oligonucleotide for detection of SNP TSC0059577
tttgggatttagy

SEQ ID NO: 244146 - DNA, 13 bp, Artificial Sequence
  Oligonucleotide for detection of SNP TSC0059577
rctaaatcccaaa

SEQ ID NO: 244147 - DNA, 13 bp, Artificial Sequence
  Oligonucleotide for detection of SNP TSC0059579
aattttttgtttg

SEQ ID NO: 244148 - DNA, 13 bp, Artificial Sequence
  Oligonucleotide for detection of SNP TSC0059579
caaacaaaaaatt

SEQ ID NO: 244149 - DNA, 13 bp, Artificial Sequence
  Oligonucleotide for detection of SNP TSC0059579
aattttgtgtttg

SEQ ID NO: 244150 - DNA, 13 bp, Artificial Sequence
  Oligonucleotide for detection of SNP TSC0059579
caaacacaaaatt

SEQ ID NO: 244151 - DNA, 13 bp, Artificial Sequence
  Oligonucleotide for detection of SNP TSC0059579
tagataaagagtt

SEQ ID NO: 244152 - DNA, 13 bp, Artificial Sequence
  Oligonucleotide for detection of SNP TSC0059579
aactctttatcta

SEQ ID NO: 244153 - DNA, 13 bp, Artificial Sequence
  Oligonucleotide for detection of SNP TSC0059579
tagatatagagtt

SEQ ID NO: 244154 - DNA, 13 bp, Artificial Sequence
  Oligonucleotide for detection of SNP TSC0059579
aactctatatcta

SEQ ID NO: 244155 - DNA, 13 bp, Artificial Sequence
  Oligonucleotide for detection of SNP TSC0059580
tgtagaagttatt

SEQ ID NO: 244156 - DNA, 13 bp, Artificial Sequence
  Oligonucleotide for detection of SNP TSC0059580
aataacttctaca

SEQ ID NO: 244157 - DNA, 13 bp, Artificial Sequence
  Oligonucleotide for detection of SNP TSC0059580
tgtagaggttatt

SEQ ID NO: 244158 - DNA, 13 bp, Artificial Sequence
  Oligonucleotide for detection of SNP TSC0059580
aataacctctaca

SEQ ID NO: 244159 - DNA, 13 bp, Artificial Sequence
  Oligonucleotide for detection of SNP TSC0059581
gttttaagagaat

SEQ ID NO: 244160 - DNA, 13 bp, Artificial Sequence
  Oligonucleotide for detection of SNP TSC0059581
attctcttaaaac

SEQ ID NO: 244161 - DNA, 13 bp, Artificial Sequence
  Oligonucleotide for detection of SNP TSC0059581
gttttatgagaat

SEQ ID NO: 244162 - DNA, 13 bp, Artificial Sequence
  Oligonucleotide for detection of SNP TSC0059581
attctcataaaac

SEQ ID NO: 244163 - DNA, 13 bp, Artificial Sequence
  Oligonucleotide for detection of SNP TSC0059581
atttttttaaggy

SEQ ID NO: 244164 - DNA, 13 bp, Artificial Sequence
  Oligonucleotide for detection of SNP TSC0059581
rccttaaaaaaat

SEQ ID NO: 244165 - DNA, 13 bp, Artificial Sequence
  Oligonucleotide for detection of SNP TSC0059581
atttttataaggy

SEQ ID NO: 244166 - DNA, 13 bp, Artificial Sequence
  Oligonucleotide for detection of SNP TSC0059581
rccttataaaaat

SEQ ID NO: 244167 - DNA, 13 bp, Artificial Sequence
  Oligonucleotide for detection of SNP TSC0059582
aatttaattatta

SEQ ID NO: 244168 - DNA, 13 bp, Artificial Sequence
  Oligonucleotide for detection of SNP TSC0059582
taataattaaatt

SEQ ID NO: 244169 - DNA, 13 bp, Artificial Sequence
  Oligonucleotide for detection of SNP TSC0059582
aatttagttatta

SEQ ID NO: 244170 - DNA, 13 bp, Artificial Sequence
  Oligonucleotide for detection of SNP TSC0059582
taataactaaatt

SEQ ID NO: 244171 - DNA, 13 bp, Artificial Sequence
  Oligonucleotide for detection of SNP TSC0059583
tattttatttgag

SEQ ID NO: 244172 - DNA, 13 bp, Artificial Sequence
  Oligonucleotide for detection of SNP TSC0059583
ctcaaataaaata

SEQ ID NO: 244173 - DNA, 13 bp, Artificial Sequence
  Oligonucleotide for detection of SNP TSC0059583
tattttttttgag

SEQ ID NO: 244174 - DNA, 13 bp, Artificial Sequence
  Oligonucleotide for detection of SNP TSC0059583
ctcaaaaaaaata

SEQ ID NO: 244175 - DNA, 13 bp, Artificial Sequence
  Oligonucleotide for detection of SNP TSC0059583
tttaaatgagatg

SEQ ID NO: 244176 - DNA, 13 bp, Artificial Sequence
  Oligonucleotide for detection of SNP TSC0059583
catctcatttaaa

SEQ ID NO: 244177 - DNA, 13 bp, Artificial Sequence
  Oligonucleotide for detection of SNP TSC0059583
tttaaaggagatg

SEQ ID NO: 244178 - DNA, 13 bp, Artificial Sequence
  Oligonucleotide for detection of SNP TSC0059583
catctcctttaaa

SEQ ID NO: 244179 - DNA, 13 bp, Artificial Sequence
  Oligonucleotide for detection of SNP TSC0059585
ttaaatatgataa

SEQ ID NO: 244180 - DNA, 13 bp, Artificial Sequence
  Oligonucleotide for detection of SNP TSC0059585
ttatcatatttaa

SEQ ID NO: 244181 - DNA, 13 bp, Artificial Sequence
  Oligonucleotide for detection of SNP TSC0059586
aggaggatttggt

SEQ ID NO: 244182 - DNA, 13 bp, Artificial Sequence
  Oligonucleotide for detection of SNP TSC0059586
accaaatcctcct

SEQ ID NO: 244183 - DNA, 13 bp, Artificial Sequence
  Oligonucleotide for detection of SNP TSC0059586
aggagggtttggt

SEQ ID NO: 244184 - DNA, 13 bp, Artificial Sequence
  Oligonucleotide for detection of SNP TSC0059586
accaaaccctcct

SEQ ID NO: 244185 - DNA, 13 bp, Artificial Sequence
  Oligonucleotide for detection of SNP TSC0059587
ggtataattgatg

SEQ ID NO: 244186 - DNA, 13 bp, Artificial Sequence
  Oligonucleotide for detection of SNP TSC0059587
catcaattatacc

SEQ ID NO: 244187 - DNA, 13 bp, Artificial Sequence
  Oligonucleotide for detection of SNP TSC0059587
ggtatatttgatg

SEQ ID NO: 244188 - DNA, 13 bp, Artificial Sequence
  Oligonucleotide for detection of SNP TSC0059587
catcaaatatacc

SEQ ID NO: 244189 - DNA, 13 bp, Artificial Sequence
  Oligonucleotide for detection of SNP TSC0059587
tattagttgtgty

SEQ ID NO: 244190 - DNA, 13 bp, Artificial Sequence
  Oligonucleotide for detection of SNP TSC0059587
racacaactaata

SEQ ID NO: 244191 - DNA, 13 bp, Artificial Sequence
  Oligonucleotide for detection of SNP TSC0059587
tattaggtgtgty

SEQ ID NO: 244192 - DNA, 13 bp, Artificial Sequence
  Oligonucleotide for detection of SNP TSC0059587
racacacctaata

SEQ ID NO: 244193 - DNA, 13 bp, Artificial Sequence
  Oligonucleotide for detection of SNP TSC0059588
ttgggtgtttgtt

SEQ ID NO: 244194 - DNA, 13 bp, Artificial Sequence
  Oligonucleotide for detection of SNP TSC0059588
aacaaacacccaa

SEQ ID NO: 244195 - DNA, 13 bp, Artificial Sequence
  Oligonucleotide for detection of SNP TSC0059588
ttgggtatttgtt

SEQ ID NO: 244196 - DNA, 13 bp, Artificial Sequence
  Oligonucleotide for detection of SNP TSC0059588
aacaaatacccaa

SEQ ID NO: 244197 - DNA, 13 bp, Artificial Sequence
  Oligonucleotide for detection of SNP TSC0059588
tcgggtgtttgtt

SEQ ID NO: 244198 - DNA, 13 bp, Artificial Sequence
  Oligonucleotide for detection of SNP TSC0059588
aacaaacacccga

SEQ ID NO: 244199 - DNA, 13 bp, Artificial Sequence
  Oligonucleotide for detection of SNP TSC0059588
tcgggtatttgtt

SEQ ID NO: 244200 - DNA, 13 bp, Artificial Sequence
  Oligonucleotide for detection of SNP TSC0059588
aacaaatacccga

SEQ ID NO: 244201 - DNA, 13 bp, Artificial Sequence
  Oligonucleotide for detection of SNP TSC0059589
agtgtatttaatt

SEQ ID NO: 244202 - DNA, 13 bp, Artificial Sequence
  Oligonucleotide for detection of SNP TSC0059589
aattaaatacact

SEQ ID NO: 244203 - DNA, 13 bp, Artificial Sequence
  Oligonucleotide for detection of SNP TSC0059589
agtgtagttaatt

SEQ ID NO: 244204 - DNA, 13 bp, Artificial Sequence
  Oligonucleotide for detection of SNP TSC0059589
aattaactacact

SEQ ID NO: 244205 - DNA, 13 bp, Artificial Sequence
  Oligonucleotide for detection of SNP TSC0059589
aattaagtatatt

SEQ ID NO: 244206 - DNA, 13 bp, Artificial Sequence
  Oligonucleotide for detection of SNP TSC0059589
aatatacttaatt

SEQ ID NO: 244207 - DNA, 13 bp, Artificial Sequence
  Oligonucleotide for detection of SNP TSC0059589
aattaattatatt

SEQ ID NO: 244208 - DNA, 13 bp, Artificial Sequence
  Oligonucleotide for detection of SNP TSC0059589
aatataattaatt

SEQ ID NO: 244209 - DNA, 13 bp, Artificial Sequence
  Oligonucleotide for detection of SNP TSC0059591
agaatttggggga

SEQ ID NO: 244210 - DNA, 13 bp, Artificial Sequence
  Oligonucleotide for detection of SNP TSC0059591
tcccccaaattct

SEQ ID NO: 244211 - DNA, 13 bp, Artificial Sequence
  Oligonucleotide for detection of SNP TSC0059591
agaattcggggga

SEQ ID NO: 244212 - DNA, 13 bp, Artificial Sequence
  Oligonucleotide for detection of SNP TSC0059591
tcccccgaattct

SEQ ID NO: 244213 - DNA, 13 bp, Artificial Sequence
  Oligonucleotide for detection of SNP TSC0059592
gtttagattttgg

SEQ ID NO: 244214 - DNA, 13 bp, Artificial Sequence
  Oligonucleotide for detection of SNP TSC0059592
ccaaaatctaaac

SEQ ID NO: 244215 - DNA, 13 bp, Artificial Sequence
  Oligonucleotide for detection of SNP TSC0059593
tgtattatgtttt

SEQ ID NO: 244216 - DNA, 13 bp, Artificial Sequence
  Oligonucleotide for detection of SNP TSC0059593
aaaacataataca

SEQ ID NO: 244217 - DNA, 13 bp, Artificial Sequence
  Oligonucleotide for detection of SNP TSC0059593
tgtattgtgtttt

SEQ ID NO: 244218 - DNA, 13 bp, Artificial Sequence
  Oligonucleotide for detection of SNP TSC0059593
aaaacacaataca

SEQ ID NO: 244219 - DNA, 13 bp, Artificial Sequence
  Oligonucleotide for detection of SNP TSC0059595
tattagagtaata

SEQ ID NO: 244220 - DNA, 13 bp, Artificial Sequence
  Oligonucleotide for detection of SNP TSC0059595
tattactctaata

SEQ ID NO: 244221 - DNA, 13 bp, Artificial Sequence
  Oligonucleotide for detection of SNP TSC0059595
tattagggtaata

SEQ ID NO: 244222 - DNA, 13 bp, Artificial Sequence
  Oligonucleotide for detection of SNP TSC0059595
tattaccctaata

SEQ ID NO: 244223 - DNA, 13 bp, Artificial Sequence
  Oligonucleotide for detection of SNP TSC0059596
agaaagatttggt

SEQ ID NO: 244224 - DNA, 13 bp, Artificial Sequence
  Oligonucleotide for detection of SNP TSC0059596
accaaatctttct

SEQ ID NO: 244225 - DNA, 13 bp, Artificial Sequence
  Oligonucleotide for detection of SNP TSC0059596
agaaaggtttggt

SEQ ID NO: 244226 - DNA, 13 bp, Artificial Sequence
  Oligonucleotide for detection of SNP TSC0059596
accaaacctttct

SEQ ID NO: 244227 - DNA, 13 bp, Artificial Sequence
  Oligonucleotide for detection of SNP TSC0059597
gaaaaaaatatat

SEQ ID NO: 244228 - DNA, 13 bp, Artificial Sequence
  Oligonucleotide for detection of SNP TSC0059597
atatatttttttc

SEQ ID NO: 244229 - DNA, 13 bp, Artificial Sequence
  Oligonucleotide for detection of SNP TSC0059597
gaaaaatatatat

SEQ ID NO: 244230 - DNA, 13 bp, Artificial Sequence
  Oligonucleotide for detection of SNP TSC0059597
atatatatttttc

SEQ ID NO: 244231 - DNA, 13 bp, Artificial Sequence
  Oligonucleotide for detection of SNP TSC0059597
atatgttttttty

SEQ ID NO: 244232 - DNA, 13 bp, Artificial Sequence
  Oligonucleotide for detection of SNP TSC0059597
raaaaaaacatat

SEQ ID NO: 244233 - DNA, 13 bp, Artificial Sequence
  Oligonucleotide for detection of SNP TSC0059598
tatattgtaattt

SEQ ID NO: 244234 - DNA, 13 bp, Artificial Sequence
  Oligonucleotide for detection of SNP TSC0059598
aaattacaatata

SEQ ID NO: 244235 - DNA, 13 bp, Artificial Sequence
  Oligonucleotide for detection of SNP TSC0059598
tatattataattt

SEQ ID NO: 244236 - DNA, 13 bp, Artificial Sequence
  Oligonucleotide for detection of SNP TSC0059598
aaattataatata

SEQ ID NO: 244237 - DNA, 13 bp, Artificial Sequence
  Oligonucleotide for detection of SNP TSC0059599
ataggtatgagtt

SEQ ID NO: 244238 - DNA, 13 bp, Artificial Sequence
  Oligonucleotide for detection of SNP TSC0059599
aactcatacctat

SEQ ID NO: 244239 - DNA, 13 bp, Artificial Sequence
  Oligonucleotide for detection of SNP TSC0059599
ataggtgtgagtt

SEQ ID NO: 244240 - DNA, 13 bp, Artificial Sequence
  Oligonucleotide for detection of SNP TSC0059599
aactcacacctat

SEQ ID NO: 244241 - DNA, 13 bp, Artificial Sequence
  Oligonucleotide for detection of SNP TSC0059599
ataggcgtgagtt

SEQ ID NO: 244242 - DNA, 13 bp, Artificial Sequence
  Oligonucleotide for detection of SNP TSC0059599
aactcacgcctat

SEQ ID NO: 244243 - DNA, 13 bp, Artificial Sequence
  Oligonucleotide for detection of SNP TSC0059599
agtttatgtttgt

SEQ ID NO: 244244 - DNA, 13 bp, Artificial Sequence
  Oligonucleotide for detection of SNP TSC0059599
acaaacataaact

SEQ ID NO: 244245 - DNA, 13 bp, Artificial Sequence
  Oligonucleotide for detection of SNP TSC0059599
agtttacgtttgt

SEQ ID NO: 244246 - DNA, 13 bp, Artificial Sequence
  Oligonucleotide for detection of SNP TSC0059599
acaaacgtaaact

SEQ ID NO: 244247 - DNA, 13 bp, Artificial Sequence
  Oligonucleotide for detection of SNP TSC0059601
ttgaatttaggag

SEQ ID NO: 244248 - DNA, 13 bp, Artificial Sequence
  Oligonucleotide for detection of SNP TSC0059601
ctcctaaattcaa

SEQ ID NO: 244249 - DNA, 13 bp, Artificial Sequence
  Oligonucleotide for detection of SNP TSC0059601
ttgaatgtaggag

SEQ ID NO: 244250 - DNA, 13 bp, Artificial Sequence
  Oligonucleotide for detection of SNP TSC0059601
ctcctacattcaa

SEQ ID NO: 244251 - DNA, 13 bp, Artificial Sequence
  Oligonucleotide for detection of SNP TSC0059601
ttgaacgtaggag

SEQ ID NO: 244252 - DNA, 13 bp, Artificial Sequence
  Oligonucleotide for detection of SNP TSC0059601
ctcctacgttcaa

SEQ ID NO: 244253 - DNA, 13 bp, Artificial Sequence
  Oligonucleotide for detection of SNP TSC0059606
atagaaaggattt

SEQ ID NO: 244254 - DNA, 13 bp, Artificial Sequence
  Oligonucleotide for detection of SNP TSC0059606
aaatcctttctat

SEQ ID NO: 244255 - DNA, 13 bp, Artificial Sequence
  Oligonucleotide for detection of SNP TSC0059606
atagaagggattt

SEQ ID NO: 244256 - DNA, 13 bp, Artificial Sequence
  Oligonucleotide for detection of SNP TSC0059606
aaatcccttctat

SEQ ID NO: 244257 - DNA, 13 bp, Artificial Sequence
  Oligonucleotide for detection of SNP TSC0059607
taataggtttttt

SEQ ID NO: 244258 - DNA, 13 bp, Artificial Sequence
  Oligonucleotide for detection of SNP TSC0059607
aaaaaacctatta

SEQ ID NO: 244259 - DNA, 13 bp, Artificial Sequence
  Oligonucleotide for detection of SNP TSC0059607
taatagatttttt

SEQ ID NO: 244260 - DNA, 13 bp, Artificial Sequence
  Oligonucleotide for detection of SNP TSC0059607
aaaaaatctatta

SEQ ID NO: 244261 - DNA, 13 bp, Artificial Sequence
  Oligonucleotide for detection of SNP TSC0059608
aaatagaatttag

SEQ ID NO: 244262 - DNA, 13 bp, Artificial Sequence
  Oligonucleotide for detection of SNP TSC0059608
ctaaattctattt

SEQ ID NO: 244263 - DNA, 13 bp, Artificial Sequence
  Oligonucleotide for detection of SNP TSC0059608
aaataggatttag

SEQ ID NO: 244264 - DNA, 13 bp, Artificial Sequence
  Oligonucleotide for detection of SNP TSC0059608
ctaaatcctattt

SEQ ID NO: 244265 - DNA, 13 bp, Artificial Sequence
  Oligonucleotide for detection of SNP TSC0059609
aatttaaaagaaa

SEQ ID NO: 244266 - DNA, 13 bp, Artificial Sequence
  Oligonucleotide for detection of SNP TSC0059609
tttcttttaaatt

SEQ ID NO: 244267 - DNA, 13 bp, Artificial Sequence
  Oligonucleotide for detection of SNP TSC0059609
aatttagaagaaa

SEQ ID NO: 244268 - DNA, 13 bp, Artificial Sequence
  Oligonucleotide for detection of SNP TSC0059609
tttcttctaaatt

SEQ ID NO: 244269 - DNA, 13 bp, Artificial Sequence
  Oligonucleotide for detection of SNP TSC0059610
aattttattgttg

SEQ ID NO: 244270 - DNA, 13 bp, Artificial Sequence
  Oligonucleotide for detection of SNP TSC0059610
caacaataaaatt

SEQ ID NO: 244271 - DNA, 13 bp, Artificial Sequence
  Oligonucleotide for detection of SNP TSC0059610
aattttgttgttg

SEQ ID NO: 244272 - DNA, 13 bp, Artificial Sequence
  Oligonucleotide for detection of SNP TSC0059610
caacaacaaaatt

SEQ ID NO: 244273 - DNA, 13 bp, Artificial Sequence
  Oligonucleotide for detection of SNP TSC0059611
aaaagaaggaaat

SEQ ID NO: 244274 - DNA, 13 bp, Artificial Sequence
  Oligonucleotide for detection of SNP TSC0059611
atttccttctttt

SEQ ID NO: 244275 - DNA, 13 bp, Artificial Sequence
  Oligonucleotide for detection of SNP TSC0059611
aaaagagggaaat

SEQ ID NO: 244276 - DNA, 13 bp, Artificial Sequence
  Oligonucleotide for detection of SNP TSC0059611
atttccctctttt

SEQ ID NO: 244277 - DNA, 13 bp, Artificial Sequence
  Oligonucleotide for detection of SNP TSC0059612
ttattaataaata

SEQ ID NO: 244278 - DNA, 13 bp, Artificial Sequence
  Oligonucleotide for detection of SNP TSC0059612
tatttattaataa

SEQ ID NO: 244279 - DNA, 13 bp, Artificial Sequence
  Oligonucleotide for detection of SNP TSC0059612
ttattattaaata

SEQ ID NO: 244280 - DNA, 13 bp, Artificial Sequence
  Oligonucleotide for detection of SNP TSC0059612
tatttaataataa

SEQ ID NO: 244281 - DNA, 13 bp, Artificial Sequence
  Oligonucleotide for detection of SNP TSC0059612
tatttgttgataa

SEQ ID NO: 244282 - DNA, 13 bp, Artificial Sequence
  Oligonucleotide for detection of SNP TSC0059612
ttatcaacaaata

SEQ ID NO: 244283 - DNA, 13 bp, Artificial Sequence
  Oligonucleotide for detection of SNP TSC0059612
tatttgatgataa

SEQ ID NO: 244284 - DNA, 13 bp, Artificial Sequence
  Oligonucleotide for detection of SNP TSC0059612
ttatcatcaaata

SEQ ID NO: 244285 - DNA, 13 bp, Artificial Sequence
  Oligonucleotide for detection of SNP TSC0059614
aatatgtgtggag

SEQ ID NO: 244286 - DNA, 13 bp, Artificial Sequence
  Oligonucleotide for detection of SNP TSC0059614
ctccacacatatt

SEQ ID NO: 244287 - DNA, 13 bp, Artificial Sequence
  Oligonucleotide for detection of SNP TSC0059614
aatatgcgtggag

SEQ ID NO: 244288 - DNA, 13 bp, Artificial Sequence
  Oligonucleotide for detection of SNP TSC0059614
ctccacgcatatt

SEQ ID NO: 244289 - DNA, 13 bp, Artificial Sequence
  Oligonucleotide for detection of SNP TSC0059615
aaaaaagtaagga

SEQ ID NO: 244290 - DNA, 13 bp, Artificial Sequence
  Oligonucleotide for detection of SNP TSC0059615
tccttactttttt

SEQ ID NO: 244291 - DNA, 13 bp, Artificial Sequence
  Oligonucleotide for detection of SNP TSC0059615
aaaaaaataagga

SEQ ID NO: 244292 - DNA, 13 bp, Artificial Sequence
  Oligonucleotide for detection of SNP TSC0059615
tccttattttttt

SEQ ID NO: 244293 - DNA, 13 bp, Artificial Sequence
  Oligonucleotide for detection of SNP TSC0059617
tgtattgtggttt

SEQ ID NO: 244294 - DNA, 13 bp, Artificial Sequence
  Oligonucleotide for detection of SNP TSC0059617
aaaccacaataca

SEQ ID NO: 244295 - DNA, 13 bp, Artificial Sequence
  Oligonucleotide for detection of SNP TSC0059617
tgtattacggttt

SEQ ID NO: 244296 - DNA, 13 bp, Artificial Sequence
  Oligonucleotide for detection of SNP TSC0059617
aaaccgtaataca

SEQ ID NO: 244297 - DNA, 13 bp, Artificial Sequence
  Oligonucleotide for detection of SNP TSC0059617
tgtattgcggttt

SEQ ID NO: 244298 - DNA, 13 bp, Artificial Sequence
  Oligonucleotide for detection of SNP TSC0059617
aaaccgcaataca

SEQ ID NO: 244299 - DNA, 13 bp, Artificial Sequence
  Oligonucleotide for detection of SNP TSC0059621
atttaaaatgtgy

SEQ ID NO: 244300 - DNA, 13 bp, Artificial Sequence
  Oligonucleotide for detection of SNP TSC0059621
rcacattttaaat

SEQ ID NO: 244301 - DNA, 13 bp, Artificial Sequence
  Oligonucleotide for detection of SNP TSC0059621
atttaagatgtgy

SEQ ID NO: 244302 - DNA, 13 bp, Artificial Sequence
  Oligonucleotide for detection of SNP TSC0059621
rcacatcttaaat

SEQ ID NO: 244303 - DNA, 13 bp, Artificial Sequence
  Oligonucleotide for detection of SNP TSC0059621
atttaaaacgtgy

SEQ ID NO: 244304 - DNA, 13 bp, Artificial Sequence
  Oligonucleotide for detection of SNP TSC0059621
rcacgttttaaat

SEQ ID NO: 244305 - DNA, 13 bp, Artificial Sequence
  Oligonucleotide for detection of SNP TSC0059621
atttaagacgtgy

SEQ ID NO: 244306 - DNA, 13 bp, Artificial Sequence
  Oligonucleotide for detection of SNP TSC0059621
rcacgtcttaaat

SEQ ID NO: 244307 - DNA, 13 bp, Artificial Sequence
  Oligonucleotide for detection of SNP TSC0059623
agagaaaaggaaa

SEQ ID NO: 244308 - DNA, 13 bp, Artificial Sequence
  Oligonucleotide for detection of SNP TSC0059623
tttccttttctct

SEQ ID NO: 244309 - DNA, 13 bp, Artificial Sequence
  Oligonucleotide for detection of SNP TSC0059623
agagaagaggaaa

SEQ ID NO: 244310 - DNA, 13 bp, Artificial Sequence
  Oligonucleotide for detection of SNP TSC0059623
tttcctcttctct

SEQ ID NO: 244311 - DNA, 13 bp, Artificial Sequence
  Oligonucleotide for detection of SNP TSC0059627
tgaaaagaaaaty

SEQ ID NO: 244312 - DNA, 13 bp, Artificial Sequence
  Oligonucleotide for detection of SNP TSC0059627
rattttcttttca

SEQ ID NO: 244313 - DNA, 13 bp, Artificial Sequence
  Oligonucleotide for detection of SNP TSC0059627
tgaaaaaaaaaty

SEQ ID NO: 244314 - DNA, 13 bp, Artificial Sequence
  Oligonucleotide for detection of SNP TSC0059627
ratttttttttca

SEQ ID NO: 244315 - DNA, 13 bp, Artificial Sequence
  Oligonucleotide for detection of SNP TSC0059630
taggatgaagttt

SEQ ID NO: 244316 - DNA, 13 bp, Artificial Sequence
  Oligonucleotide for detection of SNP TSC0059630
aaacttcatccta

SEQ ID NO: 244317 - DNA, 13 bp, Artificial Sequence
  Oligonucleotide for detection of SNP TSC0059630
taggataaagttt

SEQ ID NO: 244318 - DNA, 13 bp, Artificial Sequence
  Oligonucleotide for detection of SNP TSC0059630
aaactttatccta

SEQ ID NO: 244319 - DNA, 13 bp, Artificial Sequence
  Oligonucleotide for detection of SNP TSC0059631
ttggtttggtttt

SEQ ID NO: 244320 - DNA, 13 bp, Artificial Sequence
  Oligonucleotide for detection of SNP TSC0059631
aaaaccaaaccaa

SEQ ID NO: 244321 - DNA, 13 bp, Artificial Sequence
  Oligonucleotide for detection of SNP TSC0059631
ttggttcggtttt

SEQ ID NO: 244322 - DNA, 13 bp, Artificial Sequence
  Oligonucleotide for detection of SNP TSC0059631
aaaaccgaaccaa

SEQ ID NO: 244323 - DNA, 13 bp, Artificial Sequence
  Oligonucleotide for detection of SNP TSC0059631
aaagttgagttaa

SEQ ID NO: 244324 - DNA, 13 bp, Artificial Sequence
  Oligonucleotide for detection of SNP TSC0059631
ttaactcaacttt

SEQ ID NO: 244325 - DNA, 13 bp, Artificial Sequence
  Oligonucleotide for detection of SNP TSC0059631
aaagttaagttaa

SEQ ID NO: 244326 - DNA, 13 bp, Artificial Sequence
  Oligonucleotide for detection of SNP TSC0059631
ttaacttaacttt

SEQ ID NO: 244327 - DNA, 13 bp, Artificial Sequence
  Oligonucleotide for detection of SNP TSC0059631
aaagtcgagttaa

SEQ ID NO: 244328 - DNA, 13 bp, Artificial Sequence
  Oligonucleotide for detection of SNP TSC0059631
ttaactcgacttt

SEQ ID NO: 244329 - DNA, 13 bp, Artificial Sequence
  Oligonucleotide for detection of SNP TSC0059632
tataatttttggt

SEQ ID NO: 244330 - DNA, 13 bp, Artificial Sequence
  Oligonucleotide for detection of SNP TSC0059632
accaaaaattata

SEQ ID NO: 244331 - DNA, 13 bp, Artificial Sequence
  Oligonucleotide for detection of SNP TSC0059632
tataacgtttggt

SEQ ID NO: 244332 - DNA, 13 bp, Artificial Sequence
  Oligonucleotide for detection of SNP TSC0059632
accaaacgttata

SEQ ID NO: 244333 - DNA, 13 bp, Artificial Sequence
  Oligonucleotide for detection of SNP TSC0059632
attaggagttgtg

SEQ ID NO: 244334 - DNA, 13 bp, Artificial Sequence
  Oligonucleotide for detection of SNP TSC0059632
cacaactcctaat

SEQ ID NO: 244335 - DNA, 13 bp, Artificial Sequence
  Oligonucleotide for detection of SNP TSC0059632
attaggtgttgtg

SEQ ID NO: 244336 - DNA, 13 bp, Artificial Sequence
  Oligonucleotide for detection of SNP TSC0059632
cacaacacctaat

SEQ ID NO: 244337 - DNA, 13 bp, Artificial Sequence
  Oligonucleotide for detection of SNP TSC0059632
attaggcgttgtg

SEQ ID NO: 244338 - DNA, 13 bp, Artificial Sequence
  Oligonucleotide for detection of SNP TSC0059632
cacaacgcctaat

SEQ ID NO: 244339 - DNA, 13 bp, Artificial Sequence
  Oligonucleotide for detection of SNP TSC0059635
tgttttattagta

SEQ ID NO: 244340 - DNA, 13 bp, Artificial Sequence
  Oligonucleotide for detection of SNP TSC0059635
tactaataaaaca

SEQ ID NO: 244341 - DNA, 13 bp, Artificial Sequence
  Oligonucleotide for detection of SNP TSC0059635
tgttttgttagta

SEQ ID NO: 244342 - DNA, 13 bp, Artificial Sequence
  Oligonucleotide for detection of SNP TSC0059635
tactaacaaaaca

SEQ ID NO: 244343 - DNA, 13 bp, Artificial Sequence
  Oligonucleotide for detection of SNP TSC0059635
tgtttcgttagta

SEQ ID NO: 244344 - DNA, 13 bp, Artificial Sequence
  Oligonucleotide for detection of SNP TSC0059635
tactaacgaaaca

SEQ ID NO: 244345 - DNA, 13 bp, Artificial Sequence
  Oligonucleotide for detection of SNP TSC0059635
tgttagtgagata

SEQ ID NO: 244346 - DNA, 13 bp, Artificial Sequence
  Oligonucleotide for detection of SNP TSC0059635
tatctcactaaca

SEQ ID NO: 244347 - DNA, 13 bp, Artificial Sequence
  Oligonucleotide for detection of SNP TSC0059635
tgttagcgagata

SEQ ID NO: 244348 - DNA, 13 bp, Artificial Sequence
  Oligonucleotide for detection of SNP TSC0059635
tatctcgctaaca

SEQ ID NO: 244349 - DNA, 13 bp, Artificial Sequence
  Oligonucleotide for detection of SNP TSC0059639
gaatttattgaay

SEQ ID NO: 244350 - DNA, 13 bp, Artificial Sequence
  Oligonucleotide for detection of SNP TSC0059639
rttcaataaattc

SEQ ID NO: 244351 - DNA, 13 bp, Artificial Sequence
  Oligonucleotide for detection of SNP TSC0059639
gaattttttgaay

SEQ ID NO: 244352 - DNA, 13 bp, Artificial Sequence
  Oligonucleotide for detection of SNP TSC0059639
rttcaaaaaattc

SEQ ID NO: 244353 - DNA, 13 bp, Artificial Sequence
  Oligonucleotide for detection of SNP TSC0059639
gtttaataaatty

SEQ ID NO: 244354 - DNA, 13 bp, Artificial Sequence
  Oligonucleotide for detection of SNP TSC0059639
raatttattaaac

SEQ ID NO: 244355 - DNA, 13 bp, Artificial Sequence
  Oligonucleotide for detection of SNP TSC0059639
gtttaagaaatty

SEQ ID NO: 244356 - DNA, 13 bp, Artificial Sequence
  Oligonucleotide for detection of SNP TSC0059639
raatttcttaaac

SEQ ID NO: 244357 - DNA, 13 bp, Artificial Sequence
  Oligonucleotide for detection of SNP TSC0059646
tttttttgagaag

SEQ ID NO: 244358 - DNA, 13 bp, Artificial Sequence
  Oligonucleotide for detection of SNP TSC0059646
cttctcaaaaaaa

SEQ ID NO: 244359 - DNA, 13 bp, Artificial Sequence
  Oligonucleotide for detection of SNP TSC0059646
ttttttcgagaag

SEQ ID NO: 244360 - DNA, 13 bp, Artificial Sequence
  Oligonucleotide for detection of SNP TSC0059646
cttctcgaaaaaa

SEQ ID NO: 244361 - DNA, 13 bp, Artificial Sequence
  Oligonucleotide for detection of SNP TSC0059647
ttatttgatatag

SEQ ID NO: 244362 - DNA, 13 bp, Artificial Sequence
  Oligonucleotide for detection of SNP TSC0059647
ctatatcaaataa

SEQ ID NO: 244363 - DNA, 13 bp, Artificial Sequence
  Oligonucleotide for detection of SNP TSC0059647
ttatataaaatag

SEQ ID NO: 244364 - DNA, 13 bp, Artificial Sequence
  Oligonucleotide for detection of SNP TSC0059647
ctattttatataa

SEQ ID NO: 244365 - DNA, 13 bp, Artificial Sequence
  Oligonucleotide for detection of SNP TSC0059647
ttatattaaatag

SEQ ID NO: 244366 - DNA, 13 bp, Artificial Sequence
  Oligonucleotide for detection of SNP TSC0059647
ctatttaatataa

SEQ ID NO: 244367 - DNA, 13 bp, Artificial Sequence
  Oligonucleotide for detection of SNP TSC0059648
tgaaattggttgg

SEQ ID NO: 244368 - DNA, 13 bp, Artificial Sequence
  Oligonucleotide for detection of SNP TSC0059648
ccaaccaatttca

SEQ ID NO: 244369 - DNA, 13 bp, Artificial Sequence
  Oligonucleotide for detection of SNP TSC0059648
tgaaatgggttgg

SEQ ID NO: 244370 - DNA, 13 bp, Artificial Sequence
  Oligonucleotide for detection of SNP TSC0059648
ccaacccatttca

SEQ ID NO: 244371 - DNA, 13 bp, Artificial Sequence
  Oligonucleotide for detection of SNP TSC0059649
taaaagttaaaat

SEQ ID NO: 244372 - DNA, 13 bp, Artificial Sequence
  Oligonucleotide for detection of SNP TSC0059649
attttaactttta

SEQ ID NO: 244373 - DNA, 13 bp, Artificial Sequence
  Oligonucleotide for detection of SNP TSC0059649
taaaaggtaaaat

SEQ ID NO: 244374 - DNA, 13 bp, Artificial Sequence
  Oligonucleotide for detection of SNP TSC0059649
attttacctttta

SEQ ID NO: 244375 - DNA, 13 bp, Artificial Sequence
  Oligonucleotide for detection of SNP TSC0059649
attttgattttta

SEQ ID NO: 244376 - DNA, 13 bp, Artificial Sequence
  Oligonucleotide for detection of SNP TSC0059649
taaaaatcaaaat

SEQ ID NO: 244377 - DNA, 13 bp, Artificial Sequence
  Oligonucleotide for detection of SNP TSC0059655
atgtgtgagtata

SEQ ID NO: 244378 - DNA, 13 bp, Artificial Sequence
  Oligonucleotide for detection of SNP TSC0059655
tatactcacacat

SEQ ID NO: 244379 - DNA, 13 bp, Artificial Sequence
  Oligonucleotide for detection of SNP TSC0059655
atgtgtaagtata

SEQ ID NO: 244380 - DNA, 13 bp, Artificial Sequence
  Oligonucleotide for detection of SNP TSC0059655
tatacttacacat

SEQ ID NO: 244381 - DNA, 13 bp, Artificial Sequence
  Oligonucleotide for detection of SNP TSC0059657
aattttattttag

SEQ ID NO: 244382 - DNA, 13 bp, Artificial Sequence
  Oligonucleotide for detection of SNP TSC0059657
ctaaaataaaatt

SEQ ID NO: 244383 - DNA, 13 bp, Artificial Sequence
  Oligonucleotide for detection of SNP TSC0059660
aatatataatagy

SEQ ID NO: 244384 - DNA, 13 bp, Artificial Sequence
  Oligonucleotide for detection of SNP TSC0059660
rctattatatatt

SEQ ID NO: 244385 - DNA, 13 bp, Artificial Sequence
  Oligonucleotide for detection of SNP TSC0059660
aatatagaatagy

SEQ ID NO: 244386 - DNA, 13 bp, Artificial Sequence
  Oligonucleotide for detection of SNP TSC0059660
rctattctatatt

SEQ ID NO: 244387 - DNA, 13 bp, Artificial Sequence
  Oligonucleotide for detection of SNP TSC0059660
gttgttttgtgtt

SEQ ID NO: 244388 - DNA, 13 bp, Artificial Sequence
  Oligonucleotide for detection of SNP TSC0059660
aacacaaaacaac

SEQ ID NO: 244389 - DNA, 13 bp, Artificial Sequence
  Oligonucleotide for detection of SNP TSC0059661
gtagttataattg

SEQ ID NO: 244390 - DNA, 13 bp, Artificial Sequence
  Oligonucleotide for detection of SNP TSC0059661
caattataactac

SEQ ID NO: 244391 - DNA, 13 bp, Artificial Sequence
  Oligonucleotide for detection of SNP TSC0059661
gtagttgtaattg

SEQ ID NO: 244392 - DNA, 13 bp, Artificial Sequence
  Oligonucleotide for detection of SNP TSC0059661
caattacaactac

SEQ ID NO: 244393 - DNA, 13 bp, Artificial Sequence
  Oligonucleotide for detection of SNP TSC0059661
gtagtcgtaattg

SEQ ID NO: 244394 - DNA, 13 bp, Artificial Sequence
  Oligonucleotide for detection of SNP TSC0059661
caattacgactac

SEQ ID NO: 244395 - DNA, 13 bp, Artificial Sequence
  Oligonucleotide for detection of SNP TSC0059662
gggaataaagatt

SEQ ID NO: 244396 - DNA, 13 bp, Artificial Sequence
  Oligonucleotide for detection of SNP TSC0059662
aatctttattccc

SEQ ID NO: 244397 - DNA, 13 bp, Artificial Sequence
  Oligonucleotide for detection of SNP TSC0059662
gggaattaagatt

SEQ ID NO: 244398 - DNA, 13 bp, Artificial Sequence
  Oligonucleotide for detection of SNP TSC0059662
aatcttaattccc

SEQ ID NO: 244399 - DNA, 13 bp, Artificial Sequence
  Oligonucleotide for detection of SNP TSC0059664
tattttaatgagy

SEQ ID NO: 244400 - DNA, 13 bp, Artificial Sequence
  Oligonucleotide for detection of SNP TSC0059664
rctcattaaaata

SEQ ID NO: 244401 - DNA, 13 bp, Artificial Sequence
  Oligonucleotide for detection of SNP TSC0059664
tattttgatgagy

SEQ ID NO: 244402 - DNA, 13 bp, Artificial Sequence
  Oligonucleotide for detection of SNP TSC0059664
rctcatcaaaata

SEQ ID NO: 244403 - DNA, 13 bp, Artificial Sequence
  Oligonucleotide for detection of SNP TSC0059664
tattttaacgagy

SEQ ID NO: 244404 - DNA, 13 bp, Artificial Sequence
  Oligonucleotide for detection of SNP TSC0059664
rctcgttaaaata

SEQ ID NO: 244405 - DNA, 13 bp, Artificial Sequence
  Oligonucleotide for detection of SNP TSC0059664
tatttcgatgagy

SEQ ID NO: 244406 - DNA, 13 bp, Artificial Sequence
  Oligonucleotide for detection of SNP TSC0059664
rctcatcgaaata

SEQ ID NO: 244407 - DNA, 13 bp, Artificial Sequence
  Oligonucleotide for detection of SNP TSC0059664
tattttgacgagy

SEQ ID NO: 244408 - DNA, 13 bp, Artificial Sequence
  Oligonucleotide for detection of SNP TSC0059664
rctcgtcaaaata

SEQ ID NO: 244409 - DNA, 13 bp, Artificial Sequence
  Oligonucleotide for detection of SNP TSC0059664
tatttcgacgagy

SEQ ID NO: 244410 - DNA, 13 bp, Artificial Sequence
  Oligonucleotide for detection of SNP TSC0059664
rctcgtcgaaata

SEQ ID NO: 244411 - DNA, 13 bp, Artificial Sequence
  Oligonucleotide for detection of SNP TSC0059664
gtttgttgaaata

SEQ ID NO: 244412 - DNA, 13 bp, Artificial Sequence
  Oligonucleotide for detection of SNP TSC0059664
tatttcaacaaac

SEQ ID NO: 244413 - DNA, 13 bp, Artificial Sequence
  Oligonucleotide for detection of SNP TSC0059664
gttcgttgaaata

SEQ ID NO: 244414 - DNA, 13 bp, Artificial Sequence
  Oligonucleotide for detection of SNP TSC0059664
tatttcaacgaac

SEQ ID NO: 244415 - DNA, 13 bp, Artificial Sequence
  Oligonucleotide for detection of SNP TSC0059664
gtttgtcgaaata

SEQ ID NO: 244416 - DNA, 13 bp, Artificial Sequence
  Oligonucleotide for detection of SNP TSC0059664
tatttcgacaaac

SEQ ID NO: 244417 - DNA, 13 bp, Artificial Sequence
  Oligonucleotide for detection of SNP TSC0059664
gttcgtcgaaata

SEQ ID NO: 244418 - DNA, 13 bp, Artificial Sequence
  Oligonucleotide for detection of SNP TSC0059664
tatttcgacgaac

SEQ ID NO: 244419 - DNA, 13 bp, Artificial Sequence
  Oligonucleotide for detection of SNP TSC0059665
taagtaaatatty

SEQ ID NO: 244420 - DNA, 13 bp, Artificial Sequence
  Oligonucleotide for detection of SNP TSC0059665
raatatttactta

SEQ ID NO: 244421 - DNA, 13 bp, Artificial Sequence
  Oligonucleotide for detection of SNP TSC0059665
taagtagatatty

SEQ ID NO: 244422 - DNA, 13 bp, Artificial Sequence
  Oligonucleotide for detection of SNP TSC0059665
raatatctactta

SEQ ID NO: 244423 - DNA, 13 bp, Artificial Sequence
  Oligonucleotide for detection of SNP TSC0059666
aggagatttttta

SEQ ID NO: 244424 - DNA, 13 bp, Artificial Sequence
  Oligonucleotide for detection of SNP TSC0059666
taaaaaatctcct

SEQ ID NO: 244425 - DNA, 13 bp, Artificial Sequence
  Oligonucleotide for detection of SNP TSC0059666
tggaaagtttttt

SEQ ID NO: 244426 - DNA, 13 bp, Artificial Sequence
  Oligonucleotide for detection of SNP TSC0059666
aaaaaactttcca

SEQ ID NO: 244427 - DNA, 13 bp, Artificial Sequence
  Oligonucleotide for detection of SNP TSC0059666
tggaaattttttt

SEQ ID NO: 244428 - DNA, 13 bp, Artificial Sequence
  Oligonucleotide for detection of SNP TSC0059666
aaaaaaatttcca

SEQ ID NO: 244429 - DNA, 13 bp, Artificial Sequence
  Oligonucleotide for detection of SNP TSC0059669
tttataataatat

SEQ ID NO: 244430 - DNA, 13 bp, Artificial Sequence
  Oligonucleotide for detection of SNP TSC0059669
atattattataaa

SEQ ID NO: 244431 - DNA, 13 bp, Artificial Sequence
  Oligonucleotide for detection of SNP TSC0059669
tttatagtaatat

SEQ ID NO: 244432 - DNA, 13 bp, Artificial Sequence
  Oligonucleotide for detection of SNP TSC0059669
atattactataaa

SEQ ID NO: 244433 - DNA, 13 bp, Artificial Sequence
  Oligonucleotide for detection of SNP TSC0059670
attttaaaaaaga

SEQ ID NO: 244434 - DNA, 13 bp, Artificial Sequence
  Oligonucleotide for detection of SNP TSC0059670
tcttttttaaaat

SEQ ID NO: 244435 - DNA, 13 bp, Artificial Sequence
  Oligonucleotide for detection of SNP TSC0059670
attttagaaaaga

SEQ ID NO: 244436 - DNA, 13 bp, Artificial Sequence
  Oligonucleotide for detection of SNP TSC0059670
tcttttctaaaat

SEQ ID NO: 244437 - DNA, 13 bp, Artificial Sequence
  Oligonucleotide for detection of SNP TSC0059671
tttttagtattat

SEQ ID NO: 244438 - DNA, 13 bp, Artificial Sequence
  Oligonucleotide for detection of SNP TSC0059671
ataatactaaaaa

SEQ ID NO: 244439 - DNA, 13 bp, Artificial Sequence
  Oligonucleotide for detection of SNP TSC0059671
atggtagtaagag

SEQ ID NO: 244440 - DNA, 13 bp, Artificial Sequence
  Oligonucleotide for detection of SNP TSC0059671
ctcttactaccat

SEQ ID NO: 244441 - DNA, 13 bp, Artificial Sequence
  Oligonucleotide for detection of SNP TSC0059671
atggtattaagag

SEQ ID NO: 244442 - DNA, 13 bp, Artificial Sequence
  Oligonucleotide for detection of SNP TSC0059671
ctcttaataccat

SEQ ID NO: 244443 - DNA, 13 bp, Artificial Sequence
  Oligonucleotide for detection of SNP TSC0059675
tagtgttgaggty

SEQ ID NO: 244444 - DNA, 13 bp, Artificial Sequence
  Oligonucleotide for detection of SNP TSC0059675
racctcaacacta

SEQ ID NO: 244445 - DNA, 13 bp, Artificial Sequence
  Oligonucleotide for detection of SNP TSC0059675
tagcgttgaggty

SEQ ID NO: 244446 - DNA, 13 bp, Artificial Sequence
  Oligonucleotide for detection of SNP TSC0059675
racctcaacgcta

SEQ ID NO: 244447 - DNA, 13 bp, Artificial Sequence
  Oligonucleotide for detection of SNP TSC0059675
tagtgtcgaggty

SEQ ID NO: 244448 - DNA, 13 bp, Artificial Sequence
  Oligonucleotide for detection of SNP TSC0059675
racctcgacacta

SEQ ID NO: 244449 - DNA, 13 bp, Artificial Sequence
  Oligonucleotide for detection of SNP TSC0059675
tagcgtcgaggty

SEQ ID NO: 244450 - DNA, 13 bp, Artificial Sequence
  Oligonucleotide for detection of SNP TSC0059675
racctcgacgcta

SEQ ID NO: 244451 - DNA, 13 bp, Artificial Sequence
  Oligonucleotide for detection of SNP TSC0059675
ggttttggtgttg

SEQ ID NO: 244452 - DNA, 13 bp, Artificial Sequence
  Oligonucleotide for detection of SNP TSC0059675
caacaccaaaacc

SEQ ID NO: 244453 - DNA, 13 bp, Artificial Sequence
  Oligonucleotide for detection of SNP TSC0059675
ggttttagtgttg

SEQ ID NO: 244454 - DNA, 13 bp, Artificial Sequence
  Oligonucleotide for detection of SNP TSC0059675
caacactaaaacc

SEQ ID NO: 244455 - DNA, 13 bp, Artificial Sequence
  Oligonucleotide for detection of SNP TSC0059675
ggtttcggtgttg

SEQ ID NO: 244456 - DNA, 13 bp, Artificial Sequence
  Oligonucleotide for detection of SNP TSC0059675
caacaccgaaacc

SEQ ID NO: 244457 - DNA, 13 bp, Artificial Sequence
  Oligonucleotide for detection of SNP TSC0059675
ggttttagcgttg

SEQ ID NO: 244458 - DNA, 13 bp, Artificial Sequence
  Oligonucleotide for detection of SNP TSC0059675
caacgctaaaacc

SEQ ID NO: 244459 - DNA, 13 bp, Artificial Sequence
  Oligonucleotide for detection of SNP TSC0059675
ggttttggcgttg

SEQ ID NO: 244460 - DNA, 13 bp, Artificial Sequence
  Oligonucleotide for detection of SNP TSC0059675
caacgccaaaacc

SEQ ID NO: 244461 - DNA, 13 bp, Artificial Sequence
  Oligonucleotide for detection of SNP TSC0059675
ggtttcggcgttg

SEQ ID NO: 244462 - DNA, 13 bp, Artificial Sequence
  Oligonucleotide for detection of SNP TSC0059675
caacgccgaaacc

SEQ ID NO: 244463 - DNA, 13 bp, Artificial Sequence
  Oligonucleotide for detection of SNP TSC0059677
ttttttttgggat

SEQ ID NO: 244464 - DNA, 13 bp, Artificial Sequence
  Oligonucleotide for detection of SNP TSC0059677
atcccaaaaaaaa

SEQ ID NO: 244465 - DNA, 13 bp, Artificial Sequence
  Oligonucleotide for detection of SNP TSC0059686
gagaaataaataa

SEQ ID NO: 244466 - DNA, 13 bp, Artificial Sequence
  Oligonucleotide for detection of SNP TSC0059686
ttatttatttctc

SEQ ID NO: 244467 - DNA, 13 bp, Artificial Sequence
  Oligonucleotide for detection of SNP TSC0059686
gagaaagaaataa

SEQ ID NO: 244468 - DNA, 13 bp, Artificial Sequence
  Oligonucleotide for detection of SNP TSC0059686
ttatttctttctc

SEQ ID NO: 244469 - DNA, 13 bp, Artificial Sequence
  Oligonucleotide for detection of SNP TSC0059687
gaaagaaagagag

SEQ ID NO: 244470 - DNA, 13 bp, Artificial Sequence
  Oligonucleotide for detection of SNP TSC0059687
ctctctttctttc

SEQ ID NO: 244471 - DNA, 13 bp, Artificial Sequence
  Oligonucleotide for detection of SNP TSC0059687
gaaagagagagag

SEQ ID NO: 244472 - DNA, 13 bp, Artificial Sequence
  Oligonucleotide for detection of SNP TSC0059687
ctctctctctttc

SEQ ID NO: 244473 - DNA, 13 bp, Artificial Sequence
  Oligonucleotide for detection of SNP TSC0059688
aataaatgtaggt

SEQ ID NO: 244474 - DNA, 13 bp, Artificial Sequence
  Oligonucleotide for detection of SNP TSC0059688
acctacatttatt

SEQ ID NO: 244475 - DNA, 13 bp, Artificial Sequence
  Oligonucleotide for detection of SNP TSC0059688
aataaaggtaggt

SEQ ID NO: 244476 - DNA, 13 bp, Artificial Sequence
  Oligonucleotide for detection of SNP TSC0059688
acctacctttatt

SEQ ID NO: 244477 - DNA, 13 bp, Artificial Sequence
  Oligonucleotide for detection of SNP TSC0059689
aagaaaagaaaga

SEQ ID NO: 244478 - DNA, 13 bp, Artificial Sequence
  Oligonucleotide for detection of SNP TSC0059689
tctttcttttctt

SEQ ID NO: 244479 - DNA, 13 bp, Artificial Sequence
  Oligonucleotide for detection of SNP TSC0059689
aagaaaggaaaga

SEQ ID NO: 244480 - DNA, 13 bp, Artificial Sequence
  Oligonucleotide for detection of SNP TSC0059689
tctttcctttctt

SEQ ID NO: 244481 - DNA, 13 bp, Artificial Sequence
  Oligonucleotide for detection of SNP TSC0059693
agatttattatay

SEQ ID NO: 244482 - DNA, 13 bp, Artificial Sequence
  Oligonucleotide for detection of SNP TSC0059693
rtataataaatct

SEQ ID NO: 244483 - DNA, 13 bp, Artificial Sequence
  Oligonucleotide for detection of SNP TSC0059693
agatttgttatay

SEQ ID NO: 244484 - DNA, 13 bp, Artificial Sequence
  Oligonucleotide for detection of SNP TSC0059693
rtataacaaatct

SEQ ID NO: 244485 - DNA, 13 bp, Artificial Sequence
  Oligonucleotide for detection of SNP TSC0059693
agattcgttatay

SEQ ID NO: 244486 - DNA, 13 bp, Artificial Sequence
  Oligonucleotide for detection of SNP TSC0059693
rtataacgaatct

SEQ ID NO: 244487 - DNA, 13 bp, Artificial Sequence
  Oligonucleotide for detection of SNP TSC0059693
gtgtaatgggttt

SEQ ID NO: 244488 - DNA, 13 bp, Artificial Sequence
  Oligonucleotide for detection of SNP TSC0059693
aaacccattacac

SEQ ID NO: 244489 - DNA, 13 bp, Artificial Sequence
  Oligonucleotide for detection of SNP TSC0059693
gtgtaacgggttt

SEQ ID NO: 244490 - DNA, 13 bp, Artificial Sequence
  Oligonucleotide for detection of SNP TSC0059693
aaacccgttacac

SEQ ID NO: 244491 - DNA, 13 bp, Artificial Sequence
  Oligonucleotide for detection of SNP TSC0059694
tggtttgtagtgt

SEQ ID NO: 244492 - DNA, 13 bp, Artificial Sequence
  Oligonucleotide for detection of SNP TSC0059694
acactacaaacca

SEQ ID NO: 244493 - DNA, 13 bp, Artificial Sequence
  Oligonucleotide for detection of SNP TSC0059694
tggtttatagtgt

SEQ ID NO: 244494 - DNA, 13 bp, Artificial Sequence
  Oligonucleotide for detection of SNP TSC0059694
acactataaacca

SEQ ID NO: 244495 - DNA, 13 bp, Artificial Sequence
  Oligonucleotide for detection of SNP TSC0059695
tgttaattaattg

SEQ ID NO: 244496 - DNA, 13 bp, Artificial Sequence
  Oligonucleotide for detection of SNP TSC0059695
caattaattaaca

SEQ ID NO: 244497 - DNA, 13 bp, Artificial Sequence
  Oligonucleotide for detection of SNP TSC0059695
tgttaagtaattg

SEQ ID NO: 244498 - DNA, 13 bp, Artificial Sequence
  Oligonucleotide for detection of SNP TSC0059695
caattacttaaca

SEQ ID NO: 244499 - DNA, 13 bp, Artificial Sequence
  Oligonucleotide for detection of SNP TSC0059695
tagttaattaata

SEQ ID NO: 244500 - DNA, 13 bp, Artificial Sequence
  Oligonucleotide for detection of SNP TSC0059695
tattaattaacta

SEQ ID NO: 244501 - DNA, 13 bp, Artificial Sequence
  Oligonucleotide for detection of SNP TSC0059695
tagttatttaata

SEQ ID NO: 244502 - DNA, 13 bp, Artificial Sequence
  Oligonucleotide for detection of SNP TSC0059695
tattaaataacta

SEQ ID NO: 244503 - DNA, 13 bp, Artificial Sequence
  Oligonucleotide for detection of SNP TSC0059696
gttttattagtga

SEQ ID NO: 244504 - DNA, 13 bp, Artificial Sequence
  Oligonucleotide for detection of SNP TSC0059696
tcactaataaaac

SEQ ID NO: 244505 - DNA, 13 bp, Artificial Sequence
  Oligonucleotide for detection of SNP TSC0059696
gttttagtagtga

SEQ ID NO: 244506 - DNA, 13 bp, Artificial Sequence
  Oligonucleotide for detection of SNP TSC0059696
tcactactaaaac

SEQ ID NO: 244507 - DNA, 13 bp, Artificial Sequence
  Oligonucleotide for detection of SNP TSC0059696
ttattaatggggy

SEQ ID NO: 244508 - DNA, 13 bp, Artificial Sequence
  Oligonucleotide for detection of SNP TSC0059696
rccccattaataa

SEQ ID NO: 244509 - DNA, 13 bp, Artificial Sequence
  Oligonucleotide for detection of SNP TSC0059696
ttattattggggy

SEQ ID NO: 244510 - DNA, 13 bp, Artificial Sequence
  Oligonucleotide for detection of SNP TSC0059696
rccccaataataa

SEQ ID NO: 244511 - DNA, 13 bp, Artificial Sequence
  Oligonucleotide for detection of SNP TSC0059697
tgtttagggaaga

SEQ ID NO: 244512 - DNA, 13 bp, Artificial Sequence
  Oligonucleotide for detection of SNP TSC0059697
tcttccctaaaca

SEQ ID NO: 244513 - DNA, 13 bp, Artificial Sequence
  Oligonucleotide for detection of SNP TSC0059697
tgtttaaggaaga

SEQ ID NO: 244514 - DNA, 13 bp, Artificial Sequence
  Oligonucleotide for detection of SNP TSC0059697
tcttccttaaaca

SEQ ID NO: 244515 - DNA, 13 bp, Artificial Sequence
  Oligonucleotide for detection of SNP TSC0059698
ttattgatttggy

SEQ ID NO: 244516 - DNA, 13 bp, Artificial Sequence
  Oligonucleotide for detection of SNP TSC0059698
rccaaatcaataa

SEQ ID NO: 244517 - DNA, 13 bp, Artificial Sequence
  Oligonucleotide for detection of SNP TSC0059698
ttattgttttggy

SEQ ID NO: 244518 - DNA, 13 bp, Artificial Sequence
  Oligonucleotide for detection of SNP TSC0059698
rccaaaacaataa

SEQ ID NO: 244519 - DNA, 13 bp, Artificial Sequence
  Oligonucleotide for detection of SNP TSC0059698
gttaggttagtag

SEQ ID NO: 244520 - DNA, 13 bp, Artificial Sequence
  Oligonucleotide for detection of SNP TSC0059698
ctactaacctaac

SEQ ID NO: 244521 - DNA, 13 bp, Artificial Sequence
  Oligonucleotide for detection of SNP TSC0059698
gttagggtagtag

SEQ ID NO: 244522 - DNA, 13 bp, Artificial Sequence
  Oligonucleotide for detection of SNP TSC0059698
ctactaccctaac

SEQ ID NO: 244523 - DNA, 13 bp, Artificial Sequence
  Oligonucleotide for detection of SNP TSC0059700
tagagaagtgaag

SEQ ID NO: 244524 - DNA, 13 bp, Artificial Sequence
  Oligonucleotide for detection of SNP TSC0059700
cttcacttctcta

SEQ ID NO: 244525 - DNA, 13 bp, Artificial Sequence
  Oligonucleotide for detection of SNP TSC0059700
tagagaggtgaag

SEQ ID NO: 244526 - DNA, 13 bp, Artificial Sequence
  Oligonucleotide for detection of SNP TSC0059700
cttcacctctcta

SEQ ID NO: 244527 - DNA, 13 bp, Artificial Sequence
  Oligonucleotide for detection of SNP TSC0059701
aatatttaaagtg

SEQ ID NO: 244528 - DNA, 13 bp, Artificial Sequence
  Oligonucleotide for detection of SNP TSC0059701
cactttaaatatt

SEQ ID NO: 244529 - DNA, 13 bp, Artificial Sequence
  Oligonucleotide for detection of SNP TSC0059701
aatattgaaagtg

SEQ ID NO: 244530 - DNA, 13 bp, Artificial Sequence
  Oligonucleotide for detection of SNP TSC0059701
cactttcaatatt

SEQ ID NO: 244531 - DNA, 13 bp, Artificial Sequence
  Oligonucleotide for detection of SNP TSC0059701
tatttttaatatt

SEQ ID NO: 244532 - DNA, 13 bp, Artificial Sequence
  Oligonucleotide for detection of SNP TSC0059701
aatattaaaaata

SEQ ID NO: 244533 - DNA, 13 bp, Artificial Sequence
  Oligonucleotide for detection of SNP TSC0059702
tgtaagagtttta

SEQ ID NO: 244534 - DNA, 13 bp, Artificial Sequence
  Oligonucleotide for detection of SNP TSC0059702
taaaactcttaca

SEQ ID NO: 244535 - DNA, 13 bp, Artificial Sequence
  Oligonucleotide for detection of SNP TSC0059702
cgtaagggtttta

SEQ ID NO: 244536 - DNA, 13 bp, Artificial Sequence
  Oligonucleotide for detection of SNP TSC0059702
taaaacccttacg

SEQ ID NO: 244537 - DNA, 13 bp, Artificial Sequence
  Oligonucleotide for detection of SNP TSC0059702
cgtaagagtttta

SEQ ID NO: 244538 - DNA, 13 bp, Artificial Sequence
  Oligonucleotide for detection of SNP TSC0059702
taaaactcttacg

SEQ ID NO: 244539 - DNA, 13 bp, Artificial Sequence
  Oligonucleotide for detection of SNP TSC0059704
ttattatagagtt

SEQ ID NO: 244540 - DNA, 13 bp, Artificial Sequence
  Oligonucleotide for detection of SNP TSC0059704
aactctataataa

SEQ ID NO: 244541 - DNA, 13 bp, Artificial Sequence
  Oligonucleotide for detection of SNP TSC0059704
ttattagagagtt

SEQ ID NO: 244542 - DNA, 13 bp, Artificial Sequence
  Oligonucleotide for detection of SNP TSC0059704
aactctctaataa

SEQ ID NO: 244543 - DNA, 13 bp, Artificial Sequence
  Oligonucleotide for detection of SNP TSC0059704
agttttatgatga

SEQ ID NO: 244544 - DNA, 13 bp, Artificial Sequence
  Oligonucleotide for detection of SNP TSC0059704
tcatcataaaact

SEQ ID NO: 244545 - DNA, 13 bp, Artificial Sequence
  Oligonucleotide for detection of SNP TSC0059704
agttttttgatga

SEQ ID NO: 244546 - DNA, 13 bp, Artificial Sequence
  Oligonucleotide for detection of SNP TSC0059704
tcatcaaaaaact

SEQ ID NO: 244547 - DNA, 13 bp, Artificial Sequence
  Oligonucleotide for detection of SNP TSC0059705
attttattaagta

SEQ ID NO: 244548 - DNA, 13 bp, Artificial Sequence
  Oligonucleotide for detection of SNP TSC0059705
tacttaataaaat

SEQ ID NO: 244549 - DNA, 13 bp, Artificial Sequence
  Oligonucleotide for detection of SNP TSC0059705
tgtttgttaagat

SEQ ID NO: 244550 - DNA, 13 bp, Artificial Sequence
  Oligonucleotide for detection of SNP TSC0059705
atcttaacaaaca

SEQ ID NO: 244551 - DNA, 13 bp, Artificial Sequence
  Oligonucleotide for detection of SNP TSC0059705
tgtttgataagat

SEQ ID NO: 244552 - DNA, 13 bp, Artificial Sequence
  Oligonucleotide for detection of SNP TSC0059705
atcttatcaaaca

SEQ ID NO: 244553 - DNA, 13 bp, Artificial Sequence
  Oligonucleotide for detection of SNP TSC0059706
aaatatgtattgt

SEQ ID NO: 244554 - DNA, 13 bp, Artificial Sequence
  Oligonucleotide for detection of SNP TSC0059706
acaatacatattt

SEQ ID NO: 244555 - DNA, 13 bp, Artificial Sequence
  Oligonucleotide for detection of SNP TSC0059706
aaatatatattgt

SEQ ID NO: 244556 - DNA, 13 bp, Artificial Sequence
  Oligonucleotide for detection of SNP TSC0059706
acaatatatattt

SEQ ID NO: 244557 - DNA, 13 bp, Artificial Sequence
  Oligonucleotide for detection of SNP TSC0059707
aaggatataggtt

SEQ ID NO: 244558 - DNA, 13 bp, Artificial Sequence
  Oligonucleotide for detection of SNP TSC0059707
aacctatatcctt

SEQ ID NO: 244559 - DNA, 13 bp, Artificial Sequence
  Oligonucleotide for detection of SNP TSC0059707
aaggatttaggtt

SEQ ID NO: 244560 - DNA, 13 bp, Artificial Sequence
  Oligonucleotide for detection of SNP TSC0059707
aacctaaatcctt

SEQ ID NO: 244561 - DNA, 13 bp, Artificial Sequence
  Oligonucleotide for detection of SNP TSC0059708
tagtgtagtaatt

SEQ ID NO: 244562 - DNA, 13 bp, Artificial Sequence
  Oligonucleotide for detection of SNP TSC0059708
aattactacacta

SEQ ID NO: 244563 - DNA, 13 bp, Artificial Sequence
  Oligonucleotide for detection of SNP TSC0059708
tagtgtggtaatt

SEQ ID NO: 244564 - DNA, 13 bp, Artificial Sequence
  Oligonucleotide for detection of SNP TSC0059708
aattaccacacta

SEQ ID NO: 244565 - DNA, 13 bp, Artificial Sequence
  Oligonucleotide for detection of SNP TSC0059713
tgagaaatatagt

SEQ ID NO: 244566 - DNA, 13 bp, Artificial Sequence
  Oligonucleotide for detection of SNP TSC0059713
actatatttctca

SEQ ID NO: 244567 - DNA, 13 bp, Artificial Sequence
  Oligonucleotide for detection of SNP TSC0059713
tgagaattatagt

SEQ ID NO: 244568 - DNA, 13 bp, Artificial Sequence
  Oligonucleotide for detection of SNP TSC0059713
actataattctca

SEQ ID NO: 244569 - DNA, 13 bp, Artificial Sequence
  Oligonucleotide for detection of SNP TSC0059714
tataggtgtaagy

SEQ ID NO: 244570 - DNA, 13 bp, Artificial Sequence
  Oligonucleotide for detection of SNP TSC0059714
rcttacacctata

SEQ ID NO: 244571 - DNA, 13 bp, Artificial Sequence
  Oligonucleotide for detection of SNP TSC0059714
tataggcgtaagy

SEQ ID NO: 244572 - DNA, 13 bp, Artificial Sequence
  Oligonucleotide for detection of SNP TSC0059714
rcttacgcctata

SEQ ID NO: 244573 - DNA, 13 bp, Artificial Sequence
  Oligonucleotide for detection of SNP TSC0059719
attttagtttaga

SEQ ID NO: 244574 - DNA, 13 bp, Artificial Sequence
  Oligonucleotide for detection of SNP TSC0059719
tctaaactaaaat

SEQ ID NO: 244575 - DNA, 13 bp, Artificial Sequence
  Oligonucleotide for detection of SNP TSC0059719
attttaatttaga

SEQ ID NO: 244576 - DNA, 13 bp, Artificial Sequence
  Oligonucleotide for detection of SNP TSC0059719
tctaaattaaaat

SEQ ID NO: 244577 - DNA, 13 bp, Artificial Sequence
  Oligonucleotide for detection of SNP TSC0059720
ggggtgattatgg

SEQ ID NO: 244578 - DNA, 13 bp, Artificial Sequence
  Oligonucleotide for detection of SNP TSC0059720
ccataatcacccc

SEQ ID NO: 244579 - DNA, 13 bp, Artificial Sequence
  Oligonucleotide for detection of SNP TSC0059720
ggggtggttatgg

SEQ ID NO: 244580 - DNA, 13 bp, Artificial Sequence
  Oligonucleotide for detection of SNP TSC0059720
ccataaccacccc

SEQ ID NO: 244581 - DNA, 13 bp, Artificial Sequence
  Oligonucleotide for detection of SNP TSC0059722
gattttaaattaa

SEQ ID NO: 244582 - DNA, 13 bp, Artificial Sequence
  Oligonucleotide for detection of SNP TSC0059722
ttaatttaaaatc

SEQ ID NO: 244583 - DNA, 13 bp, Artificial Sequence
  Oligonucleotide for detection of SNP TSC0059722
gattttgaattaa

SEQ ID NO: 244584 - DNA, 13 bp, Artificial Sequence
  Oligonucleotide for detection of SNP TSC0059722
ttaattcaaaatc

SEQ ID NO: 244585 - DNA, 13 bp, Artificial Sequence
  Oligonucleotide for detection of SNP TSC0059722
gatttcgaattaa

SEQ ID NO: 244586 - DNA, 13 bp, Artificial Sequence
  Oligonucleotide for detection of SNP TSC0059722
ttaattcgaaatc

SEQ ID NO: 244587 - DNA, 13 bp, Artificial Sequence
  Oligonucleotide for detection of SNP TSC0059723
tgggggataaatt

SEQ ID NO: 244588 - DNA, 13 bp, Artificial Sequence
  Oligonucleotide for detection of SNP TSC0059723
aatttatccccca

SEQ ID NO: 244589 - DNA, 13 bp, Artificial Sequence
  Oligonucleotide for detection of SNP TSC0059723
tgggggttaaatt

SEQ ID NO: 244590 - DNA, 13 bp, Artificial Sequence
  Oligonucleotide for detection of SNP TSC0059723
aatttaaccccca

SEQ ID NO: 244591 - DNA, 13 bp, Artificial Sequence
  Oligonucleotide for detection of SNP TSC0059723
cgggggataaatt

SEQ ID NO: 244592 - DNA, 13 bp, Artificial Sequence
  Oligonucleotide for detection of SNP TSC0059723
aatttatcccccg

SEQ ID NO: 244593 - DNA, 13 bp, Artificial Sequence
  Oligonucleotide for detection of SNP TSC0059723
cgggggttaaatt

SEQ ID NO: 244594 - DNA, 13 bp, Artificial Sequence
  Oligonucleotide for detection of SNP TSC0059723
aatttaacccccg

SEQ ID NO: 244595 - DNA, 13 bp, Artificial Sequence
  Oligonucleotide for detection of SNP TSC0059723
agtttgttttttg

SEQ ID NO: 244596 - DNA, 13 bp, Artificial Sequence
  Oligonucleotide for detection of SNP TSC0059723
caaaaaacaaact

SEQ ID NO: 244597 - DNA, 13 bp, Artificial Sequence
  Oligonucleotide for detection of SNP TSC0059723
agtttgatttttg

SEQ ID NO: 244598 - DNA, 13 bp, Artificial Sequence
  Oligonucleotide for detection of SNP TSC0059723
caaaaatcaaact

SEQ ID NO: 244599 - DNA, 13 bp, Artificial Sequence
  Oligonucleotide for detection of SNP TSC0059723
agtttgtttttcg

SEQ ID NO: 244600 - DNA, 13 bp, Artificial Sequence
  Oligonucleotide for detection of SNP TSC0059723
cgaaaaacaaact

SEQ ID NO: 244601 - DNA, 13 bp, Artificial Sequence
  Oligonucleotide for detection of SNP TSC0059723
agtttgattttcg

SEQ ID NO: 244602 - DNA, 13 bp, Artificial Sequence
  Oligonucleotide for detection of SNP TSC0059723
cgaaaatcaaact

SEQ ID NO: 244603 - DNA, 13 bp, Artificial Sequence
  Oligonucleotide for detection of SNP TSC0059724
gaagttagattat

SEQ ID NO: 244604 - DNA, 13 bp, Artificial Sequence
  Oligonucleotide for detection of SNP TSC0059724
ataatctaacttc

SEQ ID NO: 244605 - DNA, 13 bp, Artificial Sequence
  Oligonucleotide for detection of SNP TSC0059724
gaagtttgattat

SEQ ID NO: 244606 - DNA, 13 bp, Artificial Sequence
  Oligonucleotide for detection of SNP TSC0059724
ataatcaaacttc

SEQ ID NO: 244607 - DNA, 13 bp, Artificial Sequence
  Oligonucleotide for detection of SNP TSC0059724
atgatttggttty

SEQ ID NO: 244608 - DNA, 13 bp, Artificial Sequence
  Oligonucleotide for detection of SNP TSC0059724
raaaccaaatcat

SEQ ID NO: 244609 - DNA, 13 bp, Artificial Sequence
  Oligonucleotide for detection of SNP TSC0059724
atgattaggttty

SEQ ID NO: 244610 - DNA, 13 bp, Artificial Sequence
  Oligonucleotide for detection of SNP TSC0059724
raaacctaatcat

SEQ ID NO: 244611 - DNA, 13 bp, Artificial Sequence
  Oligonucleotide for detection of SNP TSC0059726
tggtgttggggaa

SEQ ID NO: 244612 - DNA, 13 bp, Artificial Sequence
  Oligonucleotide for detection of SNP TSC0059726
ttccccaacacca

SEQ ID NO: 244613 - DNA, 13 bp, Artificial Sequence
  Oligonucleotide for detection of SNP TSC0059726
tggtgtgggggaa

SEQ ID NO: 244614 - DNA, 13 bp, Artificial Sequence
  Oligonucleotide for detection of SNP TSC0059726
ttcccccacacca

SEQ ID NO: 244615 - DNA, 13 bp, Artificial Sequence
  Oligonucleotide for detection of SNP TSC0059727
aagttgatatata

SEQ ID NO: 244616 - DNA, 13 bp, Artificial Sequence
  Oligonucleotide for detection of SNP TSC0059727
tatatatcaactt

SEQ ID NO: 244617 - DNA, 13 bp, Artificial Sequence
  Oligonucleotide for detection of SNP TSC0059727
aagttgttatata

SEQ ID NO: 244618 - DNA, 13 bp, Artificial Sequence
  Oligonucleotide for detection of SNP TSC0059727
tatataacaactt

SEQ ID NO: 244619 - DNA, 13 bp, Artificial Sequence
  Oligonucleotide for detection of SNP TSC0059727
tatgtattagttt

SEQ ID NO: 244620 - DNA, 13 bp, Artificial Sequence
  Oligonucleotide for detection of SNP TSC0059727
aaactaatacata

SEQ ID NO: 244621 - DNA, 13 bp, Artificial Sequence
  Oligonucleotide for detection of SNP TSC0059727
tatgtaatagttt

SEQ ID NO: 244622 - DNA, 13 bp, Artificial Sequence
  Oligonucleotide for detection of SNP TSC0059727
aaactattacata

SEQ ID NO: 244623 - DNA, 13 bp, Artificial Sequence
  Oligonucleotide for detection of SNP TSC0059728
tgatatatataat

SEQ ID NO: 244624 - DNA, 13 bp, Artificial Sequence
  Oligonucleotide for detection of SNP TSC0059728
attatatatatca

SEQ ID NO: 244625 - DNA, 13 bp, Artificial Sequence
  Oligonucleotide for detection of SNP TSC0059728
tgatatgtataat

SEQ ID NO: 244626 - DNA, 13 bp, Artificial Sequence
  Oligonucleotide for detection of SNP TSC0059728
attatacatatca

SEQ ID NO: 244627 - DNA, 13 bp, Artificial Sequence
  Oligonucleotide for detection of SNP TSC0059728
tgatacgtataat

SEQ ID NO: 244628 - DNA, 13 bp, Artificial Sequence
  Oligonucleotide for detection of SNP TSC0059728
attatacgtatca

SEQ ID NO: 244629 - DNA, 13 bp, Artificial Sequence
  Oligonucleotide for detection of SNP TSC0059728
attatgtgtgtta

SEQ ID NO: 244630 - DNA, 13 bp, Artificial Sequence
  Oligonucleotide for detection of SNP TSC0059728
taacacacataat

SEQ ID NO: 244631 - DNA, 13 bp, Artificial Sequence
  Oligonucleotide for detection of SNP TSC0059728
attatgcgtgtta

SEQ ID NO: 244632 - DNA, 13 bp, Artificial Sequence
  Oligonucleotide for detection of SNP TSC0059728
taacacgcataat

SEQ ID NO: 244633 - DNA, 13 bp, Artificial Sequence
  Oligonucleotide for detection of SNP TSC0059729
tattatatattty

SEQ ID NO: 244634 - DNA, 13 bp, Artificial Sequence
  Oligonucleotide for detection of SNP TSC0059729
raaatatataata

SEQ ID NO: 244635 - DNA, 13 bp, Artificial Sequence
  Oligonucleotide for detection of SNP TSC0059729
tattatttattty

SEQ ID NO: 244636 - DNA, 13 bp, Artificial Sequence
  Oligonucleotide for detection of SNP TSC0059729
raaataaataata

SEQ ID NO: 244637 - DNA, 13 bp, Artificial Sequence
  Oligonucleotide for detection of SNP TSC0059729
gaaatagataata

SEQ ID NO: 244638 - DNA, 13 bp, Artificial Sequence
  Oligonucleotide for detection of SNP TSC0059729
tattatctatttc

SEQ ID NO: 244639 - DNA, 13 bp, Artificial Sequence
  Oligonucleotide for detection of SNP TSC0059730
tatttaattttgg

SEQ ID NO: 244640 - DNA, 13 bp, Artificial Sequence
  Oligonucleotide for detection of SNP TSC0059730
ccaaaattaaata

SEQ ID NO: 244641 - DNA, 13 bp, Artificial Sequence
  Oligonucleotide for detection of SNP TSC0059730
ttaagattgagta

SEQ ID NO: 244642 - DNA, 13 bp, Artificial Sequence
  Oligonucleotide for detection of SNP TSC0059730
tactcaatcttaa

SEQ ID NO: 244643 - DNA, 13 bp, Artificial Sequence
  Oligonucleotide for detection of SNP TSC0059730
ttaagaatgagta

SEQ ID NO: 244644 - DNA, 13 bp, Artificial Sequence
  Oligonucleotide for detection of SNP TSC0059730
tactcattcttaa

SEQ ID NO: 244645 - DNA, 13 bp, Artificial Sequence
  Oligonucleotide for detection of SNP TSC0059731
aaaataaataaag

SEQ ID NO: 244646 - DNA, 13 bp, Artificial Sequence
  Oligonucleotide for detection of SNP TSC0059731
ctttatttatttt

SEQ ID NO: 244647 - DNA, 13 bp, Artificial Sequence
  Oligonucleotide for detection of SNP TSC0059731
aaaatatataaag

SEQ ID NO: 244648 - DNA, 13 bp, Artificial Sequence
  Oligonucleotide for detection of SNP TSC0059731
ctttatatatttt

SEQ ID NO: 244649 - DNA, 13 bp, Artificial Sequence
  Oligonucleotide for detection of SNP TSC0059732
gtgattgaagtgg

SEQ ID NO: 244650 - DNA, 13 bp, Artificial Sequence
  Oligonucleotide for detection of SNP TSC0059732
ccacttcaatcac

SEQ ID NO: 244651 - DNA, 13 bp, Artificial Sequence
  Oligonucleotide for detection of SNP TSC0059732
gtgattaaagtgg

SEQ ID NO: 244652 - DNA, 13 bp, Artificial Sequence
  Oligonucleotide for detection of SNP TSC0059732
ccactttaatcac

SEQ ID NO: 244653 - DNA, 13 bp, Artificial Sequence
  Oligonucleotide for detection of SNP TSC0059733
gggtgttgaagta

SEQ ID NO: 244654 - DNA, 13 bp, Artificial Sequence
  Oligonucleotide for detection of SNP TSC0059733
tacttcaacaccc

SEQ ID NO: 244655 - DNA, 13 bp, Artificial Sequence
  Oligonucleotide for detection of SNP TSC0059733
gggtgtcgaagta

SEQ ID NO: 244656 - DNA, 13 bp, Artificial Sequence
  Oligonucleotide for detection of SNP TSC0059733
tacttcgacaccc

SEQ ID NO: 244657 - DNA, 13 bp, Artificial Sequence
  Oligonucleotide for detection of SNP TSC0059733
tgttttgatatty

SEQ ID NO: 244658 - DNA, 13 bp, Artificial Sequence
  Oligonucleotide for detection of SNP TSC0059733
raatatcaaaaca

SEQ ID NO: 244659 - DNA, 13 bp, Artificial Sequence
  Oligonucleotide for detection of SNP TSC0059733
tgttttaatatty

SEQ ID NO: 244660 - DNA, 13 bp, Artificial Sequence
  Oligonucleotide for detection of SNP TSC0059733
raatattaaaaca

SEQ ID NO: 244661 - DNA, 13 bp, Artificial Sequence
  Oligonucleotide for detection of SNP TSC0059733
tgtttcgatatty

SEQ ID NO: 244662 - DNA, 13 bp, Artificial Sequence
  Oligonucleotide for detection of SNP TSC0059733
raatatcgaaaca

SEQ ID NO: 244663 - DNA, 13 bp, Artificial Sequence
  Oligonucleotide for detection of SNP TSC0059734
tagaattgttttt

SEQ ID NO: 244664 - DNA, 13 bp, Artificial Sequence
  Oligonucleotide for detection of SNP TSC0059734
aaaaacaattcta

SEQ ID NO: 244665 - DNA, 13 bp, Artificial Sequence
  Oligonucleotide for detection of SNP TSC0059734
tagaatcgttttt

SEQ ID NO: 244666 - DNA, 13 bp, Artificial Sequence
  Oligonucleotide for detection of SNP TSC0059734
aaaaacgattcta

SEQ ID NO: 244667 - DNA, 13 bp, Artificial Sequence
  Oligonucleotide for detection of SNP TSC0059734
agaggtggtttta

SEQ ID NO: 244668 - DNA, 13 bp, Artificial Sequence
  Oligonucleotide for detection of SNP TSC0059734
taaaaccacctct

SEQ ID NO: 244669 - DNA, 13 bp, Artificial Sequence
  Oligonucleotide for detection of SNP TSC0059734
agaggtagtttta

SEQ ID NO: 244670 - DNA, 13 bp, Artificial Sequence
  Oligonucleotide for detection of SNP TSC0059734
taaaactacctct

SEQ ID NO: 244671 - DNA, 13 bp, Artificial Sequence
  Oligonucleotide for detection of SNP TSC0059734
agaggcggtttta

SEQ ID NO: 244672 - DNA, 13 bp, Artificial Sequence
  Oligonucleotide for detection of SNP TSC0059734
taaaaccgcctct

SEQ ID NO: 244673 - DNA, 13 bp, Artificial Sequence
  Oligonucleotide for detection of SNP TSC0059735
tttataagtagtt

SEQ ID NO: 244674 - DNA, 13 bp, Artificial Sequence
  Oligonucleotide for detection of SNP TSC0059735
aactacttataaa

SEQ ID NO: 244675 - DNA, 13 bp, Artificial Sequence
  Oligonucleotide for detection of SNP TSC0059735
tttataggtagtt

SEQ ID NO: 244676 - DNA, 13 bp, Artificial Sequence
  Oligonucleotide for detection of SNP TSC0059735
aactacctataaa

SEQ ID NO: 244677 - DNA, 13 bp, Artificial Sequence
  Oligonucleotide for detection of SNP TSC0059737
taaatttttatat

SEQ ID NO: 244678 - DNA, 13 bp, Artificial Sequence
  Oligonucleotide for detection of SNP TSC0059737
atataaaaattta

SEQ ID NO: 244679 - DNA, 13 bp, Artificial Sequence
  Oligonucleotide for detection of SNP TSC0059737
taaattgttatat

SEQ ID NO: 244680 - DNA, 13 bp, Artificial Sequence
  Oligonucleotide for detection of SNP TSC0059737
atataacaattta

SEQ ID NO: 244681 - DNA, 13 bp, Artificial Sequence
  Oligonucleotide for detection of SNP TSC0059737
atatgaaaatttg

SEQ ID NO: 244682 - DNA, 13 bp, Artificial Sequence
  Oligonucleotide for detection of SNP TSC0059737
caaattttcatat

SEQ ID NO: 244683 - DNA, 13 bp, Artificial Sequence
  Oligonucleotide for detection of SNP TSC0059737
atatgataatttg

SEQ ID NO: 244684 - DNA, 13 bp, Artificial Sequence
  Oligonucleotide for detection of SNP TSC0059737
caaattatcatat

SEQ ID NO: 244685 - DNA, 13 bp, Artificial Sequence
  Oligonucleotide for detection of SNP TSC0059740
aaaattagtgaty

SEQ ID NO: 244686 - DNA, 13 bp, Artificial Sequence
  Oligonucleotide for detection of SNP TSC0059740
ratcactaatttt

SEQ ID NO: 244687 - DNA, 13 bp, Artificial Sequence
  Oligonucleotide for detection of SNP TSC0059740
aaaattggtgaty

SEQ ID NO: 244688 - DNA, 13 bp, Artificial Sequence
  Oligonucleotide for detection of SNP TSC0059740
ratcaccaatttt

SEQ ID NO: 244689 - DNA, 13 bp, Artificial Sequence
  Oligonucleotide for detection of SNP TSC0059741
tgtaaaaaatgaa

SEQ ID NO: 244690 - DNA, 13 bp, Artificial Sequence
  Oligonucleotide for detection of SNP TSC0059741
ttcattttttaca

SEQ ID NO: 244691 - DNA, 13 bp, Artificial Sequence
  Oligonucleotide for detection of SNP TSC0059741
tgtaaataatgaa

SEQ ID NO: 244692 - DNA, 13 bp, Artificial Sequence
  Oligonucleotide for detection of SNP TSC0059741
ttcattatttaca

SEQ ID NO: 244693 - DNA, 13 bp, Artificial Sequence
  Oligonucleotide for detection of SNP TSC0059742
ataatagatataa

SEQ ID NO: 244694 - DNA, 13 bp, Artificial Sequence
  Oligonucleotide for detection of SNP TSC0059742
ttatatctattat

SEQ ID NO: 244695 - DNA, 13 bp, Artificial Sequence
  Oligonucleotide for detection of SNP TSC0059742
ttatgtatattgt

SEQ ID NO: 244696 - DNA, 13 bp, Artificial Sequence
  Oligonucleotide for detection of SNP TSC0059742
acaatatacataa

SEQ ID NO: 244697 - DNA, 13 bp, Artificial Sequence
  Oligonucleotide for detection of SNP TSC0059742
ttatgtttattgt

SEQ ID NO: 244698 - DNA, 13 bp, Artificial Sequence
  Oligonucleotide for detection of SNP TSC0059742
acaataaacataa

SEQ ID NO: 244699 - DNA, 13 bp, Artificial Sequence
  Oligonucleotide for detection of SNP TSC0059743
gggttgtttttgg

SEQ ID NO: 244700 - DNA, 13 bp, Artificial Sequence
  Oligonucleotide for detection of SNP TSC0059743
ccaaaaacaaccc

SEQ ID NO: 244701 - DNA, 13 bp, Artificial Sequence
  Oligonucleotide for detection of SNP TSC0059743
gggttggttttgg

SEQ ID NO: 244702 - DNA, 13 bp, Artificial Sequence
  Oligonucleotide for detection of SNP TSC0059743
ccaaaaccaaccc

SEQ ID NO: 244703 - DNA, 13 bp, Artificial Sequence
  Oligonucleotide for detection of SNP TSC0059743
ttaggggtagtty

SEQ ID NO: 244704 - DNA, 13 bp, Artificial Sequence
  Oligonucleotide for detection of SNP TSC0059743
raactacccctaa

SEQ ID NO: 244705 - DNA, 13 bp, Artificial Sequence
  Oligonucleotide for detection of SNP TSC0059743
ttagggttagtty

SEQ ID NO: 244706 - DNA, 13 bp, Artificial Sequence
  Oligonucleotide for detection of SNP TSC0059743
raactaaccctaa

SEQ ID NO: 244707 - DNA, 13 bp, Artificial Sequence
  Oligonucleotide for detection of SNP TSC0059744
atagttaaaaaaa

SEQ ID NO: 244708 - DNA, 13 bp, Artificial Sequence
  Oligonucleotide for detection of SNP TSC0059744
tttttttaactat

SEQ ID NO: 244709 - DNA, 13 bp, Artificial Sequence
  Oligonucleotide for detection of SNP TSC0059744
atagtttaaaaaa

SEQ ID NO: 244710 - DNA, 13 bp, Artificial Sequence
  Oligonucleotide for detection of SNP TSC0059744
ttttttaaactat

SEQ ID NO: 244711 - DNA, 13 bp, Artificial Sequence
  Oligonucleotide for detection of SNP TSC0059745
gttttagtgaaaa

SEQ ID NO: 244712 - DNA, 13 bp, Artificial Sequence
  Oligonucleotide for detection of SNP TSC0059745
ttttcactaaaac

SEQ ID NO: 244713 - DNA, 13 bp, Artificial Sequence
  Oligonucleotide for detection of SNP TSC0059745
gttttaatgaaaa

SEQ ID NO: 244714 - DNA, 13 bp, Artificial Sequence
  Oligonucleotide for detection of SNP TSC0059745
ttttcattaaaac

SEQ ID NO: 244715 - DNA, 13 bp, Artificial Sequence
  Oligonucleotide for detection of SNP TSC0059746
aaaggggttagga

SEQ ID NO: 244716 - DNA, 13 bp, Artificial Sequence
  Oligonucleotide for detection of SNP TSC0059746
tcctaaccccttt

SEQ ID NO: 244717 - DNA, 13 bp, Artificial Sequence
  Oligonucleotide for detection of SNP TSC0059746
aaagggtttagga

SEQ ID NO: 244718 - DNA, 13 bp, Artificial Sequence
  Oligonucleotide for detection of SNP TSC0059746
tcctaaacccttt

SEQ ID NO: 244719 - DNA, 13 bp, Artificial Sequence
  Oligonucleotide for detection of SNP TSC0059747
ggtttaggaaggy

SEQ ID NO: 244720 - DNA, 13 bp, Artificial Sequence
  Oligonucleotide for detection of SNP TSC0059747
rccttcctaaacc

SEQ ID NO: 244721 - DNA, 13 bp, Artificial Sequence
  Oligonucleotide for detection of SNP TSC0059747
ggtttaagaaggy

SEQ ID NO: 244722 - DNA, 13 bp, Artificial Sequence
  Oligonucleotide for detection of SNP TSC0059747
rccttcttaaacc

SEQ ID NO: 244723 - DNA, 13 bp, Artificial Sequence
  Oligonucleotide for detection of SNP TSC0059748
ggtgttagttgta

SEQ ID NO: 244724 - DNA, 13 bp, Artificial Sequence
  Oligonucleotide for detection of SNP TSC0059748
tacaactaacacc

SEQ ID NO: 244725 - DNA, 13 bp, Artificial Sequence
  Oligonucleotide for detection of SNP TSC0059748
ggtgtttgttgta

SEQ ID NO: 244726 - DNA, 13 bp, Artificial Sequence
  Oligonucleotide for detection of SNP TSC0059748
tacaacaaacacc

SEQ ID NO: 244727 - DNA, 13 bp, Artificial Sequence
  Oligonucleotide for detection of SNP TSC0059748
ggtgttcgttgta

SEQ ID NO: 244728 - DNA, 13 bp, Artificial Sequence
  Oligonucleotide for detection of SNP TSC0059748
tacaacgaacacc

SEQ ID NO: 244729 - DNA, 13 bp, Artificial Sequence
  Oligonucleotide for detection of SNP TSC0059748
tatagttgataty

SEQ ID NO: 244730 - DNA, 13 bp, Artificial Sequence
  Oligonucleotide for detection of SNP TSC0059748
ratatcaactata

SEQ ID NO: 244731 - DNA, 13 bp, Artificial Sequence
  Oligonucleotide for detection of SNP TSC0059748
tatagtggataty

SEQ ID NO: 244732 - DNA, 13 bp, Artificial Sequence
  Oligonucleotide for detection of SNP TSC0059748
ratatccactata

SEQ ID NO: 244733 - DNA, 13 bp, Artificial Sequence
  Oligonucleotide for detection of SNP TSC0059748
tatagcggataty

SEQ ID NO: 244734 - DNA, 13 bp, Artificial Sequence
  Oligonucleotide for detection of SNP TSC0059748
ratatccgctata

SEQ ID NO: 244735 - DNA, 13 bp, Artificial Sequence
  Oligonucleotide for detection of SNP TSC0059750
atgtaaaagaaaa

SEQ ID NO: 244736 - DNA, 13 bp, Artificial Sequence
  Oligonucleotide for detection of SNP TSC0059750
ttttcttttacat

SEQ ID NO: 244737 - DNA, 13 bp, Artificial Sequence
  Oligonucleotide for detection of SNP TSC0059750
atgtaagagaaaa

SEQ ID NO: 244738 - DNA, 13 bp, Artificial Sequence
  Oligonucleotide for detection of SNP TSC0059750
ttttctcttacat

SEQ ID NO: 244739 - DNA, 13 bp, Artificial Sequence
  Oligonucleotide for detection of SNP TSC0059752
atatatttttttg

SEQ ID NO: 244740 - DNA, 13 bp, Artificial Sequence
  Oligonucleotide for detection of SNP TSC0059752
caaaaaaatatat

SEQ ID NO: 244741 - DNA, 13 bp, Artificial Sequence
  Oligonucleotide for detection of SNP TSC0059752
tagagatatgtgt

SEQ ID NO: 244742 - DNA, 13 bp, Artificial Sequence
  Oligonucleotide for detection of SNP TSC0059752
acacatatctcta

SEQ ID NO: 244743 - DNA, 13 bp, Artificial Sequence
  Oligonucleotide for detection of SNP TSC0059752
tagagaaatgtgt

SEQ ID NO: 244744 - DNA, 13 bp, Artificial Sequence
  Oligonucleotide for detection of SNP TSC0059752
acacatttctcta

SEQ ID NO: 244745 - DNA, 13 bp, Artificial Sequence
  Oligonucleotide for detection of SNP TSC0059753
aaaggaaaaaaga

SEQ ID NO: 244746 - DNA, 13 bp, Artificial Sequence
  Oligonucleotide for detection of SNP TSC0059753
tcttttttccttt

SEQ ID NO: 244747 - DNA, 13 bp, Artificial Sequence
  Oligonucleotide for detection of SNP TSC0059753
aaaggagaaaaga

SEQ ID NO: 244748 - DNA, 13 bp, Artificial Sequence
  Oligonucleotide for detection of SNP TSC0059753
tcttttctccttt

SEQ ID NO: 244749 - DNA, 13 bp, Artificial Sequence
  Oligonucleotide for detection of SNP TSC0059755
tatttgtggatta

SEQ ID NO: 244750 - DNA, 13 bp, Artificial Sequence
  Oligonucleotide for detection of SNP TSC0059755
taatccacaaata

SEQ ID NO: 244751 - DNA, 13 bp, Artificial Sequence
  Oligonucleotide for detection of SNP TSC0059755
tatttggggatta

SEQ ID NO: 244752 - DNA, 13 bp, Artificial Sequence
  Oligonucleotide for detection of SNP TSC0059755
taatccccaaata

SEQ ID NO: 244753 - DNA, 13 bp, Artificial Sequence
  Oligonucleotide for detection of SNP TSC0059755
taatttataggtg

SEQ ID NO: 244754 - DNA, 13 bp, Artificial Sequence
  Oligonucleotide for detection of SNP TSC0059755
cacctataaatta

SEQ ID NO: 244755 - DNA, 13 bp, Artificial Sequence
  Oligonucleotide for detection of SNP TSC0059755
taatttttaggtg

SEQ ID NO: 244756 - DNA, 13 bp, Artificial Sequence
  Oligonucleotide for detection of SNP TSC0059755
cacctaaaaatta

SEQ ID NO: 244757 - DNA, 13 bp, Artificial Sequence
  Oligonucleotide for detection of SNP TSC0059757
atttttgtggtaa

SEQ ID NO: 244758 - DNA, 13 bp, Artificial Sequence
  Oligonucleotide for detection of SNP TSC0059757
ttaccacaaaaat

SEQ ID NO: 244759 - DNA, 13 bp, Artificial Sequence
  Oligonucleotide for detection of SNP TSC0059757
atttttatggtaa

SEQ ID NO: 244760 - DNA, 13 bp, Artificial Sequence
  Oligonucleotide for detection of SNP TSC0059757
ttaccataaaaat

SEQ ID NO: 244761 - DNA, 13 bp, Artificial Sequence
  Oligonucleotide for detection of SNP TSC0059758
agtaggattattt

SEQ ID NO: 244762 - DNA, 13 bp, Artificial Sequence
  Oligonucleotide for detection of SNP TSC0059758
aaataatcctact

SEQ ID NO: 244763 - DNA, 13 bp, Artificial Sequence
  Oligonucleotide for detection of SNP TSC0059758
agtagggttattt

SEQ ID NO: 244764 - DNA, 13 bp, Artificial Sequence
  Oligonucleotide for detection of SNP TSC0059758
aaataaccctact

SEQ ID NO: 244765 - DNA, 13 bp, Artificial Sequence
  Oligonucleotide for detection of SNP TSC0059759
ggttaggtatgtt

SEQ ID NO: 244766 - DNA, 13 bp, Artificial Sequence
  Oligonucleotide for detection of SNP TSC0059759
aacatacctaacc

SEQ ID NO: 244767 - DNA, 13 bp, Artificial Sequence
  Oligonucleotide for detection of SNP TSC0059759
ggttagatatgtt

SEQ ID NO: 244768 - DNA, 13 bp, Artificial Sequence
  Oligonucleotide for detection of SNP TSC0059759
aacatatctaacc

SEQ ID NO: 244769 - DNA, 13 bp, Artificial Sequence
  Oligonucleotide for detection of SNP TSC0059760
tatttgagatgty

SEQ ID NO: 244770 - DNA, 13 bp, Artificial Sequence
  Oligonucleotide for detection of SNP TSC0059760
racatctcaaata

SEQ ID NO: 244771 - DNA, 13 bp, Artificial Sequence
  Oligonucleotide for detection of SNP TSC0059760
tatttgtgatgty

SEQ ID NO: 244772 - DNA, 13 bp, Artificial Sequence
  Oligonucleotide for detection of SNP TSC0059760
racatcacaaata

SEQ ID NO: 244773 - DNA, 13 bp, Artificial Sequence
  Oligonucleotide for detection of SNP TSC0059760
ggtattttagata

SEQ ID NO: 244774 - DNA, 13 bp, Artificial Sequence
  Oligonucleotide for detection of SNP TSC0059760
tatctaaaatacc

SEQ ID NO: 244775 - DNA, 13 bp, Artificial Sequence
  Oligonucleotide for detection of SNP TSC0059760
ggtattatagata

SEQ ID NO: 244776 - DNA, 13 bp, Artificial Sequence
  Oligonucleotide for detection of SNP TSC0059760
tatctataatacc

SEQ ID NO: 244777 - DNA, 13 bp, Artificial Sequence
  Oligonucleotide for detection of SNP TSC0059761
gtagattgttttg

SEQ ID NO: 244778 - DNA, 13 bp, Artificial Sequence
  Oligonucleotide for detection of SNP TSC0059761
caaaacaatctac

SEQ ID NO: 244779 - DNA, 13 bp, Artificial Sequence
  Oligonucleotide for detection of SNP TSC0059761
gtagatcgttttg

SEQ ID NO: 244780 - DNA, 13 bp, Artificial Sequence
  Oligonucleotide for detection of SNP TSC0059761
caaaacgatctac

SEQ ID NO: 244781 - DNA, 13 bp, Artificial Sequence
  Oligonucleotide for detection of SNP TSC0059761
taggatgatttgy

SEQ ID NO: 244782 - DNA, 13 bp, Artificial Sequence
  Oligonucleotide for detection of SNP TSC0059761
rcaaatcatccta

SEQ ID NO: 244783 - DNA, 13 bp, Artificial Sequence
  Oligonucleotide for detection of SNP TSC0059761
taggataatttgy

SEQ ID NO: 244784 - DNA, 13 bp, Artificial Sequence
  Oligonucleotide for detection of SNP TSC0059761
rcaaattatccta

SEQ ID NO: 244785 - DNA, 13 bp, Artificial Sequence
  Oligonucleotide for detection of SNP TSC0059761
taggacgatttgy

SEQ ID NO: 244786 - DNA, 13 bp, Artificial Sequence
  Oligonucleotide for detection of SNP TSC0059761
rcaaatcgtccta

SEQ ID NO: 244787 - DNA, 13 bp, Artificial Sequence
  Oligonucleotide for detection of SNP TSC0059762
gtgtgtatgttga

SEQ ID NO: 244788 - DNA, 13 bp, Artificial Sequence
  Oligonucleotide for detection of SNP TSC0059762
tcaacatacacac

SEQ ID NO: 244789 - DNA, 13 bp, Artificial Sequence
  Oligonucleotide for detection of SNP TSC0059762
gtgtgtgtgttga

SEQ ID NO: 244790 - DNA, 13 bp, Artificial Sequence
  Oligonucleotide for detection of SNP TSC0059762
tcaacacacacac

SEQ ID NO: 244791 - DNA, 13 bp, Artificial Sequence
  Oligonucleotide for detection of SNP TSC0059763
tgaatgagttgag

SEQ ID NO: 244792 - DNA, 13 bp, Artificial Sequence
  Oligonucleotide for detection of SNP TSC0059763
ctcaactcattca

SEQ ID NO: 244793 - DNA, 13 bp, Artificial Sequence
  Oligonucleotide for detection of SNP TSC0059763
tgaatgggttgag

SEQ ID NO: 244794 - DNA, 13 bp, Artificial Sequence
  Oligonucleotide for detection of SNP TSC0059763
ctcaacccattca

SEQ ID NO: 244795 - DNA, 13 bp, Artificial Sequence
  Oligonucleotide for detection of SNP TSC0059764
atattgggtttay

SEQ ID NO: 244796 - DNA, 13 bp, Artificial Sequence
  Oligonucleotide for detection of SNP TSC0059764
rtaaacccaatat

SEQ ID NO: 244797 - DNA, 13 bp, Artificial Sequence
  Oligonucleotide for detection of SNP TSC0059764
atattgagtttay

SEQ ID NO: 244798 - DNA, 13 bp, Artificial Sequence
  Oligonucleotide for detection of SNP TSC0059764
rtaaactcaatat

SEQ ID NO: 244799 - DNA, 13 bp, Artificial Sequence
  Oligonucleotide for detection of SNP TSC0059764
atatcgggtttay

SEQ ID NO: 244800 - DNA, 13 bp, Artificial Sequence
  Oligonucleotide for detection of SNP TSC0059764
rtaaacccgatat

SEQ ID NO: 244801 - DNA, 13 bp, Artificial Sequence
  Oligonucleotide for detection of SNP TSC0059764
atatcgagtttay

SEQ ID NO: 244802 - DNA, 13 bp, Artificial Sequence
  Oligonucleotide for detection of SNP TSC0059764
rtaaactcgatat

SEQ ID NO: 244803 - DNA, 13 bp, Artificial Sequence
  Oligonucleotide for detection of SNP TSC0059766
atatgtttttaag

SEQ ID NO: 244804 - DNA, 13 bp, Artificial Sequence
  Oligonucleotide for detection of SNP TSC0059766
cttaaaaacatat

SEQ ID NO: 244805 - DNA, 13 bp, Artificial Sequence
  Oligonucleotide for detection of SNP TSC0059766
atatgtgtttaag

SEQ ID NO: 244806 - DNA, 13 bp, Artificial Sequence
  Oligonucleotide for detection of SNP TSC0059766
cttaaacacatat

SEQ ID NO: 244807 - DNA, 13 bp, Artificial Sequence
  Oligonucleotide for detection of SNP TSC0059766
tttaagaatatat

SEQ ID NO: 244808 - DNA, 13 bp, Artificial Sequence
  Oligonucleotide for detection of SNP TSC0059766
atatattcttaaa

SEQ ID NO: 244809 - DNA, 13 bp, Artificial Sequence
  Oligonucleotide for detection of SNP TSC0059766
tttaagtatatat

SEQ ID NO: 244810 - DNA, 13 bp, Artificial Sequence
  Oligonucleotide for detection of SNP TSC0059766
atatatacttaaa

SEQ ID NO: 244811 - DNA, 13 bp, Artificial Sequence
  Oligonucleotide for detection of SNP TSC0059769
agtattatttaat

SEQ ID NO: 244812 - DNA, 13 bp, Artificial Sequence
  Oligonucleotide for detection of SNP TSC0059769
attaaataatact

SEQ ID NO: 244813 - DNA, 13 bp, Artificial Sequence
  Oligonucleotide for detection of SNP TSC0059769
agtattgtttaat

SEQ ID NO: 244814 - DNA, 13 bp, Artificial Sequence
  Oligonucleotide for detection of SNP TSC0059769
attaaacaatact

SEQ ID NO: 244815 - DNA, 13 bp, Artificial Sequence
  Oligonucleotide for detection of SNP TSC0059769
agtatcgtttaat

SEQ ID NO: 244816 - DNA, 13 bp, Artificial Sequence
  Oligonucleotide for detection of SNP TSC0059769
attaaacgatact

SEQ ID NO: 244817 - DNA, 13 bp, Artificial Sequence
  Oligonucleotide for detection of SNP TSC0059769
attaagtgatatt

SEQ ID NO: 244818 - DNA, 13 bp, Artificial Sequence
  Oligonucleotide for detection of SNP TSC0059769
aatatcacttaat

SEQ ID NO: 244819 - DNA, 13 bp, Artificial Sequence
  Oligonucleotide for detection of SNP TSC0059769
attaagcgatatt

SEQ ID NO: 244820 - DNA, 13 bp, Artificial Sequence
  Oligonucleotide for detection of SNP TSC0059769
aatatcgcttaat

SEQ ID NO: 244821 - DNA, 13 bp, Artificial Sequence
  Oligonucleotide for detection of SNP TSC0059770
taggtgatgtagg

SEQ ID NO: 244822 - DNA, 13 bp, Artificial Sequence
  Oligonucleotide for detection of SNP TSC0059770
cctacatcaccta

SEQ ID NO: 244823 - DNA, 13 bp, Artificial Sequence
  Oligonucleotide for detection of SNP TSC0059770
taggtgttgtagg

SEQ ID NO: 244824 - DNA, 13 bp, Artificial Sequence
  Oligonucleotide for detection of SNP TSC0059770
cctacaacaccta

SEQ ID NO: 244825 - DNA, 13 bp, Artificial Sequence
  Oligonucleotide for detection of SNP TSC0059770
tttgtattattta

SEQ ID NO: 244826 - DNA, 13 bp, Artificial Sequence
  Oligonucleotide for detection of SNP TSC0059770
taaataatacaaa

SEQ ID NO: 244827 - DNA, 13 bp, Artificial Sequence
  Oligonucleotide for detection of SNP TSC0059770
tttgtaatattta

SEQ ID NO: 244828 - DNA, 13 bp, Artificial Sequence
  Oligonucleotide for detection of SNP TSC0059770
taaatattacaaa

SEQ ID NO: 244829 - DNA, 13 bp, Artificial Sequence
  Oligonucleotide for detection of SNP TSC0059771
aattttgtaggat

SEQ ID NO: 244830 - DNA, 13 bp, Artificial Sequence
  Oligonucleotide for detection of SNP TSC0059771
atcctacaaaatt

SEQ ID NO: 244831 - DNA, 13 bp, Artificial Sequence
  Oligonucleotide for detection of SNP TSC0059771
aattttataggat

SEQ ID NO: 244832 - DNA, 13 bp, Artificial Sequence
  Oligonucleotide for detection of SNP TSC0059771
atcctataaaatt

SEQ ID NO: 244833 - DNA, 13 bp, Artificial Sequence
  Oligonucleotide for detection of SNP TSC0059772
agtatagtaagta

SEQ ID NO: 244834 - DNA, 13 bp, Artificial Sequence
  Oligonucleotide for detection of SNP TSC0059772
tacttactatact

SEQ ID NO: 244835 - DNA, 13 bp, Artificial Sequence
  Oligonucleotide for detection of SNP TSC0059772
agtataataagta

SEQ ID NO: 244836 - DNA, 13 bp, Artificial Sequence
  Oligonucleotide for detection of SNP TSC0059772
tacttattatact

SEQ ID NO: 244837 - DNA, 13 bp, Artificial Sequence
  Oligonucleotide for detection of SNP TSC0059773
tggtgtgttatgt

SEQ ID NO: 244838 - DNA, 13 bp, Artificial Sequence
  Oligonucleotide for detection of SNP TSC0059773
acataacacacca

SEQ ID NO: 244839 - DNA, 13 bp, Artificial Sequence
  Oligonucleotide for detection of SNP TSC0059773
tggtgtattatgt

SEQ ID NO: 244840 - DNA, 13 bp, Artificial Sequence
  Oligonucleotide for detection of SNP TSC0059773
acataatacacca

SEQ ID NO: 244841 - DNA, 13 bp, Artificial Sequence
  Oligonucleotide for detection of SNP TSC0059773
tggtgtgttacgt

SEQ ID NO: 244842 - DNA, 13 bp, Artificial Sequence
  Oligonucleotide for detection of SNP TSC0059773
acgtaacacacca

SEQ ID NO: 244843 - DNA, 13 bp, Artificial Sequence
  Oligonucleotide for detection of SNP TSC0059773
tggtgtattacgt

SEQ ID NO: 244844 - DNA, 13 bp, Artificial Sequence
  Oligonucleotide for detection of SNP TSC0059773
acgtaatacacca

SEQ ID NO: 244845 - DNA, 13 bp, Artificial Sequence
  Oligonucleotide for detection of SNP TSC0059774
tttttataattat

SEQ ID NO: 244846 - DNA, 13 bp, Artificial Sequence
  Oligonucleotide for detection of SNP TSC0059774
ataattataaaaa

SEQ ID NO: 244847 - DNA, 13 bp, Artificial Sequence
  Oligonucleotide for detection of SNP TSC0059774
atagttatggagg

SEQ ID NO: 244848 - DNA, 13 bp, Artificial Sequence
  Oligonucleotide for detection of SNP TSC0059774
cctccataactat

SEQ ID NO: 244849 - DNA, 13 bp, Artificial Sequence
  Oligonucleotide for detection of SNP TSC0059774
atagttttggagg

SEQ ID NO: 244850 - DNA, 13 bp, Artificial Sequence
  Oligonucleotide for detection of SNP TSC0059774
cctccaaaactat

SEQ ID NO: 244851 - DNA, 13 bp, Artificial Sequence
  Oligonucleotide for detection of SNP TSC0059781
aggggaaatatta

SEQ ID NO: 244852 - DNA, 13 bp, Artificial Sequence
  Oligonucleotide for detection of SNP TSC0059781
taatatttcccct

SEQ ID NO: 244853 - DNA, 13 bp, Artificial Sequence
  Oligonucleotide for detection of SNP TSC0059781
aggggagatatta

SEQ ID NO: 244854 - DNA, 13 bp, Artificial Sequence
  Oligonucleotide for detection of SNP TSC0059781
taatatctcccct

SEQ ID NO: 244855 - DNA, 13 bp, Artificial Sequence
  Oligonucleotide for detection of SNP TSC0059782
taggagatgaggg

SEQ ID NO: 244856 - DNA, 13 bp, Artificial Sequence
  Oligonucleotide for detection of SNP TSC0059782
ccctcatctccta

SEQ ID NO: 244857 - DNA, 13 bp, Artificial Sequence
  Oligonucleotide for detection of SNP TSC0059782
taggaggtgaggg

SEQ ID NO: 244858 - DNA, 13 bp, Artificial Sequence
  Oligonucleotide for detection of SNP TSC0059782
ccctcacctccta

SEQ ID NO: 244859 - DNA, 13 bp, Artificial Sequence
  Oligonucleotide for detection of SNP TSC0059784
agttgaatataaa

SEQ ID NO: 244860 - DNA, 13 bp, Artificial Sequence
  Oligonucleotide for detection of SNP TSC0059784
tttatattcaact

SEQ ID NO: 244861 - DNA, 13 bp, Artificial Sequence
  Oligonucleotide for detection of SNP TSC0059784
agttgagtataaa

SEQ ID NO: 244862 - DNA, 13 bp, Artificial Sequence
  Oligonucleotide for detection of SNP TSC0059784
tttatactcaact

SEQ ID NO: 244863 - DNA, 13 bp, Artificial Sequence
  Oligonucleotide for detection of SNP TSC0059785
aattttatgttgt

SEQ ID NO: 244864 - DNA, 13 bp, Artificial Sequence
  Oligonucleotide for detection of SNP TSC0059785
acaacataaaatt

SEQ ID NO: 244865 - DNA, 13 bp, Artificial Sequence
  Oligonucleotide for detection of SNP TSC0059785
aattttgtgttgt

SEQ ID NO: 244866 - DNA, 13 bp, Artificial Sequence
  Oligonucleotide for detection of SNP TSC0059785
acaacacaaaatt

SEQ ID NO: 244867 - DNA, 13 bp, Artificial Sequence
  Oligonucleotide for detection of SNP TSC0059785
aattttacgttgt

SEQ ID NO: 244868 - DNA, 13 bp, Artificial Sequence
  Oligonucleotide for detection of SNP TSC0059785
acaacgtaaaatt

SEQ ID NO: 244869 - DNA, 13 bp, Artificial Sequence
  Oligonucleotide for detection of SNP TSC0059785
aattttgcgttgt

SEQ ID NO: 244870 - DNA, 13 bp, Artificial Sequence
  Oligonucleotide for detection of SNP TSC0059785
acaacgcaaaatt

SEQ ID NO: 244871 - DNA, 13 bp, Artificial Sequence
  Oligonucleotide for detection of SNP TSC0059786
agattatgaatat

SEQ ID NO: 244872 - DNA, 13 bp, Artificial Sequence
  Oligonucleotide for detection of SNP TSC0059786
atattcataatct

SEQ ID NO: 244873 - DNA, 13 bp, Artificial Sequence
  Oligonucleotide for detection of SNP TSC0059786
agattacgaatat

SEQ ID NO: 244874 - DNA, 13 bp, Artificial Sequence
  Oligonucleotide for detection of SNP TSC0059786
atattcgtaatct

SEQ ID NO: 244875 - DNA, 13 bp, Artificial Sequence
  Oligonucleotide for detection of SNP TSC0059786
atgtttgtggttt

SEQ ID NO: 244876 - DNA, 13 bp, Artificial Sequence
  Oligonucleotide for detection of SNP TSC0059786
aaaccacaaacat

SEQ ID NO: 244877 - DNA, 13 bp, Artificial Sequence
  Oligonucleotide for detection of SNP TSC0059786
atgtttatggttt

SEQ ID NO: 244878 - DNA, 13 bp, Artificial Sequence
  Oligonucleotide for detection of SNP TSC0059786
aaaccataaacat

SEQ ID NO: 244879 - DNA, 13 bp, Artificial Sequence
  Oligonucleotide for detection of SNP TSC0059786
atgttcgtggttt

SEQ ID NO: 244880 - DNA, 13 bp, Artificial Sequence
  Oligonucleotide for detection of SNP TSC0059786
aaaccacgaacat

SEQ ID NO: 244881 - DNA, 13 bp, Artificial Sequence
  Oligonucleotide for detection of SNP TSC0059787
tgggttatgttat

SEQ ID NO: 244882 - DNA, 13 bp, Artificial Sequence
  Oligonucleotide for detection of SNP TSC0059787
ataacataaccca

SEQ ID NO: 244883 - DNA, 13 bp, Artificial Sequence
  Oligonucleotide for detection of SNP TSC0059787
tgggttttgttat

SEQ ID NO: 244884 - DNA, 13 bp, Artificial Sequence
  Oligonucleotide for detection of SNP TSC0059787
ataacaaaaccca

SEQ ID NO: 244885 - DNA, 13 bp, Artificial Sequence
  Oligonucleotide for detection of SNP TSC0059787
atagtataattta

SEQ ID NO: 244886 - DNA, 13 bp, Artificial Sequence
  Oligonucleotide for detection of SNP TSC0059787
taaattatactat

SEQ ID NO: 244887 - DNA, 13 bp, Artificial Sequence
  Oligonucleotide for detection of SNP TSC0059787
atagtaaaattta

SEQ ID NO: 244888 - DNA, 13 bp, Artificial Sequence
  Oligonucleotide for detection of SNP TSC0059787
taaattttactat

SEQ ID NO: 244889 - DNA, 13 bp, Artificial Sequence
  Oligonucleotide for detection of SNP TSC0059788
tagttatgtgagg

SEQ ID NO: 244890 - DNA, 13 bp, Artificial Sequence
  Oligonucleotide for detection of SNP TSC0059788
cctcacataacta

SEQ ID NO: 244891 - DNA, 13 bp, Artificial Sequence
  Oligonucleotide for detection of SNP TSC0059788
tagttaggtgagg

SEQ ID NO: 244892 - DNA, 13 bp, Artificial Sequence
  Oligonucleotide for detection of SNP TSC0059788
cctcacctaacta

SEQ ID NO: 244893 - DNA, 13 bp, Artificial Sequence
  Oligonucleotide for detection of SNP TSC0059789
agtgaggttttat

SEQ ID NO: 244894 - DNA, 13 bp, Artificial Sequence
  Oligonucleotide for detection of SNP TSC0059789
ataaaacctcact

SEQ ID NO: 244895 - DNA, 13 bp, Artificial Sequence
  Oligonucleotide for detection of SNP TSC0059789
agcgaggttttat

SEQ ID NO: 244896 - DNA, 13 bp, Artificial Sequence
  Oligonucleotide for detection of SNP TSC0059789
ataaaacctcgct

SEQ ID NO: 244897 - DNA, 13 bp, Artificial Sequence
  Oligonucleotide for detection of SNP TSC0059791
attttaagtttay

SEQ ID NO: 244898 - DNA, 13 bp, Artificial Sequence
  Oligonucleotide for detection of SNP TSC0059791
rtaaacttaaaat

SEQ ID NO: 244899 - DNA, 13 bp, Artificial Sequence
  Oligonucleotide for detection of SNP TSC0059791
attttaggtttay

SEQ ID NO: 244900 - DNA, 13 bp, Artificial Sequence
  Oligonucleotide for detection of SNP TSC0059791
rtaaacctaaaat

SEQ ID NO: 244901 - DNA, 13 bp, Artificial Sequence
  Oligonucleotide for detection of SNP TSC0059794
taattagtagaat

SEQ ID NO: 244902 - DNA, 13 bp, Artificial Sequence
  Oligonucleotide for detection of SNP TSC0059794
attctactaatta

SEQ ID NO: 244903 - DNA, 13 bp, Artificial Sequence
  Oligonucleotide for detection of SNP TSC0059794
taattaatagaat

SEQ ID NO: 244904 - DNA, 13 bp, Artificial Sequence
  Oligonucleotide for detection of SNP TSC0059794
attctattaatta

SEQ ID NO: 244905 - DNA, 13 bp, Artificial Sequence
  Oligonucleotide for detection of SNP TSC0059797
ataaaggaagtty

SEQ ID NO: 244906 - DNA, 13 bp, Artificial Sequence
  Oligonucleotide for detection of SNP TSC0059797
raacttcctttat

SEQ ID NO: 244907 - DNA, 13 bp, Artificial Sequence
  Oligonucleotide for detection of SNP TSC0059797
ataaagaaagtty

SEQ ID NO: 244908 - DNA, 13 bp, Artificial Sequence
  Oligonucleotide for detection of SNP TSC0059797
raactttctttat

SEQ ID NO: 244909 - DNA, 13 bp, Artificial Sequence
  Oligonucleotide for detection of SNP TSC0059798
tgtaattgttgta

SEQ ID NO: 244910 - DNA, 13 bp, Artificial Sequence
  Oligonucleotide for detection of SNP TSC0059798
tacaacaattaca

SEQ ID NO: 244911 - DNA, 13 bp, Artificial Sequence
  Oligonucleotide for detection of SNP TSC0059798
tgtaatcgttgta

SEQ ID NO: 244912 - DNA, 13 bp, Artificial Sequence
  Oligonucleotide for detection of SNP TSC0059798
tacaacgattaca

SEQ ID NO: 244913 - DNA, 13 bp, Artificial Sequence
  Oligonucleotide for detection of SNP TSC0059798
tatagtggttata

SEQ ID NO: 244914 - DNA, 13 bp, Artificial Sequence
  Oligonucleotide for detection of SNP TSC0059798
tataaccactata

SEQ ID NO: 244915 - DNA, 13 bp, Artificial Sequence
  Oligonucleotide for detection of SNP TSC0059798
tatagtagttata

SEQ ID NO: 244916 - DNA, 13 bp, Artificial Sequence
  Oligonucleotide for detection of SNP TSC0059798
tataactactata

SEQ ID NO: 244917 - DNA, 13 bp, Artificial Sequence
  Oligonucleotide for detection of SNP TSC0059798
tatagcggttata

SEQ ID NO: 244918 - DNA, 13 bp, Artificial Sequence
  Oligonucleotide for detection of SNP TSC0059798
tataaccgctata

SEQ ID NO: 244919 - DNA, 13 bp, Artificial Sequence
  Oligonucleotide for detection of SNP TSC0059799
ttgtatgtagtaa

SEQ ID NO: 244920 - DNA, 13 bp, Artificial Sequence
  Oligonucleotide for detection of SNP TSC0059799
ttactacatacaa

SEQ ID NO: 244921 - DNA, 13 bp, Artificial Sequence
  Oligonucleotide for detection of SNP TSC0059799
ttgtatatagtaa

SEQ ID NO: 244922 - DNA, 13 bp, Artificial Sequence
  Oligonucleotide for detection of SNP TSC0059799
ttactatatacaa

SEQ ID NO: 244923 - DNA, 13 bp, Artificial Sequence
  Oligonucleotide for detection of SNP TSC0059800
atatttatagtat

SEQ ID NO: 244924 - DNA, 13 bp, Artificial Sequence
  Oligonucleotide for detection of SNP TSC0059800
atactataaatat

SEQ ID NO: 244925 - DNA, 13 bp, Artificial Sequence
  Oligonucleotide for detection of SNP TSC0059800
atattagaaatat

SEQ ID NO: 244926 - DNA, 13 bp, Artificial Sequence
  Oligonucleotide for detection of SNP TSC0059800
atatttctaatat

SEQ ID NO: 244927 - DNA, 13 bp, Artificial Sequence
  Oligonucleotide for detection of SNP TSC0059803
tgggttatattgg

SEQ ID NO: 244928 - DNA, 13 bp, Artificial Sequence
  Oligonucleotide for detection of SNP TSC0059803
ccaatataaccca

SEQ ID NO: 244929 - DNA, 13 bp, Artificial Sequence
  Oligonucleotide for detection of SNP TSC0059803
tgggttgtattgg

SEQ ID NO: 244930 - DNA, 13 bp, Artificial Sequence
  Oligonucleotide for detection of SNP TSC0059803
ccaatacaaccca

SEQ ID NO: 244931 - DNA, 13 bp, Artificial Sequence
  Oligonucleotide for detection of SNP TSC0059803
tgggtcgtattgg

SEQ ID NO: 244932 - DNA, 13 bp, Artificial Sequence
  Oligonucleotide for detection of SNP TSC0059803
ccaatacgaccca

SEQ ID NO: 244933 - DNA, 13 bp, Artificial Sequence
  Oligonucleotide for detection of SNP TSC0059803
ttaatgtggttta

SEQ ID NO: 244934 - DNA, 13 bp, Artificial Sequence
  Oligonucleotide for detection of SNP TSC0059803
taaaccacattaa

SEQ ID NO: 244935 - DNA, 13 bp, Artificial Sequence
  Oligonucleotide for detection of SNP TSC0059803
ttaatgcggttta

SEQ ID NO: 244936 - DNA, 13 bp, Artificial Sequence
  Oligonucleotide for detection of SNP TSC0059803
taaaccgcattaa

SEQ ID NO: 244937 - DNA, 13 bp, Artificial Sequence
  Oligonucleotide for detection of SNP TSC0059804
atttagaatatga

SEQ ID NO: 244938 - DNA, 13 bp, Artificial Sequence
  Oligonucleotide for detection of SNP TSC0059804
tcatattctaaat

SEQ ID NO: 244939 - DNA, 13 bp, Artificial Sequence
  Oligonucleotide for detection of SNP TSC0059804
atttaggatatga

SEQ ID NO: 244940 - DNA, 13 bp, Artificial Sequence
  Oligonucleotide for detection of SNP TSC0059804
tcatatcctaaat

SEQ ID NO: 244941 - DNA, 13 bp, Artificial Sequence
  Oligonucleotide for detection of SNP TSC0059806
attttaatttgty

SEQ ID NO: 244942 - DNA, 13 bp, Artificial Sequence
  Oligonucleotide for detection of SNP TSC0059806
racaaattaaaat

SEQ ID NO: 244943 - DNA, 13 bp, Artificial Sequence
  Oligonucleotide for detection of SNP TSC0059806
attttagtttgty

SEQ ID NO: 244944 - DNA, 13 bp, Artificial Sequence
  Oligonucleotide for detection of SNP TSC0059806
racaaactaaaat

SEQ ID NO: 244945 - DNA, 13 bp, Artificial Sequence
  Oligonucleotide for detection of SNP TSC0059807
aaaaggatagtta

SEQ ID NO: 244946 - DNA, 13 bp, Artificial Sequence
  Oligonucleotide for detection of SNP TSC0059807
taactatcctttt

SEQ ID NO: 244947 - DNA, 13 bp, Artificial Sequence
  Oligonucleotide for detection of SNP TSC0059807
aaaagggtagtta

SEQ ID NO: 244948 - DNA, 13 bp, Artificial Sequence
  Oligonucleotide for detection of SNP TSC0059807
taactaccctttt

SEQ ID NO: 244949 - DNA, 13 bp, Artificial Sequence
  Oligonucleotide for detection of SNP TSC0059808
ggagtttgtatag

SEQ ID NO: 244950 - DNA, 13 bp, Artificial Sequence
  Oligonucleotide for detection of SNP TSC0059808
ctatacaaactcc

SEQ ID NO: 244951 - DNA, 13 bp, Artificial Sequence
  Oligonucleotide for detection of SNP TSC0059808
ttgtataagttty

SEQ ID NO: 244952 - DNA, 13 bp, Artificial Sequence
  Oligonucleotide for detection of SNP TSC0059808
raaacttatacaa

SEQ ID NO: 244953 - DNA, 13 bp, Artificial Sequence
  Oligonucleotide for detection of SNP TSC0059808
ttgtattagttty

SEQ ID NO: 244954 - DNA, 13 bp, Artificial Sequence
  Oligonucleotide for detection of SNP TSC0059808
raaactaatacaa

SEQ ID NO: 244955 - DNA, 13 bp, Artificial Sequence
  Oligonucleotide for detection of SNP TSC0059814
tgatatattgatt

SEQ ID NO: 244956 - DNA, 13 bp, Artificial Sequence
  Oligonucleotide for detection of SNP TSC0059814
aatcaatatatca

SEQ ID NO: 244957 - DNA, 13 bp, Artificial Sequence
  Oligonucleotide for detection of SNP TSC0059814
tgatatgttgatt

SEQ ID NO: 244958 - DNA, 13 bp, Artificial Sequence
  Oligonucleotide for detection of SNP TSC0059814
aatcaacatatca

SEQ ID NO: 244959 - DNA, 13 bp, Artificial Sequence
  Oligonucleotide for detection of SNP TSC0059815
tttgatatatttt

SEQ ID NO: 244960 - DNA, 13 bp, Artificial Sequence
  Oligonucleotide for detection of SNP TSC0059815
aaaatatatcaaa

SEQ ID NO: 244961 - DNA, 13 bp, Artificial Sequence
  Oligonucleotide for detection of SNP TSC0059815
tttgatttatttt

SEQ ID NO: 244962 - DNA, 13 bp, Artificial Sequence
  Oligonucleotide for detection of SNP TSC0059815
aaaataaatcaaa

SEQ ID NO: 244963 - DNA, 13 bp, Artificial Sequence
  Oligonucleotide for detection of SNP TSC0059815
agagtatattagg

SEQ ID NO: 244964 - DNA, 13 bp, Artificial Sequence
  Oligonucleotide for detection of SNP TSC0059815
cctaatatactct

SEQ ID NO: 244965 - DNA, 13 bp, Artificial Sequence
  Oligonucleotide for detection of SNP TSC0059815
agagtaaattagg

SEQ ID NO: 244966 - DNA, 13 bp, Artificial Sequence
  Oligonucleotide for detection of SNP TSC0059815
cctaatttactct

SEQ ID NO: 244967 - DNA, 13 bp, Artificial Sequence
  Oligonucleotide for detection of SNP TSC0059817
aaaagatgatata

SEQ ID NO: 244968 - DNA, 13 bp, Artificial Sequence
  Oligonucleotide for detection of SNP TSC0059817
tatatcatctttt

SEQ ID NO: 244969 - DNA, 13 bp, Artificial Sequence
  Oligonucleotide for detection of SNP TSC0059817
aaaagacgatata

SEQ ID NO: 244970 - DNA, 13 bp, Artificial Sequence
  Oligonucleotide for detection of SNP TSC0059817
tatatcgtctttt

SEQ ID NO: 244971 - DNA, 13 bp, Artificial Sequence
  Oligonucleotide for detection of SNP TSC0059818
tttttagtaagty

SEQ ID NO: 244972 - DNA, 13 bp, Artificial Sequence
  Oligonucleotide for detection of SNP TSC0059818
racttactaaaaa

SEQ ID NO: 244973 - DNA, 13 bp, Artificial Sequence
  Oligonucleotide for detection of SNP TSC0059819
gagatatataatt

SEQ ID NO: 244974 - DNA, 13 bp, Artificial Sequence
  Oligonucleotide for detection of SNP TSC0059819
aattatatatctc

SEQ ID NO: 244975 - DNA, 13 bp, Artificial Sequence
  Oligonucleotide for detection of SNP TSC0059819
gagataaataatt

SEQ ID NO: 244976 - DNA, 13 bp, Artificial Sequence
  Oligonucleotide for detection of SNP TSC0059819
aattatttatctc

SEQ ID NO: 244977 - DNA, 13 bp, Artificial Sequence
  Oligonucleotide for detection of SNP TSC0059820
aattgtttaaggg

SEQ ID NO: 244978 - DNA, 13 bp, Artificial Sequence
  Oligonucleotide for detection of SNP TSC0059820
cccttaaacaatt

SEQ ID NO: 244979 - DNA, 13 bp, Artificial Sequence
  Oligonucleotide for detection of SNP TSC0059820
aattgtgtaaggg

SEQ ID NO: 244980 - DNA, 13 bp, Artificial Sequence
  Oligonucleotide for detection of SNP TSC0059820
cccttacacaatt

SEQ ID NO: 244981 - DNA, 13 bp, Artificial Sequence
  Oligonucleotide for detection of SNP TSC0059820
aattgcgtaaggg

SEQ ID NO: 244982 - DNA, 13 bp, Artificial Sequence
  Oligonucleotide for detection of SNP TSC0059820
cccttacgcaatt

SEQ ID NO: 244983 - DNA, 13 bp, Artificial Sequence
  Oligonucleotide for detection of SNP TSC0059820
tttttaggtaatt

SEQ ID NO: 244984 - DNA, 13 bp, Artificial Sequence
  Oligonucleotide for detection of SNP TSC0059820
aattacctaaaaa

SEQ ID NO: 244985 - DNA, 13 bp, Artificial Sequence
  Oligonucleotide for detection of SNP TSC0059820
tttttatgtaatt

SEQ ID NO: 244986 - DNA, 13 bp, Artificial Sequence
  Oligonucleotide for detection of SNP TSC0059820
aattacataaaaa

SEQ ID NO: 244987 - DNA, 13 bp, Artificial Sequence
  Oligonucleotide for detection of SNP TSC0059820
tttttacgtaatt

SEQ ID NO: 244988 - DNA, 13 bp, Artificial Sequence
  Oligonucleotide for detection of SNP TSC0059820
aattacgtaaaaa

SEQ ID NO: 244989 - DNA, 13 bp, Artificial Sequence
  Oligonucleotide for detection of SNP TSC0059823
atttaagattatt

SEQ ID NO: 244990 - DNA, 13 bp, Artificial Sequence
  Oligonucleotide for detection of SNP TSC0059823
aataatcttaaat

SEQ ID NO: 244991 - DNA, 13 bp, Artificial Sequence
  Oligonucleotide for detection of SNP TSC0059823
aatagtgttgaat

SEQ ID NO: 244992 - DNA, 13 bp, Artificial Sequence
  Oligonucleotide for detection of SNP TSC0059823
attcaacactatt

SEQ ID NO: 244993 - DNA, 13 bp, Artificial Sequence
  Oligonucleotide for detection of SNP TSC0059823
aatagttttgaat

SEQ ID NO: 244994 - DNA, 13 bp, Artificial Sequence
  Oligonucleotide for detection of SNP TSC0059823
attcaaaactatt

SEQ ID NO: 244995 - DNA, 13 bp, Artificial Sequence
  Oligonucleotide for detection of SNP TSC0059824
agttagattttty

SEQ ID NO: 244996 - DNA, 13 bp, Artificial Sequence
  Oligonucleotide for detection of SNP TSC0059824
raaaaatctaact

SEQ ID NO: 244997 - DNA, 13 bp, Artificial Sequence
  Oligonucleotide for detection of SNP TSC0059824
agttaggttttty

SEQ ID NO: 244998 - DNA, 13 bp, Artificial Sequence
  Oligonucleotide for detection of SNP TSC0059824
raaaaacctaact

SEQ ID NO: 244999 - DNA, 13 bp, Artificial Sequence
  Oligonucleotide for detection of SNP TSC0059825
tggtagttttgta

SEQ ID NO: 245000 - DNA, 13 bp, Artificial Sequence
  Oligonucleotide for detection of SNP TSC0059825
tacaaaactacca

SEQ ID NO: 245001 - DNA, 13 bp, Artificial Sequence
  Oligonucleotide for detection of SNP TSC0059825
tggtaggtttgta

SEQ ID NO: 245002 - DNA, 13 bp, Artificial Sequence
  Oligonucleotide for detection of SNP TSC0059825
tacaaacctacca

SEQ ID NO: 245003 - DNA, 13 bp, Artificial Sequence
  Oligonucleotide for detection of SNP TSC0059825
tgtaaaattgtta

SEQ ID NO: 245004 - DNA, 13 bp, Artificial Sequence
  Oligonucleotide for detection of SNP TSC0059825
taacaattttaca

SEQ ID NO: 245005 - DNA, 13 bp, Artificial Sequence
  Oligonucleotide for detection of SNP TSC0059825
tgtaaatttgtta

SEQ ID NO: 245006 - DNA, 13 bp, Artificial Sequence
  Oligonucleotide for detection of SNP TSC0059825
taacaaatttaca

SEQ ID NO: 245007 - DNA, 13 bp, Artificial Sequence
  Oligonucleotide for detection of SNP TSC0059826
aaaataatttggy

SEQ ID NO: 245008 - DNA, 13 bp, Artificial Sequence
  Oligonucleotide for detection of SNP TSC0059826
rccaaattatttt

SEQ ID NO: 245009 - DNA, 13 bp, Artificial Sequence
  Oligonucleotide for detection of SNP TSC0059826
aaaatattttggy

SEQ ID NO: 245010 - DNA, 13 bp, Artificial Sequence
  Oligonucleotide for detection of SNP TSC0059826
rccaaaatatttt

SEQ ID NO: 245011 - DNA, 13 bp, Artificial Sequence
  Oligonucleotide for detection of SNP TSC0059827
ggaagtataaaat

SEQ ID NO: 245012 - DNA, 13 bp, Artificial Sequence
  Oligonucleotide for detection of SNP TSC0059827
attttatacttcc

SEQ ID NO: 245013 - DNA, 13 bp, Artificial Sequence
  Oligonucleotide for detection of SNP TSC0059827
ggaagtttaaaat

SEQ ID NO: 245014 - DNA, 13 bp, Artificial Sequence
  Oligonucleotide for detection of SNP TSC0059827
attttaaacttcc

SEQ ID NO: 245015 - DNA, 13 bp, Artificial Sequence
  Oligonucleotide for detection of SNP TSC0059828
tattttaattatt

SEQ ID NO: 245016 - DNA, 13 bp, Artificial Sequence
  Oligonucleotide for detection of SNP TSC0059828
aataattaaaata

SEQ ID NO: 245017 - DNA, 13 bp, Artificial Sequence
  Oligonucleotide for detection of SNP TSC0059828
tattttgattatt

SEQ ID NO: 245018 - DNA, 13 bp, Artificial Sequence
  Oligonucleotide for detection of SNP TSC0059828
aataatcaaaata

SEQ ID NO: 245019 - DNA, 13 bp, Artificial Sequence
  Oligonucleotide for detection of SNP TSC0059829
ttttttatgatay

SEQ ID NO: 245020 - DNA, 13 bp, Artificial Sequence
  Oligonucleotide for detection of SNP TSC0059829
rtatcataaaaaa

SEQ ID NO: 245021 - DNA, 13 bp, Artificial Sequence
  Oligonucleotide for detection of SNP TSC0059829
ttttttgtgatay

SEQ ID NO: 245022 - DNA, 13 bp, Artificial Sequence
  Oligonucleotide for detection of SNP TSC0059829
rtatcacaaaaaa

SEQ ID NO: 245023 - DNA, 13 bp, Artificial Sequence
  Oligonucleotide for detection of SNP TSC0059829
tttttcgtgatay

SEQ ID NO: 245024 - DNA, 13 bp, Artificial Sequence
  Oligonucleotide for detection of SNP TSC0059829
rtatcacgaaaaa

SEQ ID NO: 245025 - DNA, 13 bp, Artificial Sequence
  Oligonucleotide for detection of SNP TSC0059829
gtgttatgaaagg

SEQ ID NO: 245026 - DNA, 13 bp, Artificial Sequence
  Oligonucleotide for detection of SNP TSC0059829
cctttcataacac

SEQ ID NO: 245027 - DNA, 13 bp, Artificial Sequence
  Oligonucleotide for detection of SNP TSC0059829
gtgttacgaaagg

SEQ ID NO: 245028 - DNA, 13 bp, Artificial Sequence
  Oligonucleotide for detection of SNP TSC0059829
cctttcgtaacac

SEQ ID NO: 245029 - DNA, 13 bp, Artificial Sequence
  Oligonucleotide for detection of SNP TSC0059831
attatttgtgatt

SEQ ID NO: 245030 - DNA, 13 bp, Artificial Sequence
  Oligonucleotide for detection of SNP TSC0059831
aatcacaaataat

SEQ ID NO: 245031 - DNA, 13 bp, Artificial Sequence
  Oligonucleotide for detection of SNP TSC0059831
attattcgtgatt

SEQ ID NO: 245032 - DNA, 13 bp, Artificial Sequence
  Oligonucleotide for detection of SNP TSC0059831
aatcacgaataat

SEQ ID NO: 245033 - DNA, 13 bp, Artificial Sequence
  Oligonucleotide for detection of SNP TSC0059831
agttatggatagt

SEQ ID NO: 245034 - DNA, 13 bp, Artificial Sequence
  Oligonucleotide for detection of SNP TSC0059831
actatccataact

SEQ ID NO: 245035 - DNA, 13 bp, Artificial Sequence
  Oligonucleotide for detection of SNP TSC0059831
agttatagatagt

SEQ ID NO: 245036 - DNA, 13 bp, Artificial Sequence
  Oligonucleotide for detection of SNP TSC0059831
actatctataact

SEQ ID NO: 245037 - DNA, 13 bp, Artificial Sequence
  Oligonucleotide for detection of SNP TSC0059831
agttacggatagt

SEQ ID NO: 245038 - DNA, 13 bp, Artificial Sequence
  Oligonucleotide for detection of SNP TSC0059831
actatccgtaact

SEQ ID NO: 245039 - DNA, 13 bp, Artificial Sequence
  Oligonucleotide for detection of SNP TSC0059832
agatgaatataay

SEQ ID NO: 245040 - DNA, 13 bp, Artificial Sequence
  Oligonucleotide for detection of SNP TSC0059832
rttatattcatct

SEQ ID NO: 245041 - DNA, 13 bp, Artificial Sequence
  Oligonucleotide for detection of SNP TSC0059832
agatgattataay

SEQ ID NO: 245042 - DNA, 13 bp, Artificial Sequence
  Oligonucleotide for detection of SNP TSC0059832
rttataatcatct

SEQ ID NO: 245043 - DNA, 13 bp, Artificial Sequence
  Oligonucleotide for detection of SNP TSC0059832
gttatatttattt

SEQ ID NO: 245044 - DNA, 13 bp, Artificial Sequence
  Oligonucleotide for detection of SNP TSC0059832
aaataaatataac

SEQ ID NO: 245045 - DNA, 13 bp, Artificial Sequence
  Oligonucleotide for detection of SNP TSC0059832
gttataattattt

SEQ ID NO: 245046 - DNA, 13 bp, Artificial Sequence
  Oligonucleotide for detection of SNP TSC0059832
aaataattataac

SEQ ID NO: 245047 - DNA, 13 bp, Artificial Sequence
  Oligonucleotide for detection of SNP TSC0059833
gtggaggagaaat

SEQ ID NO: 245048 - DNA, 13 bp, Artificial Sequence
  Oligonucleotide for detection of SNP TSC0059833
atttctcctccac

SEQ ID NO: 245049 - DNA, 13 bp, Artificial Sequence
  Oligonucleotide for detection of SNP TSC0059833
gtggagaagaaat

SEQ ID NO: 245050 - DNA, 13 bp, Artificial Sequence
  Oligonucleotide for detection of SNP TSC0059833
atttcttctccac

SEQ ID NO: 245051 - DNA, 13 bp, Artificial Sequence
  Oligonucleotide for detection of SNP TSC0059834
aattttggttaay

SEQ ID NO: 245052 - DNA, 13 bp, Artificial Sequence
  Oligonucleotide for detection of SNP TSC0059834
rttaaccaaaatt

SEQ ID NO: 245053 - DNA, 13 bp, Artificial Sequence
  Oligonucleotide for detection of SNP TSC0059834
aattttagttaay

SEQ ID NO: 245054 - DNA, 13 bp, Artificial Sequence
  Oligonucleotide for detection of SNP TSC0059834
rttaactaaaatt

SEQ ID NO: 245055 - DNA, 13 bp, Artificial Sequence
  Oligonucleotide for detection of SNP TSC0059835
tatttggaattaa

SEQ ID NO: 245056 - DNA, 13 bp, Artificial Sequence
  Oligonucleotide for detection of SNP TSC0059835
ttaattccaaata

SEQ ID NO: 245057 - DNA, 13 bp, Artificial Sequence
  Oligonucleotide for detection of SNP TSC0059835
tatttgaaattaa

SEQ ID NO: 245058 - DNA, 13 bp, Artificial Sequence
  Oligonucleotide for detection of SNP TSC0059835
ttaatttcaaata

SEQ ID NO: 245059 - DNA, 13 bp, Artificial Sequence
  Oligonucleotide for detection of SNP TSC0059836
agaaatattttty

SEQ ID NO: 245060 - DNA, 13 bp, Artificial Sequence
  Oligonucleotide for detection of SNP TSC0059836
raaaaatatttct

SEQ ID NO: 245061 - DNA, 13 bp, Artificial Sequence
  Oligonucleotide for detection of SNP TSC0059836
agaaatgttttty

SEQ ID NO: 245062 - DNA, 13 bp, Artificial Sequence
  Oligonucleotide for detection of SNP TSC0059836
raaaaacatttct

SEQ ID NO: 245063 - DNA, 13 bp, Artificial Sequence
  Oligonucleotide for detection of SNP TSC0059836
agaaacgttttty

SEQ ID NO: 245064 - DNA, 13 bp, Artificial Sequence
  Oligonucleotide for detection of SNP TSC0059836
raaaaacgtttct

SEQ ID NO: 245065 - DNA, 13 bp, Artificial Sequence
  Oligonucleotide for detection of SNP TSC0059836
ggagaatgttttt

SEQ ID NO: 245066 - DNA, 13 bp, Artificial Sequence
  Oligonucleotide for detection of SNP TSC0059836
aaaaacattctcc

SEQ ID NO: 245067 - DNA, 13 bp, Artificial Sequence
  Oligonucleotide for detection of SNP TSC0059836
ggagaacgttttt

SEQ ID NO: 245068 - DNA, 13 bp, Artificial Sequence
  Oligonucleotide for detection of SNP TSC0059836
aaaaacgttctcc

SEQ ID NO: 245069 - DNA, 13 bp, Artificial Sequence
  Oligonucleotide for detection of SNP TSC0059837
agatgtatagttt

SEQ ID NO: 245070 - DNA, 13 bp, Artificial Sequence
  Oligonucleotide for detection of SNP TSC0059837
aaactatacatct

SEQ ID NO: 245071 - DNA, 13 bp, Artificial Sequence
  Oligonucleotide for detection of SNP TSC0059837
agatgtttagttt

SEQ ID NO: 245072 - DNA, 13 bp, Artificial Sequence
  Oligonucleotide for detection of SNP TSC0059837
aaactaaacatct

SEQ ID NO: 245073 - DNA, 13 bp, Artificial Sequence
  Oligonucleotide for detection of SNP TSC0059837
aagttgtatattt

SEQ ID NO: 245074 - DNA, 13 bp, Artificial Sequence
  Oligonucleotide for detection of SNP TSC0059837
aaatatacaactt

SEQ ID NO: 245075 - DNA, 13 bp, Artificial Sequence
  Oligonucleotide for detection of SNP TSC0059837
aagttgaatattt

SEQ ID NO: 245076 - DNA, 13 bp, Artificial Sequence
  Oligonucleotide for detection of SNP TSC0059837
aaatattcaactt

SEQ ID NO: 245077 - DNA, 13 bp, Artificial Sequence
  Oligonucleotide for detection of SNP TSC0059838
ggtattttaagga

SEQ ID NO: 245078 - DNA, 13 bp, Artificial Sequence
  Oligonucleotide for detection of SNP TSC0059838
tccttaaaatacc

SEQ ID NO: 245079 - DNA, 13 bp, Artificial Sequence
  Oligonucleotide for detection of SNP TSC0059838
ggtattgtaagga

SEQ ID NO: 245080 - DNA, 13 bp, Artificial Sequence
  Oligonucleotide for detection of SNP TSC0059838
tccttacaatacc

SEQ ID NO: 245081 - DNA, 13 bp, Artificial Sequence
  Oligonucleotide for detection of SNP TSC0059838
tttttggagtgty

SEQ ID NO: 245082 - DNA, 13 bp, Artificial Sequence
  Oligonucleotide for detection of SNP TSC0059838
racactccaaaaa

SEQ ID NO: 245083 - DNA, 13 bp, Artificial Sequence
  Oligonucleotide for detection of SNP TSC0059838
tttttgtagtgty

SEQ ID NO: 245084 - DNA, 13 bp, Artificial Sequence
  Oligonucleotide for detection of SNP TSC0059838
racactacaaaaa

SEQ ID NO: 245085 - DNA, 13 bp, Artificial Sequence
  Oligonucleotide for detection of SNP TSC0059839
tgaagatggggty

SEQ ID NO: 245086 - DNA, 13 bp, Artificial Sequence
  Oligonucleotide for detection of SNP TSC0059839
raccccatcttca

SEQ ID NO: 245087 - DNA, 13 bp, Artificial Sequence
  Oligonucleotide for detection of SNP TSC0059839
tgaagagggggty

SEQ ID NO: 245088 - DNA, 13 bp, Artificial Sequence
  Oligonucleotide for detection of SNP TSC0059839
raccccctcttca

SEQ ID NO: 245089 - DNA, 13 bp, Artificial Sequence
  Oligonucleotide for detection of SNP TSC0059839
tgaagacggggty

SEQ ID NO: 245090 - DNA, 13 bp, Artificial Sequence
  Oligonucleotide for detection of SNP TSC0059839
raccccgtcttca

SEQ ID NO: 245091 - DNA, 13 bp, Artificial Sequence
  Oligonucleotide for detection of SNP TSC0059843
tttattgttaagt

SEQ ID NO: 245092 - DNA, 13 bp, Artificial Sequence
  Oligonucleotide for detection of SNP TSC0059843
acttaacaataaa

SEQ ID NO: 245093 - DNA, 13 bp, Artificial Sequence
  Oligonucleotide for detection of SNP TSC0059843
tttattattaagt

SEQ ID NO: 245094 - DNA, 13 bp, Artificial Sequence
  Oligonucleotide for detection of SNP TSC0059843
acttaataataaa

SEQ ID NO: 245095 - DNA, 13 bp, Artificial Sequence
  Oligonucleotide for detection of SNP TSC0059845
atataaggatatg

SEQ ID NO: 245096 - DNA, 13 bp, Artificial Sequence
  Oligonucleotide for detection of SNP TSC0059845
catatccttatat

SEQ ID NO: 245097 - DNA, 13 bp, Artificial Sequence
  Oligonucleotide for detection of SNP TSC0059845
atataaagatatg

SEQ ID NO: 245098 - DNA, 13 bp, Artificial Sequence
  Oligonucleotide for detection of SNP TSC0059845
catatctttatat

SEQ ID NO: 245099 - DNA, 13 bp, Artificial Sequence
  Oligonucleotide for detection of SNP TSC0059846
gatgagatattay

SEQ ID NO: 245100 - DNA, 13 bp, Artificial Sequence
  Oligonucleotide for detection of SNP TSC0059846
rtaatatctcatc

SEQ ID NO: 245101 - DNA, 13 bp, Artificial Sequence
  Oligonucleotide for detection of SNP TSC0059846
gatgagttattay

SEQ ID NO: 245102 - DNA, 13 bp, Artificial Sequence
  Oligonucleotide for detection of SNP TSC0059846
rtaataactcatc

SEQ ID NO: 245103 - DNA, 13 bp, Artificial Sequence
  Oligonucleotide for detection of SNP TSC0059846
gtgatattttaty

SEQ ID NO: 245104 - DNA, 13 bp, Artificial Sequence
  Oligonucleotide for detection of SNP TSC0059846
rataaaatatcac

SEQ ID NO: 245105 - DNA, 13 bp, Artificial Sequence
  Oligonucleotide for detection of SNP TSC0059846
gtgataatttaty

SEQ ID NO: 245106 - DNA, 13 bp, Artificial Sequence
  Oligonucleotide for detection of SNP TSC0059846
rataaattatcac

SEQ ID NO: 245107 - DNA, 13 bp, Artificial Sequence
  Oligonucleotide for detection of SNP TSC0059847
gttatattggaag

SEQ ID NO: 245108 - DNA, 13 bp, Artificial Sequence
  Oligonucleotide for detection of SNP TSC0059847
cttccaatataac

SEQ ID NO: 245109 - DNA, 13 bp, Artificial Sequence
  Oligonucleotide for detection of SNP TSC0059847
gttatagtggaag

SEQ ID NO: 245110 - DNA, 13 bp, Artificial Sequence
  Oligonucleotide for detection of SNP TSC0059847
cttccactataac

SEQ ID NO: 245111 - DNA, 13 bp, Artificial Sequence
  Oligonucleotide for detection of SNP TSC0059849
gaaaggaaggaat

SEQ ID NO: 245112 - DNA, 13 bp, Artificial Sequence
  Oligonucleotide for detection of SNP TSC0059849
attccttcctttc

SEQ ID NO: 245113 - DNA, 13 bp, Artificial Sequence
  Oligonucleotide for detection of SNP TSC0059849
gaaaggtaggaat

SEQ ID NO: 245114 - DNA, 13 bp, Artificial Sequence
  Oligonucleotide for detection of SNP TSC0059849
attcctacctttc

SEQ ID NO: 245115 - DNA, 13 bp, Artificial Sequence
  Oligonucleotide for detection of SNP TSC0059850
tagttgattaggy

SEQ ID NO: 245116 - DNA, 13 bp, Artificial Sequence
  Oligonucleotide for detection of SNP TSC0059850
rcctaatcaacta

SEQ ID NO: 245117 - DNA, 13 bp, Artificial Sequence
  Oligonucleotide for detection of SNP TSC0059850
tagttggttaggy

SEQ ID NO: 245118 - DNA, 13 bp, Artificial Sequence
  Oligonucleotide for detection of SNP TSC0059850
rcctaaccaacta

SEQ ID NO: 245119 - DNA, 13 bp, Artificial Sequence
  Oligonucleotide for detection of SNP TSC0059850
tagtcgattaggy

SEQ ID NO: 245120 - DNA, 13 bp, Artificial Sequence
  Oligonucleotide for detection of SNP TSC0059850
rcctaatcgacta

SEQ ID NO: 245121 - DNA, 13 bp, Artificial Sequence
  Oligonucleotide for detection of SNP TSC0059850
tagtcggttaggy

SEQ ID NO: 245122 - DNA, 13 bp, Artificial Sequence
  Oligonucleotide for detection of SNP TSC0059850
rcctaaccgacta

SEQ ID NO: 245123 - DNA, 13 bp, Artificial Sequence
  Oligonucleotide for detection of SNP TSC0009304
tggggagagaatg

SEQ ID NO: 245124 - DNA, 13 bp, Artificial Sequence
  Oligonucleotide for detection of SNP TSC0009304
cattctctcccca

SEQ ID NO: 245125 - DNA, 13 bp, Artificial Sequence
  Oligonucleotide for detection of SNP TSC0009304
tggggaaagaatg

SEQ ID NO: 245126 - DNA, 13 bp, Artificial Sequence
  Oligonucleotide for detection of SNP TSC0009304
cattctttcccca

SEQ ID NO: 245127 - DNA, 13 bp, Artificial Sequence
  Oligonucleotide for detection of SNP TSC0059854
tatggaaataaag

SEQ ID NO: 245128 - DNA, 13 bp, Artificial Sequence
  Oligonucleotide for detection of SNP TSC0059854
ctttatttccata

SEQ ID NO: 245129 - DNA, 13 bp, Artificial Sequence
  Oligonucleotide for detection of SNP TSC0059854
tatggagataaag

SEQ ID NO: 245130 - DNA, 13 bp, Artificial Sequence
  Oligonucleotide for detection of SNP TSC0059854
ctttatctccata

SEQ ID NO: 245131 - DNA, 13 bp, Artificial Sequence
  Oligonucleotide for detection of SNP TSC0059854
tacggaaataaag

SEQ ID NO: 245132 - DNA, 13 bp, Artificial Sequence
  Oligonucleotide for detection of SNP TSC0059854
ctttatttccgta

SEQ ID NO: 245133 - DNA, 13 bp, Artificial Sequence
  Oligonucleotide for detection of SNP TSC0059854
tacggagataaag

SEQ ID NO: 245134 - DNA, 13 bp, Artificial Sequence
  Oligonucleotide for detection of SNP TSC0059854
ctttatctccgta

SEQ ID NO: 245135 - DNA, 13 bp, Artificial Sequence
  Oligonucleotide for detection of SNP TSC0059856
ttaaaaatagaga

SEQ ID NO: 245136 - DNA, 13 bp, Artificial Sequence
  Oligonucleotide for detection of SNP TSC0059856
tctctatttttaa

SEQ ID NO: 245137 - DNA, 13 bp, Artificial Sequence
  Oligonucleotide for detection of SNP TSC0059856
ttaaaattagaga

SEQ ID NO: 245138 - DNA, 13 bp, Artificial Sequence
  Oligonucleotide for detection of SNP TSC0059856
tctctaattttaa

SEQ ID NO: 245139 - DNA, 13 bp, Artificial Sequence
  Oligonucleotide for detection of SNP TSC0059858
attttattataty

SEQ ID NO: 245140 - DNA, 13 bp, Artificial Sequence
  Oligonucleotide for detection of SNP TSC0059858
ratataataaaat

SEQ ID NO: 245141 - DNA, 13 bp, Artificial Sequence
  Oligonucleotide for detection of SNP TSC0059858
attttagtataty

SEQ ID NO: 245142 - DNA, 13 bp, Artificial Sequence
  Oligonucleotide for detection of SNP TSC0059858
ratatactaaaat

SEQ ID NO: 245143 - DNA, 13 bp, Artificial Sequence
  Oligonucleotide for detection of SNP TSC0059858
ggtgtaatagagt

SEQ ID NO: 245144 - DNA, 13 bp, Artificial Sequence
  Oligonucleotide for detection of SNP TSC0059858
actctattacacc

SEQ ID NO: 245145 - DNA, 13 bp, Artificial Sequence
  Oligonucleotide for detection of SNP TSC0059858
ggtgtattagagt

SEQ ID NO: 245146 - DNA, 13 bp, Artificial Sequence
  Oligonucleotide for detection of SNP TSC0059858
actctaatacacc

SEQ ID NO: 245147 - DNA, 13 bp, Artificial Sequence
  Oligonucleotide for detection of SNP TSC0059859
agtgagaaagggg

SEQ ID NO: 245148 - DNA, 13 bp, Artificial Sequence
  Oligonucleotide for detection of SNP TSC0059859
cccctttctcact

SEQ ID NO: 245149 - DNA, 13 bp, Artificial Sequence
  Oligonucleotide for detection of SNP TSC0059859
agtgagtaagggg

SEQ ID NO: 245150 - DNA, 13 bp, Artificial Sequence
  Oligonucleotide for detection of SNP TSC0059859
ccccttactcact

SEQ ID NO: 245151 - DNA, 13 bp, Artificial Sequence
  Oligonucleotide for detection of SNP TSC0059860
tgttgtaattgtt

SEQ ID NO: 245152 - DNA, 13 bp, Artificial Sequence
  Oligonucleotide for detection of SNP TSC0059860
aacaattacaaca

SEQ ID NO: 245153 - DNA, 13 bp, Artificial Sequence
  Oligonucleotide for detection of SNP TSC0059861
ttagaaattatga

SEQ ID NO: 245154 - DNA, 13 bp, Artificial Sequence
  Oligonucleotide for detection of SNP TSC0059861
tcataatttctaa

SEQ ID NO: 245155 - DNA, 13 bp, Artificial Sequence
  Oligonucleotide for detection of SNP TSC0059861
ttagaatttatga

SEQ ID NO: 245156 - DNA, 13 bp, Artificial Sequence
  Oligonucleotide for detection of SNP TSC0059861
tcataaattctaa

SEQ ID NO: 245157 - DNA, 13 bp, Artificial Sequence
  Oligonucleotide for detection of SNP TSC0059868
tgataaaaaagta

SEQ ID NO: 245158 - DNA, 13 bp, Artificial Sequence
  Oligonucleotide for detection of SNP TSC0059868
tacttttttatca

SEQ ID NO: 245159 - DNA, 13 bp, Artificial Sequence
  Oligonucleotide for detection of SNP TSC0059868
tgataagaaagta

SEQ ID NO: 245160 - DNA, 13 bp, Artificial Sequence
  Oligonucleotide for detection of SNP TSC0059868
tactttcttatca

SEQ ID NO: 245161 - DNA, 13 bp, Artificial Sequence
  Oligonucleotide for detection of SNP TSC0059869
gttatttgtttat

SEQ ID NO: 245162 - DNA, 13 bp, Artificial Sequence
  Oligonucleotide for detection of SNP TSC0059869
ataaacaaataac

SEQ ID NO: 245163 - DNA, 13 bp, Artificial Sequence
  Oligonucleotide for detection of SNP TSC0059869
gttattcgtttat

SEQ ID NO: 245164 - DNA, 13 bp, Artificial Sequence
  Oligonucleotide for detection of SNP TSC0059869
ataaacgaataac

SEQ ID NO: 245165 - DNA, 13 bp, Artificial Sequence
  Oligonucleotide for detection of SNP TSC0059869
ataaatgaatagy

SEQ ID NO: 245166 - DNA, 13 bp, Artificial Sequence
  Oligonucleotide for detection of SNP TSC0059869
rctattcatttat

SEQ ID NO: 245167 - DNA, 13 bp, Artificial Sequence
  Oligonucleotide for detection of SNP TSC0059869
ataaataaatagy

SEQ ID NO: 245168 - DNA, 13 bp, Artificial Sequence
  Oligonucleotide for detection of SNP TSC0059869
rctatttatttat

SEQ ID NO: 245169 - DNA, 13 bp, Artificial Sequence
  Oligonucleotide for detection of SNP TSC0059869
ataaacgaatagy

SEQ ID NO: 245170 - DNA, 13 bp, Artificial Sequence
  Oligonucleotide for detection of SNP TSC0059869
rctattcgtttat

SEQ ID NO: 245171 - DNA, 13 bp, Artificial Sequence
  Oligonucleotide for detection of SNP TSC0059870
tatatttggattt

SEQ ID NO: 245172 - DNA, 13 bp, Artificial Sequence
  Oligonucleotide for detection of SNP TSC0059870
aaatccaaatata

SEQ ID NO: 245173 - DNA, 13 bp, Artificial Sequence
  Oligonucleotide for detection of SNP TSC0059870
tatattcggattt

SEQ ID NO: 245174 - DNA, 13 bp, Artificial Sequence
  Oligonucleotide for detection of SNP TSC0059870
aaatccgaatata

SEQ ID NO: 245175 - DNA, 13 bp, Artificial Sequence
  Oligonucleotide for detection of SNP TSC0059870
aagtttgaatgta

SEQ ID NO: 245176 - DNA, 13 bp, Artificial Sequence
  Oligonucleotide for detection of SNP TSC0059870
tacattcaaactt

SEQ ID NO: 245177 - DNA, 13 bp, Artificial Sequence
  Oligonucleotide for detection of SNP TSC0059870
aagtttaaatgta

SEQ ID NO: 245178 - DNA, 13 bp, Artificial Sequence
  Oligonucleotide for detection of SNP TSC0059870
tacatttaaactt

SEQ ID NO: 245179 - DNA, 13 bp, Artificial Sequence
  Oligonucleotide for detection of SNP TSC0059870
aagttcgaatgta

SEQ ID NO: 245180 - DNA, 13 bp, Artificial Sequence
  Oligonucleotide for detection of SNP TSC0059870
tacattcgaactt

SEQ ID NO: 245181 - DNA, 13 bp, Artificial Sequence
  Oligonucleotide for detection of SNP TSC0059871
gtttttttaggta

SEQ ID NO: 245182 - DNA, 13 bp, Artificial Sequence
  Oligonucleotide for detection of SNP TSC0059871
tacctaaaaaaac

SEQ ID NO: 245183 - DNA, 13 bp, Artificial Sequence
  Oligonucleotide for detection of SNP TSC0059871
gtttttgtaggta

SEQ ID NO: 245184 - DNA, 13 bp, Artificial Sequence
  Oligonucleotide for detection of SNP TSC0059871
tacctacaaaaac

SEQ ID NO: 245185 - DNA, 13 bp, Artificial Sequence
  Oligonucleotide for detection of SNP TSC0059871
gttttcgtaggta

SEQ ID NO: 245186 - DNA, 13 bp, Artificial Sequence
  Oligonucleotide for detection of SNP TSC0059871
tacctacgaaaac

SEQ ID NO: 245187 - DNA, 13 bp, Artificial Sequence
  Oligonucleotide for detection of SNP TSC0059871
tatttaggaggay

SEQ ID NO: 245188 - DNA, 13 bp, Artificial Sequence
  Oligonucleotide for detection of SNP TSC0059871
rtcctcctaaata

SEQ ID NO: 245189 - DNA, 13 bp, Artificial Sequence
  Oligonucleotide for detection of SNP TSC0059871
tatttatgaggay

SEQ ID NO: 245190 - DNA, 13 bp, Artificial Sequence
  Oligonucleotide for detection of SNP TSC0059871
rtcctcataaata

SEQ ID NO: 245191 - DNA, 13 bp, Artificial Sequence
  Oligonucleotide for detection of SNP TSC0059871
tatttacgaggay

SEQ ID NO: 245192 - DNA, 13 bp, Artificial Sequence
  Oligonucleotide for detection of SNP TSC0059871
rtcctcgtaaata

SEQ ID NO: 245193 - DNA, 13 bp, Artificial Sequence
  Oligonucleotide for detection of SNP TSC0059877
tggggttggggga

SEQ ID NO: 245194 - DNA, 13 bp, Artificial Sequence
  Oligonucleotide for detection of SNP TSC0059877
tcccccaacccca

SEQ ID NO: 245195 - DNA, 13 bp, Artificial Sequence
  Oligonucleotide for detection of SNP TSC0059877
tggggtgggggga

SEQ ID NO: 245196 - DNA, 13 bp, Artificial Sequence
  Oligonucleotide for detection of SNP TSC0059877
tccccccacccca

SEQ ID NO: 245197 - DNA, 13 bp, Artificial Sequence
  Oligonucleotide for detection of SNP TSC0059879
ttttgtcgttgat

SEQ ID NO: 245198 - DNA, 13 bp, Artificial Sequence
  Oligonucleotide for detection of SNP TSC0059879
atcaacgacaaaa

SEQ ID NO: 245199 - DNA, 13 bp, Artificial Sequence
  Oligonucleotide for detection of SNP TSC0059879
ttttgttgtcgat

SEQ ID NO: 245200 - DNA, 13 bp, Artificial Sequence
  Oligonucleotide for detection of SNP TSC0059879
atcgacaacaaaa

SEQ ID NO: 245201 - DNA, 13 bp, Artificial Sequence
  Oligonucleotide for detection of SNP TSC0059879
ttttgtcgtcgat

SEQ ID NO: 245202 - DNA, 13 bp, Artificial Sequence
  Oligonucleotide for detection of SNP TSC0059879
atcgacgacaaaa

SEQ ID NO: 245203 - DNA, 13 bp, Artificial Sequence
  Oligonucleotide for detection of SNP TSC0059879
attgatgataggg

SEQ ID NO: 245204 - DNA, 13 bp, Artificial Sequence
  Oligonucleotide for detection of SNP TSC0059879
ccctatcatcaat

SEQ ID NO: 245205 - DNA, 13 bp, Artificial Sequence
  Oligonucleotide for detection of SNP TSC0059879
attgataataggg

SEQ ID NO: 245206 - DNA, 13 bp, Artificial Sequence
  Oligonucleotide for detection of SNP TSC0059879
ccctattatcaat

SEQ ID NO: 245207 - DNA, 13 bp, Artificial Sequence
  Oligonucleotide for detection of SNP TSC0059879
atcgatgataggg

SEQ ID NO: 245208 - DNA, 13 bp, Artificial Sequence
  Oligonucleotide for detection of SNP TSC0059879
ccctatcatcgat

SEQ ID NO: 245209 - DNA, 13 bp, Artificial Sequence
  Oligonucleotide for detection of SNP TSC0059879
atcgataataggg

SEQ ID NO: 245210 - DNA, 13 bp, Artificial Sequence
  Oligonucleotide for detection of SNP TSC0059879
ccctattatcgat

SEQ ID NO: 245211 - DNA, 13 bp, Artificial Sequence
  Oligonucleotide for detection of SNP TSC0059879
attgacgataggg

SEQ ID NO: 245212 - DNA, 13 bp, Artificial Sequence
  Oligonucleotide for detection of SNP TSC0059879
ccctatcgtcaat

SEQ ID NO: 245213 - DNA, 13 bp, Artificial Sequence
  Oligonucleotide for detection of SNP TSC0059879
atcgacgataggg

SEQ ID NO: 245214 - DNA, 13 bp, Artificial Sequence
  Oligonucleotide for detection of SNP TSC0059879
ccctatcgtcgat

SEQ ID NO: 245215 - DNA, 13 bp, Artificial Sequence
  Oligonucleotide for detection of SNP TSC0059880
ttaataatgttat

SEQ ID NO: 245216 - DNA, 13 bp, Artificial Sequence
  Oligonucleotide for detection of SNP TSC0059880
ataacattattaa

SEQ ID NO: 245217 - DNA, 13 bp, Artificial Sequence
  Oligonucleotide for detection of SNP TSC0059880
ataatattgttgg

SEQ ID NO: 245218 - DNA, 13 bp, Artificial Sequence
  Oligonucleotide for detection of SNP TSC0059880
ccaacaatattat

SEQ ID NO: 245219 - DNA, 13 bp, Artificial Sequence
  Oligonucleotide for detection of SNP TSC0059880
ataatagtgttgg

SEQ ID NO: 245220 - DNA, 13 bp, Artificial Sequence
  Oligonucleotide for detection of SNP TSC0059880
ccaacactattat

SEQ ID NO: 245221 - DNA, 13 bp, Artificial Sequence
  Oligonucleotide for detection of SNP TSC0059881
tagttatgaaaat

SEQ ID NO: 245222 - DNA, 13 bp, Artificial Sequence
  Oligonucleotide for detection of SNP TSC0059881
attttcataacta

SEQ ID NO: 245223 - DNA, 13 bp, Artificial Sequence
  Oligonucleotide for detection of SNP TSC0059881
tagttacgaaaat

SEQ ID NO: 245224 - DNA, 13 bp, Artificial Sequence
  Oligonucleotide for detection of SNP TSC0059881
attttcgtaacta

SEQ ID NO: 245225 - DNA, 13 bp, Artificial Sequence
  Oligonucleotide for detection of SNP TSC0059881
attttcgtaatta

SEQ ID NO: 245226 - DNA, 13 bp, Artificial Sequence
  Oligonucleotide for detection of SNP TSC0059881
taattacgaaaat

SEQ ID NO: 245227 - DNA, 13 bp, Artificial Sequence
  Oligonucleotide for detection of SNP TSC0059882
aattgtaatagta

SEQ ID NO: 245228 - DNA, 13 bp, Artificial Sequence
  Oligonucleotide for detection of SNP TSC0059882
tactattacaatt

SEQ ID NO: 245229 - DNA, 13 bp, Artificial Sequence
  Oligonucleotide for detection of SNP TSC0059882
aattgttatagta

SEQ ID NO: 245230 - DNA, 13 bp, Artificial Sequence
  Oligonucleotide for detection of SNP TSC0059882
tactataacaatt

SEQ ID NO: 245231 - DNA, 13 bp, Artificial Sequence
  Oligonucleotide for detection of SNP TSC0059882
tgttgttataatt

SEQ ID NO: 245232 - DNA, 13 bp, Artificial Sequence
  Oligonucleotide for detection of SNP TSC0059882
aattataacaaca

SEQ ID NO: 245233 - DNA, 13 bp, Artificial Sequence
  Oligonucleotide for detection of SNP TSC0059882
tgttgtaataatt

SEQ ID NO: 245234 - DNA, 13 bp, Artificial Sequence
  Oligonucleotide for detection of SNP TSC0059882
aattattacaaca

SEQ ID NO: 245235 - DNA, 13 bp, Artificial Sequence
  Oligonucleotide for detection of SNP TSC0005865
gaagggaagggag

SEQ ID NO: 245236 - DNA, 13 bp, Artificial Sequence
  Oligonucleotide for detection of SNP TSC0005865
ctcccttcccttc

SEQ ID NO: 245237 - DNA, 13 bp, Artificial Sequence
  Oligonucleotide for detection of SNP TSC0005865
gaaggggagggag

SEQ ID NO: 245238 - DNA, 13 bp, Artificial Sequence
  Oligonucleotide for detection of SNP TSC0005865
ctccctccccttc

SEQ ID NO: 245239 - DNA, 13 bp, Artificial Sequence
  Oligonucleotide for detection of SNP TSC0005866
taagtgtgaggtg

SEQ ID NO: 245240 - DNA, 13 bp, Artificial Sequence
  Oligonucleotide for detection of SNP TSC0005866
cacctcacactta

SEQ ID NO: 245241 - DNA, 13 bp, Artificial Sequence
  Oligonucleotide for detection of SNP TSC0005866
taagtgggaggtg

SEQ ID NO: 245242 - DNA, 13 bp, Artificial Sequence
  Oligonucleotide for detection of SNP TSC0005866
cacctcccactta

SEQ ID NO: 245243 - DNA, 13 bp, Artificial Sequence
  Oligonucleotide for detection of SNP TSC0005866
taagtgcgaggtg

SEQ ID NO: 245244 - DNA, 13 bp, Artificial Sequence
  Oligonucleotide for detection of SNP TSC0005866
cacctcgcactta

SEQ ID NO: 245245 - DNA, 13 bp, Artificial Sequence
  Oligonucleotide for detection of SNP TSC0005866
tattttttattta

SEQ ID NO: 245246 - DNA, 13 bp, Artificial Sequence
  Oligonucleotide for detection of SNP TSC0005866
taaataaaaaata

SEQ ID NO: 245247 - DNA, 13 bp, Artificial Sequence
  Oligonucleotide for detection of SNP TSC0005866
tatttcgtattta

SEQ ID NO: 245248 - DNA, 13 bp, Artificial Sequence
  Oligonucleotide for detection of SNP TSC0005866
taaatacgaaata

SEQ ID NO: 245249 - DNA, 13 bp, Artificial Sequence
  Oligonucleotide for detection of SNP TSC0059883
agggttaggttty

SEQ ID NO: 245250 - DNA, 13 bp, Artificial Sequence
  Oligonucleotide for detection of SNP TSC0059883
raaacctaaccct

SEQ ID NO: 245251 - DNA, 13 bp, Artificial Sequence
  Oligonucleotide for detection of SNP TSC0059883
agggttgggttty

SEQ ID NO: 245252 - DNA, 13 bp, Artificial Sequence
  Oligonucleotide for detection of SNP TSC0059883
raaacccaaccct

SEQ ID NO: 245253 - DNA, 13 bp, Artificial Sequence
  Oligonucleotide for detection of SNP TSC0059886
ttttttagggggy

SEQ ID NO: 245254 - DNA, 13 bp, Artificial Sequence
  Oligonucleotide for detection of SNP TSC0059886
rccccctaaaaaa

SEQ ID NO: 245255 - DNA, 13 bp, Artificial Sequence
  Oligonucleotide for detection of SNP TSC0059886
ttttttggggggy

SEQ ID NO: 245256 - DNA, 13 bp, Artificial Sequence
  Oligonucleotide for detection of SNP TSC0059886
rccccccaaaaaa

SEQ ID NO: 245257 - DNA, 13 bp, Artificial Sequence
  Oligonucleotide for detection of SNP TSC0059887
tggtaatgtggat

SEQ ID NO: 245258 - DNA, 13 bp, Artificial Sequence
  Oligonucleotide for detection of SNP TSC0059887
atccacattacca

SEQ ID NO: 245259 - DNA, 13 bp, Artificial Sequence
  Oligonucleotide for detection of SNP TSC0059887
cggtaatgtggat

SEQ ID NO: 245260 - DNA, 13 bp, Artificial Sequence
  Oligonucleotide for detection of SNP TSC0059887
atccacattaccg

SEQ ID NO: 245261 - DNA, 13 bp, Artificial Sequence
  Oligonucleotide for detection of SNP TSC0059887
tggtaacgtggat

SEQ ID NO: 245262 - DNA, 13 bp, Artificial Sequence
  Oligonucleotide for detection of SNP TSC0059887
atccacgttacca

SEQ ID NO: 245263 - DNA, 13 bp, Artificial Sequence
  Oligonucleotide for detection of SNP TSC0059887
cggtaacgtggat

SEQ ID NO: 245264 - DNA, 13 bp, Artificial Sequence
  Oligonucleotide for detection of SNP TSC0059887
atccacgttaccg

SEQ ID NO: 245265 - DNA, 13 bp, Artificial Sequence
  Oligonucleotide for detection of SNP TSC0059887
atttacgttgttg

SEQ ID NO: 245266 - DNA, 13 bp, Artificial Sequence
  Oligonucleotide for detection of SNP TSC0059887
caacaacgtaaat

SEQ ID NO: 245267 - DNA, 13 bp, Artificial Sequence
  Oligonucleotide for detection of SNP TSC0059887
atttatattgtcg

SEQ ID NO: 245268 - DNA, 13 bp, Artificial Sequence
  Oligonucleotide for detection of SNP TSC0059887
cgacaatataaat

SEQ ID NO: 245269 - DNA, 13 bp, Artificial Sequence
  Oligonucleotide for detection of SNP TSC0059887
atttatgttgtcg

SEQ ID NO: 245270 - DNA, 13 bp, Artificial Sequence
  Oligonucleotide for detection of SNP TSC0059887
cgacaacataaat

SEQ ID NO: 245271 - DNA, 13 bp, Artificial Sequence
  Oligonucleotide for detection of SNP TSC0059887
atttacgttgtcg

SEQ ID NO: 245272 - DNA, 13 bp, Artificial Sequence
  Oligonucleotide for detection of SNP TSC0059887
cgacaacgtaaat

SEQ ID NO: 245273 - DNA, 13 bp, Artificial Sequence
  Oligonucleotide for detection of SNP TSC0059888
aaatttttatgtg

SEQ ID NO: 245274 - DNA, 13 bp, Artificial Sequence
  Oligonucleotide for detection of SNP TSC0059888
cacataaaaattt

SEQ ID NO: 245275 - DNA, 13 bp, Artificial Sequence
  Oligonucleotide for detection of SNP TSC0059888
aaatttgtatgtg

SEQ ID NO: 245276 - DNA, 13 bp, Artificial Sequence
  Oligonucleotide for detection of SNP TSC0059888
cacatacaaattt

SEQ ID NO: 245277 - DNA, 13 bp, Artificial Sequence
  Oligonucleotide for detection of SNP TSC0059888
tatatgaaggttt

SEQ ID NO: 245278 - DNA, 13 bp, Artificial Sequence
  Oligonucleotide for detection of SNP TSC0059888
aaaccttcatata

SEQ ID NO: 245279 - DNA, 13 bp, Artificial Sequence
  Oligonucleotide for detection of SNP TSC0059888
tatatgtaggttt

SEQ ID NO: 245280 - DNA, 13 bp, Artificial Sequence
  Oligonucleotide for detection of SNP TSC0059888
aaacctacatata

SEQ ID NO: 245281 - DNA, 13 bp, Artificial Sequence
  Oligonucleotide for detection of SNP TSC0059889
ggtaggtaaaaty

SEQ ID NO: 245282 - DNA, 13 bp, Artificial Sequence
  Oligonucleotide for detection of SNP TSC0059889
rattttacctacc

SEQ ID NO: 245283 - DNA, 13 bp, Artificial Sequence
  Oligonucleotide for detection of SNP TSC0059889
ggtagggaaaaty

SEQ ID NO: 245284 - DNA, 13 bp, Artificial Sequence
  Oligonucleotide for detection of SNP TSC0059889
rattttccctacc

SEQ ID NO: 245285 - DNA, 13 bp, Artificial Sequence
  Oligonucleotide for detection of SNP TSC0009601
ttgattgtataga

SEQ ID NO: 245286 - DNA, 13 bp, Artificial Sequence
  Oligonucleotide for detection of SNP TSC0009601
tctatacaatcaa

SEQ ID NO: 245287 - DNA, 13 bp, Artificial Sequence
  Oligonucleotide for detection of SNP TSC0009601
ttgattttataga

SEQ ID NO: 245288 - DNA, 13 bp, Artificial Sequence
  Oligonucleotide for detection of SNP TSC0009601
tctataaaatcaa

SEQ ID NO: 245289 - DNA, 13 bp, Artificial Sequence
  Oligonucleotide for detection of SNP TSC0059890
gagattgttttty

SEQ ID NO: 245290 - DNA, 13 bp, Artificial Sequence
  Oligonucleotide for detection of SNP TSC0059890
raaaaacaatctc

SEQ ID NO: 245291 - DNA, 13 bp, Artificial Sequence
  Oligonucleotide for detection of SNP TSC0059890
gagatcgttttty

SEQ ID NO: 245292 - DNA, 13 bp, Artificial Sequence
  Oligonucleotide for detection of SNP TSC0059890
raaaaacgatctc

SEQ ID NO: 245293 - DNA, 13 bp, Artificial Sequence
  Oligonucleotide for detection of SNP TSC0059890
ggggaatggttty

SEQ ID NO: 245294 - DNA, 13 bp, Artificial Sequence
  Oligonucleotide for detection of SNP TSC0059890
raaaccattcccc

SEQ ID NO: 245295 - DNA, 13 bp, Artificial Sequence
  Oligonucleotide for detection of SNP TSC0059890
ggggaacggttty

SEQ ID NO: 245296 - DNA, 13 bp, Artificial Sequence
  Oligonucleotide for detection of SNP TSC0059890
raaaccgttcccc

SEQ ID NO: 245297 - DNA, 13 bp, Artificial Sequence
  Oligonucleotide for detection of SNP TSC0059891
tttggggtaaata

SEQ ID NO: 245298 - DNA, 13 bp, Artificial Sequence
  Oligonucleotide for detection of SNP TSC0059891
tatttaccccaaa

SEQ ID NO: 245299 - DNA, 13 bp, Artificial Sequence
  Oligonucleotide for detection of SNP TSC0059892
ttatatatatatg

SEQ ID NO: 245300 - DNA, 13 bp, Artificial Sequence
  Oligonucleotide for detection of SNP TSC0059892
catatatatataa

SEQ ID NO: 245301 - DNA, 13 bp, Artificial Sequence
  Oligonucleotide for detection of SNP TSC0059892
ttatatgtatatg

SEQ ID NO: 245302 - DNA, 13 bp, Artificial Sequence
  Oligonucleotide for detection of SNP TSC0059892
catatacatataa

SEQ ID NO: 245303 - DNA, 13 bp, Artificial Sequence
  Oligonucleotide for detection of SNP TSC0059894
tatttagaagttg

SEQ ID NO: 245304 - DNA, 13 bp, Artificial Sequence
  Oligonucleotide for detection of SNP TSC0059894
caacttctaaata

SEQ ID NO: 245305 - DNA, 13 bp, Artificial Sequence
  Oligonucleotide for detection of SNP TSC0059894
tatttaaaagttg

SEQ ID NO: 245306 - DNA, 13 bp, Artificial Sequence
  Oligonucleotide for detection of SNP TSC0059894
caacttttaaata

SEQ ID NO: 245307 - DNA, 13 bp, Artificial Sequence
  Oligonucleotide for detection of SNP TSC0059895
gttatatttttay

SEQ ID NO: 245308 - DNA, 13 bp, Artificial Sequence
  Oligonucleotide for detection of SNP TSC0059895
rtaaaaatataac

SEQ ID NO: 245309 - DNA, 13 bp, Artificial Sequence
  Oligonucleotide for detection of SNP TSC0059895
gttatagttttay

SEQ ID NO: 245310 - DNA, 13 bp, Artificial Sequence
  Oligonucleotide for detection of SNP TSC0059895
rtaaaactataac

SEQ ID NO: 245311 - DNA, 13 bp, Artificial Sequence
  Oligonucleotide for detection of SNP TSC0059895
gtagagatataay

SEQ ID NO: 245312 - DNA, 13 bp, Artificial Sequence
  Oligonucleotide for detection of SNP TSC0059895
rttatatctctac

SEQ ID NO: 245313 - DNA, 13 bp, Artificial Sequence
  Oligonucleotide for detection of SNP TSC0059895
gtagagttataay

SEQ ID NO: 245314 - DNA, 13 bp, Artificial Sequence
  Oligonucleotide for detection of SNP TSC0059895
rttataactctac

SEQ ID NO: 245315 - DNA, 13 bp, Artificial Sequence
  Oligonucleotide for detection of SNP TSC0059896
agtgttgttttat

SEQ ID NO: 245316 - DNA, 13 bp, Artificial Sequence
  Oligonucleotide for detection of SNP TSC0059896
ataaaacaacact

SEQ ID NO: 245317 - DNA, 13 bp, Artificial Sequence
  Oligonucleotide for detection of SNP TSC0059896
agtgttattttat

SEQ ID NO: 245318 - DNA, 13 bp, Artificial Sequence
  Oligonucleotide for detection of SNP TSC0059896
ataaaataacact

SEQ ID NO: 245319 - DNA, 13 bp, Artificial Sequence
  Oligonucleotide for detection of SNP TSC0059897
gaagttttagtga

SEQ ID NO: 245320 - DNA, 13 bp, Artificial Sequence
  Oligonucleotide for detection of SNP TSC0059897
tcactaaaacttc

SEQ ID NO: 245321 - DNA, 13 bp, Artificial Sequence
  Oligonucleotide for detection of SNP TSC0059897
gaagttgtagtga

SEQ ID NO: 245322 - DNA, 13 bp, Artificial Sequence
  Oligonucleotide for detection of SNP TSC0059897
tcactacaacttc

SEQ ID NO: 245323 - DNA, 13 bp, Artificial Sequence
  Oligonucleotide for detection of SNP TSC0059898
aattagttaagay

SEQ ID NO: 245324 - DNA, 13 bp, Artificial Sequence
  Oligonucleotide for detection of SNP TSC0059898
rtcttaactaatt

SEQ ID NO: 245325 - DNA, 13 bp, Artificial Sequence
  Oligonucleotide for detection of SNP TSC0059898
aattaggtaagay

SEQ ID NO: 245326 - DNA, 13 bp, Artificial Sequence
  Oligonucleotide for detection of SNP TSC0059898
rtcttacctaatt

SEQ ID NO: 245327 - DNA, 13 bp, Artificial Sequence
  Oligonucleotide for detection of SNP TSC0059898
gttttatttaatt

SEQ ID NO: 245328 - DNA, 13 bp, Artificial Sequence
  Oligonucleotide for detection of SNP TSC0059898
aattaaataaaac

SEQ ID NO: 245329 - DNA, 13 bp, Artificial Sequence
  Oligonucleotide for detection of SNP TSC0059899
aatagggttttta

SEQ ID NO: 245330 - DNA, 13 bp, Artificial Sequence
  Oligonucleotide for detection of SNP TSC0059899
taaaaaccctatt

SEQ ID NO: 245331 - DNA, 13 bp, Artificial Sequence
  Oligonucleotide for detection of SNP TSC0059899
aataggattttta

SEQ ID NO: 245332 - DNA, 13 bp, Artificial Sequence
  Oligonucleotide for detection of SNP TSC0059899
taaaaatcctatt

SEQ ID NO: 245333 - DNA, 13 bp, Artificial Sequence
  Oligonucleotide for detection of SNP TSC0059901
ttttgagggttta

SEQ ID NO: 245334 - DNA, 13 bp, Artificial Sequence
  Oligonucleotide for detection of SNP TSC0059901
taaaccctcaaaa

SEQ ID NO: 245335 - DNA, 13 bp, Artificial Sequence
  Oligonucleotide for detection of SNP TSC0059901
ttttgaaggttta

SEQ ID NO: 245336 - DNA, 13 bp, Artificial Sequence
  Oligonucleotide for detection of SNP TSC0059901
taaaccttcaaaa

SEQ ID NO: 245337 - DNA, 13 bp, Artificial Sequence
  Oligonucleotide for detection of SNP TSC0059902
ttaggaagtttty

SEQ ID NO: 245338 - DNA, 13 bp, Artificial Sequence
  Oligonucleotide for detection of SNP TSC0059902
raaaacttcctaa

SEQ ID NO: 245339 - DNA, 13 bp, Artificial Sequence
  Oligonucleotide for detection of SNP TSC0059902
ttaggaggtttty

SEQ ID NO: 245340 - DNA, 13 bp, Artificial Sequence
  Oligonucleotide for detection of SNP TSC0059902
raaaacctcctaa

SEQ ID NO: 245341 - DNA, 13 bp, Artificial Sequence
  Oligonucleotide for detection of SNP TSC0059903
aatattattatgg

SEQ ID NO: 245342 - DNA, 13 bp, Artificial Sequence
  Oligonucleotide for detection of SNP TSC0059903
ccataataatatt

SEQ ID NO: 245343 - DNA, 13 bp, Artificial Sequence
  Oligonucleotide for detection of SNP TSC0059903
aatatttttatgg

SEQ ID NO: 245344 - DNA, 13 bp, Artificial Sequence
  Oligonucleotide for detection of SNP TSC0059903
ccataaaaatatt

SEQ ID NO: 245345 - DNA, 13 bp, Artificial Sequence
  Oligonucleotide for detection of SNP TSC0059903
ttataataatgtt

SEQ ID NO: 245346 - DNA, 13 bp, Artificial Sequence
  Oligonucleotide for detection of SNP TSC0059903
aacattattataa

SEQ ID NO: 245347 - DNA, 13 bp, Artificial Sequence
  Oligonucleotide for detection of SNP TSC0059903
ttataaaaatgtt

SEQ ID NO: 245348 - DNA, 13 bp, Artificial Sequence
  Oligonucleotide for detection of SNP TSC0059903
aacatttttataa

SEQ ID NO: 245349 - DNA, 13 bp, Artificial Sequence
  Oligonucleotide for detection of SNP TSC0059904
gatagtagtgatt

SEQ ID NO: 245350 - DNA, 13 bp, Artificial Sequence
  Oligonucleotide for detection of SNP TSC0059904
aatcactactatc

SEQ ID NO: 245351 - DNA, 13 bp, Artificial Sequence
  Oligonucleotide for detection of SNP TSC0059904
gatagtggtgatt

SEQ ID NO: 245352 - DNA, 13 bp, Artificial Sequence
  Oligonucleotide for detection of SNP TSC0059904
aatcaccactatc

SEQ ID NO: 245353 - DNA, 13 bp, Artificial Sequence
  Oligonucleotide for detection of SNP TSC0059904
gatagcggtgatt

SEQ ID NO: 245354 - DNA, 13 bp, Artificial Sequence
  Oligonucleotide for detection of SNP TSC0059904
aatcaccgctatc

SEQ ID NO: 245355 - DNA, 13 bp, Artificial Sequence
  Oligonucleotide for detection of SNP TSC0059904
aattattgttgty

SEQ ID NO: 245356 - DNA, 13 bp, Artificial Sequence
  Oligonucleotide for detection of SNP TSC0059904
racaacaataatt

SEQ ID NO: 245357 - DNA, 13 bp, Artificial Sequence
  Oligonucleotide for detection of SNP TSC0059904
aattatcgttgty

SEQ ID NO: 245358 - DNA, 13 bp, Artificial Sequence
  Oligonucleotide for detection of SNP TSC0059904
racaacgataatt

SEQ ID NO: 245359 - DNA, 13 bp, Artificial Sequence
  Oligonucleotide for detection of SNP TSC0059906
atttgtataagta

SEQ ID NO: 245360 - DNA, 13 bp, Artificial Sequence
  Oligonucleotide for detection of SNP TSC0059906
tacttatacaaat

SEQ ID NO: 245361 - DNA, 13 bp, Artificial Sequence
  Oligonucleotide for detection of SNP TSC0059906
atttgtttaagta

SEQ ID NO: 245362 - DNA, 13 bp, Artificial Sequence
  Oligonucleotide for detection of SNP TSC0059906
tacttaaacaaat

SEQ ID NO: 245363 - DNA, 13 bp, Artificial Sequence
  Oligonucleotide for detection of SNP TSC0059909
taaaaagttttat

SEQ ID NO: 245364 - DNA, 13 bp, Artificial Sequence
  Oligonucleotide for detection of SNP TSC0059909
ataaaacttttta

SEQ ID NO: 245365 - DNA, 13 bp, Artificial Sequence
  Oligonucleotide for detection of SNP TSC0059910
ttagtaataggty

SEQ ID NO: 245366 - DNA, 13 bp, Artificial Sequence
  Oligonucleotide for detection of SNP TSC0059910
racctattactaa

SEQ ID NO: 245367 - DNA, 13 bp, Artificial Sequence
  Oligonucleotide for detection of SNP TSC0059910
ttagtattaggty

SEQ ID NO: 245368 - DNA, 13 bp, Artificial Sequence
  Oligonucleotide for detection of SNP TSC0059910
racctaatactaa

SEQ ID NO: 245369 - DNA, 13 bp, Artificial Sequence
  Oligonucleotide for detection of SNP TSC0059910
ggtttattattaa

SEQ ID NO: 245370 - DNA, 13 bp, Artificial Sequence
  Oligonucleotide for detection of SNP TSC0059910
ttaataataaacc

SEQ ID NO: 245371 - DNA, 13 bp, Artificial Sequence
  Oligonucleotide for detection of SNP TSC0059910
ggtttaatattaa

SEQ ID NO: 245372 - DNA, 13 bp, Artificial Sequence
  Oligonucleotide for detection of SNP TSC0059910
ttaatattaaacc

SEQ ID NO: 245373 - DNA, 13 bp, Artificial Sequence
  Oligonucleotide for detection of SNP TSC0059913
ttaggtataagta

SEQ ID NO: 245374 - DNA, 13 bp, Artificial Sequence
  Oligonucleotide for detection of SNP TSC0059913
tacttatacctaa

SEQ ID NO: 245375 - DNA, 13 bp, Artificial Sequence
  Oligonucleotide for detection of SNP TSC0059913
ttaggtgtaagta

SEQ ID NO: 245376 - DNA, 13 bp, Artificial Sequence
  Oligonucleotide for detection of SNP TSC0059913
tacttacacctaa

SEQ ID NO: 245377 - DNA, 13 bp, Artificial Sequence
  Oligonucleotide for detection of SNP TSC0059913
ttaggcgtaagta

SEQ ID NO: 245378 - DNA, 13 bp, Artificial Sequence
  Oligonucleotide for detection of SNP TSC0059913
tacttacgcctaa

SEQ ID NO: 245379 - DNA, 13 bp, Artificial Sequence
  Oligonucleotide for detection of SNP TSC0059913
tgtttatgtttgg

SEQ ID NO: 245380 - DNA, 13 bp, Artificial Sequence
  Oligonucleotide for detection of SNP TSC0059913
ccaaacataaaca

SEQ ID NO: 245381 - DNA, 13 bp, Artificial Sequence
  Oligonucleotide for detection of SNP TSC0059913
tgtttacgtttgg

SEQ ID NO: 245382 - DNA, 13 bp, Artificial Sequence
  Oligonucleotide for detection of SNP TSC0059913
ccaaacgtaaaca

SEQ ID NO: 245383 - DNA, 13 bp, Artificial Sequence
  Oligonucleotide for detection of SNP TSC0059916
tgaaaatgaagtt

SEQ ID NO: 245384 - DNA, 13 bp, Artificial Sequence
  Oligonucleotide for detection of SNP TSC0059916
aacttcattttca

SEQ ID NO: 245385 - DNA, 13 bp, Artificial Sequence
  Oligonucleotide for detection of SNP TSC0059916
tgaaaaggaagtt

SEQ ID NO: 245386 - DNA, 13 bp, Artificial Sequence
  Oligonucleotide for detection of SNP TSC0059916
aacttccttttca

SEQ ID NO: 245387 - DNA, 13 bp, Artificial Sequence
  Oligonucleotide for detection of SNP TSC0059916
tgaaaacgaagtt

SEQ ID NO: 245388 - DNA, 13 bp, Artificial Sequence
  Oligonucleotide for detection of SNP TSC0059916
aacttcgttttca

SEQ ID NO: 245389 - DNA, 13 bp, Artificial Sequence
  Oligonucleotide for detection of SNP TSC0059916
agtttttttttta

SEQ ID NO: 245390 - DNA, 13 bp, Artificial Sequence
  Oligonucleotide for detection of SNP TSC0059916
taaaaaaaaaact

SEQ ID NO: 245391 - DNA, 13 bp, Artificial Sequence
  Oligonucleotide for detection of SNP TSC0059917
tggttttggttty

SEQ ID NO: 245392 - DNA, 13 bp, Artificial Sequence
  Oligonucleotide for detection of SNP TSC0059917
raaaccaaaacca

SEQ ID NO: 245393 - DNA, 13 bp, Artificial Sequence
  Oligonucleotide for detection of SNP TSC0059917
cggttttggttty

SEQ ID NO: 245394 - DNA, 13 bp, Artificial Sequence
  Oligonucleotide for detection of SNP TSC0059917
raaaccaaaaccg

SEQ ID NO: 245395 - DNA, 13 bp, Artificial Sequence
  Oligonucleotide for detection of SNP TSC0059917
tggtttcggttty

SEQ ID NO: 245396 - DNA, 13 bp, Artificial Sequence
  Oligonucleotide for detection of SNP TSC0059917
raaaccgaaacca

SEQ ID NO: 245397 - DNA, 13 bp, Artificial Sequence
  Oligonucleotide for detection of SNP TSC0059917
cggtttcggttty

SEQ ID NO: 245398 - DNA, 13 bp, Artificial Sequence
  Oligonucleotide for detection of SNP TSC0059917
raaaccgaaaccg

SEQ ID NO: 245399 - DNA, 13 bp, Artificial Sequence
  Oligonucleotide for detection of SNP TSC0059917
gaagttggggttg

SEQ ID NO: 245400 - DNA, 13 bp, Artificial Sequence
  Oligonucleotide for detection of SNP TSC0059917
caaccccaacttc

SEQ ID NO: 245401 - DNA, 13 bp, Artificial Sequence
  Oligonucleotide for detection of SNP TSC0059917
gaagttagggttg

SEQ ID NO: 245402 - DNA, 13 bp, Artificial Sequence
  Oligonucleotide for detection of SNP TSC0059917
caaccctaacttc

SEQ ID NO: 245403 - DNA, 13 bp, Artificial Sequence
  Oligonucleotide for detection of SNP TSC0059917
gaagtcggggttg

SEQ ID NO: 245404 - DNA, 13 bp, Artificial Sequence
  Oligonucleotide for detection of SNP TSC0059917
caaccccgacttc

SEQ ID NO: 245405 - DNA, 13 bp, Artificial Sequence
  Oligonucleotide for detection of SNP TSC0059917
gaagttagggtcg

SEQ ID NO: 245406 - DNA, 13 bp, Artificial Sequence
  Oligonucleotide for detection of SNP TSC0059917
cgaccctaacttc

SEQ ID NO: 245407 - DNA, 13 bp, Artificial Sequence
  Oligonucleotide for detection of SNP TSC0059917
gaagttggggtcg

SEQ ID NO: 245408 - DNA, 13 bp, Artificial Sequence
  Oligonucleotide for detection of SNP TSC0059917
cgaccccaacttc

SEQ ID NO: 245409 - DNA, 13 bp, Artificial Sequence
  Oligonucleotide for detection of SNP TSC0059917
gaagtcggggtcg

SEQ ID NO: 245410 - DNA, 13 bp, Artificial Sequence
  Oligonucleotide for detection of SNP TSC0059917
cgaccccgacttc

SEQ ID NO: 245411 - DNA, 13 bp, Artificial Sequence
  Oligonucleotide for detection of SNP TSC0059919
gggggtgagtgtg

SEQ ID NO: 245412 - DNA, 13 bp, Artificial Sequence
  Oligonucleotide for detection of SNP TSC0059919
cacactcaccccc

SEQ ID NO: 245413 - DNA, 13 bp, Artificial Sequence
  Oligonucleotide for detection of SNP TSC0059919
gggggtaagtgtg

SEQ ID NO: 245414 - DNA, 13 bp, Artificial Sequence
  Oligonucleotide for detection of SNP TSC0059919
cacacttaccccc

SEQ ID NO: 245415 - DNA, 13 bp, Artificial Sequence
  Oligonucleotide for detection of SNP TSC0059919
gggggcgagtgtg

SEQ ID NO: 245416 - DNA, 13 bp, Artificial Sequence
  Oligonucleotide for detection of SNP TSC0059919
cacactcgccccc

SEQ ID NO: 245417 - DNA, 13 bp, Artificial Sequence
  Oligonucleotide for detection of SNP TSC0059920
aaatatatagata

SEQ ID NO: 245418 - DNA, 13 bp, Artificial Sequence
  Oligonucleotide for detection of SNP TSC0059920
tatctatatattt

SEQ ID NO: 245419 - DNA, 13 bp, Artificial Sequence
  Oligonucleotide for detection of SNP TSC0059920
aaatatttagata

SEQ ID NO: 245420 - DNA, 13 bp, Artificial Sequence
  Oligonucleotide for detection of SNP TSC0059920
tatctaaatattt

SEQ ID NO: 245421 - DNA, 13 bp, Artificial Sequence
  Oligonucleotide for detection of SNP TSC0059920
tgtttatgtattt

SEQ ID NO: 245422 - DNA, 13 bp, Artificial Sequence
  Oligonucleotide for detection of SNP TSC0059920
aaatacataaaca

SEQ ID NO: 245423 - DNA, 13 bp, Artificial Sequence
  Oligonucleotide for detection of SNP TSC0059920
tgtttaggtattt

SEQ ID NO: 245424 - DNA, 13 bp, Artificial Sequence
  Oligonucleotide for detection of SNP TSC0059920
aaatacctaaaca

SEQ ID NO: 245425 - DNA, 13 bp, Artificial Sequence
  Oligonucleotide for detection of SNP TSC0059921
agaaagattttaa

SEQ ID NO: 245426 - DNA, 13 bp, Artificial Sequence
  Oligonucleotide for detection of SNP TSC0059921
ttaaaatctttct

SEQ ID NO: 245427 - DNA, 13 bp, Artificial Sequence
  Oligonucleotide for detection of SNP TSC0059921
agaaagtttttaa

SEQ ID NO: 245428 - DNA, 13 bp, Artificial Sequence
  Oligonucleotide for detection of SNP TSC0059921
ttaaaaactttct

SEQ ID NO: 245429 - DNA, 13 bp, Artificial Sequence
  Oligonucleotide for detection of SNP TSC0059921
ttgagattttttt

SEQ ID NO: 245430 - DNA, 13 bp, Artificial Sequence
  Oligonucleotide for detection of SNP TSC0059921
aaaaaaatctcaa

SEQ ID NO: 245431 - DNA, 13 bp, Artificial Sequence
  Oligonucleotide for detection of SNP TSC0059921
ttgagaatttttt

SEQ ID NO: 245432 - DNA, 13 bp, Artificial Sequence
  Oligonucleotide for detection of SNP TSC0059921
aaaaaattctcaa

SEQ ID NO: 245433 - DNA, 13 bp, Artificial Sequence
  Oligonucleotide for detection of SNP TSC0059922
aggaggttaaagy

SEQ ID NO: 245434 - DNA, 13 bp, Artificial Sequence
  Oligonucleotide for detection of SNP TSC0059922
rctttaacctcct

SEQ ID NO: 245435 - DNA, 13 bp, Artificial Sequence
  Oligonucleotide for detection of SNP TSC0059922
aggaggataaagy

SEQ ID NO: 245436 - DNA, 13 bp, Artificial Sequence
  Oligonucleotide for detection of SNP TSC0059922
rctttatcctcct

SEQ ID NO: 245437 - DNA, 13 bp, Artificial Sequence
  Oligonucleotide for detection of SNP TSC0059925
taaggtggggttt

SEQ ID NO: 245438 - DNA, 13 bp, Artificial Sequence
  Oligonucleotide for detection of SNP TSC0059925
aaaccccacctta

SEQ ID NO: 245439 - DNA, 13 bp, Artificial Sequence
  Oligonucleotide for detection of SNP TSC0059925
taaggcggggttt

SEQ ID NO: 245440 - DNA, 13 bp, Artificial Sequence
  Oligonucleotide for detection of SNP TSC0059925
aaaccccgcctta

SEQ ID NO: 245441 - DNA, 13 bp, Artificial Sequence
  Oligonucleotide for detection of SNP TSC0059926
atttggatatgtt

SEQ ID NO: 245442 - DNA, 13 bp, Artificial Sequence
  Oligonucleotide for detection of SNP TSC0059926
aacatatccaaat

SEQ ID NO: 245443 - DNA, 13 bp, Artificial Sequence
  Oligonucleotide for detection of SNP TSC0059926
atttgggtatgtt

SEQ ID NO: 245444 - DNA, 13 bp, Artificial Sequence
  Oligonucleotide for detection of SNP TSC0059926
aacatacccaaat

SEQ ID NO: 245445 - DNA, 13 bp, Artificial Sequence
  Oligonucleotide for detection of SNP TSC0059927
atttatatgagay

SEQ ID NO: 245446 - DNA, 13 bp, Artificial Sequence
  Oligonucleotide for detection of SNP TSC0059927
rtctcatataaat

SEQ ID NO: 245447 - DNA, 13 bp, Artificial Sequence
  Oligonucleotide for detection of SNP TSC0059927
atttatttgagay

SEQ ID NO: 245448 - DNA, 13 bp, Artificial Sequence
  Oligonucleotide for detection of SNP TSC0059927
rtctcaaataaat

SEQ ID NO: 245449 - DNA, 13 bp, Artificial Sequence
  Oligonucleotide for detection of SNP TSC0059928
aataatggtttay

SEQ ID NO: 245450 - DNA, 13 bp, Artificial Sequence
  Oligonucleotide for detection of SNP TSC0059928
rtaaaccattatt

SEQ ID NO: 245451 - DNA, 13 bp, Artificial Sequence
  Oligonucleotide for detection of SNP TSC0059928
aataatagtttay

SEQ ID NO: 245452 - DNA, 13 bp, Artificial Sequence
  Oligonucleotide for detection of SNP TSC0059928
rtaaactattatt

SEQ ID NO: 245453 - DNA, 13 bp, Artificial Sequence
  Oligonucleotide for detection of SNP TSC0059929
ttatgaaataggg

SEQ ID NO: 245454 - DNA, 13 bp, Artificial Sequence
  Oligonucleotide for detection of SNP TSC0059929
ccctatttcataa

SEQ ID NO: 245455 - DNA, 13 bp, Artificial Sequence
  Oligonucleotide for detection of SNP TSC0059929
ttatgatataggg

SEQ ID NO: 245456 - DNA, 13 bp, Artificial Sequence
  Oligonucleotide for detection of SNP TSC0059929
ccctatatcataa

SEQ ID NO: 245457 - DNA, 13 bp, Artificial Sequence
  Oligonucleotide for detection of SNP TSC0059929
ttttgttttataa

SEQ ID NO: 245458 - DNA, 13 bp, Artificial Sequence
  Oligonucleotide for detection of SNP TSC0059929
ttataaaacaaaa

SEQ ID NO: 245459 - DNA, 13 bp, Artificial Sequence
  Oligonucleotide for detection of SNP TSC0059932
attattaaattgy

SEQ ID NO: 245460 - DNA, 13 bp, Artificial Sequence
  Oligonucleotide for detection of SNP TSC0059932
rcaatttaataat

SEQ ID NO: 245461 - DNA, 13 bp, Artificial Sequence
  Oligonucleotide for detection of SNP TSC0059932
attattgaattgy

SEQ ID NO: 245462 - DNA, 13 bp, Artificial Sequence
  Oligonucleotide for detection of SNP TSC0059932
rcaattcaataat

SEQ ID NO: 245463 - DNA, 13 bp, Artificial Sequence
  Oligonucleotide for detection of SNP TSC0059932
attatcgaattgy

SEQ ID NO: 245464 - DNA, 13 bp, Artificial Sequence
  Oligonucleotide for detection of SNP TSC0059932
rcaattcgataat

SEQ ID NO: 245465 - DNA, 13 bp, Artificial Sequence
  Oligonucleotide for detection of SNP TSC0059932
gtaatttgatagt

SEQ ID NO: 245466 - DNA, 13 bp, Artificial Sequence
  Oligonucleotide for detection of SNP TSC0059932
actatcaaattac

SEQ ID NO: 245467 - DNA, 13 bp, Artificial Sequence
  Oligonucleotide for detection of SNP TSC0059932
gtaattcgatagt

SEQ ID NO: 245468 - DNA, 13 bp, Artificial Sequence
  Oligonucleotide for detection of SNP TSC0059932
actatcgaattac

SEQ ID NO: 245469 - DNA, 13 bp, Artificial Sequence
  Oligonucleotide for detection of SNP TSC0059933
ttgattgttagat

SEQ ID NO: 245470 - DNA, 13 bp, Artificial Sequence
  Oligonucleotide for detection of SNP TSC0059933
atctaacaatcaa

SEQ ID NO: 245471 - DNA, 13 bp, Artificial Sequence
  Oligonucleotide for detection of SNP TSC0059933
ttgattattagat

SEQ ID NO: 245472 - DNA, 13 bp, Artificial Sequence
  Oligonucleotide for detection of SNP TSC0059933
atctaataatcaa

SEQ ID NO: 245473 - DNA, 13 bp, Artificial Sequence
  Oligonucleotide for detection of SNP TSC0059935
ttgtagttatttt

SEQ ID NO: 245474 - DNA, 13 bp, Artificial Sequence
  Oligonucleotide for detection of SNP TSC0059935
aaaataactacaa

SEQ ID NO: 245475 - DNA, 13 bp, Artificial Sequence
  Oligonucleotide for detection of SNP TSC0059935
ttgtaggtatttt

SEQ ID NO: 245476 - DNA, 13 bp, Artificial Sequence
  Oligonucleotide for detection of SNP TSC0059935
aaaatacctacaa

SEQ ID NO: 245477 - DNA, 13 bp, Artificial Sequence
  Oligonucleotide for detection of SNP TSC0059935
aggatggttataa

SEQ ID NO: 245478 - DNA, 13 bp, Artificial Sequence
  Oligonucleotide for detection of SNP TSC0059935
ttataaccatcct

SEQ ID NO: 245479 - DNA, 13 bp, Artificial Sequence
  Oligonucleotide for detection of SNP TSC0059935
aggatgtttataa

SEQ ID NO: 245480 - DNA, 13 bp, Artificial Sequence
  Oligonucleotide for detection of SNP TSC0059935
ttataaacatcct

SEQ ID NO: 245481 - DNA, 13 bp, Artificial Sequence
  Oligonucleotide for detection of SNP TSC0059936
tgaattggatggt

SEQ ID NO: 245482 - DNA, 13 bp, Artificial Sequence
  Oligonucleotide for detection of SNP TSC0059936
accatccaattca

SEQ ID NO: 245483 - DNA, 13 bp, Artificial Sequence
  Oligonucleotide for detection of SNP TSC0059936
tgaattagatggt

SEQ ID NO: 245484 - DNA, 13 bp, Artificial Sequence
  Oligonucleotide for detection of SNP TSC0059936
accatctaattca

SEQ ID NO: 245485 - DNA, 13 bp, Artificial Sequence
  Oligonucleotide for detection of SNP TSC0059938
tggaggtaagatt

SEQ ID NO: 245486 - DNA, 13 bp, Artificial Sequence
  Oligonucleotide for detection of SNP TSC0059938
aatcttacctcca

SEQ ID NO: 245487 - DNA, 13 bp, Artificial Sequence
  Oligonucleotide for detection of SNP TSC0059938
tggagggaagatt

SEQ ID NO: 245488 - DNA, 13 bp, Artificial Sequence
  Oligonucleotide for detection of SNP TSC0059938
aatcttccctcca

SEQ ID NO: 245489 - DNA, 13 bp, Artificial Sequence
  Oligonucleotide for detection of SNP TSC0059938
cggaggtaagatt

SEQ ID NO: 245490 - DNA, 13 bp, Artificial Sequence
  Oligonucleotide for detection of SNP TSC0059938
aatcttacctccg

SEQ ID NO: 245491 - DNA, 13 bp, Artificial Sequence
  Oligonucleotide for detection of SNP TSC0059938
cggagggaagatt

SEQ ID NO: 245492 - DNA, 13 bp, Artificial Sequence
  Oligonucleotide for detection of SNP TSC0059938
aatcttccctccg

SEQ ID NO: 245493 - DNA, 13 bp, Artificial Sequence
  Oligonucleotide for detection of SNP TSC0059938
agttttgttttcg

SEQ ID NO: 245494 - DNA, 13 bp, Artificial Sequence
  Oligonucleotide for detection of SNP TSC0059938
cgaaaacaaaact

SEQ ID NO: 245495 - DNA, 13 bp, Artificial Sequence
  Oligonucleotide for detection of SNP TSC0059938
agtttttttttcg

SEQ ID NO: 245496 - DNA, 13 bp, Artificial Sequence
  Oligonucleotide for detection of SNP TSC0059938
cgaaaaaaaaact

SEQ ID NO: 245497 - DNA, 13 bp, Artificial Sequence
  Oligonucleotide for detection of SNP TSC0059939
gtaataatttgty

SEQ ID NO: 245498 - DNA, 13 bp, Artificial Sequence
  Oligonucleotide for detection of SNP TSC0059939
racaaattattac

SEQ ID NO: 245499 - DNA, 13 bp, Artificial Sequence
  Oligonucleotide for detection of SNP TSC0059939
gtaatagtttgty

SEQ ID NO: 245500 - DNA, 13 bp, Artificial Sequence
  Oligonucleotide for detection of SNP TSC0059939
racaaactattac

SEQ ID NO: 245501 - DNA, 13 bp, Artificial Sequence
  Oligonucleotide for detection of SNP TSC0059940
tttttatgtaaat

SEQ ID NO: 245502 - DNA, 13 bp, Artificial Sequence
  Oligonucleotide for detection of SNP TSC0059940
atttacataaaaa

SEQ ID NO: 245503 - DNA, 13 bp, Artificial Sequence
  Oligonucleotide for detection of SNP TSC0059940
atttatgtagagg

SEQ ID NO: 245504 - DNA, 13 bp, Artificial Sequence
  Oligonucleotide for detection of SNP TSC0059940
cctctacataaat

SEQ ID NO: 245505 - DNA, 13 bp, Artificial Sequence
  Oligonucleotide for detection of SNP TSC0059940
atttatatagagg

SEQ ID NO: 245506 - DNA, 13 bp, Artificial Sequence
  Oligonucleotide for detection of SNP TSC0059940
cctctatataaat

SEQ ID NO: 245507 - DNA, 13 bp, Artificial Sequence
  Oligonucleotide for detection of SNP TSC0059940
atttacgtagagg

SEQ ID NO: 245508 - DNA, 13 bp, Artificial Sequence
  Oligonucleotide for detection of SNP TSC0059940
cctctacgtaaat

SEQ ID NO: 245509 - DNA, 13 bp, Artificial Sequence
  Oligonucleotide for detection of SNP TSC0059941
gtttgtatgtagt

SEQ ID NO: 245510 - DNA, 13 bp, Artificial Sequence
  Oligonucleotide for detection of SNP TSC0059941
actacatacaaac

SEQ ID NO: 245511 - DNA, 13 bp, Artificial Sequence
  Oligonucleotide for detection of SNP TSC0059941
gtttgtgtgtagt

SEQ ID NO: 245512 - DNA, 13 bp, Artificial Sequence
  Oligonucleotide for detection of SNP TSC0059941
actacacacaaac

SEQ ID NO: 245513 - DNA, 13 bp, Artificial Sequence
  Oligonucleotide for detection of SNP TSC0059943
gggatttgtagty

SEQ ID NO: 245514 - DNA, 13 bp, Artificial Sequence
  Oligonucleotide for detection of SNP TSC0059943
ractacaaatccc

SEQ ID NO: 245515 - DNA, 13 bp, Artificial Sequence
  Oligonucleotide for detection of SNP TSC0059943
gggattcgtagty

SEQ ID NO: 245516 - DNA, 13 bp, Artificial Sequence
  Oligonucleotide for detection of SNP TSC0059943
ractacgaatccc

SEQ ID NO: 245517 - DNA, 13 bp, Artificial Sequence
  Oligonucleotide for detection of SNP TSC0059943
gattgtgggttty

SEQ ID NO: 245518 - DNA, 13 bp, Artificial Sequence
  Oligonucleotide for detection of SNP TSC0059943
raaacccacaatc

SEQ ID NO: 245519 - DNA, 13 bp, Artificial Sequence
  Oligonucleotide for detection of SNP TSC0059943
gattgtaggttty

SEQ ID NO: 245520 - DNA, 13 bp, Artificial Sequence
  Oligonucleotide for detection of SNP TSC0059943
raaacctacaatc

SEQ ID NO: 245521 - DNA, 13 bp, Artificial Sequence
  Oligonucleotide for detection of SNP TSC0059943
gattgcgggttty

SEQ ID NO: 245522 - DNA, 13 bp, Artificial Sequence
  Oligonucleotide for detection of SNP TSC0059943
raaacccgcaatc

SEQ ID NO: 245523 - DNA, 13 bp, Artificial Sequence
  Oligonucleotide for detection of SNP TSC0059944
ataaagatatata

SEQ ID NO: 245524 - DNA, 13 bp, Artificial Sequence
  Oligonucleotide for detection of SNP TSC0059944
tatatatctttat

SEQ ID NO: 245525 - DNA, 13 bp, Artificial Sequence
  Oligonucleotide for detection of SNP TSC0059944
ataaagttatata

SEQ ID NO: 245526 - DNA, 13 bp, Artificial Sequence
  Oligonucleotide for detection of SNP TSC0059944
tatataactttat

SEQ ID NO: 245527 - DNA, 13 bp, Artificial Sequence
  Oligonucleotide for detection of SNP TSC0059944
tgtatgtttttat

SEQ ID NO: 245528 - DNA, 13 bp, Artificial Sequence
  Oligonucleotide for detection of SNP TSC0059944
ataaaaacataca

SEQ ID NO: 245529 - DNA, 13 bp, Artificial Sequence
  Oligonucleotide for detection of SNP TSC0059944
tgtatggttttat

SEQ ID NO: 245530 - DNA, 13 bp, Artificial Sequence
  Oligonucleotide for detection of SNP TSC0059944
ataaaaccataca

SEQ ID NO: 245531 - DNA, 13 bp, Artificial Sequence
  Oligonucleotide for detection of SNP TSC0059945
ataatgtggaaag

SEQ ID NO: 245532 - DNA, 13 bp, Artificial Sequence
  Oligonucleotide for detection of SNP TSC0059945
ctttccacattat

SEQ ID NO: 245533 - DNA, 13 bp, Artificial Sequence
  Oligonucleotide for detection of SNP TSC0059945
ataatggggaaag

SEQ ID NO: 245534 - DNA, 13 bp, Artificial Sequence
  Oligonucleotide for detection of SNP TSC0059945
ctttccccattat

SEQ ID NO: 245535 - DNA, 13 bp, Artificial Sequence
  Oligonucleotide for detection of SNP TSC0059948
taaatagaaataa

SEQ ID NO: 245536 - DNA, 13 bp, Artificial Sequence
  Oligonucleotide for detection of SNP TSC0059948
ttatttctattta

SEQ ID NO: 245537 - DNA, 13 bp, Artificial Sequence
  Oligonucleotide for detection of SNP TSC0059950
ttaggagttcgag

SEQ ID NO: 245538 - DNA, 13 bp, Artificial Sequence
  Oligonucleotide for detection of SNP TSC0059950
ctcgaactcctaa

SEQ ID NO: 245539 - DNA, 13 bp, Artificial Sequence
  Oligonucleotide for detection of SNP TSC0059950
ttaggaattcgag

SEQ ID NO: 245540 - DNA, 13 bp, Artificial Sequence
  Oligonucleotide for detection of SNP TSC0059950
ctcgaattcctaa

SEQ ID NO: 245541 - DNA, 13 bp, Artificial Sequence
  Oligonucleotide for detection of SNP TSC0059951
ttaaatttagtag

SEQ ID NO: 245542 - DNA, 13 bp, Artificial Sequence
  Oligonucleotide for detection of SNP TSC0059951
ctactaaatttaa

SEQ ID NO: 245543 - DNA, 13 bp, Artificial Sequence
  Oligonucleotide for detection of SNP TSC0059951
ttaaatgtagtag

SEQ ID NO: 245544 - DNA, 13 bp, Artificial Sequence
  Oligonucleotide for detection of SNP TSC0059951
ctactacatttaa

SEQ ID NO: 245545 - DNA, 13 bp, Artificial Sequence
  Oligonucleotide for detection of SNP TSC0059951
ttgttgtatttga

SEQ ID NO: 245546 - DNA, 13 bp, Artificial Sequence
  Oligonucleotide for detection of SNP TSC0059951
tcaaatacaacaa

SEQ ID NO: 245547 - DNA, 13 bp, Artificial Sequence
  Oligonucleotide for detection of SNP TSC0059952
ggtttaaaaaaaa

SEQ ID NO: 245548 - DNA, 13 bp, Artificial Sequence
  Oligonucleotide for detection of SNP TSC0059952
ttttttttaaacc

SEQ ID NO: 245549 - DNA, 13 bp, Artificial Sequence
  Oligonucleotide for detection of SNP TSC0059952
ggtttagaaaaaa

SEQ ID NO: 245550 - DNA, 13 bp, Artificial Sequence
  Oligonucleotide for detection of SNP TSC0059952
ttttttctaaacc

SEQ ID NO: 245551 - DNA, 13 bp, Artificial Sequence
  Oligonucleotide for detection of SNP TSC0059957
aataagtgatttt

SEQ ID NO: 245552 - DNA, 13 bp, Artificial Sequence
  Oligonucleotide for detection of SNP TSC0059957
aaaatcacttatt

SEQ ID NO: 245553 - DNA, 13 bp, Artificial Sequence
  Oligonucleotide for detection of SNP TSC0059957
aataagcgatttt

SEQ ID NO: 245554 - DNA, 13 bp, Artificial Sequence
  Oligonucleotide for detection of SNP TSC0059957
aaaatcgcttatt

SEQ ID NO: 245555 - DNA, 13 bp, Artificial Sequence
  Oligonucleotide for detection of SNP TSC0059958
aattttgtgaaaa

SEQ ID NO: 245556 - DNA, 13 bp, Artificial Sequence
  Oligonucleotide for detection of SNP TSC0059958
ttttcacaaaatt

SEQ ID NO: 245557 - DNA, 13 bp, Artificial Sequence
  Oligonucleotide for detection of SNP TSC0059958
aattttatgaaaa

SEQ ID NO: 245558 - DNA, 13 bp, Artificial Sequence
  Oligonucleotide for detection of SNP TSC0059958
ttttcataaaatt

SEQ ID NO: 245559 - DNA, 13 bp, Artificial Sequence
  Oligonucleotide for detection of SNP TSC0059959
aatgtatagtagg

SEQ ID NO: 245560 - DNA, 13 bp, Artificial Sequence
  Oligonucleotide for detection of SNP TSC0059959
cctactatacatt

SEQ ID NO: 245561 - DNA, 13 bp, Artificial Sequence
  Oligonucleotide for detection of SNP TSC0059959
aatgtagagtagg

SEQ ID NO: 245562 - DNA, 13 bp, Artificial Sequence
  Oligonucleotide for detection of SNP TSC0059959
cctactctacatt

SEQ ID NO: 245563 - DNA, 13 bp, Artificial Sequence
  Oligonucleotide for detection of SNP TSC0059959
tttgttgtgtatt

SEQ ID NO: 245564 - DNA, 13 bp, Artificial Sequence
  Oligonucleotide for detection of SNP TSC0059959
aatacacaacaaa

SEQ ID NO: 245565 - DNA, 13 bp, Artificial Sequence
  Oligonucleotide for detection of SNP TSC0059959
tttgttttgtatt

SEQ ID NO: 245566 - DNA, 13 bp, Artificial Sequence
  Oligonucleotide for detection of SNP TSC0059959
aatacaaaacaaa

SEQ ID NO: 245567 - DNA, 13 bp, Artificial Sequence
  Oligonucleotide for detection of SNP TSC0059960
gaaaatttaaatg

SEQ ID NO: 245568 - DNA, 13 bp, Artificial Sequence
  Oligonucleotide for detection of SNP TSC0059960
catttaaattttc

SEQ ID NO: 245569 - DNA, 13 bp, Artificial Sequence
  Oligonucleotide for detection of SNP TSC0059960
gaaaatgtaaatg

SEQ ID NO: 245570 - DNA, 13 bp, Artificial Sequence
  Oligonucleotide for detection of SNP TSC0059960
catttacattttc

SEQ ID NO: 245571 - DNA, 13 bp, Artificial Sequence
  Oligonucleotide for detection of SNP TSC0059960
gaaaacgtaaatg

SEQ ID NO: 245572 - DNA, 13 bp, Artificial Sequence
  Oligonucleotide for detection of SNP TSC0059960
catttacgttttc

SEQ ID NO: 245573 - DNA, 13 bp, Artificial Sequence
  Oligonucleotide for detection of SNP TSC0059960
tatttgagtttty

SEQ ID NO: 245574 - DNA, 13 bp, Artificial Sequence
  Oligonucleotide for detection of SNP TSC0059960
raaaactcaaata

SEQ ID NO: 245575 - DNA, 13 bp, Artificial Sequence
  Oligonucleotide for detection of SNP TSC0059961
agattttttattt

SEQ ID NO: 245576 - DNA, 13 bp, Artificial Sequence
  Oligonucleotide for detection of SNP TSC0059961
aaataaaaaatct

SEQ ID NO: 245577 - DNA, 13 bp, Artificial Sequence
  Oligonucleotide for detection of SNP TSC0059961
agatttgttattt

SEQ ID NO: 245578 - DNA, 13 bp, Artificial Sequence
  Oligonucleotide for detection of SNP TSC0059961
aaataacaaatct

SEQ ID NO: 245579 - DNA, 13 bp, Artificial Sequence
  Oligonucleotide for detection of SNP TSC0059961
agattcgttattt

SEQ ID NO: 245580 - DNA, 13 bp, Artificial Sequence
  Oligonucleotide for detection of SNP TSC0059961
aaataacgaatct

SEQ ID NO: 245581 - DNA, 13 bp, Artificial Sequence
  Oligonucleotide for detection of SNP TSC0059961
aaatgaagagttt

SEQ ID NO: 245582 - DNA, 13 bp, Artificial Sequence
  Oligonucleotide for detection of SNP TSC0059961
aaactcttcattt

SEQ ID NO: 245583 - DNA, 13 bp, Artificial Sequence
  Oligonucleotide for detection of SNP TSC0059961
aaatgatgagttt

SEQ ID NO: 245584 - DNA, 13 bp, Artificial Sequence
  Oligonucleotide for detection of SNP TSC0059961
aaactcatcattt

SEQ ID NO: 245585 - DNA, 13 bp, Artificial Sequence
  Oligonucleotide for detection of SNP TSC0059961
aaatgacgagttt

SEQ ID NO: 245586 - DNA, 13 bp, Artificial Sequence
  Oligonucleotide for detection of SNP TSC0059961
aaactcgtcattt

SEQ ID NO: 245587 - DNA, 13 bp, Artificial Sequence
  Oligonucleotide for detection of SNP TSC0059967
gtatttaggagaa

SEQ ID NO: 245588 - DNA, 13 bp, Artificial Sequence
  Oligonucleotide for detection of SNP TSC0059967
ttctcctaaatac

SEQ ID NO: 245589 - DNA, 13 bp, Artificial Sequence
  Oligonucleotide for detection of SNP TSC0059967
gtatttgggagaa

SEQ ID NO: 245590 - DNA, 13 bp, Artificial Sequence
  Oligonucleotide for detection of SNP TSC0059967
ttctcccaaatac

SEQ ID NO: 245591 - DNA, 13 bp, Artificial Sequence
  Oligonucleotide for detection of SNP TSC0059967
gtattcgggagaa

SEQ ID NO: 245592 - DNA, 13 bp, Artificial Sequence
  Oligonucleotide for detection of SNP TSC0059967
ttctcccgaatac

SEQ ID NO: 245593 - DNA, 13 bp, Artificial Sequence
  Oligonucleotide for detection of SNP TSC0059968
aaggaatttgagg

SEQ ID NO: 245594 - DNA, 13 bp, Artificial Sequence
  Oligonucleotide for detection of SNP TSC0059968
cctcaaattcctt

SEQ ID NO: 245595 - DNA, 13 bp, Artificial Sequence
  Oligonucleotide for detection of SNP TSC0059968
aaggaagttgagg

SEQ ID NO: 245596 - DNA, 13 bp, Artificial Sequence
  Oligonucleotide for detection of SNP TSC0059968
cctcaacttcctt

SEQ ID NO: 245597 - DNA, 13 bp, Artificial Sequence
  Oligonucleotide for detection of SNP TSC0059971
ggagatatatgtg

SEQ ID NO: 245598 - DNA, 13 bp, Artificial Sequence
  Oligonucleotide for detection of SNP TSC0059971
cacatatatctcc

SEQ ID NO: 245599 - DNA, 13 bp, Artificial Sequence
  Oligonucleotide for detection of SNP TSC0059971
ggagatgtatgtg

SEQ ID NO: 245600 - DNA, 13 bp, Artificial Sequence
  Oligonucleotide for detection of SNP TSC0059971
cacatacatctcc

SEQ ID NO: 245601 - DNA, 13 bp, Artificial Sequence
  Oligonucleotide for detection of SNP TSC0059971
ggagacgtatgtg

SEQ ID NO: 245602 - DNA, 13 bp, Artificial Sequence
  Oligonucleotide for detection of SNP TSC0059971
cacatacgtctcc

SEQ ID NO: 245603 - DNA, 13 bp, Artificial Sequence
  Oligonucleotide for detection of SNP TSC0059972
tttagggtattta

SEQ ID NO: 245604 - DNA, 13 bp, Artificial Sequence
  Oligonucleotide for detection of SNP TSC0059972
taaataccctaaa

SEQ ID NO: 245605 - DNA, 13 bp, Artificial Sequence
  Oligonucleotide for detection of SNP TSC0059972
tttaggatattta

SEQ ID NO: 245606 - DNA, 13 bp, Artificial Sequence
  Oligonucleotide for detection of SNP TSC0059972
taaatatcctaaa

SEQ ID NO: 245607 - DNA, 13 bp, Artificial Sequence
  Oligonucleotide for detection of SNP TSC0059973
gagaatatatttt

SEQ ID NO: 245608 - DNA, 13 bp, Artificial Sequence
  Oligonucleotide for detection of SNP TSC0059973
aaaatatattctc

SEQ ID NO: 245609 - DNA, 13 bp, Artificial Sequence
  Oligonucleotide for detection of SNP TSC0059973
gagaatttatttt

SEQ ID NO: 245610 - DNA, 13 bp, Artificial Sequence
  Oligonucleotide for detection of SNP TSC0059973
aaaataaattctc

SEQ ID NO: 245611 - DNA, 13 bp, Artificial Sequence
  Oligonucleotide for detection of SNP TSC0059973
aaaatgtatttty

SEQ ID NO: 245612 - DNA, 13 bp, Artificial Sequence
  Oligonucleotide for detection of SNP TSC0059973
raaaatacatttt

SEQ ID NO: 245613 - DNA, 13 bp, Artificial Sequence
  Oligonucleotide for detection of SNP TSC0059973
aaaatgaatttty

SEQ ID NO: 245614 - DNA, 13 bp, Artificial Sequence
  Oligonucleotide for detection of SNP TSC0059973
raaaattcatttt

SEQ ID NO: 245615 - DNA, 13 bp, Artificial Sequence
  Oligonucleotide for detection of SNP TSC0059974
ttgtgggtggatt

SEQ ID NO: 245616 - DNA, 13 bp, Artificial Sequence
  Oligonucleotide for detection of SNP TSC0059974
aatccacccacaa

SEQ ID NO: 245617 - DNA, 13 bp, Artificial Sequence
  Oligonucleotide for detection of SNP TSC0059975
tttttagaagtgt

SEQ ID NO: 245618 - DNA, 13 bp, Artificial Sequence
  Oligonucleotide for detection of SNP TSC0059975
acacttctaaaaa

SEQ ID NO: 245619 - DNA, 13 bp, Artificial Sequence
  Oligonucleotide for detection of SNP TSC0059975
tttttaaaagtgt

SEQ ID NO: 245620 - DNA, 13 bp, Artificial Sequence
  Oligonucleotide for detection of SNP TSC0059975
acacttttaaaaa

SEQ ID NO: 245621 - DNA, 13 bp, Artificial Sequence
  Oligonucleotide for detection of SNP TSC0059977
gggtaatgtaata

SEQ ID NO: 245622 - DNA, 13 bp, Artificial Sequence
  Oligonucleotide for detection of SNP TSC0059977
tattacattaccc

SEQ ID NO: 245623 - DNA, 13 bp, Artificial Sequence
  Oligonucleotide for detection of SNP TSC0059977
gggtaacgtaata

SEQ ID NO: 245624 - DNA, 13 bp, Artificial Sequence
  Oligonucleotide for detection of SNP TSC0059977
tattacgttaccc

SEQ ID NO: 245625 - DNA, 13 bp, Artificial Sequence
  Oligonucleotide for detection of SNP TSC0059977
tattatgttatty

SEQ ID NO: 245626 - DNA, 13 bp, Artificial Sequence
  Oligonucleotide for detection of SNP TSC0059977
raataacataata

SEQ ID NO: 245627 - DNA, 13 bp, Artificial Sequence
  Oligonucleotide for detection of SNP TSC0059977
tattatattatty

SEQ ID NO: 245628 - DNA, 13 bp, Artificial Sequence
  Oligonucleotide for detection of SNP TSC0059977
raataatataata

SEQ ID NO: 245629 - DNA, 13 bp, Artificial Sequence
  Oligonucleotide for detection of SNP TSC0059977
tattacgttatty

SEQ ID NO: 245630 - DNA, 13 bp, Artificial Sequence
  Oligonucleotide for detection of SNP TSC0059977
raataacgtaata

SEQ ID NO: 245631 - DNA, 13 bp, Artificial Sequence
  Oligonucleotide for detection of SNP TSC0059982
tattagtaaaaga

SEQ ID NO: 245632 - DNA, 13 bp, Artificial Sequence
  Oligonucleotide for detection of SNP TSC0059982
tcttttactaata

SEQ ID NO: 245633 - DNA, 13 bp, Artificial Sequence
  Oligonucleotide for detection of SNP TSC0059982
tattaggaaaaga

SEQ ID NO: 245634 - DNA, 13 bp, Artificial Sequence
  Oligonucleotide for detection of SNP TSC0059982
tcttttcctaata

SEQ ID NO: 245635 - DNA, 13 bp, Artificial Sequence
  Oligonucleotide for detection of SNP TSC0059983
ttagaatggtttt

SEQ ID NO: 245636 - DNA, 13 bp, Artificial Sequence
  Oligonucleotide for detection of SNP TSC0059983
aaaaccattctaa

SEQ ID NO: 245637 - DNA, 13 bp, Artificial Sequence
  Oligonucleotide for detection of SNP TSC0059983
ttagaacggtttt

SEQ ID NO: 245638 - DNA, 13 bp, Artificial Sequence
  Oligonucleotide for detection of SNP TSC0059983
aaaaccgttctaa

SEQ ID NO: 245639 - DNA, 13 bp, Artificial Sequence
  Oligonucleotide for detection of SNP TSC0059983
aaaattgttttga

SEQ ID NO: 245640 - DNA, 13 bp, Artificial Sequence
  Oligonucleotide for detection of SNP TSC0059983
tcaaaacaatttt

SEQ ID NO: 245641 - DNA, 13 bp, Artificial Sequence
  Oligonucleotide for detection of SNP TSC0059983
aaaattattttga

SEQ ID NO: 245642 - DNA, 13 bp, Artificial Sequence
  Oligonucleotide for detection of SNP TSC0059983
tcaaaataatttt

SEQ ID NO: 245643 - DNA, 13 bp, Artificial Sequence
  Oligonucleotide for detection of SNP TSC0059983
aaaatcgttttga

SEQ ID NO: 245644 - DNA, 13 bp, Artificial Sequence
  Oligonucleotide for detection of SNP TSC0059983
tcaaaacgatttt

SEQ ID NO: 245645 - DNA, 13 bp, Artificial Sequence
  Oligonucleotide for detection of SNP TSC0059985
ttttttttaatta

SEQ ID NO: 245646 - DNA, 13 bp, Artificial Sequence
  Oligonucleotide for detection of SNP TSC0059985
taattaaaaaaaa

SEQ ID NO: 245647 - DNA, 13 bp, Artificial Sequence
  Oligonucleotide for detection of SNP TSC0059985
ttttttgtaatta

SEQ ID NO: 245648 - DNA, 13 bp, Artificial Sequence
  Oligonucleotide for detection of SNP TSC0059985
taattacaaaaaa

SEQ ID NO: 245649 - DNA, 13 bp, Artificial Sequence
  Oligonucleotide for detection of SNP TSC0059985
taattggagggaa

SEQ ID NO: 245650 - DNA, 13 bp, Artificial Sequence
  Oligonucleotide for detection of SNP TSC0059985
ttccctccaatta

SEQ ID NO: 245651 - DNA, 13 bp, Artificial Sequence
  Oligonucleotide for detection of SNP TSC0059985
taattgtagggaa

SEQ ID NO: 245652 - DNA, 13 bp, Artificial Sequence
  Oligonucleotide for detection of SNP TSC0059985
ttccctacaatta

SEQ ID NO: 245653 - DNA, 13 bp, Artificial Sequence
  Oligonucleotide for detection of SNP TSC0059987
tatttgattttta

SEQ ID NO: 245654 - DNA, 13 bp, Artificial Sequence
  Oligonucleotide for detection of SNP TSC0059987
taaaaatcaaata

SEQ ID NO: 245655 - DNA, 13 bp, Artificial Sequence
  Oligonucleotide for detection of SNP TSC0059987
tgagaattaggta

SEQ ID NO: 245656 - DNA, 13 bp, Artificial Sequence
  Oligonucleotide for detection of SNP TSC0059987
tacctaattctca

SEQ ID NO: 245657 - DNA, 13 bp, Artificial Sequence
  Oligonucleotide for detection of SNP TSC0059987
tgagaagtaggta

SEQ ID NO: 245658 - DNA, 13 bp, Artificial Sequence
  Oligonucleotide for detection of SNP TSC0059987
tacctacttctca

SEQ ID NO: 245659 - DNA, 13 bp, Artificial Sequence
  Oligonucleotide for detection of SNP TSC0059989
aagtgtatgtgat

SEQ ID NO: 245660 - DNA, 13 bp, Artificial Sequence
  Oligonucleotide for detection of SNP TSC0059989
atcacatacactt

SEQ ID NO: 245661 - DNA, 13 bp, Artificial Sequence
  Oligonucleotide for detection of SNP TSC0059989
aagtgtttgtgat

SEQ ID NO: 245662 - DNA, 13 bp, Artificial Sequence
  Oligonucleotide for detection of SNP TSC0059989
atcacaaacactt

SEQ ID NO: 245663 - DNA, 13 bp, Artificial Sequence
  Oligonucleotide for detection of SNP TSC0059989
attatatgtattt

SEQ ID NO: 245664 - DNA, 13 bp, Artificial Sequence
  Oligonucleotide for detection of SNP TSC0059989
aaatacatataat

SEQ ID NO: 245665 - DNA, 13 bp, Artificial Sequence
  Oligonucleotide for detection of SNP TSC0059989
attataggtattt

SEQ ID NO: 245666 - DNA, 13 bp, Artificial Sequence
  Oligonucleotide for detection of SNP TSC0059989
aaatacctataat

SEQ ID NO: 245667 - DNA, 13 bp, Artificial Sequence
  Oligonucleotide for detection of SNP TSC0059990
gatgaatatagta

SEQ ID NO: 245668 - DNA, 13 bp, Artificial Sequence
  Oligonucleotide for detection of SNP TSC0059990
tactatattcatc

SEQ ID NO: 245669 - DNA, 13 bp, Artificial Sequence
  Oligonucleotide for detection of SNP TSC0059990
gatgaagatagta

SEQ ID NO: 245670 - DNA, 13 bp, Artificial Sequence
  Oligonucleotide for detection of SNP TSC0059990
tactatcttcatc

SEQ ID NO: 245671 - DNA, 13 bp, Artificial Sequence
  Oligonucleotide for detection of SNP TSC0059990
tattatttttaty

SEQ ID NO: 245672 - DNA, 13 bp, Artificial Sequence
  Oligonucleotide for detection of SNP TSC0059990
rataaaaataata

SEQ ID NO: 245673 - DNA, 13 bp, Artificial Sequence
  Oligonucleotide for detection of SNP TSC0059991
ttgaaaaataaga

SEQ ID NO: 245674 - DNA, 13 bp, Artificial Sequence
  Oligonucleotide for detection of SNP TSC0059991
tcttatttttcaa

SEQ ID NO: 245675 - DNA, 13 bp, Artificial Sequence
  Oligonucleotide for detection of SNP TSC0059991
ttgaaatataaga

SEQ ID NO: 245676 - DNA, 13 bp, Artificial Sequence
  Oligonucleotide for detection of SNP TSC0059991
tcttatatttcaa

SEQ ID NO: 245677 - DNA, 13 bp, Artificial Sequence
  Oligonucleotide for detection of SNP TSC0059992
agttaaattgaaa

SEQ ID NO: 245678 - DNA, 13 bp, Artificial Sequence
  Oligonucleotide for detection of SNP TSC0059992
tttcaatttaact

SEQ ID NO: 245679 - DNA, 13 bp, Artificial Sequence
  Oligonucleotide for detection of SNP TSC0059992
agttaagttgaaa

SEQ ID NO: 245680 - DNA, 13 bp, Artificial Sequence
  Oligonucleotide for detection of SNP TSC0059992
tttcaacttaact

SEQ ID NO: 245681 - DNA, 13 bp, Artificial Sequence
  Oligonucleotide for detection of SNP TSC0059995
gagatatgttggy

SEQ ID NO: 245682 - DNA, 13 bp, Artificial Sequence
  Oligonucleotide for detection of SNP TSC0059995
rccaacatatctc

SEQ ID NO: 245683 - DNA, 13 bp, Artificial Sequence
  Oligonucleotide for detection of SNP TSC0059995
gagataagttggy

SEQ ID NO: 245684 - DNA, 13 bp, Artificial Sequence
  Oligonucleotide for detection of SNP TSC0059995
rccaacttatctc

SEQ ID NO: 245685 - DNA, 13 bp, Artificial Sequence
  Oligonucleotide for detection of SNP TSC0059996
tttagatggggat

SEQ ID NO: 245686 - DNA, 13 bp, Artificial Sequence
  Oligonucleotide for detection of SNP TSC0059996
atccccatctaaa

SEQ ID NO: 245687 - DNA, 13 bp, Artificial Sequence
  Oligonucleotide for detection of SNP TSC0059996
tttagacggggat

SEQ ID NO: 245688 - DNA, 13 bp, Artificial Sequence
  Oligonucleotide for detection of SNP TSC0059996
atccccgtctaaa

SEQ ID NO: 245689 - DNA, 13 bp, Artificial Sequence
  Oligonucleotide for detection of SNP TSC0059997
tgttttgtgaaga

SEQ ID NO: 245690 - DNA, 13 bp, Artificial Sequence
  Oligonucleotide for detection of SNP TSC0059997
tcttcacaaaaca

SEQ ID NO: 245691 - DNA, 13 bp, Artificial Sequence
  Oligonucleotide for detection of SNP TSC0059997
tgttttttgaaga

SEQ ID NO: 245692 - DNA, 13 bp, Artificial Sequence
  Oligonucleotide for detection of SNP TSC0059997
tcttcaaaaaaca

SEQ ID NO: 245693 - DNA, 13 bp, Artificial Sequence
  Oligonucleotide for detection of SNP TSC0059999
ttagaaatgttty

SEQ ID NO: 245694 - DNA, 13 bp, Artificial Sequence
  Oligonucleotide for detection of SNP TSC0059999
raaacatttctaa

SEQ ID NO: 245695 - DNA, 13 bp, Artificial Sequence
  Oligonucleotide for detection of SNP TSC0059999
gagatatttttga

SEQ ID NO: 245696 - DNA, 13 bp, Artificial Sequence
  Oligonucleotide for detection of SNP TSC0059999
tcaaaaatatctc

SEQ ID NO: 245697 - DNA, 13 bp, Artificial Sequence
  Oligonucleotide for detection of SNP TSC0060002
aattatgtgaaay

SEQ ID NO: 245698 - DNA, 13 bp, Artificial Sequence
  Oligonucleotide for detection of SNP TSC0060002
rtttcacataatt

SEQ ID NO: 245699 - DNA, 13 bp, Artificial Sequence
  Oligonucleotide for detection of SNP TSC0060002
aattatatgaaay

SEQ ID NO: 245700 - DNA, 13 bp, Artificial Sequence
  Oligonucleotide for detection of SNP TSC0060002
rtttcatataatt

SEQ ID NO: 245701 - DNA, 13 bp, Artificial Sequence
  Oligonucleotide for detection of SNP TSC0060002
aattacgtgaaay

SEQ ID NO: 245702 - DNA, 13 bp, Artificial Sequence
  Oligonucleotide for detection of SNP TSC0060002
rtttcacgtaatt

SEQ ID NO: 245703 - DNA, 13 bp, Artificial Sequence
  Oligonucleotide for detection of SNP TSC0060015
aagaattttagtt

SEQ ID NO: 245704 - DNA, 13 bp, Artificial Sequence
  Oligonucleotide for detection of SNP TSC0060015
aactaaaattctt

SEQ ID NO: 245705 - DNA, 13 bp, Artificial Sequence
  Oligonucleotide for detection of SNP TSC0060015
aagaatgttagtt

SEQ ID NO: 245706 - DNA, 13 bp, Artificial Sequence
  Oligonucleotide for detection of SNP TSC0060015
aactaacattctt

SEQ ID NO: 245707 - DNA, 13 bp, Artificial Sequence
  Oligonucleotide for detection of SNP TSC0060022
gtgggttgaaggg

SEQ ID NO: 245708 - DNA, 13 bp, Artificial Sequence
  Oligonucleotide for detection of SNP TSC0060022
cccttcaacccac

SEQ ID NO: 245709 - DNA, 13 bp, Artificial Sequence
  Oligonucleotide for detection of SNP TSC0060022
gtgggtcgaaggg

SEQ ID NO: 245710 - DNA, 13 bp, Artificial Sequence
  Oligonucleotide for detection of SNP TSC0060022
cccttcgacccac

SEQ ID NO: 245711 - DNA, 13 bp, Artificial Sequence
  Oligonucleotide for detection of SNP TSC0060023
tgaagtgtagaat

SEQ ID NO: 245712 - DNA, 13 bp, Artificial Sequence
  Oligonucleotide for detection of SNP TSC0060023
attctacacttca

SEQ ID NO: 245713 - DNA, 13 bp, Artificial Sequence
  Oligonucleotide for detection of SNP TSC0060023
tgaagtatagaat

SEQ ID NO: 245714 - DNA, 13 bp, Artificial Sequence
  Oligonucleotide for detection of SNP TSC0060023
attctatacttca

SEQ ID NO: 245715 - DNA, 13 bp, Artificial Sequence
  Oligonucleotide for detection of SNP TSC0060023
tgaagcgtagaat

SEQ ID NO: 245716 - DNA, 13 bp, Artificial Sequence
  Oligonucleotide for detection of SNP TSC0060023
attctacgcttca

SEQ ID NO: 245717 - DNA, 13 bp, Artificial Sequence
  Oligonucleotide for detection of SNP TSC0060024
gttgttattagag

SEQ ID NO: 245718 - DNA, 13 bp, Artificial Sequence
  Oligonucleotide for detection of SNP TSC0060024
ctctaataacaac

SEQ ID NO: 245719 - DNA, 13 bp, Artificial Sequence
  Oligonucleotide for detection of SNP TSC0060024
gttgtttttagag

SEQ ID NO: 245720 - DNA, 13 bp, Artificial Sequence
  Oligonucleotide for detection of SNP TSC0060024
ctctaaaaacaac

SEQ ID NO: 245721 - DNA, 13 bp, Artificial Sequence
  Oligonucleotide for detection of SNP TSC0060024
ttttgatgatagy

SEQ ID NO: 245722 - DNA, 13 bp, Artificial Sequence
  Oligonucleotide for detection of SNP TSC0060024
rctatcatcaaaa

SEQ ID NO: 245723 - DNA, 13 bp, Artificial Sequence
  Oligonucleotide for detection of SNP TSC0060024
ttttgaggatagy

SEQ ID NO: 245724 - DNA, 13 bp, Artificial Sequence
  Oligonucleotide for detection of SNP TSC0060024
rctatcctcaaaa

SEQ ID NO: 245725 - DNA, 13 bp, Artificial Sequence
  Oligonucleotide for detection of SNP TSC0008587
tttagatgataaa

SEQ ID NO: 245726 - DNA, 13 bp, Artificial Sequence
  Oligonucleotide for detection of SNP TSC0008587
tttatcatctaaa

SEQ ID NO: 245727 - DNA, 13 bp, Artificial Sequence
  Oligonucleotide for detection of SNP TSC0008587
tttagacgataaa

SEQ ID NO: 245728 - DNA, 13 bp, Artificial Sequence
  Oligonucleotide for detection of SNP TSC0008587
tttatcgtctaaa

SEQ ID NO: 245729 - DNA, 13 bp, Artificial Sequence
  Oligonucleotide for detection of SNP TSC0008587
tttgttgtttgga

SEQ ID NO: 245730 - DNA, 13 bp, Artificial Sequence
  Oligonucleotide for detection of SNP TSC0008587
tccaaacaacaaa

SEQ ID NO: 245731 - DNA, 13 bp, Artificial Sequence
  Oligonucleotide for detection of SNP TSC0008587
tttgttatttgga

SEQ ID NO: 245732 - DNA, 13 bp, Artificial Sequence
  Oligonucleotide for detection of SNP TSC0008587
tccaaataacaaa

SEQ ID NO: 245733 - DNA, 13 bp, Artificial Sequence
  Oligonucleotide for detection of SNP TSC0008587
tttgtcgtttgga

SEQ ID NO: 245734 - DNA, 13 bp, Artificial Sequence
  Oligonucleotide for detection of SNP TSC0008587
tccaaacgacaaa

SEQ ID NO: 245735 - DNA, 13 bp, Artificial Sequence
  Oligonucleotide for detection of SNP TSC0008588
attattgtattgt

SEQ ID NO: 245736 - DNA, 13 bp, Artificial Sequence
  Oligonucleotide for detection of SNP TSC0008588
acaatacaataat

SEQ ID NO: 245737 - DNA, 13 bp, Artificial Sequence
  Oligonucleotide for detection of SNP TSC0008588
atagtagagtagt

SEQ ID NO: 245738 - DNA, 13 bp, Artificial Sequence
  Oligonucleotide for detection of SNP TSC0008588
actactctactat

SEQ ID NO: 245739 - DNA, 13 bp, Artificial Sequence
  Oligonucleotide for detection of SNP TSC0008588
atagtatagtagt

SEQ ID NO: 245740 - DNA, 13 bp, Artificial Sequence
  Oligonucleotide for detection of SNP TSC0008588
actactatactat

SEQ ID NO: 245741 - DNA, 13 bp, Artificial Sequence
  Oligonucleotide for detection of SNP TSC0060031
gtgtagttgttty

SEQ ID NO: 245742 - DNA, 13 bp, Artificial Sequence
  Oligonucleotide for detection of SNP TSC0060031
raaacaactacac

SEQ ID NO: 245743 - DNA, 13 bp, Artificial Sequence
  Oligonucleotide for detection of SNP TSC0060031
gtgtaggtgttty

SEQ ID NO: 245744 - DNA, 13 bp, Artificial Sequence
  Oligonucleotide for detection of SNP TSC0060031
raaacacctacac

SEQ ID NO: 245745 - DNA, 13 bp, Artificial Sequence
  Oligonucleotide for detection of SNP TSC0060031
gaaataattgtay

SEQ ID NO: 245746 - DNA, 13 bp, Artificial Sequence
  Oligonucleotide for detection of SNP TSC0060031
rtacaattatttc

SEQ ID NO: 245747 - DNA, 13 bp, Artificial Sequence
  Oligonucleotide for detection of SNP TSC0060031
gaaatatttgtay

SEQ ID NO: 245748 - DNA, 13 bp, Artificial Sequence
  Oligonucleotide for detection of SNP TSC0060031
rtacaaatatttc

SEQ ID NO: 245749 - DNA, 13 bp, Artificial Sequence
  Oligonucleotide for detection of SNP TSC0060032
tttggtatttaty

SEQ ID NO: 245750 - DNA, 13 bp, Artificial Sequence
  Oligonucleotide for detection of SNP TSC0060032
rataaataccaaa

SEQ ID NO: 245751 - DNA, 13 bp, Artificial Sequence
  Oligonucleotide for detection of SNP TSC0060032
tttggtttttaty

SEQ ID NO: 245752 - DNA, 13 bp, Artificial Sequence
  Oligonucleotide for detection of SNP TSC0060032
rataaaaaccaaa

SEQ ID NO: 245753 - DNA, 13 bp, Artificial Sequence
  Oligonucleotide for detection of SNP TSC0060032
ggtggatattaga

SEQ ID NO: 245754 - DNA, 13 bp, Artificial Sequence
  Oligonucleotide for detection of SNP TSC0060032
tctaatatccacc

SEQ ID NO: 245755 - DNA, 13 bp, Artificial Sequence
  Oligonucleotide for detection of SNP TSC0060032
ggtggagattaga

SEQ ID NO: 245756 - DNA, 13 bp, Artificial Sequence
  Oligonucleotide for detection of SNP TSC0060032
tctaatctccacc

SEQ ID NO: 245757 - DNA, 13 bp, Artificial Sequence
  Oligonucleotide for detection of SNP TSC0060036
tttttgtttgaaa

SEQ ID NO: 245758 - DNA, 13 bp, Artificial Sequence
  Oligonucleotide for detection of SNP TSC0060036
tttcaaacaaaaa

SEQ ID NO: 245759 - DNA, 13 bp, Artificial Sequence
  Oligonucleotide for detection of SNP TSC0060036
tttttggttgaaa

SEQ ID NO: 245760 - DNA, 13 bp, Artificial Sequence
  Oligonucleotide for detection of SNP TSC0060036
tttcaaccaaaaa

SEQ ID NO: 245761 - DNA, 13 bp, Artificial Sequence
  Oligonucleotide for detection of SNP TSC0060036
ttttagttagaga

SEQ ID NO: 245762 - DNA, 13 bp, Artificial Sequence
  Oligonucleotide for detection of SNP TSC0060036
tctctaactaaaa

SEQ ID NO: 245763 - DNA, 13 bp, Artificial Sequence
  Oligonucleotide for detection of SNP TSC0060037
aattggtgatttg

SEQ ID NO: 245764 - DNA, 13 bp, Artificial Sequence
  Oligonucleotide for detection of SNP TSC0060037
caaatcaccaatt

SEQ ID NO: 245765 - DNA, 13 bp, Artificial Sequence
  Oligonucleotide for detection of SNP TSC0060037
aattggggatttg

SEQ ID NO: 245766 - DNA, 13 bp, Artificial Sequence
  Oligonucleotide for detection of SNP TSC0060037
caaatccccaatt

SEQ ID NO: 245767 - DNA, 13 bp, Artificial Sequence
  Oligonucleotide for detection of SNP TSC0060037
aattggcgatttg

SEQ ID NO: 245768 - DNA, 13 bp, Artificial Sequence
  Oligonucleotide for detection of SNP TSC0060037
caaatcgccaatt

SEQ ID NO: 245769 - DNA, 13 bp, Artificial Sequence
  Oligonucleotide for detection of SNP TSC0060037
taggttgttagtt

SEQ ID NO: 245770 - DNA, 13 bp, Artificial Sequence
  Oligonucleotide for detection of SNP TSC0060037
aactaacaaccta

SEQ ID NO: 245771 - DNA, 13 bp, Artificial Sequence
  Oligonucleotide for detection of SNP TSC0060037
taggtttttagtt

SEQ ID NO: 245772 - DNA, 13 bp, Artificial Sequence
  Oligonucleotide for detection of SNP TSC0060037
aactaaaaaccta

SEQ ID NO: 245773 - DNA, 13 bp, Artificial Sequence
  Oligonucleotide for detection of SNP TSC0060037
taggtcgttagtt

SEQ ID NO: 245774 - DNA, 13 bp, Artificial Sequence
  Oligonucleotide for detection of SNP TSC0060037
aactaacgaccta

SEQ ID NO: 245775 - DNA, 13 bp, Artificial Sequence
  Oligonucleotide for detection of SNP TSC0060038
tgaatatgtttay

SEQ ID NO: 245776 - DNA, 13 bp, Artificial Sequence
  Oligonucleotide for detection of SNP TSC0060038
rtaaacatattca

SEQ ID NO: 245777 - DNA, 13 bp, Artificial Sequence
  Oligonucleotide for detection of SNP TSC0060038
tgaatacgtttay

SEQ ID NO: 245778 - DNA, 13 bp, Artificial Sequence
  Oligonucleotide for detection of SNP TSC0060038
rtaaacgtattca

SEQ ID NO: 245779 - DNA, 13 bp, Artificial Sequence
  Oligonucleotide for detection of SNP TSC0060038
gtgggtgtgttta

SEQ ID NO: 245780 - DNA, 13 bp, Artificial Sequence
  Oligonucleotide for detection of SNP TSC0060038
taaacacacccac

SEQ ID NO: 245781 - DNA, 13 bp, Artificial Sequence
  Oligonucleotide for detection of SNP TSC0060038
gtgggtatgttta

SEQ ID NO: 245782 - DNA, 13 bp, Artificial Sequence
  Oligonucleotide for detection of SNP TSC0060038
taaacatacccac

SEQ ID NO: 245783 - DNA, 13 bp, Artificial Sequence
  Oligonucleotide for detection of SNP TSC0060038
gtgggcgtgttta

SEQ ID NO: 245784 - DNA, 13 bp, Artificial Sequence
  Oligonucleotide for detection of SNP TSC0060038
taaacacgcccac

SEQ ID NO: 245785 - DNA, 13 bp, Artificial Sequence
  Oligonucleotide for detection of SNP TSC0060039
atttgtgttaagg

SEQ ID NO: 245786 - DNA, 13 bp, Artificial Sequence
  Oligonucleotide for detection of SNP TSC0060039
ccttaacacaaat

SEQ ID NO: 245787 - DNA, 13 bp, Artificial Sequence
  Oligonucleotide for detection of SNP TSC0060039
atttgtattaagg

SEQ ID NO: 245788 - DNA, 13 bp, Artificial Sequence
  Oligonucleotide for detection of SNP TSC0060039
ccttaatacaaat

SEQ ID NO: 245789 - DNA, 13 bp, Artificial Sequence
  Oligonucleotide for detection of SNP TSC0060041
tgagattggttta

SEQ ID NO: 245790 - DNA, 13 bp, Artificial Sequence
  Oligonucleotide for detection of SNP TSC0060041
taaaccaatctca

SEQ ID NO: 245791 - DNA, 13 bp, Artificial Sequence
  Oligonucleotide for detection of SNP TSC0060041
tgagatgggttta

SEQ ID NO: 245792 - DNA, 13 bp, Artificial Sequence
  Oligonucleotide for detection of SNP TSC0060041
taaacccatctca

SEQ ID NO: 245793 - DNA, 13 bp, Artificial Sequence
  Oligonucleotide for detection of SNP TSC0060047
tttttgtatttty

SEQ ID NO: 245794 - DNA, 13 bp, Artificial Sequence
  Oligonucleotide for detection of SNP TSC0060047
raaaatacaaaaa

SEQ ID NO: 245795 - DNA, 13 bp, Artificial Sequence
  Oligonucleotide for detection of SNP TSC0060047
ggaaatgtaaaaa

SEQ ID NO: 245796 - DNA, 13 bp, Artificial Sequence
  Oligonucleotide for detection of SNP TSC0060047
tttttacatttcc

SEQ ID NO: 245797 - DNA, 13 bp, Artificial Sequence
  Oligonucleotide for detection of SNP TSC0060047
ggaaatttaaaaa

SEQ ID NO: 245798 - DNA, 13 bp, Artificial Sequence
  Oligonucleotide for detection of SNP TSC0060047
tttttaaatttcc

SEQ ID NO: 245799 - DNA, 13 bp, Artificial Sequence
  Oligonucleotide for detection of SNP TSC0060048
aattggtggggtg

SEQ ID NO: 245800 - DNA, 13 bp, Artificial Sequence
  Oligonucleotide for detection of SNP TSC0060048
caccccaccaatt

SEQ ID NO: 245801 - DNA, 13 bp, Artificial Sequence
  Oligonucleotide for detection of SNP TSC0060048
aattggcggggtg

SEQ ID NO: 245802 - DNA, 13 bp, Artificial Sequence
  Oligonucleotide for detection of SNP TSC0060048
caccccgccaatt

SEQ ID NO: 245803 - DNA, 13 bp, Artificial Sequence
  Oligonucleotide for detection of SNP TSC0060048
tattttgttaatt

SEQ ID NO: 245804 - DNA, 13 bp, Artificial Sequence
  Oligonucleotide for detection of SNP TSC0060048
aattaacaaaata

SEQ ID NO: 245805 - DNA, 13 bp, Artificial Sequence
  Oligonucleotide for detection of SNP TSC0060048
tattttattaatt

SEQ ID NO: 245806 - DNA, 13 bp, Artificial Sequence
  Oligonucleotide for detection of SNP TSC0060048
aattaataaaata

SEQ ID NO: 245807 - DNA, 13 bp, Artificial Sequence
  Oligonucleotide for detection of SNP TSC0060048
tatttcgttaatt

SEQ ID NO: 245808 - DNA, 13 bp, Artificial Sequence
  Oligonucleotide for detection of SNP TSC0060048
aattaacgaaata

SEQ ID NO: 245809 - DNA, 13 bp, Artificial Sequence
  Oligonucleotide for detection of SNP TSC0060049
tatttttgggttt

SEQ ID NO: 245810 - DNA, 13 bp, Artificial Sequence
  Oligonucleotide for detection of SNP TSC0060049
aaacccaaaaata

SEQ ID NO: 245811 - DNA, 13 bp, Artificial Sequence
  Oligonucleotide for detection of SNP TSC0060049
agatttaagggtg

SEQ ID NO: 245812 - DNA, 13 bp, Artificial Sequence
  Oligonucleotide for detection of SNP TSC0060049
cacccttaaatct

SEQ ID NO: 245813 - DNA, 13 bp, Artificial Sequence
  Oligonucleotide for detection of SNP TSC0060049
agattttagggtg

SEQ ID NO: 245814 - DNA, 13 bp, Artificial Sequence
  Oligonucleotide for detection of SNP TSC0060049
caccctaaaatct

SEQ ID NO: 245815 - DNA, 13 bp, Artificial Sequence
  Oligonucleotide for detection of SNP TSC0060050
aagatttgtgtga

SEQ ID NO: 245816 - DNA, 13 bp, Artificial Sequence
  Oligonucleotide for detection of SNP TSC0060050
tcacacaaatctt

SEQ ID NO: 245817 - DNA, 13 bp, Artificial Sequence
  Oligonucleotide for detection of SNP TSC0060050
aagattcgtgtga

SEQ ID NO: 245818 - DNA, 13 bp, Artificial Sequence
  Oligonucleotide for detection of SNP TSC0060050
tcacacgaatctt

SEQ ID NO: 245819 - DNA, 13 bp, Artificial Sequence
  Oligonucleotide for detection of SNP TSC0060050
ttatatgggtttt

SEQ ID NO: 245820 - DNA, 13 bp, Artificial Sequence
  Oligonucleotide for detection of SNP TSC0060050
aaaacccatataa

SEQ ID NO: 245821 - DNA, 13 bp, Artificial Sequence
  Oligonucleotide for detection of SNP TSC0060050
ttatacgggtttt

SEQ ID NO: 245822 - DNA, 13 bp, Artificial Sequence
  Oligonucleotide for detection of SNP TSC0060050
aaaacccgtataa

SEQ ID NO: 245823 - DNA, 13 bp, Artificial Sequence
  Oligonucleotide for detection of SNP TSC0010699
attgttataatty

SEQ ID NO: 245824 - DNA, 13 bp, Artificial Sequence
  Oligonucleotide for detection of SNP TSC0010699
raattataacaat

SEQ ID NO: 245825 - DNA, 13 bp, Artificial Sequence
  Oligonucleotide for detection of SNP TSC0010699
attgttttaatty

SEQ ID NO: 245826 - DNA, 13 bp, Artificial Sequence
  Oligonucleotide for detection of SNP TSC0010699
raattaaaacaat

SEQ ID NO: 245827 - DNA, 13 bp, Artificial Sequence
  Oligonucleotide for detection of SNP TSC0010699
ggattatgatagt

SEQ ID NO: 245828 - DNA, 13 bp, Artificial Sequence
  Oligonucleotide for detection of SNP TSC0010699
actatcataatcc

SEQ ID NO: 245829 - DNA, 13 bp, Artificial Sequence
  Oligonucleotide for detection of SNP TSC0010699
ggattaggatagt

SEQ ID NO: 245830 - DNA, 13 bp, Artificial Sequence
  Oligonucleotide for detection of SNP TSC0010699
actatcctaatcc

SEQ ID NO: 245831 - DNA, 13 bp, Artificial Sequence
  Oligonucleotide for detection of SNP TSC0060052
tagataggaatay

SEQ ID NO: 245832 - DNA, 13 bp, Artificial Sequence
  Oligonucleotide for detection of SNP TSC0060052
rtattcctatcta

SEQ ID NO: 245833 - DNA, 13 bp, Artificial Sequence
  Oligonucleotide for detection of SNP TSC0060052
tagataagaatay

SEQ ID NO: 245834 - DNA, 13 bp, Artificial Sequence
  Oligonucleotide for detection of SNP TSC0060052
rtattcttatcta

SEQ ID NO: 245835 - DNA, 13 bp, Artificial Sequence
  Oligonucleotide for detection of SNP TSC0060060
ggagagagagatg

SEQ ID NO: 245836 - DNA, 13 bp, Artificial Sequence
  Oligonucleotide for detection of SNP TSC0060060
catctctctctcc

SEQ ID NO: 245837 - DNA, 13 bp, Artificial Sequence
  Oligonucleotide for detection of SNP TSC0060060
ggagagtgagatg

SEQ ID NO: 245838 - DNA, 13 bp, Artificial Sequence
  Oligonucleotide for detection of SNP TSC0060060
catctcactctcc

SEQ ID NO: 245839 - DNA, 13 bp, Artificial Sequence
  Oligonucleotide for detection of SNP TSC0060062
gagttcgggagtt

SEQ ID NO: 245840 - DNA, 13 bp, Artificial Sequence
  Oligonucleotide for detection of SNP TSC0060062
aactcccgaactc

SEQ ID NO: 245841 - DNA, 13 bp, Artificial Sequence
  Oligonucleotide for detection of SNP TSC0060063
ttgtgagttttty

SEQ ID NO: 245842 - DNA, 13 bp, Artificial Sequence
  Oligonucleotide for detection of SNP TSC0060063
raaaaactcacaa

SEQ ID NO: 245843 - DNA, 13 bp, Artificial Sequence
  Oligonucleotide for detection of SNP TSC0060064
atatattttataa

SEQ ID NO: 245844 - DNA, 13 bp, Artificial Sequence
  Oligonucleotide for detection of SNP TSC0060064
ttataaaatatat

SEQ ID NO: 245845 - DNA, 13 bp, Artificial Sequence
  Oligonucleotide for detection of SNP TSC0060064
atatatgttataa

SEQ ID NO: 245846 - DNA, 13 bp, Artificial Sequence
  Oligonucleotide for detection of SNP TSC0060064
ttataacatatat

SEQ ID NO: 245847 - DNA, 13 bp, Artificial Sequence
  Oligonucleotide for detection of SNP TSC0060064
ttataatatatat

SEQ ID NO: 245848 - DNA, 13 bp, Artificial Sequence
  Oligonucleotide for detection of SNP TSC0060064
atatatattataa

SEQ ID NO: 245849 - DNA, 13 bp, Artificial Sequence
  Oligonucleotide for detection of SNP TSC0060065
atggatagatatt

SEQ ID NO: 245850 - DNA, 13 bp, Artificial Sequence
  Oligonucleotide for detection of SNP TSC0060065
aatatctatccat

SEQ ID NO: 245851 - DNA, 13 bp, Artificial Sequence
  Oligonucleotide for detection of SNP TSC0060065
atggatggatatt

SEQ ID NO: 245852 - DNA, 13 bp, Artificial Sequence
  Oligonucleotide for detection of SNP TSC0060065
aatatccatccat

SEQ ID NO: 245853 - DNA, 13 bp, Artificial Sequence
  Oligonucleotide for detection of SNP TSC0060066
tatagatgagtgy

SEQ ID NO: 245854 - DNA, 13 bp, Artificial Sequence
  Oligonucleotide for detection of SNP TSC0060066
rcactcatctata

SEQ ID NO: 245855 - DNA, 13 bp, Artificial Sequence
  Oligonucleotide for detection of SNP TSC0060066
tatagacgagtgy

SEQ ID NO: 245856 - DNA, 13 bp, Artificial Sequence
  Oligonucleotide for detection of SNP TSC0060066
rcactcgtctata

SEQ ID NO: 245857 - DNA, 13 bp, Artificial Sequence
  Oligonucleotide for detection of SNP TSC0060067
gagatcgtattay

SEQ ID NO: 245858 - DNA, 13 bp, Artificial Sequence
  Oligonucleotide for detection of SNP TSC0060067
rtaatacgatctc

SEQ ID NO: 245859 - DNA, 13 bp, Artificial Sequence
  Oligonucleotide for detection of SNP TSC0060068
gaaaagtagatgg

SEQ ID NO: 245860 - DNA, 13 bp, Artificial Sequence
  Oligonucleotide for detection of SNP TSC0060068
ccatctacttttc

SEQ ID NO: 245861 - DNA, 13 bp, Artificial Sequence
  Oligonucleotide for detection of SNP TSC0060068
gaaaaggagatgg

SEQ ID NO: 245862 - DNA, 13 bp, Artificial Sequence
  Oligonucleotide for detection of SNP TSC0060068
ccatctccttttc

SEQ ID NO: 245863 - DNA, 13 bp, Artificial Sequence
  Oligonucleotide for detection of SNP TSC0060069
taaagagttatgg

SEQ ID NO: 245864 - DNA, 13 bp, Artificial Sequence
  Oligonucleotide for detection of SNP TSC0060069
ccataactcttta

SEQ ID NO: 245865 - DNA, 13 bp, Artificial Sequence
  Oligonucleotide for detection of SNP TSC0060069
taaagaattatgg

SEQ ID NO: 245866 - DNA, 13 bp, Artificial Sequence
  Oligonucleotide for detection of SNP TSC0060069
ccataattcttta

SEQ ID NO: 245867 - DNA, 13 bp, Artificial Sequence
  Oligonucleotide for detection of SNP TSC0060071
ttagtaatatggy

SEQ ID NO: 245868 - DNA, 13 bp, Artificial Sequence
  Oligonucleotide for detection of SNP TSC0060071
rccatattactaa

SEQ ID NO: 245869 - DNA, 13 bp, Artificial Sequence
  Oligonucleotide for detection of SNP TSC0060071
ttagtagtatggy

SEQ ID NO: 245870 - DNA, 13 bp, Artificial Sequence
  Oligonucleotide for detection of SNP TSC0060071
rccatactactaa

SEQ ID NO: 245871 - DNA, 13 bp, Artificial Sequence
  Oligonucleotide for detection of SNP TSC0060072
ttttgaatttagg

SEQ ID NO: 245872 - DNA, 13 bp, Artificial Sequence
  Oligonucleotide for detection of SNP TSC0060072
cctaaattcaaaa

SEQ ID NO: 245873 - DNA, 13 bp, Artificial Sequence
  Oligonucleotide for detection of SNP TSC0060073
attttatgggttt

SEQ ID NO: 245874 - DNA, 13 bp, Artificial Sequence
  Oligonucleotide for detection of SNP TSC0060073
aaacccataaaat

SEQ ID NO: 245875 - DNA, 13 bp, Artificial Sequence
  Oligonucleotide for detection of SNP TSC0060073
attttacgggttt

SEQ ID NO: 245876 - DNA, 13 bp, Artificial Sequence
  Oligonucleotide for detection of SNP TSC0060073
aaacccgtaaaat

SEQ ID NO: 245877 - DNA, 13 bp, Artificial Sequence
  Oligonucleotide for detection of SNP TSC0060073
aaatttgtggaat

SEQ ID NO: 245878 - DNA, 13 bp, Artificial Sequence
  Oligonucleotide for detection of SNP TSC0060073
attccacaaattt

SEQ ID NO: 245879 - DNA, 13 bp, Artificial Sequence
  Oligonucleotide for detection of SNP TSC0060073
aaatttatggaat

SEQ ID NO: 245880 - DNA, 13 bp, Artificial Sequence
  Oligonucleotide for detection of SNP TSC0060073
attccataaattt

SEQ ID NO: 245881 - DNA, 13 bp, Artificial Sequence
  Oligonucleotide for detection of SNP TSC0060073
aaattcgtggaat

SEQ ID NO: 245882 - DNA, 13 bp, Artificial Sequence
  Oligonucleotide for detection of SNP TSC0060073
attccacgaattt

SEQ ID NO: 245883 - DNA, 13 bp, Artificial Sequence
  Oligonucleotide for detection of SNP TSC0060074
gagagagattttg

SEQ ID NO: 245884 - DNA, 13 bp, Artificial Sequence
  Oligonucleotide for detection of SNP TSC0060074
caaaatctctctc

SEQ ID NO: 245885 - DNA, 13 bp, Artificial Sequence
  Oligonucleotide for detection of SNP TSC0060074
gagagaaattttg

SEQ ID NO: 245886 - DNA, 13 bp, Artificial Sequence
  Oligonucleotide for detection of SNP TSC0060074
caaaatttctctc

SEQ ID NO: 245887 - DNA, 13 bp, Artificial Sequence
  Oligonucleotide for detection of SNP TSC0060075
agaaaagaaaaga

SEQ ID NO: 245888 - DNA, 13 bp, Artificial Sequence
  Oligonucleotide for detection of SNP TSC0060075
tcttttcttttct

SEQ ID NO: 245889 - DNA, 13 bp, Artificial Sequence
  Oligonucleotide for detection of SNP TSC0060075
agaaaaaaaaaga

SEQ ID NO: 245890 - DNA, 13 bp, Artificial Sequence
  Oligonucleotide for detection of SNP TSC0060075
tctttttttttct

SEQ ID NO: 245891 - DNA, 13 bp, Artificial Sequence
  Oligonucleotide for detection of SNP TSC0060076
agagttaggaaat

SEQ ID NO: 245892 - DNA, 13 bp, Artificial Sequence
  Oligonucleotide for detection of SNP TSC0060076
atttcctaactct

SEQ ID NO: 245893 - DNA, 13 bp, Artificial Sequence
  Oligonucleotide for detection of SNP TSC0060076
agagtttggaaat

SEQ ID NO: 245894 - DNA, 13 bp, Artificial Sequence
  Oligonucleotide for detection of SNP TSC0060076
atttccaaactct

SEQ ID NO: 245895 - DNA, 13 bp, Artificial Sequence
  Oligonucleotide for detection of SNP TSC0060079
tttgtgatatata

SEQ ID NO: 245896 - DNA, 13 bp, Artificial Sequence
  Oligonucleotide for detection of SNP TSC0060079
tatatatcacaaa

SEQ ID NO: 245897 - DNA, 13 bp, Artificial Sequence
  Oligonucleotide for detection of SNP TSC0060079
tttgtgttatata

SEQ ID NO: 245898 - DNA, 13 bp, Artificial Sequence
  Oligonucleotide for detection of SNP TSC0060079
tatataacacaaa

SEQ ID NO: 245899 - DNA, 13 bp, Artificial Sequence
  Oligonucleotide for detection of SNP TSC0060079
tatgtattataga

SEQ ID NO: 245900 - DNA, 13 bp, Artificial Sequence
  Oligonucleotide for detection of SNP TSC0060079
tctataatacata

SEQ ID NO: 245901 - DNA, 13 bp, Artificial Sequence
  Oligonucleotide for detection of SNP TSC0060079
tatgtaatataga

SEQ ID NO: 245902 - DNA, 13 bp, Artificial Sequence
  Oligonucleotide for detection of SNP TSC0060079
tctatattacata

SEQ ID NO: 245903 - DNA, 13 bp, Artificial Sequence
  Oligonucleotide for detection of SNP TSC0060080
ataataatttggt

SEQ ID NO: 245904 - DNA, 13 bp, Artificial Sequence
  Oligonucleotide for detection of SNP TSC0060080
accaaattattat

SEQ ID NO: 245905 - DNA, 13 bp, Artificial Sequence
  Oligonucleotide for detection of SNP TSC0060080
ataatagtttggt

SEQ ID NO: 245906 - DNA, 13 bp, Artificial Sequence
  Oligonucleotide for detection of SNP TSC0060080
accaaactattat

SEQ ID NO: 245907 - DNA, 13 bp, Artificial Sequence
  Oligonucleotide for detection of SNP TSC0060080
ataataattcggt

SEQ ID NO: 245908 - DNA, 13 bp, Artificial Sequence
  Oligonucleotide for detection of SNP TSC0060080
accgaattattat

SEQ ID NO: 245909 - DNA, 13 bp, Artificial Sequence
  Oligonucleotide for detection of SNP TSC0060080
ataatagttcggt

SEQ ID NO: 245910 - DNA, 13 bp, Artificial Sequence
  Oligonucleotide for detection of SNP TSC0060080
accgaactattat

SEQ ID NO: 245911 - DNA, 13 bp, Artificial Sequence
  Oligonucleotide for detection of SNP TSC0060085
gtagtgatattat

SEQ ID NO: 245912 - DNA, 13 bp, Artificial Sequence
  Oligonucleotide for detection of SNP TSC0060085
ataatatcactac

SEQ ID NO: 245913 - DNA, 13 bp, Artificial Sequence
  Oligonucleotide for detection of SNP TSC0060085
gtagtggtattat

SEQ ID NO: 245914 - DNA, 13 bp, Artificial Sequence
  Oligonucleotide for detection of SNP TSC0060085
ataataccactac

SEQ ID NO: 245915 - DNA, 13 bp, Artificial Sequence
  Oligonucleotide for detection of SNP TSC0060086
attgtagtaagag

SEQ ID NO: 245916 - DNA, 13 bp, Artificial Sequence
  Oligonucleotide for detection of SNP TSC0060086
ctcttactacaat

SEQ ID NO: 245917 - DNA, 13 bp, Artificial Sequence
  Oligonucleotide for detection of SNP TSC0060086
attgtaataagag

SEQ ID NO: 245918 - DNA, 13 bp, Artificial Sequence
  Oligonucleotide for detection of SNP TSC0060086
ctcttattacaat

SEQ ID NO: 245919 - DNA, 13 bp, Artificial Sequence
  Oligonucleotide for detection of SNP TSC0060088
tagaggttagggg

SEQ ID NO: 245920 - DNA, 13 bp, Artificial Sequence
  Oligonucleotide for detection of SNP TSC0060088
cccctaacctcta

SEQ ID NO: 245921 - DNA, 13 bp, Artificial Sequence
  Oligonucleotide for detection of SNP TSC0060088
tagagggtagggg

SEQ ID NO: 245922 - DNA, 13 bp, Artificial Sequence
  Oligonucleotide for detection of SNP TSC0060088
cccctaccctcta

SEQ ID NO: 245923 - DNA, 13 bp, Artificial Sequence
  Oligonucleotide for detection of SNP TSC0060089
tgttacgaaattt

SEQ ID NO: 245924 - DNA, 13 bp, Artificial Sequence
  Oligonucleotide for detection of SNP TSC0060089
aaatttcgtaaca

SEQ ID NO: 245925 - DNA, 13 bp, Artificial Sequence
  Oligonucleotide for detection of SNP TSC0060089
aagttttgtagta

SEQ ID NO: 245926 - DNA, 13 bp, Artificial Sequence
  Oligonucleotide for detection of SNP TSC0060089
tactacaaaactt

SEQ ID NO: 245927 - DNA, 13 bp, Artificial Sequence
  Oligonucleotide for detection of SNP TSC0060089
aagtttcgtagta

SEQ ID NO: 245928 - DNA, 13 bp, Artificial Sequence
  Oligonucleotide for detection of SNP TSC0060089
tactacgaaactt

SEQ ID NO: 245929 - DNA, 13 bp, Artificial Sequence
  Oligonucleotide for detection of SNP TSC0060094
atttttttttaag

SEQ ID NO: 245930 - DNA, 13 bp, Artificial Sequence
  Oligonucleotide for detection of SNP TSC0060094
cttaaaaaaaaat

SEQ ID NO: 245931 - DNA, 13 bp, Artificial Sequence
  Oligonucleotide for detection of SNP TSC0060094
atttttgtttaag

SEQ ID NO: 245932 - DNA, 13 bp, Artificial Sequence
  Oligonucleotide for detection of SNP TSC0060094
cttaaacaaaaat

SEQ ID NO: 245933 - DNA, 13 bp, Artificial Sequence
  Oligonucleotide for detection of SNP TSC0060094
tttaaataaaaat

SEQ ID NO: 245934 - DNA, 13 bp, Artificial Sequence
  Oligonucleotide for detection of SNP TSC0060094
atttttatttaaa

SEQ ID NO: 245935 - DNA, 13 bp, Artificial Sequence
  Oligonucleotide for detection of SNP TSC0060095
ataatatgtatta

SEQ ID NO: 245936 - DNA, 13 bp, Artificial Sequence
  Oligonucleotide for detection of SNP TSC0060095
taatacatattat

SEQ ID NO: 245937 - DNA, 13 bp, Artificial Sequence
  Oligonucleotide for detection of SNP TSC0060095
ataatacgtatta

SEQ ID NO: 245938 - DNA, 13 bp, Artificial Sequence
  Oligonucleotide for detection of SNP TSC0060095
taatacgtattat

SEQ ID NO: 245939 - DNA, 13 bp, Artificial Sequence
  Oligonucleotide for detection of SNP TSC0060095
tggtatgtgttat

SEQ ID NO: 245940 - DNA, 13 bp, Artificial Sequence
  Oligonucleotide for detection of SNP TSC0060095
ataacacatacca

SEQ ID NO: 245941 - DNA, 13 bp, Artificial Sequence
  Oligonucleotide for detection of SNP TSC0060095
tggtatatgttat

SEQ ID NO: 245942 - DNA, 13 bp, Artificial Sequence
  Oligonucleotide for detection of SNP TSC0060095
ataacatatacca

SEQ ID NO: 245943 - DNA, 13 bp, Artificial Sequence
  Oligonucleotide for detection of SNP TSC0060095
tggtacgtgttat

SEQ ID NO: 245944 - DNA, 13 bp, Artificial Sequence
  Oligonucleotide for detection of SNP TSC0060095
ataacacgtacca

SEQ ID NO: 245945 - DNA, 13 bp, Artificial Sequence
  Oligonucleotide for detection of SNP TSC0060096
aaaaaattgttta

SEQ ID NO: 245946 - DNA, 13 bp, Artificial Sequence
  Oligonucleotide for detection of SNP TSC0060096
taaacaatttttt

SEQ ID NO: 245947 - DNA, 13 bp, Artificial Sequence
  Oligonucleotide for detection of SNP TSC0060096
aaaaaaatgttta

SEQ ID NO: 245948 - DNA, 13 bp, Artificial Sequence
  Oligonucleotide for detection of SNP TSC0060096
taaacattttttt

SEQ ID NO: 245949 - DNA, 13 bp, Artificial Sequence
  Oligonucleotide for detection of SNP TSC0060097
gtattttttgaat

SEQ ID NO: 245950 - DNA, 13 bp, Artificial Sequence
  Oligonucleotide for detection of SNP TSC0060097
attcaaaaaatac

SEQ ID NO: 245951 - DNA, 13 bp, Artificial Sequence
  Oligonucleotide for detection of SNP TSC0060097
gtatttgttgaat

SEQ ID NO: 245952 - DNA, 13 bp, Artificial Sequence
  Oligonucleotide for detection of SNP TSC0060097
attcaacaaatac

SEQ ID NO: 245953 - DNA, 13 bp, Artificial Sequence
  Oligonucleotide for detection of SNP TSC0060097
atttaagaaatgy

SEQ ID NO: 245954 - DNA, 13 bp, Artificial Sequence
  Oligonucleotide for detection of SNP TSC0060097
rcatttcttaaat

SEQ ID NO: 245955 - DNA, 13 bp, Artificial Sequence
  Oligonucleotide for detection of SNP TSC0060097
atttaataaatgy

SEQ ID NO: 245956 - DNA, 13 bp, Artificial Sequence
  Oligonucleotide for detection of SNP TSC0060097
rcatttattaaat

SEQ ID NO: 245957 - DNA, 13 bp, Artificial Sequence
  Oligonucleotide for detection of SNP TSC0060101
aaaattgtatttt

SEQ ID NO: 245958 - DNA, 13 bp, Artificial Sequence
  Oligonucleotide for detection of SNP TSC0060101
aaaatacaatttt

SEQ ID NO: 245959 - DNA, 13 bp, Artificial Sequence
  Oligonucleotide for detection of SNP TSC0060102
atatagaatagaa

SEQ ID NO: 245960 - DNA, 13 bp, Artificial Sequence
  Oligonucleotide for detection of SNP TSC0060102
ttctattctatat

SEQ ID NO: 245961 - DNA, 13 bp, Artificial Sequence
  Oligonucleotide for detection of SNP TSC0060102
atatagtatagaa

SEQ ID NO: 245962 - DNA, 13 bp, Artificial Sequence
  Oligonucleotide for detection of SNP TSC0060102
ttctatactatat

SEQ ID NO: 245963 - DNA, 13 bp, Artificial Sequence
  Oligonucleotide for detection of SNP TSC0060102
ttttgttttgtat

SEQ ID NO: 245964 - DNA, 13 bp, Artificial Sequence
  Oligonucleotide for detection of SNP TSC0060102
atacaaaacaaaa

SEQ ID NO: 245965 - DNA, 13 bp, Artificial Sequence
  Oligonucleotide for detection of SNP TSC0060102
ttttgtattgtat

SEQ ID NO: 245966 - DNA, 13 bp, Artificial Sequence
  Oligonucleotide for detection of SNP TSC0060102
atacaatacaaaa

SEQ ID NO: 245967 - DNA, 13 bp, Artificial Sequence
  Oligonucleotide for detection of SNP TSC0060103
ttggttgttagty

SEQ ID NO: 245968 - DNA, 13 bp, Artificial Sequence
  Oligonucleotide for detection of SNP TSC0060103
ractaacaaccaa

SEQ ID NO: 245969 - DNA, 13 bp, Artificial Sequence
  Oligonucleotide for detection of SNP TSC0060103
ttggttattagty

SEQ ID NO: 245970 - DNA, 13 bp, Artificial Sequence
  Oligonucleotide for detection of SNP TSC0060103
ractaataaccaa

SEQ ID NO: 245971 - DNA, 13 bp, Artificial Sequence
  Oligonucleotide for detection of SNP TSC0060104
gttaataataatt

SEQ ID NO: 245972 - DNA, 13 bp, Artificial Sequence
  Oligonucleotide for detection of SNP TSC0060104
aattattattaac

SEQ ID NO: 245973 - DNA, 13 bp, Artificial Sequence
  Oligonucleotide for detection of SNP TSC0060104
gttaatgataatt

SEQ ID NO: 245974 - DNA, 13 bp, Artificial Sequence
  Oligonucleotide for detection of SNP TSC0060104
aattatcattaac

SEQ ID NO: 245975 - DNA, 13 bp, Artificial Sequence
  Oligonucleotide for detection of SNP TSC0060104
gttaacgataatt

SEQ ID NO: 245976 - DNA, 13 bp, Artificial Sequence
  Oligonucleotide for detection of SNP TSC0060104
aattatcgttaac

SEQ ID NO: 245977 - DNA, 13 bp, Artificial Sequence
  Oligonucleotide for detection of SNP TSC0060104
agttattgttggy

SEQ ID NO: 245978 - DNA, 13 bp, Artificial Sequence
  Oligonucleotide for detection of SNP TSC0060104
rccaacaataact

SEQ ID NO: 245979 - DNA, 13 bp, Artificial Sequence
  Oligonucleotide for detection of SNP TSC0060104
agttatcgttggy

SEQ ID NO: 245980 - DNA, 13 bp, Artificial Sequence
  Oligonucleotide for detection of SNP TSC0060104
rccaacgataact

SEQ ID NO: 245981 - DNA, 13 bp, Artificial Sequence
  Oligonucleotide for detection of SNP TSC0006786
tatatatagggta

SEQ ID NO: 245982 - DNA, 13 bp, Artificial Sequence
  Oligonucleotide for detection of SNP TSC0006786
taccctatatata

SEQ ID NO: 245983 - DNA, 13 bp, Artificial Sequence
  Oligonucleotide for detection of SNP TSC0006786
tatataaagggta

SEQ ID NO: 245984 - DNA, 13 bp, Artificial Sequence
  Oligonucleotide for detection of SNP TSC0006786
taccctttatata

SEQ ID NO: 245985 - DNA, 13 bp, Artificial Sequence
  Oligonucleotide for detection of SNP TSC0006787
tgtaatatgtgat

SEQ ID NO: 245986 - DNA, 13 bp, Artificial Sequence
  Oligonucleotide for detection of SNP TSC0006787
atcacatattaca

SEQ ID NO: 245987 - DNA, 13 bp, Artificial Sequence
  Oligonucleotide for detection of SNP TSC0006787
tgtaatgtgtgat

SEQ ID NO: 245988 - DNA, 13 bp, Artificial Sequence
  Oligonucleotide for detection of SNP TSC0006787
atcacacattaca

SEQ ID NO: 245989 - DNA, 13 bp, Artificial Sequence
  Oligonucleotide for detection of SNP TSC0006787
tgtaacgtgtgat

SEQ ID NO: 245990 - DNA, 13 bp, Artificial Sequence
  Oligonucleotide for detection of SNP TSC0006787
atcacacgttaca

SEQ ID NO: 245991 - DNA, 13 bp, Artificial Sequence
  Oligonucleotide for detection of SNP TSC0006787
attatatgttata

SEQ ID NO: 245992 - DNA, 13 bp, Artificial Sequence
  Oligonucleotide for detection of SNP TSC0006787
tataacatataat

SEQ ID NO: 245993 - DNA, 13 bp, Artificial Sequence
  Oligonucleotide for detection of SNP TSC0006787
attatacgttata

SEQ ID NO: 245994 - DNA, 13 bp, Artificial Sequence
  Oligonucleotide for detection of SNP TSC0006787
tataacgtataat

SEQ ID NO: 245995 - DNA, 13 bp, Artificial Sequence
  Oligonucleotide for detection of SNP TSC0060106
tttagtatggtty

SEQ ID NO: 245996 - DNA, 13 bp, Artificial Sequence
  Oligonucleotide for detection of SNP TSC0060106
raaccatactaaa

SEQ ID NO: 245997 - DNA, 13 bp, Artificial Sequence
  Oligonucleotide for detection of SNP TSC0060106
tttagtttggtty

SEQ ID NO: 245998 - DNA, 13 bp, Artificial Sequence
  Oligonucleotide for detection of SNP TSC0060106
raaccaaactaaa

SEQ ID NO: 245999 - DNA, 13 bp, Artificial Sequence
  Oligonucleotide for detection of SNP TSC0060106
ggattatgttaga

SEQ ID NO: 246000 - DNA, 13 bp, Artificial Sequence
  Oligonucleotide for detection of SNP TSC0060106
tctaacataatcc

SEQ ID NO: 246001 - DNA, 13 bp, Artificial Sequence
  Oligonucleotide for detection of SNP TSC0060106
ggattaagttaga

SEQ ID NO: 246002 - DNA, 13 bp, Artificial Sequence
  Oligonucleotide for detection of SNP TSC0060106
tctaacttaatcc

SEQ ID NO: 246003 - DNA, 13 bp, Artificial Sequence
  Oligonucleotide for detection of SNP TSC0060108
ggtaatgtattgg

SEQ ID NO: 246004 - DNA, 13 bp, Artificial Sequence
  Oligonucleotide for detection of SNP TSC0060108
ccaatacattacc

SEQ ID NO: 246005 - DNA, 13 bp, Artificial Sequence
  Oligonucleotide for detection of SNP TSC0060108
ggtaatatattgg

SEQ ID NO: 246006 - DNA, 13 bp, Artificial Sequence
  Oligonucleotide for detection of SNP TSC0060108
ccaatatattacc

SEQ ID NO: 246007 - DNA, 13 bp, Artificial Sequence
  Oligonucleotide for detection of SNP TSC0060108
ggtaacgtattgg

SEQ ID NO: 246008 - DNA, 13 bp, Artificial Sequence
  Oligonucleotide for detection of SNP TSC0060108
ccaatacgttacc

SEQ ID NO: 246009 - DNA, 13 bp, Artificial Sequence
  Oligonucleotide for detection of SNP TSC0060109
atttattttttcg

SEQ ID NO: 246010 - DNA, 13 bp, Artificial Sequence
  Oligonucleotide for detection of SNP TSC0060109
cgaaaaaataaat

SEQ ID NO: 246011 - DNA, 13 bp, Artificial Sequence
  Oligonucleotide for detection of SNP TSC0060109
atttatgttttcg

SEQ ID NO: 246012 - DNA, 13 bp, Artificial Sequence
  Oligonucleotide for detection of SNP TSC0060109
cgaaaacataaat

SEQ ID NO: 246013 - DNA, 13 bp, Artificial Sequence
  Oligonucleotide for detection of SNP TSC0060109
atttacgttttcg

SEQ ID NO: 246014 - DNA, 13 bp, Artificial Sequence
  Oligonucleotide for detection of SNP TSC0060109
cgaaaacgtaaat

SEQ ID NO: 246015 - DNA, 13 bp, Artificial Sequence
  Oligonucleotide for detection of SNP TSC0060109
tgagggagtgagt

SEQ ID NO: 246016 - DNA, 13 bp, Artificial Sequence
  Oligonucleotide for detection of SNP TSC0060109
actcactccctca

SEQ ID NO: 246017 - DNA, 13 bp, Artificial Sequence
  Oligonucleotide for detection of SNP TSC0060109
tgagggtgtgagt

SEQ ID NO: 246018 - DNA, 13 bp, Artificial Sequence
  Oligonucleotide for detection of SNP TSC0060109
actcacaccctca

SEQ ID NO: 246019 - DNA, 13 bp, Artificial Sequence
  Oligonucleotide for detection of SNP TSC0060109
cgagggagtgagt

SEQ ID NO: 246020 - DNA, 13 bp, Artificial Sequence
  Oligonucleotide for detection of SNP TSC0060109
actcactccctcg

SEQ ID NO: 246021 - DNA, 13 bp, Artificial Sequence
  Oligonucleotide for detection of SNP TSC0060109
cgagggtgtgagt

SEQ ID NO: 246022 - DNA, 13 bp, Artificial Sequence
  Oligonucleotide for detection of SNP TSC0060109
actcacaccctcg

SEQ ID NO: 246023 - DNA, 13 bp, Artificial Sequence
  Oligonucleotide for detection of SNP TSC0060109
tgagggcgtgagt

SEQ ID NO: 246024 - DNA, 13 bp, Artificial Sequence
  Oligonucleotide for detection of SNP TSC0060109
actcacgccctca

SEQ ID NO: 246025 - DNA, 13 bp, Artificial Sequence
  Oligonucleotide for detection of SNP TSC0060109
cgagggcgtgagt

SEQ ID NO: 246026 - DNA, 13 bp, Artificial Sequence
  Oligonucleotide for detection of SNP TSC0060109
actcacgccctcg

SEQ ID NO: 246027 - DNA, 13 bp, Artificial Sequence
  Oligonucleotide for detection of SNP TSC0060110
aggagatgtgggy

SEQ ID NO: 246028 - DNA, 13 bp, Artificial Sequence
  Oligonucleotide for detection of SNP TSC0060110
rcccacatctcct

SEQ ID NO: 246029 - DNA, 13 bp, Artificial Sequence
  Oligonucleotide for detection of SNP TSC0060110
aggagaagtgggy

SEQ ID NO: 246030 - DNA, 13 bp, Artificial Sequence
  Oligonucleotide for detection of SNP TSC0060110
rcccacttctcct

SEQ ID NO: 246031 - DNA, 13 bp, Artificial Sequence
  Oligonucleotide for detection of SNP TSC0060111
agtgtaagtagat

SEQ ID NO: 246032 - DNA, 13 bp, Artificial Sequence
  Oligonucleotide for detection of SNP TSC0060111
atctacttacact

SEQ ID NO: 246033 - DNA, 13 bp, Artificial Sequence
  Oligonucleotide for detection of SNP TSC0060111
agtgtaggtagat

SEQ ID NO: 246034 - DNA, 13 bp, Artificial Sequence
  Oligonucleotide for detection of SNP TSC0060111
atctacctacact

SEQ ID NO: 246035 - DNA, 13 bp, Artificial Sequence
  Oligonucleotide for detection of SNP TSC0060116
tttagagaagtta

SEQ ID NO: 246036 - DNA, 13 bp, Artificial Sequence
  Oligonucleotide for detection of SNP TSC0060116
taacttctctaaa

SEQ ID NO: 246037 - DNA, 13 bp, Artificial Sequence
  Oligonucleotide for detection of SNP TSC0060116
tttagaaaagtta

SEQ ID NO: 246038 - DNA, 13 bp, Artificial Sequence
  Oligonucleotide for detection of SNP TSC0060116
taacttttctaaa

SEQ ID NO: 246039 - DNA, 13 bp, Artificial Sequence
  Oligonucleotide for detection of SNP TSC0060117
gtggtggggtata

SEQ ID NO: 246040 - DNA, 13 bp, Artificial Sequence
  Oligonucleotide for detection of SNP TSC0060117
tataccccaccac

SEQ ID NO: 246041 - DNA, 13 bp, Artificial Sequence
  Oligonucleotide for detection of SNP TSC0060117
gtggtgaggtata

SEQ ID NO: 246042 - DNA, 13 bp, Artificial Sequence
  Oligonucleotide for detection of SNP TSC0060117
tatacctcaccac

SEQ ID NO: 246043 - DNA, 13 bp, Artificial Sequence
  Oligonucleotide for detection of SNP TSC0060118
aatttagtgagag

SEQ ID NO: 246044 - DNA, 13 bp, Artificial Sequence
  Oligonucleotide for detection of SNP TSC0060118
ctctcactaaatt

SEQ ID NO: 246045 - DNA, 13 bp, Artificial Sequence
  Oligonucleotide for detection of SNP TSC0060118
aatttagcgagag

SEQ ID NO: 246046 - DNA, 13 bp, Artificial Sequence
  Oligonucleotide for detection of SNP TSC0060118
ctctcgctaaatt

SEQ ID NO: 246047 - DNA, 13 bp, Artificial Sequence
  Oligonucleotide for detection of SNP TSC0060118
aatttaacgagag

SEQ ID NO: 246048 - DNA, 13 bp, Artificial Sequence
  Oligonucleotide for detection of SNP TSC0060118
ctctcgttaaatt

SEQ ID NO: 246049 - DNA, 13 bp, Artificial Sequence
  Oligonucleotide for detection of SNP TSC0060119
gttgttgtaggtt

SEQ ID NO: 246050 - DNA, 13 bp, Artificial Sequence
  Oligonucleotide for detection of SNP TSC0060119
aacctacaacaac

SEQ ID NO: 246051 - DNA, 13 bp, Artificial Sequence
  Oligonucleotide for detection of SNP TSC0060119
gttgttataggtt

SEQ ID NO: 246052 - DNA, 13 bp, Artificial Sequence
  Oligonucleotide for detection of SNP TSC0060119
aacctataacaac

SEQ ID NO: 246053 - DNA, 13 bp, Artificial Sequence
  Oligonucleotide for detection of SNP TSC0060120
gatataaggggtg

SEQ ID NO: 246054 - DNA, 13 bp, Artificial Sequence
  Oligonucleotide for detection of SNP TSC0060120
caccccttatatc

SEQ ID NO: 246055 - DNA, 13 bp, Artificial Sequence
  Oligonucleotide for detection of SNP TSC0060120
gatatagggggtg

SEQ ID NO: 246056 - DNA, 13 bp, Artificial Sequence
  Oligonucleotide for detection of SNP TSC0060120
caccccctatatc

SEQ ID NO: 246057 - DNA, 13 bp, Artificial Sequence
  Oligonucleotide for detection of SNP TSC0060121
taaaagatatata

SEQ ID NO: 246058 - DNA, 13 bp, Artificial Sequence
  Oligonucleotide for detection of SNP TSC0060121
tatatatctttta

SEQ ID NO: 246059 - DNA, 13 bp, Artificial Sequence
  Oligonucleotide for detection of SNP TSC0060121
taaaagttatata

SEQ ID NO: 246060 - DNA, 13 bp, Artificial Sequence
  Oligonucleotide for detection of SNP TSC0060121
tatataactttta

SEQ ID NO: 246061 - DNA, 13 bp, Artificial Sequence
  Oligonucleotide for detection of SNP TSC0060121
tgtatgttttttg

SEQ ID NO: 246062 - DNA, 13 bp, Artificial Sequence
  Oligonucleotide for detection of SNP TSC0060121
caaaaaacataca

SEQ ID NO: 246063 - DNA, 13 bp, Artificial Sequence
  Oligonucleotide for detection of SNP TSC0060121
tgtatgatttttg

SEQ ID NO: 246064 - DNA, 13 bp, Artificial Sequence
  Oligonucleotide for detection of SNP TSC0060121
caaaaatcataca

SEQ ID NO: 246065 - DNA, 13 bp, Artificial Sequence
  Oligonucleotide for detection of SNP TSC0060122
ttatgatgtttga

SEQ ID NO: 246066 - DNA, 13 bp, Artificial Sequence
  Oligonucleotide for detection of SNP TSC0060122
tcaaacatcataa

SEQ ID NO: 246067 - DNA, 13 bp, Artificial Sequence
  Oligonucleotide for detection of SNP TSC0060122
ttatgacgtttga

SEQ ID NO: 246068 - DNA, 13 bp, Artificial Sequence
  Oligonucleotide for detection of SNP TSC0060122
tcaaacgtcataa

SEQ ID NO: 246069 - DNA, 13 bp, Artificial Sequence
  Oligonucleotide for detection of SNP TSC0060122
ttaagtgttatag

SEQ ID NO: 246070 - DNA, 13 bp, Artificial Sequence
  Oligonucleotide for detection of SNP TSC0060122
ctataacacttaa

SEQ ID NO: 246071 - DNA, 13 bp, Artificial Sequence
  Oligonucleotide for detection of SNP TSC0060122
ttaagtattatag

SEQ ID NO: 246072 - DNA, 13 bp, Artificial Sequence
  Oligonucleotide for detection of SNP TSC0060122
ctataatacttaa

SEQ ID NO: 246073 - DNA, 13 bp, Artificial Sequence
  Oligonucleotide for detection of SNP TSC0060122
ttaagcgttatag

SEQ ID NO: 246074 - DNA, 13 bp, Artificial Sequence
  Oligonucleotide for detection of SNP TSC0060122
ctataacgcttaa

SEQ ID NO: 246075 - DNA, 13 bp, Artificial Sequence
  Oligonucleotide for detection of SNP TSC0060123
tttatagtatgta

SEQ ID NO: 246076 - DNA, 13 bp, Artificial Sequence
  Oligonucleotide for detection of SNP TSC0060123
tacatactataaa

SEQ ID NO: 246077 - DNA, 13 bp, Artificial Sequence
  Oligonucleotide for detection of SNP TSC0060123
tttataatatgta

SEQ ID NO: 246078 - DNA, 13 bp, Artificial Sequence
  Oligonucleotide for detection of SNP TSC0060123
tacatattataaa

SEQ ID NO: 246079 - DNA, 13 bp, Artificial Sequence
  Oligonucleotide for detection of SNP TSC0060124
tttttatgagagt

SEQ ID NO: 246080 - DNA, 13 bp, Artificial Sequence
  Oligonucleotide for detection of SNP TSC0060124
actctcataaaaa

SEQ ID NO: 246081 - DNA, 13 bp, Artificial Sequence
  Oligonucleotide for detection of SNP TSC0060124
tttttacgagagt

SEQ ID NO: 246082 - DNA, 13 bp, Artificial Sequence
  Oligonucleotide for detection of SNP TSC0060124
actctcgtaaaaa

SEQ ID NO: 246083 - DNA, 13 bp, Artificial Sequence
  Oligonucleotide for detection of SNP TSC0060124
atttttgtgagaa

SEQ ID NO: 246084 - DNA, 13 bp, Artificial Sequence
  Oligonucleotide for detection of SNP TSC0060124
ttctcacaaaaat

SEQ ID NO: 246085 - DNA, 13 bp, Artificial Sequence
  Oligonucleotide for detection of SNP TSC0060124
atttttatgagaa

SEQ ID NO: 246086 - DNA, 13 bp, Artificial Sequence
  Oligonucleotide for detection of SNP TSC0060124
ttctcataaaaat

SEQ ID NO: 246087 - DNA, 13 bp, Artificial Sequence
  Oligonucleotide for detection of SNP TSC0060124
attttcgtgagaa

SEQ ID NO: 246088 - DNA, 13 bp, Artificial Sequence
  Oligonucleotide for detection of SNP TSC0060124
ttctcacgaaaat

SEQ ID NO: 246089 - DNA, 13 bp, Artificial Sequence
  Oligonucleotide for detection of SNP TSC0060125
ggatatggagttt

SEQ ID NO: 246090 - DNA, 13 bp, Artificial Sequence
  Oligonucleotide for detection of SNP TSC0060125
aaactccatatcc

SEQ ID NO: 246091 - DNA, 13 bp, Artificial Sequence
  Oligonucleotide for detection of SNP TSC0060125
ggatatagagttt

SEQ ID NO: 246092 - DNA, 13 bp, Artificial Sequence
  Oligonucleotide for detection of SNP TSC0060125
aaactctatatcc

SEQ ID NO: 246093 - DNA, 13 bp, Artificial Sequence
  Oligonucleotide for detection of SNP TSC0060126
agtagtatttgty

SEQ ID NO: 246094 - DNA, 13 bp, Artificial Sequence
  Oligonucleotide for detection of SNP TSC0060126
racaaatactact

SEQ ID NO: 246095 - DNA, 13 bp, Artificial Sequence
  Oligonucleotide for detection of SNP TSC0060126
agtagtgtttgty

SEQ ID NO: 246096 - DNA, 13 bp, Artificial Sequence
  Oligonucleotide for detection of SNP TSC0060126
racaaacactact

SEQ ID NO: 246097 - DNA, 13 bp, Artificial Sequence
  Oligonucleotide for detection of SNP TSC0060127
attttgaaaataa

SEQ ID NO: 246098 - DNA, 13 bp, Artificial Sequence
  Oligonucleotide for detection of SNP TSC0060127
ttattttcaaaat

SEQ ID NO: 246099 - DNA, 13 bp, Artificial Sequence
  Oligonucleotide for detection of SNP TSC0060127
attttggaaataa

SEQ ID NO: 246100 - DNA, 13 bp, Artificial Sequence
  Oligonucleotide for detection of SNP TSC0060127
ttatttccaaaat

SEQ ID NO: 246101 - DNA, 13 bp, Artificial Sequence
  Oligonucleotide for detection of SNP TSC0060128
tttttagttgatt

SEQ ID NO: 246102 - DNA, 13 bp, Artificial Sequence
  Oligonucleotide for detection of SNP TSC0060128
aatcaactaaaaa

SEQ ID NO: 246103 - DNA, 13 bp, Artificial Sequence
  Oligonucleotide for detection of SNP TSC0060128
tttttaattgatt

SEQ ID NO: 246104 - DNA, 13 bp, Artificial Sequence
  Oligonucleotide for detection of SNP TSC0060128
aatcaattaaaaa

SEQ ID NO: 246105 - DNA, 13 bp, Artificial Sequence
  Oligonucleotide for detection of SNP TSC0060129
gttttttgaaagg

SEQ ID NO: 246106 - DNA, 13 bp, Artificial Sequence
  Oligonucleotide for detection of SNP TSC0060129
cctttcaaaaaac

SEQ ID NO: 246107 - DNA, 13 bp, Artificial Sequence
  Oligonucleotide for detection of SNP TSC0060129
gtttttcgaaagg

SEQ ID NO: 246108 - DNA, 13 bp, Artificial Sequence
  Oligonucleotide for detection of SNP TSC0060129
cctttcgaaaaac

SEQ ID NO: 246109 - DNA, 13 bp, Artificial Sequence
  Oligonucleotide for detection of SNP TSC0060129
ttttttggaaggy

SEQ ID NO: 246110 - DNA, 13 bp, Artificial Sequence
  Oligonucleotide for detection of SNP TSC0060129
rccttccaaaaaa

SEQ ID NO: 246111 - DNA, 13 bp, Artificial Sequence
  Oligonucleotide for detection of SNP TSC0060129
ttttttagaaggy

SEQ ID NO: 246112 - DNA, 13 bp, Artificial Sequence
  Oligonucleotide for detection of SNP TSC0060129
rccttctaaaaaa

SEQ ID NO: 246113 - DNA, 13 bp, Artificial Sequence
  Oligonucleotide for detection of SNP TSC0060129
tttttcggaaggy

SEQ ID NO: 246114 - DNA, 13 bp, Artificial Sequence
  Oligonucleotide for detection of SNP TSC0060129
rccttccgaaaaa

SEQ ID NO: 246115 - DNA, 13 bp, Artificial Sequence
  Oligonucleotide for detection of SNP TSC0060130
aagtttatgagay

SEQ ID NO: 246116 - DNA, 13 bp, Artificial Sequence
  Oligonucleotide for detection of SNP TSC0060130
rtctcataaactt

SEQ ID NO: 246117 - DNA, 13 bp, Artificial Sequence
  Oligonucleotide for detection of SNP TSC0060130
aagtttgtgagay

SEQ ID NO: 246118 - DNA, 13 bp, Artificial Sequence
  Oligonucleotide for detection of SNP TSC0060130
rtctcacaaactt

SEQ ID NO: 246119 - DNA, 13 bp, Artificial Sequence
  Oligonucleotide for detection of SNP TSC0060131
ttagtaatatttg

SEQ ID NO: 246120 - DNA, 13 bp, Artificial Sequence
  Oligonucleotide for detection of SNP TSC0060131
caaatattactaa

SEQ ID NO: 246121 - DNA, 13 bp, Artificial Sequence
  Oligonucleotide for detection of SNP TSC0060131
ttagtattatttg

SEQ ID NO: 246122 - DNA, 13 bp, Artificial Sequence
  Oligonucleotide for detection of SNP TSC0060131
caaataatactaa

SEQ ID NO: 246123 - DNA, 13 bp, Artificial Sequence
  Oligonucleotide for detection of SNP TSC0060131
tagatattattgg

SEQ ID NO: 246124 - DNA, 13 bp, Artificial Sequence
  Oligonucleotide for detection of SNP TSC0060131
ccaataatatcta

SEQ ID NO: 246125 - DNA, 13 bp, Artificial Sequence
  Oligonucleotide for detection of SNP TSC0060131
tagatagtattgg

SEQ ID NO: 246126 - DNA, 13 bp, Artificial Sequence
  Oligonucleotide for detection of SNP TSC0060131
ccaatactatcta

SEQ ID NO: 246127 - DNA, 13 bp, Artificial Sequence
  Oligonucleotide for detection of SNP TSC0060132
aattataatatat

SEQ ID NO: 246128 - DNA, 13 bp, Artificial Sequence
  Oligonucleotide for detection of SNP TSC0060132
atatattataatt

SEQ ID NO: 246129 - DNA, 13 bp, Artificial Sequence
  Oligonucleotide for detection of SNP TSC0060132
aattatgatatat

SEQ ID NO: 246130 - DNA, 13 bp, Artificial Sequence
  Oligonucleotide for detection of SNP TSC0060132
atatatcataatt

SEQ ID NO: 246131 - DNA, 13 bp, Artificial Sequence
  Oligonucleotide for detection of SNP TSC0060133
tttaataggttat

SEQ ID NO: 246132 - DNA, 13 bp, Artificial Sequence
  Oligonucleotide for detection of SNP TSC0060133
ataacctattaaa

SEQ ID NO: 246133 - DNA, 13 bp, Artificial Sequence
  Oligonucleotide for detection of SNP TSC0060133
tttaatgggttat

SEQ ID NO: 246134 - DNA, 13 bp, Artificial Sequence
  Oligonucleotide for detection of SNP TSC0060133
ataacccattaaa

SEQ ID NO: 246135 - DNA, 13 bp, Artificial Sequence
  Oligonucleotide for detection of SNP TSC0060134
gttttaatgagty

SEQ ID NO: 246136 - DNA, 13 bp, Artificial Sequence
  Oligonucleotide for detection of SNP TSC0060134
ractcattaaaac

SEQ ID NO: 246137 - DNA, 13 bp, Artificial Sequence
  Oligonucleotide for detection of SNP TSC0060134
gttttagtgagty

SEQ ID NO: 246138 - DNA, 13 bp, Artificial Sequence
  Oligonucleotide for detection of SNP TSC0060134
ractcactaaaac

SEQ ID NO: 246139 - DNA, 13 bp, Artificial Sequence
  Oligonucleotide for detection of SNP TSC0060135
ttaaaataaatgt

SEQ ID NO: 246140 - DNA, 13 bp, Artificial Sequence
  Oligonucleotide for detection of SNP TSC0060135
acatttattttaa

SEQ ID NO: 246141 - DNA, 13 bp, Artificial Sequence
  Oligonucleotide for detection of SNP TSC0060135
ttaaaagaaatgt

SEQ ID NO: 246142 - DNA, 13 bp, Artificial Sequence
  Oligonucleotide for detection of SNP TSC0060135
acatttcttttaa

SEQ ID NO: 246143 - DNA, 13 bp, Artificial Sequence
  Oligonucleotide for detection of SNP TSC0060136
tagaatagatatt

SEQ ID NO: 246144 - DNA, 13 bp, Artificial Sequence
  Oligonucleotide for detection of SNP TSC0060136
aatatctattcta

SEQ ID NO: 246145 - DNA, 13 bp, Artificial Sequence
  Oligonucleotide for detection of SNP TSC0060136
tagaatggatatt

SEQ ID NO: 246146 - DNA, 13 bp, Artificial Sequence
  Oligonucleotide for detection of SNP TSC0060136
aatatccattcta

SEQ ID NO: 246147 - DNA, 13 bp, Artificial Sequence
  Oligonucleotide for detection of SNP TSC0060137
ataattattttgt

SEQ ID NO: 246148 - DNA, 13 bp, Artificial Sequence
  Oligonucleotide for detection of SNP TSC0060137
acaaaataattat

SEQ ID NO: 246149 - DNA, 13 bp, Artificial Sequence
  Oligonucleotide for detection of SNP TSC0060137
ataattgttttgt

SEQ ID NO: 246150 - DNA, 13 bp, Artificial Sequence
  Oligonucleotide for detection of SNP TSC0060137
acaaaacaattat

SEQ ID NO: 246151 - DNA, 13 bp, Artificial Sequence
  Oligonucleotide for detection of SNP TSC0060138
atttaaagattta

SEQ ID NO: 246152 - DNA, 13 bp, Artificial Sequence
  Oligonucleotide for detection of SNP TSC0060138
taaatctttaaat

SEQ ID NO: 246153 - DNA, 13 bp, Artificial Sequence
  Oligonucleotide for detection of SNP TSC0060138
atttaaggattta

SEQ ID NO: 246154 - DNA, 13 bp, Artificial Sequence
  Oligonucleotide for detection of SNP TSC0060138
taaatccttaaat

SEQ ID NO: 246155 - DNA, 13 bp, Artificial Sequence
  Oligonucleotide for detection of SNP TSC0060142
ttattttggtggy

SEQ ID NO: 246156 - DNA, 13 bp, Artificial Sequence
  Oligonucleotide for detection of SNP TSC0060142
rccaccaaaataa

SEQ ID NO: 246157 - DNA, 13 bp, Artificial Sequence
  Oligonucleotide for detection of SNP TSC0060142
ttatttgggtggy

SEQ ID NO: 246158 - DNA, 13 bp, Artificial Sequence
  Oligonucleotide for detection of SNP TSC0060142
rccacccaaataa

SEQ ID NO: 246159 - DNA, 13 bp, Artificial Sequence
  Oligonucleotide for detection of SNP TSC0060142
ttattcgggtggy

SEQ ID NO: 246160 - DNA, 13 bp, Artificial Sequence
  Oligonucleotide for detection of SNP TSC0060142
rccacccgaataa

SEQ ID NO: 246161 - DNA, 13 bp, Artificial Sequence
  Oligonucleotide for detection of SNP TSC0060142
gttattagagtag

SEQ ID NO: 246162 - DNA, 13 bp, Artificial Sequence
  Oligonucleotide for detection of SNP TSC0060142
ctactctaataac

SEQ ID NO: 246163 - DNA, 13 bp, Artificial Sequence
  Oligonucleotide for detection of SNP TSC0060142
gttatttgagtag

SEQ ID NO: 246164 - DNA, 13 bp, Artificial Sequence
  Oligonucleotide for detection of SNP TSC0060142
ctactcaaataac

SEQ ID NO: 246165 - DNA, 13 bp, Artificial Sequence
  Oligonucleotide for detection of SNP TSC0060142
gttattcgagtag

SEQ ID NO: 246166 - DNA, 13 bp, Artificial Sequence
  Oligonucleotide for detection of SNP TSC0060142
ctactcgaataac

SEQ ID NO: 246167 - DNA, 13 bp, Artificial Sequence
  Oligonucleotide for detection of SNP TSC0060147
tagtaatgttgay

SEQ ID NO: 246168 - DNA, 13 bp, Artificial Sequence
  Oligonucleotide for detection of SNP TSC0060147
rtcaacattacta

SEQ ID NO: 246169 - DNA, 13 bp, Artificial Sequence
  Oligonucleotide for detection of SNP TSC0060147
tagtaacgttgay

SEQ ID NO: 246170 - DNA, 13 bp, Artificial Sequence
  Oligonucleotide for detection of SNP TSC0060147
rtcaacgttacta

SEQ ID NO: 246171 - DNA, 13 bp, Artificial Sequence
  Oligonucleotide for detection of SNP TSC0060147
gttaatgttgtta

SEQ ID NO: 246172 - DNA, 13 bp, Artificial Sequence
  Oligonucleotide for detection of SNP TSC0060147
taacaacattaac

SEQ ID NO: 246173 - DNA, 13 bp, Artificial Sequence
  Oligonucleotide for detection of SNP TSC0060147
gttaatattgtta

SEQ ID NO: 246174 - DNA, 13 bp, Artificial Sequence
  Oligonucleotide for detection of SNP TSC0060147
taacaatattaac

SEQ ID NO: 246175 - DNA, 13 bp, Artificial Sequence
  Oligonucleotide for detection of SNP TSC0060147
gttaacgttgtta

SEQ ID NO: 246176 - DNA, 13 bp, Artificial Sequence
  Oligonucleotide for detection of SNP TSC0060147
taacaacgttaac

SEQ ID NO: 246177 - DNA, 13 bp, Artificial Sequence
  Oligonucleotide for detection of SNP TSC0060148
agggaggaagaaa

SEQ ID NO: 246178 - DNA, 13 bp, Artificial Sequence
  Oligonucleotide for detection of SNP TSC0060148
tttcttcctccct

SEQ ID NO: 246179 - DNA, 13 bp, Artificial Sequence
  Oligonucleotide for detection of SNP TSC0060148
agggagaaagaaa

SEQ ID NO: 246180 - DNA, 13 bp, Artificial Sequence
  Oligonucleotide for detection of SNP TSC0060148
tttctttctccct

SEQ ID NO: 246181 - DNA, 13 bp, Artificial Sequence
  Oligonucleotide for detection of SNP TSC0060150
atattatagttag

SEQ ID NO: 246182 - DNA, 13 bp, Artificial Sequence
  Oligonucleotide for detection of SNP TSC0060150
ctaactataatat

SEQ ID NO: 246183 - DNA, 13 bp, Artificial Sequence
  Oligonucleotide for detection of SNP TSC0060150
atattagagttag

SEQ ID NO: 246184 - DNA, 13 bp, Artificial Sequence
  Oligonucleotide for detection of SNP TSC0060150
ctaactctaatat

SEQ ID NO: 246185 - DNA, 13 bp, Artificial Sequence
  Oligonucleotide for detection of SNP TSC0060150
ttaattgtaatat

SEQ ID NO: 246186 - DNA, 13 bp, Artificial Sequence
  Oligonucleotide for detection of SNP TSC0060150
atattacaattaa

SEQ ID NO: 246187 - DNA, 13 bp, Artificial Sequence
  Oligonucleotide for detection of SNP TSC0060151
tgattaaaattta

SEQ ID NO: 246188 - DNA, 13 bp, Artificial Sequence
  Oligonucleotide for detection of SNP TSC0060151
taaattttaatca

SEQ ID NO: 246189 - DNA, 13 bp, Artificial Sequence
  Oligonucleotide for detection of SNP TSC0060159
aaaaagaaaaggg

SEQ ID NO: 246190 - DNA, 13 bp, Artificial Sequence
  Oligonucleotide for detection of SNP TSC0060159
cccttttcttttt

SEQ ID NO: 246191 - DNA, 13 bp, Artificial Sequence
  Oligonucleotide for detection of SNP TSC0060159
aaaaaggaaaggg

SEQ ID NO: 246192 - DNA, 13 bp, Artificial Sequence
  Oligonucleotide for detection of SNP TSC0060159
ccctttccttttt

SEQ ID NO: 246193 - DNA, 13 bp, Artificial Sequence
  Oligonucleotide for detection of SNP TSC0060160
gtaagagatagtg

SEQ ID NO: 246194 - DNA, 13 bp, Artificial Sequence
  Oligonucleotide for detection of SNP TSC0060160
cactatctcttac

SEQ ID NO: 246195 - DNA, 13 bp, Artificial Sequence
  Oligonucleotide for detection of SNP TSC0060160
gtaagaaatagtg

SEQ ID NO: 246196 - DNA, 13 bp, Artificial Sequence
  Oligonucleotide for detection of SNP TSC0060160
cactatttcttac

SEQ ID NO: 246197 - DNA, 13 bp, Artificial Sequence
  Oligonucleotide for detection of SNP TSC0060161
gggtattggggaa

SEQ ID NO: 246198 - DNA, 13 bp, Artificial Sequence
  Oligonucleotide for detection of SNP TSC0060161
ttccccaataccc

SEQ ID NO: 246199 - DNA, 13 bp, Artificial Sequence
  Oligonucleotide for detection of SNP TSC0060161
gggtatcggggaa

SEQ ID NO: 246200 - DNA, 13 bp, Artificial Sequence
  Oligonucleotide for detection of SNP TSC0060161
ttccccgataccc

SEQ ID NO: 246201 - DNA, 13 bp, Artificial Sequence
  Oligonucleotide for detection of SNP TSC0060161
ttttttggtatty

SEQ ID NO: 246202 - DNA, 13 bp, Artificial Sequence
  Oligonucleotide for detection of SNP TSC0060161
raataccaaaaaa

SEQ ID NO: 246203 - DNA, 13 bp, Artificial Sequence
  Oligonucleotide for detection of SNP TSC0060161
tttttcggtatty

SEQ ID NO: 246204 - DNA, 13 bp, Artificial Sequence
  Oligonucleotide for detection of SNP TSC0060161
raataccgaaaaa

SEQ ID NO: 246205 - DNA, 13 bp, Artificial Sequence
  Oligonucleotide for detection of SNP TSC0060162
gtaaaggggagta

SEQ ID NO: 246206 - DNA, 13 bp, Artificial Sequence
  Oligonucleotide for detection of SNP TSC0060162
tactcccctttac

SEQ ID NO: 246207 - DNA, 13 bp, Artificial Sequence
  Oligonucleotide for detection of SNP TSC0060162
gtaaagaggagta

SEQ ID NO: 246208 - DNA, 13 bp, Artificial Sequence
  Oligonucleotide for detection of SNP TSC0060162
tactcctctttac

SEQ ID NO: 246209 - DNA, 13 bp, Artificial Sequence
  Oligonucleotide for detection of SNP TSC0060164
atattgagtttat

SEQ ID NO: 246210 - DNA, 13 bp, Artificial Sequence
  Oligonucleotide for detection of SNP TSC0060164
ataaactcaatat

SEQ ID NO: 246211 - DNA, 13 bp, Artificial Sequence
  Oligonucleotide for detection of SNP TSC0060164
atattgggtttat

SEQ ID NO: 246212 - DNA, 13 bp, Artificial Sequence
  Oligonucleotide for detection of SNP TSC0060164
ataaacccaatat

SEQ ID NO: 246213 - DNA, 13 bp, Artificial Sequence
  Oligonucleotide for detection of SNP TSC0060165
gttaaatagtttt

SEQ ID NO: 246214 - DNA, 13 bp, Artificial Sequence
  Oligonucleotide for detection of SNP TSC0060165
aaaactatttaac

SEQ ID NO: 246215 - DNA, 13 bp, Artificial Sequence
  Oligonucleotide for detection of SNP TSC0060165
gttaaagagtttt

SEQ ID NO: 246216 - DNA, 13 bp, Artificial Sequence
  Oligonucleotide for detection of SNP TSC0060165
aaaactctttaac

SEQ ID NO: 246217 - DNA, 13 bp, Artificial Sequence
  Oligonucleotide for detection of SNP TSC0060165
agaattgtttggy

SEQ ID NO: 246218 - DNA, 13 bp, Artificial Sequence
  Oligonucleotide for detection of SNP TSC0060165
rccaaacaattct

SEQ ID NO: 246219 - DNA, 13 bp, Artificial Sequence
  Oligonucleotide for detection of SNP TSC0060165
agaattttttggy

SEQ ID NO: 246220 - DNA, 13 bp, Artificial Sequence
  Oligonucleotide for detection of SNP TSC0060165
rccaaaaaattct

SEQ ID NO: 246221 - DNA, 13 bp, Artificial Sequence
  Oligonucleotide for detection of SNP TSC0060166
atgattttgaaat

SEQ ID NO: 246222 - DNA, 13 bp, Artificial Sequence
  Oligonucleotide for detection of SNP TSC0060166
atttcaaaatcat

SEQ ID NO: 246223 - DNA, 13 bp, Artificial Sequence
  Oligonucleotide for detection of SNP TSC0060166
atgattgtgaaat

SEQ ID NO: 246224 - DNA, 13 bp, Artificial Sequence
  Oligonucleotide for detection of SNP TSC0060166
atttcacaatcat

SEQ ID NO: 246225 - DNA, 13 bp, Artificial Sequence
  Oligonucleotide for detection of SNP TSC0060167
gtttttagaggaa

SEQ ID NO: 246226 - DNA, 13 bp, Artificial Sequence
  Oligonucleotide for detection of SNP TSC0060167
ttcctctaaaaac

SEQ ID NO: 246227 - DNA, 13 bp, Artificial Sequence
  Oligonucleotide for detection of SNP TSC0060167
gtttttggaggaa

SEQ ID NO: 246228 - DNA, 13 bp, Artificial Sequence
  Oligonucleotide for detection of SNP TSC0060167
ttcctccaaaaac

SEQ ID NO: 246229 - DNA, 13 bp, Artificial Sequence
  Oligonucleotide for detection of SNP TSC0060167
gttttcggaggaa

SEQ ID NO: 246230 - DNA, 13 bp, Artificial Sequence
  Oligonucleotide for detection of SNP TSC0060167
ttcctccgaaaac

SEQ ID NO: 246231 - DNA, 13 bp, Artificial Sequence
  Oligonucleotide for detection of SNP TSC0060167
ttttttcggaaay

SEQ ID NO: 246232 - DNA, 13 bp, Artificial Sequence
  Oligonucleotide for detection of SNP TSC0060167
rtttccgaaaaaa

SEQ ID NO: 246233 - DNA, 13 bp, Artificial Sequence
  Oligonucleotide for detection of SNP TSC0060168
ttagtattttaat

SEQ ID NO: 246234 - DNA, 13 bp, Artificial Sequence
  Oligonucleotide for detection of SNP TSC0060168
attaaaatactaa

SEQ ID NO: 246235 - DNA, 13 bp, Artificial Sequence
  Oligonucleotide for detection of SNP TSC0060168
ttagtagtttaat

SEQ ID NO: 246236 - DNA, 13 bp, Artificial Sequence
  Oligonucleotide for detection of SNP TSC0060168
attaaactactaa

SEQ ID NO: 246237 - DNA, 13 bp, Artificial Sequence
  Oligonucleotide for detection of SNP TSC0060170
tagatgtggagtt

SEQ ID NO: 246238 - DNA, 13 bp, Artificial Sequence
  Oligonucleotide for detection of SNP TSC0060170
aactccacatcta

SEQ ID NO: 246239 - DNA, 13 bp, Artificial Sequence
  Oligonucleotide for detection of SNP TSC0060170
tagatggggagtt

SEQ ID NO: 246240 - DNA, 13 bp, Artificial Sequence
  Oligonucleotide for detection of SNP TSC0060170
aactccccatcta

SEQ ID NO: 246241 - DNA, 13 bp, Artificial Sequence
  Oligonucleotide for detection of SNP TSC0060176
atataaagtattg

SEQ ID NO: 246242 - DNA, 13 bp, Artificial Sequence
  Oligonucleotide for detection of SNP TSC0060176
caatactttatat

SEQ ID NO: 246243 - DNA, 13 bp, Artificial Sequence
  Oligonucleotide for detection of SNP TSC0060176
atataaggtattg

SEQ ID NO: 246244 - DNA, 13 bp, Artificial Sequence
  Oligonucleotide for detection of SNP TSC0060176
caataccttatat

SEQ ID NO: 246245 - DNA, 13 bp, Artificial Sequence
  Oligonucleotide for detection of SNP TSC0060177
tttagtagggtty

SEQ ID NO: 246246 - DNA, 13 bp, Artificial Sequence
  Oligonucleotide for detection of SNP TSC0060177
raaccctactaaa

SEQ ID NO: 246247 - DNA, 13 bp, Artificial Sequence
  Oligonucleotide for detection of SNP TSC0060177
tttagtggggtty

SEQ ID NO: 246248 - DNA, 13 bp, Artificial Sequence
  Oligonucleotide for detection of SNP TSC0060177
raaccccactaaa

SEQ ID NO: 246249 - DNA, 13 bp, Artificial Sequence
  Oligonucleotide for detection of SNP TSC0060177
tttagcggggtty

SEQ ID NO: 246250 - DNA, 13 bp, Artificial Sequence
  Oligonucleotide for detection of SNP TSC0060177
raaccccgctaaa

SEQ ID NO: 246251 - DNA, 13 bp, Artificial Sequence
  Oligonucleotide for detection of SNP TSC0060177
gagttttgttgag

SEQ ID NO: 246252 - DNA, 13 bp, Artificial Sequence
  Oligonucleotide for detection of SNP TSC0060177
ctcaacaaaactc

SEQ ID NO: 246253 - DNA, 13 bp, Artificial Sequence
  Oligonucleotide for detection of SNP TSC0060177
gagtttcgttgag

SEQ ID NO: 246254 - DNA, 13 bp, Artificial Sequence
  Oligonucleotide for detection of SNP TSC0060177
ctcaacgaaactc

SEQ ID NO: 246255 - DNA, 13 bp, Artificial Sequence
  Oligonucleotide for detection of SNP TSC0060178
taaggtaattgty

SEQ ID NO: 246256 - DNA, 13 bp, Artificial Sequence
  Oligonucleotide for detection of SNP TSC0060178
racaattacctta

SEQ ID NO: 246257 - DNA, 13 bp, Artificial Sequence
  Oligonucleotide for detection of SNP TSC0060178
taaggttattgty

SEQ ID NO: 246258 - DNA, 13 bp, Artificial Sequence
  Oligonucleotide for detection of SNP TSC0060178
racaataacctta

SEQ ID NO: 246259 - DNA, 13 bp, Artificial Sequence
  Oligonucleotide for detection of SNP TSC0060178
ggtagttatttta

SEQ ID NO: 246260 - DNA, 13 bp, Artificial Sequence
  Oligonucleotide for detection of SNP TSC0060178
taaaataactacc

SEQ ID NO: 246261 - DNA, 13 bp, Artificial Sequence
  Oligonucleotide for detection of SNP TSC0060178
ggtagtgatttta

SEQ ID NO: 246262 - DNA, 13 bp, Artificial Sequence
  Oligonucleotide for detection of SNP TSC0060178
taaaatcactacc

SEQ ID NO: 246263 - DNA, 13 bp, Artificial Sequence
  Oligonucleotide for detection of SNP TSC0060179
taggtagaagaaa

SEQ ID NO: 246264 - DNA, 13 bp, Artificial Sequence
  Oligonucleotide for detection of SNP TSC0060179
tttcttctaccta

SEQ ID NO: 246265 - DNA, 13 bp, Artificial Sequence
  Oligonucleotide for detection of SNP TSC0060179
taggtataagaaa

SEQ ID NO: 246266 - DNA, 13 bp, Artificial Sequence
  Oligonucleotide for detection of SNP TSC0060179
tttcttataccta

SEQ ID NO: 246267 - DNA, 13 bp, Artificial Sequence
  Oligonucleotide for detection of SNP TSC0060180
tttgttataatta

SEQ ID NO: 246268 - DNA, 13 bp, Artificial Sequence
  Oligonucleotide for detection of SNP TSC0060180
taattataacaaa

SEQ ID NO: 246269 - DNA, 13 bp, Artificial Sequence
  Oligonucleotide for detection of SNP TSC0060180
tttgttgtaatta

SEQ ID NO: 246270 - DNA, 13 bp, Artificial Sequence
  Oligonucleotide for detection of SNP TSC0060180
taattacaacaaa

SEQ ID NO: 246271 - DNA, 13 bp, Artificial Sequence
  Oligonucleotide for detection of SNP TSC0060182
tataagtttattg

SEQ ID NO: 246272 - DNA, 13 bp, Artificial Sequence
  Oligonucleotide for detection of SNP TSC0060182
caataaacttata

SEQ ID NO: 246273 - DNA, 13 bp, Artificial Sequence
  Oligonucleotide for detection of SNP TSC0060182
tataaggttattg

SEQ ID NO: 246274 - DNA, 13 bp, Artificial Sequence
  Oligonucleotide for detection of SNP TSC0060182
caataaccttata

SEQ ID NO: 246275 - DNA, 13 bp, Artificial Sequence
  Oligonucleotide for detection of SNP TSC0060182
tataagtttatcg

SEQ ID NO: 246276 - DNA, 13 bp, Artificial Sequence
  Oligonucleotide for detection of SNP TSC0060182
cgataaacttata

SEQ ID NO: 246277 - DNA, 13 bp, Artificial Sequence
  Oligonucleotide for detection of SNP TSC0060182
tataaggttatcg

SEQ ID NO: 246278 - DNA, 13 bp, Artificial Sequence
  Oligonucleotide for detection of SNP TSC0060182
cgataaccttata

SEQ ID NO: 246279 - DNA, 13 bp, Artificial Sequence
  Oligonucleotide for detection of SNP TSC0060182
tggtgagtttgta

SEQ ID NO: 246280 - DNA, 13 bp, Artificial Sequence
  Oligonucleotide for detection of SNP TSC0060182
tacaaactcacca

SEQ ID NO: 246281 - DNA, 13 bp, Artificial Sequence
  Oligonucleotide for detection of SNP TSC0060182
tggtgattttgta

SEQ ID NO: 246282 - DNA, 13 bp, Artificial Sequence
  Oligonucleotide for detection of SNP TSC0060182
tacaaaatcacca

SEQ ID NO: 246283 - DNA, 13 bp, Artificial Sequence
  Oligonucleotide for detection of SNP TSC0060182
cggtgagtttgta

SEQ ID NO: 246284 - DNA, 13 bp, Artificial Sequence
  Oligonucleotide for detection of SNP TSC0060182
tacaaactcaccg

SEQ ID NO: 246285 - DNA, 13 bp, Artificial Sequence
  Oligonucleotide for detection of SNP TSC0060182
cggtgattttgta

SEQ ID NO: 246286 - DNA, 13 bp, Artificial Sequence
  Oligonucleotide for detection of SNP TSC0060182
tacaaaatcaccg

SEQ ID NO: 246287 - DNA, 13 bp, Artificial Sequence
  Oligonucleotide for detection of SNP TSC0060183
aggttattgggtt

SEQ ID NO: 246288 - DNA, 13 bp, Artificial Sequence
  Oligonucleotide for detection of SNP TSC0060183
aacccaataacct

SEQ ID NO: 246289 - DNA, 13 bp, Artificial Sequence
  Oligonucleotide for detection of SNP TSC0060183
aggttagtgggtt

SEQ ID NO: 246290 - DNA, 13 bp, Artificial Sequence
  Oligonucleotide for detection of SNP TSC0060183
aacccactaacct

SEQ ID NO: 246291 - DNA, 13 bp, Artificial Sequence
  Oligonucleotide for detection of SNP TSC0060183
aggttatcgggtt

SEQ ID NO: 246292 - DNA, 13 bp, Artificial Sequence
  Oligonucleotide for detection of SNP TSC0060183
aacccgataacct

SEQ ID NO: 246293 - DNA, 13 bp, Artificial Sequence
  Oligonucleotide for detection of SNP TSC0060183
aggttagcgggtt

SEQ ID NO: 246294 - DNA, 13 bp, Artificial Sequence
  Oligonucleotide for detection of SNP TSC0060183
aacccgctaacct

SEQ ID NO: 246295 - DNA, 13 bp, Artificial Sequence
  Oligonucleotide for detection of SNP TSC0060183
agtttggtgattt

SEQ ID NO: 246296 - DNA, 13 bp, Artificial Sequence
  Oligonucleotide for detection of SNP TSC0060183
aaatcaccaaact

SEQ ID NO: 246297 - DNA, 13 bp, Artificial Sequence
  Oligonucleotide for detection of SNP TSC0060183
agtttgttgattt

SEQ ID NO: 246298 - DNA, 13 bp, Artificial Sequence
  Oligonucleotide for detection of SNP TSC0060183
aaatcaacaaact

SEQ ID NO: 246299 - DNA, 13 bp, Artificial Sequence
  Oligonucleotide for detection of SNP TSC0060183
agttcggtgattt

SEQ ID NO: 246300 - DNA, 13 bp, Artificial Sequence
  Oligonucleotide for detection of SNP TSC0060183
aaatcaccgaact

SEQ ID NO: 246301 - DNA, 13 bp, Artificial Sequence
  Oligonucleotide for detection of SNP TSC0060183
agttcgttgattt

SEQ ID NO: 246302 - DNA, 13 bp, Artificial Sequence
  Oligonucleotide for detection of SNP TSC0060183
aaatcaacgaact

SEQ ID NO: 246303 - DNA, 13 bp, Artificial Sequence
  Oligonucleotide for detection of SNP TSC0060184
ttttgaaagatay

SEQ ID NO: 246304 - DNA, 13 bp, Artificial Sequence
  Oligonucleotide for detection of SNP TSC0060184
rtatctttcaaaa

SEQ ID NO: 246305 - DNA, 13 bp, Artificial Sequence
  Oligonucleotide for detection of SNP TSC0060184
ttttgatagatay

SEQ ID NO: 246306 - DNA, 13 bp, Artificial Sequence
  Oligonucleotide for detection of SNP TSC0060184
rtatctatcaaaa

SEQ ID NO: 246307 - DNA, 13 bp, Artificial Sequence
  Oligonucleotide for detection of SNP TSC0060184
gtattttttaaaa

SEQ ID NO: 246308 - DNA, 13 bp, Artificial Sequence
  Oligonucleotide for detection of SNP TSC0060184
ttttaaaaaatac

SEQ ID NO: 246309 - DNA, 13 bp, Artificial Sequence
  Oligonucleotide for detection of SNP TSC0060184
gtatttgttaaaa

SEQ ID NO: 246310 - DNA, 13 bp, Artificial Sequence
  Oligonucleotide for detection of SNP TSC0060184
ttttaacaaatac

SEQ ID NO: 246311 - DNA, 13 bp, Artificial Sequence
  Oligonucleotide for detection of SNP TSC0060187
gggtatgttaata

SEQ ID NO: 246312 - DNA, 13 bp, Artificial Sequence
  Oligonucleotide for detection of SNP TSC0060187
tattaacataccc

SEQ ID NO: 246313 - DNA, 13 bp, Artificial Sequence
  Oligonucleotide for detection of SNP TSC0060187
gggtatattaata

SEQ ID NO: 246314 - DNA, 13 bp, Artificial Sequence
  Oligonucleotide for detection of SNP TSC0060187
tattaatataccc

SEQ ID NO: 246315 - DNA, 13 bp, Artificial Sequence
  Oligonucleotide for detection of SNP TSC0060188
agattttgtatgy

SEQ ID NO: 246316 - DNA, 13 bp, Artificial Sequence
  Oligonucleotide for detection of SNP TSC0060188
rcatacaaaatct

SEQ ID NO: 246317 - DNA, 13 bp, Artificial Sequence
  Oligonucleotide for detection of SNP TSC0060188
agatttcgtatgy

SEQ ID NO: 246318 - DNA, 13 bp, Artificial Sequence
  Oligonucleotide for detection of SNP TSC0060188
rcatacgaaatct

SEQ ID NO: 246319 - DNA, 13 bp, Artificial Sequence
  Oligonucleotide for detection of SNP TSC0060188
gtatgtgggattt

SEQ ID NO: 246320 - DNA, 13 bp, Artificial Sequence
  Oligonucleotide for detection of SNP TSC0060188
aaatcccacatac

SEQ ID NO: 246321 - DNA, 13 bp, Artificial Sequence
  Oligonucleotide for detection of SNP TSC0060188
gtatgtaggattt

SEQ ID NO: 246322 - DNA, 13 bp, Artificial Sequence
  Oligonucleotide for detection of SNP TSC0060188
aaatcctacatac

SEQ ID NO: 246323 - DNA, 13 bp, Artificial Sequence
  Oligonucleotide for detection of SNP TSC0060188
gtatgcgggattt

SEQ ID NO: 246324 - DNA, 13 bp, Artificial Sequence
  Oligonucleotide for detection of SNP TSC0060188
aaatcccgcatac

SEQ ID NO: 246325 - DNA, 13 bp, Artificial Sequence
  Oligonucleotide for detection of SNP TSC0060192
gtttgtgttttaa

SEQ ID NO: 246326 - DNA, 13 bp, Artificial Sequence
  Oligonucleotide for detection of SNP TSC0060192
ttaaaacacaaac

SEQ ID NO: 246327 - DNA, 13 bp, Artificial Sequence
  Oligonucleotide for detection of SNP TSC0060192
gtttgtattttaa

SEQ ID NO: 246328 - DNA, 13 bp, Artificial Sequence
  Oligonucleotide for detection of SNP TSC0060192
ttaaaatacaaac

SEQ ID NO: 246329 - DNA, 13 bp, Artificial Sequence
  Oligonucleotide for detection of SNP TSC0060195
gtttttgttatag

SEQ ID NO: 246330 - DNA, 13 bp, Artificial Sequence
  Oligonucleotide for detection of SNP TSC0060195
ctataacaaaaac

SEQ ID NO: 246331 - DNA, 13 bp, Artificial Sequence
  Oligonucleotide for detection of SNP TSC0060196
taagtataaaaag

SEQ ID NO: 246332 - DNA, 13 bp, Artificial Sequence
  Oligonucleotide for detection of SNP TSC0060196
ctttttatactta

SEQ ID NO: 246333 - DNA, 13 bp, Artificial Sequence
  Oligonucleotide for detection of SNP TSC0060196
taagtagaaaaag

SEQ ID NO: 246334 - DNA, 13 bp, Artificial Sequence
  Oligonucleotide for detection of SNP TSC0060196
ctttttctactta

SEQ ID NO: 246335 - DNA, 13 bp, Artificial Sequence
  Oligonucleotide for detection of SNP TSC0060197
aatttagatgaag

SEQ ID NO: 246336 - DNA, 13 bp, Artificial Sequence
  Oligonucleotide for detection of SNP TSC0060197
cttcatctaaatt

SEQ ID NO: 246337 - DNA, 13 bp, Artificial Sequence
  Oligonucleotide for detection of SNP TSC0060197
aatttaaatgaag

SEQ ID NO: 246338 - DNA, 13 bp, Artificial Sequence
  Oligonucleotide for detection of SNP TSC0060197
cttcatttaaatt

SEQ ID NO: 246339 - DNA, 13 bp, Artificial Sequence
  Oligonucleotide for detection of SNP TSC0060199
ataagaggttaag

SEQ ID NO: 246340 - DNA, 13 bp, Artificial Sequence
  Oligonucleotide for detection of SNP TSC0060199
cttaacctcttat

SEQ ID NO: 246341 - DNA, 13 bp, Artificial Sequence
  Oligonucleotide for detection of SNP TSC0060199
ataagaagttaag

SEQ ID NO: 246342 - DNA, 13 bp, Artificial Sequence
  Oligonucleotide for detection of SNP TSC0060199
cttaacttcttat

SEQ ID NO: 246343 - DNA, 13 bp, Artificial Sequence
  Oligonucleotide for detection of SNP TSC0060200
aggataagaaaaa

SEQ ID NO: 246344 - DNA, 13 bp, Artificial Sequence
  Oligonucleotide for detection of SNP TSC0060200
tttttcttatcct

SEQ ID NO: 246345 - DNA, 13 bp, Artificial Sequence
  Oligonucleotide for detection of SNP TSC0060200
aggataggaaaaa

SEQ ID NO: 246346 - DNA, 13 bp, Artificial Sequence
  Oligonucleotide for detection of SNP TSC0060200
tttttcctatcct

SEQ ID NO: 246347 - DNA, 13 bp, Artificial Sequence
  Oligonucleotide for detection of SNP TSC0060201
ttgtagtatatgt

SEQ ID NO: 246348 - DNA, 13 bp, Artificial Sequence
  Oligonucleotide for detection of SNP TSC0060201
acatatactacaa

SEQ ID NO: 246349 - DNA, 13 bp, Artificial Sequence
  Oligonucleotide for detection of SNP TSC0060201
ttgtaggatatgt

SEQ ID NO: 246350 - DNA, 13 bp, Artificial Sequence
  Oligonucleotide for detection of SNP TSC0060201
acatatcctacaa

SEQ ID NO: 246351 - DNA, 13 bp, Artificial Sequence
  Oligonucleotide for detection of SNP TSC0060202
ttattaattatty

SEQ ID NO: 246352 - DNA, 13 bp, Artificial Sequence
  Oligonucleotide for detection of SNP TSC0060202
raataattaataa

SEQ ID NO: 246353 - DNA, 13 bp, Artificial Sequence
  Oligonucleotide for detection of SNP TSC0060202
ttattatttatty

SEQ ID NO: 246354 - DNA, 13 bp, Artificial Sequence
  Oligonucleotide for detection of SNP TSC0060202
raataaataataa

SEQ ID NO: 246355 - DNA, 13 bp, Artificial Sequence
  Oligonucleotide for detection of SNP TSC0060202
ggataattaatag

SEQ ID NO: 246356 - DNA, 13 bp, Artificial Sequence
  Oligonucleotide for detection of SNP TSC0060202
ctattaattatcc

SEQ ID NO: 246357 - DNA, 13 bp, Artificial Sequence
  Oligonucleotide for detection of SNP TSC0060202
ggataaataatag

SEQ ID NO: 246358 - DNA, 13 bp, Artificial Sequence
  Oligonucleotide for detection of SNP TSC0060202
ctattatttatcc

SEQ ID NO: 246359 - DNA, 13 bp, Artificial Sequence
  Oligonucleotide for detection of SNP TSC0060205
atagattttttty

SEQ ID NO: 246360 - DNA, 13 bp, Artificial Sequence
  Oligonucleotide for detection of SNP TSC0060205
raaaaaaatctat

SEQ ID NO: 246361 - DNA, 13 bp, Artificial Sequence
  Oligonucleotide for detection of SNP TSC0060205
gagaaatgtttat

SEQ ID NO: 246362 - DNA, 13 bp, Artificial Sequence
  Oligonucleotide for detection of SNP TSC0060205
ataaacatttctc

SEQ ID NO: 246363 - DNA, 13 bp, Artificial Sequence
  Oligonucleotide for detection of SNP TSC0060205
gagaaaggtttat

SEQ ID NO: 246364 - DNA, 13 bp, Artificial Sequence
  Oligonucleotide for detection of SNP TSC0060205
ataaacctttctc

SEQ ID NO: 246365 - DNA, 13 bp, Artificial Sequence
  Oligonucleotide for detection of SNP TSC0060206
atgaaaattaaaa

SEQ ID NO: 246366 - DNA, 13 bp, Artificial Sequence
  Oligonucleotide for detection of SNP TSC0060206
ttttaattttcat

SEQ ID NO: 246367 - DNA, 13 bp, Artificial Sequence
  Oligonucleotide for detection of SNP TSC0060206
atgaaagttaaaa

SEQ ID NO: 246368 - DNA, 13 bp, Artificial Sequence
  Oligonucleotide for detection of SNP TSC0060206
ttttaactttcat

SEQ ID NO: 246369 - DNA, 13 bp, Artificial Sequence
  Oligonucleotide for detection of SNP TSC0060209
ttataaataatgy

SEQ ID NO: 246370 - DNA, 13 bp, Artificial Sequence
  Oligonucleotide for detection of SNP TSC0060209
rcattatttataa

SEQ ID NO: 246371 - DNA, 13 bp, Artificial Sequence
  Oligonucleotide for detection of SNP TSC0060209
ttataagtaatgy

SEQ ID NO: 246372 - DNA, 13 bp, Artificial Sequence
  Oligonucleotide for detection of SNP TSC0060209
rcattacttataa

SEQ ID NO: 246373 - DNA, 13 bp, Artificial Sequence
  Oligonucleotide for detection of SNP TSC0060210
tgtgagatgtttt

SEQ ID NO: 246374 - DNA, 13 bp, Artificial Sequence
  Oligonucleotide for detection of SNP TSC0060210
aaaacatctcaca

SEQ ID NO: 246375 - DNA, 13 bp, Artificial Sequence
  Oligonucleotide for detection of SNP TSC0060210
tgtgagttgtttt

SEQ ID NO: 246376 - DNA, 13 bp, Artificial Sequence
  Oligonucleotide for detection of SNP TSC0060210
aaaacaactcaca

SEQ ID NO: 246377 - DNA, 13 bp, Artificial Sequence
  Oligonucleotide for detection of SNP TSC0060210
aaggtattttata

SEQ ID NO: 246378 - DNA, 13 bp, Artificial Sequence
  Oligonucleotide for detection of SNP TSC0060210
tataaaatacctt

SEQ ID NO: 246379 - DNA, 13 bp, Artificial Sequence
  Oligonucleotide for detection of SNP TSC0060213
agttattgatatg

SEQ ID NO: 246380 - DNA, 13 bp, Artificial Sequence
  Oligonucleotide for detection of SNP TSC0060213
catatcaataact

SEQ ID NO: 246381 - DNA, 13 bp, Artificial Sequence
  Oligonucleotide for detection of SNP TSC0060213
agttatggatatg

SEQ ID NO: 246382 - DNA, 13 bp, Artificial Sequence
  Oligonucleotide for detection of SNP TSC0060213
catatccataact

SEQ ID NO: 246383 - DNA, 13 bp, Artificial Sequence
  Oligonucleotide for detection of SNP TSC0060213
agttatcgatatg

SEQ ID NO: 246384 - DNA, 13 bp, Artificial Sequence
  Oligonucleotide for detection of SNP TSC0060213
catatcgataact

SEQ ID NO: 246385 - DNA, 13 bp, Artificial Sequence
  Oligonucleotide for detection of SNP TSC0060213
tatgttgatggtt

SEQ ID NO: 246386 - DNA, 13 bp, Artificial Sequence
  Oligonucleotide for detection of SNP TSC0060213
aaccatcaacata

SEQ ID NO: 246387 - DNA, 13 bp, Artificial Sequence
  Oligonucleotide for detection of SNP TSC0060213
tatgtttatggtt

SEQ ID NO: 246388 - DNA, 13 bp, Artificial Sequence
  Oligonucleotide for detection of SNP TSC0060213
aaccataaacata

SEQ ID NO: 246389 - DNA, 13 bp, Artificial Sequence
  Oligonucleotide for detection of SNP TSC0060213
tatgtcgatggtt

SEQ ID NO: 246390 - DNA, 13 bp, Artificial Sequence
  Oligonucleotide for detection of SNP TSC0060213
aaccatcgacata

SEQ ID NO: 246391 - DNA, 13 bp, Artificial Sequence
  Oligonucleotide for detection of SNP TSC0060214
tggtttttttttg

SEQ ID NO: 246392 - DNA, 13 bp, Artificial Sequence
  Oligonucleotide for detection of SNP TSC0060214
caaaaaaaaacca

SEQ ID NO: 246393 - DNA, 13 bp, Artificial Sequence
  Oligonucleotide for detection of SNP TSC0060214
tggtttgtttttg

SEQ ID NO: 246394 - DNA, 13 bp, Artificial Sequence
  Oligonucleotide for detection of SNP TSC0060214
caaaaacaaacca

SEQ ID NO: 246395 - DNA, 13 bp, Artificial Sequence
  Oligonucleotide for detection of SNP TSC0060214
tagagaaaaatta

SEQ ID NO: 246396 - DNA, 13 bp, Artificial Sequence
  Oligonucleotide for detection of SNP TSC0060214
taatttttctcta

SEQ ID NO: 246397 - DNA, 13 bp, Artificial Sequence
  Oligonucleotide for detection of SNP TSC0060214
tagagataaatta

SEQ ID NO: 246398 - DNA, 13 bp, Artificial Sequence
  Oligonucleotide for detection of SNP TSC0060214
taatttatctcta

SEQ ID NO: 246399 - DNA, 13 bp, Artificial Sequence
  Oligonucleotide for detection of SNP TSC0060215
tttttttattgta

SEQ ID NO: 246400 - DNA, 13 bp, Artificial Sequence
  Oligonucleotide for detection of SNP TSC0060215
tacaataaaaaaa

SEQ ID NO: 246401 - DNA, 13 bp, Artificial Sequence
  Oligonucleotide for detection of SNP TSC0060215
ttttttaattgta

SEQ ID NO: 246402 - DNA, 13 bp, Artificial Sequence
  Oligonucleotide for detection of SNP TSC0060215
tacaattaaaaaa

SEQ ID NO: 246403 - DNA, 13 bp, Artificial Sequence
  Oligonucleotide for detection of SNP TSC0060216
ttatagatgttag

SEQ ID NO: 246404 - DNA, 13 bp, Artificial Sequence
  Oligonucleotide for detection of SNP TSC0060216
ctaacatctataa

SEQ ID NO: 246405 - DNA, 13 bp, Artificial Sequence
  Oligonucleotide for detection of SNP TSC0060216
ttatagttgttag

SEQ ID NO: 246406 - DNA, 13 bp, Artificial Sequence
  Oligonucleotide for detection of SNP TSC0060216
ctaacaactataa

SEQ ID NO: 246407 - DNA, 13 bp, Artificial Sequence
  Oligonucleotide for detection of SNP TSC0060216
ttggtatttgtgg

SEQ ID NO: 246408 - DNA, 13 bp, Artificial Sequence
  Oligonucleotide for detection of SNP TSC0060216
ccacaaataccaa

SEQ ID NO: 246409 - DNA, 13 bp, Artificial Sequence
  Oligonucleotide for detection of SNP TSC0060216
ttggtagttgtgg

SEQ ID NO: 246410 - DNA, 13 bp, Artificial Sequence
  Oligonucleotide for detection of SNP TSC0060216
ccacaactaccaa

SEQ ID NO: 246411 - DNA, 13 bp, Artificial Sequence
  Oligonucleotide for detection of SNP TSC0060219
aaaatttgagttt

SEQ ID NO: 246412 - DNA, 13 bp, Artificial Sequence
  Oligonucleotide for detection of SNP TSC0060219
aaactcaaatttt

SEQ ID NO: 246413 - DNA, 13 bp, Artificial Sequence
  Oligonucleotide for detection of SNP TSC0060219
aaaattcgagttt

SEQ ID NO: 246414 - DNA, 13 bp, Artificial Sequence
  Oligonucleotide for detection of SNP TSC0060219
aaactcgaatttt

SEQ ID NO: 246415 - DNA, 13 bp, Artificial Sequence
  Oligonucleotide for detection of SNP TSC0060219
aaatttgaatttt

SEQ ID NO: 246416 - DNA, 13 bp, Artificial Sequence
  Oligonucleotide for detection of SNP TSC0060219
aaaattcaaattt

SEQ ID NO: 246417 - DNA, 13 bp, Artificial Sequence
  Oligonucleotide for detection of SNP TSC0060219
aaatttaaatttt

SEQ ID NO: 246418 - DNA, 13 bp, Artificial Sequence
  Oligonucleotide for detection of SNP TSC0060219
aaaatttaaattt

SEQ ID NO: 246419 - DNA, 13 bp, Artificial Sequence
  Oligonucleotide for detection of SNP TSC0060219
aaattcgaatttt

SEQ ID NO: 246420 - DNA, 13 bp, Artificial Sequence
  Oligonucleotide for detection of SNP TSC0060219
aaaattcgaattt

SEQ ID NO: 246421 - DNA, 13 bp, Artificial Sequence
  Oligonucleotide for detection of SNP TSC0060221
atattttattgta

SEQ ID NO: 246422 - DNA, 13 bp, Artificial Sequence
  Oligonucleotide for detection of SNP TSC0060221
tacaataaaatat

SEQ ID NO: 246423 - DNA, 13 bp, Artificial Sequence
  Oligonucleotide for detection of SNP TSC0060221
tataatgaaatat

SEQ ID NO: 246424 - DNA, 13 bp, Artificial Sequence
  Oligonucleotide for detection of SNP TSC0060221
atatttcattata

SEQ ID NO: 246425 - DNA, 13 bp, Artificial Sequence
  Oligonucleotide for detection of SNP TSC0060224
tatgatatttagg

SEQ ID NO: 246426 - DNA, 13 bp, Artificial Sequence
  Oligonucleotide for detection of SNP TSC0060224
cctaaatatcata

SEQ ID NO: 246427 - DNA, 13 bp, Artificial Sequence
  Oligonucleotide for detection of SNP TSC0060224
tatgatttttagg

SEQ ID NO: 246428 - DNA, 13 bp, Artificial Sequence
  Oligonucleotide for detection of SNP TSC0060224
cctaaaaatcata

SEQ ID NO: 246429 - DNA, 13 bp, Artificial Sequence
  Oligonucleotide for detection of SNP TSC0060224
tttaaaaattata

SEQ ID NO: 246430 - DNA, 13 bp, Artificial Sequence
  Oligonucleotide for detection of SNP TSC0060224
tataatttttaaa

SEQ ID NO: 246431 - DNA, 13 bp, Artificial Sequence
  Oligonucleotide for detection of SNP TSC0060225
ggtgtaattgtta

SEQ ID NO: 246432 - DNA, 13 bp, Artificial Sequence
  Oligonucleotide for detection of SNP TSC0060225
taacaattacacc

SEQ ID NO: 246433 - DNA, 13 bp, Artificial Sequence
  Oligonucleotide for detection of SNP TSC0060225
ggtgtatttgtta

SEQ ID NO: 246434 - DNA, 13 bp, Artificial Sequence
  Oligonucleotide for detection of SNP TSC0060225
taacaaatacacc

SEQ ID NO: 246435 - DNA, 13 bp, Artificial Sequence
  Oligonucleotide for detection of SNP TSC0060225
tgataattataty

SEQ ID NO: 246436 - DNA, 13 bp, Artificial Sequence
  Oligonucleotide for detection of SNP TSC0060225
ratataattatca

SEQ ID NO: 246437 - DNA, 13 bp, Artificial Sequence
  Oligonucleotide for detection of SNP TSC0060225
tgataagtataty

SEQ ID NO: 246438 - DNA, 13 bp, Artificial Sequence
  Oligonucleotide for detection of SNP TSC0060225
ratatacttatca

SEQ ID NO: 246439 - DNA, 13 bp, Artificial Sequence
  Oligonucleotide for detection of SNP TSC0060226
gtataggtataaa

SEQ ID NO: 246440 - DNA, 13 bp, Artificial Sequence
  Oligonucleotide for detection of SNP TSC0060226
tttatacctatac

SEQ ID NO: 246441 - DNA, 13 bp, Artificial Sequence
  Oligonucleotide for detection of SNP TSC0060226
gtatagatataaa

SEQ ID NO: 246442 - DNA, 13 bp, Artificial Sequence
  Oligonucleotide for detection of SNP TSC0060226
tttatatctatac

SEQ ID NO: 246443 - DNA, 13 bp, Artificial Sequence
  Oligonucleotide for detection of SNP TSC0060227
aagggagtaaaat

SEQ ID NO: 246444 - DNA, 13 bp, Artificial Sequence
  Oligonucleotide for detection of SNP TSC0060227
attttactccctt

SEQ ID NO: 246445 - DNA, 13 bp, Artificial Sequence
  Oligonucleotide for detection of SNP TSC0060227
aagggaataaaat

SEQ ID NO: 246446 - DNA, 13 bp, Artificial Sequence
  Oligonucleotide for detection of SNP TSC0060227
attttattccctt

SEQ ID NO: 246447 - DNA, 13 bp, Artificial Sequence
  Oligonucleotide for detection of SNP TSC0060228
gttattagtgtag

SEQ ID NO: 246448 - DNA, 13 bp, Artificial Sequence
  Oligonucleotide for detection of SNP TSC0060228
ctacactaataac

SEQ ID NO: 246449 - DNA, 13 bp, Artificial Sequence
  Oligonucleotide for detection of SNP TSC0060228
gttatttgtgtag

SEQ ID NO: 246450 - DNA, 13 bp, Artificial Sequence
  Oligonucleotide for detection of SNP TSC0060228
ctacacaaataac

SEQ ID NO: 246451 - DNA, 13 bp, Artificial Sequence
  Oligonucleotide for detection of SNP TSC0060228
gttattcgtgtag

SEQ ID NO: 246452 - DNA, 13 bp, Artificial Sequence
  Oligonucleotide for detection of SNP TSC0060228
ctacacgaataac

SEQ ID NO: 246453 - DNA, 13 bp, Artificial Sequence
  Oligonucleotide for detection of SNP TSC0060228
ttatattaatgay

SEQ ID NO: 246454 - DNA, 13 bp, Artificial Sequence
  Oligonucleotide for detection of SNP TSC0060228
rtcattaatataa

SEQ ID NO: 246455 - DNA, 13 bp, Artificial Sequence
  Oligonucleotide for detection of SNP TSC0060228
ttatatgaatgay

SEQ ID NO: 246456 - DNA, 13 bp, Artificial Sequence
  Oligonucleotide for detection of SNP TSC0060228
rtcattcatataa

SEQ ID NO: 246457 - DNA, 13 bp, Artificial Sequence
  Oligonucleotide for detection of SNP TSC0060228
ttatacgaatgay

SEQ ID NO: 246458 - DNA, 13 bp, Artificial Sequence
  Oligonucleotide for detection of SNP TSC0060228
rtcattcgtataa

SEQ ID NO: 246459 - DNA, 13 bp, Artificial Sequence
  Oligonucleotide for detection of SNP TSC0060229
agggggaagggtt

SEQ ID NO: 246460 - DNA, 13 bp, Artificial Sequence
  Oligonucleotide for detection of SNP TSC0060229
aacccttccccct

SEQ ID NO: 246461 - DNA, 13 bp, Artificial Sequence
  Oligonucleotide for detection of SNP TSC0060229
agggggtagggtt

SEQ ID NO: 246462 - DNA, 13 bp, Artificial Sequence
  Oligonucleotide for detection of SNP TSC0060229
aaccctaccccct

SEQ ID NO: 246463 - DNA, 13 bp, Artificial Sequence
  Oligonucleotide for detection of SNP TSC0060232
gttggtagttggy

SEQ ID NO: 246464 - DNA, 13 bp, Artificial Sequence
  Oligonucleotide for detection of SNP TSC0060232
rccaactaccaac

SEQ ID NO: 246465 - DNA, 13 bp, Artificial Sequence
  Oligonucleotide for detection of SNP TSC0060232
gttggtggttggy

SEQ ID NO: 246466 - DNA, 13 bp, Artificial Sequence
  Oligonucleotide for detection of SNP TSC0060232
rccaaccaccaac

SEQ ID NO: 246467 - DNA, 13 bp, Artificial Sequence
  Oligonucleotide for detection of SNP TSC0060233
ttttatggtatag

SEQ ID NO: 246468 - DNA, 13 bp, Artificial Sequence
  Oligonucleotide for detection of SNP TSC0060233
ctataccataaaa

SEQ ID NO: 246469 - DNA, 13 bp, Artificial Sequence
  Oligonucleotide for detection of SNP TSC0060233
ttttatagtatag

SEQ ID NO: 246470 - DNA, 13 bp, Artificial Sequence
  Oligonucleotide for detection of SNP TSC0060233
ctatactataaaa

SEQ ID NO: 246471 - DNA, 13 bp, Artificial Sequence
  Oligonucleotide for detection of SNP TSC0060239
aatagtatattay

SEQ ID NO: 246472 - DNA, 13 bp, Artificial Sequence
  Oligonucleotide for detection of SNP TSC0060239
rtaatatactatt

SEQ ID NO: 246473 - DNA, 13 bp, Artificial Sequence
  Oligonucleotide for detection of SNP TSC0060242
tatgttgggagtt

SEQ ID NO: 246474 - DNA, 13 bp, Artificial Sequence
  Oligonucleotide for detection of SNP TSC0060242
aactcccaacata

SEQ ID NO: 246475 - DNA, 13 bp, Artificial Sequence
  Oligonucleotide for detection of SNP TSC0060242
tatgttaggagtt

SEQ ID NO: 246476 - DNA, 13 bp, Artificial Sequence
  Oligonucleotide for detection of SNP TSC0060242
aactcctaacata

SEQ ID NO: 246477 - DNA, 13 bp, Artificial Sequence
  Oligonucleotide for detection of SNP TSC0060246
ttttataatatat

SEQ ID NO: 246478 - DNA, 13 bp, Artificial Sequence
  Oligonucleotide for detection of SNP TSC0060246
atatattataaaa

SEQ ID NO: 246479 - DNA, 13 bp, Artificial Sequence
  Oligonucleotide for detection of SNP TSC0060249
gagttttggttag

SEQ ID NO: 246480 - DNA, 13 bp, Artificial Sequence
  Oligonucleotide for detection of SNP TSC0060249
ctaaccaaaactc

SEQ ID NO: 246481 - DNA, 13 bp, Artificial Sequence
  Oligonucleotide for detection of SNP TSC0060249
gagtttcggttag

SEQ ID NO: 246482 - DNA, 13 bp, Artificial Sequence
  Oligonucleotide for detection of SNP TSC0060249
ctaaccgaaactc

SEQ ID NO: 246483 - DNA, 13 bp, Artificial Sequence
  Oligonucleotide for detection of SNP TSC0060249
ttggttgaggtty

SEQ ID NO: 246484 - DNA, 13 bp, Artificial Sequence
  Oligonucleotide for detection of SNP TSC0060249
raacctcaaccaa

SEQ ID NO: 246485 - DNA, 13 bp, Artificial Sequence
  Oligonucleotide for detection of SNP TSC0060249
ttggttaaggtty

SEQ ID NO: 246486 - DNA, 13 bp, Artificial Sequence
  Oligonucleotide for detection of SNP TSC0060249
raaccttaaccaa

SEQ ID NO: 246487 - DNA, 13 bp, Artificial Sequence
  Oligonucleotide for detection of SNP TSC0060249
ttggtcgaggtty

SEQ ID NO: 246488 - DNA, 13 bp, Artificial Sequence
  Oligonucleotide for detection of SNP TSC0060249
raacctcgaccaa

SEQ ID NO: 246489 - DNA, 13 bp, Artificial Sequence
  Oligonucleotide for detection of SNP TSC0060250
taaggatggtgga

SEQ ID NO: 246490 - DNA, 13 bp, Artificial Sequence
  Oligonucleotide for detection of SNP TSC0060250
tccaccatcctta

SEQ ID NO: 246491 - DNA, 13 bp, Artificial Sequence
  Oligonucleotide for detection of SNP TSC0060250
taaggagggtgga

SEQ ID NO: 246492 - DNA, 13 bp, Artificial Sequence
  Oligonucleotide for detection of SNP TSC0060250
tccaccctcctta

SEQ ID NO: 246493 - DNA, 13 bp, Artificial Sequence
  Oligonucleotide for detection of SNP TSC0060252
ttgtgggagttag

SEQ ID NO: 246494 - DNA, 13 bp, Artificial Sequence
  Oligonucleotide for detection of SNP TSC0060252
ctaactcccacaa

SEQ ID NO: 246495 - DNA, 13 bp, Artificial Sequence
  Oligonucleotide for detection of SNP TSC0060252
ttgtggaagttag

SEQ ID NO: 246496 - DNA, 13 bp, Artificial Sequence
  Oligonucleotide for detection of SNP TSC0060252
ctaacttccacaa

SEQ ID NO: 246497 - DNA, 13 bp, Artificial Sequence
  Oligonucleotide for detection of SNP TSC0060254
tgtatatttgtaa

SEQ ID NO: 246498 - DNA, 13 bp, Artificial Sequence
  Oligonucleotide for detection of SNP TSC0060254
ttacaaatataca

SEQ ID NO: 246499 - DNA, 13 bp, Artificial Sequence
  Oligonucleotide for detection of SNP TSC0060254
tgtatagttgtaa

SEQ ID NO: 246500 - DNA, 13 bp, Artificial Sequence
  Oligonucleotide for detection of SNP TSC0060254
ttacaactataca

SEQ ID NO: 246501 - DNA, 13 bp, Artificial Sequence
  Oligonucleotide for detection of SNP TSC0060257
tgtttaatataag

SEQ ID NO: 246502 - DNA, 13 bp, Artificial Sequence
  Oligonucleotide for detection of SNP TSC0060257
cttatattaaaca

SEQ ID NO: 246503 - DNA, 13 bp, Artificial Sequence
  Oligonucleotide for detection of SNP TSC0060257
tgtttattataag

SEQ ID NO: 246504 - DNA, 13 bp, Artificial Sequence
  Oligonucleotide for detection of SNP TSC0060257
cttataataaaca

SEQ ID NO: 246505 - DNA, 13 bp, Artificial Sequence
  Oligonucleotide for detection of SNP TSC0010321
gataataattttt

SEQ ID NO: 246506 - DNA, 13 bp, Artificial Sequence
  Oligonucleotide for detection of SNP TSC0010321
aaaaattattatc

SEQ ID NO: 246507 - DNA, 13 bp, Artificial Sequence
  Oligonucleotide for detection of SNP TSC0010321
gataattattttt

SEQ ID NO: 246508 - DNA, 13 bp, Artificial Sequence
  Oligonucleotide for detection of SNP TSC0010321
aaaaataattatc

SEQ ID NO: 246509 - DNA, 13 bp, Artificial Sequence
  Oligonucleotide for detection of SNP TSC0010321
aggaattgttgty

SEQ ID NO: 246510 - DNA, 13 bp, Artificial Sequence
  Oligonucleotide for detection of SNP TSC0010321
racaacaattcct

SEQ ID NO: 246511 - DNA, 13 bp, Artificial Sequence
  Oligonucleotide for detection of SNP TSC0010321
aggaatggttgty

SEQ ID NO: 246512 - DNA, 13 bp, Artificial Sequence
  Oligonucleotide for detection of SNP TSC0010321
racaaccattcct

SEQ ID NO: 246513 - DNA, 13 bp, Artificial Sequence
  Oligonucleotide for detection of SNP TSC0010322
tagtatattttag

SEQ ID NO: 246514 - DNA, 13 bp, Artificial Sequence
  Oligonucleotide for detection of SNP TSC0010322
ctaaaatatacta

SEQ ID NO: 246515 - DNA, 13 bp, Artificial Sequence
  Oligonucleotide for detection of SNP TSC0010322
tagtatgttttag

SEQ ID NO: 246516 - DNA, 13 bp, Artificial Sequence
  Oligonucleotide for detection of SNP TSC0010322
ctaaaacatacta

SEQ ID NO: 246517 - DNA, 13 bp, Artificial Sequence
  Oligonucleotide for detection of SNP TSC0010323
ataatgagaataa

SEQ ID NO: 246518 - DNA, 13 bp, Artificial Sequence
  Oligonucleotide for detection of SNP TSC0010323
ttattctcattat

SEQ ID NO: 246519 - DNA, 13 bp, Artificial Sequence
  Oligonucleotide for detection of SNP TSC0010323
ataatgggaataa

SEQ ID NO: 246520 - DNA, 13 bp, Artificial Sequence
  Oligonucleotide for detection of SNP TSC0010323
ttattcccattat

SEQ ID NO: 246521 - DNA, 13 bp, Artificial Sequence
  Oligonucleotide for detection of SNP TSC0060261
gagaggtggttag

SEQ ID NO: 246522 - DNA, 13 bp, Artificial Sequence
  Oligonucleotide for detection of SNP TSC0060261
ctaaccacctctc

SEQ ID NO: 246523 - DNA, 13 bp, Artificial Sequence
  Oligonucleotide for detection of SNP TSC0060261
gagaggcggttag

SEQ ID NO: 246524 - DNA, 13 bp, Artificial Sequence
  Oligonucleotide for detection of SNP TSC0060261
ctaaccgcctctc

SEQ ID NO: 246525 - DNA, 13 bp, Artificial Sequence
  Oligonucleotide for detection of SNP TSC0060261
ttggtcgttttty

SEQ ID NO: 246526 - DNA, 13 bp, Artificial Sequence
  Oligonucleotide for detection of SNP TSC0060261
raaaaacgaccaa

SEQ ID NO: 246527 - DNA, 13 bp, Artificial Sequence
  Oligonucleotide for detection of SNP TSC0008909
ttggtatattttt

SEQ ID NO: 246528 - DNA, 13 bp, Artificial Sequence
  Oligonucleotide for detection of SNP TSC0008909
aaaaatataccaa

SEQ ID NO: 246529 - DNA, 13 bp, Artificial Sequence
  Oligonucleotide for detection of SNP TSC0008909
agaaatttattag

SEQ ID NO: 246530 - DNA, 13 bp, Artificial Sequence
  Oligonucleotide for detection of SNP TSC0008909
ctaataaatttct

SEQ ID NO: 246531 - DNA, 13 bp, Artificial Sequence
  Oligonucleotide for detection of SNP TSC0008909
agaaatgtattag

SEQ ID NO: 246532 - DNA, 13 bp, Artificial Sequence
  Oligonucleotide for detection of SNP TSC0008909
ctaatacatttct

SEQ ID NO: 246533 - DNA, 13 bp, Artificial Sequence
  Oligonucleotide for detection of SNP TSC0060264
agtaaagattgga

SEQ ID NO: 246534 - DNA, 13 bp, Artificial Sequence
  Oligonucleotide for detection of SNP TSC0060264
tccaatctttact

SEQ ID NO: 246535 - DNA, 13 bp, Artificial Sequence
  Oligonucleotide for detection of SNP TSC0060264
agtaaaaattgga

SEQ ID NO: 246536 - DNA, 13 bp, Artificial Sequence
  Oligonucleotide for detection of SNP TSC0060264
tccaatttttact

SEQ ID NO: 246537 - DNA, 13 bp, Artificial Sequence
  Oligonucleotide for detection of SNP TSC0060269
gttgttatgaaga

SEQ ID NO: 246538 - DNA, 13 bp, Artificial Sequence
  Oligonucleotide for detection of SNP TSC0060269
tcttcataacaac

SEQ ID NO: 246539 - DNA, 13 bp, Artificial Sequence
  Oligonucleotide for detection of SNP TSC0060269
gttgttgtgaaga

SEQ ID NO: 246540 - DNA, 13 bp, Artificial Sequence
  Oligonucleotide for detection of SNP TSC0060269
tcttcacaacaac

SEQ ID NO: 246541 - DNA, 13 bp, Artificial Sequence
  Oligonucleotide for detection of SNP TSC0060269
gttgtcgtgaaga

SEQ ID NO: 246542 - DNA, 13 bp, Artificial Sequence
  Oligonucleotide for detection of SNP TSC0060269
tcttcacgacaac

SEQ ID NO: 246543 - DNA, 13 bp, Artificial Sequence
  Oligonucleotide for detection of SNP TSC0060269
tttttatgatagy

SEQ ID NO: 246544 - DNA, 13 bp, Artificial Sequence
  Oligonucleotide for detection of SNP TSC0060269
rctatcataaaaa

SEQ ID NO: 246545 - DNA, 13 bp, Artificial Sequence
  Oligonucleotide for detection of SNP TSC0060269
tttttacgatagy

SEQ ID NO: 246546 - DNA, 13 bp, Artificial Sequence
  Oligonucleotide for detection of SNP TSC0060269
rctatcgtaaaaa

SEQ ID NO: 246547 - DNA, 13 bp, Artificial Sequence
  Oligonucleotide for detection of SNP TSC0060270
attttttatttag

SEQ ID NO: 246548 - DNA, 13 bp, Artificial Sequence
  Oligonucleotide for detection of SNP TSC0060270
ctaaataaaaaat

SEQ ID NO: 246549 - DNA, 13 bp, Artificial Sequence
  Oligonucleotide for detection of SNP TSC0060270
attttcgatttag

SEQ ID NO: 246550 - DNA, 13 bp, Artificial Sequence
  Oligonucleotide for detection of SNP TSC0060270
ctaaatcgaaaat

SEQ ID NO: 246551 - DNA, 13 bp, Artificial Sequence
  Oligonucleotide for detection of SNP TSC0060270
ttaggtagagagt

SEQ ID NO: 246552 - DNA, 13 bp, Artificial Sequence
  Oligonucleotide for detection of SNP TSC0060270
actctctacctaa

SEQ ID NO: 246553 - DNA, 13 bp, Artificial Sequence
  Oligonucleotide for detection of SNP TSC0060270
ttaggttgagagt

SEQ ID NO: 246554 - DNA, 13 bp, Artificial Sequence
  Oligonucleotide for detection of SNP TSC0060270
actctcaacctaa

SEQ ID NO: 246555 - DNA, 13 bp, Artificial Sequence
  Oligonucleotide for detection of SNP TSC0060270
ttaggtcgagagt

SEQ ID NO: 246556 - DNA, 13 bp, Artificial Sequence
  Oligonucleotide for detection of SNP TSC0060270
actctcgacctaa

SEQ ID NO: 246557 - DNA, 13 bp, Artificial Sequence
  Oligonucleotide for detection of SNP TSC0010783
attatgatttatt

SEQ ID NO: 246558 - DNA, 13 bp, Artificial Sequence
  Oligonucleotide for detection of SNP TSC0010783
aataaatcataat

SEQ ID NO: 246559 - DNA, 13 bp, Artificial Sequence
  Oligonucleotide for detection of SNP TSC0010783
attatgttttatt

SEQ ID NO: 246560 - DNA, 13 bp, Artificial Sequence
  Oligonucleotide for detection of SNP TSC0010783
aataaaacataat

SEQ ID NO: 246561 - DNA, 13 bp, Artificial Sequence
  Oligonucleotide for detection of SNP TSC0010783
aatagattatgat

SEQ ID NO: 246562 - DNA, 13 bp, Artificial Sequence
  Oligonucleotide for detection of SNP TSC0010783
atcataatctatt

SEQ ID NO: 246563 - DNA, 13 bp, Artificial Sequence
  Oligonucleotide for detection of SNP TSC0010783
aatagagtatgat

SEQ ID NO: 246564 - DNA, 13 bp, Artificial Sequence
  Oligonucleotide for detection of SNP TSC0010783
atcatactctatt

SEQ ID NO: 246565 - DNA, 13 bp, Artificial Sequence
  Oligonucleotide for detection of SNP TSC0010784
gaaaataaattat

SEQ ID NO: 246566 - DNA, 13 bp, Artificial Sequence
  Oligonucleotide for detection of SNP TSC0010784
ataatttattttc

SEQ ID NO: 246567 - DNA, 13 bp, Artificial Sequence
  Oligonucleotide for detection of SNP TSC0010784
gaaaattaattat

SEQ ID NO: 246568 - DNA, 13 bp, Artificial Sequence
  Oligonucleotide for detection of SNP TSC0010784
ataattaattttc

SEQ ID NO: 246569 - DNA, 13 bp, Artificial Sequence
  Oligonucleotide for detection of SNP TSC0010784
atagtttgtttty

SEQ ID NO: 246570 - DNA, 13 bp, Artificial Sequence
  Oligonucleotide for detection of SNP TSC0010784
raaaacaaactat

SEQ ID NO: 246571 - DNA, 13 bp, Artificial Sequence
  Oligonucleotide for detection of SNP TSC0010784
atagttggtttty

SEQ ID NO: 246572 - DNA, 13 bp, Artificial Sequence
  Oligonucleotide for detection of SNP TSC0010784
raaaaccaactat

SEQ ID NO: 246573 - DNA, 13 bp, Artificial Sequence
  Oligonucleotide for detection of SNP TSC0060275
gtaagtaggttta

SEQ ID NO: 246574 - DNA, 13 bp, Artificial Sequence
  Oligonucleotide for detection of SNP TSC0060275
taaacctacttac

SEQ ID NO: 246575 - DNA, 13 bp, Artificial Sequence
  Oligonucleotide for detection of SNP TSC0060275
gtaagttggttta

SEQ ID NO: 246576 - DNA, 13 bp, Artificial Sequence
  Oligonucleotide for detection of SNP TSC0060275
taaaccaacttac

SEQ ID NO: 246577 - DNA, 13 bp, Artificial Sequence
  Oligonucleotide for detection of SNP TSC0060275
gtaagtcggttta

SEQ ID NO: 246578 - DNA, 13 bp, Artificial Sequence
  Oligonucleotide for detection of SNP TSC0060275
taaaccgacttac

SEQ ID NO: 246579 - DNA, 13 bp, Artificial Sequence
  Oligonucleotide for detection of SNP TSC0060275
tgagtttgtttgy

SEQ ID NO: 246580 - DNA, 13 bp, Artificial Sequence
  Oligonucleotide for detection of SNP TSC0060275
rcaaacaaactca

SEQ ID NO: 246581 - DNA, 13 bp, Artificial Sequence
  Oligonucleotide for detection of SNP TSC0060275
tgagttggtttgy

SEQ ID NO: 246582 - DNA, 13 bp, Artificial Sequence
  Oligonucleotide for detection of SNP TSC0060275
rcaaaccaactca

SEQ ID NO: 246583 - DNA, 13 bp, Artificial Sequence
  Oligonucleotide for detection of SNP TSC0060275
tgagtcggtttgy

SEQ ID NO: 246584 - DNA, 13 bp, Artificial Sequence
  Oligonucleotide for detection of SNP TSC0060275
rcaaaccgactca

SEQ ID NO: 246585 - DNA, 13 bp, Artificial Sequence
  Oligonucleotide for detection of SNP TSC0060276
aataataagtaaa

SEQ ID NO: 246586 - DNA, 13 bp, Artificial Sequence
  Oligonucleotide for detection of SNP TSC0060276
tttacttattatt

SEQ ID NO: 246587 - DNA, 13 bp, Artificial Sequence
  Oligonucleotide for detection of SNP TSC0060276
aataatgagtaaa

SEQ ID NO: 246588 - DNA, 13 bp, Artificial Sequence
  Oligonucleotide for detection of SNP TSC0060276
tttactcattatt

SEQ ID NO: 246589 - DNA, 13 bp, Artificial Sequence
  Oligonucleotide for detection of SNP TSC0060279
atttttgaaagtt

SEQ ID NO: 246590 - DNA, 13 bp, Artificial Sequence
  Oligonucleotide for detection of SNP TSC0060279
aactttcaaaaat

SEQ ID NO: 246591 - DNA, 13 bp, Artificial Sequence
  Oligonucleotide for detection of SNP TSC0060279
attttttaaagtt

SEQ ID NO: 246592 - DNA, 13 bp, Artificial Sequence
  Oligonucleotide for detection of SNP TSC0060279
aactttaaaaaat

SEQ ID NO: 246593 - DNA, 13 bp, Artificial Sequence
  Oligonucleotide for detection of SNP TSC0060279
aatttttagaaat

SEQ ID NO: 246594 - DNA, 13 bp, Artificial Sequence
  Oligonucleotide for detection of SNP TSC0060279
atttctaaaaatt

SEQ ID NO: 246595 - DNA, 13 bp, Artificial Sequence
  Oligonucleotide for detection of SNP TSC0060283
aaaatgagggtta

SEQ ID NO: 246596 - DNA, 13 bp, Artificial Sequence
  Oligonucleotide for detection of SNP TSC0060283
taaccctcatttt

SEQ ID NO: 246597 - DNA, 13 bp, Artificial Sequence
  Oligonucleotide for detection of SNP TSC0060283
aaaatgggggtta

SEQ ID NO: 246598 - DNA, 13 bp, Artificial Sequence
  Oligonucleotide for detection of SNP TSC0060283
taacccccatttt

SEQ ID NO: 246599 - DNA, 13 bp, Artificial Sequence
  Oligonucleotide for detection of SNP TSC0060284
ttattgttgagtt

SEQ ID NO: 246600 - DNA, 13 bp, Artificial Sequence
  Oligonucleotide for detection of SNP TSC0060284
aactcaacaataa

SEQ ID NO: 246601 - DNA, 13 bp, Artificial Sequence
  Oligonucleotide for detection of SNP TSC0060284
ttattggtgagtt

SEQ ID NO: 246602 - DNA, 13 bp, Artificial Sequence
  Oligonucleotide for detection of SNP TSC0060284
aactcaccaataa

SEQ ID NO: 246603 - DNA, 13 bp, Artificial Sequence
  Oligonucleotide for detection of SNP TSC0060284
aatttaataataa

SEQ ID NO: 246604 - DNA, 13 bp, Artificial Sequence
  Oligonucleotide for detection of SNP TSC0060284
ttattattaaatt

SEQ ID NO: 246605 - DNA, 13 bp, Artificial Sequence
  Oligonucleotide for detection of SNP TSC0060284
aatttattaataa

SEQ ID NO: 246606 - DNA, 13 bp, Artificial Sequence
  Oligonucleotide for detection of SNP TSC0060284
ttattaataaatt

SEQ ID NO: 246607 - DNA, 13 bp, Artificial Sequence
  Oligonucleotide for detection of SNP TSC0060285
aattgtgttttgt

SEQ ID NO: 246608 - DNA, 13 bp, Artificial Sequence
  Oligonucleotide for detection of SNP TSC0060285
acaaaacacaatt

SEQ ID NO: 246609 - DNA, 13 bp, Artificial Sequence
  Oligonucleotide for detection of SNP TSC0060285
aattgtattttgt

SEQ ID NO: 246610 - DNA, 13 bp, Artificial Sequence
  Oligonucleotide for detection of SNP TSC0060285
acaaaatacaatt

SEQ ID NO: 246611 - DNA, 13 bp, Artificial Sequence
  Oligonucleotide for detection of SNP TSC0060285
aattgtgtttcgt

SEQ ID NO: 246612 - DNA, 13 bp, Artificial Sequence
  Oligonucleotide for detection of SNP TSC0060285
acgaaacacaatt

SEQ ID NO: 246613 - DNA, 13 bp, Artificial Sequence
  Oligonucleotide for detection of SNP TSC0060285
aattgtatttcgt

SEQ ID NO: 246614 - DNA, 13 bp, Artificial Sequence
  Oligonucleotide for detection of SNP TSC0060285
acgaaatacaatt

SEQ ID NO: 246615 - DNA, 13 bp, Artificial Sequence
  Oligonucleotide for detection of SNP TSC0060286
aattttatatata

SEQ ID NO: 246616 - DNA, 13 bp, Artificial Sequence
  Oligonucleotide for detection of SNP TSC0060286
tatatataaaatt

SEQ ID NO: 246617 - DNA, 13 bp, Artificial Sequence
  Oligonucleotide for detection of SNP TSC0060286
aattttgtatata

SEQ ID NO: 246618 - DNA, 13 bp, Artificial Sequence
  Oligonucleotide for detection of SNP TSC0060286
tatatacaaaatt

SEQ ID NO: 246619 - DNA, 13 bp, Artificial Sequence
  Oligonucleotide for detection of SNP TSC0060287
tagatttttttta

SEQ ID NO: 246620 - DNA, 13 bp, Artificial Sequence
  Oligonucleotide for detection of SNP TSC0060287
taaaaaaaatcta

SEQ ID NO: 246621 - DNA, 13 bp, Artificial Sequence
  Oligonucleotide for detection of SNP TSC0060287
tagattgttttta

SEQ ID NO: 246622 - DNA, 13 bp, Artificial Sequence
  Oligonucleotide for detection of SNP TSC0060287
taaaaacaatcta

SEQ ID NO: 246623 - DNA, 13 bp, Artificial Sequence
  Oligonucleotide for detection of SNP TSC0060287
tagatcgttttta

SEQ ID NO: 246624 - DNA, 13 bp, Artificial Sequence
  Oligonucleotide for detection of SNP TSC0060287
taaaaacgatcta

SEQ ID NO: 246625 - DNA, 13 bp, Artificial Sequence
  Oligonucleotide for detection of SNP TSC0060287
tgaggggggtttg

SEQ ID NO: 246626 - DNA, 13 bp, Artificial Sequence
  Oligonucleotide for detection of SNP TSC0060287
caaacccccctca

SEQ ID NO: 246627 - DNA, 13 bp, Artificial Sequence
  Oligonucleotide for detection of SNP TSC0060287
tgagggtggtttg

SEQ ID NO: 246628 - DNA, 13 bp, Artificial Sequence
  Oligonucleotide for detection of SNP TSC0060287
caaaccaccctca

SEQ ID NO: 246629 - DNA, 13 bp, Artificial Sequence
  Oligonucleotide for detection of SNP TSC0060287
tgagggcggtttg

SEQ ID NO: 246630 - DNA, 13 bp, Artificial Sequence
  Oligonucleotide for detection of SNP TSC0060287
caaaccgccctca

SEQ ID NO: 246631 - DNA, 13 bp, Artificial Sequence
  Oligonucleotide for detection of SNP TSC0060289
taatgttgagtta

SEQ ID NO: 246632 - DNA, 13 bp, Artificial Sequence
  Oligonucleotide for detection of SNP TSC0060289
taactcaacatta

SEQ ID NO: 246633 - DNA, 13 bp, Artificial Sequence
  Oligonucleotide for detection of SNP TSC0060289
taatgtcgagtta

SEQ ID NO: 246634 - DNA, 13 bp, Artificial Sequence
  Oligonucleotide for detection of SNP TSC0060289
taactcgacatta

SEQ ID NO: 246635 - DNA, 13 bp, Artificial Sequence
  Oligonucleotide for detection of SNP TSC0060289
tgatttggtattg

SEQ ID NO: 246636 - DNA, 13 bp, Artificial Sequence
  Oligonucleotide for detection of SNP TSC0060289
caataccaaatca

SEQ ID NO: 246637 - DNA, 13 bp, Artificial Sequence
  Oligonucleotide for detection of SNP TSC0060289
tgatttagtattg

SEQ ID NO: 246638 - DNA, 13 bp, Artificial Sequence
  Oligonucleotide for detection of SNP TSC0060289
caatactaaatca

SEQ ID NO: 246639 - DNA, 13 bp, Artificial Sequence
  Oligonucleotide for detection of SNP TSC0060289
tgattcggtattg

SEQ ID NO: 246640 - DNA, 13 bp, Artificial Sequence
  Oligonucleotide for detection of SNP TSC0060289
caataccgaatca

SEQ ID NO: 246641 - DNA, 13 bp, Artificial Sequence
  Oligonucleotide for detection of SNP TSC0060290
aaggggggtagtt

SEQ ID NO: 246642 - DNA, 13 bp, Artificial Sequence
  Oligonucleotide for detection of SNP TSC0060290
aactacccccctt

SEQ ID NO: 246643 - DNA, 13 bp, Artificial Sequence
  Oligonucleotide for detection of SNP TSC0060290
aaggggagtagtt

SEQ ID NO: 246644 - DNA, 13 bp, Artificial Sequence
  Oligonucleotide for detection of SNP TSC0060290
aactactcccctt

SEQ ID NO: 246645 - DNA, 13 bp, Artificial Sequence
  Oligonucleotide for detection of SNP TSC0060291
agaaatgatgtgt

SEQ ID NO: 246646 - DNA, 13 bp, Artificial Sequence
  Oligonucleotide for detection of SNP TSC0060291
acacatcatttct

SEQ ID NO: 246647 - DNA, 13 bp, Artificial Sequence
  Oligonucleotide for detection of SNP TSC0060291
agaaataatgtgt

SEQ ID NO: 246648 - DNA, 13 bp, Artificial Sequence
  Oligonucleotide for detection of SNP TSC0060291
acacattatttct

SEQ ID NO: 246649 - DNA, 13 bp, Artificial Sequence
  Oligonucleotide for detection of SNP TSC0060292
atatagtgaaagy

SEQ ID NO: 246650 - DNA, 13 bp, Artificial Sequence
  Oligonucleotide for detection of SNP TSC0060292
rctttcactatat

SEQ ID NO: 246651 - DNA, 13 bp, Artificial Sequence
  Oligonucleotide for detection of SNP TSC0060292
atatagggaaagy

SEQ ID NO: 246652 - DNA, 13 bp, Artificial Sequence
  Oligonucleotide for detection of SNP TSC0060292
rctttccctatat

SEQ ID NO: 246653 - DNA, 13 bp, Artificial Sequence
  Oligonucleotide for detection of SNP TSC0060292
gttttttttatat

SEQ ID NO: 246654 - DNA, 13 bp, Artificial Sequence
  Oligonucleotide for detection of SNP TSC0060292
atataaaaaaaac

SEQ ID NO: 246655 - DNA, 13 bp, Artificial Sequence
  Oligonucleotide for detection of SNP TSC0060293
tatgtaaaaaata

SEQ ID NO: 246656 - DNA, 13 bp, Artificial Sequence
  Oligonucleotide for detection of SNP TSC0060293
tattttttacata

SEQ ID NO: 246657 - DNA, 13 bp, Artificial Sequence
  Oligonucleotide for detection of SNP TSC0060293
tatgtagaaaata

SEQ ID NO: 246658 - DNA, 13 bp, Artificial Sequence
  Oligonucleotide for detection of SNP TSC0060293
tattttctacata

SEQ ID NO: 246659 - DNA, 13 bp, Artificial Sequence
  Oligonucleotide for detection of SNP TSC0060295
gaggtaggaggat

SEQ ID NO: 246660 - DNA, 13 bp, Artificial Sequence
  Oligonucleotide for detection of SNP TSC0060295
atcctcctacctc

SEQ ID NO: 246661 - DNA, 13 bp, Artificial Sequence
  Oligonucleotide for detection of SNP TSC0060295
gaggtaagaggat

SEQ ID NO: 246662 - DNA, 13 bp, Artificial Sequence
  Oligonucleotide for detection of SNP TSC0060295
atcctcttacctc

SEQ ID NO: 246663 - DNA, 13 bp, Artificial Sequence
  Oligonucleotide for detection of SNP TSC0060296
tattatttttaay

SEQ ID NO: 246664 - DNA, 13 bp, Artificial Sequence
  Oligonucleotide for detection of SNP TSC0060296
rttaaaaataata

SEQ ID NO: 246665 - DNA, 13 bp, Artificial Sequence
  Oligonucleotide for detection of SNP TSC0060296
gttaaggatagta

SEQ ID NO: 246666 - DNA, 13 bp, Artificial Sequence
  Oligonucleotide for detection of SNP TSC0060296
tactatccttaac

SEQ ID NO: 246667 - DNA, 13 bp, Artificial Sequence
  Oligonucleotide for detection of SNP TSC0060296
gttaagtatagta

SEQ ID NO: 246668 - DNA, 13 bp, Artificial Sequence
  Oligonucleotide for detection of SNP TSC0060296
tactatacttaac

SEQ ID NO: 246669 - DNA, 13 bp, Artificial Sequence
  Oligonucleotide for detection of SNP TSC0060297
tagtagatattgy

SEQ ID NO: 246670 - DNA, 13 bp, Artificial Sequence
  Oligonucleotide for detection of SNP TSC0060297
rcaatatctacta

SEQ ID NO: 246671 - DNA, 13 bp, Artificial Sequence
  Oligonucleotide for detection of SNP TSC0060297
tagtaggtattgy

SEQ ID NO: 246672 - DNA, 13 bp, Artificial Sequence
  Oligonucleotide for detection of SNP TSC0060297
rcaatacctacta

SEQ ID NO: 246673 - DNA, 13 bp, Artificial Sequence
  Oligonucleotide for detection of SNP TSC0060298
gtttatatagata

SEQ ID NO: 246674 - DNA, 13 bp, Artificial Sequence
  Oligonucleotide for detection of SNP TSC0060298
tatctatataaac

SEQ ID NO: 246675 - DNA, 13 bp, Artificial Sequence
  Oligonucleotide for detection of SNP TSC0060298
gtttatttagata

SEQ ID NO: 246676 - DNA, 13 bp, Artificial Sequence
  Oligonucleotide for detection of SNP TSC0060298
tatctaaataaac

SEQ ID NO: 246677 - DNA, 13 bp, Artificial Sequence
  Oligonucleotide for detection of SNP TSC0060298
tatttatgtgggy

SEQ ID NO: 246678 - DNA, 13 bp, Artificial Sequence
  Oligonucleotide for detection of SNP TSC0060298
rcccacataaata

SEQ ID NO: 246679 - DNA, 13 bp, Artificial Sequence
  Oligonucleotide for detection of SNP TSC0060298
tatttaggtgggy

SEQ ID NO: 246680 - DNA, 13 bp, Artificial Sequence
  Oligonucleotide for detection of SNP TSC0060298
rcccacctaaata

SEQ ID NO: 246681 - DNA, 13 bp, Artificial Sequence
  Oligonucleotide for detection of SNP TSC0060299
tggtttatggatt

SEQ ID NO: 246682 - DNA, 13 bp, Artificial Sequence
  Oligonucleotide for detection of SNP TSC0060299
aatccataaacca

SEQ ID NO: 246683 - DNA, 13 bp, Artificial Sequence
  Oligonucleotide for detection of SNP TSC0060299
tggtttgtggatt

SEQ ID NO: 246684 - DNA, 13 bp, Artificial Sequence
  Oligonucleotide for detection of SNP TSC0060299
aatccacaaacca

SEQ ID NO: 246685 - DNA, 13 bp, Artificial Sequence
  Oligonucleotide for detection of SNP TSC0060300
gattttattatgy

SEQ ID NO: 246686 - DNA, 13 bp, Artificial Sequence
  Oligonucleotide for detection of SNP TSC0060300
rcataataaaatc

SEQ ID NO: 246687 - DNA, 13 bp, Artificial Sequence
  Oligonucleotide for detection of SNP TSC0060300
gattttgttatgy

SEQ ID NO: 246688 - DNA, 13 bp, Artificial Sequence
  Oligonucleotide for detection of SNP TSC0060300
rcataacaaaatc

SEQ ID NO: 246689 - DNA, 13 bp, Artificial Sequence
  Oligonucleotide for detection of SNP TSC0060300
gatttcgttatgy

SEQ ID NO: 246690 - DNA, 13 bp, Artificial Sequence
  Oligonucleotide for detection of SNP TSC0060300
rcataacgaaatc

SEQ ID NO: 246691 - DNA, 13 bp, Artificial Sequence
  Oligonucleotide for detection of SNP TSC0060300
gtataatggagty

SEQ ID NO: 246692 - DNA, 13 bp, Artificial Sequence
  Oligonucleotide for detection of SNP TSC0060300
ractccattatac

SEQ ID NO: 246693 - DNA, 13 bp, Artificial Sequence
  Oligonucleotide for detection of SNP TSC0060300
gtataacggagty

SEQ ID NO: 246694 - DNA, 13 bp, Artificial Sequence
  Oligonucleotide for detection of SNP TSC0060300
ractccgttatac

SEQ ID NO: 246695 - DNA, 13 bp, Artificial Sequence
  Oligonucleotide for detection of SNP TSC0060301
tttgttaagtatt

SEQ ID NO: 246696 - DNA, 13 bp, Artificial Sequence
  Oligonucleotide for detection of SNP TSC0060301
aatacttaacaaa

SEQ ID NO: 246697 - DNA, 13 bp, Artificial Sequence
  Oligonucleotide for detection of SNP TSC0060301
tttgttgagtatt

SEQ ID NO: 246698 - DNA, 13 bp, Artificial Sequence
  Oligonucleotide for detection of SNP TSC0060301
aatactcaacaaa

SEQ ID NO: 246699 - DNA, 13 bp, Artificial Sequence
  Oligonucleotide for detection of SNP TSC0060301
tttgtcgagtatt

SEQ ID NO: 246700 - DNA, 13 bp, Artificial Sequence
  Oligonucleotide for detection of SNP TSC0060301
aatactcgacaaa

SEQ ID NO: 246701 - DNA, 13 bp, Artificial Sequence
  Oligonucleotide for detection of SNP TSC0060301
agtgtttggtagg

SEQ ID NO: 246702 - DNA, 13 bp, Artificial Sequence
  Oligonucleotide for detection of SNP TSC0060301
cctaccaaacact

SEQ ID NO: 246703 - DNA, 13 bp, Artificial Sequence
  Oligonucleotide for detection of SNP TSC0060301
agtgttcggtagg

SEQ ID NO: 246704 - DNA, 13 bp, Artificial Sequence
  Oligonucleotide for detection of SNP TSC0060301
cctaccgaacact

SEQ ID NO: 246705 - DNA, 13 bp, Artificial Sequence
  Oligonucleotide for detection of SNP TSC0060302
gtatttaaatttg

SEQ ID NO: 246706 - DNA, 13 bp, Artificial Sequence
  Oligonucleotide for detection of SNP TSC0060302
caaatttaaatac

SEQ ID NO: 246707 - DNA, 13 bp, Artificial Sequence
  Oligonucleotide for detection of SNP TSC0060302
gtatttgaatttg

SEQ ID NO: 246708 - DNA, 13 bp, Artificial Sequence
  Oligonucleotide for detection of SNP TSC0060302
caaattcaaatac

SEQ ID NO: 246709 - DNA, 13 bp, Artificial Sequence
  Oligonucleotide for detection of SNP TSC0060302
gtattcgaatttg

SEQ ID NO: 246710 - DNA, 13 bp, Artificial Sequence
  Oligonucleotide for detection of SNP TSC0060302
caaattcgaatac

SEQ ID NO: 246711 - DNA, 13 bp, Artificial Sequence
  Oligonucleotide for detection of SNP TSC0060302
tagatttgaatgy

SEQ ID NO: 246712 - DNA, 13 bp, Artificial Sequence
  Oligonucleotide for detection of SNP TSC0060302
rcattcaaatcta

SEQ ID NO: 246713 - DNA, 13 bp, Artificial Sequence
  Oligonucleotide for detection of SNP TSC0060302
tagattcgaatgy

SEQ ID NO: 246714 - DNA, 13 bp, Artificial Sequence
  Oligonucleotide for detection of SNP TSC0060302
rcattcgaatcta

SEQ ID NO: 246715 - DNA, 13 bp, Artificial Sequence
  Oligonucleotide for detection of SNP TSC0060303
tattggatatgta

SEQ ID NO: 246716 - DNA, 13 bp, Artificial Sequence
  Oligonucleotide for detection of SNP TSC0060303
tacatatccaata

SEQ ID NO: 246717 - DNA, 13 bp, Artificial Sequence
  Oligonucleotide for detection of SNP TSC0060303
tattgggtatgta

SEQ ID NO: 246718 - DNA, 13 bp, Artificial Sequence
  Oligonucleotide for detection of SNP TSC0060303
tacatacccaata

SEQ ID NO: 246719 - DNA, 13 bp, Artificial Sequence
  Oligonucleotide for detection of SNP TSC0060304
taatttagtgtat

SEQ ID NO: 246720 - DNA, 13 bp, Artificial Sequence
  Oligonucleotide for detection of SNP TSC0060304
atacactaaatta

SEQ ID NO: 246721 - DNA, 13 bp, Artificial Sequence
  Oligonucleotide for detection of SNP TSC0060304
taatttggtgtat

SEQ ID NO: 246722 - DNA, 13 bp, Artificial Sequence
  Oligonucleotide for detection of SNP TSC0060304
atacaccaaatta

SEQ ID NO: 246723 - DNA, 13 bp, Artificial Sequence
  Oligonucleotide for detection of SNP TSC0060304
taattcggtgtat

SEQ ID NO: 246724 - DNA, 13 bp, Artificial Sequence
  Oligonucleotide for detection of SNP TSC0060304
atacaccgaatta

SEQ ID NO: 246725 - DNA, 13 bp, Artificial Sequence
  Oligonucleotide for detection of SNP TSC0060304
atatattgaattg

SEQ ID NO: 246726 - DNA, 13 bp, Artificial Sequence
  Oligonucleotide for detection of SNP TSC0060304
caattcaatatat

SEQ ID NO: 246727 - DNA, 13 bp, Artificial Sequence
  Oligonucleotide for detection of SNP TSC0060304
atatatcgaattg

SEQ ID NO: 246728 - DNA, 13 bp, Artificial Sequence
  Oligonucleotide for detection of SNP TSC0060304
caattcgatatat

SEQ ID NO: 246729 - DNA, 13 bp, Artificial Sequence
  Oligonucleotide for detection of SNP TSC0007035
tgaagagttaatt

SEQ ID NO: 246730 - DNA, 13 bp, Artificial Sequence
  Oligonucleotide for detection of SNP TSC0007035
aattaactcttca

SEQ ID NO: 246731 - DNA, 13 bp, Artificial Sequence
  Oligonucleotide for detection of SNP TSC0007035
tgaagaattaatt

SEQ ID NO: 246732 - DNA, 13 bp, Artificial Sequence
  Oligonucleotide for detection of SNP TSC0007035
aattaattcttca

SEQ ID NO: 246733 - DNA, 13 bp, Artificial Sequence
  Oligonucleotide for detection of SNP TSC0007035
cgaagagttaatt

SEQ ID NO: 246734 - DNA, 13 bp, Artificial Sequence
  Oligonucleotide for detection of SNP TSC0007035
aattaactcttcg

SEQ ID NO: 246735 - DNA, 13 bp, Artificial Sequence
  Oligonucleotide for detection of SNP TSC0007035
cgaagaattaatt

SEQ ID NO: 246736 - DNA, 13 bp, Artificial Sequence
  Oligonucleotide for detection of SNP TSC0007035
aattaattcttcg

SEQ ID NO: 246737 - DNA, 13 bp, Artificial Sequence
  Oligonucleotide for detection of SNP TSC0060306
ttttttaaaaagt

SEQ ID NO: 246738 - DNA, 13 bp, Artificial Sequence
  Oligonucleotide for detection of SNP TSC0060306
actttttaaaaaa

SEQ ID NO: 246739 - DNA, 13 bp, Artificial Sequence
  Oligonucleotide for detection of SNP TSC0060307
aaagatgatttaa

SEQ ID NO: 246740 - DNA, 13 bp, Artificial Sequence
  Oligonucleotide for detection of SNP TSC0060307
ttaaatcatcttt

SEQ ID NO: 246741 - DNA, 13 bp, Artificial Sequence
  Oligonucleotide for detection of SNP TSC0060307
aaagataatttaa

SEQ ID NO: 246742 - DNA, 13 bp, Artificial Sequence
  Oligonucleotide for detection of SNP TSC0060307
ttaaattatcttt

SEQ ID NO: 246743 - DNA, 13 bp, Artificial Sequence
  Oligonucleotide for detection of SNP TSC0060308
ataaattgatatt

SEQ ID NO: 246744 - DNA, 13 bp, Artificial Sequence
  Oligonucleotide for detection of SNP TSC0060308
aatatcaatttat

SEQ ID NO: 246745 - DNA, 13 bp, Artificial Sequence
  Oligonucleotide for detection of SNP TSC0060308
ataaatcgatatt

SEQ ID NO: 246746 - DNA, 13 bp, Artificial Sequence
  Oligonucleotide for detection of SNP TSC0060308
aatatcgatttat

SEQ ID NO: 246747 - DNA, 13 bp, Artificial Sequence
  Oligonucleotide for detection of SNP TSC0060308
aatattgatttgt

SEQ ID NO: 246748 - DNA, 13 bp, Artificial Sequence
  Oligonucleotide for detection of SNP TSC0060308
acaaatcaatatt

SEQ ID NO: 246749 - DNA, 13 bp, Artificial Sequence
  Oligonucleotide for detection of SNP TSC0060308
aatattaatttgt

SEQ ID NO: 246750 - DNA, 13 bp, Artificial Sequence
  Oligonucleotide for detection of SNP TSC0060308
acaaattaatatt

SEQ ID NO: 246751 - DNA, 13 bp, Artificial Sequence
  Oligonucleotide for detection of SNP TSC0060308
aatatcgatttgt

SEQ ID NO: 246752 - DNA, 13 bp, Artificial Sequence
  Oligonucleotide for detection of SNP TSC0060308
acaaatcgatatt

SEQ ID NO: 246753 - DNA, 13 bp, Artificial Sequence
  Oligonucleotide for detection of SNP TSC0060310
attatgtagaagg

SEQ ID NO: 246754 - DNA, 13 bp, Artificial Sequence
  Oligonucleotide for detection of SNP TSC0060310
ccttctacataat

SEQ ID NO: 246755 - DNA, 13 bp, Artificial Sequence
  Oligonucleotide for detection of SNP TSC0060310
attatggagaagg

SEQ ID NO: 246756 - DNA, 13 bp, Artificial Sequence
  Oligonucleotide for detection of SNP TSC0060310
ccttctccataat

SEQ ID NO: 246757 - DNA, 13 bp, Artificial Sequence
  Oligonucleotide for detection of SNP TSC0060310
ttttttttatgat

SEQ ID NO: 246758 - DNA, 13 bp, Artificial Sequence
  Oligonucleotide for detection of SNP TSC0060310
atcataaaaaaaa

SEQ ID NO: 246759 - DNA, 13 bp, Artificial Sequence
  Oligonucleotide for detection of SNP TSC0060311
tatataataggtg

SEQ ID NO: 246760 - DNA, 13 bp, Artificial Sequence
  Oligonucleotide for detection of SNP TSC0060311
cacctattatata

SEQ ID NO: 246761 - DNA, 13 bp, Artificial Sequence
  Oligonucleotide for detection of SNP TSC0060311
tatatagtaggtg

SEQ ID NO: 246762 - DNA, 13 bp, Artificial Sequence
  Oligonucleotide for detection of SNP TSC0060311
cacctactatata

SEQ ID NO: 246763 - DNA, 13 bp, Artificial Sequence
  Oligonucleotide for detection of SNP TSC0060313
atataaagtaaag

SEQ ID NO: 246764 - DNA, 13 bp, Artificial Sequence
  Oligonucleotide for detection of SNP TSC0060313
ctttactttatat

SEQ ID NO: 246765 - DNA, 13 bp, Artificial Sequence
  Oligonucleotide for detection of SNP TSC0060313
atataaggtaaag

SEQ ID NO: 246766 - DNA, 13 bp, Artificial Sequence
  Oligonucleotide for detection of SNP TSC0060313
ctttaccttatat

SEQ ID NO: 246767 - DNA, 13 bp, Artificial Sequence
  Oligonucleotide for detection of SNP TSC0060314
tttattgagttty

SEQ ID NO: 246768 - DNA, 13 bp, Artificial Sequence
  Oligonucleotide for detection of SNP TSC0060314
raaactcaataaa

SEQ ID NO: 246769 - DNA, 13 bp, Artificial Sequence
  Oligonucleotide for detection of SNP TSC0060315
attttatagtgtt

SEQ ID NO: 246770 - DNA, 13 bp, Artificial Sequence
  Oligonucleotide for detection of SNP TSC0060315
aacactataaaat

SEQ ID NO: 246771 - DNA, 13 bp, Artificial Sequence
  Oligonucleotide for detection of SNP TSC0060315
attttagagtgtt

SEQ ID NO: 246772 - DNA, 13 bp, Artificial Sequence
  Oligonucleotide for detection of SNP TSC0060315
aacactctaaaat

SEQ ID NO: 246773 - DNA, 13 bp, Artificial Sequence
  Oligonucleotide for detection of SNP TSC0060315
agtattataagat

SEQ ID NO: 246774 - DNA, 13 bp, Artificial Sequence
  Oligonucleotide for detection of SNP TSC0060315
atcttataatact

SEQ ID NO: 246775 - DNA, 13 bp, Artificial Sequence
  Oligonucleotide for detection of SNP TSC0060315
agtattttaagat

SEQ ID NO: 246776 - DNA, 13 bp, Artificial Sequence
  Oligonucleotide for detection of SNP TSC0060315
atcttaaaatact

SEQ ID NO: 246777 - DNA, 13 bp, Artificial Sequence
  Oligonucleotide for detection of SNP TSC0060316
ttgttaatattaa

SEQ ID NO: 246778 - DNA, 13 bp, Artificial Sequence
  Oligonucleotide for detection of SNP TSC0060316
ttaatattaacaa

SEQ ID NO: 246779 - DNA, 13 bp, Artificial Sequence
  Oligonucleotide for detection of SNP TSC0060316
ttgttattattaa

SEQ ID NO: 246780 - DNA, 13 bp, Artificial Sequence
  Oligonucleotide for detection of SNP TSC0060316
ttaataataacaa

SEQ ID NO: 246781 - DNA, 13 bp, Artificial Sequence
  Oligonucleotide for detection of SNP TSC0060316
ttggtattgatag

SEQ ID NO: 246782 - DNA, 13 bp, Artificial Sequence
  Oligonucleotide for detection of SNP TSC0060316
ctatcaataccaa

SEQ ID NO: 246783 - DNA, 13 bp, Artificial Sequence
  Oligonucleotide for detection of SNP TSC0060316
ttggtagtgatag

SEQ ID NO: 246784 - DNA, 13 bp, Artificial Sequence
  Oligonucleotide for detection of SNP TSC0060316
ctatcactaccaa

SEQ ID NO: 246785 - DNA, 13 bp, Artificial Sequence
  Oligonucleotide for detection of SNP TSC0060317
ttgtgtataattt

SEQ ID NO: 246786 - DNA, 13 bp, Artificial Sequence
  Oligonucleotide for detection of SNP TSC0060317
aaattatacacaa

SEQ ID NO: 246787 - DNA, 13 bp, Artificial Sequence
  Oligonucleotide for detection of SNP TSC0060317
ttgtgtttaattt

SEQ ID NO: 246788 - DNA, 13 bp, Artificial Sequence
  Oligonucleotide for detection of SNP TSC0060317
aaattaaacacaa

SEQ ID NO: 246789 - DNA, 13 bp, Artificial Sequence
  Oligonucleotide for detection of SNP TSC0060317
aggttatatataa

SEQ ID NO: 246790 - DNA, 13 bp, Artificial Sequence
  Oligonucleotide for detection of SNP TSC0060317
ttatatataacct

SEQ ID NO: 246791 - DNA, 13 bp, Artificial Sequence
  Oligonucleotide for detection of SNP TSC0060317
aggttagatataa

SEQ ID NO: 246792 - DNA, 13 bp, Artificial Sequence
  Oligonucleotide for detection of SNP TSC0060317
ttatatctaacct

SEQ ID NO: 246793 - DNA, 13 bp, Artificial Sequence
  Oligonucleotide for detection of SNP TSC0060318
taagtaaagagaa

SEQ ID NO: 246794 - DNA, 13 bp, Artificial Sequence
  Oligonucleotide for detection of SNP TSC0060318
ttctctttactta

SEQ ID NO: 246795 - DNA, 13 bp, Artificial Sequence
  Oligonucleotide for detection of SNP TSC0060318
taagtagagagaa

SEQ ID NO: 246796 - DNA, 13 bp, Artificial Sequence
  Oligonucleotide for detection of SNP TSC0060318
ttctctctactta

SEQ ID NO: 246797 - DNA, 13 bp, Artificial Sequence
  Oligonucleotide for detection of SNP TSC0060319
ttattcgagatta

SEQ ID NO: 246798 - DNA, 13 bp, Artificial Sequence
  Oligonucleotide for detection of SNP TSC0060319
taatctcgaataa

SEQ ID NO: 246799 - DNA, 13 bp, Artificial Sequence
  Oligonucleotide for detection of SNP TSC0060319
tgattttgggtaa

SEQ ID NO: 246800 - DNA, 13 bp, Artificial Sequence
  Oligonucleotide for detection of SNP TSC0060319
ttacccaaaatca

SEQ ID NO: 246801 - DNA, 13 bp, Artificial Sequence
  Oligonucleotide for detection of SNP TSC0060319
tgatttcgggtaa

SEQ ID NO: 246802 - DNA, 13 bp, Artificial Sequence
  Oligonucleotide for detection of SNP TSC0060319
ttacccgaaatca

SEQ ID NO: 246803 - DNA, 13 bp, Artificial Sequence
  Oligonucleotide for detection of SNP TSC0060321
tgttttttttgat

SEQ ID NO: 246804 - DNA, 13 bp, Artificial Sequence
  Oligonucleotide for detection of SNP TSC0060321
atcaaaaaaaaca

SEQ ID NO: 246805 - DNA, 13 bp, Artificial Sequence
  Oligonucleotide for detection of SNP TSC0060321
tgttttgtttgat

SEQ ID NO: 246806 - DNA, 13 bp, Artificial Sequence
  Oligonucleotide for detection of SNP TSC0060321
atcaaacaaaaca

SEQ ID NO: 246807 - DNA, 13 bp, Artificial Sequence
  Oligonucleotide for detection of SNP TSC0060321
attaggaaaagta

SEQ ID NO: 246808 - DNA, 13 bp, Artificial Sequence
  Oligonucleotide for detection of SNP TSC0060321
tacttttcctaat

SEQ ID NO: 246809 - DNA, 13 bp, Artificial Sequence
  Oligonucleotide for detection of SNP TSC0060321
attaggtaaagta

SEQ ID NO: 246810 - DNA, 13 bp, Artificial Sequence
  Oligonucleotide for detection of SNP TSC0060321
tactttacctaat

SEQ ID NO: 246811 - DNA, 13 bp, Artificial Sequence
  Oligonucleotide for detection of SNP TSC0060322
ttggagtgtataa

SEQ ID NO: 246812 - DNA, 13 bp, Artificial Sequence
  Oligonucleotide for detection of SNP TSC0060322
ttatacactccaa

SEQ ID NO: 246813 - DNA, 13 bp, Artificial Sequence
  Oligonucleotide for detection of SNP TSC0060322
ttggagcgtataa

SEQ ID NO: 246814 - DNA, 13 bp, Artificial Sequence
  Oligonucleotide for detection of SNP TSC0060322
ttatacgctccaa

SEQ ID NO: 246815 - DNA, 13 bp, Artificial Sequence
  Oligonucleotide for detection of SNP TSC0060322
ttatgtgttttag

SEQ ID NO: 246816 - DNA, 13 bp, Artificial Sequence
  Oligonucleotide for detection of SNP TSC0060322
ctaaaacacataa

SEQ ID NO: 246817 - DNA, 13 bp, Artificial Sequence
  Oligonucleotide for detection of SNP TSC0060322
ttatgtattttag

SEQ ID NO: 246818 - DNA, 13 bp, Artificial Sequence
  Oligonucleotide for detection of SNP TSC0060322
ctaaaatacataa

SEQ ID NO: 246819 - DNA, 13 bp, Artificial Sequence
  Oligonucleotide for detection of SNP TSC0060322
ttatgcgttttag

SEQ ID NO: 246820 - DNA, 13 bp, Artificial Sequence
  Oligonucleotide for detection of SNP TSC0060322
ctaaaacgcataa

SEQ ID NO: 246821 - DNA, 13 bp, Artificial Sequence
  Oligonucleotide for detection of SNP TSC0060323
ataatatataaay

SEQ ID NO: 246822 - DNA, 13 bp, Artificial Sequence
  Oligonucleotide for detection of SNP TSC0060323
rtttatatattat

SEQ ID NO: 246823 - DNA, 13 bp, Artificial Sequence
  Oligonucleotide for detection of SNP TSC0060323
ataatagataaay

SEQ ID NO: 246824 - DNA, 13 bp, Artificial Sequence
  Oligonucleotide for detection of SNP TSC0060323
rtttatctattat

SEQ ID NO: 246825 - DNA, 13 bp, Artificial Sequence
  Oligonucleotide for detection of SNP TSC0060323
gtttatatgttat

SEQ ID NO: 246826 - DNA, 13 bp, Artificial Sequence
  Oligonucleotide for detection of SNP TSC0060323
ataacatataaac

SEQ ID NO: 246827 - DNA, 13 bp, Artificial Sequence
  Oligonucleotide for detection of SNP TSC0060323
gtttatttgttat

SEQ ID NO: 246828 - DNA, 13 bp, Artificial Sequence
  Oligonucleotide for detection of SNP TSC0060323
ataacaaataaac

SEQ ID NO: 246829 - DNA, 13 bp, Artificial Sequence
  Oligonucleotide for detection of SNP TSC0060324
ttttaggagtgat

SEQ ID NO: 246830 - DNA, 13 bp, Artificial Sequence
  Oligonucleotide for detection of SNP TSC0060324
atcactcctaaaa

SEQ ID NO: 246831 - DNA, 13 bp, Artificial Sequence
  Oligonucleotide for detection of SNP TSC0060324
ttttagaagtgat

SEQ ID NO: 246832 - DNA, 13 bp, Artificial Sequence
  Oligonucleotide for detection of SNP TSC0060324
atcacttctaaaa

SEQ ID NO: 246833 - DNA, 13 bp, Artificial Sequence
  Oligonucleotide for detection of SNP TSC0060326
gaagtgtgagagy

SEQ ID NO: 246834 - DNA, 13 bp, Artificial Sequence
  Oligonucleotide for detection of SNP TSC0060326
rctctcacacttc

SEQ ID NO: 246835 - DNA, 13 bp, Artificial Sequence
  Oligonucleotide for detection of SNP TSC0060326
gaagtgggagagy

SEQ ID NO: 246836 - DNA, 13 bp, Artificial Sequence
  Oligonucleotide for detection of SNP TSC0060326
rctctcccacttc

SEQ ID NO: 246837 - DNA, 13 bp, Artificial Sequence
  Oligonucleotide for detection of SNP TSC0060326
gtttttatattty

SEQ ID NO: 246838 - DNA, 13 bp, Artificial Sequence
  Oligonucleotide for detection of SNP TSC0060326
raaatataaaaac

SEQ ID NO: 246839 - DNA, 13 bp, Artificial Sequence
  Oligonucleotide for detection of SNP TSC0060328
gaggggtgtgttt

SEQ ID NO: 246840 - DNA, 13 bp, Artificial Sequence
  Oligonucleotide for detection of SNP TSC0060328
aaacacacccctc

SEQ ID NO: 246841 - DNA, 13 bp, Artificial Sequence
  Oligonucleotide for detection of SNP TSC0060328
gaggggcgtgttt

SEQ ID NO: 246842 - DNA, 13 bp, Artificial Sequence
  Oligonucleotide for detection of SNP TSC0060328
aaacacgcccctc

SEQ ID NO: 246843 - DNA, 13 bp, Artificial Sequence
  Oligonucleotide for detection of SNP TSC0060328
agatacgttttty

SEQ ID NO: 246844 - DNA, 13 bp, Artificial Sequence
  Oligonucleotide for detection of SNP TSC0060328
raaaaacgtatct

SEQ ID NO: 246845 - DNA, 13 bp, Artificial Sequence
  Oligonucleotide for detection of SNP TSC0060329
atttgtttgatat

SEQ ID NO: 246846 - DNA, 13 bp, Artificial Sequence
  Oligonucleotide for detection of SNP TSC0060329
atatcaaacaaat

SEQ ID NO: 246847 - DNA, 13 bp, Artificial Sequence
  Oligonucleotide for detection of SNP TSC0060329
atttgtgtgatat

SEQ ID NO: 246848 - DNA, 13 bp, Artificial Sequence
  Oligonucleotide for detection of SNP TSC0060329
atatcacacaaat

SEQ ID NO: 246849 - DNA, 13 bp, Artificial Sequence
  Oligonucleotide for detection of SNP TSC0060329
atattagataaat

SEQ ID NO: 246850 - DNA, 13 bp, Artificial Sequence
  Oligonucleotide for detection of SNP TSC0060329
atttatctaatat

SEQ ID NO: 246851 - DNA, 13 bp, Artificial Sequence
  Oligonucleotide for detection of SNP TSC0060329
atattatataaat

SEQ ID NO: 246852 - DNA, 13 bp, Artificial Sequence
  Oligonucleotide for detection of SNP TSC0060329
atttatataatat

SEQ ID NO: 246853 - DNA, 13 bp, Artificial Sequence
  Oligonucleotide for detection of SNP TSC0060333
ttttgttgtgtgy

SEQ ID NO: 246854 - DNA, 13 bp, Artificial Sequence
  Oligonucleotide for detection of SNP TSC0060333
rcacacaacaaaa

SEQ ID NO: 246855 - DNA, 13 bp, Artificial Sequence
  Oligonucleotide for detection of SNP TSC0060333
ttttgtggtgtgy

SEQ ID NO: 246856 - DNA, 13 bp, Artificial Sequence
  Oligonucleotide for detection of SNP TSC0060333
rcacaccacaaaa

SEQ ID NO: 246857 - DNA, 13 bp, Artificial Sequence
  Oligonucleotide for detection of SNP TSC0060333
ttttgttgtgcgy

SEQ ID NO: 246858 - DNA, 13 bp, Artificial Sequence
  Oligonucleotide for detection of SNP TSC0060333
rcgcacaacaaaa

SEQ ID NO: 246859 - DNA, 13 bp, Artificial Sequence
  Oligonucleotide for detection of SNP TSC0060333
ttttgcggtgtgy

SEQ ID NO: 246860 - DNA, 13 bp, Artificial Sequence
  Oligonucleotide for detection of SNP TSC0060333
rcacaccgcaaaa

SEQ ID NO: 246861 - DNA, 13 bp, Artificial Sequence
  Oligonucleotide for detection of SNP TSC0060333
ttttgtggtgcgy

SEQ ID NO: 246862 - DNA, 13 bp, Artificial Sequence
  Oligonucleotide for detection of SNP TSC0060333
rcgcaccacaaaa

SEQ ID NO: 246863 - DNA, 13 bp, Artificial Sequence
  Oligonucleotide for detection of SNP TSC0060333
ttttgcggtgcgy

SEQ ID NO: 246864 - DNA, 13 bp, Artificial Sequence
  Oligonucleotide for detection of SNP TSC0060333
rcgcaccgcaaaa

SEQ ID NO: 246865 - DNA, 13 bp, Artificial Sequence
  Oligonucleotide for detection of SNP TSC0060333
gtgtatagtagga

SEQ ID NO: 246866 - DNA, 13 bp, Artificial Sequence
  Oligonucleotide for detection of SNP TSC0060333
tcctactatacac

SEQ ID NO: 246867 - DNA, 13 bp, Artificial Sequence
  Oligonucleotide for detection of SNP TSC0060333
gtgtattgtagga

SEQ ID NO: 246868 - DNA, 13 bp, Artificial Sequence
  Oligonucleotide for detection of SNP TSC0060333
tcctacaatacac

SEQ ID NO: 246869 - DNA, 13 bp, Artificial Sequence
  Oligonucleotide for detection of SNP TSC0060333
gcgtatagtagga

SEQ ID NO: 246870 - DNA, 13 bp, Artificial Sequence
  Oligonucleotide for detection of SNP TSC0060333
tcctactatacgc

SEQ ID NO: 246871 - DNA, 13 bp, Artificial Sequence
  Oligonucleotide for detection of SNP TSC0060333
gcgtattgtagga

SEQ ID NO: 246872 - DNA, 13 bp, Artificial Sequence
  Oligonucleotide for detection of SNP TSC0060333
tcctacaatacgc

SEQ ID NO: 246873 - DNA, 13 bp, Artificial Sequence
  Oligonucleotide for detection of SNP TSC0060333
gtgtatcgtagga

SEQ ID NO: 246874 - DNA, 13 bp, Artificial Sequence
  Oligonucleotide for detection of SNP TSC0060333
tcctacgatacac

SEQ ID NO: 246875 - DNA, 13 bp, Artificial Sequence
  Oligonucleotide for detection of SNP TSC0060333
gcgtatcgtagga

SEQ ID NO: 246876 - DNA, 13 bp, Artificial Sequence
  Oligonucleotide for detection of SNP TSC0060333
tcctacgatacgc

SEQ ID NO: 246877 - DNA, 13 bp, Artificial Sequence
  Oligonucleotide for detection of SNP TSC0060335
atttaagtagtat

SEQ ID NO: 246878 - DNA, 13 bp, Artificial Sequence
  Oligonucleotide for detection of SNP TSC0060335
atactacttaaat

SEQ ID NO: 246879 - DNA, 13 bp, Artificial Sequence
  Oligonucleotide for detection of SNP TSC0060335
atttaaatagtat

SEQ ID NO: 246880 - DNA, 13 bp, Artificial Sequence
  Oligonucleotide for detection of SNP TSC0060335
atactatttaaat

SEQ ID NO: 246881 - DNA, 13 bp, Artificial Sequence
  Oligonucleotide for detection of SNP TSC0060336
tttatgaatagta

SEQ ID NO: 246882 - DNA, 13 bp, Artificial Sequence
  Oligonucleotide for detection of SNP TSC0060336
tactattcataaa

SEQ ID NO: 246883 - DNA, 13 bp, Artificial Sequence
  Oligonucleotide for detection of SNP TSC0060336
tttatggatagta

SEQ ID NO: 246884 - DNA, 13 bp, Artificial Sequence
  Oligonucleotide for detection of SNP TSC0060336
tactatccataaa

SEQ ID NO: 246885 - DNA, 13 bp, Artificial Sequence
  Oligonucleotide for detection of SNP TSC0060337
tataaagaaaaaa

SEQ ID NO: 246886 - DNA, 13 bp, Artificial Sequence
  Oligonucleotide for detection of SNP TSC0060337
ttttttctttata

SEQ ID NO: 246887 - DNA, 13 bp, Artificial Sequence
  Oligonucleotide for detection of SNP TSC0060338
aaaaaagaattaa

SEQ ID NO: 246888 - DNA, 13 bp, Artificial Sequence
  Oligonucleotide for detection of SNP TSC0060338
ttaattctttttt

SEQ ID NO: 246889 - DNA, 13 bp, Artificial Sequence
  Oligonucleotide for detection of SNP TSC0060342
agataaatagttt

SEQ ID NO: 246890 - DNA, 13 bp, Artificial Sequence
  Oligonucleotide for detection of SNP TSC0060342
aaactatttatct

SEQ ID NO: 246891 - DNA, 13 bp, Artificial Sequence
  Oligonucleotide for detection of SNP TSC0060342
agataattagttt

SEQ ID NO: 246892 - DNA, 13 bp, Artificial Sequence
  Oligonucleotide for detection of SNP TSC0060342
aaactaattatct

SEQ ID NO: 246893 - DNA, 13 bp, Artificial Sequence
  Oligonucleotide for detection of SNP TSC0060342
aagttgtttattt

SEQ ID NO: 246894 - DNA, 13 bp, Artificial Sequence
  Oligonucleotide for detection of SNP TSC0060342
aaataaacaactt

SEQ ID NO: 246895 - DNA, 13 bp, Artificial Sequence
  Oligonucleotide for detection of SNP TSC0060342
aagttggttattt

SEQ ID NO: 246896 - DNA, 13 bp, Artificial Sequence
  Oligonucleotide for detection of SNP TSC0060342
aaataaccaactt

SEQ ID NO: 246897 - DNA, 13 bp, Artificial Sequence
  Oligonucleotide for detection of SNP TSC0060343
tatttaaggtaga

SEQ ID NO: 246898 - DNA, 13 bp, Artificial Sequence
  Oligonucleotide for detection of SNP TSC0060343
tctaccttaaata

SEQ ID NO: 246899 - DNA, 13 bp, Artificial Sequence
  Oligonucleotide for detection of SNP TSC0060343
tatttagggtaga

SEQ ID NO: 246900 - DNA, 13 bp, Artificial Sequence
  Oligonucleotide for detection of SNP TSC0060343
tctaccctaaata

SEQ ID NO: 246901 - DNA, 13 bp, Artificial Sequence
  Oligonucleotide for detection of SNP TSC0060347
taagatttgagtg

SEQ ID NO: 246902 - DNA, 13 bp, Artificial Sequence
  Oligonucleotide for detection of SNP TSC0060347
cactcaaatctta

SEQ ID NO: 246903 - DNA, 13 bp, Artificial Sequence
  Oligonucleotide for detection of SNP TSC0060347
taagatatgagtg

SEQ ID NO: 246904 - DNA, 13 bp, Artificial Sequence
  Oligonucleotide for detection of SNP TSC0060347
cactcatatctta

SEQ ID NO: 246905 - DNA, 13 bp, Artificial Sequence
  Oligonucleotide for detection of SNP TSC0060351
aggtattgtgaty

SEQ ID NO: 246906 - DNA, 13 bp, Artificial Sequence
  Oligonucleotide for detection of SNP TSC0060351
ratcacaatacct

SEQ ID NO: 246907 - DNA, 13 bp, Artificial Sequence
  Oligonucleotide for detection of SNP TSC0060351
aggtatcgtgaty

SEQ ID NO: 246908 - DNA, 13 bp, Artificial Sequence
  Oligonucleotide for detection of SNP TSC0060351
ratcacgatacct

SEQ ID NO: 246909 - DNA, 13 bp, Artificial Sequence
  Oligonucleotide for detection of SNP TSC0060351
ggttatggtgttt

SEQ ID NO: 246910 - DNA, 13 bp, Artificial Sequence
  Oligonucleotide for detection of SNP TSC0060351
aaacaccataacc

SEQ ID NO: 246911 - DNA, 13 bp, Artificial Sequence
  Oligonucleotide for detection of SNP TSC0060351
ggttatagtgttt

SEQ ID NO: 246912 - DNA, 13 bp, Artificial Sequence
  Oligonucleotide for detection of SNP TSC0060351
aaacactataacc

SEQ ID NO: 246913 - DNA, 13 bp, Artificial Sequence
  Oligonucleotide for detection of SNP TSC0060351
ggttacggtgttt

SEQ ID NO: 246914 - DNA, 13 bp, Artificial Sequence
  Oligonucleotide for detection of SNP TSC0060351
aaacaccgtaacc

SEQ ID NO: 246915 - DNA, 13 bp, Artificial Sequence
  Oligonucleotide for detection of SNP TSC0060352
gatgtgattataa

SEQ ID NO: 246916 - DNA, 13 bp, Artificial Sequence
  Oligonucleotide for detection of SNP TSC0060352
ttataatcacatc

SEQ ID NO: 246917 - DNA, 13 bp, Artificial Sequence
  Oligonucleotide for detection of SNP TSC0060352
gatgtggttataa

SEQ ID NO: 246918 - DNA, 13 bp, Artificial Sequence
  Oligonucleotide for detection of SNP TSC0060352
ttataaccacatc

SEQ ID NO: 246919 - DNA, 13 bp, Artificial Sequence
  Oligonucleotide for detection of SNP TSC0060355
aatgaatggtaga

SEQ ID NO: 246920 - DNA, 13 bp, Artificial Sequence
  Oligonucleotide for detection of SNP TSC0060355
tctaccattcatt

SEQ ID NO: 246921 - DNA, 13 bp, Artificial Sequence
  Oligonucleotide for detection of SNP TSC0060355
aatgaacggtaga

SEQ ID NO: 246922 - DNA, 13 bp, Artificial Sequence
  Oligonucleotide for detection of SNP TSC0060355
tctaccgttcatt

SEQ ID NO: 246923 - DNA, 13 bp, Artificial Sequence
  Oligonucleotide for detection of SNP TSC0060356
aaaaatattattt

SEQ ID NO: 246924 - DNA, 13 bp, Artificial Sequence
  Oligonucleotide for detection of SNP TSC0060356
aaataatattttt

SEQ ID NO: 246925 - DNA, 13 bp, Artificial Sequence
  Oligonucleotide for detection of SNP TSC0060356
aaaaattttattt

SEQ ID NO: 246926 - DNA, 13 bp, Artificial Sequence
  Oligonucleotide for detection of SNP TSC0060356
aaataaaattttt

SEQ ID NO: 246927 - DNA, 13 bp, Artificial Sequence
  Oligonucleotide for detection of SNP TSC0060356
aagtagtattttt

SEQ ID NO: 246928 - DNA, 13 bp, Artificial Sequence
  Oligonucleotide for detection of SNP TSC0060356
aaaaatactactt

SEQ ID NO: 246929 - DNA, 13 bp, Artificial Sequence
  Oligonucleotide for detection of SNP TSC0060356
aagtaggattttt

SEQ ID NO: 246930 - DNA, 13 bp, Artificial Sequence
  Oligonucleotide for detection of SNP TSC0060356
aaaaatcctactt

SEQ ID NO: 246931 - DNA, 13 bp, Artificial Sequence
  Oligonucleotide for detection of SNP TSC0060357
taaataatgatty

SEQ ID NO: 246932 - DNA, 13 bp, Artificial Sequence
  Oligonucleotide for detection of SNP TSC0060357
raatcattattta

SEQ ID NO: 246933 - DNA, 13 bp, Artificial Sequence
  Oligonucleotide for detection of SNP TSC0060357
taaatagtgatty

SEQ ID NO: 246934 - DNA, 13 bp, Artificial Sequence
  Oligonucleotide for detection of SNP TSC0060357
raatcactattta

SEQ ID NO: 246935 - DNA, 13 bp, Artificial Sequence
  Oligonucleotide for detection of SNP TSC0060359
tataatgggttag

SEQ ID NO: 246936 - DNA, 13 bp, Artificial Sequence
  Oligonucleotide for detection of SNP TSC0060359
ctaacccattata

SEQ ID NO: 246937 - DNA, 13 bp, Artificial Sequence
  Oligonucleotide for detection of SNP TSC0060359
tataataggttag

SEQ ID NO: 246938 - DNA, 13 bp, Artificial Sequence
  Oligonucleotide for detection of SNP TSC0060359
ctaacctattata

SEQ ID NO: 246939 - DNA, 13 bp, Artificial Sequence
  Oligonucleotide for detection of SNP TSC0060360
tgtgtatgggtgg

SEQ ID NO: 246940 - DNA, 13 bp, Artificial Sequence
  Oligonucleotide for detection of SNP TSC0060360
ccacccatacaca

SEQ ID NO: 246941 - DNA, 13 bp, Artificial Sequence
  Oligonucleotide for detection of SNP TSC0060360
tgtgtaggggtgg

SEQ ID NO: 246942 - DNA, 13 bp, Artificial Sequence
  Oligonucleotide for detection of SNP TSC0060360
ccacccctacaca

SEQ ID NO: 246943 - DNA, 13 bp, Artificial Sequence
  Oligonucleotide for detection of SNP TSC0060360
tgcgtatgggtgg

SEQ ID NO: 246944 - DNA, 13 bp, Artificial Sequence
  Oligonucleotide for detection of SNP TSC0060360
ccacccatacgca

SEQ ID NO: 246945 - DNA, 13 bp, Artificial Sequence
  Oligonucleotide for detection of SNP TSC0060360
tgcgtaggggtgg

SEQ ID NO: 246946 - DNA, 13 bp, Artificial Sequence
  Oligonucleotide for detection of SNP TSC0060360
ccacccctacgca

SEQ ID NO: 246947 - DNA, 13 bp, Artificial Sequence
  Oligonucleotide for detection of SNP TSC0060360
tgtgtacgggtgg

SEQ ID NO: 246948 - DNA, 13 bp, Artificial Sequence
  Oligonucleotide for detection of SNP TSC0060360
ccacccgtacaca

SEQ ID NO: 246949 - DNA, 13 bp, Artificial Sequence
  Oligonucleotide for detection of SNP TSC0060360
tgcgtacgggtgg

SEQ ID NO: 246950 - DNA, 13 bp, Artificial Sequence
  Oligonucleotide for detection of SNP TSC0060360
ccacccgtacgca

SEQ ID NO: 246951 - DNA, 13 bp, Artificial Sequence
  Oligonucleotide for detection of SNP TSC0060360
ttatttgtgtgta

SEQ ID NO: 246952 - DNA, 13 bp, Artificial Sequence
  Oligonucleotide for detection of SNP TSC0060360
tacacacaaataa

SEQ ID NO: 246953 - DNA, 13 bp, Artificial Sequence
  Oligonucleotide for detection of SNP TSC0060360
ttatttttgtgta

SEQ ID NO: 246954 - DNA, 13 bp, Artificial Sequence
  Oligonucleotide for detection of SNP TSC0060360
tacacaaaaataa

SEQ ID NO: 246955 - DNA, 13 bp, Artificial Sequence
  Oligonucleotide for detection of SNP TSC0060360
ttattcgtgtgta

SEQ ID NO: 246956 - DNA, 13 bp, Artificial Sequence
  Oligonucleotide for detection of SNP TSC0060360
tacacacgaataa

SEQ ID NO: 246957 - DNA, 13 bp, Artificial Sequence
  Oligonucleotide for detection of SNP TSC0060360
ttatttttgcgta

SEQ ID NO: 246958 - DNA, 13 bp, Artificial Sequence
  Oligonucleotide for detection of SNP TSC0060360
tacgcaaaaataa

SEQ ID NO: 246959 - DNA, 13 bp, Artificial Sequence
  Oligonucleotide for detection of SNP TSC0060360
ttatttgtgcgta

SEQ ID NO: 246960 - DNA, 13 bp, Artificial Sequence
  Oligonucleotide for detection of SNP TSC0060360
tacgcacaaataa

SEQ ID NO: 246961 - DNA, 13 bp, Artificial Sequence
  Oligonucleotide for detection of SNP TSC0060360
ttattcgtgcgta

SEQ ID NO: 246962 - DNA, 13 bp, Artificial Sequence
  Oligonucleotide for detection of SNP TSC0060360
tacgcacgaataa

SEQ ID NO: 246963 - DNA, 13 bp, Artificial Sequence
  Oligonucleotide for detection of SNP TSC0008403
ttaagttgtgtay

SEQ ID NO: 246964 - DNA, 13 bp, Artificial Sequence
  Oligonucleotide for detection of SNP TSC0008403
rtacacaacttaa

SEQ ID NO: 246965 - DNA, 13 bp, Artificial Sequence
  Oligonucleotide for detection of SNP TSC0008403
ttaagtcgtgtay

SEQ ID NO: 246966 - DNA, 13 bp, Artificial Sequence
  Oligonucleotide for detection of SNP TSC0008403
rtacacgacttaa

SEQ ID NO: 246967 - DNA, 13 bp, Artificial Sequence
  Oligonucleotide for detection of SNP TSC0008403
ttaagttgcgtay

SEQ ID NO: 246968 - DNA, 13 bp, Artificial Sequence
  Oligonucleotide for detection of SNP TSC0008403
rtacgcaacttaa

SEQ ID NO: 246969 - DNA, 13 bp, Artificial Sequence
  Oligonucleotide for detection of SNP TSC0008403
ttaagtcgcgtay

SEQ ID NO: 246970 - DNA, 13 bp, Artificial Sequence
  Oligonucleotide for detection of SNP TSC0008403
rtacgcgacttaa

SEQ ID NO: 246971 - DNA, 13 bp, Artificial Sequence
  Oligonucleotide for detection of SNP TSC0008403
gtatgtggtttgg

SEQ ID NO: 246972 - DNA, 13 bp, Artificial Sequence
  Oligonucleotide for detection of SNP TSC0008403
ccaaaccacatac

SEQ ID NO: 246973 - DNA, 13 bp, Artificial Sequence
  Oligonucleotide for detection of SNP TSC0008403
gtatgtagtttgg

SEQ ID NO: 246974 - DNA, 13 bp, Artificial Sequence
  Oligonucleotide for detection of SNP TSC0008403
ccaaactacatac

SEQ ID NO: 246975 - DNA, 13 bp, Artificial Sequence
  Oligonucleotide for detection of SNP TSC0008403
gtacgtggtttgg

SEQ ID NO: 246976 - DNA, 13 bp, Artificial Sequence
  Oligonucleotide for detection of SNP TSC0008403
ccaaaccacgtac

SEQ ID NO: 246977 - DNA, 13 bp, Artificial Sequence
  Oligonucleotide for detection of SNP TSC0008403
gtacgtagtttgg

SEQ ID NO: 246978 - DNA, 13 bp, Artificial Sequence
  Oligonucleotide for detection of SNP TSC0008403
ccaaactacgtac

SEQ ID NO: 246979 - DNA, 13 bp, Artificial Sequence
  Oligonucleotide for detection of SNP TSC0008403
gtatgcggtttgg

SEQ ID NO: 246980 - DNA, 13 bp, Artificial Sequence
  Oligonucleotide for detection of SNP TSC0008403
ccaaaccgcatac

SEQ ID NO: 246981 - DNA, 13 bp, Artificial Sequence
  Oligonucleotide for detection of SNP TSC0008403
gtacgcggtttgg

SEQ ID NO: 246982 - DNA, 13 bp, Artificial Sequence
  Oligonucleotide for detection of SNP TSC0008403
ccaaaccgcgtac

SEQ ID NO: 246983 - DNA, 13 bp, Artificial Sequence
  Oligonucleotide for detection of SNP TSC0060362
gttgtatggttga

SEQ ID NO: 246984 - DNA, 13 bp, Artificial Sequence
  Oligonucleotide for detection of SNP TSC0060362
tcaaccatacaac

SEQ ID NO: 246985 - DNA, 13 bp, Artificial Sequence
  Oligonucleotide for detection of SNP TSC0060362
gttgtacggttga

SEQ ID NO: 246986 - DNA, 13 bp, Artificial Sequence
  Oligonucleotide for detection of SNP TSC0060362
tcaaccgtacaac

SEQ ID NO: 246987 - DNA, 13 bp, Artificial Sequence
  Oligonucleotide for detection of SNP TSC0060362
ttagttgtgtagy

SEQ ID NO: 246988 - DNA, 13 bp, Artificial Sequence
  Oligonucleotide for detection of SNP TSC0060362
rctacacaactaa

SEQ ID NO: 246989 - DNA, 13 bp, Artificial Sequence
  Oligonucleotide for detection of SNP TSC0060362
ttagtcgtgtagy

SEQ ID NO: 246990 - DNA, 13 bp, Artificial Sequence
  Oligonucleotide for detection of SNP TSC0060362
rctacacgactaa

SEQ ID NO: 246991 - DNA, 13 bp, Artificial Sequence
  Oligonucleotide for detection of SNP TSC0060366
agatttgtttttg

SEQ ID NO: 246992 - DNA, 13 bp, Artificial Sequence
  Oligonucleotide for detection of SNP TSC0060366
caaaaacaaatct

SEQ ID NO: 246993 - DNA, 13 bp, Artificial Sequence
  Oligonucleotide for detection of SNP TSC0060366
agatttatttttg

SEQ ID NO: 246994 - DNA, 13 bp, Artificial Sequence
  Oligonucleotide for detection of SNP TSC0060366
caaaaataaatct

SEQ ID NO: 246995 - DNA, 13 bp, Artificial Sequence
  Oligonucleotide for detection of SNP TSC0060367
tttatggtttgtg

SEQ ID NO: 246996 - DNA, 13 bp, Artificial Sequence
  Oligonucleotide for detection of SNP TSC0060367
cacaaaccataaa

SEQ ID NO: 246997 - DNA, 13 bp, Artificial Sequence
  Oligonucleotide for detection of SNP TSC0060367
tttatggttcgtg

SEQ ID NO: 246998 - DNA, 13 bp, Artificial Sequence
  Oligonucleotide for detection of SNP TSC0060367
cacgaaccataaa

SEQ ID NO: 246999 - DNA, 13 bp, Artificial Sequence
  Oligonucleotide for detection of SNP TSC0060367
tttatgattcgtg

SEQ ID NO: 247000 - DNA, 13 bp, Artificial Sequence
  Oligonucleotide for detection of SNP TSC0060367
cacgaatcataaa

SEQ ID NO: 247001 - DNA, 13 bp, Artificial Sequence
  Oligonucleotide for detection of SNP TSC0060368
agttgtatgtaga

SEQ ID NO: 247002 - DNA, 13 bp, Artificial Sequence
  Oligonucleotide for detection of SNP TSC0060368
tctacatacaact

SEQ ID NO: 247003 - DNA, 13 bp, Artificial Sequence
  Oligonucleotide for detection of SNP TSC0060368
agttgtgtgtaga

SEQ ID NO: 247004 - DNA, 13 bp, Artificial Sequence
  Oligonucleotide for detection of SNP TSC0060368
tctacacacaact

SEQ ID NO: 247005 - DNA, 13 bp, Artificial Sequence
  Oligonucleotide for detection of SNP TSC0060368
agttgcgtgtaga

SEQ ID NO: 247006 - DNA, 13 bp, Artificial Sequence
  Oligonucleotide for detection of SNP TSC0060368
tctacacgcaact

SEQ ID NO: 247007 - DNA, 13 bp, Artificial Sequence
  Oligonucleotide for detection of SNP TSC0060368
tttgtatgtaatt

SEQ ID NO: 247008 - DNA, 13 bp, Artificial Sequence
  Oligonucleotide for detection of SNP TSC0060368
aattacatacaaa

SEQ ID NO: 247009 - DNA, 13 bp, Artificial Sequence
  Oligonucleotide for detection of SNP TSC0060368
tttgtacgtaatt

SEQ ID NO: 247010 - DNA, 13 bp, Artificial Sequence
  Oligonucleotide for detection of SNP TSC0060368
aattacgtacaaa

SEQ ID NO: 247011 - DNA, 13 bp, Artificial Sequence
  Oligonucleotide for detection of SNP TSC0060369
atttatagattgt

SEQ ID NO: 247012 - DNA, 13 bp, Artificial Sequence
  Oligonucleotide for detection of SNP TSC0060369
acaatctataaat

SEQ ID NO: 247013 - DNA, 13 bp, Artificial Sequence
  Oligonucleotide for detection of SNP TSC0060369
atttattgattgt

SEQ ID NO: 247014 - DNA, 13 bp, Artificial Sequence
  Oligonucleotide for detection of SNP TSC0060369
acaatcaataaat

SEQ ID NO: 247015 - DNA, 13 bp, Artificial Sequence
  Oligonucleotide for detection of SNP TSC0060369
atttatggattgt

SEQ ID NO: 247016 - DNA, 13 bp, Artificial Sequence
  Oligonucleotide for detection of SNP TSC0060369
acaatccataaat

SEQ ID NO: 247017 - DNA, 13 bp, Artificial Sequence
  Oligonucleotide for detection of SNP TSC0060369
atttatcgattgt

SEQ ID NO: 247018 - DNA, 13 bp, Artificial Sequence
  Oligonucleotide for detection of SNP TSC0060369
acaatcgataaat

SEQ ID NO: 247019 - DNA, 13 bp, Artificial Sequence
  Oligonucleotide for detection of SNP TSC0060369
atttacggattgt

SEQ ID NO: 247020 - DNA, 13 bp, Artificial Sequence
  Oligonucleotide for detection of SNP TSC0060369
acaatccgtaaat

SEQ ID NO: 247021 - DNA, 13 bp, Artificial Sequence
  Oligonucleotide for detection of SNP TSC0060369
ataatttgtagat

SEQ ID NO: 247022 - DNA, 13 bp, Artificial Sequence
  Oligonucleotide for detection of SNP TSC0060369
atctacaaattat

SEQ ID NO: 247023 - DNA, 13 bp, Artificial Sequence
  Oligonucleotide for detection of SNP TSC0060369
ataattggtagat

SEQ ID NO: 247024 - DNA, 13 bp, Artificial Sequence
  Oligonucleotide for detection of SNP TSC0060369
atctaccaattat

SEQ ID NO: 247025 - DNA, 13 bp, Artificial Sequence
  Oligonucleotide for detection of SNP TSC0060369
ataattagtagat

SEQ ID NO: 247026 - DNA, 13 bp, Artificial Sequence
  Oligonucleotide for detection of SNP TSC0060369
atctactaattat

SEQ ID NO: 247027 - DNA, 13 bp, Artificial Sequence
  Oligonucleotide for detection of SNP TSC0060369
ataatcggtagat

SEQ ID NO: 247028 - DNA, 13 bp, Artificial Sequence
  Oligonucleotide for detection of SNP TSC0060369
atctaccgattat

SEQ ID NO: 247029 - DNA, 13 bp, Artificial Sequence
  Oligonucleotide for detection of SNP TSC0060369
ataattcgtagat

SEQ ID NO: 247030 - DNA, 13 bp, Artificial Sequence
  Oligonucleotide for detection of SNP TSC0060369
atctacgaattat

SEQ ID NO: 247031 - DNA, 13 bp, Artificial Sequence
  Oligonucleotide for detection of SNP TSC0060370
atataaaattgag

SEQ ID NO: 247032 - DNA, 13 bp, Artificial Sequence
  Oligonucleotide for detection of SNP TSC0060370
ctcaattttatat

SEQ ID NO: 247033 - DNA, 13 bp, Artificial Sequence
  Oligonucleotide for detection of SNP TSC0060370
atataatattgag

SEQ ID NO: 247034 - DNA, 13 bp, Artificial Sequence
  Oligonucleotide for detection of SNP TSC0060370
ctcaatattatat

SEQ ID NO: 247035 - DNA, 13 bp, Artificial Sequence
  Oligonucleotide for detection of SNP TSC0060370
atataagattgag

SEQ ID NO: 247036 - DNA, 13 bp, Artificial Sequence
  Oligonucleotide for detection of SNP TSC0060370
ctcaatcttatat

SEQ ID NO: 247037 - DNA, 13 bp, Artificial Sequence
  Oligonucleotide for detection of SNP TSC0060370
tttagttttatgt

SEQ ID NO: 247038 - DNA, 13 bp, Artificial Sequence
  Oligonucleotide for detection of SNP TSC0060370
acataaaactaaa

SEQ ID NO: 247039 - DNA, 13 bp, Artificial Sequence
  Oligonucleotide for detection of SNP TSC0060371
ttgttataaagtt

SEQ ID NO: 247040 - DNA, 13 bp, Artificial Sequence
  Oligonucleotide for detection of SNP TSC0060371
aactttataacaa

SEQ ID NO: 247041 - DNA, 13 bp, Artificial Sequence
  Oligonucleotide for detection of SNP TSC0060371
ttgttagaaagtt

SEQ ID NO: 247042 - DNA, 13 bp, Artificial Sequence
  Oligonucleotide for detection of SNP TSC0060371
aactttctaacaa

SEQ ID NO: 247043 - DNA, 13 bp, Artificial Sequence
  Oligonucleotide for detection of SNP TSC0060371
agttttgtagtag

SEQ ID NO: 247044 - DNA, 13 bp, Artificial Sequence
  Oligonucleotide for detection of SNP TSC0060371
ctactacaaaact

SEQ ID NO: 247045 - DNA, 13 bp, Artificial Sequence
  Oligonucleotide for detection of SNP TSC0060373
gagaaagtttttt

SEQ ID NO: 247046 - DNA, 13 bp, Artificial Sequence
  Oligonucleotide for detection of SNP TSC0060373
aaaaaactttctc

SEQ ID NO: 247047 - DNA, 13 bp, Artificial Sequence
  Oligonucleotide for detection of SNP TSC0060373
gagaaaatttttt

SEQ ID NO: 247048 - DNA, 13 bp, Artificial Sequence
  Oligonucleotide for detection of SNP TSC0060373
aaaaaattttctc

SEQ ID NO: 247049 - DNA, 13 bp, Artificial Sequence
  Oligonucleotide for detection of SNP TSC0060374
tttttagatagaa

SEQ ID NO: 247050 - DNA, 13 bp, Artificial Sequence
  Oligonucleotide for detection of SNP TSC0060374
ttctatctaaaaa

SEQ ID NO: 247051 - DNA, 13 bp, Artificial Sequence
  Oligonucleotide for detection of SNP TSC0060374
tttttaaatagaa

SEQ ID NO: 247052 - DNA, 13 bp, Artificial Sequence
  Oligonucleotide for detection of SNP TSC0060374
ttctatttaaaaa

SEQ ID NO: 247053 - DNA, 13 bp, Artificial Sequence
  Oligonucleotide for detection of SNP TSC0060375
ttgaataatgtag

SEQ ID NO: 247054 - DNA, 13 bp, Artificial Sequence
  Oligonucleotide for detection of SNP TSC0060375
ctacattattcaa

SEQ ID NO: 247055 - DNA, 13 bp, Artificial Sequence
  Oligonucleotide for detection of SNP TSC0060375
ttgaatgatgtag

SEQ ID NO: 247056 - DNA, 13 bp, Artificial Sequence
  Oligonucleotide for detection of SNP TSC0060375
ctacatcattcaa

SEQ ID NO: 247057 - DNA, 13 bp, Artificial Sequence
  Oligonucleotide for detection of SNP TSC0060375
ttgaacgatgtag

SEQ ID NO: 247058 - DNA, 13 bp, Artificial Sequence
  Oligonucleotide for detection of SNP TSC0060375
ctacatcgttcaa

SEQ ID NO: 247059 - DNA, 13 bp, Artificial Sequence
  Oligonucleotide for detection of SNP TSC0060377
tttttatgtatty

SEQ ID NO: 247060 - DNA, 13 bp, Artificial Sequence
  Oligonucleotide for detection of SNP TSC0060377
raatacataaaaa

SEQ ID NO: 247061 - DNA, 13 bp, Artificial Sequence
  Oligonucleotide for detection of SNP TSC0060377
tttttacgtatty

SEQ ID NO: 247062 - DNA, 13 bp, Artificial Sequence
  Oligonucleotide for detection of SNP TSC0060377
raatacgtaaaaa

SEQ ID NO: 247063 - DNA, 13 bp, Artificial Sequence
  Oligonucleotide for detection of SNP TSC0060377
gagtatgtaaggg

SEQ ID NO: 247064 - DNA, 13 bp, Artificial Sequence
  Oligonucleotide for detection of SNP TSC0060377
cccttacatactc

SEQ ID NO: 247065 - DNA, 13 bp, Artificial Sequence
  Oligonucleotide for detection of SNP TSC0060377
gagtatataaggg

SEQ ID NO: 247066 - DNA, 13 bp, Artificial Sequence
  Oligonucleotide for detection of SNP TSC0060377
cccttatatactc

SEQ ID NO: 247067 - DNA, 13 bp, Artificial Sequence
  Oligonucleotide for detection of SNP TSC0060377
gagtacgtaaggg

SEQ ID NO: 247068 - DNA, 13 bp, Artificial Sequence
  Oligonucleotide for detection of SNP TSC0060377
cccttacgtactc

SEQ ID NO: 247069 - DNA, 13 bp, Artificial Sequence
  Oligonucleotide for detection of SNP TSC0060378
tttatggataggt

SEQ ID NO: 247070 - DNA, 13 bp, Artificial Sequence
  Oligonucleotide for detection of SNP TSC0060378
acctatccataaa

SEQ ID NO: 247071 - DNA, 13 bp, Artificial Sequence
  Oligonucleotide for detection of SNP TSC0060378
tttatgaataggt

SEQ ID NO: 247072 - DNA, 13 bp, Artificial Sequence
  Oligonucleotide for detection of SNP TSC0060378
acctattcataaa

SEQ ID NO: 247073 - DNA, 13 bp, Artificial Sequence
  Oligonucleotide for detection of SNP TSC0060378
tttacggataggt

SEQ ID NO: 247074 - DNA, 13 bp, Artificial Sequence
  Oligonucleotide for detection of SNP TSC0060378
acctatccgtaaa

SEQ ID NO: 247075 - DNA, 13 bp, Artificial Sequence
  Oligonucleotide for detection of SNP TSC0060378
tttacgaataggt

SEQ ID NO: 247076 - DNA, 13 bp, Artificial Sequence
  Oligonucleotide for detection of SNP TSC0060378
acctattcgtaaa

SEQ ID NO: 247077 - DNA, 13 bp, Artificial Sequence
  Oligonucleotide for detection of SNP TSC0060379
tttttaaatttcg

SEQ ID NO: 247078 - DNA, 13 bp, Artificial Sequence
  Oligonucleotide for detection of SNP TSC0060379
cgaaatttaaaaa

SEQ ID NO: 247079 - DNA, 13 bp, Artificial Sequence
  Oligonucleotide for detection of SNP TSC0060379
tttttatatttcg

SEQ ID NO: 247080 - DNA, 13 bp, Artificial Sequence
  Oligonucleotide for detection of SNP TSC0060379
cgaaatataaaaa

SEQ ID NO: 247081 - DNA, 13 bp, Artificial Sequence
  Oligonucleotide for detection of SNP TSC0060379
tggggtttgggga

SEQ ID NO: 247082 - DNA, 13 bp, Artificial Sequence
  Oligonucleotide for detection of SNP TSC0060379
tccccaaacccca

SEQ ID NO: 247083 - DNA, 13 bp, Artificial Sequence
  Oligonucleotide for detection of SNP TSC0060379
tggggtatgggga

SEQ ID NO: 247084 - DNA, 13 bp, Artificial Sequence
  Oligonucleotide for detection of SNP TSC0060379
tccccatacccca

SEQ ID NO: 247085 - DNA, 13 bp, Artificial Sequence
  Oligonucleotide for detection of SNP TSC0060379
cggggtttgggga

SEQ ID NO: 247086 - DNA, 13 bp, Artificial Sequence
  Oligonucleotide for detection of SNP TSC0060379
tccccaaaccccg

SEQ ID NO: 247087 - DNA, 13 bp, Artificial Sequence
  Oligonucleotide for detection of SNP TSC0060379
cggggtatgggga

SEQ ID NO: 247088 - DNA, 13 bp, Artificial Sequence
  Oligonucleotide for detection of SNP TSC0060379
tccccataccccg

SEQ ID NO: 247089 - DNA, 13 bp, Artificial Sequence
  Oligonucleotide for detection of SNP TSC0060380
gtagttattatty

SEQ ID NO: 247090 - DNA, 13 bp, Artificial Sequence
  Oligonucleotide for detection of SNP TSC0060380
raataataactac

SEQ ID NO: 247091 - DNA, 13 bp, Artificial Sequence
  Oligonucleotide for detection of SNP TSC0060380
gtagttgttatty

SEQ ID NO: 247092 - DNA, 13 bp, Artificial Sequence
  Oligonucleotide for detection of SNP TSC0060380
raataacaactac

SEQ ID NO: 247093 - DNA, 13 bp, Artificial Sequence
  Oligonucleotide for detection of SNP TSC0060381
tttatatgggtag

SEQ ID NO: 247094 - DNA, 13 bp, Artificial Sequence
  Oligonucleotide for detection of SNP TSC0060381
ctacccatataaa

SEQ ID NO: 247095 - DNA, 13 bp, Artificial Sequence
  Oligonucleotide for detection of SNP TSC0060381
tttataggggtag

SEQ ID NO: 247096 - DNA, 13 bp, Artificial Sequence
  Oligonucleotide for detection of SNP TSC0060381
ctacccctataaa

SEQ ID NO: 247097 - DNA, 13 bp, Artificial Sequence
  Oligonucleotide for detection of SNP TSC0060381
tttatacgggtag

SEQ ID NO: 247098 - DNA, 13 bp, Artificial Sequence
  Oligonucleotide for detection of SNP TSC0060381
ctacccgtataaa

SEQ ID NO: 247099 - DNA, 13 bp, Artificial Sequence
  Oligonucleotide for detection of SNP TSC0060381
ttgtttgtatgag

SEQ ID NO: 247100 - DNA, 13 bp, Artificial Sequence
  Oligonucleotide for detection of SNP TSC0060381
ctcatacaaacaa

SEQ ID NO: 247101 - DNA, 13 bp, Artificial Sequence
  Oligonucleotide for detection of SNP TSC0060381
ttgtttttatgag

SEQ ID NO: 247102 - DNA, 13 bp, Artificial Sequence
  Oligonucleotide for detection of SNP TSC0060381
ctcataaaaacaa

SEQ ID NO: 247103 - DNA, 13 bp, Artificial Sequence
  Oligonucleotide for detection of SNP TSC0060381
ttgttcgtatgag

SEQ ID NO: 247104 - DNA, 13 bp, Artificial Sequence
  Oligonucleotide for detection of SNP TSC0060381
ctcatacgaacaa

SEQ ID NO: 247105 - DNA, 13 bp, Artificial Sequence
  Oligonucleotide for detection of SNP TSC0060382
gttattattatty

SEQ ID NO: 247106 - DNA, 13 bp, Artificial Sequence
  Oligonucleotide for detection of SNP TSC0060382
raataataataac

SEQ ID NO: 247107 - DNA, 13 bp, Artificial Sequence
  Oligonucleotide for detection of SNP TSC0060382
gttattgttatty

SEQ ID NO: 247108 - DNA, 13 bp, Artificial Sequence
  Oligonucleotide for detection of SNP TSC0060382
raataacaataac

SEQ ID NO: 247109 - DNA, 13 bp, Artificial Sequence
  Oligonucleotide for detection of SNP TSC0060382
gttatcgttatty

SEQ ID NO: 247110 - DNA, 13 bp, Artificial Sequence
  Oligonucleotide for detection of SNP TSC0060382
raataacgataac

SEQ ID NO: 247111 - DNA, 13 bp, Artificial Sequence
  Oligonucleotide for detection of SNP TSC0060382
gagtaatgataay

SEQ ID NO: 247112 - DNA, 13 bp, Artificial Sequence
  Oligonucleotide for detection of SNP TSC0060382
rttatcattactc

SEQ ID NO: 247113 - DNA, 13 bp, Artificial Sequence
  Oligonucleotide for detection of SNP TSC0060382
gagtaacgataay

SEQ ID NO: 247114 - DNA, 13 bp, Artificial Sequence
  Oligonucleotide for detection of SNP TSC0060382
rttatcgttactc

SEQ ID NO: 247115 - DNA, 13 bp, Artificial Sequence
  Oligonucleotide for detection of SNP TSC0060383
aagtaaggtaagt

SEQ ID NO: 247116 - DNA, 13 bp, Artificial Sequence
  Oligonucleotide for detection of SNP TSC0060383
acttaccttactt

SEQ ID NO: 247117 - DNA, 13 bp, Artificial Sequence
  Oligonucleotide for detection of SNP TSC0060383
aagtaaagtaagt

SEQ ID NO: 247118 - DNA, 13 bp, Artificial Sequence
  Oligonucleotide for detection of SNP TSC0060383
acttactttactt

SEQ ID NO: 247119 - DNA, 13 bp, Artificial Sequence
  Oligonucleotide for detection of SNP TSC0060384
taaataatggtta

SEQ ID NO: 247120 - DNA, 13 bp, Artificial Sequence
  Oligonucleotide for detection of SNP TSC0060384
taaccattattta

SEQ ID NO: 247121 - DNA, 13 bp, Artificial Sequence
  Oligonucleotide for detection of SNP TSC0060384
taaatattggtta

SEQ ID NO: 247122 - DNA, 13 bp, Artificial Sequence
  Oligonucleotide for detection of SNP TSC0060384
taaccaatattta

SEQ ID NO: 247123 - DNA, 13 bp, Artificial Sequence
  Oligonucleotide for detection of SNP TSC0060384
taattattattta

SEQ ID NO: 247124 - DNA, 13 bp, Artificial Sequence
  Oligonucleotide for detection of SNP TSC0060384
taaataataatta

SEQ ID NO: 247125 - DNA, 13 bp, Artificial Sequence
  Oligonucleotide for detection of SNP TSC0060384
taattaatattta

SEQ ID NO: 247126 - DNA, 13 bp, Artificial Sequence
  Oligonucleotide for detection of SNP TSC0060384
taaatattaatta

SEQ ID NO: 247127 - DNA, 13 bp, Artificial Sequence
  Oligonucleotide for detection of SNP TSC0060385
taaattttgatta

SEQ ID NO: 247128 - DNA, 13 bp, Artificial Sequence
  Oligonucleotide for detection of SNP TSC0060385
taatcaaaattta

SEQ ID NO: 247129 - DNA, 13 bp, Artificial Sequence
  Oligonucleotide for detection of SNP TSC0060385
taattataattta

SEQ ID NO: 247130 - DNA, 13 bp, Artificial Sequence
  Oligonucleotide for detection of SNP TSC0060385
taaattataatta

SEQ ID NO: 247131 - DNA, 13 bp, Artificial Sequence
  Oligonucleotide for detection of SNP TSC0060385
taattagaattta

SEQ ID NO: 247132 - DNA, 13 bp, Artificial Sequence
  Oligonucleotide for detection of SNP TSC0060385
taaattctaatta

SEQ ID NO: 247133 - DNA, 13 bp, Artificial Sequence
  Oligonucleotide for detection of SNP TSC0060386
tttgggagttatg

SEQ ID NO: 247134 - DNA, 13 bp, Artificial Sequence
  Oligonucleotide for detection of SNP TSC0060386
cataactcccaaa

SEQ ID NO: 247135 - DNA, 13 bp, Artificial Sequence
  Oligonucleotide for detection of SNP TSC0060386
tttgggggttatg

SEQ ID NO: 247136 - DNA, 13 bp, Artificial Sequence
  Oligonucleotide for detection of SNP TSC0060386
cataacccccaaa

SEQ ID NO: 247137 - DNA, 13 bp, Artificial Sequence
  Oligonucleotide for detection of SNP TSC0060387
aatgtaaaattaa

SEQ ID NO: 247138 - DNA, 13 bp, Artificial Sequence
  Oligonucleotide for detection of SNP TSC0060387
ttaattttacatt

SEQ ID NO: 247139 - DNA, 13 bp, Artificial Sequence
  Oligonucleotide for detection of SNP TSC0060387
aatgtataattaa

SEQ ID NO: 247140 - DNA, 13 bp, Artificial Sequence
  Oligonucleotide for detection of SNP TSC0060387
ttaattatacatt

SEQ ID NO: 247141 - DNA, 13 bp, Artificial Sequence
  Oligonucleotide for detection of SNP TSC0060387
ttaattttatatt

SEQ ID NO: 247142 - DNA, 13 bp, Artificial Sequence
  Oligonucleotide for detection of SNP TSC0060387
aatataaaattaa

SEQ ID NO: 247143 - DNA, 13 bp, Artificial Sequence
  Oligonucleotide for detection of SNP TSC0060388
gtttatttgatga

SEQ ID NO: 247144 - DNA, 13 bp, Artificial Sequence
  Oligonucleotide for detection of SNP TSC0060388
tcatcaaataaac

SEQ ID NO: 247145 - DNA, 13 bp, Artificial Sequence
  Oligonucleotide for detection of SNP TSC0060388
gtttatgtgatga

SEQ ID NO: 247146 - DNA, 13 bp, Artificial Sequence
  Oligonucleotide for detection of SNP TSC0060388
tcatcacataaac

SEQ ID NO: 247147 - DNA, 13 bp, Artificial Sequence
  Oligonucleotide for detection of SNP TSC0060388
ttattaaataaay

SEQ ID NO: 247148 - DNA, 13 bp, Artificial Sequence
  Oligonucleotide for detection of SNP TSC0060388
rtttatttaataa

SEQ ID NO: 247149 - DNA, 13 bp, Artificial Sequence
  Oligonucleotide for detection of SNP TSC0060388
ttattatataaay

SEQ ID NO: 247150 - DNA, 13 bp, Artificial Sequence
  Oligonucleotide for detection of SNP TSC0060388
rtttatataataa

SEQ ID NO: 247151 - DNA, 13 bp, Artificial Sequence
  Oligonucleotide for detection of SNP TSC0060389
ttgttttgtttay

SEQ ID NO: 247152 - DNA, 13 bp, Artificial Sequence
  Oligonucleotide for detection of SNP TSC0060389
rtaaacaaaacaa

SEQ ID NO: 247153 - DNA, 13 bp, Artificial Sequence
  Oligonucleotide for detection of SNP TSC0060389
ttgtttcgtttay

SEQ ID NO: 247154 - DNA, 13 bp, Artificial Sequence
  Oligonucleotide for detection of SNP TSC0060389
rtaaacgaaacaa

SEQ ID NO: 247155 - DNA, 13 bp, Artificial Sequence
  Oligonucleotide for detection of SNP TSC0060389
gtagatgggatag

SEQ ID NO: 247156 - DNA, 13 bp, Artificial Sequence
  Oligonucleotide for detection of SNP TSC0060389
ctatcccatctac

SEQ ID NO: 247157 - DNA, 13 bp, Artificial Sequence
  Oligonucleotide for detection of SNP TSC0060389
gtagataggatag

SEQ ID NO: 247158 - DNA, 13 bp, Artificial Sequence
  Oligonucleotide for detection of SNP TSC0060389
ctatcctatctac

SEQ ID NO: 247159 - DNA, 13 bp, Artificial Sequence
  Oligonucleotide for detection of SNP TSC0060389
gtagacgggatag

SEQ ID NO: 247160 - DNA, 13 bp, Artificial Sequence
  Oligonucleotide for detection of SNP TSC0060389
ctatcccgtctac

SEQ ID NO: 247161 - DNA, 13 bp, Artificial Sequence
  Oligonucleotide for detection of SNP TSC0060394
ggaggatgaagag

SEQ ID NO: 247162 - DNA, 13 bp, Artificial Sequence
  Oligonucleotide for detection of SNP TSC0060394
ctcttcatcctcc

SEQ ID NO: 247163 - DNA, 13 bp, Artificial Sequence
  Oligonucleotide for detection of SNP TSC0060394
ggaggaggaagag

SEQ ID NO: 247164 - DNA, 13 bp, Artificial Sequence
  Oligonucleotide for detection of SNP TSC0060394
ctcttcctcctcc

SEQ ID NO: 247165 - DNA, 13 bp, Artificial Sequence
  Oligonucleotide for detection of SNP TSC0060395
aggaggtgttggt

SEQ ID NO: 247166 - DNA, 13 bp, Artificial Sequence
  Oligonucleotide for detection of SNP TSC0060395
accaacacctcct

SEQ ID NO: 247167 - DNA, 13 bp, Artificial Sequence
  Oligonucleotide for detection of SNP TSC0060395
aggaggcgttggt

SEQ ID NO: 247168 - DNA, 13 bp, Artificial Sequence
  Oligonucleotide for detection of SNP TSC0060395
accaacgcctcct

SEQ ID NO: 247169 - DNA, 13 bp, Artificial Sequence
  Oligonucleotide for detection of SNP TSC0060396
ataattagtagty

SEQ ID NO: 247170 - DNA, 13 bp, Artificial Sequence
  Oligonucleotide for detection of SNP TSC0060396
ractactaattat

SEQ ID NO: 247171 - DNA, 13 bp, Artificial Sequence
  Oligonucleotide for detection of SNP TSC0060396
ataattggtagty

SEQ ID NO: 247172 - DNA, 13 bp, Artificial Sequence
  Oligonucleotide for detection of SNP TSC0060396
ractaccaattat

SEQ ID NO: 247173 - DNA, 13 bp, Artificial Sequence
  Oligonucleotide for detection of SNP TSC0060397
gttatagttggag

SEQ ID NO: 247174 - DNA, 13 bp, Artificial Sequence
  Oligonucleotide for detection of SNP TSC0060397
ctccaactataac

SEQ ID NO: 247175 - DNA, 13 bp, Artificial Sequence
  Oligonucleotide for detection of SNP TSC0060397
gttataattggag

SEQ ID NO: 247176 - DNA, 13 bp, Artificial Sequence
  Oligonucleotide for detection of SNP TSC0060397
ctccaattataac

SEQ ID NO: 247177 - DNA, 13 bp, Artificial Sequence
  Oligonucleotide for detection of SNP TSC0060403
agaaggattttgy

SEQ ID NO: 247178 - DNA, 13 bp, Artificial Sequence
  Oligonucleotide for detection of SNP TSC0060403
rcaaaatccttct

SEQ ID NO: 247179 - DNA, 13 bp, Artificial Sequence
  Oligonucleotide for detection of SNP TSC0060403
agaaggtttttgy

SEQ ID NO: 247180 - DNA, 13 bp, Artificial Sequence
  Oligonucleotide for detection of SNP TSC0060403
rcaaaaaccttct

SEQ ID NO: 247181 - DNA, 13 bp, Artificial Sequence
  Oligonucleotide for detection of SNP TSC0060403
gtaggattttttt

SEQ ID NO: 247182 - DNA, 13 bp, Artificial Sequence
  Oligonucleotide for detection of SNP TSC0060403
aaaaaaatcctac

SEQ ID NO: 247183 - DNA, 13 bp, Artificial Sequence
  Oligonucleotide for detection of SNP TSC0060403
gtaggaatttttt

SEQ ID NO: 247184 - DNA, 13 bp, Artificial Sequence
  Oligonucleotide for detection of SNP TSC0060403
aaaaaattcctac

SEQ ID NO: 247185 - DNA, 13 bp, Artificial Sequence
  Oligonucleotide for detection of SNP TSC0060404
gttaataggtagy

SEQ ID NO: 247186 - DNA, 13 bp, Artificial Sequence
  Oligonucleotide for detection of SNP TSC0060404
rctacctattaac

SEQ ID NO: 247187 - DNA, 13 bp, Artificial Sequence
  Oligonucleotide for detection of SNP TSC0060404
gttaatgggtagy

SEQ ID NO: 247188 - DNA, 13 bp, Artificial Sequence
  Oligonucleotide for detection of SNP TSC0060404
rctacccattaac

SEQ ID NO: 247189 - DNA, 13 bp, Artificial Sequence
  Oligonucleotide for detection of SNP TSC0060410
ttttatagataga

SEQ ID NO: 247190 - DNA, 13 bp, Artificial Sequence
  Oligonucleotide for detection of SNP TSC0060410
tctatctataaaa

SEQ ID NO: 247191 - DNA, 13 bp, Artificial Sequence
  Oligonucleotide for detection of SNP TSC0060410
ttttacggataga

SEQ ID NO: 247192 - DNA, 13 bp, Artificial Sequence
  Oligonucleotide for detection of SNP TSC0060410
tctatccgtaaaa

SEQ ID NO: 247193 - DNA, 13 bp, Artificial Sequence
  Oligonucleotide for detection of SNP TSC0060410
tttgtttgtaaga

SEQ ID NO: 247194 - DNA, 13 bp, Artificial Sequence
  Oligonucleotide for detection of SNP TSC0060410
tcttacaaacaaa

SEQ ID NO: 247195 - DNA, 13 bp, Artificial Sequence
  Oligonucleotide for detection of SNP TSC0060410
tttgttcgtaaga

SEQ ID NO: 247196 - DNA, 13 bp, Artificial Sequence
  Oligonucleotide for detection of SNP TSC0060410
tcttacgaacaaa

SEQ ID NO: 247197 - DNA, 13 bp, Artificial Sequence
  Oligonucleotide for detection of SNP TSC0060411
ttgaaaaattgta

SEQ ID NO: 247198 - DNA, 13 bp, Artificial Sequence
  Oligonucleotide for detection of SNP TSC0060411
tacaatttttcaa

SEQ ID NO: 247199 - DNA, 13 bp, Artificial Sequence
  Oligonucleotide for detection of SNP TSC0060411
ttgaaatattgta

SEQ ID NO: 247200 - DNA, 13 bp, Artificial Sequence
  Oligonucleotide for detection of SNP TSC0060411
tacaatatttcaa

SEQ ID NO: 247201 - DNA, 13 bp, Artificial Sequence
  Oligonucleotide for detection of SNP TSC0060412
agttttgaattta

SEQ ID NO: 247202 - DNA, 13 bp, Artificial Sequence
  Oligonucleotide for detection of SNP TSC0060412
taaattcaaaact

SEQ ID NO: 247203 - DNA, 13 bp, Artificial Sequence
  Oligonucleotide for detection of SNP TSC0060412
agtttcgaattta

SEQ ID NO: 247204 - DNA, 13 bp, Artificial Sequence
  Oligonucleotide for detection of SNP TSC0060412
taaattcgaaact

SEQ ID NO: 247205 - DNA, 13 bp, Artificial Sequence
  Oligonucleotide for detection of SNP TSC0060412
tggatttgaagtt

SEQ ID NO: 247206 - DNA, 13 bp, Artificial Sequence
  Oligonucleotide for detection of SNP TSC0060412
aacttcaaatcca

SEQ ID NO: 247207 - DNA, 13 bp, Artificial Sequence
  Oligonucleotide for detection of SNP TSC0060412
tggattcgaagtt

SEQ ID NO: 247208 - DNA, 13 bp, Artificial Sequence
  Oligonucleotide for detection of SNP TSC0060412
aacttcgaatcca

SEQ ID NO: 247209 - DNA, 13 bp, Artificial Sequence
  Oligonucleotide for detection of SNP TSC0060413
ttgttatgaatay

SEQ ID NO: 247210 - DNA, 13 bp, Artificial Sequence
  Oligonucleotide for detection of SNP TSC0060413
rtattcataacaa

SEQ ID NO: 247211 - DNA, 13 bp, Artificial Sequence
  Oligonucleotide for detection of SNP TSC0060413
ttgttacgaatay

SEQ ID NO: 247212 - DNA, 13 bp, Artificial Sequence
  Oligonucleotide for detection of SNP TSC0060413
rtattcgtaacaa

SEQ ID NO: 247213 - DNA, 13 bp, Artificial Sequence
  Oligonucleotide for detection of SNP TSC0060413
gtatttgtaatag

SEQ ID NO: 247214 - DNA, 13 bp, Artificial Sequence
  Oligonucleotide for detection of SNP TSC0060413
ctattacaaatac

SEQ ID NO: 247215 - DNA, 13 bp, Artificial Sequence
  Oligonucleotide for detection of SNP TSC0060413
gtatttataatag

SEQ ID NO: 247216 - DNA, 13 bp, Artificial Sequence
  Oligonucleotide for detection of SNP TSC0060413
ctattataaatac

SEQ ID NO: 247217 - DNA, 13 bp, Artificial Sequence
  Oligonucleotide for detection of SNP TSC0060413
gtattcgtaatag

SEQ ID NO: 247218 - DNA, 13 bp, Artificial Sequence
  Oligonucleotide for detection of SNP TSC0060413
ctattacgaatac

SEQ ID NO: 247219 - DNA, 13 bp, Artificial Sequence
  Oligonucleotide for detection of SNP TSC0060414
ttatagttgtgta

SEQ ID NO: 247220 - DNA, 13 bp, Artificial Sequence
  Oligonucleotide for detection of SNP TSC0060414
tacacaactataa

SEQ ID NO: 247221 - DNA, 13 bp, Artificial Sequence
  Oligonucleotide for detection of SNP TSC0060414
ttataggtgtgta

SEQ ID NO: 247222 - DNA, 13 bp, Artificial Sequence
  Oligonucleotide for detection of SNP TSC0060414
tacacacctataa

SEQ ID NO: 247223 - DNA, 13 bp, Artificial Sequence
  Oligonucleotide for detection of SNP TSC0060414
tatataattgtaa

SEQ ID NO: 247224 - DNA, 13 bp, Artificial Sequence
  Oligonucleotide for detection of SNP TSC0060414
ttacaattatata

SEQ ID NO: 247225 - DNA, 13 bp, Artificial Sequence
  Oligonucleotide for detection of SNP TSC0060414
tatatatttgtaa

SEQ ID NO: 247226 - DNA, 13 bp, Artificial Sequence
  Oligonucleotide for detection of SNP TSC0060414
ttacaaatatata

SEQ ID NO: 247227 - DNA, 13 bp, Artificial Sequence
  Oligonucleotide for detection of SNP TSC0005445
tatttaatatatt

SEQ ID NO: 247228 - DNA, 13 bp, Artificial Sequence
  Oligonucleotide for detection of SNP TSC0005445
aatatattaaata

SEQ ID NO: 247229 - DNA, 13 bp, Artificial Sequence
  Oligonucleotide for detection of SNP TSC0005445
tatttagtatatt

SEQ ID NO: 247230 - DNA, 13 bp, Artificial Sequence
  Oligonucleotide for detection of SNP TSC0005445
aatatactaaata

SEQ ID NO: 247231 - DNA, 13 bp, Artificial Sequence
  Oligonucleotide for detection of SNP TSC0060422
aaaagtatgtttt

SEQ ID NO: 247232 - DNA, 13 bp, Artificial Sequence
  Oligonucleotide for detection of SNP TSC0060422
aaaacatactttt

SEQ ID NO: 247233 - DNA, 13 bp, Artificial Sequence
  Oligonucleotide for detection of SNP TSC0060422
aaaagtgtgtttt

SEQ ID NO: 247234 - DNA, 13 bp, Artificial Sequence
  Oligonucleotide for detection of SNP TSC0060422
aaaacacactttt

SEQ ID NO: 247235 - DNA, 13 bp, Artificial Sequence
  Oligonucleotide for detection of SNP TSC0060422
aaaagcgtgtttt

SEQ ID NO: 247236 - DNA, 13 bp, Artificial Sequence
  Oligonucleotide for detection of SNP TSC0060422
aaaacacgctttt

SEQ ID NO: 247237 - DNA, 13 bp, Artificial Sequence
  Oligonucleotide for detection of SNP TSC0060423
taagttgttaaga

SEQ ID NO: 247238 - DNA, 13 bp, Artificial Sequence
  Oligonucleotide for detection of SNP TSC0060423
tcttaacaactta

SEQ ID NO: 247239 - DNA, 13 bp, Artificial Sequence
  Oligonucleotide for detection of SNP TSC0060423
taagttattaaga

SEQ ID NO: 247240 - DNA, 13 bp, Artificial Sequence
  Oligonucleotide for detection of SNP TSC0060423
tcttaataactta

SEQ ID NO: 247241 - DNA, 13 bp, Artificial Sequence
  Oligonucleotide for detection of SNP TSC0060424
gtatttttttatt

SEQ ID NO: 247242 - DNA, 13 bp, Artificial Sequence
  Oligonucleotide for detection of SNP TSC0060424
aataaaaaaatac

SEQ ID NO: 247243 - DNA, 13 bp, Artificial Sequence
  Oligonucleotide for detection of SNP TSC0060424
aataaaaaagtay

SEQ ID NO: 247244 - DNA, 13 bp, Artificial Sequence
  Oligonucleotide for detection of SNP TSC0060424
rtacttttttatt

SEQ ID NO: 247245 - DNA, 13 bp, Artificial Sequence
  Oligonucleotide for detection of SNP TSC0060424
aataaataagtay

SEQ ID NO: 247246 - DNA, 13 bp, Artificial Sequence
  Oligonucleotide for detection of SNP TSC0060424
rtacttatttatt

SEQ ID NO: 247247 - DNA, 13 bp, Artificial Sequence
  Oligonucleotide for detection of SNP TSC0060425
aaatttatttata

SEQ ID NO: 247248 - DNA, 13 bp, Artificial Sequence
  Oligonucleotide for detection of SNP TSC0060425
tataaataaattt

SEQ ID NO: 247249 - DNA, 13 bp, Artificial Sequence
  Oligonucleotide for detection of SNP TSC0060425
aaatttgtttata

SEQ ID NO: 247250 - DNA, 13 bp, Artificial Sequence
  Oligonucleotide for detection of SNP TSC0060425
tataaacaaattt

SEQ ID NO: 247251 - DNA, 13 bp, Artificial Sequence
  Oligonucleotide for detection of SNP TSC0060425
aaattcgtttata

SEQ ID NO: 247252 - DNA, 13 bp, Artificial Sequence
  Oligonucleotide for detection of SNP TSC0060425
tataaacgaattt

SEQ ID NO: 247253 - DNA, 13 bp, Artificial Sequence
  Oligonucleotide for detection of SNP TSC0060425
tataaatgaattt

SEQ ID NO: 247254 - DNA, 13 bp, Artificial Sequence
  Oligonucleotide for detection of SNP TSC0060425
aaattcatttata

SEQ ID NO: 247255 - DNA, 13 bp, Artificial Sequence
  Oligonucleotide for detection of SNP TSC0060426
taaagtaatagty

SEQ ID NO: 247256 - DNA, 13 bp, Artificial Sequence
  Oligonucleotide for detection of SNP TSC0060426
ractattacttta

SEQ ID NO: 247257 - DNA, 13 bp, Artificial Sequence
  Oligonucleotide for detection of SNP TSC0060426
taaagtgatagty

SEQ ID NO: 247258 - DNA, 13 bp, Artificial Sequence
  Oligonucleotide for detection of SNP TSC0060426
ractatcacttta

SEQ ID NO: 247259 - DNA, 13 bp, Artificial Sequence
  Oligonucleotide for detection of SNP TSC0060426
taaagcgatagty

SEQ ID NO: 247260 - DNA, 13 bp, Artificial Sequence
  Oligonucleotide for detection of SNP TSC0060426
ractatcgcttta

SEQ ID NO: 247261 - DNA, 13 bp, Artificial Sequence
  Oligonucleotide for detection of SNP TSC0060426
ggttgttgttttg

SEQ ID NO: 247262 - DNA, 13 bp, Artificial Sequence
  Oligonucleotide for detection of SNP TSC0060426
caaaacaacaacc

SEQ ID NO: 247263 - DNA, 13 bp, Artificial Sequence
  Oligonucleotide for detection of SNP TSC0060426
ggttgtcgttttg

SEQ ID NO: 247264 - DNA, 13 bp, Artificial Sequence
  Oligonucleotide for detection of SNP TSC0060426
caaaacgacaacc

SEQ ID NO: 247265 - DNA, 13 bp, Artificial Sequence
  Oligonucleotide for detection of SNP TSC0060428
tgttttataagtt

SEQ ID NO: 247266 - DNA, 13 bp, Artificial Sequence
  Oligonucleotide for detection of SNP TSC0060428
aacttataaaaca

SEQ ID NO: 247267 - DNA, 13 bp, Artificial Sequence
  Oligonucleotide for detection of SNP TSC0060428
tgttttgtaagtt

SEQ ID NO: 247268 - DNA, 13 bp, Artificial Sequence
  Oligonucleotide for detection of SNP TSC0060428
aacttacaaaaca

SEQ ID NO: 247269 - DNA, 13 bp, Artificial Sequence
  Oligonucleotide for detection of SNP TSC0060429
ttaggtgagatga

SEQ ID NO: 247270 - DNA, 13 bp, Artificial Sequence
  Oligonucleotide for detection of SNP TSC0060429
tcatctcacctaa

SEQ ID NO: 247271 - DNA, 13 bp, Artificial Sequence
  Oligonucleotide for detection of SNP TSC0060429
ttaggtaagatga

SEQ ID NO: 247272 - DNA, 13 bp, Artificial Sequence
  Oligonucleotide for detection of SNP TSC0060429
tcatcttacctaa

SEQ ID NO: 247273 - DNA, 13 bp, Artificial Sequence
  Oligonucleotide for detection of SNP TSC0060432
tttttaaattatt

SEQ ID NO: 247274 - DNA, 13 bp, Artificial Sequence
  Oligonucleotide for detection of SNP TSC0060432
aataatttaaaaa

SEQ ID NO: 247275 - DNA, 13 bp, Artificial Sequence
  Oligonucleotide for detection of SNP TSC0060433
aaatgtatttaag

SEQ ID NO: 247276 - DNA, 13 bp, Artificial Sequence
  Oligonucleotide for detection of SNP TSC0060433
cttaaatacattt

SEQ ID NO: 247277 - DNA, 13 bp, Artificial Sequence
  Oligonucleotide for detection of SNP TSC0060433
aaatgtgtttaag

SEQ ID NO: 247278 - DNA, 13 bp, Artificial Sequence
  Oligonucleotide for detection of SNP TSC0060433
cttaaacacattt

SEQ ID NO: 247279 - DNA, 13 bp, Artificial Sequence
  Oligonucleotide for detection of SNP TSC0060433
aaatgcgtttaag

SEQ ID NO: 247280 - DNA, 13 bp, Artificial Sequence
  Oligonucleotide for detection of SNP TSC0060433
cttaaacgcattt

SEQ ID NO: 247281 - DNA, 13 bp, Artificial Sequence
  Oligonucleotide for detection of SNP TSC0060435
gaattttgatagy

SEQ ID NO: 247282 - DNA, 13 bp, Artificial Sequence
  Oligonucleotide for detection of SNP TSC0060435
rctatcaaaattc

SEQ ID NO: 247283 - DNA, 13 bp, Artificial Sequence
  Oligonucleotide for detection of SNP TSC0060435
gaatttcgatagy

SEQ ID NO: 247284 - DNA, 13 bp, Artificial Sequence
  Oligonucleotide for detection of SNP TSC0060435
rctatcgaaattc

SEQ ID NO: 247285 - DNA, 13 bp, Artificial Sequence
  Oligonucleotide for detection of SNP TSC0060435
gttattggggtty

SEQ ID NO: 247286 - DNA, 13 bp, Artificial Sequence
  Oligonucleotide for detection of SNP TSC0060435
raaccccaataac

SEQ ID NO: 247287 - DNA, 13 bp, Artificial Sequence
  Oligonucleotide for detection of SNP TSC0060435
gttattagggtty

SEQ ID NO: 247288 - DNA, 13 bp, Artificial Sequence
  Oligonucleotide for detection of SNP TSC0060435
raaccctaataac

SEQ ID NO: 247289 - DNA, 13 bp, Artificial Sequence
  Oligonucleotide for detection of SNP TSC0060435
gttatcggggtty

SEQ ID NO: 247290 - DNA, 13 bp, Artificial Sequence
  Oligonucleotide for detection of SNP TSC0060435
raaccccgataac

SEQ ID NO: 247291 - DNA, 13 bp, Artificial Sequence
  Oligonucleotide for detection of SNP TSC0060439
aatataggttttg

SEQ ID NO: 247292 - DNA, 13 bp, Artificial Sequence
  Oligonucleotide for detection of SNP TSC0060439
caaaacctatatt

SEQ ID NO: 247293 - DNA, 13 bp, Artificial Sequence
  Oligonucleotide for detection of SNP TSC0060439
taggatttatatt

SEQ ID NO: 247294 - DNA, 13 bp, Artificial Sequence
  Oligonucleotide for detection of SNP TSC0060439
aatataaatccta

SEQ ID NO: 247295 - DNA, 13 bp, Artificial Sequence
  Oligonucleotide for detection of SNP TSC0060440
ggaaattgtaggg

SEQ ID NO: 247296 - DNA, 13 bp, Artificial Sequence
  Oligonucleotide for detection of SNP TSC0060440
ccctacaatttcc

SEQ ID NO: 247297 - DNA, 13 bp, Artificial Sequence
  Oligonucleotide for detection of SNP TSC0060440
ggaaatcgtaggg

SEQ ID NO: 247298 - DNA, 13 bp, Artificial Sequence
  Oligonucleotide for detection of SNP TSC0060440
ccctacgatttcc

SEQ ID NO: 247299 - DNA, 13 bp, Artificial Sequence
  Oligonucleotide for detection of SNP TSC0060440
ttttgtgatttty

SEQ ID NO: 247300 - DNA, 13 bp, Artificial Sequence
  Oligonucleotide for detection of SNP TSC0060440
raaaatcacaaaa

SEQ ID NO: 247301 - DNA, 13 bp, Artificial Sequence
  Oligonucleotide for detection of SNP TSC0060440
ttttgtaatttty

SEQ ID NO: 247302 - DNA, 13 bp, Artificial Sequence
  Oligonucleotide for detection of SNP TSC0060440
raaaattacaaaa

SEQ ID NO: 247303 - DNA, 13 bp, Artificial Sequence
  Oligonucleotide for detection of SNP TSC0060440
ttttgcgatttty

SEQ ID NO: 247304 - DNA, 13 bp, Artificial Sequence
  Oligonucleotide for detection of SNP TSC0060440
raaaatcgcaaaa

SEQ ID NO: 247305 - DNA, 13 bp, Artificial Sequence
  Oligonucleotide for detection of SNP TSC0060441
tgtataaaaaata

SEQ ID NO: 247306 - DNA, 13 bp, Artificial Sequence
  Oligonucleotide for detection of SNP TSC0060441
tattttttataca

SEQ ID NO: 247307 - DNA, 13 bp, Artificial Sequence
  Oligonucleotide for detection of SNP TSC0007004
gaaaattaagtaa

SEQ ID NO: 247308 - DNA, 13 bp, Artificial Sequence
  Oligonucleotide for detection of SNP TSC0007004
ttacttaattttc

SEQ ID NO: 247309 - DNA, 13 bp, Artificial Sequence
  Oligonucleotide for detection of SNP TSC0007004
gaaaatgaagtaa

SEQ ID NO: 247310 - DNA, 13 bp, Artificial Sequence
  Oligonucleotide for detection of SNP TSC0007004
ttacttcattttc

SEQ ID NO: 247311 - DNA, 13 bp, Artificial Sequence
  Oligonucleotide for detection of SNP TSC0010671
tttagtagttttg

SEQ ID NO: 247312 - DNA, 13 bp, Artificial Sequence
  Oligonucleotide for detection of SNP TSC0010671
caaaactactaaa

SEQ ID NO: 247313 - DNA, 13 bp, Artificial Sequence
  Oligonucleotide for detection of SNP TSC0010671
tttagtggttttg

SEQ ID NO: 247314 - DNA, 13 bp, Artificial Sequence
  Oligonucleotide for detection of SNP TSC0010671
caaaaccactaaa

SEQ ID NO: 247315 - DNA, 13 bp, Artificial Sequence
  Oligonucleotide for detection of SNP TSC0060444
ggtatatgagaat

SEQ ID NO: 247316 - DNA, 13 bp, Artificial Sequence
  Oligonucleotide for detection of SNP TSC0060444
attctcatatacc

SEQ ID NO: 247317 - DNA, 13 bp, Artificial Sequence
  Oligonucleotide for detection of SNP TSC0060444
ggtatacgagaat

SEQ ID NO: 247318 - DNA, 13 bp, Artificial Sequence
  Oligonucleotide for detection of SNP TSC0060444
attctcgtatacc

SEQ ID NO: 247319 - DNA, 13 bp, Artificial Sequence
  Oligonucleotide for detection of SNP TSC0060444
atttttatataty

SEQ ID NO: 247320 - DNA, 13 bp, Artificial Sequence
  Oligonucleotide for detection of SNP TSC0060444
ratatataaaaat

SEQ ID NO: 247321 - DNA, 13 bp, Artificial Sequence
  Oligonucleotide for detection of SNP TSC0060445
gagaataattgta

SEQ ID NO: 247322 - DNA, 13 bp, Artificial Sequence
  Oligonucleotide for detection of SNP TSC0060445
tacaattattctc

SEQ ID NO: 247323 - DNA, 13 bp, Artificial Sequence
  Oligonucleotide for detection of SNP TSC0060445
gagaatgattgta

SEQ ID NO: 247324 - DNA, 13 bp, Artificial Sequence
  Oligonucleotide for detection of SNP TSC0060445
tacaatcattctc

SEQ ID NO: 247325 - DNA, 13 bp, Artificial Sequence
  Oligonucleotide for detection of SNP TSC0060445
gagaacgattgta

SEQ ID NO: 247326 - DNA, 13 bp, Artificial Sequence
  Oligonucleotide for detection of SNP TSC0060445
tacaatcgttctc

SEQ ID NO: 247327 - DNA, 13 bp, Artificial Sequence
  Oligonucleotide for detection of SNP TSC0060446
ttatgtttgttat

SEQ ID NO: 247328 - DNA, 13 bp, Artificial Sequence
  Oligonucleotide for detection of SNP TSC0060446
ataacaaacataa

SEQ ID NO: 247329 - DNA, 13 bp, Artificial Sequence
  Oligonucleotide for detection of SNP TSC0060446
ttatgtgtgttat

SEQ ID NO: 247330 - DNA, 13 bp, Artificial Sequence
  Oligonucleotide for detection of SNP TSC0060446
ataacacacataa

SEQ ID NO: 247331 - DNA, 13 bp, Artificial Sequence
  Oligonucleotide for detection of SNP TSC0060446
ttatgcgtgttat

SEQ ID NO: 247332 - DNA, 13 bp, Artificial Sequence
  Oligonucleotide for detection of SNP TSC0060446
ataacacgcataa

SEQ ID NO: 247333 - DNA, 13 bp, Artificial Sequence
  Oligonucleotide for detection of SNP TSC0060446
atgataagtatga

SEQ ID NO: 247334 - DNA, 13 bp, Artificial Sequence
  Oligonucleotide for detection of SNP TSC0060446
tcatacttatcat

SEQ ID NO: 247335 - DNA, 13 bp, Artificial Sequence
  Oligonucleotide for detection of SNP TSC0060446
atgatatgtatga

SEQ ID NO: 247336 - DNA, 13 bp, Artificial Sequence
  Oligonucleotide for detection of SNP TSC0060446
tcatacatatcat

SEQ ID NO: 247337 - DNA, 13 bp, Artificial Sequence
  Oligonucleotide for detection of SNP TSC0060446
atgatacgtatga

SEQ ID NO: 247338 - DNA, 13 bp, Artificial Sequence
  Oligonucleotide for detection of SNP TSC0060446
tcatacgtatcat

SEQ ID NO: 247339 - DNA, 13 bp, Artificial Sequence
  Oligonucleotide for detection of SNP TSC0060448
gagagatagaaay

SEQ ID NO: 247340 - DNA, 13 bp, Artificial Sequence
  Oligonucleotide for detection of SNP TSC0060448
rtttctatctctc

SEQ ID NO: 247341 - DNA, 13 bp, Artificial Sequence
  Oligonucleotide for detection of SNP TSC0060448
gagagagagaaay

SEQ ID NO: 247342 - DNA, 13 bp, Artificial Sequence
  Oligonucleotide for detection of SNP TSC0060448
rtttctctctctc

SEQ ID NO: 247343 - DNA, 13 bp, Artificial Sequence
  Oligonucleotide for detection of SNP TSC0060449
atttagattggag

SEQ ID NO: 247344 - DNA, 13 bp, Artificial Sequence
  Oligonucleotide for detection of SNP TSC0060449
ctccaatctaaat

SEQ ID NO: 247345 - DNA, 13 bp, Artificial Sequence
  Oligonucleotide for detection of SNP TSC0060450
tattatataattg

SEQ ID NO: 247346 - DNA, 13 bp, Artificial Sequence
  Oligonucleotide for detection of SNP TSC0060450
caattatataata

SEQ ID NO: 247347 - DNA, 13 bp, Artificial Sequence
  Oligonucleotide for detection of SNP TSC0060450
tattatgtaattg

SEQ ID NO: 247348 - DNA, 13 bp, Artificial Sequence
  Oligonucleotide for detection of SNP TSC0060450
caattacataata

SEQ ID NO: 247349 - DNA, 13 bp, Artificial Sequence
  Oligonucleotide for detection of SNP TSC0008714
tttattttgaatt

SEQ ID NO: 247350 - DNA, 13 bp, Artificial Sequence
  Oligonucleotide for detection of SNP TSC0008714
aattcaaaataaa

SEQ ID NO: 247351 - DNA, 13 bp, Artificial Sequence
  Oligonucleotide for detection of SNP TSC0008714
tttattgtgaatt

SEQ ID NO: 247352 - DNA, 13 bp, Artificial Sequence
  Oligonucleotide for detection of SNP TSC0008714
aattcacaataaa

SEQ ID NO: 247353 - DNA, 13 bp, Artificial Sequence
  Oligonucleotide for detection of SNP TSC0008714
tttatcgtgaatt

SEQ ID NO: 247354 - DNA, 13 bp, Artificial Sequence
  Oligonucleotide for detection of SNP TSC0008714
aattcacgataaa

SEQ ID NO: 247355 - DNA, 13 bp, Artificial Sequence
  Oligonucleotide for detection of SNP TSC0008714
aatttatgatgag

SEQ ID NO: 247356 - DNA, 13 bp, Artificial Sequence
  Oligonucleotide for detection of SNP TSC0008714
ctcatcataaatt

SEQ ID NO: 247357 - DNA, 13 bp, Artificial Sequence
  Oligonucleotide for detection of SNP TSC0008714
aatttacgatgag

SEQ ID NO: 247358 - DNA, 13 bp, Artificial Sequence
  Oligonucleotide for detection of SNP TSC0008714
ctcatcgtaaatt

SEQ ID NO: 247359 - DNA, 13 bp, Artificial Sequence
  Oligonucleotide for detection of SNP TSC0008715
attaaaatattta

SEQ ID NO: 247360 - DNA, 13 bp, Artificial Sequence
  Oligonucleotide for detection of SNP TSC0008715
taaatattttaat

SEQ ID NO: 247361 - DNA, 13 bp, Artificial Sequence
  Oligonucleotide for detection of SNP TSC0008715
attaaattattta

SEQ ID NO: 247362 - DNA, 13 bp, Artificial Sequence
  Oligonucleotide for detection of SNP TSC0008715
taaataatttaat

SEQ ID NO: 247363 - DNA, 13 bp, Artificial Sequence
  Oligonucleotide for detection of SNP TSC0008715
tgaatgttttagt

SEQ ID NO: 247364 - DNA, 13 bp, Artificial Sequence
  Oligonucleotide for detection of SNP TSC0008715
actaaaacattca

SEQ ID NO: 247365 - DNA, 13 bp, Artificial Sequence
  Oligonucleotide for detection of SNP TSC0008715
tgaatggtttagt

SEQ ID NO: 247366 - DNA, 13 bp, Artificial Sequence
  Oligonucleotide for detection of SNP TSC0008715
actaaaccattca

SEQ ID NO: 247367 - DNA, 13 bp, Artificial Sequence
  Oligonucleotide for detection of SNP TSC0060451
atagtaattttga

SEQ ID NO: 247368 - DNA, 13 bp, Artificial Sequence
  Oligonucleotide for detection of SNP TSC0060451
tcaaaattactat

SEQ ID NO: 247369 - DNA, 13 bp, Artificial Sequence
  Oligonucleotide for detection of SNP TSC0060451
atagtagttttga

SEQ ID NO: 247370 - DNA, 13 bp, Artificial Sequence
  Oligonucleotide for detection of SNP TSC0060451
tcaaaactactat

SEQ ID NO: 247371 - DNA, 13 bp, Artificial Sequence
  Oligonucleotide for detection of SNP TSC0060452
ttatgtgtgttty

SEQ ID NO: 247372 - DNA, 13 bp, Artificial Sequence
  Oligonucleotide for detection of SNP TSC0060452
raaacacacataa

SEQ ID NO: 247373 - DNA, 13 bp, Artificial Sequence
  Oligonucleotide for detection of SNP TSC0060452
ttatgtatgttty

SEQ ID NO: 247374 - DNA, 13 bp, Artificial Sequence
  Oligonucleotide for detection of SNP TSC0060452
raaacatacataa

SEQ ID NO: 247375 - DNA, 13 bp, Artificial Sequence
  Oligonucleotide for detection of SNP TSC0060453
ggaattaatggtg

SEQ ID NO: 247376 - DNA, 13 bp, Artificial Sequence
  Oligonucleotide for detection of SNP TSC0060453
caccattaattcc

SEQ ID NO: 247377 - DNA, 13 bp, Artificial Sequence
  Oligonucleotide for detection of SNP TSC0060453
ggaatttatggtg

SEQ ID NO: 247378 - DNA, 13 bp, Artificial Sequence
  Oligonucleotide for detection of SNP TSC0060453
caccataaattcc

SEQ ID NO: 247379 - DNA, 13 bp, Artificial Sequence
  Oligonucleotide for detection of SNP TSC0060453
tattattaattty

SEQ ID NO: 247380 - DNA, 13 bp, Artificial Sequence
  Oligonucleotide for detection of SNP TSC0060453
raaattaataata

SEQ ID NO: 247381 - DNA, 13 bp, Artificial Sequence
  Oligonucleotide for detection of SNP TSC0060453
tattataaattty

SEQ ID NO: 247382 - DNA, 13 bp, Artificial Sequence
  Oligonucleotide for detection of SNP TSC0060453
raaatttataata

SEQ ID NO: 247383 - DNA, 13 bp, Artificial Sequence
  Oligonucleotide for detection of SNP TSC0060456
gattgtttatgtt

SEQ ID NO: 247384 - DNA, 13 bp, Artificial Sequence
  Oligonucleotide for detection of SNP TSC0060456
aacataaacaatc

SEQ ID NO: 247385 - DNA, 13 bp, Artificial Sequence
  Oligonucleotide for detection of SNP TSC0060456
gattgtgtatgtt

SEQ ID NO: 247386 - DNA, 13 bp, Artificial Sequence
  Oligonucleotide for detection of SNP TSC0060456
aacatacacaatc

SEQ ID NO: 247387 - DNA, 13 bp, Artificial Sequence
  Oligonucleotide for detection of SNP TSC0060457
gaagtatgaaaga

SEQ ID NO: 247388 - DNA, 13 bp, Artificial Sequence
  Oligonucleotide for detection of SNP TSC0060457
tctttcatacttc

SEQ ID NO: 247389 - DNA, 13 bp, Artificial Sequence
  Oligonucleotide for detection of SNP TSC0060457
gaagtacgaaaga

SEQ ID NO: 247390 - DNA, 13 bp, Artificial Sequence
  Oligonucleotide for detection of SNP TSC0060457
tctttcgtacttc

SEQ ID NO: 247391 - DNA, 13 bp, Artificial Sequence
  Oligonucleotide for detection of SNP TSC0007436
aattttggagaag

SEQ ID NO: 247392 - DNA, 13 bp, Artificial Sequence
  Oligonucleotide for detection of SNP TSC0007436
cttctccaaaatt

SEQ ID NO: 247393 - DNA, 13 bp, Artificial Sequence
  Oligonucleotide for detection of SNP TSC0007436
aattttagagaag

SEQ ID NO: 247394 - DNA, 13 bp, Artificial Sequence
  Oligonucleotide for detection of SNP TSC0007436
cttctctaaaatt

SEQ ID NO: 247395 - DNA, 13 bp, Artificial Sequence
  Oligonucleotide for detection of SNP TSC0010878
tagatgtttattg

SEQ ID NO: 247396 - DNA, 13 bp, Artificial Sequence
  Oligonucleotide for detection of SNP TSC0010878
caataaacatcta

SEQ ID NO: 247397 - DNA, 13 bp, Artificial Sequence
  Oligonucleotide for detection of SNP TSC0010878
tagatggttattg

SEQ ID NO: 247398 - DNA, 13 bp, Artificial Sequence
  Oligonucleotide for detection of SNP TSC0010878
caataaccatcta

SEQ ID NO: 247399 - DNA, 13 bp, Artificial Sequence
  Oligonucleotide for detection of SNP TSC0010878
tagtaggtattta

SEQ ID NO: 247400 - DNA, 13 bp, Artificial Sequence
  Oligonucleotide for detection of SNP TSC0010878
taaatacctacta

SEQ ID NO: 247401 - DNA, 13 bp, Artificial Sequence
  Oligonucleotide for detection of SNP TSC0010879
ttttttagtaaay

SEQ ID NO: 247402 - DNA, 13 bp, Artificial Sequence
  Oligonucleotide for detection of SNP TSC0010879
rtttactaaaaaa

SEQ ID NO: 247403 - DNA, 13 bp, Artificial Sequence
  Oligonucleotide for detection of SNP TSC0010879
tttttcggtaaay

SEQ ID NO: 247404 - DNA, 13 bp, Artificial Sequence
  Oligonucleotide for detection of SNP TSC0010879
rtttaccgaaaaa

SEQ ID NO: 247405 - DNA, 13 bp, Artificial Sequence
  Oligonucleotide for detection of SNP TSC0010879
gtttgttgggaaa

SEQ ID NO: 247406 - DNA, 13 bp, Artificial Sequence
  Oligonucleotide for detection of SNP TSC0010879
tttcccaacaaac

SEQ ID NO: 247407 - DNA, 13 bp, Artificial Sequence
  Oligonucleotide for detection of SNP TSC0010879
gtttgtcgggaaa

SEQ ID NO: 247408 - DNA, 13 bp, Artificial Sequence
  Oligonucleotide for detection of SNP TSC0010879
tttcccgacaaac

SEQ ID NO: 247409 - DNA, 13 bp, Artificial Sequence
  Oligonucleotide for detection of SNP TSC0060458
tggtggggtaggy

SEQ ID NO: 247410 - DNA, 13 bp, Artificial Sequence
  Oligonucleotide for detection of SNP TSC0060458
rcctaccccacca

SEQ ID NO: 247411 - DNA, 13 bp, Artificial Sequence
  Oligonucleotide for detection of SNP TSC0060458
tggtggagtaggy

SEQ ID NO: 247412 - DNA, 13 bp, Artificial Sequence
  Oligonucleotide for detection of SNP TSC0060458
rcctactccacca

SEQ ID NO: 247413 - DNA, 13 bp, Artificial Sequence
  Oligonucleotide for detection of SNP TSC0060459
tatgttagtaaga

SEQ ID NO: 247414 - DNA, 13 bp, Artificial Sequence
  Oligonucleotide for detection of SNP TSC0060459
tcttactaacata

SEQ ID NO: 247415 - DNA, 13 bp, Artificial Sequence
  Oligonucleotide for detection of SNP TSC0060459
tatgttggtaaga

SEQ ID NO: 247416 - DNA, 13 bp, Artificial Sequence
  Oligonucleotide for detection of SNP TSC0060459
tcttaccaacata

SEQ ID NO: 247417 - DNA, 13 bp, Artificial Sequence
  Oligonucleotide for detection of SNP TSC0010827
tatatagtttttt

SEQ ID NO: 247418 - DNA, 13 bp, Artificial Sequence
  Oligonucleotide for detection of SNP TSC0010827
aaaaaactatata

SEQ ID NO: 247419 - DNA, 13 bp, Artificial Sequence
  Oligonucleotide for detection of SNP TSC0060460
atggtaggaatta

SEQ ID NO: 247420 - DNA, 13 bp, Artificial Sequence
  Oligonucleotide for detection of SNP TSC0060460
taattcctaccat

SEQ ID NO: 247421 - DNA, 13 bp, Artificial Sequence
  Oligonucleotide for detection of SNP TSC0060460
atggtaagaatta

SEQ ID NO: 247422 - DNA, 13 bp, Artificial Sequence
  Oligonucleotide for detection of SNP TSC0060460
taattcttaccat

SEQ ID NO: 247423 - DNA, 13 bp, Artificial Sequence
  Oligonucleotide for detection of SNP TSC0060461
aaatgttgagatg

SEQ ID NO: 247424 - DNA, 13 bp, Artificial Sequence
  Oligonucleotide for detection of SNP TSC0060461
catctcaacattt

SEQ ID NO: 247425 - DNA, 13 bp, Artificial Sequence
  Oligonucleotide for detection of SNP TSC0060461
aaatgtcgagatg

SEQ ID NO: 247426 - DNA, 13 bp, Artificial Sequence
  Oligonucleotide for detection of SNP TSC0060461
catctcgacattt

SEQ ID NO: 247427 - DNA, 13 bp, Artificial Sequence
  Oligonucleotide for detection of SNP TSC0060461
tattttagtattt

SEQ ID NO: 247428 - DNA, 13 bp, Artificial Sequence
  Oligonucleotide for detection of SNP TSC0060461
aaatactaaaata

SEQ ID NO: 247429 - DNA, 13 bp, Artificial Sequence
  Oligonucleotide for detection of SNP TSC0060461
tatttcggtattt

SEQ ID NO: 247430 - DNA, 13 bp, Artificial Sequence
  Oligonucleotide for detection of SNP TSC0060461
aaataccgaaata

SEQ ID NO: 247431 - DNA, 13 bp, Artificial Sequence
  Oligonucleotide for detection of SNP TSC0060463
gaattgattttta

SEQ ID NO: 247432 - DNA, 13 bp, Artificial Sequence
  Oligonucleotide for detection of SNP TSC0060463
taaaaatcaattc

SEQ ID NO: 247433 - DNA, 13 bp, Artificial Sequence
  Oligonucleotide for detection of SNP TSC0060463
gaattgtttttta

SEQ ID NO: 247434 - DNA, 13 bp, Artificial Sequence
  Oligonucleotide for detection of SNP TSC0060463
taaaaaacaattc

SEQ ID NO: 247435 - DNA, 13 bp, Artificial Sequence
  Oligonucleotide for detection of SNP TSC0060463
tgaggattagtty

SEQ ID NO: 247436 - DNA, 13 bp, Artificial Sequence
  Oligonucleotide for detection of SNP TSC0060463
raactaatcctca

SEQ ID NO: 247437 - DNA, 13 bp, Artificial Sequence
  Oligonucleotide for detection of SNP TSC0060463
tgaggaatagtty

SEQ ID NO: 247438 - DNA, 13 bp, Artificial Sequence
  Oligonucleotide for detection of SNP TSC0060463
raactattcctca

SEQ ID NO: 247439 - DNA, 13 bp, Artificial Sequence
  Oligonucleotide for detection of SNP TSC0060465
gttaaagtttgaa

SEQ ID NO: 247440 - DNA, 13 bp, Artificial Sequence
  Oligonucleotide for detection of SNP TSC0060465
ttcaaactttaac

SEQ ID NO: 247441 - DNA, 13 bp, Artificial Sequence
  Oligonucleotide for detection of SNP TSC0060465
gttaaaatttgaa

SEQ ID NO: 247442 - DNA, 13 bp, Artificial Sequence
  Oligonucleotide for detection of SNP TSC0060465
ttcaaattttaac

SEQ ID NO: 247443 - DNA, 13 bp, Artificial Sequence
  Oligonucleotide for detection of SNP TSC0060466
aaagagtgtgttt

SEQ ID NO: 247444 - DNA, 13 bp, Artificial Sequence
  Oligonucleotide for detection of SNP TSC0060466
aaacacactcttt

SEQ ID NO: 247445 - DNA, 13 bp, Artificial Sequence
  Oligonucleotide for detection of SNP TSC0060466
aaagagcgtgttt

SEQ ID NO: 247446 - DNA, 13 bp, Artificial Sequence
  Oligonucleotide for detection of SNP TSC0060466
aaacacgctcttt

SEQ ID NO: 247447 - DNA, 13 bp, Artificial Sequence
  Oligonucleotide for detection of SNP TSC0060467
tagaaaatttgtt

SEQ ID NO: 247448 - DNA, 13 bp, Artificial Sequence
  Oligonucleotide for detection of SNP TSC0060467
aacaaattttcta

SEQ ID NO: 247449 - DNA, 13 bp, Artificial Sequence
  Oligonucleotide for detection of SNP TSC0060467
tagaaagtttgtt

SEQ ID NO: 247450 - DNA, 13 bp, Artificial Sequence
  Oligonucleotide for detection of SNP TSC0060467
aacaaactttcta

SEQ ID NO: 247451 - DNA, 13 bp, Artificial Sequence
  Oligonucleotide for detection of SNP TSC0060468
gaaatttagttaa

SEQ ID NO: 247452 - DNA, 13 bp, Artificial Sequence
  Oligonucleotide for detection of SNP TSC0060468
ttaactaaatttc

SEQ ID NO: 247453 - DNA, 13 bp, Artificial Sequence
  Oligonucleotide for detection of SNP TSC0060468
gaaattgagttaa

SEQ ID NO: 247454 - DNA, 13 bp, Artificial Sequence
  Oligonucleotide for detection of SNP TSC0060468
ttaactcaatttc

SEQ ID NO: 247455 - DNA, 13 bp, Artificial Sequence
  Oligonucleotide for detection of SNP TSC0060468
ttgattgaattty

SEQ ID NO: 247456 - DNA, 13 bp, Artificial Sequence
  Oligonucleotide for detection of SNP TSC0060468
raaattcaatcaa

SEQ ID NO: 247457 - DNA, 13 bp, Artificial Sequence
  Oligonucleotide for detection of SNP TSC0060468
ttgatttaattty

SEQ ID NO: 247458 - DNA, 13 bp, Artificial Sequence
  Oligonucleotide for detection of SNP TSC0060468
raaattaaatcaa

SEQ ID NO: 247459 - DNA, 13 bp, Artificial Sequence
  Oligonucleotide for detection of SNP TSC0060469
ttttttgtataga

SEQ ID NO: 247460 - DNA, 13 bp, Artificial Sequence
  Oligonucleotide for detection of SNP TSC0060469
tctatacaaaaaa

SEQ ID NO: 247461 - DNA, 13 bp, Artificial Sequence
  Oligonucleotide for detection of SNP TSC0060469
tttttcgtataga

SEQ ID NO: 247462 - DNA, 13 bp, Artificial Sequence
  Oligonucleotide for detection of SNP TSC0060469
tctatacgaaaaa

SEQ ID NO: 247463 - DNA, 13 bp, Artificial Sequence
  Oligonucleotide for detection of SNP TSC0060469
tttatatgggaaa

SEQ ID NO: 247464 - DNA, 13 bp, Artificial Sequence
  Oligonucleotide for detection of SNP TSC0060469
tttcccatataaa

SEQ ID NO: 247465 - DNA, 13 bp, Artificial Sequence
  Oligonucleotide for detection of SNP TSC0060469
tttatacgggaaa

SEQ ID NO: 247466 - DNA, 13 bp, Artificial Sequence
  Oligonucleotide for detection of SNP TSC0060469
tttcccgtataaa

SEQ ID NO: 247467 - DNA, 13 bp, Artificial Sequence
  Oligonucleotide for detection of SNP TSC0060470
ggatgattagtga

SEQ ID NO: 247468 - DNA, 13 bp, Artificial Sequence
  Oligonucleotide for detection of SNP TSC0060470
tcactaatcatcc

SEQ ID NO: 247469 - DNA, 13 bp, Artificial Sequence
  Oligonucleotide for detection of SNP TSC0060470
ggatgagtagtga

SEQ ID NO: 247470 - DNA, 13 bp, Artificial Sequence
  Oligonucleotide for detection of SNP TSC0060470
tcactactcatcc

SEQ ID NO: 247471 - DNA, 13 bp, Artificial Sequence
  Oligonucleotide for detection of SNP TSC0060471
aaagagttaaagt

SEQ ID NO: 247472 - DNA, 13 bp, Artificial Sequence
  Oligonucleotide for detection of SNP TSC0060471
actttaactcttt

SEQ ID NO: 247473 - DNA, 13 bp, Artificial Sequence
  Oligonucleotide for detection of SNP TSC0060471
aaagagataaagt

SEQ ID NO: 247474 - DNA, 13 bp, Artificial Sequence
  Oligonucleotide for detection of SNP TSC0060471
actttatctcttt

SEQ ID NO: 247475 - DNA, 13 bp, Artificial Sequence
  Oligonucleotide for detection of SNP TSC0060472
gtattagtaagty

SEQ ID NO: 247476 - DNA, 13 bp, Artificial Sequence
  Oligonucleotide for detection of SNP TSC0060472
racttactaatac

SEQ ID NO: 247477 - DNA, 13 bp, Artificial Sequence
  Oligonucleotide for detection of SNP TSC0060472
gtattaataagty

SEQ ID NO: 247478 - DNA, 13 bp, Artificial Sequence
  Oligonucleotide for detection of SNP TSC0060472
racttattaatac

SEQ ID NO: 247479 - DNA, 13 bp, Artificial Sequence
  Oligonucleotide for detection of SNP TSC0060473
aataagtgggaag

SEQ ID NO: 247480 - DNA, 13 bp, Artificial Sequence
  Oligonucleotide for detection of SNP TSC0060473
cttcccacttatt

SEQ ID NO: 247481 - DNA, 13 bp, Artificial Sequence
  Oligonucleotide for detection of SNP TSC0060473
aataagcgggaag

SEQ ID NO: 247482 - DNA, 13 bp, Artificial Sequence
  Oligonucleotide for detection of SNP TSC0060473
cttcccgcttatt

SEQ ID NO: 247483 - DNA, 13 bp, Artificial Sequence
  Oligonucleotide for detection of SNP TSC0060474
agtttaagaatta

SEQ ID NO: 247484 - DNA, 13 bp, Artificial Sequence
  Oligonucleotide for detection of SNP TSC0060474
taattcttaaact

SEQ ID NO: 247485 - DNA, 13 bp, Artificial Sequence
  Oligonucleotide for detection of SNP TSC0060474
agtttaggaatta

SEQ ID NO: 247486 - DNA, 13 bp, Artificial Sequence
  Oligonucleotide for detection of SNP TSC0060474
taattcctaaact

SEQ ID NO: 247487 - DNA, 13 bp, Artificial Sequence
  Oligonucleotide for detection of SNP TSC0060478
tggtagggttttg

SEQ ID NO: 247488 - DNA, 13 bp, Artificial Sequence
  Oligonucleotide for detection of SNP TSC0060478
caaaaccctacca

SEQ ID NO: 247489 - DNA, 13 bp, Artificial Sequence
  Oligonucleotide for detection of SNP TSC0060478
tggtagagttttg

SEQ ID NO: 247490 - DNA, 13 bp, Artificial Sequence
  Oligonucleotide for detection of SNP TSC0060478
caaaactctacca

SEQ ID NO: 247491 - DNA, 13 bp, Artificial Sequence
  Oligonucleotide for detection of SNP TSC0060478
tggtagggtttcg

SEQ ID NO: 247492 - DNA, 13 bp, Artificial Sequence
  Oligonucleotide for detection of SNP TSC0060478
cgaaaccctacca

SEQ ID NO: 247493 - DNA, 13 bp, Artificial Sequence
  Oligonucleotide for detection of SNP TSC0060478
tggtagagtttcg

SEQ ID NO: 247494 - DNA, 13 bp, Artificial Sequence
  Oligonucleotide for detection of SNP TSC0060478
cgaaactctacca

SEQ ID NO: 247495 - DNA, 13 bp, Artificial Sequence
  Oligonucleotide for detection of SNP TSC0060479
tgaatttgggaag

SEQ ID NO: 247496 - DNA, 13 bp, Artificial Sequence
  Oligonucleotide for detection of SNP TSC0060479
cttcccaaattca

SEQ ID NO: 247497 - DNA, 13 bp, Artificial Sequence
  Oligonucleotide for detection of SNP TSC0060479
tgaattcgggaag

SEQ ID NO: 247498 - DNA, 13 bp, Artificial Sequence
  Oligonucleotide for detection of SNP TSC0060479
cttcccgaattca

SEQ ID NO: 247499 - DNA, 13 bp, Artificial Sequence
  Oligonucleotide for detection of SNP TSC0060483
tgtagggagttag

SEQ ID NO: 247500 - DNA, 13 bp, Artificial Sequence
  Oligonucleotide for detection of SNP TSC0060483
ctaactccctaca

SEQ ID NO: 247501 - DNA, 13 bp, Artificial Sequence
  Oligonucleotide for detection of SNP TSC0060483
tgtaggaagttag

SEQ ID NO: 247502 - DNA, 13 bp, Artificial Sequence
  Oligonucleotide for detection of SNP TSC0060483
ctaacttcctaca

SEQ ID NO: 247503 - DNA, 13 bp, Artificial Sequence
  Oligonucleotide for detection of SNP TSC0060485
tgtgttaaagtag

SEQ ID NO: 247504 - DNA, 13 bp, Artificial Sequence
  Oligonucleotide for detection of SNP TSC0060485
ctactttaacaca

SEQ ID NO: 247505 - DNA, 13 bp, Artificial Sequence
  Oligonucleotide for detection of SNP TSC0060485
tgtgttgaagtag

SEQ ID NO: 247506 - DNA, 13 bp, Artificial Sequence
  Oligonucleotide for detection of SNP TSC0060485
ctacttcaacaca

SEQ ID NO: 247507 - DNA, 13 bp, Artificial Sequence
  Oligonucleotide for detection of SNP TSC0060485
cgtgttaaagtag

SEQ ID NO: 247508 - DNA, 13 bp, Artificial Sequence
  Oligonucleotide for detection of SNP TSC0060485
ctactttaacacg

SEQ ID NO: 247509 - DNA, 13 bp, Artificial Sequence
  Oligonucleotide for detection of SNP TSC0060485
cgtgttgaagtag

SEQ ID NO: 247510 - DNA, 13 bp, Artificial Sequence
  Oligonucleotide for detection of SNP TSC0060485
ctacttcaacacg

SEQ ID NO: 247511 - DNA, 13 bp, Artificial Sequence
  Oligonucleotide for detection of SNP TSC0060485
tgtgtcgaagtag

SEQ ID NO: 247512 - DNA, 13 bp, Artificial Sequence
  Oligonucleotide for detection of SNP TSC0060485
ctacttcgacaca

SEQ ID NO: 247513 - DNA, 13 bp, Artificial Sequence
  Oligonucleotide for detection of SNP TSC0060485
cgtgtcgaagtag

SEQ ID NO: 247514 - DNA, 13 bp, Artificial Sequence
  Oligonucleotide for detection of SNP TSC0060485
ctacttcgacacg

SEQ ID NO: 247515 - DNA, 13 bp, Artificial Sequence
  Oligonucleotide for detection of SNP TSC0060485
ttattttgatatg

SEQ ID NO: 247516 - DNA, 13 bp, Artificial Sequence
  Oligonucleotide for detection of SNP TSC0060485
catatcaaaataa

SEQ ID NO: 247517 - DNA, 13 bp, Artificial Sequence
  Oligonucleotide for detection of SNP TSC0060485
ttattttgatacg

SEQ ID NO: 247518 - DNA, 13 bp, Artificial Sequence
  Oligonucleotide for detection of SNP TSC0060485
cgtatcaaaataa

SEQ ID NO: 247519 - DNA, 13 bp, Artificial Sequence
  Oligonucleotide for detection of SNP TSC0060485
ttatttcgatatg

SEQ ID NO: 247520 - DNA, 13 bp, Artificial Sequence
  Oligonucleotide for detection of SNP TSC0060485
catatcgaaataa

SEQ ID NO: 247521 - DNA, 13 bp, Artificial Sequence
  Oligonucleotide for detection of SNP TSC0060485
ttatttcgatacg

SEQ ID NO: 247522 - DNA, 13 bp, Artificial Sequence
  Oligonucleotide for detection of SNP TSC0060485
cgtatcgaaataa

SEQ ID NO: 247523 - DNA, 13 bp, Artificial Sequence
  Oligonucleotide for detection of SNP TSC0060486
ggttttttgtata

SEQ ID NO: 247524 - DNA, 13 bp, Artificial Sequence
  Oligonucleotide for detection of SNP TSC0060486
tatacaaaaaacc

SEQ ID NO: 247525 - DNA, 13 bp, Artificial Sequence
  Oligonucleotide for detection of SNP TSC0060486
ggttttgtgtata

SEQ ID NO: 247526 - DNA, 13 bp, Artificial Sequence
  Oligonucleotide for detection of SNP TSC0060486
tatacacaaaacc

SEQ ID NO: 247527 - DNA, 13 bp, Artificial Sequence
  Oligonucleotide for detection of SNP TSC0060486
ggtttcgtgtata

SEQ ID NO: 247528 - DNA, 13 bp, Artificial Sequence
  Oligonucleotide for detection of SNP TSC0060486
tatacacgaaacc

SEQ ID NO: 247529 - DNA, 13 bp, Artificial Sequence
  Oligonucleotide for detection of SNP TSC0060486
tgtgtagggagty

SEQ ID NO: 247530 - DNA, 13 bp, Artificial Sequence
  Oligonucleotide for detection of SNP TSC0060486
ractccctacaca

SEQ ID NO: 247531 - DNA, 13 bp, Artificial Sequence
  Oligonucleotide for detection of SNP TSC0060486
tgtgtatggagty

SEQ ID NO: 247532 - DNA, 13 bp, Artificial Sequence
  Oligonucleotide for detection of SNP TSC0060486
ractccatacaca

SEQ ID NO: 247533 - DNA, 13 bp, Artificial Sequence
  Oligonucleotide for detection of SNP TSC0060486
tgtgtacggagty

SEQ ID NO: 247534 - DNA, 13 bp, Artificial Sequence
  Oligonucleotide for detection of SNP TSC0060486
ractccgtacaca

SEQ ID NO: 247535 - DNA, 13 bp, Artificial Sequence
  Oligonucleotide for detection of SNP TSC0060489
ataggtaatgtgg

SEQ ID NO: 247536 - DNA, 13 bp, Artificial Sequence
  Oligonucleotide for detection of SNP TSC0060489
ccacattacctat

SEQ ID NO: 247537 - DNA, 13 bp, Artificial Sequence
  Oligonucleotide for detection of SNP TSC0060489
ataggttatgtgg

SEQ ID NO: 247538 - DNA, 13 bp, Artificial Sequence
  Oligonucleotide for detection of SNP TSC0060489
ccacataacctat

SEQ ID NO: 247539 - DNA, 13 bp, Artificial Sequence
  Oligonucleotide for detection of SNP TSC0060489
ataggtgatgtgg

SEQ ID NO: 247540 - DNA, 13 bp, Artificial Sequence
  Oligonucleotide for detection of SNP TSC0060489
ccacatcacctat

SEQ ID NO: 247541 - DNA, 13 bp, Artificial Sequence
  Oligonucleotide for detection of SNP TSC0060489
ttatataatttat

SEQ ID NO: 247542 - DNA, 13 bp, Artificial Sequence
  Oligonucleotide for detection of SNP TSC0060489
ataaattatataa

SEQ ID NO: 247543 - DNA, 13 bp, Artificial Sequence
  Oligonucleotide for detection of SNP TSC0060490
tagtatagttagt

SEQ ID NO: 247544 - DNA, 13 bp, Artificial Sequence
  Oligonucleotide for detection of SNP TSC0060490
actaactatacta

SEQ ID NO: 247545 - DNA, 13 bp, Artificial Sequence
  Oligonucleotide for detection of SNP TSC0060490
tagtattgttagt

SEQ ID NO: 247546 - DNA, 13 bp, Artificial Sequence
  Oligonucleotide for detection of SNP TSC0060490
actaacaatacta

SEQ ID NO: 247547 - DNA, 13 bp, Artificial Sequence
  Oligonucleotide for detection of SNP TSC0060490
tagtatcgttagt

SEQ ID NO: 247548 - DNA, 13 bp, Artificial Sequence
  Oligonucleotide for detection of SNP TSC0060490
actaacgatacta

SEQ ID NO: 247549 - DNA, 13 bp, Artificial Sequence
  Oligonucleotide for detection of SNP TSC0060490
attaatagtatta

SEQ ID NO: 247550 - DNA, 13 bp, Artificial Sequence
  Oligonucleotide for detection of SNP TSC0060490
taatactattaat

SEQ ID NO: 247551 - DNA, 13 bp, Artificial Sequence
  Oligonucleotide for detection of SNP TSC0060492
attttaagttaty

SEQ ID NO: 247552 - DNA, 13 bp, Artificial Sequence
  Oligonucleotide for detection of SNP TSC0060492
rataacttaaaat

SEQ ID NO: 247553 - DNA, 13 bp, Artificial Sequence
  Oligonucleotide for detection of SNP TSC0060493
gggaagagggtta

SEQ ID NO: 247554 - DNA, 13 bp, Artificial Sequence
  Oligonucleotide for detection of SNP TSC0060493
taaccctcttccc

SEQ ID NO: 247555 - DNA, 13 bp, Artificial Sequence
  Oligonucleotide for detection of SNP TSC0060493
gggaagggggtta

SEQ ID NO: 247556 - DNA, 13 bp, Artificial Sequence
  Oligonucleotide for detection of SNP TSC0060493
taacccccttccc

SEQ ID NO: 247557 - DNA, 13 bp, Artificial Sequence
  Oligonucleotide for detection of SNP TSC0060495
gtttttgggagat

SEQ ID NO: 247558 - DNA, 13 bp, Artificial Sequence
  Oligonucleotide for detection of SNP TSC0060495
atctcccaaaaac

SEQ ID NO: 247559 - DNA, 13 bp, Artificial Sequence
  Oligonucleotide for detection of SNP TSC0060495
gtttttaggagat

SEQ ID NO: 247560 - DNA, 13 bp, Artificial Sequence
  Oligonucleotide for detection of SNP TSC0060495
atctcctaaaaac

SEQ ID NO: 247561 - DNA, 13 bp, Artificial Sequence
  Oligonucleotide for detection of SNP TSC0060496
tattgaatttatt

SEQ ID NO: 247562 - DNA, 13 bp, Artificial Sequence
  Oligonucleotide for detection of SNP TSC0060496
aataaattcaata

SEQ ID NO: 247563 - DNA, 13 bp, Artificial Sequence
  Oligonucleotide for detection of SNP TSC0060496
tattgagtttatt

SEQ ID NO: 247564 - DNA, 13 bp, Artificial Sequence
  Oligonucleotide for detection of SNP TSC0060496
aataaactcaata

SEQ ID NO: 247565 - DNA, 13 bp, Artificial Sequence
  Oligonucleotide for detection of SNP TSC0060497
tttagggaagagy

SEQ ID NO: 247566 - DNA, 13 bp, Artificial Sequence
  Oligonucleotide for detection of SNP TSC0060497
rctcttccctaaa

SEQ ID NO: 247567 - DNA, 13 bp, Artificial Sequence
  Oligonucleotide for detection of SNP TSC0060497
tttaggaaagagy

SEQ ID NO: 247568 - DNA, 13 bp, Artificial Sequence
  Oligonucleotide for detection of SNP TSC0060497
rctctttcctaaa

SEQ ID NO: 247569 - DNA, 13 bp, Artificial Sequence
  Oligonucleotide for detection of SNP TSC0060498
gattattggttty

SEQ ID NO: 247570 - DNA, 13 bp, Artificial Sequence
  Oligonucleotide for detection of SNP TSC0060498
raaaccaataatc

SEQ ID NO: 247571 - DNA, 13 bp, Artificial Sequence
  Oligonucleotide for detection of SNP TSC0060498
gattatcggttty

SEQ ID NO: 247572 - DNA, 13 bp, Artificial Sequence
  Oligonucleotide for detection of SNP TSC0060498
raaaccgataatc

SEQ ID NO: 247573 - DNA, 13 bp, Artificial Sequence
  Oligonucleotide for detection of SNP TSC0060498
ggagttggtggty

SEQ ID NO: 247574 - DNA, 13 bp, Artificial Sequence
  Oligonucleotide for detection of SNP TSC0060498
raccaccaactcc

SEQ ID NO: 247575 - DNA, 13 bp, Artificial Sequence
  Oligonucleotide for detection of SNP TSC0060498
ggagttagtggty

SEQ ID NO: 247576 - DNA, 13 bp, Artificial Sequence
  Oligonucleotide for detection of SNP TSC0060498
raccactaactcc

SEQ ID NO: 247577 - DNA, 13 bp, Artificial Sequence
  Oligonucleotide for detection of SNP TSC0060498
ggagtcggtggty

SEQ ID NO: 247578 - DNA, 13 bp, Artificial Sequence
  Oligonucleotide for detection of SNP TSC0060498
raccaccgactcc

SEQ ID NO: 247579 - DNA, 13 bp, Artificial Sequence
  Oligonucleotide for detection of SNP TSC0060500
atttgaagttata

SEQ ID NO: 247580 - DNA, 13 bp, Artificial Sequence
  Oligonucleotide for detection of SNP TSC0060500
tataacttcaaat

SEQ ID NO: 247581 - DNA, 13 bp, Artificial Sequence
  Oligonucleotide for detection of SNP TSC0060500
atttgatgttata

SEQ ID NO: 247582 - DNA, 13 bp, Artificial Sequence
  Oligonucleotide for detection of SNP TSC0060500
tataacatcaaat

SEQ ID NO: 247583 - DNA, 13 bp, Artificial Sequence
  Oligonucleotide for detection of SNP TSC0060500
tgtgattttagat

SEQ ID NO: 247584 - DNA, 13 bp, Artificial Sequence
  Oligonucleotide for detection of SNP TSC0060500
atctaaaatcaca

SEQ ID NO: 247585 - DNA, 13 bp, Artificial Sequence
  Oligonucleotide for detection of SNP TSC0060500
tgtgatattagat

SEQ ID NO: 247586 - DNA, 13 bp, Artificial Sequence
  Oligonucleotide for detection of SNP TSC0060500
atctaatatcaca

SEQ ID NO: 247587 - DNA, 13 bp, Artificial Sequence
  Oligonucleotide for detection of SNP TSC0060502
agtttaagaggty

SEQ ID NO: 247588 - DNA, 13 bp, Artificial Sequence
  Oligonucleotide for detection of SNP TSC0060502
racctcttaaact

SEQ ID NO: 247589 - DNA, 13 bp, Artificial Sequence
  Oligonucleotide for detection of SNP TSC0060502
agtttaggaggty

SEQ ID NO: 247590 - DNA, 13 bp, Artificial Sequence
  Oligonucleotide for detection of SNP TSC0060502
racctcctaaact

SEQ ID NO: 247591 - DNA, 13 bp, Artificial Sequence
  Oligonucleotide for detection of SNP TSC0060503
tgggtttaagtta

SEQ ID NO: 247592 - DNA, 13 bp, Artificial Sequence
  Oligonucleotide for detection of SNP TSC0060503
taacttaaaccca

SEQ ID NO: 247593 - DNA, 13 bp, Artificial Sequence
  Oligonucleotide for detection of SNP TSC0060503
tgggttgaagtta

SEQ ID NO: 247594 - DNA, 13 bp, Artificial Sequence
  Oligonucleotide for detection of SNP TSC0060503
taacttcaaccca

SEQ ID NO: 247595 - DNA, 13 bp, Artificial Sequence
  Oligonucleotide for detection of SNP TSC0060503
tggtttgagttta

SEQ ID NO: 247596 - DNA, 13 bp, Artificial Sequence
  Oligonucleotide for detection of SNP TSC0060503
taaactcaaacca

SEQ ID NO: 247597 - DNA, 13 bp, Artificial Sequence
  Oligonucleotide for detection of SNP TSC0060503
tggttttagttta

SEQ ID NO: 247598 - DNA, 13 bp, Artificial Sequence
  Oligonucleotide for detection of SNP TSC0060503
taaactaaaacca

SEQ ID NO: 247599 - DNA, 13 bp, Artificial Sequence
  Oligonucleotide for detection of SNP TSC0060506
tgttggattagga

SEQ ID NO: 247600 - DNA, 13 bp, Artificial Sequence
  Oligonucleotide for detection of SNP TSC0060506
tcctaatccaaca

SEQ ID NO: 247601 - DNA, 13 bp, Artificial Sequence
  Oligonucleotide for detection of SNP TSC0060506
tgttgggttagga

SEQ ID NO: 247602 - DNA, 13 bp, Artificial Sequence
  Oligonucleotide for detection of SNP TSC0060506
tcctaacccaaca

SEQ ID NO: 247603 - DNA, 13 bp, Artificial Sequence
  Oligonucleotide for detection of SNP TSC0060507
agatagtgtaggt

SEQ ID NO: 247604 - DNA, 13 bp, Artificial Sequence
  Oligonucleotide for detection of SNP TSC0060507
acctacactatct

SEQ ID NO: 247605 - DNA, 13 bp, Artificial Sequence
  Oligonucleotide for detection of SNP TSC0060507
agatagcgtaggt

SEQ ID NO: 247606 - DNA, 13 bp, Artificial Sequence
  Oligonucleotide for detection of SNP TSC0060507
acctacgctatct

SEQ ID NO: 247607 - DNA, 13 bp, Artificial Sequence
  Oligonucleotide for detection of SNP TSC0060507
atttgtgttgttt

SEQ ID NO: 247608 - DNA, 13 bp, Artificial Sequence
  Oligonucleotide for detection of SNP TSC0060507
aaacaacacaaat

SEQ ID NO: 247609 - DNA, 13 bp, Artificial Sequence
  Oligonucleotide for detection of SNP TSC0060507
atttgtattgttt

SEQ ID NO: 247610 - DNA, 13 bp, Artificial Sequence
  Oligonucleotide for detection of SNP TSC0060507
aaacaatacaaat

SEQ ID NO: 247611 - DNA, 13 bp, Artificial Sequence
  Oligonucleotide for detection of SNP TSC0060507
atttgcgttgttt

SEQ ID NO: 247612 - DNA, 13 bp, Artificial Sequence
  Oligonucleotide for detection of SNP TSC0060507
aaacaacgcaaat

SEQ ID NO: 247613 - DNA, 13 bp, Artificial Sequence
  Oligonucleotide for detection of SNP TSC0060513
tttttaaggaagy

SEQ ID NO: 247614 - DNA, 13 bp, Artificial Sequence
  Oligonucleotide for detection of SNP TSC0060513
rcttccttaaaaa

SEQ ID NO: 247615 - DNA, 13 bp, Artificial Sequence
  Oligonucleotide for detection of SNP TSC0060513
tttttagggaagy

SEQ ID NO: 247616 - DNA, 13 bp, Artificial Sequence
  Oligonucleotide for detection of SNP TSC0060513
rcttccctaaaaa

SEQ ID NO: 247617 - DNA, 13 bp, Artificial Sequence
  Oligonucleotide for detection of SNP TSC0060514
ttgtattgttatt

SEQ ID NO: 247618 - DNA, 13 bp, Artificial Sequence
  Oligonucleotide for detection of SNP TSC0060514
aataacaatacaa

SEQ ID NO: 247619 - DNA, 13 bp, Artificial Sequence
  Oligonucleotide for detection of SNP TSC0060514
ttgtatcgttatt

SEQ ID NO: 247620 - DNA, 13 bp, Artificial Sequence
  Oligonucleotide for detection of SNP TSC0060514
aataacgatacaa

SEQ ID NO: 247621 - DNA, 13 bp, Artificial Sequence
  Oligonucleotide for detection of SNP TSC0060514
agtgatgatatag

SEQ ID NO: 247622 - DNA, 13 bp, Artificial Sequence
  Oligonucleotide for detection of SNP TSC0060514
ctatatcatcact

SEQ ID NO: 247623 - DNA, 13 bp, Artificial Sequence
  Oligonucleotide for detection of SNP TSC0060514
agtgataatatag

SEQ ID NO: 247624 - DNA, 13 bp, Artificial Sequence
  Oligonucleotide for detection of SNP TSC0060514
ctatattatcact

SEQ ID NO: 247625 - DNA, 13 bp, Artificial Sequence
  Oligonucleotide for detection of SNP TSC0060514
agtgacgatatag

SEQ ID NO: 247626 - DNA, 13 bp, Artificial Sequence
  Oligonucleotide for detection of SNP TSC0060514
ctatatcgtcact

SEQ ID NO: 247627 - DNA, 13 bp, Artificial Sequence
  Oligonucleotide for detection of SNP TSC0060516
tgtttatgttttt

SEQ ID NO: 247628 - DNA, 13 bp, Artificial Sequence
  Oligonucleotide for detection of SNP TSC0060516
aaaaacataaaca

SEQ ID NO: 247629 - DNA, 13 bp, Artificial Sequence
  Oligonucleotide for detection of SNP TSC0060516
tgtttacgttttt

SEQ ID NO: 247630 - DNA, 13 bp, Artificial Sequence
  Oligonucleotide for detection of SNP TSC0060516
aaaaacgtaaaca

SEQ ID NO: 247631 - DNA, 13 bp, Artificial Sequence
  Oligonucleotide for detection of SNP TSC0060516
agaaatgtgggta

SEQ ID NO: 247632 - DNA, 13 bp, Artificial Sequence
  Oligonucleotide for detection of SNP TSC0060516
tacccacatttct

SEQ ID NO: 247633 - DNA, 13 bp, Artificial Sequence
  Oligonucleotide for detection of SNP TSC0060516
agaaatatgggta

SEQ ID NO: 247634 - DNA, 13 bp, Artificial Sequence
  Oligonucleotide for detection of SNP TSC0060516
tacccatatttct

SEQ ID NO: 247635 - DNA, 13 bp, Artificial Sequence
  Oligonucleotide for detection of SNP TSC0060516
agaaacgtgggta

SEQ ID NO: 247636 - DNA, 13 bp, Artificial Sequence
  Oligonucleotide for detection of SNP TSC0060516
tacccacgtttct

SEQ ID NO: 247637 - DNA, 13 bp, Artificial Sequence
  Oligonucleotide for detection of SNP TSC0060517
ttatttagtatga

SEQ ID NO: 247638 - DNA, 13 bp, Artificial Sequence
  Oligonucleotide for detection of SNP TSC0060517
tcatactaaataa

SEQ ID NO: 247639 - DNA, 13 bp, Artificial Sequence
  Oligonucleotide for detection of SNP TSC0060517
ttattttgtatga

SEQ ID NO: 247640 - DNA, 13 bp, Artificial Sequence
  Oligonucleotide for detection of SNP TSC0060517
tcatacaaaataa

SEQ ID NO: 247641 - DNA, 13 bp, Artificial Sequence
  Oligonucleotide for detection of SNP TSC0060517
ttatgttgaataa

SEQ ID NO: 247642 - DNA, 13 bp, Artificial Sequence
  Oligonucleotide for detection of SNP TSC0060517
ttattcaacataa

SEQ ID NO: 247643 - DNA, 13 bp, Artificial Sequence
  Oligonucleotide for detection of SNP TSC0060517
ttatgtagaataa

SEQ ID NO: 247644 - DNA, 13 bp, Artificial Sequence
  Oligonucleotide for detection of SNP TSC0060517
ttattctacataa

SEQ ID NO: 247645 - DNA, 13 bp, Artificial Sequence
  Oligonucleotide for detection of SNP TSC0060518
aagttgttagaag

SEQ ID NO: 247646 - DNA, 13 bp, Artificial Sequence
  Oligonucleotide for detection of SNP TSC0060518
cttctaacaactt

SEQ ID NO: 247647 - DNA, 13 bp, Artificial Sequence
  Oligonucleotide for detection of SNP TSC0060518
aagttggtagaag

SEQ ID NO: 247648 - DNA, 13 bp, Artificial Sequence
  Oligonucleotide for detection of SNP TSC0060518
cttctaccaactt

SEQ ID NO: 247649 - DNA, 13 bp, Artificial Sequence
  Oligonucleotide for detection of SNP TSC0060522
aatataattaaty

SEQ ID NO: 247650 - DNA, 13 bp, Artificial Sequence
  Oligonucleotide for detection of SNP TSC0060522
rattaattatatt

SEQ ID NO: 247651 - DNA, 13 bp, Artificial Sequence
  Oligonucleotide for detection of SNP TSC0060524
ttgtgtatatttt

SEQ ID NO: 247652 - DNA, 13 bp, Artificial Sequence
  Oligonucleotide for detection of SNP TSC0060524
aaaatatacacaa

SEQ ID NO: 247653 - DNA, 13 bp, Artificial Sequence
  Oligonucleotide for detection of SNP TSC0060524
ttgtgtgtatttt

SEQ ID NO: 247654 - DNA, 13 bp, Artificial Sequence
  Oligonucleotide for detection of SNP TSC0060524
aaaatacacacaa

SEQ ID NO: 247655 - DNA, 13 bp, Artificial Sequence
  Oligonucleotide for detection of SNP TSC0060525
gatttagtggaat

SEQ ID NO: 247656 - DNA, 13 bp, Artificial Sequence
  Oligonucleotide for detection of SNP TSC0060525
attccactaaatc

SEQ ID NO: 247657 - DNA, 13 bp, Artificial Sequence
  Oligonucleotide for detection of SNP TSC0060525
gatttaatggaat

SEQ ID NO: 247658 - DNA, 13 bp, Artificial Sequence
  Oligonucleotide for detection of SNP TSC0060525
attccattaaatc

SEQ ID NO: 247659 - DNA, 13 bp, Artificial Sequence
  Oligonucleotide for detection of SNP TSC0060526
tttagtaaattta

SEQ ID NO: 247660 - DNA, 13 bp, Artificial Sequence
  Oligonucleotide for detection of SNP TSC0060526
taaatttactaaa

SEQ ID NO: 247661 - DNA, 13 bp, Artificial Sequence
  Oligonucleotide for detection of SNP TSC0060526
tggatttgttaaa

SEQ ID NO: 247662 - DNA, 13 bp, Artificial Sequence
  Oligonucleotide for detection of SNP TSC0060526
tttaacaaatcca

SEQ ID NO: 247663 - DNA, 13 bp, Artificial Sequence
  Oligonucleotide for detection of SNP TSC0060526
tggattagttaaa

SEQ ID NO: 247664 - DNA, 13 bp, Artificial Sequence
  Oligonucleotide for detection of SNP TSC0060526
tttaactaatcca

SEQ ID NO: 247665 - DNA, 13 bp, Artificial Sequence
  Oligonucleotide for detection of SNP TSC0060527
ataaattttgaay

SEQ ID NO: 247666 - DNA, 13 bp, Artificial Sequence
  Oligonucleotide for detection of SNP TSC0060527
rttcaaaatttat

SEQ ID NO: 247667 - DNA, 13 bp, Artificial Sequence
  Oligonucleotide for detection of SNP TSC0060527
ataaatgttgaay

SEQ ID NO: 247668 - DNA, 13 bp, Artificial Sequence
  Oligonucleotide for detection of SNP TSC0060527
rttcaacatttat

SEQ ID NO: 247669 - DNA, 13 bp, Artificial Sequence
  Oligonucleotide for detection of SNP TSC0060527
gtttaaaatttat

SEQ ID NO: 247670 - DNA, 13 bp, Artificial Sequence
  Oligonucleotide for detection of SNP TSC0060527
ataaattttaaac

SEQ ID NO: 247671 - DNA, 13 bp, Artificial Sequence
  Oligonucleotide for detection of SNP TSC0060527
gtttaatatttat

SEQ ID NO: 247672 - DNA, 13 bp, Artificial Sequence
  Oligonucleotide for detection of SNP TSC0060527
ataaatattaaac

SEQ ID NO: 247673 - DNA, 13 bp, Artificial Sequence
  Oligonucleotide for detection of SNP TSC0060534
atttgagtattta

SEQ ID NO: 247674 - DNA, 13 bp, Artificial Sequence
  Oligonucleotide for detection of SNP TSC0060534
taaatactcaaat

SEQ ID NO: 247675 - DNA, 13 bp, Artificial Sequence
  Oligonucleotide for detection of SNP TSC0060534
atttgaatattta

SEQ ID NO: 247676 - DNA, 13 bp, Artificial Sequence
  Oligonucleotide for detection of SNP TSC0060534
taaatattcaaat

SEQ ID NO: 247677 - DNA, 13 bp, Artificial Sequence
  Oligonucleotide for detection of SNP TSC0060535
atattgtgttata

SEQ ID NO: 247678 - DNA, 13 bp, Artificial Sequence
  Oligonucleotide for detection of SNP TSC0060535
tataacacaatat

SEQ ID NO: 247679 - DNA, 13 bp, Artificial Sequence
  Oligonucleotide for detection of SNP TSC0060535
atattgggttata

SEQ ID NO: 247680 - DNA, 13 bp, Artificial Sequence
  Oligonucleotide for detection of SNP TSC0060535
tataacccaatat

SEQ ID NO: 247681 - DNA, 13 bp, Artificial Sequence
  Oligonucleotide for detection of SNP TSC0060535
tatggtataatgt

SEQ ID NO: 247682 - DNA, 13 bp, Artificial Sequence
  Oligonucleotide for detection of SNP TSC0060535
acattataccata

SEQ ID NO: 247683 - DNA, 13 bp, Artificial Sequence
  Oligonucleotide for detection of SNP TSC0060535
tatggtttaatgt

SEQ ID NO: 247684 - DNA, 13 bp, Artificial Sequence
  Oligonucleotide for detection of SNP TSC0060535
acattaaaccata

SEQ ID NO: 247685 - DNA, 13 bp, Artificial Sequence
  Oligonucleotide for detection of SNP TSC0060536
ttgttatgattty

SEQ ID NO: 247686 - DNA, 13 bp, Artificial Sequence
  Oligonucleotide for detection of SNP TSC0060536
raaatcataacaa

SEQ ID NO: 247687 - DNA, 13 bp, Artificial Sequence
  Oligonucleotide for detection of SNP TSC0060536
ttgttacgattty

SEQ ID NO: 247688 - DNA, 13 bp, Artificial Sequence
  Oligonucleotide for detection of SNP TSC0060536
raaatcgtaacaa

SEQ ID NO: 247689 - DNA, 13 bp, Artificial Sequence
  Oligonucleotide for detection of SNP TSC0060536
gaagttgtgatag

SEQ ID NO: 247690 - DNA, 13 bp, Artificial Sequence
  Oligonucleotide for detection of SNP TSC0060536
ctatcacaacttc

SEQ ID NO: 247691 - DNA, 13 bp, Artificial Sequence
  Oligonucleotide for detection of SNP TSC0060536
gaagttatgatag

SEQ ID NO: 247692 - DNA, 13 bp, Artificial Sequence
  Oligonucleotide for detection of SNP TSC0060536
ctatcataacttc

SEQ ID NO: 247693 - DNA, 13 bp, Artificial Sequence
  Oligonucleotide for detection of SNP TSC0060536
gaagtcgtgatag

SEQ ID NO: 247694 - DNA, 13 bp, Artificial Sequence
  Oligonucleotide for detection of SNP TSC0060536
ctatcacgacttc

SEQ ID NO: 247695 - DNA, 13 bp, Artificial Sequence
  Oligonucleotide for detection of SNP TSC0060537
tataaaatagtta

SEQ ID NO: 247696 - DNA, 13 bp, Artificial Sequence
  Oligonucleotide for detection of SNP TSC0060537
taactattttata

SEQ ID NO: 247697 - DNA, 13 bp, Artificial Sequence
  Oligonucleotide for detection of SNP TSC0060538
ttttttagatgta

SEQ ID NO: 247698 - DNA, 13 bp, Artificial Sequence
  Oligonucleotide for detection of SNP TSC0060538
tacatctaaaaaa

SEQ ID NO: 247699 - DNA, 13 bp, Artificial Sequence
  Oligonucleotide for detection of SNP TSC0060538
ttttttagacgta

SEQ ID NO: 247700 - DNA, 13 bp, Artificial Sequence
  Oligonucleotide for detection of SNP TSC0060538
tacgtctaaaaaa

SEQ ID NO: 247701 - DNA, 13 bp, Artificial Sequence
  Oligonucleotide for detection of SNP TSC0060538
tttttttgacgta

SEQ ID NO: 247702 - DNA, 13 bp, Artificial Sequence
  Oligonucleotide for detection of SNP TSC0060538
tacgtcaaaaaaa

SEQ ID NO: 247703 - DNA, 13 bp, Artificial Sequence
  Oligonucleotide for detection of SNP TSC0060538
ttttttcgacgta

SEQ ID NO: 247704 - DNA, 13 bp, Artificial Sequence
  Oligonucleotide for detection of SNP TSC0060538
tacgtcgaaaaaa

SEQ ID NO: 247705 - DNA, 13 bp, Artificial Sequence
  Oligonucleotide for detection of SNP TSC0060538
tatgtttgaagaa

SEQ ID NO: 247706 - DNA, 13 bp, Artificial Sequence
  Oligonucleotide for detection of SNP TSC0060538
ttcttcaaacata

SEQ ID NO: 247707 - DNA, 13 bp, Artificial Sequence
  Oligonucleotide for detection of SNP TSC0060538
tatgttggaagaa

SEQ ID NO: 247708 - DNA, 13 bp, Artificial Sequence
  Oligonucleotide for detection of SNP TSC0060538
ttcttccaacata

SEQ ID NO: 247709 - DNA, 13 bp, Artificial Sequence
  Oligonucleotide for detection of SNP TSC0060538
tacgtttgaagaa

SEQ ID NO: 247710 - DNA, 13 bp, Artificial Sequence
  Oligonucleotide for detection of SNP TSC0060538
ttcttcaaacgta

SEQ ID NO: 247711 - DNA, 13 bp, Artificial Sequence
  Oligonucleotide for detection of SNP TSC0060538
tacgttggaagaa

SEQ ID NO: 247712 - DNA, 13 bp, Artificial Sequence
  Oligonucleotide for detection of SNP TSC0060538
ttcttccaacgta

SEQ ID NO: 247713 - DNA, 13 bp, Artificial Sequence
  Oligonucleotide for detection of SNP TSC0060538
tatgtcggaagaa

SEQ ID NO: 247714 - DNA, 13 bp, Artificial Sequence
  Oligonucleotide for detection of SNP TSC0060538
ttcttccgacata

SEQ ID NO: 247715 - DNA, 13 bp, Artificial Sequence
  Oligonucleotide for detection of SNP TSC0060538
tacgtcggaagaa

SEQ ID NO: 247716 - DNA, 13 bp, Artificial Sequence
  Oligonucleotide for detection of SNP TSC0060538
ttcttccgacgta

SEQ ID NO: 247717 - DNA, 13 bp, Artificial Sequence
  Oligonucleotide for detection of SNP TSC0060544
ttatttttaaaat

SEQ ID NO: 247718 - DNA, 13 bp, Artificial Sequence
  Oligonucleotide for detection of SNP TSC0060544
attttaaaaataa

SEQ ID NO: 247719 - DNA, 13 bp, Artificial Sequence
  Oligonucleotide for detection of SNP TSC0060544
ttatttgtaaaat

SEQ ID NO: 247720 - DNA, 13 bp, Artificial Sequence
  Oligonucleotide for detection of SNP TSC0060544
attttacaaataa

SEQ ID NO: 247721 - DNA, 13 bp, Artificial Sequence
  Oligonucleotide for detection of SNP TSC0060544
attttagaggtgg

SEQ ID NO: 247722 - DNA, 13 bp, Artificial Sequence
  Oligonucleotide for detection of SNP TSC0060544
ccacctctaaaat

SEQ ID NO: 247723 - DNA, 13 bp, Artificial Sequence
  Oligonucleotide for detection of SNP TSC0060544
attttataggtgg

SEQ ID NO: 247724 - DNA, 13 bp, Artificial Sequence
  Oligonucleotide for detection of SNP TSC0060544
ccacctataaaat

SEQ ID NO: 247725 - DNA, 13 bp, Artificial Sequence
  Oligonucleotide for detection of SNP TSC0060545
ggaattatatttg

SEQ ID NO: 247726 - DNA, 13 bp, Artificial Sequence
  Oligonucleotide for detection of SNP TSC0060545
caaatataattcc

SEQ ID NO: 247727 - DNA, 13 bp, Artificial Sequence
  Oligonucleotide for detection of SNP TSC0060545
ggaattgtatttg

SEQ ID NO: 247728 - DNA, 13 bp, Artificial Sequence
  Oligonucleotide for detection of SNP TSC0060545
caaatacaattcc

SEQ ID NO: 247729 - DNA, 13 bp, Artificial Sequence
  Oligonucleotide for detection of SNP TSC0060545
ggaatcgtatttg

SEQ ID NO: 247730 - DNA, 13 bp, Artificial Sequence
  Oligonucleotide for detection of SNP TSC0060545
caaatacgattcc

SEQ ID NO: 247731 - DNA, 13 bp, Artificial Sequence
  Oligonucleotide for detection of SNP TSC0060545
taagtatgattty

SEQ ID NO: 247732 - DNA, 13 bp, Artificial Sequence
  Oligonucleotide for detection of SNP TSC0060545
raaatcatactta

SEQ ID NO: 247733 - DNA, 13 bp, Artificial Sequence
  Oligonucleotide for detection of SNP TSC0060545
taagtacgattty

SEQ ID NO: 247734 - DNA, 13 bp, Artificial Sequence
  Oligonucleotide for detection of SNP TSC0060545
raaatcgtactta

SEQ ID NO: 247735 - DNA, 13 bp, Artificial Sequence
  Oligonucleotide for detection of SNP TSC0060546
aagaaatgattta

SEQ ID NO: 247736 - DNA, 13 bp, Artificial Sequence
  Oligonucleotide for detection of SNP TSC0060546
taaatcatttctt

SEQ ID NO: 247737 - DNA, 13 bp, Artificial Sequence
  Oligonucleotide for detection of SNP TSC0060546
taagttatttttt

SEQ ID NO: 247738 - DNA, 13 bp, Artificial Sequence
  Oligonucleotide for detection of SNP TSC0060546
aaaaaataactta

SEQ ID NO: 247739 - DNA, 13 bp, Artificial Sequence
  Oligonucleotide for detection of SNP TSC0060549
aatttagatttgy

SEQ ID NO: 247740 - DNA, 13 bp, Artificial Sequence
  Oligonucleotide for detection of SNP TSC0060549
rcaaatctaaatt

SEQ ID NO: 247741 - DNA, 13 bp, Artificial Sequence
  Oligonucleotide for detection of SNP TSC0060549
aatttaaatttgy

SEQ ID NO: 247742 - DNA, 13 bp, Artificial Sequence
  Oligonucleotide for detection of SNP TSC0060549
rcaaatttaaatt

SEQ ID NO: 247743 - DNA, 13 bp, Artificial Sequence
  Oligonucleotide for detection of SNP TSC0060550
tggttaaggtaga

SEQ ID NO: 247744 - DNA, 13 bp, Artificial Sequence
  Oligonucleotide for detection of SNP TSC0060550
tctaccttaacca

SEQ ID NO: 247745 - DNA, 13 bp, Artificial Sequence
  Oligonucleotide for detection of SNP TSC0060550
tggttagggtaga

SEQ ID NO: 247746 - DNA, 13 bp, Artificial Sequence
  Oligonucleotide for detection of SNP TSC0060550
tctaccctaacca

SEQ ID NO: 247747 - DNA, 13 bp, Artificial Sequence
  Oligonucleotide for detection of SNP TSC0060551
taatagggattaa

SEQ ID NO: 247748 - DNA, 13 bp, Artificial Sequence
  Oligonucleotide for detection of SNP TSC0060551
ttaatccctatta

SEQ ID NO: 247749 - DNA, 13 bp, Artificial Sequence
  Oligonucleotide for detection of SNP TSC0060551
taatagagattaa

SEQ ID NO: 247750 - DNA, 13 bp, Artificial Sequence
  Oligonucleotide for detection of SNP TSC0060551
ttaatctctatta

SEQ ID NO: 247751 - DNA, 13 bp, Artificial Sequence
  Oligonucleotide for detection of SNP TSC0060552
tagtataatttta

SEQ ID NO: 247752 - DNA, 13 bp, Artificial Sequence
  Oligonucleotide for detection of SNP TSC0060552
taaaattatacta

SEQ ID NO: 247753 - DNA, 13 bp, Artificial Sequence
  Oligonucleotide for detection of SNP TSC0060552
tagtatgatttta

SEQ ID NO: 247754 - DNA, 13 bp, Artificial Sequence
  Oligonucleotide for detection of SNP TSC0060552
taaaatcatacta

SEQ ID NO: 247755 - DNA, 13 bp, Artificial Sequence
  Oligonucleotide for detection of SNP TSC0060553
tttgataaagtaa

SEQ ID NO: 247756 - DNA, 13 bp, Artificial Sequence
  Oligonucleotide for detection of SNP TSC0060553
ttactttatcaaa

SEQ ID NO: 247757 - DNA, 13 bp, Artificial Sequence
  Oligonucleotide for detection of SNP TSC0060553
tttgatgaagtaa

SEQ ID NO: 247758 - DNA, 13 bp, Artificial Sequence
  Oligonucleotide for detection of SNP TSC0060553
ttacttcatcaaa

SEQ ID NO: 247759 - DNA, 13 bp, Artificial Sequence
  Oligonucleotide for detection of SNP TSC0060553
tttgacgaagtaa

SEQ ID NO: 247760 - DNA, 13 bp, Artificial Sequence
  Oligonucleotide for detection of SNP TSC0060553
ttacttcgtcaaa

SEQ ID NO: 247761 - DNA, 13 bp, Artificial Sequence
  Oligonucleotide for detection of SNP TSC0060553
ttgttttgttaga

SEQ ID NO: 247762 - DNA, 13 bp, Artificial Sequence
  Oligonucleotide for detection of SNP TSC0060553
tctaacaaaacaa

SEQ ID NO: 247763 - DNA, 13 bp, Artificial Sequence
  Oligonucleotide for detection of SNP TSC0060553
ttgtttcgttaga

SEQ ID NO: 247764 - DNA, 13 bp, Artificial Sequence
  Oligonucleotide for detection of SNP TSC0060553
tctaacgaaacaa

SEQ ID NO: 247765 - DNA, 13 bp, Artificial Sequence
  Oligonucleotide for detection of SNP TSC0060555
ttttattttgaty

SEQ ID NO: 247766 - DNA, 13 bp, Artificial Sequence
  Oligonucleotide for detection of SNP TSC0060555
ratcaaaataaaa

SEQ ID NO: 247767 - DNA, 13 bp, Artificial Sequence
  Oligonucleotide for detection of SNP TSC0060555
ttttatgttgaty

SEQ ID NO: 247768 - DNA, 13 bp, Artificial Sequence
  Oligonucleotide for detection of SNP TSC0060555
ratcaacataaaa

SEQ ID NO: 247769 - DNA, 13 bp, Artificial Sequence
  Oligonucleotide for detection of SNP TSC0060555
ggttaggatagag

SEQ ID NO: 247770 - DNA, 13 bp, Artificial Sequence
  Oligonucleotide for detection of SNP TSC0060555
ctctatcctaacc

SEQ ID NO: 247771 - DNA, 13 bp, Artificial Sequence
  Oligonucleotide for detection of SNP TSC0060555
ggttagtatagag

SEQ ID NO: 247772 - DNA, 13 bp, Artificial Sequence
  Oligonucleotide for detection of SNP TSC0060555
ctctatactaacc

SEQ ID NO: 247773 - DNA, 13 bp, Artificial Sequence
  Oligonucleotide for detection of SNP TSC0060556
gttttgaattttt

SEQ ID NO: 247774 - DNA, 13 bp, Artificial Sequence
  Oligonucleotide for detection of SNP TSC0060556
aaaaattcaaaac

SEQ ID NO: 247775 - DNA, 13 bp, Artificial Sequence
  Oligonucleotide for detection of SNP TSC0060556
gttttgtattttt

SEQ ID NO: 247776 - DNA, 13 bp, Artificial Sequence
  Oligonucleotide for detection of SNP TSC0060556
aaaaatacaaaac

SEQ ID NO: 247777 - DNA, 13 bp, Artificial Sequence
  Oligonucleotide for detection of SNP TSC0060556
gtttcgaattttt

SEQ ID NO: 247778 - DNA, 13 bp, Artificial Sequence
  Oligonucleotide for detection of SNP TSC0060556
aaaaattcgaaac

SEQ ID NO: 247779 - DNA, 13 bp, Artificial Sequence
  Oligonucleotide for detection of SNP TSC0060556
gtttcgtattttt

SEQ ID NO: 247780 - DNA, 13 bp, Artificial Sequence
  Oligonucleotide for detection of SNP TSC0060556
aaaaatacgaaac

SEQ ID NO: 247781 - DNA, 13 bp, Artificial Sequence
  Oligonucleotide for detection of SNP TSC0060556
aggagtttgagay

SEQ ID NO: 247782 - DNA, 13 bp, Artificial Sequence
  Oligonucleotide for detection of SNP TSC0060556
rtctcaaactcct

SEQ ID NO: 247783 - DNA, 13 bp, Artificial Sequence
  Oligonucleotide for detection of SNP TSC0060556
aggagtatgagay

SEQ ID NO: 247784 - DNA, 13 bp, Artificial Sequence
  Oligonucleotide for detection of SNP TSC0060556
rtctcatactcct

SEQ ID NO: 247785 - DNA, 13 bp, Artificial Sequence
  Oligonucleotide for detection of SNP TSC0060556
aggagttcgagay

SEQ ID NO: 247786 - DNA, 13 bp, Artificial Sequence
  Oligonucleotide for detection of SNP TSC0060556
rtctcgaactcct

SEQ ID NO: 247787 - DNA, 13 bp, Artificial Sequence
  Oligonucleotide for detection of SNP TSC0060556
aggagtacgagay

SEQ ID NO: 247788 - DNA, 13 bp, Artificial Sequence
  Oligonucleotide for detection of SNP TSC0060556
rtctcgtactcct

SEQ ID NO: 247789 - DNA, 13 bp, Artificial Sequence
  Oligonucleotide for detection of SNP TSC0060557
attaggatggaaa

SEQ ID NO: 247790 - DNA, 13 bp, Artificial Sequence
  Oligonucleotide for detection of SNP TSC0060557
tttccatcctaat

SEQ ID NO: 247791 - DNA, 13 bp, Artificial Sequence
  Oligonucleotide for detection of SNP TSC0060557
attagggtggaaa

SEQ ID NO: 247792 - DNA, 13 bp, Artificial Sequence
  Oligonucleotide for detection of SNP TSC0060557
tttccaccctaat

SEQ ID NO: 247793 - DNA, 13 bp, Artificial Sequence
  Oligonucleotide for detection of SNP TSC0060558
taaagagagagag

SEQ ID NO: 247794 - DNA, 13 bp, Artificial Sequence
  Oligonucleotide for detection of SNP TSC0060558
ctctctctcttta

SEQ ID NO: 247795 - DNA, 13 bp, Artificial Sequence
  Oligonucleotide for detection of SNP TSC0060558
taaagaaagagag

SEQ ID NO: 247796 - DNA, 13 bp, Artificial Sequence
  Oligonucleotide for detection of SNP TSC0060558
ctctctttcttta

SEQ ID NO: 247797 - DNA, 13 bp, Artificial Sequence
  Oligonucleotide for detection of SNP TSC0060561
ggtgtgatagtty

SEQ ID NO: 247798 - DNA, 13 bp, Artificial Sequence
  Oligonucleotide for detection of SNP TSC0060561
raactatcacacc

SEQ ID NO: 247799 - DNA, 13 bp, Artificial Sequence
  Oligonucleotide for detection of SNP TSC0060561
ggtgtggtagtty

SEQ ID NO: 247800 - DNA, 13 bp, Artificial Sequence
  Oligonucleotide for detection of SNP TSC0060561
raactaccacacc

SEQ ID NO: 247801 - DNA, 13 bp, Artificial Sequence
  Oligonucleotide for detection of SNP TSC0060561
ggcgtgatagtty

SEQ ID NO: 247802 - DNA, 13 bp, Artificial Sequence
  Oligonucleotide for detection of SNP TSC0060561
raactatcacgcc

SEQ ID NO: 247803 - DNA, 13 bp, Artificial Sequence
  Oligonucleotide for detection of SNP TSC0060561
ggcgtggtagtty

SEQ ID NO: 247804 - DNA, 13 bp, Artificial Sequence
  Oligonucleotide for detection of SNP TSC0060561
raactaccacgcc

SEQ ID NO: 247805 - DNA, 13 bp, Artificial Sequence
  Oligonucleotide for detection of SNP TSC0060561
ggtgcgatagtty

SEQ ID NO: 247806 - DNA, 13 bp, Artificial Sequence
  Oligonucleotide for detection of SNP TSC0060561
raactatcgcacc

SEQ ID NO: 247807 - DNA, 13 bp, Artificial Sequence
  Oligonucleotide for detection of SNP TSC0060561
ggtgcggtagtty

SEQ ID NO: 247808 - DNA, 13 bp, Artificial Sequence
  Oligonucleotide for detection of SNP TSC0060561
raactaccgcacc

SEQ ID NO: 247809 - DNA, 13 bp, Artificial Sequence
  Oligonucleotide for detection of SNP TSC0060561
ggcgcgatagtty

SEQ ID NO: 247810 - DNA, 13 bp, Artificial Sequence
  Oligonucleotide for detection of SNP TSC0060561
raactatcgcgcc

SEQ ID NO: 247811 - DNA, 13 bp, Artificial Sequence
  Oligonucleotide for detection of SNP TSC0060561
ggcgcggtagtty

SEQ ID NO: 247812 - DNA, 13 bp, Artificial Sequence
  Oligonucleotide for detection of SNP TSC0060561
raactaccgcgcc

SEQ ID NO: 247813 - DNA, 13 bp, Artificial Sequence
  Oligonucleotide for detection of SNP TSC0060564
atttgggtttatt

SEQ ID NO: 247814 - DNA, 13 bp, Artificial Sequence
  Oligonucleotide for detection of SNP TSC0060564
aataaacccaaat

SEQ ID NO: 247815 - DNA, 13 bp, Artificial Sequence
  Oligonucleotide for detection of SNP TSC0060564
atttggatttatt

SEQ ID NO: 247816 - DNA, 13 bp, Artificial Sequence
  Oligonucleotide for detection of SNP TSC0060564
aataaatccaaat

SEQ ID NO: 247817 - DNA, 13 bp, Artificial Sequence
  Oligonucleotide for detection of SNP TSC0060565
aaaaattttgttt

SEQ ID NO: 247818 - DNA, 13 bp, Artificial Sequence
  Oligonucleotide for detection of SNP TSC0060565
aaacaaaattttt

SEQ ID NO: 247819 - DNA, 13 bp, Artificial Sequence
  Oligonucleotide for detection of SNP TSC0060565
aaaaatatcgttt

SEQ ID NO: 247820 - DNA, 13 bp, Artificial Sequence
  Oligonucleotide for detection of SNP TSC0060565
aaacgatattttt

SEQ ID NO: 247821 - DNA, 13 bp, Artificial Sequence
  Oligonucleotide for detection of SNP TSC0060565
aaaaatttcgttt

SEQ ID NO: 247822 - DNA, 13 bp, Artificial Sequence
  Oligonucleotide for detection of SNP TSC0060565
aaacgaaattttt

SEQ ID NO: 247823 - DNA, 13 bp, Artificial Sequence
  Oligonucleotide for detection of SNP TSC0060565
agatggtgttttt

SEQ ID NO: 247824 - DNA, 13 bp, Artificial Sequence
  Oligonucleotide for detection of SNP TSC0060565
aaaaacaccatct

SEQ ID NO: 247825 - DNA, 13 bp, Artificial Sequence
  Oligonucleotide for detection of SNP TSC0060565
agacggtgttttt

SEQ ID NO: 247826 - DNA, 13 bp, Artificial Sequence
  Oligonucleotide for detection of SNP TSC0060565
aaaaacaccgtct

SEQ ID NO: 247827 - DNA, 13 bp, Artificial Sequence
  Oligonucleotide for detection of SNP TSC0060565
agacggggttttt

SEQ ID NO: 247828 - DNA, 13 bp, Artificial Sequence
  Oligonucleotide for detection of SNP TSC0060565
aaaaaccccgtct

SEQ ID NO: 247829 - DNA, 13 bp, Artificial Sequence
  Oligonucleotide for detection of SNP TSC0060567
agttaagtttgga

SEQ ID NO: 247830 - DNA, 13 bp, Artificial Sequence
  Oligonucleotide for detection of SNP TSC0060567
tccaaacttaact

SEQ ID NO: 247831 - DNA, 13 bp, Artificial Sequence
  Oligonucleotide for detection of SNP TSC0060567
agttaaatttgga

SEQ ID NO: 247832 - DNA, 13 bp, Artificial Sequence
  Oligonucleotide for detection of SNP TSC0060567
tccaaatttaact

SEQ ID NO: 247833 - DNA, 13 bp, Artificial Sequence
  Oligonucleotide for detection of SNP TSC0060568
aaagagatataty

SEQ ID NO: 247834 - DNA, 13 bp, Artificial Sequence
  Oligonucleotide for detection of SNP TSC0060568
ratatatctcttt

SEQ ID NO: 247835 - DNA, 13 bp, Artificial Sequence
  Oligonucleotide for detection of SNP TSC0060568
aaagaggtataty

SEQ ID NO: 247836 - DNA, 13 bp, Artificial Sequence
  Oligonucleotide for detection of SNP TSC0060568
ratatacctcttt

SEQ ID NO: 247837 - DNA, 13 bp, Artificial Sequence
  Oligonucleotide for detection of SNP TSC0060569
atataaaaaatag

SEQ ID NO: 247838 - DNA, 13 bp, Artificial Sequence
  Oligonucleotide for detection of SNP TSC0060569
ctattttttatat

SEQ ID NO: 247839 - DNA, 13 bp, Artificial Sequence
  Oligonucleotide for detection of SNP TSC0060569
atataagaaatag

SEQ ID NO: 247840 - DNA, 13 bp, Artificial Sequence
  Oligonucleotide for detection of SNP TSC0060569
ctatttcttatat

SEQ ID NO: 247841 - DNA, 13 bp, Artificial Sequence
  Oligonucleotide for detection of SNP TSC0060571
aatttggggtaaa

SEQ ID NO: 247842 - DNA, 13 bp, Artificial Sequence
  Oligonucleotide for detection of SNP TSC0060571
tttaccccaaatt

SEQ ID NO: 247843 - DNA, 13 bp, Artificial Sequence
  Oligonucleotide for detection of SNP TSC0060571
aatttgaggtaaa

SEQ ID NO: 247844 - DNA, 13 bp, Artificial Sequence
  Oligonucleotide for detection of SNP TSC0060571
tttacctcaaatt

SEQ ID NO: 247845 - DNA, 13 bp, Artificial Sequence
  Oligonucleotide for detection of SNP TSC0060571
aattcggggtaaa

SEQ ID NO: 247846 - DNA, 13 bp, Artificial Sequence
  Oligonucleotide for detection of SNP TSC0060571
tttaccccgaatt

SEQ ID NO: 247847 - DNA, 13 bp, Artificial Sequence
  Oligonucleotide for detection of SNP TSC0060571
aattcgaggtaaa

SEQ ID NO: 247848 - DNA, 13 bp, Artificial Sequence
  Oligonucleotide for detection of SNP TSC0060571
tttacctcgaatt

SEQ ID NO: 247849 - DNA, 13 bp, Artificial Sequence
  Oligonucleotide for detection of SNP TSC0060576
tgattgtggtgat

SEQ ID NO: 247850 - DNA, 13 bp, Artificial Sequence
  Oligonucleotide for detection of SNP TSC0060576
atcaccacaatca

SEQ ID NO: 247851 - DNA, 13 bp, Artificial Sequence
  Oligonucleotide for detection of SNP TSC0060576
tgattgcggtgat

SEQ ID NO: 247852 - DNA, 13 bp, Artificial Sequence
  Oligonucleotide for detection of SNP TSC0060576
atcaccgcaatca

SEQ ID NO: 247853 - DNA, 13 bp, Artificial Sequence
  Oligonucleotide for detection of SNP TSC0060576
attattgtaatta

SEQ ID NO: 247854 - DNA, 13 bp, Artificial Sequence
  Oligonucleotide for detection of SNP TSC0060576
taattacaataat

SEQ ID NO: 247855 - DNA, 13 bp, Artificial Sequence
  Oligonucleotide for detection of SNP TSC0060576
attattataatta

SEQ ID NO: 247856 - DNA, 13 bp, Artificial Sequence
  Oligonucleotide for detection of SNP TSC0060576
taattataataat

SEQ ID NO: 247857 - DNA, 13 bp, Artificial Sequence
  Oligonucleotide for detection of SNP TSC0060576
attatcgtaatta

SEQ ID NO: 247858 - DNA, 13 bp, Artificial Sequence
  Oligonucleotide for detection of SNP TSC0060576
taattacgataat

SEQ ID NO: 247859 - DNA, 13 bp, Artificial Sequence
  Oligonucleotide for detection of SNP TSC0060577
gagagtgttttag

SEQ ID NO: 247860 - DNA, 13 bp, Artificial Sequence
  Oligonucleotide for detection of SNP TSC0060577
ctaaaacactctc

SEQ ID NO: 247861 - DNA, 13 bp, Artificial Sequence
  Oligonucleotide for detection of SNP TSC0060577
gagagtattttag

SEQ ID NO: 247862 - DNA, 13 bp, Artificial Sequence
  Oligonucleotide for detection of SNP TSC0060577
ctaaaatactctc

SEQ ID NO: 247863 - DNA, 13 bp, Artificial Sequence
  Oligonucleotide for detection of SNP TSC0060577
gagagcgttttag

SEQ ID NO: 247864 - DNA, 13 bp, Artificial Sequence
  Oligonucleotide for detection of SNP TSC0060577
ctaaaacgctctc

SEQ ID NO: 247865 - DNA, 13 bp, Artificial Sequence
  Oligonucleotide for detection of SNP TSC0060578
aaagaaatttata

SEQ ID NO: 247866 - DNA, 13 bp, Artificial Sequence
  Oligonucleotide for detection of SNP TSC0060578
tataaatttcttt

SEQ ID NO: 247867 - DNA, 13 bp, Artificial Sequence
  Oligonucleotide for detection of SNP TSC0060578
aaagaattttata

SEQ ID NO: 247868 - DNA, 13 bp, Artificial Sequence
  Oligonucleotide for detection of SNP TSC0060578
tataaaattcttt

SEQ ID NO: 247869 - DNA, 13 bp, Artificial Sequence
  Oligonucleotide for detection of SNP TSC0060578
tatgaattttttt

SEQ ID NO: 247870 - DNA, 13 bp, Artificial Sequence
  Oligonucleotide for detection of SNP TSC0060578
aaaaaaattcata

SEQ ID NO: 247871 - DNA, 13 bp, Artificial Sequence
  Oligonucleotide for detection of SNP TSC0060578
tatgaaatttttt

SEQ ID NO: 247872 - DNA, 13 bp, Artificial Sequence
  Oligonucleotide for detection of SNP TSC0060578
aaaaaatttcata

SEQ ID NO: 247873 - DNA, 13 bp, Artificial Sequence
  Oligonucleotide for detection of SNP TSC0060581
gagaaaattgtga

SEQ ID NO: 247874 - DNA, 13 bp, Artificial Sequence
  Oligonucleotide for detection of SNP TSC0060581
tcacaattttctc

SEQ ID NO: 247875 - DNA, 13 bp, Artificial Sequence
  Oligonucleotide for detection of SNP TSC0060581
gagaaagttgtga

SEQ ID NO: 247876 - DNA, 13 bp, Artificial Sequence
  Oligonucleotide for detection of SNP TSC0060581
tcacaactttctc

SEQ ID NO: 247877 - DNA, 13 bp, Artificial Sequence
  Oligonucleotide for detection of SNP TSC0060582
gttgataatgtta

SEQ ID NO: 247878 - DNA, 13 bp, Artificial Sequence
  Oligonucleotide for detection of SNP TSC0060582
taacattatcaac

SEQ ID NO: 247879 - DNA, 13 bp, Artificial Sequence
  Oligonucleotide for detection of SNP TSC0060582
gttgatgatgtta

SEQ ID NO: 247880 - DNA, 13 bp, Artificial Sequence
  Oligonucleotide for detection of SNP TSC0060582
taacatcatcaac

SEQ ID NO: 247881 - DNA, 13 bp, Artificial Sequence
  Oligonucleotide for detection of SNP TSC0060583
ggaagatggagtg

SEQ ID NO: 247882 - DNA, 13 bp, Artificial Sequence
  Oligonucleotide for detection of SNP TSC0060583
cactccatcttcc

SEQ ID NO: 247883 - DNA, 13 bp, Artificial Sequence
  Oligonucleotide for detection of SNP TSC0060583
ggaagatggagcg

SEQ ID NO: 247884 - DNA, 13 bp, Artificial Sequence
  Oligonucleotide for detection of SNP TSC0060583
cgctccatcttcc

SEQ ID NO: 247885 - DNA, 13 bp, Artificial Sequence
  Oligonucleotide for detection of SNP TSC0060583
ggaagacggagtg

SEQ ID NO: 247886 - DNA, 13 bp, Artificial Sequence
  Oligonucleotide for detection of SNP TSC0060583
cactccgtcttcc

SEQ ID NO: 247887 - DNA, 13 bp, Artificial Sequence
  Oligonucleotide for detection of SNP TSC0060583
ggaagacggagcg

SEQ ID NO: 247888 - DNA, 13 bp, Artificial Sequence
  Oligonucleotide for detection of SNP TSC0060583
cgctccgtcttcc

SEQ ID NO: 247889 - DNA, 13 bp, Artificial Sequence
  Oligonucleotide for detection of SNP TSC0060584
gattgtaagttty

SEQ ID NO: 247890 - DNA, 13 bp, Artificial Sequence
  Oligonucleotide for detection of SNP TSC0060584
raaacttacaatc

SEQ ID NO: 247891 - DNA, 13 bp, Artificial Sequence
  Oligonucleotide for detection of SNP TSC0060584
gattgttagttty

SEQ ID NO: 247892 - DNA, 13 bp, Artificial Sequence
  Oligonucleotide for detection of SNP TSC0060584
raaactaacaatc

SEQ ID NO: 247893 - DNA, 13 bp, Artificial Sequence
  Oligonucleotide for detection of SNP TSC0060584
gaaatttataaty

SEQ ID NO: 247894 - DNA, 13 bp, Artificial Sequence
  Oligonucleotide for detection of SNP TSC0060584
rattataaatttc

SEQ ID NO: 247895 - DNA, 13 bp, Artificial Sequence
  Oligonucleotide for detection of SNP TSC0060584
gaaattaataaty

SEQ ID NO: 247896 - DNA, 13 bp, Artificial Sequence
  Oligonucleotide for detection of SNP TSC0060584
rattattaatttc

SEQ ID NO: 247897 - DNA, 13 bp, Artificial Sequence
  Oligonucleotide for detection of SNP TSC0060585
gtgagttaattaa

SEQ ID NO: 247898 - DNA, 13 bp, Artificial Sequence
  Oligonucleotide for detection of SNP TSC0060585
ttaattaactcac

SEQ ID NO: 247899 - DNA, 13 bp, Artificial Sequence
  Oligonucleotide for detection of SNP TSC0060585
gtgagtgaattaa

SEQ ID NO: 247900 - DNA, 13 bp, Artificial Sequence
  Oligonucleotide for detection of SNP TSC0060585
ttaattcactcac

SEQ ID NO: 247901 - DNA, 13 bp, Artificial Sequence
  Oligonucleotide for detection of SNP TSC0060585
ttaattgatttay

SEQ ID NO: 247902 - DNA, 13 bp, Artificial Sequence
  Oligonucleotide for detection of SNP TSC0060585
rtaaatcaattaa

SEQ ID NO: 247903 - DNA, 13 bp, Artificial Sequence
  Oligonucleotide for detection of SNP TSC0060585
ttaatttatttay

SEQ ID NO: 247904 - DNA, 13 bp, Artificial Sequence
  Oligonucleotide for detection of SNP TSC0060585
rtaaataaattaa

SEQ ID NO: 247905 - DNA, 13 bp, Artificial Sequence
  Oligonucleotide for detection of SNP TSC0060586
ggaattataggga

SEQ ID NO: 247906 - DNA, 13 bp, Artificial Sequence
  Oligonucleotide for detection of SNP TSC0060586
tccctataattcc

SEQ ID NO: 247907 - DNA, 13 bp, Artificial Sequence
  Oligonucleotide for detection of SNP TSC0060586
ggaattgtaggga

SEQ ID NO: 247908 - DNA, 13 bp, Artificial Sequence
  Oligonucleotide for detection of SNP TSC0060586
tccctacaattcc

SEQ ID NO: 247909 - DNA, 13 bp, Artificial Sequence
  Oligonucleotide for detection of SNP TSC0060586
ggaatcgtaggga

SEQ ID NO: 247910 - DNA, 13 bp, Artificial Sequence
  Oligonucleotide for detection of SNP TSC0060586
tccctacgattcc

SEQ ID NO: 247911 - DNA, 13 bp, Artificial Sequence
  Oligonucleotide for detection of SNP TSC0060587
tgaagaagtgggt

SEQ ID NO: 247912 - DNA, 13 bp, Artificial Sequence
  Oligonucleotide for detection of SNP TSC0060587
acccacttcttca

SEQ ID NO: 247913 - DNA, 13 bp, Artificial Sequence
  Oligonucleotide for detection of SNP TSC0060587
tgaagaggtgggt

SEQ ID NO: 247914 - DNA, 13 bp, Artificial Sequence
  Oligonucleotide for detection of SNP TSC0060587
acccacctcttca

SEQ ID NO: 247915 - DNA, 13 bp, Artificial Sequence
  Oligonucleotide for detection of SNP TSC0060594
aagtattaaagag

SEQ ID NO: 247916 - DNA, 13 bp, Artificial Sequence
  Oligonucleotide for detection of SNP TSC0060594
ctctttaatactt

SEQ ID NO: 247917 - DNA, 13 bp, Artificial Sequence
  Oligonucleotide for detection of SNP TSC0060594
aagtatgaaagag

SEQ ID NO: 247918 - DNA, 13 bp, Artificial Sequence
  Oligonucleotide for detection of SNP TSC0060594
ctctttcatactt

SEQ ID NO: 247919 - DNA, 13 bp, Artificial Sequence
  Oligonucleotide for detection of SNP TSC0060596
aggaggatgaggy

SEQ ID NO: 247920 - DNA, 13 bp, Artificial Sequence
  Oligonucleotide for detection of SNP TSC0060596
rcctcatcctcct

SEQ ID NO: 247921 - DNA, 13 bp, Artificial Sequence
  Oligonucleotide for detection of SNP TSC0060596
aggaggttgaggy

SEQ ID NO: 247922 - DNA, 13 bp, Artificial Sequence
  Oligonucleotide for detection of SNP TSC0060596
rcctcaacctcct

SEQ ID NO: 247923 - DNA, 13 bp, Artificial Sequence
  Oligonucleotide for detection of SNP TSC0060603
tattgaatgggaa

SEQ ID NO: 247924 - DNA, 13 bp, Artificial Sequence
  Oligonucleotide for detection of SNP TSC0060603
ttcccattcaata

SEQ ID NO: 247925 - DNA, 13 bp, Artificial Sequence
  Oligonucleotide for detection of SNP TSC0060603
tattgagtgggaa

SEQ ID NO: 247926 - DNA, 13 bp, Artificial Sequence
  Oligonucleotide for detection of SNP TSC0060603
ttcccactcaata

SEQ ID NO: 247927 - DNA, 13 bp, Artificial Sequence
  Oligonucleotide for detection of SNP TSC0060604
gtggaaagtggat

SEQ ID NO: 247928 - DNA, 13 bp, Artificial Sequence
  Oligonucleotide for detection of SNP TSC0060604
atccactttccac

SEQ ID NO: 247929 - DNA, 13 bp, Artificial Sequence
  Oligonucleotide for detection of SNP TSC0060604
gtggaatgtggat

SEQ ID NO: 247930 - DNA, 13 bp, Artificial Sequence
  Oligonucleotide for detection of SNP TSC0060604
atccacattccac

SEQ ID NO: 247931 - DNA, 13 bp, Artificial Sequence
  Oligonucleotide for detection of SNP TSC0009359
atttttattgaaa

SEQ ID NO: 247932 - DNA, 13 bp, Artificial Sequence
  Oligonucleotide for detection of SNP TSC0009359
tttcaataaaaat

SEQ ID NO: 247933 - DNA, 13 bp, Artificial Sequence
  Oligonucleotide for detection of SNP TSC0009359
attttttttgaaa

SEQ ID NO: 247934 - DNA, 13 bp, Artificial Sequence
  Oligonucleotide for detection of SNP TSC0009359
tttcaaaaaaaat

SEQ ID NO: 247935 - DNA, 13 bp, Artificial Sequence
  Oligonucleotide for detection of SNP TSC0009359
ttttaatagggat

SEQ ID NO: 247936 - DNA, 13 bp, Artificial Sequence
  Oligonucleotide for detection of SNP TSC0009359
atccctattaaaa

SEQ ID NO: 247937 - DNA, 13 bp, Artificial Sequence
  Oligonucleotide for detection of SNP TSC0009359
ttttaagagggat

SEQ ID NO: 247938 - DNA, 13 bp, Artificial Sequence
  Oligonucleotide for detection of SNP TSC0009359
atccctcttaaaa

SEQ ID NO: 247939 - DNA, 13 bp, Artificial Sequence
  Oligonucleotide for detection of SNP TSC0009360
atttaatgtatty

SEQ ID NO: 247940 - DNA, 13 bp, Artificial Sequence
  Oligonucleotide for detection of SNP TSC0009360
raatacattaaat

SEQ ID NO: 247941 - DNA, 13 bp, Artificial Sequence
  Oligonucleotide for detection of SNP TSC0009360
atttaacgtatty

SEQ ID NO: 247942 - DNA, 13 bp, Artificial Sequence
  Oligonucleotide for detection of SNP TSC0009360
raatacgttaaat

SEQ ID NO: 247943 - DNA, 13 bp, Artificial Sequence
  Oligonucleotide for detection of SNP TSC0009360
gaatgtgttgagt

SEQ ID NO: 247944 - DNA, 13 bp, Artificial Sequence
  Oligonucleotide for detection of SNP TSC0009360
actcaacacattc

SEQ ID NO: 247945 - DNA, 13 bp, Artificial Sequence
  Oligonucleotide for detection of SNP TSC0009360
gaatgtattgagt

SEQ ID NO: 247946 - DNA, 13 bp, Artificial Sequence
  Oligonucleotide for detection of SNP TSC0009360
actcaatacattc

SEQ ID NO: 247947 - DNA, 13 bp, Artificial Sequence
  Oligonucleotide for detection of SNP TSC0009360
gaatgcgttgagt

SEQ ID NO: 247948 - DNA, 13 bp, Artificial Sequence
  Oligonucleotide for detection of SNP TSC0009360
actcaacgcattc

SEQ ID NO: 247949 - DNA, 13 bp, Artificial Sequence
  Oligonucleotide for detection of SNP TSC0060605
tatttttgaaaay

SEQ ID NO: 247950 - DNA, 13 bp, Artificial Sequence
  Oligonucleotide for detection of SNP TSC0060605
rttttcaaaaata

SEQ ID NO: 247951 - DNA, 13 bp, Artificial Sequence
  Oligonucleotide for detection of SNP TSC0060605
tattttcgaaaay

SEQ ID NO: 247952 - DNA, 13 bp, Artificial Sequence
  Oligonucleotide for detection of SNP TSC0060605
rttttcgaaaata

SEQ ID NO: 247953 - DNA, 13 bp, Artificial Sequence
  Oligonucleotide for detection of SNP TSC0060605
gtttttagaaata

SEQ ID NO: 247954 - DNA, 13 bp, Artificial Sequence
  Oligonucleotide for detection of SNP TSC0060605
tatttctaaaaac

SEQ ID NO: 247955 - DNA, 13 bp, Artificial Sequence
  Oligonucleotide for detection of SNP TSC0060605
gttttcggaaata

SEQ ID NO: 247956 - DNA, 13 bp, Artificial Sequence
  Oligonucleotide for detection of SNP TSC0060605
tatttccgaaaac

SEQ ID NO: 247957 - DNA, 13 bp, Artificial Sequence
  Oligonucleotide for detection of SNP TSC0060607
tgtatgtaagtat

SEQ ID NO: 247958 - DNA, 13 bp, Artificial Sequence
  Oligonucleotide for detection of SNP TSC0060607
atacttacataca

SEQ ID NO: 247959 - DNA, 13 bp, Artificial Sequence
  Oligonucleotide for detection of SNP TSC0060607
tgtatggaagtat

SEQ ID NO: 247960 - DNA, 13 bp, Artificial Sequence
  Oligonucleotide for detection of SNP TSC0060607
atacttccataca

SEQ ID NO: 247961 - DNA, 13 bp, Artificial Sequence
  Oligonucleotide for detection of SNP TSC0060607
atgtttttatgta

SEQ ID NO: 247962 - DNA, 13 bp, Artificial Sequence
  Oligonucleotide for detection of SNP TSC0060607
tacataaaaacat

SEQ ID NO: 247963 - DNA, 13 bp, Artificial Sequence
  Oligonucleotide for detection of SNP TSC0060608
ttatagtgtttat

SEQ ID NO: 247964 - DNA, 13 bp, Artificial Sequence
  Oligonucleotide for detection of SNP TSC0060608
ataaacactataa

SEQ ID NO: 247965 - DNA, 13 bp, Artificial Sequence
  Oligonucleotide for detection of SNP TSC0060608
ttatagcgtttat

SEQ ID NO: 247966 - DNA, 13 bp, Artificial Sequence
  Oligonucleotide for detection of SNP TSC0060608
ataaacgctataa

SEQ ID NO: 247967 - DNA, 13 bp, Artificial Sequence
  Oligonucleotide for detection of SNP TSC0060608
atgaatgttgtgg

SEQ ID NO: 247968 - DNA, 13 bp, Artificial Sequence
  Oligonucleotide for detection of SNP TSC0060608
ccacaacattcat

SEQ ID NO: 247969 - DNA, 13 bp, Artificial Sequence
  Oligonucleotide for detection of SNP TSC0060608
atgaatattgtgg

SEQ ID NO: 247970 - DNA, 13 bp, Artificial Sequence
  Oligonucleotide for detection of SNP TSC0060608
ccacaatattcat

SEQ ID NO: 247971 - DNA, 13 bp, Artificial Sequence
  Oligonucleotide for detection of SNP TSC0060608
atgaacgttgtgg

SEQ ID NO: 247972 - DNA, 13 bp, Artificial Sequence
  Oligonucleotide for detection of SNP TSC0060608
ccacaacgttcat

SEQ ID NO: 247973 - DNA, 13 bp, Artificial Sequence
  Oligonucleotide for detection of SNP TSC0060610
tttaattttatay

SEQ ID NO: 247974 - DNA, 13 bp, Artificial Sequence
  Oligonucleotide for detection of SNP TSC0060610
rtataaaattaaa

SEQ ID NO: 247975 - DNA, 13 bp, Artificial Sequence
  Oligonucleotide for detection of SNP TSC0060610
tttaatgttatay

SEQ ID NO: 247976 - DNA, 13 bp, Artificial Sequence
  Oligonucleotide for detection of SNP TSC0060610
rtataacattaaa

SEQ ID NO: 247977 - DNA, 13 bp, Artificial Sequence
  Oligonucleotide for detection of SNP TSC0060610
gtatgaaattggg

SEQ ID NO: 247978 - DNA, 13 bp, Artificial Sequence
  Oligonucleotide for detection of SNP TSC0060610
cccaatttcatac

SEQ ID NO: 247979 - DNA, 13 bp, Artificial Sequence
  Oligonucleotide for detection of SNP TSC0060610
gtatgatattggg

SEQ ID NO: 247980 - DNA, 13 bp, Artificial Sequence
  Oligonucleotide for detection of SNP TSC0060610
cccaatatcatac

SEQ ID NO: 247981 - DNA, 13 bp, Artificial Sequence
  Oligonucleotide for detection of SNP TSC0060612
aagatatggagaa

SEQ ID NO: 247982 - DNA, 13 bp, Artificial Sequence
  Oligonucleotide for detection of SNP TSC0060612
ttctccatatctt

SEQ ID NO: 247983 - DNA, 13 bp, Artificial Sequence
  Oligonucleotide for detection of SNP TSC0060612
aagatacggagaa

SEQ ID NO: 247984 - DNA, 13 bp, Artificial Sequence
  Oligonucleotide for detection of SNP TSC0060612
ttctccgtatctt

SEQ ID NO: 247985 - DNA, 13 bp, Artificial Sequence
  Oligonucleotide for detection of SNP TSC0060613
tgttatataaaag

SEQ ID NO: 247986 - DNA, 13 bp, Artificial Sequence
  Oligonucleotide for detection of SNP TSC0060613
cttttatataaca

SEQ ID NO: 247987 - DNA, 13 bp, Artificial Sequence
  Oligonucleotide for detection of SNP TSC0060613
tgttatgtaaaag

SEQ ID NO: 247988 - DNA, 13 bp, Artificial Sequence
  Oligonucleotide for detection of SNP TSC0060613
cttttacataaca

SEQ ID NO: 247989 - DNA, 13 bp, Artificial Sequence
  Oligonucleotide for detection of SNP TSC0060613
tgttacgtaaaag

SEQ ID NO: 247990 - DNA, 13 bp, Artificial Sequence
  Oligonucleotide for detection of SNP TSC0060613
cttttacgtaaca

SEQ ID NO: 247991 - DNA, 13 bp, Artificial Sequence
  Oligonucleotide for detection of SNP TSC0060614
tggtggggaaaga

SEQ ID NO: 247992 - DNA, 13 bp, Artificial Sequence
  Oligonucleotide for detection of SNP TSC0060614
tctttccccacca

SEQ ID NO: 247993 - DNA, 13 bp, Artificial Sequence
  Oligonucleotide for detection of SNP TSC0060614
tggtggagaaaga

SEQ ID NO: 247994 - DNA, 13 bp, Artificial Sequence
  Oligonucleotide for detection of SNP TSC0060614
tctttctccacca

SEQ ID NO: 247995 - DNA, 13 bp, Artificial Sequence
  Oligonucleotide for detection of SNP TSC0060615
gagtaggtgaaay

SEQ ID NO: 247996 - DNA, 13 bp, Artificial Sequence
  Oligonucleotide for detection of SNP TSC0060615
rtttcacctactc

SEQ ID NO: 247997 - DNA, 13 bp, Artificial Sequence
  Oligonucleotide for detection of SNP TSC0060615
gagtagatgaaay

SEQ ID NO: 247998 - DNA, 13 bp, Artificial Sequence
  Oligonucleotide for detection of SNP TSC0060615
rtttcatctactc

SEQ ID NO: 247999 - DNA, 13 bp, Artificial Sequence
  Oligonucleotide for detection of SNP TSC0060615
gagtaggcgaaay

SEQ ID NO: 248000 - DNA, 13 bp, Artificial Sequence
  Oligonucleotide for detection of SNP TSC0060615
rtttcgcctactc

SEQ ID NO: 248001 - DNA, 13 bp, Artificial Sequence
  Oligonucleotide for detection of SNP TSC0060615
gagtagacgaaay

SEQ ID NO: 248002 - DNA, 13 bp, Artificial Sequence
  Oligonucleotide for detection of SNP TSC0060615
rtttcgtctactc

SEQ ID NO: 248003 - DNA, 13 bp, Artificial Sequence
  Oligonucleotide for detection of SNP TSC0060616
agaataggtgaat

SEQ ID NO: 248004 - DNA, 13 bp, Artificial Sequence
  Oligonucleotide for detection of SNP TSC0060616
attcacctattct

SEQ ID NO: 248005 - DNA, 13 bp, Artificial Sequence
  Oligonucleotide for detection of SNP TSC0060616
agaataagtgaat

SEQ ID NO: 248006 - DNA, 13 bp, Artificial Sequence
  Oligonucleotide for detection of SNP TSC0060616
attcacttattct

SEQ ID NO: 248007 - DNA, 13 bp, Artificial Sequence
  Oligonucleotide for detection of SNP TSC0060617
tttagggggtatg

SEQ ID NO: 248008 - DNA, 13 bp, Artificial Sequence
  Oligonucleotide for detection of SNP TSC0060617
cataccccctaaa

SEQ ID NO: 248009 - DNA, 13 bp, Artificial Sequence
  Oligonucleotide for detection of SNP TSC0060617
tttaggaggtatg

SEQ ID NO: 248010 - DNA, 13 bp, Artificial Sequence
  Oligonucleotide for detection of SNP TSC0060617
catacctcctaaa

SEQ ID NO: 248011 - DNA, 13 bp, Artificial Sequence
  Oligonucleotide for detection of SNP TSC0060617
tttagggggtacg

SEQ ID NO: 248012 - DNA, 13 bp, Artificial Sequence
  Oligonucleotide for detection of SNP TSC0060617
cgtaccccctaaa

SEQ ID NO: 248013 - DNA, 13 bp, Artificial Sequence
  Oligonucleotide for detection of SNP TSC0060617
tttaggaggtacg

SEQ ID NO: 248014 - DNA, 13 bp, Artificial Sequence
  Oligonucleotide for detection of SNP TSC0060617
cgtacctcctaaa

SEQ ID NO: 248015 - DNA, 13 bp, Artificial Sequence
  Oligonucleotide for detection of SNP TSC0060618
gttggtattgttt

SEQ ID NO: 248016 - DNA, 13 bp, Artificial Sequence
  Oligonucleotide for detection of SNP TSC0060618
aaacaataccaac

SEQ ID NO: 248017 - DNA, 13 bp, Artificial Sequence
  Oligonucleotide for detection of SNP TSC0060618
gttggttttgttt

SEQ ID NO: 248018 - DNA, 13 bp, Artificial Sequence
  Oligonucleotide for detection of SNP TSC0060618
aaacaaaaccaac

SEQ ID NO: 248019 - DNA, 13 bp, Artificial Sequence
  Oligonucleotide for detection of SNP TSC0060618
aggtaatattaay

SEQ ID NO: 248020 - DNA, 13 bp, Artificial Sequence
  Oligonucleotide for detection of SNP TSC0060618
rttaatattacct

SEQ ID NO: 248021 - DNA, 13 bp, Artificial Sequence
  Oligonucleotide for detection of SNP TSC0060618
aggtaagattaay

SEQ ID NO: 248022 - DNA, 13 bp, Artificial Sequence
  Oligonucleotide for detection of SNP TSC0060618
rttaatcttacct

SEQ ID NO: 248023 - DNA, 13 bp, Artificial Sequence
  Oligonucleotide for detection of SNP TSC0060620
taaggaatagaay

SEQ ID NO: 248024 - DNA, 13 bp, Artificial Sequence
  Oligonucleotide for detection of SNP TSC0060620
rttctattcctta

SEQ ID NO: 248025 - DNA, 13 bp, Artificial Sequence
  Oligonucleotide for detection of SNP TSC0060620
taaggagtagaay

SEQ ID NO: 248026 - DNA, 13 bp, Artificial Sequence
  Oligonucleotide for detection of SNP TSC0060620
rttctactcctta

SEQ ID NO: 248027 - DNA, 13 bp, Artificial Sequence
  Oligonucleotide for detection of SNP TSC0007675
tataataaggatt

SEQ ID NO: 248028 - DNA, 13 bp, Artificial Sequence
  Oligonucleotide for detection of SNP TSC0007675
aatccttattata

SEQ ID NO: 248029 - DNA, 13 bp, Artificial Sequence
  Oligonucleotide for detection of SNP TSC0007675
tataattaggatt

SEQ ID NO: 248030 - DNA, 13 bp, Artificial Sequence
  Oligonucleotide for detection of SNP TSC0007675
aatcctaattata

SEQ ID NO: 248031 - DNA, 13 bp, Artificial Sequence
  Oligonucleotide for detection of SNP TSC0007675
agtttttattgta

SEQ ID NO: 248032 - DNA, 13 bp, Artificial Sequence
  Oligonucleotide for detection of SNP TSC0007675
tacaataaaaact

SEQ ID NO: 248033 - DNA, 13 bp, Artificial Sequence
  Oligonucleotide for detection of SNP TSC0007675
agttttaattgta

SEQ ID NO: 248034 - DNA, 13 bp, Artificial Sequence
  Oligonucleotide for detection of SNP TSC0007675
tacaattaaaact

SEQ ID NO: 248035 - DNA, 13 bp, Artificial Sequence
  Oligonucleotide for detection of SNP TSC0005362
tgtaatgtttatt

SEQ ID NO: 248036 - DNA, 13 bp, Artificial Sequence
  Oligonucleotide for detection of SNP TSC0005362
aataaacattaca

SEQ ID NO: 248037 - DNA, 13 bp, Artificial Sequence
  Oligonucleotide for detection of SNP TSC0005362
tgtaatatttatt

SEQ ID NO: 248038 - DNA, 13 bp, Artificial Sequence
  Oligonucleotide for detection of SNP TSC0005362
aataaatattaca

SEQ ID NO: 248039 - DNA, 13 bp, Artificial Sequence
  Oligonucleotide for detection of SNP TSC0004739
gtggggagtggaa

SEQ ID NO: 248040 - DNA, 13 bp, Artificial Sequence
  Oligonucleotide for detection of SNP TSC0004739
ttccactccccac

SEQ ID NO: 248041 - DNA, 13 bp, Artificial Sequence
  Oligonucleotide for detection of SNP TSC0004739
gtggggggtggaa

SEQ ID NO: 248042 - DNA, 13 bp, Artificial Sequence
  Oligonucleotide for detection of SNP TSC0004739
ttccaccccccac

SEQ ID NO: 248043 - DNA, 13 bp, Artificial Sequence
  Oligonucleotide for detection of SNP TSC0004739
gcggggagtggaa

SEQ ID NO: 248044 - DNA, 13 bp, Artificial Sequence
  Oligonucleotide for detection of SNP TSC0004739
ttccactccccgc

SEQ ID NO: 248045 - DNA, 13 bp, Artificial Sequence
  Oligonucleotide for detection of SNP TSC0004739
gcggggggtggaa

SEQ ID NO: 248046 - DNA, 13 bp, Artificial Sequence
  Oligonucleotide for detection of SNP TSC0004739
ttccaccccccgc

SEQ ID NO: 248047 - DNA, 13 bp, Artificial Sequence
  Oligonucleotide for detection of SNP TSC0004740
tatatatattatt

SEQ ID NO: 248048 - DNA, 13 bp, Artificial Sequence
  Oligonucleotide for detection of SNP TSC0004740
aataatatatata

SEQ ID NO: 248049 - DNA, 13 bp, Artificial Sequence
  Oligonucleotide for detection of SNP TSC0004740
tatatagattatt

SEQ ID NO: 248050 - DNA, 13 bp, Artificial Sequence
  Oligonucleotide for detection of SNP TSC0004740
aataatctatata

SEQ ID NO: 248051 - DNA, 13 bp, Artificial Sequence
  Oligonucleotide for detection of SNP TSC0004740
aatagtatgtgtg

SEQ ID NO: 248052 - DNA, 13 bp, Artificial Sequence
  Oligonucleotide for detection of SNP TSC0004740
cacacatactatt

SEQ ID NO: 248053 - DNA, 13 bp, Artificial Sequence
  Oligonucleotide for detection of SNP TSC0004740
aatagtttgtgtg

SEQ ID NO: 248054 - DNA, 13 bp, Artificial Sequence
  Oligonucleotide for detection of SNP TSC0004740
cacacaaactatt

SEQ ID NO: 248055 - DNA, 13 bp, Artificial Sequence
  Oligonucleotide for detection of SNP TSC0004741
aaatttgttttga

SEQ ID NO: 248056 - DNA, 13 bp, Artificial Sequence
  Oligonucleotide for detection of SNP TSC0004741
tcaaaacaaattt

SEQ ID NO: 248057 - DNA, 13 bp, Artificial Sequence
  Oligonucleotide for detection of SNP TSC0060625
gattttatggata

SEQ ID NO: 248058 - DNA, 13 bp, Artificial Sequence
  Oligonucleotide for detection of SNP TSC0060625
tatccataaaatc

SEQ ID NO: 248059 - DNA, 13 bp, Artificial Sequence
  Oligonucleotide for detection of SNP TSC0060625
gattttgtggata

SEQ ID NO: 248060 - DNA, 13 bp, Artificial Sequence
  Oligonucleotide for detection of SNP TSC0060625
tatccacaaaatc

SEQ ID NO: 248061 - DNA, 13 bp, Artificial Sequence
  Oligonucleotide for detection of SNP TSC0060625
gatttcgtggata

SEQ ID NO: 248062 - DNA, 13 bp, Artificial Sequence
  Oligonucleotide for detection of SNP TSC0060625
tatccacgaaatc

SEQ ID NO: 248063 - DNA, 13 bp, Artificial Sequence
  Oligonucleotide for detection of SNP TSC0060625
tgtttatggagty

SEQ ID NO: 248064 - DNA, 13 bp, Artificial Sequence
  Oligonucleotide for detection of SNP TSC0060625
ractccataaaca

SEQ ID NO: 248065 - DNA, 13 bp, Artificial Sequence
  Oligonucleotide for detection of SNP TSC0060625
tgtttacggagty

SEQ ID NO: 248066 - DNA, 13 bp, Artificial Sequence
  Oligonucleotide for detection of SNP TSC0060625
ractccgtaaaca

SEQ ID NO: 248067 - DNA, 13 bp, Artificial Sequence
  Oligonucleotide for detection of SNP TSC0060626
aaagttatttaay

SEQ ID NO: 248068 - DNA, 13 bp, Artificial Sequence
  Oligonucleotide for detection of SNP TSC0060626
rttaaataacttt

SEQ ID NO: 248069 - DNA, 13 bp, Artificial Sequence
  Oligonucleotide for detection of SNP TSC0060626
aaagttttttaay

SEQ ID NO: 248070 - DNA, 13 bp, Artificial Sequence
  Oligonucleotide for detection of SNP TSC0060626
rttaaaaaacttt

SEQ ID NO: 248071 - DNA, 13 bp, Artificial Sequence
  Oligonucleotide for detection of SNP TSC0060626
gttgaatagtttt

SEQ ID NO: 248072 - DNA, 13 bp, Artificial Sequence
  Oligonucleotide for detection of SNP TSC0060626
aaaactattcaac

SEQ ID NO: 248073 - DNA, 13 bp, Artificial Sequence
  Oligonucleotide for detection of SNP TSC0060626
gttgaagagtttt

SEQ ID NO: 248074 - DNA, 13 bp, Artificial Sequence
  Oligonucleotide for detection of SNP TSC0060626
aaaactcttcaac

SEQ ID NO: 248075 - DNA, 13 bp, Artificial Sequence
  Oligonucleotide for detection of SNP TSC0060627
gaaggtaaaggaa

SEQ ID NO: 248076 - DNA, 13 bp, Artificial Sequence
  Oligonucleotide for detection of SNP TSC0060627
ttcctttaccttc

SEQ ID NO: 248077 - DNA, 13 bp, Artificial Sequence
  Oligonucleotide for detection of SNP TSC0060627
gaaggtgaaggaa

SEQ ID NO: 248078 - DNA, 13 bp, Artificial Sequence
  Oligonucleotide for detection of SNP TSC0060627
ttccttcaccttc

SEQ ID NO: 248079 - DNA, 13 bp, Artificial Sequence
  Oligonucleotide for detection of SNP TSC0060627
gaaggcgaaggaa

SEQ ID NO: 248080 - DNA, 13 bp, Artificial Sequence
  Oligonucleotide for detection of SNP TSC0060627
ttccttcgccttc

SEQ ID NO: 248081 - DNA, 13 bp, Artificial Sequence
  Oligonucleotide for detection of SNP TSC0060628
agtgagatttttt

SEQ ID NO: 248082 - DNA, 13 bp, Artificial Sequence
  Oligonucleotide for detection of SNP TSC0060628
aaaaaatctcact

SEQ ID NO: 248083 - DNA, 13 bp, Artificial Sequence
  Oligonucleotide for detection of SNP TSC0060628
agtgagttttttt

SEQ ID NO: 248084 - DNA, 13 bp, Artificial Sequence
  Oligonucleotide for detection of SNP TSC0060628
aaaaaaactcact

SEQ ID NO: 248085 - DNA, 13 bp, Artificial Sequence
  Oligonucleotide for detection of SNP TSC0060628
aaaagattttatt

SEQ ID NO: 248086 - DNA, 13 bp, Artificial Sequence
  Oligonucleotide for detection of SNP TSC0060628
aataaaatctttt

SEQ ID NO: 248087 - DNA, 13 bp, Artificial Sequence
  Oligonucleotide for detection of SNP TSC0060628
aaaagagtttatt

SEQ ID NO: 248088 - DNA, 13 bp, Artificial Sequence
  Oligonucleotide for detection of SNP TSC0060628
aataaactctttt

SEQ ID NO: 248089 - DNA, 13 bp, Artificial Sequence
  Oligonucleotide for detection of SNP TSC0060629
gggataaaataay

SEQ ID NO: 248090 - DNA, 13 bp, Artificial Sequence
  Oligonucleotide for detection of SNP TSC0060629
rttattttatccc

SEQ ID NO: 248091 - DNA, 13 bp, Artificial Sequence
  Oligonucleotide for detection of SNP TSC0060629
gggatagaataay

SEQ ID NO: 248092 - DNA, 13 bp, Artificial Sequence
  Oligonucleotide for detection of SNP TSC0060629
rttattctatccc

SEQ ID NO: 248093 - DNA, 13 bp, Artificial Sequence
  Oligonucleotide for detection of SNP TSC0060632
ttataagttaaaa

SEQ ID NO: 248094 - DNA, 13 bp, Artificial Sequence
  Oligonucleotide for detection of SNP TSC0060632
ttttaacttataa

SEQ ID NO: 248095 - DNA, 13 bp, Artificial Sequence
  Oligonucleotide for detection of SNP TSC0060632
ttataaattaaaa

SEQ ID NO: 248096 - DNA, 13 bp, Artificial Sequence
  Oligonucleotide for detection of SNP TSC0060632
ttttaatttataa

SEQ ID NO: 248097 - DNA, 13 bp, Artificial Sequence
  Oligonucleotide for detection of SNP TSC0060633
aagagatttttgg

SEQ ID NO: 248098 - DNA, 13 bp, Artificial Sequence
  Oligonucleotide for detection of SNP TSC0060633
ccaaaaatctctt

SEQ ID NO: 248099 - DNA, 13 bp, Artificial Sequence
  Oligonucleotide for detection of SNP TSC0060633
aagagagttttgg

SEQ ID NO: 248100 - DNA, 13 bp, Artificial Sequence
  Oligonucleotide for detection of SNP TSC0060633
ccaaaactctctt

SEQ ID NO: 248101 - DNA, 13 bp, Artificial Sequence
  Oligonucleotide for detection of SNP TSC0060634
gttaaaggtgata

SEQ ID NO: 248102 - DNA, 13 bp, Artificial Sequence
  Oligonucleotide for detection of SNP TSC0060634
tatcacctttaac

SEQ ID NO: 248103 - DNA, 13 bp, Artificial Sequence
  Oligonucleotide for detection of SNP TSC0060634
gttaaaagtgata

SEQ ID NO: 248104 - DNA, 13 bp, Artificial Sequence
  Oligonucleotide for detection of SNP TSC0060634
tatcacttttaac

SEQ ID NO: 248105 - DNA, 13 bp, Artificial Sequence
  Oligonucleotide for detection of SNP TSC0060636
agtatggagaagt

SEQ ID NO: 248106 - DNA, 13 bp, Artificial Sequence
  Oligonucleotide for detection of SNP TSC0060636
acttctccatact

SEQ ID NO: 248107 - DNA, 13 bp, Artificial Sequence
  Oligonucleotide for detection of SNP TSC0060636
agtatgtagaagt

SEQ ID NO: 248108 - DNA, 13 bp, Artificial Sequence
  Oligonucleotide for detection of SNP TSC0060636
acttctacatact

SEQ ID NO: 248109 - DNA, 13 bp, Artificial Sequence
  Oligonucleotide for detection of SNP TSC0060637
attagatgaatga

SEQ ID NO: 248110 - DNA, 13 bp, Artificial Sequence
  Oligonucleotide for detection of SNP TSC0060637
tcattcatctaat

SEQ ID NO: 248111 - DNA, 13 bp, Artificial Sequence
  Oligonucleotide for detection of SNP TSC0060637
attagacgaatga

SEQ ID NO: 248112 - DNA, 13 bp, Artificial Sequence
  Oligonucleotide for detection of SNP TSC0060637
tcattcgtctaat

SEQ ID NO: 248113 - DNA, 13 bp, Artificial Sequence
  Oligonucleotide for detection of SNP TSC0060637
ttatttgtttggt

SEQ ID NO: 248114 - DNA, 13 bp, Artificial Sequence
  Oligonucleotide for detection of SNP TSC0060637
accaaacaaataa

SEQ ID NO: 248115 - DNA, 13 bp, Artificial Sequence
  Oligonucleotide for detection of SNP TSC0060637
ttatttatttggt

SEQ ID NO: 248116 - DNA, 13 bp, Artificial Sequence
  Oligonucleotide for detection of SNP TSC0060637
accaaataaataa

SEQ ID NO: 248117 - DNA, 13 bp, Artificial Sequence
  Oligonucleotide for detection of SNP TSC0060637
ttattcgtttggt

SEQ ID NO: 248118 - DNA, 13 bp, Artificial Sequence
  Oligonucleotide for detection of SNP TSC0060637
accaaacgaataa

SEQ ID NO: 248119 - DNA, 13 bp, Artificial Sequence
  Oligonucleotide for detection of SNP TSC0060638
agtgaggattgaa

SEQ ID NO: 248120 - DNA, 13 bp, Artificial Sequence
  Oligonucleotide for detection of SNP TSC0060638
ttcaatcctcact

SEQ ID NO: 248121 - DNA, 13 bp, Artificial Sequence
  Oligonucleotide for detection of SNP TSC0060638
agtgagaattgaa

SEQ ID NO: 248122 - DNA, 13 bp, Artificial Sequence
  Oligonucleotide for detection of SNP TSC0060638
ttcaattctcact

SEQ ID NO: 248123 - DNA, 13 bp, Artificial Sequence
  Oligonucleotide for detection of SNP TSC0060639
agagtggtttgaa

SEQ ID NO: 248124 - DNA, 13 bp, Artificial Sequence
  Oligonucleotide for detection of SNP TSC0060639
ttcaaaccactct

SEQ ID NO: 248125 - DNA, 13 bp, Artificial Sequence
  Oligonucleotide for detection of SNP TSC0060639
agagtgatttgaa

SEQ ID NO: 248126 - DNA, 13 bp, Artificial Sequence
  Oligonucleotide for detection of SNP TSC0060639
ttcaaatcactct

SEQ ID NO: 248127 - DNA, 13 bp, Artificial Sequence
  Oligonucleotide for detection of SNP TSC0060640
tttttatttatag

SEQ ID NO: 248128 - DNA, 13 bp, Artificial Sequence
  Oligonucleotide for detection of SNP TSC0060640
ctataaataaaaa

SEQ ID NO: 248129 - DNA, 13 bp, Artificial Sequence
  Oligonucleotide for detection of SNP TSC0060640
ttgtagttggaga

SEQ ID NO: 248130 - DNA, 13 bp, Artificial Sequence
  Oligonucleotide for detection of SNP TSC0060640
tctccaactacaa

SEQ ID NO: 248131 - DNA, 13 bp, Artificial Sequence
  Oligonucleotide for detection of SNP TSC0060640
ttgtagatggaga

SEQ ID NO: 248132 - DNA, 13 bp, Artificial Sequence
  Oligonucleotide for detection of SNP TSC0060640
tctccatctacaa

SEQ ID NO: 248133 - DNA, 13 bp, Artificial Sequence
  Oligonucleotide for detection of SNP TSC0060641
tgtgattttggay

SEQ ID NO: 248134 - DNA, 13 bp, Artificial Sequence
  Oligonucleotide for detection of SNP TSC0060641
rtccaaaatcaca

SEQ ID NO: 248135 - DNA, 13 bp, Artificial Sequence
  Oligonucleotide for detection of SNP TSC0060641
tgtgatgttggay

SEQ ID NO: 248136 - DNA, 13 bp, Artificial Sequence
  Oligonucleotide for detection of SNP TSC0060641
rtccaacatcaca

SEQ ID NO: 248137 - DNA, 13 bp, Artificial Sequence
  Oligonucleotide for detection of SNP TSC0060641
tgtgacgttggay

SEQ ID NO: 248138 - DNA, 13 bp, Artificial Sequence
  Oligonucleotide for detection of SNP TSC0060641
rtccaacgtcaca

SEQ ID NO: 248139 - DNA, 13 bp, Artificial Sequence
  Oligonucleotide for detection of SNP TSC0060641
gtttaatgttata

SEQ ID NO: 248140 - DNA, 13 bp, Artificial Sequence
  Oligonucleotide for detection of SNP TSC0060641
tataacattaaac

SEQ ID NO: 248141 - DNA, 13 bp, Artificial Sequence
  Oligonucleotide for detection of SNP TSC0060641
gtttaacgttata

SEQ ID NO: 248142 - DNA, 13 bp, Artificial Sequence
  Oligonucleotide for detection of SNP TSC0060641
tataacgttaaac

SEQ ID NO: 248143 - DNA, 13 bp, Artificial Sequence
  Oligonucleotide for detection of SNP TSC0060642
tttataaaattay

SEQ ID NO: 248144 - DNA, 13 bp, Artificial Sequence
  Oligonucleotide for detection of SNP TSC0060642
rtaattttataaa

SEQ ID NO: 248145 - DNA, 13 bp, Artificial Sequence
  Oligonucleotide for detection of SNP TSC0060642
tttatagaattay

SEQ ID NO: 248146 - DNA, 13 bp, Artificial Sequence
  Oligonucleotide for detection of SNP TSC0060642
rtaattctataaa

SEQ ID NO: 248147 - DNA, 13 bp, Artificial Sequence
  Oligonucleotide for detection of SNP TSC0060643
agagtatatggay

SEQ ID NO: 248148 - DNA, 13 bp, Artificial Sequence
  Oligonucleotide for detection of SNP TSC0060643
rtccatatactct

SEQ ID NO: 248149 - DNA, 13 bp, Artificial Sequence
  Oligonucleotide for detection of SNP TSC0060643
agagtagatggay

SEQ ID NO: 248150 - DNA, 13 bp, Artificial Sequence
  Oligonucleotide for detection of SNP TSC0060643
rtccatctactct

SEQ ID NO: 248151 - DNA, 13 bp, Artificial Sequence
  Oligonucleotide for detection of SNP TSC0060644
taattaatgggta

SEQ ID NO: 248152 - DNA, 13 bp, Artificial Sequence
  Oligonucleotide for detection of SNP TSC0060644
tacccattaatta

SEQ ID NO: 248153 - DNA, 13 bp, Artificial Sequence
  Oligonucleotide for detection of SNP TSC0060644
taattagtgggta

SEQ ID NO: 248154 - DNA, 13 bp, Artificial Sequence
  Oligonucleotide for detection of SNP TSC0060644
tacccactaatta

SEQ ID NO: 248155 - DNA, 13 bp, Artificial Sequence
  Oligonucleotide for detection of SNP TSC0005619
ttggagttgggga

SEQ ID NO: 248156 - DNA, 13 bp, Artificial Sequence
  Oligonucleotide for detection of SNP TSC0005619
tccccaactccaa

SEQ ID NO: 248157 - DNA, 13 bp, Artificial Sequence
  Oligonucleotide for detection of SNP TSC0005619
ttggaggtgggga

SEQ ID NO: 248158 - DNA, 13 bp, Artificial Sequence
  Oligonucleotide for detection of SNP TSC0005619
tccccacctccaa

SEQ ID NO: 248159 - DNA, 13 bp, Artificial Sequence
  Oligonucleotide for detection of SNP TSC0060645
atatagattttaa

SEQ ID NO: 248160 - DNA, 13 bp, Artificial Sequence
  Oligonucleotide for detection of SNP TSC0060645
ttaaaatctatat

SEQ ID NO: 248161 - DNA, 13 bp, Artificial Sequence
  Oligonucleotide for detection of SNP TSC0060645
atatagtttttaa

SEQ ID NO: 248162 - DNA, 13 bp, Artificial Sequence
  Oligonucleotide for detection of SNP TSC0060645
ttaaaaactatat

SEQ ID NO: 248163 - DNA, 13 bp, Artificial Sequence
  Oligonucleotide for detection of SNP TSC0060645
ttagaatttgtgt

SEQ ID NO: 248164 - DNA, 13 bp, Artificial Sequence
  Oligonucleotide for detection of SNP TSC0060645
acacaaattctaa

SEQ ID NO: 248165 - DNA, 13 bp, Artificial Sequence
  Oligonucleotide for detection of SNP TSC0060645
ttagaaattgtgt

SEQ ID NO: 248166 - DNA, 13 bp, Artificial Sequence
  Oligonucleotide for detection of SNP TSC0060645
acacaatttctaa

SEQ ID NO: 248167 - DNA, 13 bp, Artificial Sequence
  Oligonucleotide for detection of SNP TSC0060646
aaattatgaaggy

SEQ ID NO: 248168 - DNA, 13 bp, Artificial Sequence
  Oligonucleotide for detection of SNP TSC0060646
rccttcataattt

SEQ ID NO: 248169 - DNA, 13 bp, Artificial Sequence
  Oligonucleotide for detection of SNP TSC0060646
aaattaggaaggy

SEQ ID NO: 248170 - DNA, 13 bp, Artificial Sequence
  Oligonucleotide for detection of SNP TSC0060646
rccttcctaattt

SEQ ID NO: 248171 - DNA, 13 bp, Artificial Sequence
  Oligonucleotide for detection of SNP TSC0060646
aaattacgaaggy

SEQ ID NO: 248172 - DNA, 13 bp, Artificial Sequence
  Oligonucleotide for detection of SNP TSC0060646
rccttcgtaattt

SEQ ID NO: 248173 - DNA, 13 bp, Artificial Sequence
  Oligonucleotide for detection of SNP TSC0060646
gtttttttggttt

SEQ ID NO: 248174 - DNA, 13 bp, Artificial Sequence
  Oligonucleotide for detection of SNP TSC0060646
aaaccaaaaaaac

SEQ ID NO: 248175 - DNA, 13 bp, Artificial Sequence
  Oligonucleotide for detection of SNP TSC0060646
gttttcgtggttt

SEQ ID NO: 248176 - DNA, 13 bp, Artificial Sequence
  Oligonucleotide for detection of SNP TSC0060646
aaaccacgaaaac

SEQ ID NO: 248177 - DNA, 13 bp, Artificial Sequence
  Oligonucleotide for detection of SNP TSC0060647
tgtttaatgaatg

SEQ ID NO: 248178 - DNA, 13 bp, Artificial Sequence
  Oligonucleotide for detection of SNP TSC0060647
cattcattaaaca

SEQ ID NO: 248179 - DNA, 13 bp, Artificial Sequence
  Oligonucleotide for detection of SNP TSC0060647
tgtttagtgaatg

SEQ ID NO: 248180 - DNA, 13 bp, Artificial Sequence
  Oligonucleotide for detection of SNP TSC0060647
cattcactaaaca

SEQ ID NO: 248181 - DNA, 13 bp, Artificial Sequence
  Oligonucleotide for detection of SNP TSC0060648
taaattataaata

SEQ ID NO: 248182 - DNA, 13 bp, Artificial Sequence
  Oligonucleotide for detection of SNP TSC0060648
tatttataattta

SEQ ID NO: 248183 - DNA, 13 bp, Artificial Sequence
  Oligonucleotide for detection of SNP TSC0060648
taaattttaaata

SEQ ID NO: 248184 - DNA, 13 bp, Artificial Sequence
  Oligonucleotide for detection of SNP TSC0060648
tatttaaaattta

SEQ ID NO: 248185 - DNA, 13 bp, Artificial Sequence
  Oligonucleotide for detection of SNP TSC0060648
tatttgtagttta

SEQ ID NO: 248186 - DNA, 13 bp, Artificial Sequence
  Oligonucleotide for detection of SNP TSC0060648
taaactacaaata

SEQ ID NO: 248187 - DNA, 13 bp, Artificial Sequence
  Oligonucleotide for detection of SNP TSC0060648
tatttggagttta

SEQ ID NO: 248188 - DNA, 13 bp, Artificial Sequence
  Oligonucleotide for detection of SNP TSC0060648
taaactccaaata

SEQ ID NO: 248189 - DNA, 13 bp, Artificial Sequence
  Oligonucleotide for detection of SNP TSC0060649
gatatattttttt

SEQ ID NO: 248190 - DNA, 13 bp, Artificial Sequence
  Oligonucleotide for detection of SNP TSC0060649
aaaaaaatatatc

SEQ ID NO: 248191 - DNA, 13 bp, Artificial Sequence
  Oligonucleotide for detection of SNP TSC0060649
agagaaatataty

SEQ ID NO: 248192 - DNA, 13 bp, Artificial Sequence
  Oligonucleotide for detection of SNP TSC0060649
ratatatttctct

SEQ ID NO: 248193 - DNA, 13 bp, Artificial Sequence
  Oligonucleotide for detection of SNP TSC0060649
agagaattataty

SEQ ID NO: 248194 - DNA, 13 bp, Artificial Sequence
  Oligonucleotide for detection of SNP TSC0060649
ratataattctct

SEQ ID NO: 248195 - DNA, 13 bp, Artificial Sequence
  Oligonucleotide for detection of SNP TSC0060653
gtaatatgtgttt

SEQ ID NO: 248196 - DNA, 13 bp, Artificial Sequence
  Oligonucleotide for detection of SNP TSC0060653
aaacacatattac

SEQ ID NO: 248197 - DNA, 13 bp, Artificial Sequence
  Oligonucleotide for detection of SNP TSC0060653
gtaatacgtgttt

SEQ ID NO: 248198 - DNA, 13 bp, Artificial Sequence
  Oligonucleotide for detection of SNP TSC0060653
aaacacgtattac

SEQ ID NO: 248199 - DNA, 13 bp, Artificial Sequence
  Oligonucleotide for detection of SNP TSC0010361
ttttgagtatatt

SEQ ID NO: 248200 - DNA, 13 bp, Artificial Sequence
  Oligonucleotide for detection of SNP TSC0010361
aatatactcaaaa

SEQ ID NO: 248201 - DNA, 13 bp, Artificial Sequence
  Oligonucleotide for detection of SNP TSC0010361
ttttgaatatatt

SEQ ID NO: 248202 - DNA, 13 bp, Artificial Sequence
  Oligonucleotide for detection of SNP TSC0010361
aatatattcaaaa

SEQ ID NO: 248203 - DNA, 13 bp, Artificial Sequence
  Oligonucleotide for detection of SNP TSC0060654
ttaggagaggtga

SEQ ID NO: 248204 - DNA, 13 bp, Artificial Sequence
  Oligonucleotide for detection of SNP TSC0060654
tcacctctcctaa

SEQ ID NO: 248205 - DNA, 13 bp, Artificial Sequence
  Oligonucleotide for detection of SNP TSC0060654
ttaggaaaggtga

SEQ ID NO: 248206 - DNA, 13 bp, Artificial Sequence
  Oligonucleotide for detection of SNP TSC0060654
tcacctttcctaa

SEQ ID NO: 248207 - DNA, 13 bp, Artificial Sequence
  Oligonucleotide for detection of SNP TSC0060655
gaaagatagaagt

SEQ ID NO: 248208 - DNA, 13 bp, Artificial Sequence
  Oligonucleotide for detection of SNP TSC0060655
acttctatctttc

SEQ ID NO: 248209 - DNA, 13 bp, Artificial Sequence
  Oligonucleotide for detection of SNP TSC0060655
gaaagagagaagt

SEQ ID NO: 248210 - DNA, 13 bp, Artificial Sequence
  Oligonucleotide for detection of SNP TSC0060655
acttctctctttc

SEQ ID NO: 248211 - DNA, 13 bp, Artificial Sequence
  Oligonucleotide for detection of SNP TSC0009045
aggggatggttty

SEQ ID NO: 248212 - DNA, 13 bp, Artificial Sequence
  Oligonucleotide for detection of SNP TSC0009045
raaaccatcccct

SEQ ID NO: 248213 - DNA, 13 bp, Artificial Sequence
  Oligonucleotide for detection of SNP TSC0009045
aggggagggttty

SEQ ID NO: 248214 - DNA, 13 bp, Artificial Sequence
  Oligonucleotide for detection of SNP TSC0009045
raaaccctcccct

SEQ ID NO: 248215 - DNA, 13 bp, Artificial Sequence
  Oligonucleotide for detection of SNP TSC0009045
aggggacggttty

SEQ ID NO: 248216 - DNA, 13 bp, Artificial Sequence
  Oligonucleotide for detection of SNP TSC0009045
raaaccgtcccct

SEQ ID NO: 248217 - DNA, 13 bp, Artificial Sequence
  Oligonucleotide for detection of SNP TSC0009045
gggatcgtttttt

SEQ ID NO: 248218 - DNA, 13 bp, Artificial Sequence
  Oligonucleotide for detection of SNP TSC0009045
aaaaaacgatccc

SEQ ID NO: 248219 - DNA, 13 bp, Artificial Sequence
  Oligonucleotide for detection of SNP TSC0060657
ttgtatgtgaaat

SEQ ID NO: 248220 - DNA, 13 bp, Artificial Sequence
  Oligonucleotide for detection of SNP TSC0060657
atttcacatacaa

SEQ ID NO: 248221 - DNA, 13 bp, Artificial Sequence
  Oligonucleotide for detection of SNP TSC0060657
ttgtatatgaaat

SEQ ID NO: 248222 - DNA, 13 bp, Artificial Sequence
  Oligonucleotide for detection of SNP TSC0060657
atttcatatacaa

SEQ ID NO: 248223 - DNA, 13 bp, Artificial Sequence
  Oligonucleotide for detection of SNP TSC0060658
gagagtgttattg

SEQ ID NO: 248224 - DNA, 13 bp, Artificial Sequence
  Oligonucleotide for detection of SNP TSC0060658
caataacactctc

SEQ ID NO: 248225 - DNA, 13 bp, Artificial Sequence
  Oligonucleotide for detection of SNP TSC0060658
gagagtattattg

SEQ ID NO: 248226 - DNA, 13 bp, Artificial Sequence
  Oligonucleotide for detection of SNP TSC0060658
caataatactctc

SEQ ID NO: 248227 - DNA, 13 bp, Artificial Sequence
  Oligonucleotide for detection of SNP TSC0060659
tttatcgtataaa

SEQ ID NO: 248228 - DNA, 13 bp, Artificial Sequence
  Oligonucleotide for detection of SNP TSC0060659
tttatacgataaa

SEQ ID NO: 248229 - DNA, 13 bp, Artificial Sequence
  Oligonucleotide for detection of SNP TSC0060659
tttgtatggtgag

SEQ ID NO: 248230 - DNA, 13 bp, Artificial Sequence
  Oligonucleotide for detection of SNP TSC0060659
ctcaccatacaaa

SEQ ID NO: 248231 - DNA, 13 bp, Artificial Sequence
  Oligonucleotide for detection of SNP TSC0060659
tttgtacggtgag

SEQ ID NO: 248232 - DNA, 13 bp, Artificial Sequence
  Oligonucleotide for detection of SNP TSC0060659
ctcaccgtacaaa

SEQ ID NO: 248233 - DNA, 13 bp, Artificial Sequence
  Oligonucleotide for detection of SNP TSC0060660
aattaaaatgtat

SEQ ID NO: 248234 - DNA, 13 bp, Artificial Sequence
  Oligonucleotide for detection of SNP TSC0060660
atacattttaatt

SEQ ID NO: 248235 - DNA, 13 bp, Artificial Sequence
  Oligonucleotide for detection of SNP TSC0060660
aattaagatgtat

SEQ ID NO: 248236 - DNA, 13 bp, Artificial Sequence
  Oligonucleotide for detection of SNP TSC0060660
atacatcttaatt

SEQ ID NO: 248237 - DNA, 13 bp, Artificial Sequence
  Oligonucleotide for detection of SNP TSC0010771
ttaatatgttttg

SEQ ID NO: 248238 - DNA, 13 bp, Artificial Sequence
  Oligonucleotide for detection of SNP TSC0010771
caaaacatattaa

SEQ ID NO: 248239 - DNA, 13 bp, Artificial Sequence
  Oligonucleotide for detection of SNP TSC0010771
ttaataggttttg

SEQ ID NO: 248240 - DNA, 13 bp, Artificial Sequence
  Oligonucleotide for detection of SNP TSC0010771
caaaacctattaa

SEQ ID NO: 248241 - DNA, 13 bp, Artificial Sequence
  Oligonucleotide for detection of SNP TSC0010771
taaagtatattga

SEQ ID NO: 248242 - DNA, 13 bp, Artificial Sequence
  Oligonucleotide for detection of SNP TSC0010771
tcaatatacttta

SEQ ID NO: 248243 - DNA, 13 bp, Artificial Sequence
  Oligonucleotide for detection of SNP TSC0010771
taaagtttattga

SEQ ID NO: 248244 - DNA, 13 bp, Artificial Sequence
  Oligonucleotide for detection of SNP TSC0010771
tcaataaacttta

SEQ ID NO: 248245 - DNA, 13 bp, Artificial Sequence
  Oligonucleotide for detection of SNP TSC0060663
taggatgagggaa

SEQ ID NO: 248246 - DNA, 13 bp, Artificial Sequence
  Oligonucleotide for detection of SNP TSC0060663
ttccctcatccta

SEQ ID NO: 248247 - DNA, 13 bp, Artificial Sequence
  Oligonucleotide for detection of SNP TSC0060663
taggattagggaa

SEQ ID NO: 248248 - DNA, 13 bp, Artificial Sequence
  Oligonucleotide for detection of SNP TSC0060663
ttccctaatccta

SEQ ID NO: 248249 - DNA, 13 bp, Artificial Sequence
  Oligonucleotide for detection of SNP TSC0060663
taggacgagggaa

SEQ ID NO: 248250 - DNA, 13 bp, Artificial Sequence
  Oligonucleotide for detection of SNP TSC0060663
ttccctcgtccta

SEQ ID NO: 248251 - DNA, 13 bp, Artificial Sequence
  Oligonucleotide for detection of SNP TSC0060664
aaataataagaag

SEQ ID NO: 248252 - DNA, 13 bp, Artificial Sequence
  Oligonucleotide for detection of SNP TSC0060664
cttcttattattt

SEQ ID NO: 248253 - DNA, 13 bp, Artificial Sequence
  Oligonucleotide for detection of SNP TSC0060664
aaataagaagaag

SEQ ID NO: 248254 - DNA, 13 bp, Artificial Sequence
  Oligonucleotide for detection of SNP TSC0060664
cttcttcttattt

SEQ ID NO: 248255 - DNA, 13 bp, Artificial Sequence
  Oligonucleotide for detection of SNP TSC0060666
ttttgatttttag

SEQ ID NO: 248256 - DNA, 13 bp, Artificial Sequence
  Oligonucleotide for detection of SNP TSC0060666
ctaaaaatcaaaa

SEQ ID NO: 248257 - DNA, 13 bp, Artificial Sequence
  Oligonucleotide for detection of SNP TSC0060666
ttgggagttagga

SEQ ID NO: 248258 - DNA, 13 bp, Artificial Sequence
  Oligonucleotide for detection of SNP TSC0060666
tcctaactcccaa

SEQ ID NO: 248259 - DNA, 13 bp, Artificial Sequence
  Oligonucleotide for detection of SNP TSC0060666
ttgggatttagga

SEQ ID NO: 248260 - DNA, 13 bp, Artificial Sequence
  Oligonucleotide for detection of SNP TSC0060666
tcctaaatcccaa

SEQ ID NO: 248261 - DNA, 13 bp, Artificial Sequence
  Oligonucleotide for detection of SNP TSC0060667
agatataaattga

SEQ ID NO: 248262 - DNA, 13 bp, Artificial Sequence
  Oligonucleotide for detection of SNP TSC0060667
tcaatttatatct

SEQ ID NO: 248263 - DNA, 13 bp, Artificial Sequence
  Oligonucleotide for detection of SNP TSC0060667
agatattaattga

SEQ ID NO: 248264 - DNA, 13 bp, Artificial Sequence
  Oligonucleotide for detection of SNP TSC0060667
tcaattaatatct

SEQ ID NO: 248265 - DNA, 13 bp, Artificial Sequence
  Oligonucleotide for detection of SNP TSC0008176
tagttagtgttty

SEQ ID NO: 248266 - DNA, 13 bp, Artificial Sequence
  Oligonucleotide for detection of SNP TSC0008176
raaacactaacta

SEQ ID NO: 248267 - DNA, 13 bp, Artificial Sequence
  Oligonucleotide for detection of SNP TSC0008177
agggttgtttaat

SEQ ID NO: 248268 - DNA, 13 bp, Artificial Sequence
  Oligonucleotide for detection of SNP TSC0008177
attaaacaaccct

SEQ ID NO: 248269 - DNA, 13 bp, Artificial Sequence
  Oligonucleotide for detection of SNP TSC0008177
agggttttttaat

SEQ ID NO: 248270 - DNA, 13 bp, Artificial Sequence
  Oligonucleotide for detection of SNP TSC0008177
attaaaaaaccct

SEQ ID NO: 248271 - DNA, 13 bp, Artificial Sequence
  Oligonucleotide for detection of SNP TSC0010880
agttatatttaat

SEQ ID NO: 248272 - DNA, 13 bp, Artificial Sequence
  Oligonucleotide for detection of SNP TSC0010880
attaaatataact

SEQ ID NO: 248273 - DNA, 13 bp, Artificial Sequence
  Oligonucleotide for detection of SNP TSC0010880
agttatgtttaat

SEQ ID NO: 248274 - DNA, 13 bp, Artificial Sequence
  Oligonucleotide for detection of SNP TSC0010880
attaaacataact

SEQ ID NO: 248275 - DNA, 13 bp, Artificial Sequence
  Oligonucleotide for detection of SNP TSC0010881
gtaataggtttga

SEQ ID NO: 248276 - DNA, 13 bp, Artificial Sequence
  Oligonucleotide for detection of SNP TSC0010881
tcaaacctattac

SEQ ID NO: 248277 - DNA, 13 bp, Artificial Sequence
  Oligonucleotide for detection of SNP TSC0010881
gtaataagtttga

SEQ ID NO: 248278 - DNA, 13 bp, Artificial Sequence
  Oligonucleotide for detection of SNP TSC0010881
tcaaacttattac

SEQ ID NO: 248279 - DNA, 13 bp, Artificial Sequence
  Oligonucleotide for detection of SNP TSC0010882
gtataatggttaa

SEQ ID NO: 248280 - DNA, 13 bp, Artificial Sequence
  Oligonucleotide for detection of SNP TSC0010882
ttaaccattatac

SEQ ID NO: 248281 - DNA, 13 bp, Artificial Sequence
  Oligonucleotide for detection of SNP TSC0010882
gtataacggttaa

SEQ ID NO: 248282 - DNA, 13 bp, Artificial Sequence
  Oligonucleotide for detection of SNP TSC0010882
ttaaccgttatac

SEQ ID NO: 248283 - DNA, 13 bp, Artificial Sequence
  Oligonucleotide for detection of SNP TSC0010882
ttaatcgttatgy

SEQ ID NO: 248284 - DNA, 13 bp, Artificial Sequence
  Oligonucleotide for detection of SNP TSC0010882
rcataacgattaa

SEQ ID NO: 248285 - DNA, 13 bp, Artificial Sequence
  Oligonucleotide for detection of SNP TSC0060670
gtatttggatttt

SEQ ID NO: 248286 - DNA, 13 bp, Artificial Sequence
  Oligonucleotide for detection of SNP TSC0060670
aaaatccaaatac

SEQ ID NO: 248287 - DNA, 13 bp, Artificial Sequence
  Oligonucleotide for detection of SNP TSC0060670
gtatttagatttt

SEQ ID NO: 248288 - DNA, 13 bp, Artificial Sequence
  Oligonucleotide for detection of SNP TSC0060670
aaaatctaaatac

SEQ ID NO: 248289 - DNA, 13 bp, Artificial Sequence
  Oligonucleotide for detection of SNP TSC0060671
aaatgtatgtgag

SEQ ID NO: 248290 - DNA, 13 bp, Artificial Sequence
  Oligonucleotide for detection of SNP TSC0060671
ctcacatacattt

SEQ ID NO: 248291 - DNA, 13 bp, Artificial Sequence
  Oligonucleotide for detection of SNP TSC0060671
aaatgtttgtgag

SEQ ID NO: 248292 - DNA, 13 bp, Artificial Sequence
  Oligonucleotide for detection of SNP TSC0060671
ctcacaaacattt

SEQ ID NO: 248293 - DNA, 13 bp, Artificial Sequence
  Oligonucleotide for detection of SNP TSC0060671
tttataggtattt

SEQ ID NO: 248294 - DNA, 13 bp, Artificial Sequence
  Oligonucleotide for detection of SNP TSC0060671
aaatacctataaa

SEQ ID NO: 248295 - DNA, 13 bp, Artificial Sequence
  Oligonucleotide for detection of SNP TSC0060672
tattggggtttgy

SEQ ID NO: 248296 - DNA, 13 bp, Artificial Sequence
  Oligonucleotide for detection of SNP TSC0060672
rcaaaccccaata

SEQ ID NO: 248297 - DNA, 13 bp, Artificial Sequence
  Oligonucleotide for detection of SNP TSC0060672
tattggagtttgy

SEQ ID NO: 248298 - DNA, 13 bp, Artificial Sequence
  Oligonucleotide for detection of SNP TSC0060672
rcaaactccaata

SEQ ID NO: 248299 - DNA, 13 bp, Artificial Sequence
  Oligonucleotide for detection of SNP TSC0060673
ttgatataaatga

SEQ ID NO: 248300 - DNA, 13 bp, Artificial Sequence
  Oligonucleotide for detection of SNP TSC0060673
tcatttatatcaa

SEQ ID NO: 248301 - DNA, 13 bp, Artificial Sequence
  Oligonucleotide for detection of SNP TSC0060673
ttgatagaaatga

SEQ ID NO: 248302 - DNA, 13 bp, Artificial Sequence
  Oligonucleotide for detection of SNP TSC0060673
tcatttctatcaa

SEQ ID NO: 248303 - DNA, 13 bp, Artificial Sequence
  Oligonucleotide for detection of SNP TSC0060674
gtagagattttty

SEQ ID NO: 248304 - DNA, 13 bp, Artificial Sequence
  Oligonucleotide for detection of SNP TSC0060674
raaaaatctctac

SEQ ID NO: 248305 - DNA, 13 bp, Artificial Sequence
  Oligonucleotide for detection of SNP TSC0060677
agatatattaata

SEQ ID NO: 248306 - DNA, 13 bp, Artificial Sequence
  Oligonucleotide for detection of SNP TSC0060677
tattaatatatct

SEQ ID NO: 248307 - DNA, 13 bp, Artificial Sequence
  Oligonucleotide for detection of SNP TSC0060677
tgttagtgtgttt

SEQ ID NO: 248308 - DNA, 13 bp, Artificial Sequence
  Oligonucleotide for detection of SNP TSC0060677
aaacacactaaca

SEQ ID NO: 248309 - DNA, 13 bp, Artificial Sequence
  Oligonucleotide for detection of SNP TSC0060677
tgttagggtgttt

SEQ ID NO: 248310 - DNA, 13 bp, Artificial Sequence
  Oligonucleotide for detection of SNP TSC0060677
aaacaccctaaca

SEQ ID NO: 248311 - DNA, 13 bp, Artificial Sequence
  Oligonucleotide for detection of SNP TSC0060678
gttaaaatattat

SEQ ID NO: 248312 - DNA, 13 bp, Artificial Sequence
  Oligonucleotide for detection of SNP TSC0060678
ataatattttaac

SEQ ID NO: 248313 - DNA, 13 bp, Artificial Sequence
  Oligonucleotide for detection of SNP TSC0060678
gttaaattattat

SEQ ID NO: 248314 - DNA, 13 bp, Artificial Sequence
  Oligonucleotide for detection of SNP TSC0060678
ataataatttaac

SEQ ID NO: 248315 - DNA, 13 bp, Artificial Sequence
  Oligonucleotide for detection of SNP TSC0060678
ataatgttttagy

SEQ ID NO: 248316 - DNA, 13 bp, Artificial Sequence
  Oligonucleotide for detection of SNP TSC0060678
rctaaaacattat

SEQ ID NO: 248317 - DNA, 13 bp, Artificial Sequence
  Oligonucleotide for detection of SNP TSC0060678
ataatgatttagy

SEQ ID NO: 248318 - DNA, 13 bp, Artificial Sequence
  Oligonucleotide for detection of SNP TSC0060678
rctaaatcattat

SEQ ID NO: 248319 - DNA, 13 bp, Artificial Sequence
  Oligonucleotide for detection of SNP TSC0060680
attttattaggtg

SEQ ID NO: 248320 - DNA, 13 bp, Artificial Sequence
  Oligonucleotide for detection of SNP TSC0060680
cacctaataaaat

SEQ ID NO: 248321 - DNA, 13 bp, Artificial Sequence
  Oligonucleotide for detection of SNP TSC0060680
attttagtaggtg

SEQ ID NO: 248322 - DNA, 13 bp, Artificial Sequence
  Oligonucleotide for detection of SNP TSC0060680
cacctactaaaat

SEQ ID NO: 248323 - DNA, 13 bp, Artificial Sequence
  Oligonucleotide for detection of SNP TSC0060680
tatttaatgaaat

SEQ ID NO: 248324 - DNA, 13 bp, Artificial Sequence
  Oligonucleotide for detection of SNP TSC0060680
atttcattaaata

SEQ ID NO: 248325 - DNA, 13 bp, Artificial Sequence
  Oligonucleotide for detection of SNP TSC0060680
tatttattgaaat

SEQ ID NO: 248326 - DNA, 13 bp, Artificial Sequence
  Oligonucleotide for detection of SNP TSC0060680
atttcaataaata

SEQ ID NO: 248327 - DNA, 13 bp, Artificial Sequence
  Oligonucleotide for detection of SNP TSC0060681
gagtgtattgttt

SEQ ID NO: 248328 - DNA, 13 bp, Artificial Sequence
  Oligonucleotide for detection of SNP TSC0060681
aaacaatacactc

SEQ ID NO: 248329 - DNA, 13 bp, Artificial Sequence
  Oligonucleotide for detection of SNP TSC0060681
gagtgtgttgttt

SEQ ID NO: 248330 - DNA, 13 bp, Artificial Sequence
  Oligonucleotide for detection of SNP TSC0060681
aaacaacacactc

SEQ ID NO: 248331 - DNA, 13 bp, Artificial Sequence
  Oligonucleotide for detection of SNP TSC0060681
gagcgtattgttt

SEQ ID NO: 248332 - DNA, 13 bp, Artificial Sequence
  Oligonucleotide for detection of SNP TSC0060681
aaacaatacgctc

SEQ ID NO: 248333 - DNA, 13 bp, Artificial Sequence
  Oligonucleotide for detection of SNP TSC0060681
gagcgtgttgttt

SEQ ID NO: 248334 - DNA, 13 bp, Artificial Sequence
  Oligonucleotide for detection of SNP TSC0060681
aaacaacacgctc

SEQ ID NO: 248335 - DNA, 13 bp, Artificial Sequence
  Oligonucleotide for detection of SNP TSC0060682
atggaattggagg

SEQ ID NO: 248336 - DNA, 13 bp, Artificial Sequence
  Oligonucleotide for detection of SNP TSC0060682
cctccaattccat

SEQ ID NO: 248337 - DNA, 13 bp, Artificial Sequence
  Oligonucleotide for detection of SNP TSC0060682
atggaagtggagg

SEQ ID NO: 248338 - DNA, 13 bp, Artificial Sequence
  Oligonucleotide for detection of SNP TSC0060682
cctccacttccat

SEQ ID NO: 248339 - DNA, 13 bp, Artificial Sequence
  Oligonucleotide for detection of SNP TSC0060683
atttaaaaatatg

SEQ ID NO: 248340 - DNA, 13 bp, Artificial Sequence
  Oligonucleotide for detection of SNP TSC0060683
catatttttaaat

SEQ ID NO: 248341 - DNA, 13 bp, Artificial Sequence
  Oligonucleotide for detection of SNP TSC0060683
atttaagaatatg

SEQ ID NO: 248342 - DNA, 13 bp, Artificial Sequence
  Oligonucleotide for detection of SNP TSC0060683
catattcttaaat

SEQ ID NO: 248343 - DNA, 13 bp, Artificial Sequence
  Oligonucleotide for detection of SNP TSC0060684
attagtattaatt

SEQ ID NO: 248344 - DNA, 13 bp, Artificial Sequence
  Oligonucleotide for detection of SNP TSC0060684
aattaatactaat

SEQ ID NO: 248345 - DNA, 13 bp, Artificial Sequence
  Oligonucleotide for detection of SNP TSC0060684
attagttttaatt

SEQ ID NO: 248346 - DNA, 13 bp, Artificial Sequence
  Oligonucleotide for detection of SNP TSC0060684
aattaaaactaat

SEQ ID NO: 248347 - DNA, 13 bp, Artificial Sequence
  Oligonucleotide for detection of SNP TSC0060684
agttggtgttgat

SEQ ID NO: 248348 - DNA, 13 bp, Artificial Sequence
  Oligonucleotide for detection of SNP TSC0060684
atcaacaccaact

SEQ ID NO: 248349 - DNA, 13 bp, Artificial Sequence
  Oligonucleotide for detection of SNP TSC0060684
agttggagttgat

SEQ ID NO: 248350 - DNA, 13 bp, Artificial Sequence
  Oligonucleotide for detection of SNP TSC0060684
atcaactccaact

SEQ ID NO: 248351 - DNA, 13 bp, Artificial Sequence
  Oligonucleotide for detection of SNP TSC0060685
attattagtgttt

SEQ ID NO: 248352 - DNA, 13 bp, Artificial Sequence
  Oligonucleotide for detection of SNP TSC0060685
aaacactaataat

SEQ ID NO: 248353 - DNA, 13 bp, Artificial Sequence
  Oligonucleotide for detection of SNP TSC0060685
attattggtgttt

SEQ ID NO: 248354 - DNA, 13 bp, Artificial Sequence
  Oligonucleotide for detection of SNP TSC0060685
aaacaccaataat

SEQ ID NO: 248355 - DNA, 13 bp, Artificial Sequence
  Oligonucleotide for detection of SNP TSC0060685
attatcggtgttt

SEQ ID NO: 248356 - DNA, 13 bp, Artificial Sequence
  Oligonucleotide for detection of SNP TSC0060685
aaacaccgataat

SEQ ID NO: 248357 - DNA, 13 bp, Artificial Sequence
  Oligonucleotide for detection of SNP TSC0060685
aggtattgataat

SEQ ID NO: 248358 - DNA, 13 bp, Artificial Sequence
  Oligonucleotide for detection of SNP TSC0060685
attatcaatacct

SEQ ID NO: 248359 - DNA, 13 bp, Artificial Sequence
  Oligonucleotide for detection of SNP TSC0060685
aggtatcgataat

SEQ ID NO: 248360 - DNA, 13 bp, Artificial Sequence
  Oligonucleotide for detection of SNP TSC0060685
attatcgatacct

SEQ ID NO: 248361 - DNA, 13 bp, Artificial Sequence
  Oligonucleotide for detection of SNP TSC0060686
aatatgaggtttg

SEQ ID NO: 248362 - DNA, 13 bp, Artificial Sequence
  Oligonucleotide for detection of SNP TSC0060686
caaacctcatatt

SEQ ID NO: 248363 - DNA, 13 bp, Artificial Sequence
  Oligonucleotide for detection of SNP TSC0060686
aatatggggtttg

SEQ ID NO: 248364 - DNA, 13 bp, Artificial Sequence
  Oligonucleotide for detection of SNP TSC0060686
caaaccccatatt

SEQ ID NO: 248365 - DNA, 13 bp, Artificial Sequence
  Oligonucleotide for detection of SNP TSC0060687
atttgtatttaga

SEQ ID NO: 248366 - DNA, 13 bp, Artificial Sequence
  Oligonucleotide for detection of SNP TSC0060687
tctaaatacaaat

SEQ ID NO: 248367 - DNA, 13 bp, Artificial Sequence
  Oligonucleotide for detection of SNP TSC0060689
ataaaaaaataay

SEQ ID NO: 248368 - DNA, 13 bp, Artificial Sequence
  Oligonucleotide for detection of SNP TSC0060689
rttatttttttat

SEQ ID NO: 248369 - DNA, 13 bp, Artificial Sequence
  Oligonucleotide for detection of SNP TSC0060689
ataaaataataay

SEQ ID NO: 248370 - DNA, 13 bp, Artificial Sequence
  Oligonucleotide for detection of SNP TSC0060689
rttattattttat

SEQ ID NO: 248371 - DNA, 13 bp, Artificial Sequence
  Oligonucleotide for detection of SNP TSC0060690
tatgttaaaatta

SEQ ID NO: 248372 - DNA, 13 bp, Artificial Sequence
  Oligonucleotide for detection of SNP TSC0060690
taattttaacata

SEQ ID NO: 248373 - DNA, 13 bp, Artificial Sequence
  Oligonucleotide for detection of SNP TSC0060690
tatgttgaaatta

SEQ ID NO: 248374 - DNA, 13 bp, Artificial Sequence
  Oligonucleotide for detection of SNP TSC0060690
taatttcaacata

SEQ ID NO: 248375 - DNA, 13 bp, Artificial Sequence
  Oligonucleotide for detection of SNP TSC0060690
tatgtcgaaatta

SEQ ID NO: 248376 - DNA, 13 bp, Artificial Sequence
  Oligonucleotide for detection of SNP TSC0060690
taatttcgacata

SEQ ID NO: 248377 - DNA, 13 bp, Artificial Sequence
  Oligonucleotide for detection of SNP TSC0060690
tgattttgatatg

SEQ ID NO: 248378 - DNA, 13 bp, Artificial Sequence
  Oligonucleotide for detection of SNP TSC0060690
catatcaaaatca

SEQ ID NO: 248379 - DNA, 13 bp, Artificial Sequence
  Oligonucleotide for detection of SNP TSC0060690
tgatttcgatatg

SEQ ID NO: 248380 - DNA, 13 bp, Artificial Sequence
  Oligonucleotide for detection of SNP TSC0060690
catatcgaaatca

SEQ ID NO: 248381 - DNA, 13 bp, Artificial Sequence
  Oligonucleotide for detection of SNP TSC0060691
ttatttattcgta

SEQ ID NO: 248382 - DNA, 13 bp, Artificial Sequence
  Oligonucleotide for detection of SNP TSC0060691
tacgaataaataa

SEQ ID NO: 248383 - DNA, 13 bp, Artificial Sequence
  Oligonucleotide for detection of SNP TSC0060691
ttatttgttcgta

SEQ ID NO: 248384 - DNA, 13 bp, Artificial Sequence
  Oligonucleotide for detection of SNP TSC0060691
tacgaacaaataa

SEQ ID NO: 248385 - DNA, 13 bp, Artificial Sequence
  Oligonucleotide for detection of SNP TSC0060696
ggagagagtttgt

SEQ ID NO: 248386 - DNA, 13 bp, Artificial Sequence
  Oligonucleotide for detection of SNP TSC0060696
acaaactctctcc

SEQ ID NO: 248387 - DNA, 13 bp, Artificial Sequence
  Oligonucleotide for detection of SNP TSC0060696
ggagagggtttgt

SEQ ID NO: 248388 - DNA, 13 bp, Artificial Sequence
  Oligonucleotide for detection of SNP TSC0060696
acaaaccctctcc

SEQ ID NO: 248389 - DNA, 13 bp, Artificial Sequence
  Oligonucleotide for detection of SNP TSC0060697
ttttgtatgggty

SEQ ID NO: 248390 - DNA, 13 bp, Artificial Sequence
  Oligonucleotide for detection of SNP TSC0060697
racccatacaaaa

SEQ ID NO: 248391 - DNA, 13 bp, Artificial Sequence
  Oligonucleotide for detection of SNP TSC0060697
ttttgtgtgggty

SEQ ID NO: 248392 - DNA, 13 bp, Artificial Sequence
  Oligonucleotide for detection of SNP TSC0060697
racccacacaaaa

SEQ ID NO: 248393 - DNA, 13 bp, Artificial Sequence
  Oligonucleotide for detection of SNP TSC0060697
ttttgcgtgggty

SEQ ID NO: 248394 - DNA, 13 bp, Artificial Sequence
  Oligonucleotide for detection of SNP TSC0060697
racccacgcaaaa

SEQ ID NO: 248395 - DNA, 13 bp, Artificial Sequence
  Oligonucleotide for detection of SNP TSC0060697
ggtttatgtaggg

SEQ ID NO: 248396 - DNA, 13 bp, Artificial Sequence
  Oligonucleotide for detection of SNP TSC0060697
ccctacataaacc

SEQ ID NO: 248397 - DNA, 13 bp, Artificial Sequence
  Oligonucleotide for detection of SNP TSC0060697
ggtttacgtaggg

SEQ ID NO: 248398 - DNA, 13 bp, Artificial Sequence
  Oligonucleotide for detection of SNP TSC0060697
ccctacgtaaacc

SEQ ID NO: 248399 - DNA, 13 bp, Artificial Sequence
  Oligonucleotide for detection of SNP TSC0060698
gtatggtgtttay

SEQ ID NO: 248400 - DNA, 13 bp, Artificial Sequence
  Oligonucleotide for detection of SNP TSC0060698
rtaaacaccatac

SEQ ID NO: 248401 - DNA, 13 bp, Artificial Sequence
  Oligonucleotide for detection of SNP TSC0060698
gtatggggtttay

SEQ ID NO: 248402 - DNA, 13 bp, Artificial Sequence
  Oligonucleotide for detection of SNP TSC0060698
rtaaaccccatac

SEQ ID NO: 248403 - DNA, 13 bp, Artificial Sequence
  Oligonucleotide for detection of SNP TSC0060698
gtgaatattatgy

SEQ ID NO: 248404 - DNA, 13 bp, Artificial Sequence
  Oligonucleotide for detection of SNP TSC0060698
rcataatattcac

SEQ ID NO: 248405 - DNA, 13 bp, Artificial Sequence
  Oligonucleotide for detection of SNP TSC0060698
gtgaattttatgy

SEQ ID NO: 248406 - DNA, 13 bp, Artificial Sequence
  Oligonucleotide for detection of SNP TSC0060698
rcataaaattcac

SEQ ID NO: 248407 - DNA, 13 bp, Artificial Sequence
  Oligonucleotide for detection of SNP TSC0060704
gatttgatattga

SEQ ID NO: 248408 - DNA, 13 bp, Artificial Sequence
  Oligonucleotide for detection of SNP TSC0060704
tcaatatcaaatc

SEQ ID NO: 248409 - DNA, 13 bp, Artificial Sequence
  Oligonucleotide for detection of SNP TSC0060704
gatttgttattga

SEQ ID NO: 248410 - DNA, 13 bp, Artificial Sequence
  Oligonucleotide for detection of SNP TSC0060704
tcaataacaaatc

SEQ ID NO: 248411 - DNA, 13 bp, Artificial Sequence
  Oligonucleotide for detection of SNP TSC0060704
ttaatattaggty

SEQ ID NO: 248412 - DNA, 13 bp, Artificial Sequence
  Oligonucleotide for detection of SNP TSC0060704
racctaatattaa

SEQ ID NO: 248413 - DNA, 13 bp, Artificial Sequence
  Oligonucleotide for detection of SNP TSC0060704
ttaataataggty

SEQ ID NO: 248414 - DNA, 13 bp, Artificial Sequence
  Oligonucleotide for detection of SNP TSC0060704
racctattattaa

SEQ ID NO: 248415 - DNA, 13 bp, Artificial Sequence
  Oligonucleotide for detection of SNP TSC0060709
tgtatagagaaga

SEQ ID NO: 248416 - DNA, 13 bp, Artificial Sequence
  Oligonucleotide for detection of SNP TSC0060709
tcttctctataca

SEQ ID NO: 248417 - DNA, 13 bp, Artificial Sequence
  Oligonucleotide for detection of SNP TSC0060709
tgtataaagaaga

SEQ ID NO: 248418 - DNA, 13 bp, Artificial Sequence
  Oligonucleotide for detection of SNP TSC0060709
tcttctttataca

SEQ ID NO: 248419 - DNA, 13 bp, Artificial Sequence
  Oligonucleotide for detection of SNP TSC0060712
gaatatatttgta

SEQ ID NO: 248420 - DNA, 13 bp, Artificial Sequence
  Oligonucleotide for detection of SNP TSC0060712
tacaaatatattc

SEQ ID NO: 248421 - DNA, 13 bp, Artificial Sequence
  Oligonucleotide for detection of SNP TSC0060712
gaatatgtttgta

SEQ ID NO: 248422 - DNA, 13 bp, Artificial Sequence
  Oligonucleotide for detection of SNP TSC0060712
tacaaacatattc

SEQ ID NO: 248423 - DNA, 13 bp, Artificial Sequence
  Oligonucleotide for detection of SNP TSC0060712
gaatatattcgta

SEQ ID NO: 248424 - DNA, 13 bp, Artificial Sequence
  Oligonucleotide for detection of SNP TSC0060712
tacgaatatattc

SEQ ID NO: 248425 - DNA, 13 bp, Artificial Sequence
  Oligonucleotide for detection of SNP TSC0060712
gaatatgttcgta

SEQ ID NO: 248426 - DNA, 13 bp, Artificial Sequence
  Oligonucleotide for detection of SNP TSC0060712
tacgaacatattc

SEQ ID NO: 248427 - DNA, 13 bp, Artificial Sequence
  Oligonucleotide for detection of SNP TSC0060714
tggagtatagtgg

SEQ ID NO: 248428 - DNA, 13 bp, Artificial Sequence
  Oligonucleotide for detection of SNP TSC0060714
ccactatactcca

SEQ ID NO: 248429 - DNA, 13 bp, Artificial Sequence
  Oligonucleotide for detection of SNP TSC0060715
attttagtagttg

SEQ ID NO: 248430 - DNA, 13 bp, Artificial Sequence
  Oligonucleotide for detection of SNP TSC0060715
caactactaaaat

SEQ ID NO: 248431 - DNA, 13 bp, Artificial Sequence
  Oligonucleotide for detection of SNP TSC0060715
attttaatagttg

SEQ ID NO: 248432 - DNA, 13 bp, Artificial Sequence
  Oligonucleotide for detection of SNP TSC0060715
caactattaaaat

SEQ ID NO: 248433 - DNA, 13 bp, Artificial Sequence
  Oligonucleotide for detection of SNP TSC0060717
gaggtatagagag

SEQ ID NO: 248434 - DNA, 13 bp, Artificial Sequence
  Oligonucleotide for detection of SNP TSC0060717
ctctctatacctc

SEQ ID NO: 248435 - DNA, 13 bp, Artificial Sequence
  Oligonucleotide for detection of SNP TSC0060717
gaggtagagagag

SEQ ID NO: 248436 - DNA, 13 bp, Artificial Sequence
  Oligonucleotide for detection of SNP TSC0060717
ctctctctacctc

SEQ ID NO: 248437 - DNA, 13 bp, Artificial Sequence
  Oligonucleotide for detection of SNP TSC0060718
atttgtatttgty

SEQ ID NO: 248438 - DNA, 13 bp, Artificial Sequence
  Oligonucleotide for detection of SNP TSC0060718
racaaatacaaat

SEQ ID NO: 248439 - DNA, 13 bp, Artificial Sequence
  Oligonucleotide for detection of SNP TSC0060718
gataggtgtaggt

SEQ ID NO: 248440 - DNA, 13 bp, Artificial Sequence
  Oligonucleotide for detection of SNP TSC0060718
acctacacctatc

SEQ ID NO: 248441 - DNA, 13 bp, Artificial Sequence
  Oligonucleotide for detection of SNP TSC0060718
gataggggtaggt

SEQ ID NO: 248442 - DNA, 13 bp, Artificial Sequence
  Oligonucleotide for detection of SNP TSC0060718
acctacccctatc

SEQ ID NO: 248443 - DNA, 13 bp, Artificial Sequence
  Oligonucleotide for detection of SNP TSC0060719
aggtaatgggttt

SEQ ID NO: 248444 - DNA, 13 bp, Artificial Sequence
  Oligonucleotide for detection of SNP TSC0060719
aaacccattacct

SEQ ID NO: 248445 - DNA, 13 bp, Artificial Sequence
  Oligonucleotide for detection of SNP TSC0060719
aggtaaggggttt

SEQ ID NO: 248446 - DNA, 13 bp, Artificial Sequence
  Oligonucleotide for detection of SNP TSC0060719
aaaccccttacct

SEQ ID NO: 248447 - DNA, 13 bp, Artificial Sequence
  Oligonucleotide for detection of SNP TSC0060719
aggtaacgggttt

SEQ ID NO: 248448 - DNA, 13 bp, Artificial Sequence
  Oligonucleotide for detection of SNP TSC0060719
aaacccgttacct

SEQ ID NO: 248449 - DNA, 13 bp, Artificial Sequence
  Oligonucleotide for detection of SNP TSC0060719
aggtttgttgttt

SEQ ID NO: 248450 - DNA, 13 bp, Artificial Sequence
  Oligonucleotide for detection of SNP TSC0060719
aaacaacaaacct

SEQ ID NO: 248451 - DNA, 13 bp, Artificial Sequence
  Oligonucleotide for detection of SNP TSC0060719
aggttttttgttt

SEQ ID NO: 248452 - DNA, 13 bp, Artificial Sequence
  Oligonucleotide for detection of SNP TSC0060719
aaacaaaaaacct

SEQ ID NO: 248453 - DNA, 13 bp, Artificial Sequence
  Oligonucleotide for detection of SNP TSC0060719
aggttcgttgttt

SEQ ID NO: 248454 - DNA, 13 bp, Artificial Sequence
  Oligonucleotide for detection of SNP TSC0060719
aaacaacgaacct

SEQ ID NO: 248455 - DNA, 13 bp, Artificial Sequence
  Oligonucleotide for detection of SNP TSC0060721
tgaaagattttay

SEQ ID NO: 248456 - DNA, 13 bp, Artificial Sequence
  Oligonucleotide for detection of SNP TSC0060721
rtaaaatctttca

SEQ ID NO: 248457 - DNA, 13 bp, Artificial Sequence
  Oligonucleotide for detection of SNP TSC0060721
tgaaaggttttay

SEQ ID NO: 248458 - DNA, 13 bp, Artificial Sequence
  Oligonucleotide for detection of SNP TSC0060721
rtaaaacctttca

SEQ ID NO: 248459 - DNA, 13 bp, Artificial Sequence
  Oligonucleotide for detection of SNP TSC0060722
ggaatgagaagtt

SEQ ID NO: 248460 - DNA, 13 bp, Artificial Sequence
  Oligonucleotide for detection of SNP TSC0060722
aacttctcattcc

SEQ ID NO: 248461 - DNA, 13 bp, Artificial Sequence
  Oligonucleotide for detection of SNP TSC0060722
ggaatgggaagtt

SEQ ID NO: 248462 - DNA, 13 bp, Artificial Sequence
  Oligonucleotide for detection of SNP TSC0060722
aacttcccattcc

SEQ ID NO: 248463 - DNA, 13 bp, Artificial Sequence
  Oligonucleotide for detection of SNP TSC0060723
atttggagagatt

SEQ ID NO: 248464 - DNA, 13 bp, Artificial Sequence
  Oligonucleotide for detection of SNP TSC0060723
aatctctccaaat

SEQ ID NO: 248465 - DNA, 13 bp, Artificial Sequence
  Oligonucleotide for detection of SNP TSC0060723
atttggggagatt

SEQ ID NO: 248466 - DNA, 13 bp, Artificial Sequence
  Oligonucleotide for detection of SNP TSC0060723
aatctccccaaat

SEQ ID NO: 248467 - DNA, 13 bp, Artificial Sequence
  Oligonucleotide for detection of SNP TSC0060724
atttattttgaat

SEQ ID NO: 248468 - DNA, 13 bp, Artificial Sequence
  Oligonucleotide for detection of SNP TSC0060724
attcaaaataaat

SEQ ID NO: 248469 - DNA, 13 bp, Artificial Sequence
  Oligonucleotide for detection of SNP TSC0060724
atttatgttgaat

SEQ ID NO: 248470 - DNA, 13 bp, Artificial Sequence
  Oligonucleotide for detection of SNP TSC0060724
attcaacataaat

SEQ ID NO: 248471 - DNA, 13 bp, Artificial Sequence
  Oligonucleotide for detection of SNP TSC0060724
atttaggatgaat

SEQ ID NO: 248472 - DNA, 13 bp, Artificial Sequence
  Oligonucleotide for detection of SNP TSC0060724
attcatcctaaat

SEQ ID NO: 248473 - DNA, 13 bp, Artificial Sequence
  Oligonucleotide for detection of SNP TSC0060724
atttagtatgaat

SEQ ID NO: 248474 - DNA, 13 bp, Artificial Sequence
  Oligonucleotide for detection of SNP TSC0060724
attcatactaaat

SEQ ID NO: 248475 - DNA, 13 bp, Artificial Sequence
  Oligonucleotide for detection of SNP TSC0060726
gaggaaaaaaaay

SEQ ID NO: 248476 - DNA, 13 bp, Artificial Sequence
  Oligonucleotide for detection of SNP TSC0060726
rttttttttcctc

SEQ ID NO: 248477 - DNA, 13 bp, Artificial Sequence
  Oligonucleotide for detection of SNP TSC0060726
gaggaagaaaaay

SEQ ID NO: 248478 - DNA, 13 bp, Artificial Sequence
  Oligonucleotide for detection of SNP TSC0060726
rtttttcttcctc

SEQ ID NO: 248479 - DNA, 13 bp, Artificial Sequence
  Oligonucleotide for detection of SNP TSC0060727
aagtgtagagttt

SEQ ID NO: 248480 - DNA, 13 bp, Artificial Sequence
  Oligonucleotide for detection of SNP TSC0060727
aaactctacactt

SEQ ID NO: 248481 - DNA, 13 bp, Artificial Sequence
  Oligonucleotide for detection of SNP TSC0060727
aagtgttgagttt

SEQ ID NO: 248482 - DNA, 13 bp, Artificial Sequence
  Oligonucleotide for detection of SNP TSC0060727
aaactcaacactt

SEQ ID NO: 248483 - DNA, 13 bp, Artificial Sequence
  Oligonucleotide for detection of SNP TSC0060727
aagtgtcgagttt

SEQ ID NO: 248484 - DNA, 13 bp, Artificial Sequence
  Oligonucleotide for detection of SNP TSC0060727
aaactcgacactt

SEQ ID NO: 248485 - DNA, 13 bp, Artificial Sequence
  Oligonucleotide for detection of SNP TSC0060727
agattttatattt

SEQ ID NO: 248486 - DNA, 13 bp, Artificial Sequence
  Oligonucleotide for detection of SNP TSC0060727
aaatataaaatct

SEQ ID NO: 248487 - DNA, 13 bp, Artificial Sequence
  Oligonucleotide for detection of SNP TSC0060727
agatttgatattt

SEQ ID NO: 248488 - DNA, 13 bp, Artificial Sequence
  Oligonucleotide for detection of SNP TSC0060727
aaatatcaaatct

SEQ ID NO: 248489 - DNA, 13 bp, Artificial Sequence
  Oligonucleotide for detection of SNP TSC0060727
agattcgatattt

SEQ ID NO: 248490 - DNA, 13 bp, Artificial Sequence
  Oligonucleotide for detection of SNP TSC0060727
aaatatcgaatct

SEQ ID NO: 248491 - DNA, 13 bp, Artificial Sequence
  Oligonucleotide for detection of SNP TSC0060728
ttttatagtgtay

SEQ ID NO: 248492 - DNA, 13 bp, Artificial Sequence
  Oligonucleotide for detection of SNP TSC0060728
rtacactataaaa

SEQ ID NO: 248493 - DNA, 13 bp, Artificial Sequence
  Oligonucleotide for detection of SNP TSC0060728
ttttattgtgtay

SEQ ID NO: 248494 - DNA, 13 bp, Artificial Sequence
  Oligonucleotide for detection of SNP TSC0060728
rtacacaataaaa

SEQ ID NO: 248495 - DNA, 13 bp, Artificial Sequence
  Oligonucleotide for detection of SNP TSC0060728
gtgtattgtgaaa

SEQ ID NO: 248496 - DNA, 13 bp, Artificial Sequence
  Oligonucleotide for detection of SNP TSC0060728
tttcacaatacac

SEQ ID NO: 248497 - DNA, 13 bp, Artificial Sequence
  Oligonucleotide for detection of SNP TSC0060728
gtgtatagtgaaa

SEQ ID NO: 248498 - DNA, 13 bp, Artificial Sequence
  Oligonucleotide for detection of SNP TSC0060728
tttcactatacac

SEQ ID NO: 248499 - DNA, 13 bp, Artificial Sequence
  Oligonucleotide for detection of SNP TSC0060729
atagatattatat

SEQ ID NO: 248500 - DNA, 13 bp, Artificial Sequence
  Oligonucleotide for detection of SNP TSC0060729
atataatatctat

SEQ ID NO: 248501 - DNA, 13 bp, Artificial Sequence
  Oligonucleotide for detection of SNP TSC0060729
atagatgttatat

SEQ ID NO: 248502 - DNA, 13 bp, Artificial Sequence
  Oligonucleotide for detection of SNP TSC0060729
atataacatctat

SEQ ID NO: 248503 - DNA, 13 bp, Artificial Sequence
  Oligonucleotide for detection of SNP TSC0060729
atagacgttatat

SEQ ID NO: 248504 - DNA, 13 bp, Artificial Sequence
  Oligonucleotide for detection of SNP TSC0060729
atataacgtctat

SEQ ID NO: 248505 - DNA, 13 bp, Artificial Sequence
  Oligonucleotide for detection of SNP TSC0060729
atatagtgtttat

SEQ ID NO: 248506 - DNA, 13 bp, Artificial Sequence
  Oligonucleotide for detection of SNP TSC0060729
ataaacactatat

SEQ ID NO: 248507 - DNA, 13 bp, Artificial Sequence
  Oligonucleotide for detection of SNP TSC0060729
atatagcgtttat

SEQ ID NO: 248508 - DNA, 13 bp, Artificial Sequence
  Oligonucleotide for detection of SNP TSC0060729
ataaacgctatat

SEQ ID NO: 248509 - DNA, 13 bp, Artificial Sequence
  Oligonucleotide for detection of SNP TSC0060730
aatttgatttttt

SEQ ID NO: 248510 - DNA, 13 bp, Artificial Sequence
  Oligonucleotide for detection of SNP TSC0060730
aaaaaatcaaatt

SEQ ID NO: 248511 - DNA, 13 bp, Artificial Sequence
  Oligonucleotide for detection of SNP TSC0060730
aatttggtttttt

SEQ ID NO: 248512 - DNA, 13 bp, Artificial Sequence
  Oligonucleotide for detection of SNP TSC0060730
aaaaaaccaaatt

SEQ ID NO: 248513 - DNA, 13 bp, Artificial Sequence
  Oligonucleotide for detection of SNP TSC0060731
agtaaatgatttg

SEQ ID NO: 248514 - DNA, 13 bp, Artificial Sequence
  Oligonucleotide for detection of SNP TSC0060731
caaatcatttact

SEQ ID NO: 248515 - DNA, 13 bp, Artificial Sequence
  Oligonucleotide for detection of SNP TSC0060731
agtaaacgatttg

SEQ ID NO: 248516 - DNA, 13 bp, Artificial Sequence
  Oligonucleotide for detection of SNP TSC0060731
caaatcgtttact

SEQ ID NO: 248517 - DNA, 13 bp, Artificial Sequence
  Oligonucleotide for detection of SNP TSC0060731
taggttatttgtt

SEQ ID NO: 248518 - DNA, 13 bp, Artificial Sequence
  Oligonucleotide for detection of SNP TSC0060731
aacaaataaccta

SEQ ID NO: 248519 - DNA, 13 bp, Artificial Sequence
  Oligonucleotide for detection of SNP TSC0060737
gttttgagaggga

SEQ ID NO: 248520 - DNA, 13 bp, Artificial Sequence
  Oligonucleotide for detection of SNP TSC0060737
tccctctcaaaac

SEQ ID NO: 248521 - DNA, 13 bp, Artificial Sequence
  Oligonucleotide for detection of SNP TSC0060737
gtttcgggaggga

SEQ ID NO: 248522 - DNA, 13 bp, Artificial Sequence
  Oligonucleotide for detection of SNP TSC0060737
tccctcccgaaac

SEQ ID NO: 248523 - DNA, 13 bp, Artificial Sequence
  Oligonucleotide for detection of SNP TSC0060737
gtttcgagaggga

SEQ ID NO: 248524 - DNA, 13 bp, Artificial Sequence
  Oligonucleotide for detection of SNP TSC0060737
tccctctcgaaac

SEQ ID NO: 248525 - DNA, 13 bp, Artificial Sequence
  Oligonucleotide for detection of SNP TSC0060738
ggtaaggttggtg

SEQ ID NO: 248526 - DNA, 13 bp, Artificial Sequence
  Oligonucleotide for detection of SNP TSC0060738
caccaaccttacc

SEQ ID NO: 248527 - DNA, 13 bp, Artificial Sequence
  Oligonucleotide for detection of SNP TSC0060738
ggtaagattggtg

SEQ ID NO: 248528 - DNA, 13 bp, Artificial Sequence
  Oligonucleotide for detection of SNP TSC0060738
caccaatcttacc

SEQ ID NO: 248529 - DNA, 13 bp, Artificial Sequence
  Oligonucleotide for detection of SNP TSC0060739
agagaaaaattta

SEQ ID NO: 248530 - DNA, 13 bp, Artificial Sequence
  Oligonucleotide for detection of SNP TSC0060739
taaatttttctct

SEQ ID NO: 248531 - DNA, 13 bp, Artificial Sequence
  Oligonucleotide for detection of SNP TSC0060739
agagaataattta

SEQ ID NO: 248532 - DNA, 13 bp, Artificial Sequence
  Oligonucleotide for detection of SNP TSC0060739
taaattattctct

SEQ ID NO: 248533 - DNA, 13 bp, Artificial Sequence
  Oligonucleotide for detection of SNP TSC0060741
ttgtttatggtay

SEQ ID NO: 248534 - DNA, 13 bp, Artificial Sequence
  Oligonucleotide for detection of SNP TSC0060741
rtaccataaacaa

SEQ ID NO: 248535 - DNA, 13 bp, Artificial Sequence
  Oligonucleotide for detection of SNP TSC0060741
ttgtttgtggtay

SEQ ID NO: 248536 - DNA, 13 bp, Artificial Sequence
  Oligonucleotide for detection of SNP TSC0060741
rtaccacaaacaa

SEQ ID NO: 248537 - DNA, 13 bp, Artificial Sequence
  Oligonucleotide for detection of SNP TSC0060746
ttgtaatttttgg

SEQ ID NO: 248538 - DNA, 13 bp, Artificial Sequence
  Oligonucleotide for detection of SNP TSC0060746
ccaaaaattacaa

SEQ ID NO: 248539 - DNA, 13 bp, Artificial Sequence
  Oligonucleotide for detection of SNP TSC0060746
ttgtaagttttgg

SEQ ID NO: 248540 - DNA, 13 bp, Artificial Sequence
  Oligonucleotide for detection of SNP TSC0060746
ccaaaacttacaa

SEQ ID NO: 248541 - DNA, 13 bp, Artificial Sequence
  Oligonucleotide for detection of SNP TSC0060746
ttagagattgtag

SEQ ID NO: 248542 - DNA, 13 bp, Artificial Sequence
  Oligonucleotide for detection of SNP TSC0060746
ctacaatctctaa

SEQ ID NO: 248543 - DNA, 13 bp, Artificial Sequence
  Oligonucleotide for detection of SNP TSC0060746
ttagagtttgtag

SEQ ID NO: 248544 - DNA, 13 bp, Artificial Sequence
  Oligonucleotide for detection of SNP TSC0060746
ctacaaactctaa

SEQ ID NO: 248545 - DNA, 13 bp, Artificial Sequence
  Oligonucleotide for detection of SNP TSC0060748
agggatgtgttta

SEQ ID NO: 248546 - DNA, 13 bp, Artificial Sequence
  Oligonucleotide for detection of SNP TSC0060748
taaacacatccct

SEQ ID NO: 248547 - DNA, 13 bp, Artificial Sequence
  Oligonucleotide for detection of SNP TSC0060748
agggatatgttta

SEQ ID NO: 248548 - DNA, 13 bp, Artificial Sequence
  Oligonucleotide for detection of SNP TSC0060748
taaacatatccct

SEQ ID NO: 248549 - DNA, 13 bp, Artificial Sequence
  Oligonucleotide for detection of SNP TSC0060748
agggacgtgttta

SEQ ID NO: 248550 - DNA, 13 bp, Artificial Sequence
  Oligonucleotide for detection of SNP TSC0060748
taaacacgtccct

SEQ ID NO: 248551 - DNA, 13 bp, Artificial Sequence
  Oligonucleotide for detection of SNP TSC0060749
atgatttggtagg

SEQ ID NO: 248552 - DNA, 13 bp, Artificial Sequence
  Oligonucleotide for detection of SNP TSC0060749
cctaccaaatcat

SEQ ID NO: 248553 - DNA, 13 bp, Artificial Sequence
  Oligonucleotide for detection of SNP TSC0060749
acgatttggtagg

SEQ ID NO: 248554 - DNA, 13 bp, Artificial Sequence
  Oligonucleotide for detection of SNP TSC0060749
cctaccaaatcgt

SEQ ID NO: 248555 - DNA, 13 bp, Artificial Sequence
  Oligonucleotide for detection of SNP TSC0060749
atgattcggtagg

SEQ ID NO: 248556 - DNA, 13 bp, Artificial Sequence
  Oligonucleotide for detection of SNP TSC0060749
cctaccgaatcat

SEQ ID NO: 248557 - DNA, 13 bp, Artificial Sequence
  Oligonucleotide for detection of SNP TSC0060749
acgattcggtagg

SEQ ID NO: 248558 - DNA, 13 bp, Artificial Sequence
  Oligonucleotide for detection of SNP TSC0060749
cctaccgaatcgt

SEQ ID NO: 248559 - DNA, 13 bp, Artificial Sequence
  Oligonucleotide for detection of SNP TSC0060749
tttgttggattgt

SEQ ID NO: 248560 - DNA, 13 bp, Artificial Sequence
  Oligonucleotide for detection of SNP TSC0060749
acaatccaacaaa

SEQ ID NO: 248561 - DNA, 13 bp, Artificial Sequence
  Oligonucleotide for detection of SNP TSC0060749
tttgttagattgt

SEQ ID NO: 248562 - DNA, 13 bp, Artificial Sequence
  Oligonucleotide for detection of SNP TSC0060749
acaatctaacaaa

SEQ ID NO: 248563 - DNA, 13 bp, Artificial Sequence
  Oligonucleotide for detection of SNP TSC0060749
tttgtcggattgt

SEQ ID NO: 248564 - DNA, 13 bp, Artificial Sequence
  Oligonucleotide for detection of SNP TSC0060749
acaatccgacaaa

SEQ ID NO: 248565 - DNA, 13 bp, Artificial Sequence
  Oligonucleotide for detection of SNP TSC0060749
tttgttagatcgt

SEQ ID NO: 248566 - DNA, 13 bp, Artificial Sequence
  Oligonucleotide for detection of SNP TSC0060749
acgatctaacaaa

SEQ ID NO: 248567 - DNA, 13 bp, Artificial Sequence
  Oligonucleotide for detection of SNP TSC0060749
tttgttggatcgt

SEQ ID NO: 248568 - DNA, 13 bp, Artificial Sequence
  Oligonucleotide for detection of SNP TSC0060749
acgatccaacaaa

SEQ ID NO: 248569 - DNA, 13 bp, Artificial Sequence
  Oligonucleotide for detection of SNP TSC0060749
tttgtcggatcgt

SEQ ID NO: 248570 - DNA, 13 bp, Artificial Sequence
  Oligonucleotide for detection of SNP TSC0060749
acgatccgacaaa

SEQ ID NO: 248571 - DNA, 13 bp, Artificial Sequence
  Oligonucleotide for detection of SNP TSC0060750
ttattggtaattt

SEQ ID NO: 248572 - DNA, 13 bp, Artificial Sequence
  Oligonucleotide for detection of SNP TSC0060750
aaattaccaataa

SEQ ID NO: 248573 - DNA, 13 bp, Artificial Sequence
  Oligonucleotide for detection of SNP TSC0060755
ttttgttgttgcg

SEQ ID NO: 248574 - DNA, 13 bp, Artificial Sequence
  Oligonucleotide for detection of SNP TSC0060755
cgcaacaacaaaa

SEQ ID NO: 248575 - DNA, 13 bp, Artificial Sequence
  Oligonucleotide for detection of SNP TSC0060755
ttttgtcgttgcg

SEQ ID NO: 248576 - DNA, 13 bp, Artificial Sequence
  Oligonucleotide for detection of SNP TSC0060755
cgcaacgacaaaa

SEQ ID NO: 248577 - DNA, 13 bp, Artificial Sequence
  Oligonucleotide for detection of SNP TSC0060755
tgtagtggtaggg

SEQ ID NO: 248578 - DNA, 13 bp, Artificial Sequence
  Oligonucleotide for detection of SNP TSC0060755
ccctaccactaca

SEQ ID NO: 248579 - DNA, 13 bp, Artificial Sequence
  Oligonucleotide for detection of SNP TSC0060755
tgtagtagtaggg

SEQ ID NO: 248580 - DNA, 13 bp, Artificial Sequence
  Oligonucleotide for detection of SNP TSC0060755
ccctactactaca

SEQ ID NO: 248581 - DNA, 13 bp, Artificial Sequence
  Oligonucleotide for detection of SNP TSC0060755
cgtagtggtaggg

SEQ ID NO: 248582 - DNA, 13 bp, Artificial Sequence
  Oligonucleotide for detection of SNP TSC0060755
ccctaccactacg

SEQ ID NO: 248583 - DNA, 13 bp, Artificial Sequence
  Oligonucleotide for detection of SNP TSC0060755
cgtagtagtaggg

SEQ ID NO: 248584 - DNA, 13 bp, Artificial Sequence
  Oligonucleotide for detection of SNP TSC0060755
ccctactactacg

SEQ ID NO: 248585 - DNA, 13 bp, Artificial Sequence
  Oligonucleotide for detection of SNP TSC0060755
tgtagcggtaggg

SEQ ID NO: 248586 - DNA, 13 bp, Artificial Sequence
  Oligonucleotide for detection of SNP TSC0060755
ccctaccgctaca

SEQ ID NO: 248587 - DNA, 13 bp, Artificial Sequence
  Oligonucleotide for detection of SNP TSC0060755
cgtagcggtaggg

SEQ ID NO: 248588 - DNA, 13 bp, Artificial Sequence
  Oligonucleotide for detection of SNP TSC0060755
ccctaccgctacg

SEQ ID NO: 248589 - DNA, 13 bp, Artificial Sequence
  Oligonucleotide for detection of SNP TSC0060756
attaatagagaty

SEQ ID NO: 248590 - DNA, 13 bp, Artificial Sequence
  Oligonucleotide for detection of SNP TSC0060756
ratctctattaat

SEQ ID NO: 248591 - DNA, 13 bp, Artificial Sequence
  Oligonucleotide for detection of SNP TSC0060756
attaatggagaty

SEQ ID NO: 248592 - DNA, 13 bp, Artificial Sequence
  Oligonucleotide for detection of SNP TSC0060756
ratctccattaat

SEQ ID NO: 248593 - DNA, 13 bp, Artificial Sequence
  Oligonucleotide for detection of SNP TSC0060756
attaacggagaty

SEQ ID NO: 248594 - DNA, 13 bp, Artificial Sequence
  Oligonucleotide for detection of SNP TSC0060756
ratctccgttaat

SEQ ID NO: 248595 - DNA, 13 bp, Artificial Sequence
  Oligonucleotide for detection of SNP TSC0060756
ggtttttgttggt

SEQ ID NO: 248596 - DNA, 13 bp, Artificial Sequence
  Oligonucleotide for detection of SNP TSC0060756
accaacaaaaacc

SEQ ID NO: 248597 - DNA, 13 bp, Artificial Sequence
  Oligonucleotide for detection of SNP TSC0060756
ggttttcgttggt

SEQ ID NO: 248598 - DNA, 13 bp, Artificial Sequence
  Oligonucleotide for detection of SNP TSC0060756
accaacgaaaacc

SEQ ID NO: 248599 - DNA, 13 bp, Artificial Sequence
  Oligonucleotide for detection of SNP TSC0060760
tttgttggtatty

SEQ ID NO: 248600 - DNA, 13 bp, Artificial Sequence
  Oligonucleotide for detection of SNP TSC0060760
raataccaacaaa

SEQ ID NO: 248601 - DNA, 13 bp, Artificial Sequence
  Oligonucleotide for detection of SNP TSC0060760
tttgtcggtatty

SEQ ID NO: 248602 - DNA, 13 bp, Artificial Sequence
  Oligonucleotide for detection of SNP TSC0060760
raataccgacaaa

SEQ ID NO: 248603 - DNA, 13 bp, Artificial Sequence
  Oligonucleotide for detection of SNP TSC0060760
gagtgtcggtaga

SEQ ID NO: 248604 - DNA, 13 bp, Artificial Sequence
  Oligonucleotide for detection of SNP TSC0060760
tctaccgacactc

SEQ ID NO: 248605 - DNA, 13 bp, Artificial Sequence
  Oligonucleotide for detection of SNP TSC0060761
gtgatttaagttt

SEQ ID NO: 248606 - DNA, 13 bp, Artificial Sequence
  Oligonucleotide for detection of SNP TSC0060761
aaacttaaatcac

SEQ ID NO: 248607 - DNA, 13 bp, Artificial Sequence
  Oligonucleotide for detection of SNP TSC0060761
gtgattgaagttt

SEQ ID NO: 248608 - DNA, 13 bp, Artificial Sequence
  Oligonucleotide for detection of SNP TSC0060761
aaacttcaatcac

SEQ ID NO: 248609 - DNA, 13 bp, Artificial Sequence
  Oligonucleotide for detection of SNP TSC0060761
gtgatcgaagttt

SEQ ID NO: 248610 - DNA, 13 bp, Artificial Sequence
  Oligonucleotide for detection of SNP TSC0060761
aaacttcgatcac

SEQ ID NO: 248611 - DNA, 13 bp, Artificial Sequence
  Oligonucleotide for detection of SNP TSC0060761
agatttggattay

SEQ ID NO: 248612 - DNA, 13 bp, Artificial Sequence
  Oligonucleotide for detection of SNP TSC0060761
rtaatccaaatct

SEQ ID NO: 248613 - DNA, 13 bp, Artificial Sequence
  Oligonucleotide for detection of SNP TSC0060761
agattttgattay

SEQ ID NO: 248614 - DNA, 13 bp, Artificial Sequence
  Oligonucleotide for detection of SNP TSC0060761
rtaatcaaaatct

SEQ ID NO: 248615 - DNA, 13 bp, Artificial Sequence
  Oligonucleotide for detection of SNP TSC0060761
agatttcgattay

SEQ ID NO: 248616 - DNA, 13 bp, Artificial Sequence
  Oligonucleotide for detection of SNP TSC0060761
rtaatcgaaatct

SEQ ID NO: 248617 - DNA, 13 bp, Artificial Sequence
  Oligonucleotide for detection of SNP TSC0060762
gattttagttaty

SEQ ID NO: 248618 - DNA, 13 bp, Artificial Sequence
  Oligonucleotide for detection of SNP TSC0060762
rataactaaaatc

SEQ ID NO: 248619 - DNA, 13 bp, Artificial Sequence
  Oligonucleotide for detection of SNP TSC0060762
gatttttgttaty

SEQ ID NO: 248620 - DNA, 13 bp, Artificial Sequence
  Oligonucleotide for detection of SNP TSC0060762
rataacaaaaatc

SEQ ID NO: 248621 - DNA, 13 bp, Artificial Sequence
  Oligonucleotide for detection of SNP TSC0060762
ggtaattaaaaty

SEQ ID NO: 248622 - DNA, 13 bp, Artificial Sequence
  Oligonucleotide for detection of SNP TSC0060762
rattttaattacc

SEQ ID NO: 248623 - DNA, 13 bp, Artificial Sequence
  Oligonucleotide for detection of SNP TSC0060762
ggtaataaaaaty

SEQ ID NO: 248624 - DNA, 13 bp, Artificial Sequence
  Oligonucleotide for detection of SNP TSC0060762
ratttttattacc

SEQ ID NO: 248625 - DNA, 13 bp, Artificial Sequence
  Oligonucleotide for detection of SNP TSC0060763
ttgttgggtttag

SEQ ID NO: 248626 - DNA, 13 bp, Artificial Sequence
  Oligonucleotide for detection of SNP TSC0060763
ctaaacccaacaa

SEQ ID NO: 248627 - DNA, 13 bp, Artificial Sequence
  Oligonucleotide for detection of SNP TSC0060763
ttgttgagtttag

SEQ ID NO: 248628 - DNA, 13 bp, Artificial Sequence
  Oligonucleotide for detection of SNP TSC0060763
ctaaactcaacaa

SEQ ID NO: 248629 - DNA, 13 bp, Artificial Sequence
  Oligonucleotide for detection of SNP TSC0060764
tattattgttgat

SEQ ID NO: 248630 - DNA, 13 bp, Artificial Sequence
  Oligonucleotide for detection of SNP TSC0060764
atcaacaataata

SEQ ID NO: 248631 - DNA, 13 bp, Artificial Sequence
  Oligonucleotide for detection of SNP TSC0060764
tattatagttgat

SEQ ID NO: 248632 - DNA, 13 bp, Artificial Sequence
  Oligonucleotide for detection of SNP TSC0060764
atcaactataata

SEQ ID NO: 248633 - DNA, 13 bp, Artificial Sequence
  Oligonucleotide for detection of SNP TSC0005352
tttattaaagata

SEQ ID NO: 248634 - DNA, 13 bp, Artificial Sequence
  Oligonucleotide for detection of SNP TSC0005352
tatctttaataaa

SEQ ID NO: 248635 - DNA, 13 bp, Artificial Sequence
  Oligonucleotide for detection of SNP TSC0005352
tttattgaagata

SEQ ID NO: 248636 - DNA, 13 bp, Artificial Sequence
  Oligonucleotide for detection of SNP TSC0005352
tatcttcaataaa

SEQ ID NO: 248637 - DNA, 13 bp, Artificial Sequence
  Oligonucleotide for detection of SNP TSC0005352
tttatcgaagata

SEQ ID NO: 248638 - DNA, 13 bp, Artificial Sequence
  Oligonucleotide for detection of SNP TSC0005352
tatcttcgataaa

SEQ ID NO: 248639 - DNA, 13 bp, Artificial Sequence
  Oligonucleotide for detection of SNP TSC0005352
tgtttttggtagg

SEQ ID NO: 248640 - DNA, 13 bp, Artificial Sequence
  Oligonucleotide for detection of SNP TSC0005352
cctaccaaaaaca

SEQ ID NO: 248641 - DNA, 13 bp, Artificial Sequence
  Oligonucleotide for detection of SNP TSC0005352
tgttttcggtagg

SEQ ID NO: 248642 - DNA, 13 bp, Artificial Sequence
  Oligonucleotide for detection of SNP TSC0005352
cctaccgaaaaca

SEQ ID NO: 248643 - DNA, 13 bp, Artificial Sequence
  Oligonucleotide for detection of SNP TSC0060767
tattgtaatgttt

SEQ ID NO: 248644 - DNA, 13 bp, Artificial Sequence
  Oligonucleotide for detection of SNP TSC0060767
aaacattacaata

SEQ ID NO: 248645 - DNA, 13 bp, Artificial Sequence
  Oligonucleotide for detection of SNP TSC0060767
tattgtgatgttt

SEQ ID NO: 248646 - DNA, 13 bp, Artificial Sequence
  Oligonucleotide for detection of SNP TSC0060767
aaacatcacaata

SEQ ID NO: 248647 - DNA, 13 bp, Artificial Sequence
  Oligonucleotide for detection of SNP TSC0060768
gaataagaaagat

SEQ ID NO: 248648 - DNA, 13 bp, Artificial Sequence
  Oligonucleotide for detection of SNP TSC0060768
atctttcttattc

SEQ ID NO: 248649 - DNA, 13 bp, Artificial Sequence
  Oligonucleotide for detection of SNP TSC0060768
gaataaaaaagat

SEQ ID NO: 248650 - DNA, 13 bp, Artificial Sequence
  Oligonucleotide for detection of SNP TSC0060768
atcttttttattc

SEQ ID NO: 248651 - DNA, 13 bp, Artificial Sequence
  Oligonucleotide for detection of SNP TSC0060770
gtggtgtgatggg

SEQ ID NO: 248652 - DNA, 13 bp, Artificial Sequence
  Oligonucleotide for detection of SNP TSC0060770
cccatcacaccac

SEQ ID NO: 248653 - DNA, 13 bp, Artificial Sequence
  Oligonucleotide for detection of SNP TSC0060770
gtggtgggatggg

SEQ ID NO: 248654 - DNA, 13 bp, Artificial Sequence
  Oligonucleotide for detection of SNP TSC0060770
cccatcccaccac

SEQ ID NO: 248655 - DNA, 13 bp, Artificial Sequence
  Oligonucleotide for detection of SNP TSC0060770
gtggtgcgatggg

SEQ ID NO: 248656 - DNA, 13 bp, Artificial Sequence
  Oligonucleotide for detection of SNP TSC0060770
cccatcgcaccac

SEQ ID NO: 248657 - DNA, 13 bp, Artificial Sequence
  Oligonucleotide for detection of SNP TSC0060770
tttattgtattay

SEQ ID NO: 248658 - DNA, 13 bp, Artificial Sequence
  Oligonucleotide for detection of SNP TSC0060770
rtaatacaataaa

SEQ ID NO: 248659 - DNA, 13 bp, Artificial Sequence
  Oligonucleotide for detection of SNP TSC0060770
tttattttattay

SEQ ID NO: 248660 - DNA, 13 bp, Artificial Sequence
  Oligonucleotide for detection of SNP TSC0060770
rtaataaaataaa

SEQ ID NO: 248661 - DNA, 13 bp, Artificial Sequence
  Oligonucleotide for detection of SNP TSC0060770
tttatcgtattay

SEQ ID NO: 248662 - DNA, 13 bp, Artificial Sequence
  Oligonucleotide for detection of SNP TSC0060770
rtaatacgataaa

SEQ ID NO: 248663 - DNA, 13 bp, Artificial Sequence
  Oligonucleotide for detection of SNP TSC0060771
gttttagggaggg

SEQ ID NO: 248664 - DNA, 13 bp, Artificial Sequence
  Oligonucleotide for detection of SNP TSC0060771
ccctccctaaaac

SEQ ID NO: 248665 - DNA, 13 bp, Artificial Sequence
  Oligonucleotide for detection of SNP TSC0060771
gttttaaggaggg

SEQ ID NO: 248666 - DNA, 13 bp, Artificial Sequence
  Oligonucleotide for detection of SNP TSC0060771
ccctccttaaaac

SEQ ID NO: 248667 - DNA, 13 bp, Artificial Sequence
  Oligonucleotide for detection of SNP TSC0060772
tttttaggaataa

SEQ ID NO: 248668 - DNA, 13 bp, Artificial Sequence
  Oligonucleotide for detection of SNP TSC0060772
ttattcctaaaaa

SEQ ID NO: 248669 - DNA, 13 bp, Artificial Sequence
  Oligonucleotide for detection of SNP TSC0060772
tttttaagaataa

SEQ ID NO: 248670 - DNA, 13 bp, Artificial Sequence
  Oligonucleotide for detection of SNP TSC0060772
ttattcttaaaaa

SEQ ID NO: 248671 - DNA, 13 bp, Artificial Sequence
  Oligonucleotide for detection of SNP TSC0060773
ttaaagtataggg

SEQ ID NO: 248672 - DNA, 13 bp, Artificial Sequence
  Oligonucleotide for detection of SNP TSC0060773
ccctatactttaa

SEQ ID NO: 248673 - DNA, 13 bp, Artificial Sequence
  Oligonucleotide for detection of SNP TSC0060773
ttaaaggataggg

SEQ ID NO: 248674 - DNA, 13 bp, Artificial Sequence
  Oligonucleotide for detection of SNP TSC0060773
ccctatcctttaa

SEQ ID NO: 248675 - DNA, 13 bp, Artificial Sequence
  Oligonucleotide for detection of SNP TSC0060775
taatatttttata

SEQ ID NO: 248676 - DNA, 13 bp, Artificial Sequence
  Oligonucleotide for detection of SNP TSC0060775
tataaaaatatta

SEQ ID NO: 248677 - DNA, 13 bp, Artificial Sequence
  Oligonucleotide for detection of SNP TSC0060775
tgtgggagtgttg

SEQ ID NO: 248678 - DNA, 13 bp, Artificial Sequence
  Oligonucleotide for detection of SNP TSC0060775
caacactcccaca

SEQ ID NO: 248679 - DNA, 13 bp, Artificial Sequence
  Oligonucleotide for detection of SNP TSC0060775
tgtgggtgtgttg

SEQ ID NO: 248680 - DNA, 13 bp, Artificial Sequence
  Oligonucleotide for detection of SNP TSC0060775
caacacacccaca

SEQ ID NO: 248681 - DNA, 13 bp, Artificial Sequence
  Oligonucleotide for detection of SNP TSC0060775
tgtgggcgtgttg

SEQ ID NO: 248682 - DNA, 13 bp, Artificial Sequence
  Oligonucleotide for detection of SNP TSC0060775
caacacgcccaca

SEQ ID NO: 248683 - DNA, 13 bp, Artificial Sequence
  Oligonucleotide for detection of SNP TSC0006684
agtattaaagatt

SEQ ID NO: 248684 - DNA, 13 bp, Artificial Sequence
  Oligonucleotide for detection of SNP TSC0006684
aatctttaatact

SEQ ID NO: 248685 - DNA, 13 bp, Artificial Sequence
  Oligonucleotide for detection of SNP TSC0006684
agtattgaagatt

SEQ ID NO: 248686 - DNA, 13 bp, Artificial Sequence
  Oligonucleotide for detection of SNP TSC0006684
aatcttcaatact

SEQ ID NO: 248687 - DNA, 13 bp, Artificial Sequence
  Oligonucleotide for detection of SNP TSC0006684
agtatcgaagatt

SEQ ID NO: 248688 - DNA, 13 bp, Artificial Sequence
  Oligonucleotide for detection of SNP TSC0006684
aatcttcgatact

SEQ ID NO: 248689 - DNA, 13 bp, Artificial Sequence
  Oligonucleotide for detection of SNP TSC0006684
agtttttggtgtt

SEQ ID NO: 248690 - DNA, 13 bp, Artificial Sequence
  Oligonucleotide for detection of SNP TSC0006684
aacaccaaaaact

SEQ ID NO: 248691 - DNA, 13 bp, Artificial Sequence
  Oligonucleotide for detection of SNP TSC0006684
agttttcggtgtt

SEQ ID NO: 248692 - DNA, 13 bp, Artificial Sequence
  Oligonucleotide for detection of SNP TSC0006684
aacaccgaaaact

SEQ ID NO: 248693 - DNA, 13 bp, Artificial Sequence
  Oligonucleotide for detection of SNP TSC0007192
ggttattaataag

SEQ ID NO: 248694 - DNA, 13 bp, Artificial Sequence
  Oligonucleotide for detection of SNP TSC0007192
cttattaataacc

SEQ ID NO: 248695 - DNA, 13 bp, Artificial Sequence
  Oligonucleotide for detection of SNP TSC0007192
ggttatgaataag

SEQ ID NO: 248696 - DNA, 13 bp, Artificial Sequence
  Oligonucleotide for detection of SNP TSC0007192
cttattcataacc

SEQ ID NO: 248697 - DNA, 13 bp, Artificial Sequence
  Oligonucleotide for detection of SNP TSC0007192
ggttacgaataag

SEQ ID NO: 248698 - DNA, 13 bp, Artificial Sequence
  Oligonucleotide for detection of SNP TSC0007192
cttattcgtaacc

SEQ ID NO: 248699 - DNA, 13 bp, Artificial Sequence
  Oligonucleotide for detection of SNP TSC0007192
tttatttgtaaty

SEQ ID NO: 248700 - DNA, 13 bp, Artificial Sequence
  Oligonucleotide for detection of SNP TSC0007192
rattacaaataaa

SEQ ID NO: 248701 - DNA, 13 bp, Artificial Sequence
  Oligonucleotide for detection of SNP TSC0007192
tttattcgtaaty

SEQ ID NO: 248702 - DNA, 13 bp, Artificial Sequence
  Oligonucleotide for detection of SNP TSC0007192
rattacgaataaa

SEQ ID NO: 248703 - DNA, 13 bp, Artificial Sequence
  Oligonucleotide for detection of SNP TSC0060777
tgggatggtaggy

SEQ ID NO: 248704 - DNA, 13 bp, Artificial Sequence
  Oligonucleotide for detection of SNP TSC0060777
rcctaccatccca

SEQ ID NO: 248705 - DNA, 13 bp, Artificial Sequence
  Oligonucleotide for detection of SNP TSC0060778
taaattgtagtgt

SEQ ID NO: 248706 - DNA, 13 bp, Artificial Sequence
  Oligonucleotide for detection of SNP TSC0060778
acactacaattta

SEQ ID NO: 248707 - DNA, 13 bp, Artificial Sequence
  Oligonucleotide for detection of SNP TSC0060778
taaattatagtgt

SEQ ID NO: 248708 - DNA, 13 bp, Artificial Sequence
  Oligonucleotide for detection of SNP TSC0060778
acactataattta

SEQ ID NO: 248709 - DNA, 13 bp, Artificial Sequence
  Oligonucleotide for detection of SNP TSC0060779
tttatttggttga

SEQ ID NO: 248710 - DNA, 13 bp, Artificial Sequence
  Oligonucleotide for detection of SNP TSC0060779
tcaaccaaataaa

SEQ ID NO: 248711 - DNA, 13 bp, Artificial Sequence
  Oligonucleotide for detection of SNP TSC0060779
tttattcggttga

SEQ ID NO: 248712 - DNA, 13 bp, Artificial Sequence
  Oligonucleotide for detection of SNP TSC0060779
tcaaccgaataaa

SEQ ID NO: 248713 - DNA, 13 bp, Artificial Sequence
  Oligonucleotide for detection of SNP TSC0060779
tttatttggtcga

SEQ ID NO: 248714 - DNA, 13 bp, Artificial Sequence
  Oligonucleotide for detection of SNP TSC0060779
tcgaccaaataaa

SEQ ID NO: 248715 - DNA, 13 bp, Artificial Sequence
  Oligonucleotide for detection of SNP TSC0060779
tttattcggtcga

SEQ ID NO: 248716 - DNA, 13 bp, Artificial Sequence
  Oligonucleotide for detection of SNP TSC0060779
tcgaccgaataaa

SEQ ID NO: 248717 - DNA, 13 bp, Artificial Sequence
  Oligonucleotide for detection of SNP TSC0060779
ttgattgggtaaa

SEQ ID NO: 248718 - DNA, 13 bp, Artificial Sequence
  Oligonucleotide for detection of SNP TSC0060779
tttacccaatcaa

SEQ ID NO: 248719 - DNA, 13 bp, Artificial Sequence
  Oligonucleotide for detection of SNP TSC0060779
ttgattaggtaaa

SEQ ID NO: 248720 - DNA, 13 bp, Artificial Sequence
  Oligonucleotide for detection of SNP TSC0060779
tttacctaatcaa

SEQ ID NO: 248721 - DNA, 13 bp, Artificial Sequence
  Oligonucleotide for detection of SNP TSC0060779
tcgattgggtaaa

SEQ ID NO: 248722 - DNA, 13 bp, Artificial Sequence
  Oligonucleotide for detection of SNP TSC0060779
tttacccaatcga

SEQ ID NO: 248723 - DNA, 13 bp, Artificial Sequence
  Oligonucleotide for detection of SNP TSC0060779
tcgattaggtaaa

SEQ ID NO: 248724 - DNA, 13 bp, Artificial Sequence
  Oligonucleotide for detection of SNP TSC0060779
tttacctaatcga

SEQ ID NO: 248725 - DNA, 13 bp, Artificial Sequence
  Oligonucleotide for detection of SNP TSC0060779
ttgatcgggtaaa

SEQ ID NO: 248726 - DNA, 13 bp, Artificial Sequence
  Oligonucleotide for detection of SNP TSC0060779
tttacccgatcaa

SEQ ID NO: 248727 - DNA, 13 bp, Artificial Sequence
  Oligonucleotide for detection of SNP TSC0060779
tcgatcgggtaaa

SEQ ID NO: 248728 - DNA, 13 bp, Artificial Sequence
  Oligonucleotide for detection of SNP TSC0060779
tttacccgatcga

SEQ ID NO: 248729 - DNA, 13 bp, Artificial Sequence
  Oligonucleotide for detection of SNP TSC0060781
gattgtattggtt

SEQ ID NO: 248730 - DNA, 13 bp, Artificial Sequence
  Oligonucleotide for detection of SNP TSC0060781
aaccaatacaatc

SEQ ID NO: 248731 - DNA, 13 bp, Artificial Sequence
  Oligonucleotide for detection of SNP TSC0060781
gattgttttggtt

SEQ ID NO: 248732 - DNA, 13 bp, Artificial Sequence
  Oligonucleotide for detection of SNP TSC0060781
aaccaaaacaatc

SEQ ID NO: 248733 - DNA, 13 bp, Artificial Sequence
  Oligonucleotide for detection of SNP TSC0060781
aattaatgtaaty

SEQ ID NO: 248734 - DNA, 13 bp, Artificial Sequence
  Oligonucleotide for detection of SNP TSC0060781
rattacattaatt

SEQ ID NO: 248735 - DNA, 13 bp, Artificial Sequence
  Oligonucleotide for detection of SNP TSC0060781
aattaaagtaaty

SEQ ID NO: 248736 - DNA, 13 bp, Artificial Sequence
  Oligonucleotide for detection of SNP TSC0060781
rattactttaatt

SEQ ID NO: 248737 - DNA, 13 bp, Artificial Sequence
  Oligonucleotide for detection of SNP TSC0060782
agtttttgttgtt

SEQ ID NO: 248738 - DNA, 13 bp, Artificial Sequence
  Oligonucleotide for detection of SNP TSC0060782
aacaacaaaaact

SEQ ID NO: 248739 - DNA, 13 bp, Artificial Sequence
  Oligonucleotide for detection of SNP TSC0060782
agttttcgttgtt

SEQ ID NO: 248740 - DNA, 13 bp, Artificial Sequence
  Oligonucleotide for detection of SNP TSC0060782
aacaacgaaaact

SEQ ID NO: 248741 - DNA, 13 bp, Artificial Sequence
  Oligonucleotide for detection of SNP TSC0060782
agtaatgggaatt

SEQ ID NO: 248742 - DNA, 13 bp, Artificial Sequence
  Oligonucleotide for detection of SNP TSC0060782
aattcccattact

SEQ ID NO: 248743 - DNA, 13 bp, Artificial Sequence
  Oligonucleotide for detection of SNP TSC0060782
agtaataggaatt

SEQ ID NO: 248744 - DNA, 13 bp, Artificial Sequence
  Oligonucleotide for detection of SNP TSC0060782
aattcctattact

SEQ ID NO: 248745 - DNA, 13 bp, Artificial Sequence
  Oligonucleotide for detection of SNP TSC0060782
agtaacgggaatt

SEQ ID NO: 248746 - DNA, 13 bp, Artificial Sequence
  Oligonucleotide for detection of SNP TSC0060782
aattcccgttact

SEQ ID NO: 248747 - DNA, 13 bp, Artificial Sequence
  Oligonucleotide for detection of SNP TSC0006074
tgattgattattt

SEQ ID NO: 248748 - DNA, 13 bp, Artificial Sequence
  Oligonucleotide for detection of SNP TSC0006074
aaataatcaatca

SEQ ID NO: 248749 - DNA, 13 bp, Artificial Sequence
  Oligonucleotide for detection of SNP TSC0006074
tgattgtttattt

SEQ ID NO: 248750 - DNA, 13 bp, Artificial Sequence
  Oligonucleotide for detection of SNP TSC0006074
aaataaacaatca

SEQ ID NO: 248751 - DNA, 13 bp, Artificial Sequence
  Oligonucleotide for detection of SNP TSC0006074
aagtaattagtta

SEQ ID NO: 248752 - DNA, 13 bp, Artificial Sequence
  Oligonucleotide for detection of SNP TSC0006074
taactaattactt

SEQ ID NO: 248753 - DNA, 13 bp, Artificial Sequence
  Oligonucleotide for detection of SNP TSC0006074
aagtaaatagtta

SEQ ID NO: 248754 - DNA, 13 bp, Artificial Sequence
  Oligonucleotide for detection of SNP TSC0006074
taactatttactt

SEQ ID NO: 248755 - DNA, 13 bp, Artificial Sequence
  Oligonucleotide for detection of SNP TSC0006075
tgaaaggttagta

SEQ ID NO: 248756 - DNA, 13 bp, Artificial Sequence
  Oligonucleotide for detection of SNP TSC0006075
tactaacctttca

SEQ ID NO: 248757 - DNA, 13 bp, Artificial Sequence
  Oligonucleotide for detection of SNP TSC0006075
tgaaagattagta

SEQ ID NO: 248758 - DNA, 13 bp, Artificial Sequence
  Oligonucleotide for detection of SNP TSC0006075
tactaatctttca

SEQ ID NO: 248759 - DNA, 13 bp, Artificial Sequence
  Oligonucleotide for detection of SNP TSC0006076
ggttttagatgat

SEQ ID NO: 248760 - DNA, 13 bp, Artificial Sequence
  Oligonucleotide for detection of SNP TSC0006076
atcatctaaaacc

SEQ ID NO: 248761 - DNA, 13 bp, Artificial Sequence
  Oligonucleotide for detection of SNP TSC0006076
ggttttggatgat

SEQ ID NO: 248762 - DNA, 13 bp, Artificial Sequence
  Oligonucleotide for detection of SNP TSC0006076
atcatccaaaacc

SEQ ID NO: 248763 - DNA, 13 bp, Artificial Sequence
  Oligonucleotide for detection of SNP TSC0006076
ggtttcggatgat

SEQ ID NO: 248764 - DNA, 13 bp, Artificial Sequence
  Oligonucleotide for detection of SNP TSC0006076
atcatccgaaacc

SEQ ID NO: 248765 - DNA, 13 bp, Artificial Sequence
  Oligonucleotide for detection of SNP TSC0006076
attatttgaggty

SEQ ID NO: 248766 - DNA, 13 bp, Artificial Sequence
  Oligonucleotide for detection of SNP TSC0006076
racctcaaataat

SEQ ID NO: 248767 - DNA, 13 bp, Artificial Sequence
  Oligonucleotide for detection of SNP TSC0006076
attattcgaggty

SEQ ID NO: 248768 - DNA, 13 bp, Artificial Sequence
  Oligonucleotide for detection of SNP TSC0006076
racctcgaataat

SEQ ID NO: 248769 - DNA, 13 bp, Artificial Sequence
  Oligonucleotide for detection of SNP TSC0060783
gtaaattgaataa

SEQ ID NO: 248770 - DNA, 13 bp, Artificial Sequence
  Oligonucleotide for detection of SNP TSC0060783
ttattcaatttac

SEQ ID NO: 248771 - DNA, 13 bp, Artificial Sequence
  Oligonucleotide for detection of SNP TSC0060783
gtaaatggaataa

SEQ ID NO: 248772 - DNA, 13 bp, Artificial Sequence
  Oligonucleotide for detection of SNP TSC0060783
ttattccatttac

SEQ ID NO: 248773 - DNA, 13 bp, Artificial Sequence
  Oligonucleotide for detection of SNP TSC0060785
tttatttgtagay

SEQ ID NO: 248774 - DNA, 13 bp, Artificial Sequence
  Oligonucleotide for detection of SNP TSC0060785
rtctacaaataaa

SEQ ID NO: 248775 - DNA, 13 bp, Artificial Sequence
  Oligonucleotide for detection of SNP TSC0060785
tttattcgtagay

SEQ ID NO: 248776 - DNA, 13 bp, Artificial Sequence
  Oligonucleotide for detection of SNP TSC0060785
rtctacgaataaa

SEQ ID NO: 248777 - DNA, 13 bp, Artificial Sequence
  Oligonucleotide for detection of SNP TSC0060785
gtttatgggtaga

SEQ ID NO: 248778 - DNA, 13 bp, Artificial Sequence
  Oligonucleotide for detection of SNP TSC0060785
tctacccataaac

SEQ ID NO: 248779 - DNA, 13 bp, Artificial Sequence
  Oligonucleotide for detection of SNP TSC0060785
gtttataggtaga

SEQ ID NO: 248780 - DNA, 13 bp, Artificial Sequence
  Oligonucleotide for detection of SNP TSC0060785
tctacctataaac

SEQ ID NO: 248781 - DNA, 13 bp, Artificial Sequence
  Oligonucleotide for detection of SNP TSC0060785
gtttacgggtaga

SEQ ID NO: 248782 - DNA, 13 bp, Artificial Sequence
  Oligonucleotide for detection of SNP TSC0060785
tctacccgtaaac

SEQ ID NO: 248783 - DNA, 13 bp, Artificial Sequence
  Oligonucleotide for detection of SNP TSC0060787
tgtagttgatgtt

SEQ ID NO: 248784 - DNA, 13 bp, Artificial Sequence
  Oligonucleotide for detection of SNP TSC0060787
aacatcaactaca

SEQ ID NO: 248785 - DNA, 13 bp, Artificial Sequence
  Oligonucleotide for detection of SNP TSC0060787
tgtagtcgatgtt

SEQ ID NO: 248786 - DNA, 13 bp, Artificial Sequence
  Oligonucleotide for detection of SNP TSC0060787
aacatcgactaca

SEQ ID NO: 248787 - DNA, 13 bp, Artificial Sequence
  Oligonucleotide for detection of SNP TSC0060787
agtattggttata

SEQ ID NO: 248788 - DNA, 13 bp, Artificial Sequence
  Oligonucleotide for detection of SNP TSC0060787
tataaccaatact

SEQ ID NO: 248789 - DNA, 13 bp, Artificial Sequence
  Oligonucleotide for detection of SNP TSC0060787
agtattagttata

SEQ ID NO: 248790 - DNA, 13 bp, Artificial Sequence
  Oligonucleotide for detection of SNP TSC0060787
tataactaatact

SEQ ID NO: 248791 - DNA, 13 bp, Artificial Sequence
  Oligonucleotide for detection of SNP TSC0060787
agtatcggttata

SEQ ID NO: 248792 - DNA, 13 bp, Artificial Sequence
  Oligonucleotide for detection of SNP TSC0060787
tataaccgatact

SEQ ID NO: 248793 - DNA, 13 bp, Artificial Sequence
  Oligonucleotide for detection of SNP TSC0060788
ggagattgtttga

SEQ ID NO: 248794 - DNA, 13 bp, Artificial Sequence
  Oligonucleotide for detection of SNP TSC0060788
tcaaacaatctcc

SEQ ID NO: 248795 - DNA, 13 bp, Artificial Sequence
  Oligonucleotide for detection of SNP TSC0060788
ggagatcgtttga

SEQ ID NO: 248796 - DNA, 13 bp, Artificial Sequence
  Oligonucleotide for detection of SNP TSC0060788
tcaaacgatctcc

SEQ ID NO: 248797 - DNA, 13 bp, Artificial Sequence
  Oligonucleotide for detection of SNP TSC0060789
ttatatagttagg

SEQ ID NO: 248798 - DNA, 13 bp, Artificial Sequence
  Oligonucleotide for detection of SNP TSC0060789
cctaactatataa

SEQ ID NO: 248799 - DNA, 13 bp, Artificial Sequence
  Oligonucleotide for detection of SNP TSC0060789
ttatattgttagg

SEQ ID NO: 248800 - DNA, 13 bp, Artificial Sequence
  Oligonucleotide for detection of SNP TSC0060789
cctaacaatataa

SEQ ID NO: 248801 - DNA, 13 bp, Artificial Sequence
  Oligonucleotide for detection of SNP TSC0060789
ttatatcgttagg

SEQ ID NO: 248802 - DNA, 13 bp, Artificial Sequence
  Oligonucleotide for detection of SNP TSC0060789
cctaacgatataa

SEQ ID NO: 248803 - DNA, 13 bp, Artificial Sequence
  Oligonucleotide for detection of SNP TSC0060789
tttagttgtgtga

SEQ ID NO: 248804 - DNA, 13 bp, Artificial Sequence
  Oligonucleotide for detection of SNP TSC0060789
tcacacaactaaa

SEQ ID NO: 248805 - DNA, 13 bp, Artificial Sequence
  Oligonucleotide for detection of SNP TSC0060789
tttagtggtgtga

SEQ ID NO: 248806 - DNA, 13 bp, Artificial Sequence
  Oligonucleotide for detection of SNP TSC0060789
tcacaccactaaa

SEQ ID NO: 248807 - DNA, 13 bp, Artificial Sequence
  Oligonucleotide for detection of SNP TSC0060789
tttagcggtgtga

SEQ ID NO: 248808 - DNA, 13 bp, Artificial Sequence
  Oligonucleotide for detection of SNP TSC0060789
tcacaccgctaaa

SEQ ID NO: 248809 - DNA, 13 bp, Artificial Sequence
  Oligonucleotide for detection of SNP TSC0060795
agataatgagggt

SEQ ID NO: 248810 - DNA, 13 bp, Artificial Sequence
  Oligonucleotide for detection of SNP TSC0060795
accctcattatct

SEQ ID NO: 248811 - DNA, 13 bp, Artificial Sequence
  Oligonucleotide for detection of SNP TSC0060795
agataaggagggt

SEQ ID NO: 248812 - DNA, 13 bp, Artificial Sequence
  Oligonucleotide for detection of SNP TSC0060795
accctccttatct

SEQ ID NO: 248813 - DNA, 13 bp, Artificial Sequence
  Oligonucleotide for detection of SNP TSC0060796
gtgttgtgtttay

SEQ ID NO: 248814 - DNA, 13 bp, Artificial Sequence
  Oligonucleotide for detection of SNP TSC0060796
rtaaacacaacac

SEQ ID NO: 248815 - DNA, 13 bp, Artificial Sequence
  Oligonucleotide for detection of SNP TSC0060796
gtgttgggtttay

SEQ ID NO: 248816 - DNA, 13 bp, Artificial Sequence
  Oligonucleotide for detection of SNP TSC0060796
rtaaacccaacac

SEQ ID NO: 248817 - DNA, 13 bp, Artificial Sequence
  Oligonucleotide for detection of SNP TSC0060796
gtgttgcgtttay

SEQ ID NO: 248818 - DNA, 13 bp, Artificial Sequence
  Oligonucleotide for detection of SNP TSC0060796
rtaaacgcaacac

SEQ ID NO: 248819 - DNA, 13 bp, Artificial Sequence
  Oligonucleotide for detection of SNP TSC0060796
gtggatgtagtay

SEQ ID NO: 248820 - DNA, 13 bp, Artificial Sequence
  Oligonucleotide for detection of SNP TSC0060796
rtactacatccac

SEQ ID NO: 248821 - DNA, 13 bp, Artificial Sequence
  Oligonucleotide for detection of SNP TSC0060796
gtggatttagtay

SEQ ID NO: 248822 - DNA, 13 bp, Artificial Sequence
  Oligonucleotide for detection of SNP TSC0060796
rtactaaatccac

SEQ ID NO: 248823 - DNA, 13 bp, Artificial Sequence
  Oligonucleotide for detection of SNP TSC0060796
gtggacgtagtay

SEQ ID NO: 248824 - DNA, 13 bp, Artificial Sequence
  Oligonucleotide for detection of SNP TSC0060796
rtactacgtccac

SEQ ID NO: 248825 - DNA, 13 bp, Artificial Sequence
  Oligonucleotide for detection of SNP TSC0060797
ggaatttttttty

SEQ ID NO: 248826 - DNA, 13 bp, Artificial Sequence
  Oligonucleotide for detection of SNP TSC0060797
raaaaaaaattcc

SEQ ID NO: 248827 - DNA, 13 bp, Artificial Sequence
  Oligonucleotide for detection of SNP TSC0060797
ggaattgttttty

SEQ ID NO: 248828 - DNA, 13 bp, Artificial Sequence
  Oligonucleotide for detection of SNP TSC0060797
raaaaacaattcc

SEQ ID NO: 248829 - DNA, 13 bp, Artificial Sequence
  Oligonucleotide for detection of SNP TSC0060797
gagagaaaattty

SEQ ID NO: 248830 - DNA, 13 bp, Artificial Sequence
  Oligonucleotide for detection of SNP TSC0060797
raaattttctctc

SEQ ID NO: 248831 - DNA, 13 bp, Artificial Sequence
  Oligonucleotide for detection of SNP TSC0060797
gagagataattty

SEQ ID NO: 248832 - DNA, 13 bp, Artificial Sequence
  Oligonucleotide for detection of SNP TSC0060797
raaattatctctc

SEQ ID NO: 248833 - DNA, 13 bp, Artificial Sequence
  Oligonucleotide for detection of SNP TSC0060798
ttttagaaaatat

SEQ ID NO: 248834 - DNA, 13 bp, Artificial Sequence
  Oligonucleotide for detection of SNP TSC0060798
atattttctaaaa

SEQ ID NO: 248835 - DNA, 13 bp, Artificial Sequence
  Oligonucleotide for detection of SNP TSC0060798
ttttaggaaatat

SEQ ID NO: 248836 - DNA, 13 bp, Artificial Sequence
  Oligonucleotide for detection of SNP TSC0060798
atatttcctaaaa

SEQ ID NO: 248837 - DNA, 13 bp, Artificial Sequence
  Oligonucleotide for detection of SNP TSC0060800
gttatttttataa

SEQ ID NO: 248838 - DNA, 13 bp, Artificial Sequence
  Oligonucleotide for detection of SNP TSC0060800
ttataaaaataac

SEQ ID NO: 248839 - DNA, 13 bp, Artificial Sequence
  Oligonucleotide for detection of SNP TSC0060801
agagtaaaagagt

SEQ ID NO: 248840 - DNA, 13 bp, Artificial Sequence
  Oligonucleotide for detection of SNP TSC0060801
actcttttactct

SEQ ID NO: 248841 - DNA, 13 bp, Artificial Sequence
  Oligonucleotide for detection of SNP TSC0060801
agagtagaagagt

SEQ ID NO: 248842 - DNA, 13 bp, Artificial Sequence
  Oligonucleotide for detection of SNP TSC0060801
actcttctactct

SEQ ID NO: 248843 - DNA, 13 bp, Artificial Sequence
  Oligonucleotide for detection of SNP TSC0060802
tgaaataggataa

SEQ ID NO: 248844 - DNA, 13 bp, Artificial Sequence
  Oligonucleotide for detection of SNP TSC0060802
ttatcctatttca

SEQ ID NO: 248845 - DNA, 13 bp, Artificial Sequence
  Oligonucleotide for detection of SNP TSC0060802
tgaaatgggataa

SEQ ID NO: 248846 - DNA, 13 bp, Artificial Sequence
  Oligonucleotide for detection of SNP TSC0060802
ttatcccatttca

SEQ ID NO: 248847 - DNA, 13 bp, Artificial Sequence
  Oligonucleotide for detection of SNP TSC0060802
tgaaacgggataa

SEQ ID NO: 248848 - DNA, 13 bp, Artificial Sequence
  Oligonucleotide for detection of SNP TSC0060802
ttatcccgtttca

SEQ ID NO: 248849 - DNA, 13 bp, Artificial Sequence
  Oligonucleotide for detection of SNP TSC0060803
atttatatgaaat

SEQ ID NO: 248850 - DNA, 13 bp, Artificial Sequence
  Oligonucleotide for detection of SNP TSC0060803
atttcatataaat

SEQ ID NO: 248851 - DNA, 13 bp, Artificial Sequence
  Oligonucleotide for detection of SNP TSC0060803
atttatgtgaaat

SEQ ID NO: 248852 - DNA, 13 bp, Artificial Sequence
  Oligonucleotide for detection of SNP TSC0060803
atttcacataaat

SEQ ID NO: 248853 - DNA, 13 bp, Artificial Sequence
  Oligonucleotide for detection of SNP TSC0060806
tgattttaaaaaa

SEQ ID NO: 248854 - DNA, 13 bp, Artificial Sequence
  Oligonucleotide for detection of SNP TSC0060806
ttttttaaaatca

SEQ ID NO: 248855 - DNA, 13 bp, Artificial Sequence
  Oligonucleotide for detection of SNP TSC0060808
gtgttaattttgg

SEQ ID NO: 248856 - DNA, 13 bp, Artificial Sequence
  Oligonucleotide for detection of SNP TSC0060808
ccaaaattaacac

SEQ ID NO: 248857 - DNA, 13 bp, Artificial Sequence
  Oligonucleotide for detection of SNP TSC0060808
gtgttatttttgg

SEQ ID NO: 248858 - DNA, 13 bp, Artificial Sequence
  Oligonucleotide for detection of SNP TSC0060808
ccaaaaataacac

SEQ ID NO: 248859 - DNA, 13 bp, Artificial Sequence
  Oligonucleotide for detection of SNP TSC0060808
gtgttaatttcgg

SEQ ID NO: 248860 - DNA, 13 bp, Artificial Sequence
  Oligonucleotide for detection of SNP TSC0060808
ccgaaattaacac

SEQ ID NO: 248861 - DNA, 13 bp, Artificial Sequence
  Oligonucleotide for detection of SNP TSC0060808
gtgttattttcgg

SEQ ID NO: 248862 - DNA, 13 bp, Artificial Sequence
  Oligonucleotide for detection of SNP TSC0060808
ccgaaaataacac

SEQ ID NO: 248863 - DNA, 13 bp, Artificial Sequence
  Oligonucleotide for detection of SNP TSC0060808
tcgaaattaatay

SEQ ID NO: 248864 - DNA, 13 bp, Artificial Sequence
  Oligonucleotide for detection of SNP TSC0060808
rtattaatttcga

SEQ ID NO: 248865 - DNA, 13 bp, Artificial Sequence
  Oligonucleotide for detection of SNP TSC0060808
tcgaaaataatay

SEQ ID NO: 248866 - DNA, 13 bp, Artificial Sequence
  Oligonucleotide for detection of SNP TSC0060808
rtattattttcga

SEQ ID NO: 248867 - DNA, 13 bp, Artificial Sequence
  Oligonucleotide for detection of SNP TSC0060809
attttattttaga

SEQ ID NO: 248868 - DNA, 13 bp, Artificial Sequence
  Oligonucleotide for detection of SNP TSC0060809
tctaaaataaaat

SEQ ID NO: 248869 - DNA, 13 bp, Artificial Sequence
  Oligonucleotide for detection of SNP TSC0060809
tttaaattaaggt

SEQ ID NO: 248870 - DNA, 13 bp, Artificial Sequence
  Oligonucleotide for detection of SNP TSC0060809
accttaatttaaa

SEQ ID NO: 248871 - DNA, 13 bp, Artificial Sequence
  Oligonucleotide for detection of SNP TSC0060809
tttaaaataaggt

SEQ ID NO: 248872 - DNA, 13 bp, Artificial Sequence
  Oligonucleotide for detection of SNP TSC0060809
accttattttaaa

SEQ ID NO: 248873 - DNA, 13 bp, Artificial Sequence
  Oligonucleotide for detection of SNP TSC0060810
tattttcggttay

SEQ ID NO: 248874 - DNA, 13 bp, Artificial Sequence
  Oligonucleotide for detection of SNP TSC0060810
rtaaccgaaaata

SEQ ID NO: 248875 - DNA, 13 bp, Artificial Sequence
  Oligonucleotide for detection of SNP TSC0060810
gtagttgaaaata

SEQ ID NO: 248876 - DNA, 13 bp, Artificial Sequence
  Oligonucleotide for detection of SNP TSC0060810
tattttcaactac

SEQ ID NO: 248877 - DNA, 13 bp, Artificial Sequence
  Oligonucleotide for detection of SNP TSC0060810
gtagttaaaaata

SEQ ID NO: 248878 - DNA, 13 bp, Artificial Sequence
  Oligonucleotide for detection of SNP TSC0060810
tatttttaactac

SEQ ID NO: 248879 - DNA, 13 bp, Artificial Sequence
  Oligonucleotide for detection of SNP TSC0060810
gtagtcgaaaata

SEQ ID NO: 248880 - DNA, 13 bp, Artificial Sequence
  Oligonucleotide for detection of SNP TSC0060810
tattttcgactac

SEQ ID NO: 248881 - DNA, 13 bp, Artificial Sequence
  Oligonucleotide for detection of SNP TSC0060812
ggagtttgttaty

SEQ ID NO: 248882 - DNA, 13 bp, Artificial Sequence
  Oligonucleotide for detection of SNP TSC0060812
rataacaaactcc

SEQ ID NO: 248883 - DNA, 13 bp, Artificial Sequence
  Oligonucleotide for detection of SNP TSC0060812
ggagttcgttaty

SEQ ID NO: 248884 - DNA, 13 bp, Artificial Sequence
  Oligonucleotide for detection of SNP TSC0060812
rataacgaactcc

SEQ ID NO: 248885 - DNA, 13 bp, Artificial Sequence
  Oligonucleotide for detection of SNP TSC0060812
ggtggtgggttty

SEQ ID NO: 248886 - DNA, 13 bp, Artificial Sequence
  Oligonucleotide for detection of SNP TSC0060812
raaacccaccacc

SEQ ID NO: 248887 - DNA, 13 bp, Artificial Sequence
  Oligonucleotide for detection of SNP TSC0060812
ggtggtaggttty

SEQ ID NO: 248888 - DNA, 13 bp, Artificial Sequence
  Oligonucleotide for detection of SNP TSC0060812
raaacctaccacc

SEQ ID NO: 248889 - DNA, 13 bp, Artificial Sequence
  Oligonucleotide for detection of SNP TSC0060812
ggtggcgggttty

SEQ ID NO: 248890 - DNA, 13 bp, Artificial Sequence
  Oligonucleotide for detection of SNP TSC0060812
raaacccgccacc

SEQ ID NO: 248891 - DNA, 13 bp, Artificial Sequence
  Oligonucleotide for detection of SNP TSC0060816
tatttataattty

SEQ ID NO: 248892 - DNA, 13 bp, Artificial Sequence
  Oligonucleotide for detection of SNP TSC0060816
raaattataaata

SEQ ID NO: 248893 - DNA, 13 bp, Artificial Sequence
  Oligonucleotide for detection of SNP TSC0060816
tatttagaattty

SEQ ID NO: 248894 - DNA, 13 bp, Artificial Sequence
  Oligonucleotide for detection of SNP TSC0060816
raaattctaaata

SEQ ID NO: 248895 - DNA, 13 bp, Artificial Sequence
  Oligonucleotide for detection of SNP TSC0060816
gagattgtaaata

SEQ ID NO: 248896 - DNA, 13 bp, Artificial Sequence
  Oligonucleotide for detection of SNP TSC0060816
tatttacaatctc

SEQ ID NO: 248897 - DNA, 13 bp, Artificial Sequence
  Oligonucleotide for detection of SNP TSC0060816
gagattttaaata

SEQ ID NO: 248898 - DNA, 13 bp, Artificial Sequence
  Oligonucleotide for detection of SNP TSC0060816
tatttaaaatctc

SEQ ID NO: 248899 - DNA, 13 bp, Artificial Sequence
  Oligonucleotide for detection of SNP TSC0007221
gtagttattattg

SEQ ID NO: 248900 - DNA, 13 bp, Artificial Sequence
  Oligonucleotide for detection of SNP TSC0007221
caataataactac

SEQ ID NO: 248901 - DNA, 13 bp, Artificial Sequence
  Oligonucleotide for detection of SNP TSC0007221
gtagttgttattg

SEQ ID NO: 248902 - DNA, 13 bp, Artificial Sequence
  Oligonucleotide for detection of SNP TSC0007221
caataacaactac

SEQ ID NO: 248903 - DNA, 13 bp, Artificial Sequence
  Oligonucleotide for detection of SNP TSC0007221
gtagtcgttattg

SEQ ID NO: 248904 - DNA, 13 bp, Artificial Sequence
  Oligonucleotide for detection of SNP TSC0007221
caataacgactac

SEQ ID NO: 248905 - DNA, 13 bp, Artificial Sequence
  Oligonucleotide for detection of SNP TSC0007221
taatgatggttay

SEQ ID NO: 248906 - DNA, 13 bp, Artificial Sequence
  Oligonucleotide for detection of SNP TSC0007221
rtaaccatcatta

SEQ ID NO: 248907 - DNA, 13 bp, Artificial Sequence
  Oligonucleotide for detection of SNP TSC0007221
taatgacggttay

SEQ ID NO: 248908 - DNA, 13 bp, Artificial Sequence
  Oligonucleotide for detection of SNP TSC0007221
rtaaccgtcatta

SEQ ID NO: 248909 - DNA, 13 bp, Artificial Sequence
  Oligonucleotide for detection of SNP TSC0060817
attttgatgaatt

SEQ ID NO: 248910 - DNA, 13 bp, Artificial Sequence
  Oligonucleotide for detection of SNP TSC0060817
aattcatcaaaat

SEQ ID NO: 248911 - DNA, 13 bp, Artificial Sequence
  Oligonucleotide for detection of SNP TSC0060817
attttgttgaatt

SEQ ID NO: 248912 - DNA, 13 bp, Artificial Sequence
  Oligonucleotide for detection of SNP TSC0060817
aattcaacaaaat

SEQ ID NO: 248913 - DNA, 13 bp, Artificial Sequence
  Oligonucleotide for detection of SNP TSC0060817
aatttattaagat

SEQ ID NO: 248914 - DNA, 13 bp, Artificial Sequence
  Oligonucleotide for detection of SNP TSC0060817
atcttaataaatt

SEQ ID NO: 248915 - DNA, 13 bp, Artificial Sequence
  Oligonucleotide for detection of SNP TSC0060817
aatttaataagat

SEQ ID NO: 248916 - DNA, 13 bp, Artificial Sequence
  Oligonucleotide for detection of SNP TSC0060817
atcttattaaatt

SEQ ID NO: 248917 - DNA, 13 bp, Artificial Sequence
  Oligonucleotide for detection of SNP TSC0060818
tgagtgaaatgat

SEQ ID NO: 248918 - DNA, 13 bp, Artificial Sequence
  Oligonucleotide for detection of SNP TSC0060818
atcatttcactca

SEQ ID NO: 248919 - DNA, 13 bp, Artificial Sequence
  Oligonucleotide for detection of SNP TSC0060818
tgagtggaatgat

SEQ ID NO: 248920 - DNA, 13 bp, Artificial Sequence
  Oligonucleotide for detection of SNP TSC0060818
atcattccactca

SEQ ID NO: 248921 - DNA, 13 bp, Artificial Sequence
  Oligonucleotide for detection of SNP TSC0060819
tagaataggaata

SEQ ID NO: 248922 - DNA, 13 bp, Artificial Sequence
  Oligonucleotide for detection of SNP TSC0060819
tattcctattcta

SEQ ID NO: 248923 - DNA, 13 bp, Artificial Sequence
  Oligonucleotide for detection of SNP TSC0060819
tagaattggaata

SEQ ID NO: 248924 - DNA, 13 bp, Artificial Sequence
  Oligonucleotide for detection of SNP TSC0060819
tattccaattcta

SEQ ID NO: 248925 - DNA, 13 bp, Artificial Sequence
  Oligonucleotide for detection of SNP TSC0060821
atatttttataag

SEQ ID NO: 248926 - DNA, 13 bp, Artificial Sequence
  Oligonucleotide for detection of SNP TSC0060821
cttataaaaatat

SEQ ID NO: 248927 - DNA, 13 bp, Artificial Sequence
  Oligonucleotide for detection of SNP TSC0060821
tttgtatgaatgt

SEQ ID NO: 248928 - DNA, 13 bp, Artificial Sequence
  Oligonucleotide for detection of SNP TSC0060821
acattcatacaaa

SEQ ID NO: 248929 - DNA, 13 bp, Artificial Sequence
  Oligonucleotide for detection of SNP TSC0060821
tttgtaggaatgt

SEQ ID NO: 248930 - DNA, 13 bp, Artificial Sequence
  Oligonucleotide for detection of SNP TSC0060821
acattcctacaaa

SEQ ID NO: 248931 - DNA, 13 bp, Artificial Sequence
  Oligonucleotide for detection of SNP TSC0010220
agtaatcgtatta

SEQ ID NO: 248932 - DNA, 13 bp, Artificial Sequence
  Oligonucleotide for detection of SNP TSC0010220
taatacgattact

SEQ ID NO: 248933 - DNA, 13 bp, Artificial Sequence
  Oligonucleotide for detection of SNP TSC0010220
taatgtgattatt

SEQ ID NO: 248934 - DNA, 13 bp, Artificial Sequence
  Oligonucleotide for detection of SNP TSC0010220
aataatcacatta

SEQ ID NO: 248935 - DNA, 13 bp, Artificial Sequence
  Oligonucleotide for detection of SNP TSC0010220
taatgtaattatt

SEQ ID NO: 248936 - DNA, 13 bp, Artificial Sequence
  Oligonucleotide for detection of SNP TSC0010220
aataattacatta

SEQ ID NO: 248937 - DNA, 13 bp, Artificial Sequence
  Oligonucleotide for detection of SNP TSC0010220
taatgcgattatt

SEQ ID NO: 248938 - DNA, 13 bp, Artificial Sequence
  Oligonucleotide for detection of SNP TSC0010220
aataatcgcatta

SEQ ID NO: 248939 - DNA, 13 bp, Artificial Sequence
  Oligonucleotide for detection of SNP TSC0060825
taattatatttta

SEQ ID NO: 248940 - DNA, 13 bp, Artificial Sequence
  Oligonucleotide for detection of SNP TSC0060825
taaaatataatta

SEQ ID NO: 248941 - DNA, 13 bp, Artificial Sequence
  Oligonucleotide for detection of SNP TSC0060825
taattagatttta

SEQ ID NO: 248942 - DNA, 13 bp, Artificial Sequence
  Oligonucleotide for detection of SNP TSC0060825
taaaatctaatta

SEQ ID NO: 248943 - DNA, 13 bp, Artificial Sequence
  Oligonucleotide for detection of SNP TSC0060825
tgaggtatgattg

SEQ ID NO: 248944 - DNA, 13 bp, Artificial Sequence
  Oligonucleotide for detection of SNP TSC0060825
caatcatacctca

SEQ ID NO: 248945 - DNA, 13 bp, Artificial Sequence
  Oligonucleotide for detection of SNP TSC0060825
tgaggtttgattg

SEQ ID NO: 248946 - DNA, 13 bp, Artificial Sequence
  Oligonucleotide for detection of SNP TSC0060825
caatcaaacctca

SEQ ID NO: 248947 - DNA, 13 bp, Artificial Sequence
  Oligonucleotide for detection of SNP TSC0060826
atttttatatata

SEQ ID NO: 248948 - DNA, 13 bp, Artificial Sequence
  Oligonucleotide for detection of SNP TSC0060826
tatatataaaaat

SEQ ID NO: 248949 - DNA, 13 bp, Artificial Sequence
  Oligonucleotide for detection of SNP TSC0060826
atttttttatata

SEQ ID NO: 248950 - DNA, 13 bp, Artificial Sequence
  Oligonucleotide for detection of SNP TSC0060826
tatataaaaaaat

SEQ ID NO: 248951 - DNA, 13 bp, Artificial Sequence
  Oligonucleotide for detection of SNP TSC0060826
tgtgtgtgggggt

SEQ ID NO: 248952 - DNA, 13 bp, Artificial Sequence
  Oligonucleotide for detection of SNP TSC0060826
acccccacacaca

SEQ ID NO: 248953 - DNA, 13 bp, Artificial Sequence
  Oligonucleotide for detection of SNP TSC0060826
tgtgtgggggggt

SEQ ID NO: 248954 - DNA, 13 bp, Artificial Sequence
  Oligonucleotide for detection of SNP TSC0060826
acccccccacaca

SEQ ID NO: 248955 - DNA, 13 bp, Artificial Sequence
  Oligonucleotide for detection of SNP TSC0060827
tataggatagata

SEQ ID NO: 248956 - DNA, 13 bp, Artificial Sequence
  Oligonucleotide for detection of SNP TSC0060827
tatctatcctata

SEQ ID NO: 248957 - DNA, 13 bp, Artificial Sequence
  Oligonucleotide for detection of SNP TSC0060827
tataggttagata

SEQ ID NO: 248958 - DNA, 13 bp, Artificial Sequence
  Oligonucleotide for detection of SNP TSC0060827
tatctaacctata

SEQ ID NO: 248959 - DNA, 13 bp, Artificial Sequence
  Oligonucleotide for detection of SNP TSC0060827
tgtttattttgtg

SEQ ID NO: 248960 - DNA, 13 bp, Artificial Sequence
  Oligonucleotide for detection of SNP TSC0060827
cacaaaataaaca

SEQ ID NO: 248961 - DNA, 13 bp, Artificial Sequence
  Oligonucleotide for detection of SNP TSC0060827
tgtttaatttgtg

SEQ ID NO: 248962 - DNA, 13 bp, Artificial Sequence
  Oligonucleotide for detection of SNP TSC0060827
cacaaattaaaca

SEQ ID NO: 248963 - DNA, 13 bp, Artificial Sequence
  Oligonucleotide for detection of SNP TSC0060828
ggaaaaggatggt

SEQ ID NO: 248964 - DNA, 13 bp, Artificial Sequence
  Oligonucleotide for detection of SNP TSC0060828
accatccttttcc

SEQ ID NO: 248965 - DNA, 13 bp, Artificial Sequence
  Oligonucleotide for detection of SNP TSC0060828
ggaaaaagatggt

SEQ ID NO: 248966 - DNA, 13 bp, Artificial Sequence
  Oligonucleotide for detection of SNP TSC0060828
accatctttttcc

SEQ ID NO: 248967 - DNA, 13 bp, Artificial Sequence
  Oligonucleotide for detection of SNP TSC0060829
agttttaagttta

SEQ ID NO: 248968 - DNA, 13 bp, Artificial Sequence
  Oligonucleotide for detection of SNP TSC0060829
taaacttaaaact

SEQ ID NO: 248969 - DNA, 13 bp, Artificial Sequence
  Oligonucleotide for detection of SNP TSC0060829
agttttgagttta

SEQ ID NO: 248970 - DNA, 13 bp, Artificial Sequence
  Oligonucleotide for detection of SNP TSC0060829
taaactcaaaact

SEQ ID NO: 248971 - DNA, 13 bp, Artificial Sequence
  Oligonucleotide for detection of SNP TSC0060831
tgtttttgtatay

SEQ ID NO: 248972 - DNA, 13 bp, Artificial Sequence
  Oligonucleotide for detection of SNP TSC0060831
rtatacaaaaaca

SEQ ID NO: 248973 - DNA, 13 bp, Artificial Sequence
  Oligonucleotide for detection of SNP TSC0060831
tgttttcgtatay

SEQ ID NO: 248974 - DNA, 13 bp, Artificial Sequence
  Oligonucleotide for detection of SNP TSC0060831
rtatacgaaaaca

SEQ ID NO: 248975 - DNA, 13 bp, Artificial Sequence
  Oligonucleotide for detection of SNP TSC0060831
gtatgtggaggta

SEQ ID NO: 248976 - DNA, 13 bp, Artificial Sequence
  Oligonucleotide for detection of SNP TSC0060831
tacctccacatac

SEQ ID NO: 248977 - DNA, 13 bp, Artificial Sequence
  Oligonucleotide for detection of SNP TSC0060831
gtatgtagaggta

SEQ ID NO: 248978 - DNA, 13 bp, Artificial Sequence
  Oligonucleotide for detection of SNP TSC0060831
tacctctacatac

SEQ ID NO: 248979 - DNA, 13 bp, Artificial Sequence
  Oligonucleotide for detection of SNP TSC0060831
gtatgcggaggta

SEQ ID NO: 248980 - DNA, 13 bp, Artificial Sequence
  Oligonucleotide for detection of SNP TSC0060831
tacctccgcatac

SEQ ID NO: 248981 - DNA, 13 bp, Artificial Sequence
  Oligonucleotide for detection of SNP TSC0060832
aatagttgataga

SEQ ID NO: 248982 - DNA, 13 bp, Artificial Sequence
  Oligonucleotide for detection of SNP TSC0060832
tctatcaactatt

SEQ ID NO: 248983 - DNA, 13 bp, Artificial Sequence
  Oligonucleotide for detection of SNP TSC0060832
aatagtcgataga

SEQ ID NO: 248984 - DNA, 13 bp, Artificial Sequence
  Oligonucleotide for detection of SNP TSC0060832
tctatcgactatt

SEQ ID NO: 248985 - DNA, 13 bp, Artificial Sequence
  Oligonucleotide for detection of SNP TSC0060832
tttgttgattgtt

SEQ ID NO: 248986 - DNA, 13 bp, Artificial Sequence
  Oligonucleotide for detection of SNP TSC0060832
aacaatcaacaaa

SEQ ID NO: 248987 - DNA, 13 bp, Artificial Sequence
  Oligonucleotide for detection of SNP TSC0060832
tttgttaattgtt

SEQ ID NO: 248988 - DNA, 13 bp, Artificial Sequence
  Oligonucleotide for detection of SNP TSC0060832
aacaattaacaaa

SEQ ID NO: 248989 - DNA, 13 bp, Artificial Sequence
  Oligonucleotide for detection of SNP TSC0060832
tttgtcgattgtt

SEQ ID NO: 248990 - DNA, 13 bp, Artificial Sequence
  Oligonucleotide for detection of SNP TSC0060832
aacaatcgacaaa

SEQ ID NO: 248991 - DNA, 13 bp, Artificial Sequence
  Oligonucleotide for detection of SNP TSC0060834
aaaatggatgagt

SEQ ID NO: 248992 - DNA, 13 bp, Artificial Sequence
  Oligonucleotide for detection of SNP TSC0060834
actcatccatttt

SEQ ID NO: 248993 - DNA, 13 bp, Artificial Sequence
  Oligonucleotide for detection of SNP TSC0060834
aaaatgaatgagt

SEQ ID NO: 248994 - DNA, 13 bp, Artificial Sequence
  Oligonucleotide for detection of SNP TSC0060834
actcattcatttt

SEQ ID NO: 248995 - DNA, 13 bp, Artificial Sequence
  Oligonucleotide for detection of SNP TSC0060835
ttaaataaatagg

SEQ ID NO: 248996 - DNA, 13 bp, Artificial Sequence
  Oligonucleotide for detection of SNP TSC0060835
cctatttatttaa

SEQ ID NO: 248997 - DNA, 13 bp, Artificial Sequence
  Oligonucleotide for detection of SNP TSC0060835
ttaaattaatagg

SEQ ID NO: 248998 - DNA, 13 bp, Artificial Sequence
  Oligonucleotide for detection of SNP TSC0060835
cctattaatttaa

SEQ ID NO: 248999 - DNA, 13 bp, Artificial Sequence
  Oligonucleotide for detection of SNP TSC0060835
tttgtttatttaa

SEQ ID NO: 249000 - DNA, 13 bp, Artificial Sequence
  Oligonucleotide for detection of SNP TSC0060835
ttaaataaacaaa

SEQ ID NO: 249001 - DNA, 13 bp, Artificial Sequence
  Oligonucleotide for detection of SNP TSC0060835
tttgttaatttaa

SEQ ID NO: 249002 - DNA, 13 bp, Artificial Sequence
  Oligonucleotide for detection of SNP TSC0060835
ttaaattaacaaa

SEQ ID NO: 249003 - DNA, 13 bp, Artificial Sequence
  Oligonucleotide for detection of SNP TSC0060838
gaatttagaggty

SEQ ID NO: 249004 - DNA, 13 bp, Artificial Sequence
  Oligonucleotide for detection of SNP TSC0060838
racctctaaattc

SEQ ID NO: 249005 - DNA, 13 bp, Artificial Sequence
  Oligonucleotide for detection of SNP TSC0060838
gaattttgaggty

SEQ ID NO: 249006 - DNA, 13 bp, Artificial Sequence
  Oligonucleotide for detection of SNP TSC0060838
racctcaaaattc

SEQ ID NO: 249007 - DNA, 13 bp, Artificial Sequence
  Oligonucleotide for detection of SNP TSC0060838
gaatttcgaggty

SEQ ID NO: 249008 - DNA, 13 bp, Artificial Sequence
  Oligonucleotide for detection of SNP TSC0060838
racctcgaaattc

SEQ ID NO: 249009 - DNA, 13 bp, Artificial Sequence
  Oligonucleotide for detection of SNP TSC0060838
gattttggggtty

SEQ ID NO: 249010 - DNA, 13 bp, Artificial Sequence
  Oligonucleotide for detection of SNP TSC0060838
raaccccaaaatc

SEQ ID NO: 249011 - DNA, 13 bp, Artificial Sequence
  Oligonucleotide for detection of SNP TSC0060838
gatttcggggtty

SEQ ID NO: 249012 - DNA, 13 bp, Artificial Sequence
  Oligonucleotide for detection of SNP TSC0060838
raaccccgaaatc

SEQ ID NO: 249013 - DNA, 13 bp, Artificial Sequence
  Oligonucleotide for detection of SNP TSC0010191
ttatgggtttttt

SEQ ID NO: 249014 - DNA, 13 bp, Artificial Sequence
  Oligonucleotide for detection of SNP TSC0010191
aaaaaacccataa

SEQ ID NO: 249015 - DNA, 13 bp, Artificial Sequence
  Oligonucleotide for detection of SNP TSC0060839
atgtttgtgatgy

SEQ ID NO: 249016 - DNA, 13 bp, Artificial Sequence
  Oligonucleotide for detection of SNP TSC0060839
rcatcacaaacat

SEQ ID NO: 249017 - DNA, 13 bp, Artificial Sequence
  Oligonucleotide for detection of SNP TSC0060839
atgtttatgatgy

SEQ ID NO: 249018 - DNA, 13 bp, Artificial Sequence
  Oligonucleotide for detection of SNP TSC0060839
rcatcataaacat

SEQ ID NO: 249019 - DNA, 13 bp, Artificial Sequence
  Oligonucleotide for detection of SNP TSC0060840
aaatgtatttaga

SEQ ID NO: 249020 - DNA, 13 bp, Artificial Sequence
  Oligonucleotide for detection of SNP TSC0060840
tctaaatacattt

SEQ ID NO: 249021 - DNA, 13 bp, Artificial Sequence
  Oligonucleotide for detection of SNP TSC0060840
aaatgtgtttaga

SEQ ID NO: 249022 - DNA, 13 bp, Artificial Sequence
  Oligonucleotide for detection of SNP TSC0060840
tctaaacacattt

SEQ ID NO: 249023 - DNA, 13 bp, Artificial Sequence
  Oligonucleotide for detection of SNP TSC0060840
aaacgtatttaga

SEQ ID NO: 249024 - DNA, 13 bp, Artificial Sequence
  Oligonucleotide for detection of SNP TSC0060840
tctaaatacgttt

SEQ ID NO: 249025 - DNA, 13 bp, Artificial Sequence
  Oligonucleotide for detection of SNP TSC0060840
aaacgtgtttaga

SEQ ID NO: 249026 - DNA, 13 bp, Artificial Sequence
  Oligonucleotide for detection of SNP TSC0060840
tctaaacacgttt

SEQ ID NO: 249027 - DNA, 13 bp, Artificial Sequence
  Oligonucleotide for detection of SNP TSC0060840
aaatgcgtttaga

SEQ ID NO: 249028 - DNA, 13 bp, Artificial Sequence
  Oligonucleotide for detection of SNP TSC0060840
tctaaacgcattt

SEQ ID NO: 249029 - DNA, 13 bp, Artificial Sequence
  Oligonucleotide for detection of SNP TSC0060840
aaacgcgtttaga

SEQ ID NO: 249030 - DNA, 13 bp, Artificial Sequence
  Oligonucleotide for detection of SNP TSC0060840
tctaaacgcgttt

SEQ ID NO: 249031 - DNA, 13 bp, Artificial Sequence
  Oligonucleotide for detection of SNP TSC0060840
tttagatgtgttt

SEQ ID NO: 249032 - DNA, 13 bp, Artificial Sequence
  Oligonucleotide for detection of SNP TSC0060840
aaacacatctaaa

SEQ ID NO: 249033 - DNA, 13 bp, Artificial Sequence
  Oligonucleotide for detection of SNP TSC0060840
tttagatgcgttt

SEQ ID NO: 249034 - DNA, 13 bp, Artificial Sequence
  Oligonucleotide for detection of SNP TSC0060840
aaacgcatctaaa

SEQ ID NO: 249035 - DNA, 13 bp, Artificial Sequence
  Oligonucleotide for detection of SNP TSC0060840
tttagacgtgttt

SEQ ID NO: 249036 - DNA, 13 bp, Artificial Sequence
  Oligonucleotide for detection of SNP TSC0060840
aaacacgtctaaa

SEQ ID NO: 249037 - DNA, 13 bp, Artificial Sequence
  Oligonucleotide for detection of SNP TSC0060840
tttagacgcgttt

SEQ ID NO: 249038 - DNA, 13 bp, Artificial Sequence
  Oligonucleotide for detection of SNP TSC0060840
aaacgcgtctaaa

SEQ ID NO: 249039 - DNA, 13 bp, Artificial Sequence
  Oligonucleotide for detection of SNP TSC0060841
attttttgatttt

SEQ ID NO: 249040 - DNA, 13 bp, Artificial Sequence
  Oligonucleotide for detection of SNP TSC0060841
aaaatcaaaaaat

SEQ ID NO: 249041 - DNA, 13 bp, Artificial Sequence
  Oligonucleotide for detection of SNP TSC0060841
atttttcgatttt

SEQ ID NO: 249042 - DNA, 13 bp, Artificial Sequence
  Oligonucleotide for detection of SNP TSC0060841
aaaatcgaaaaat

SEQ ID NO: 249043 - DNA, 13 bp, Artificial Sequence
  Oligonucleotide for detection of SNP TSC0060841
aaaattgaagggt

SEQ ID NO: 249044 - DNA, 13 bp, Artificial Sequence
  Oligonucleotide for detection of SNP TSC0060841
acccttcaatttt

SEQ ID NO: 249045 - DNA, 13 bp, Artificial Sequence
  Oligonucleotide for detection of SNP TSC0060841
aaaatttaagggt

SEQ ID NO: 249046 - DNA, 13 bp, Artificial Sequence
  Oligonucleotide for detection of SNP TSC0060841
acccttaaatttt

SEQ ID NO: 249047 - DNA, 13 bp, Artificial Sequence
  Oligonucleotide for detection of SNP TSC0060841
aaaatcgaagggt

SEQ ID NO: 249048 - DNA, 13 bp, Artificial Sequence
  Oligonucleotide for detection of SNP TSC0060841
acccttcgatttt

SEQ ID NO: 249049 - DNA, 13 bp, Artificial Sequence
  Oligonucleotide for detection of SNP TSC0060842
tttaattgggtty

SEQ ID NO: 249050 - DNA, 13 bp, Artificial Sequence
  Oligonucleotide for detection of SNP TSC0060842
raacccaattaaa

SEQ ID NO: 249051 - DNA, 13 bp, Artificial Sequence
  Oligonucleotide for detection of SNP TSC0060842
tttaatcgggtty

SEQ ID NO: 249052 - DNA, 13 bp, Artificial Sequence
  Oligonucleotide for detection of SNP TSC0060842
raacccgattaaa

SEQ ID NO: 249053 - DNA, 13 bp, Artificial Sequence
  Oligonucleotide for detection of SNP TSC0060842
gagtttggttaag

SEQ ID NO: 249054 - DNA, 13 bp, Artificial Sequence
  Oligonucleotide for detection of SNP TSC0060842
cttaaccaaactc

SEQ ID NO: 249055 - DNA, 13 bp, Artificial Sequence
  Oligonucleotide for detection of SNP TSC0060842
gagttcggttaag

SEQ ID NO: 249056 - DNA, 13 bp, Artificial Sequence
  Oligonucleotide for detection of SNP TSC0060842
cttaaccgaactc

SEQ ID NO: 249057 - DNA, 13 bp, Artificial Sequence
  Oligonucleotide for detection of SNP TSC0060843
ggatagatttgtg

SEQ ID NO: 249058 - DNA, 13 bp, Artificial Sequence
  Oligonucleotide for detection of SNP TSC0060843
cacaaatctatcc

SEQ ID NO: 249059 - DNA, 13 bp, Artificial Sequence
  Oligonucleotide for detection of SNP TSC0060843
ggatagttttgtg

SEQ ID NO: 249060 - DNA, 13 bp, Artificial Sequence
  Oligonucleotide for detection of SNP TSC0060843
cacaaaactatcc

SEQ ID NO: 249061 - DNA, 13 bp, Artificial Sequence
  Oligonucleotide for detection of SNP TSC0060843
tataagtttgtty

SEQ ID NO: 249062 - DNA, 13 bp, Artificial Sequence
  Oligonucleotide for detection of SNP TSC0060843
raacaaacttata

SEQ ID NO: 249063 - DNA, 13 bp, Artificial Sequence
  Oligonucleotide for detection of SNP TSC0060843
tataagattgtty

SEQ ID NO: 249064 - DNA, 13 bp, Artificial Sequence
  Oligonucleotide for detection of SNP TSC0060843
raacaatcttata

SEQ ID NO: 249065 - DNA, 13 bp, Artificial Sequence
  Oligonucleotide for detection of SNP TSC0060844
aaaagtagtttgt

SEQ ID NO: 249066 - DNA, 13 bp, Artificial Sequence
  Oligonucleotide for detection of SNP TSC0060844
acaaactactttt

SEQ ID NO: 249067 - DNA, 13 bp, Artificial Sequence
  Oligonucleotide for detection of SNP TSC0060844
aaaagttgtttgt

SEQ ID NO: 249068 - DNA, 13 bp, Artificial Sequence
  Oligonucleotide for detection of SNP TSC0060844
acaaacaactttt

SEQ ID NO: 249069 - DNA, 13 bp, Artificial Sequence
  Oligonucleotide for detection of SNP TSC0060844
ataaattgttttt

SEQ ID NO: 249070 - DNA, 13 bp, Artificial Sequence
  Oligonucleotide for detection of SNP TSC0060844
aaaaacaatttat

SEQ ID NO: 249071 - DNA, 13 bp, Artificial Sequence
  Oligonucleotide for detection of SNP TSC0060844
ataaatagttttt

SEQ ID NO: 249072 - DNA, 13 bp, Artificial Sequence
  Oligonucleotide for detection of SNP TSC0060844
aaaaactatttat

SEQ ID NO: 249073 - DNA, 13 bp, Artificial Sequence
  Oligonucleotide for detection of SNP TSC0060846
aagtatagatttt

SEQ ID NO: 249074 - DNA, 13 bp, Artificial Sequence
  Oligonucleotide for detection of SNP TSC0060846
aaaatctatactt

SEQ ID NO: 249075 - DNA, 13 bp, Artificial Sequence
  Oligonucleotide for detection of SNP TSC0060846
aagtattgatttt

SEQ ID NO: 249076 - DNA, 13 bp, Artificial Sequence
  Oligonucleotide for detection of SNP TSC0060846
aaaatcaatactt

SEQ ID NO: 249077 - DNA, 13 bp, Artificial Sequence
  Oligonucleotide for detection of SNP TSC0060846
aagtatcgatttt

SEQ ID NO: 249078 - DNA, 13 bp, Artificial Sequence
  Oligonucleotide for detection of SNP TSC0060846
aaaatcgatactt

SEQ ID NO: 249079 - DNA, 13 bp, Artificial Sequence
  Oligonucleotide for detection of SNP TSC0060846
agggtttgtattt

SEQ ID NO: 249080 - DNA, 13 bp, Artificial Sequence
  Oligonucleotide for detection of SNP TSC0060846
aaatacaaaccct

SEQ ID NO: 249081 - DNA, 13 bp, Artificial Sequence
  Oligonucleotide for detection of SNP TSC0060846
agggttggtattt

SEQ ID NO: 249082 - DNA, 13 bp, Artificial Sequence
  Oligonucleotide for detection of SNP TSC0060846
aaataccaaccct

SEQ ID NO: 249083 - DNA, 13 bp, Artificial Sequence
  Oligonucleotide for detection of SNP TSC0060846
agggtcggtattt

SEQ ID NO: 249084 - DNA, 13 bp, Artificial Sequence
  Oligonucleotide for detection of SNP TSC0060846
aaataccgaccct

SEQ ID NO: 249085 - DNA, 13 bp, Artificial Sequence
  Oligonucleotide for detection of SNP TSC0060848
aagaaagtttagt

SEQ ID NO: 249086 - DNA, 13 bp, Artificial Sequence
  Oligonucleotide for detection of SNP TSC0060848
actaaactttctt

SEQ ID NO: 249087 - DNA, 13 bp, Artificial Sequence
  Oligonucleotide for detection of SNP TSC0060848
aagaaaatttagt

SEQ ID NO: 249088 - DNA, 13 bp, Artificial Sequence
  Oligonucleotide for detection of SNP TSC0060848
actaaattttctt

SEQ ID NO: 249089 - DNA, 13 bp, Artificial Sequence
  Oligonucleotide for detection of SNP TSC0060849
ataatagagtaga

SEQ ID NO: 249090 - DNA, 13 bp, Artificial Sequence
  Oligonucleotide for detection of SNP TSC0060849
tctactctattat

SEQ ID NO: 249091 - DNA, 13 bp, Artificial Sequence
  Oligonucleotide for detection of SNP TSC0060849
ataatatagtaga

SEQ ID NO: 249092 - DNA, 13 bp, Artificial Sequence
  Oligonucleotide for detection of SNP TSC0060849
tctactatattat

SEQ ID NO: 249093 - DNA, 13 bp, Artificial Sequence
  Oligonucleotide for detection of SNP TSC0010652
aagttgtgatttt

SEQ ID NO: 249094 - DNA, 13 bp, Artificial Sequence
  Oligonucleotide for detection of SNP TSC0010652
aaaatcacaactt

SEQ ID NO: 249095 - DNA, 13 bp, Artificial Sequence
  Oligonucleotide for detection of SNP TSC0010652
aagttgggatttt

SEQ ID NO: 249096 - DNA, 13 bp, Artificial Sequence
  Oligonucleotide for detection of SNP TSC0010652
aaaatcccaactt

SEQ ID NO: 249097 - DNA, 13 bp, Artificial Sequence
  Oligonucleotide for detection of SNP TSC0010652
aaaattataattt

SEQ ID NO: 249098 - DNA, 13 bp, Artificial Sequence
  Oligonucleotide for detection of SNP TSC0010652
aaattataatttt

SEQ ID NO: 249099 - DNA, 13 bp, Artificial Sequence
  Oligonucleotide for detection of SNP TSC0010652
aaaattttaattt

SEQ ID NO: 249100 - DNA, 13 bp, Artificial Sequence
  Oligonucleotide for detection of SNP TSC0010652
aaattaaaatttt

SEQ ID NO: 249101 - DNA, 13 bp, Artificial Sequence
  Oligonucleotide for detection of SNP TSC0010653
ggatttattgttg

SEQ ID NO: 249102 - DNA, 13 bp, Artificial Sequence
  Oligonucleotide for detection of SNP TSC0010653
caacaataaatcc

SEQ ID NO: 249103 - DNA, 13 bp, Artificial Sequence
  Oligonucleotide for detection of SNP TSC0010653
ggattttttgttg

SEQ ID NO: 249104 - DNA, 13 bp, Artificial Sequence
  Oligonucleotide for detection of SNP TSC0010653
caacaaaaaatcc

SEQ ID NO: 249105 - DNA, 13 bp, Artificial Sequence
  Oligonucleotide for detection of SNP TSC0010653
taataatggatty

SEQ ID NO: 249106 - DNA, 13 bp, Artificial Sequence
  Oligonucleotide for detection of SNP TSC0010653
raatccattatta

SEQ ID NO: 249107 - DNA, 13 bp, Artificial Sequence
  Oligonucleotide for detection of SNP TSC0010653
taataaaggatty

SEQ ID NO: 249108 - DNA, 13 bp, Artificial Sequence
  Oligonucleotide for detection of SNP TSC0010653
raatcctttatta

SEQ ID NO: 249109 - DNA, 13 bp, Artificial Sequence
  Oligonucleotide for detection of SNP TSC0060851
gataaataaaaaa

SEQ ID NO: 249110 - DNA, 13 bp, Artificial Sequence
  Oligonucleotide for detection of SNP TSC0060851
ttttttatttatc

SEQ ID NO: 249111 - DNA, 13 bp, Artificial Sequence
  Oligonucleotide for detection of SNP TSC0060852
aatttaaaattty

SEQ ID NO: 249112 - DNA, 13 bp, Artificial Sequence
  Oligonucleotide for detection of SNP TSC0060852
raaattttaaatt

SEQ ID NO: 249113 - DNA, 13 bp, Artificial Sequence
  Oligonucleotide for detection of SNP TSC0060852
aatttagaattty

SEQ ID NO: 249114 - DNA, 13 bp, Artificial Sequence
  Oligonucleotide for detection of SNP TSC0060852
raaattctaaatt

SEQ ID NO: 249115 - DNA, 13 bp, Artificial Sequence
  Oligonucleotide for detection of SNP TSC0005535
gagagaattgtay

SEQ ID NO: 249116 - DNA, 13 bp, Artificial Sequence
  Oligonucleotide for detection of SNP TSC0005535
rtacaattctctc

SEQ ID NO: 249117 - DNA, 13 bp, Artificial Sequence
  Oligonucleotide for detection of SNP TSC0005535
gagagatttgtay

SEQ ID NO: 249118 - DNA, 13 bp, Artificial Sequence
  Oligonucleotide for detection of SNP TSC0005535
rtacaaatctctc

SEQ ID NO: 249119 - DNA, 13 bp, Artificial Sequence
  Oligonucleotide for detection of SNP TSC0005535
gtatagtttttty

SEQ ID NO: 249120 - DNA, 13 bp, Artificial Sequence
  Oligonucleotide for detection of SNP TSC0005535
raaaaaactatac

SEQ ID NO: 249121 - DNA, 13 bp, Artificial Sequence
  Oligonucleotide for detection of SNP TSC0005535
gtatagattttty

SEQ ID NO: 249122 - DNA, 13 bp, Artificial Sequence
  Oligonucleotide for detection of SNP TSC0005535
raaaaatctatac

SEQ ID NO: 249123 - DNA, 13 bp, Artificial Sequence
  Oligonucleotide for detection of SNP TSC0060859
taggtatttattt

SEQ ID NO: 249124 - DNA, 13 bp, Artificial Sequence
  Oligonucleotide for detection of SNP TSC0060859
aaataaataccta

SEQ ID NO: 249125 - DNA, 13 bp, Artificial Sequence
  Oligonucleotide for detection of SNP TSC0060859
taggtagttattt

SEQ ID NO: 249126 - DNA, 13 bp, Artificial Sequence
  Oligonucleotide for detection of SNP TSC0060859
aaataactaccta

SEQ ID NO: 249127 - DNA, 13 bp, Artificial Sequence
  Oligonucleotide for detection of SNP TSC0060859
aggtgagtgtttg

SEQ ID NO: 249128 - DNA, 13 bp, Artificial Sequence
  Oligonucleotide for detection of SNP TSC0060859
caaacactcacct

SEQ ID NO: 249129 - DNA, 13 bp, Artificial Sequence
  Oligonucleotide for detection of SNP TSC0060859
aggtgattgtttg

SEQ ID NO: 249130 - DNA, 13 bp, Artificial Sequence
  Oligonucleotide for detection of SNP TSC0060859
caaacaatcacct

SEQ ID NO: 249131 - DNA, 13 bp, Artificial Sequence
  Oligonucleotide for detection of SNP TSC0060860
ttgattattagtt

SEQ ID NO: 249132 - DNA, 13 bp, Artificial Sequence
  Oligonucleotide for detection of SNP TSC0060860
aactaataatcaa

SEQ ID NO: 249133 - DNA, 13 bp, Artificial Sequence
  Oligonucleotide for detection of SNP TSC0060860
ttgatttttagtt

SEQ ID NO: 249134 - DNA, 13 bp, Artificial Sequence
  Oligonucleotide for detection of SNP TSC0060860
aactaaaaatcaa

SEQ ID NO: 249135 - DNA, 13 bp, Artificial Sequence
  Oligonucleotide for detection of SNP TSC0060860
aattgatgattag

SEQ ID NO: 249136 - DNA, 13 bp, Artificial Sequence
  Oligonucleotide for detection of SNP TSC0060860
ctaatcatcaatt

SEQ ID NO: 249137 - DNA, 13 bp, Artificial Sequence
  Oligonucleotide for detection of SNP TSC0060860
aattgaggattag

SEQ ID NO: 249138 - DNA, 13 bp, Artificial Sequence
  Oligonucleotide for detection of SNP TSC0060860
ctaatcctcaatt

SEQ ID NO: 249139 - DNA, 13 bp, Artificial Sequence
  Oligonucleotide for detection of SNP TSC0060863
ataatatatgttt

SEQ ID NO: 249140 - DNA, 13 bp, Artificial Sequence
  Oligonucleotide for detection of SNP TSC0060863
aaacatatattat

SEQ ID NO: 249141 - DNA, 13 bp, Artificial Sequence
  Oligonucleotide for detection of SNP TSC0060863
ataatagatgttt

SEQ ID NO: 249142 - DNA, 13 bp, Artificial Sequence
  Oligonucleotide for detection of SNP TSC0060863
aaacatctattat

SEQ ID NO: 249143 - DNA, 13 bp, Artificial Sequence
  Oligonucleotide for detection of SNP TSC0060863
aagtatgtattgt

SEQ ID NO: 249144 - DNA, 13 bp, Artificial Sequence
  Oligonucleotide for detection of SNP TSC0060863
acaatacatactt

SEQ ID NO: 249145 - DNA, 13 bp, Artificial Sequence
  Oligonucleotide for detection of SNP TSC0060863
aagtatatattgt

SEQ ID NO: 249146 - DNA, 13 bp, Artificial Sequence
  Oligonucleotide for detection of SNP TSC0060863
acaatatatactt

SEQ ID NO: 249147 - DNA, 13 bp, Artificial Sequence
  Oligonucleotide for detection of SNP TSC0060863
aagtatttattgt

SEQ ID NO: 249148 - DNA, 13 bp, Artificial Sequence
  Oligonucleotide for detection of SNP TSC0060863
acaataaatactt

SEQ ID NO: 249149 - DNA, 13 bp, Artificial Sequence
  Oligonucleotide for detection of SNP TSC0060864
taggtatgtgaga

SEQ ID NO: 249150 - DNA, 13 bp, Artificial Sequence
  Oligonucleotide for detection of SNP TSC0060864
tctcacataccta

SEQ ID NO: 249151 - DNA, 13 bp, Artificial Sequence
  Oligonucleotide for detection of SNP TSC0060864
taggtacgtgaga

SEQ ID NO: 249152 - DNA, 13 bp, Artificial Sequence
  Oligonucleotide for detection of SNP TSC0060864
tctcacgtaccta

SEQ ID NO: 249153 - DNA, 13 bp, Artificial Sequence
  Oligonucleotide for detection of SNP TSC0060866
aggaagttatttg

SEQ ID NO: 249154 - DNA, 13 bp, Artificial Sequence
  Oligonucleotide for detection of SNP TSC0060866
caaataacttcct

SEQ ID NO: 249155 - DNA, 13 bp, Artificial Sequence
  Oligonucleotide for detection of SNP TSC0060866
aggaaggtatttg

SEQ ID NO: 249156 - DNA, 13 bp, Artificial Sequence
  Oligonucleotide for detection of SNP TSC0060866
caaataccttcct

SEQ ID NO: 249157 - DNA, 13 bp, Artificial Sequence
  Oligonucleotide for detection of SNP TSC0060867
ttatgattttgta

SEQ ID NO: 249158 - DNA, 13 bp, Artificial Sequence
  Oligonucleotide for detection of SNP TSC0060867
tacaaaatcataa

SEQ ID NO: 249159 - DNA, 13 bp, Artificial Sequence
  Oligonucleotide for detection of SNP TSC0060867
ttatgagtttgta

SEQ ID NO: 249160 - DNA, 13 bp, Artificial Sequence
  Oligonucleotide for detection of SNP TSC0060867
tacaaactcataa

SEQ ID NO: 249161 - DNA, 13 bp, Artificial Sequence
  Oligonucleotide for detection of SNP TSC0060867
tatagatttatag

SEQ ID NO: 249162 - DNA, 13 bp, Artificial Sequence
  Oligonucleotide for detection of SNP TSC0060867
ctataaatctata

SEQ ID NO: 249163 - DNA, 13 bp, Artificial Sequence
  Oligonucleotide for detection of SNP TSC0060868
taggtaatatttg

SEQ ID NO: 249164 - DNA, 13 bp, Artificial Sequence
  Oligonucleotide for detection of SNP TSC0060868
caaatattaccta

SEQ ID NO: 249165 - DNA, 13 bp, Artificial Sequence
  Oligonucleotide for detection of SNP TSC0060868
taggtagtatttg

SEQ ID NO: 249166 - DNA, 13 bp, Artificial Sequence
  Oligonucleotide for detection of SNP TSC0060868
caaatactaccta

SEQ ID NO: 249167 - DNA, 13 bp, Artificial Sequence
  Oligonucleotide for detection of SNP TSC0060869
tagagagtaatgt

SEQ ID NO: 249168 - DNA, 13 bp, Artificial Sequence
  Oligonucleotide for detection of SNP TSC0060869
acattactctcta

SEQ ID NO: 249169 - DNA, 13 bp, Artificial Sequence
  Oligonucleotide for detection of SNP TSC0060869
tagagaataatgt

SEQ ID NO: 249170 - DNA, 13 bp, Artificial Sequence
  Oligonucleotide for detection of SNP TSC0060869
acattattctcta

SEQ ID NO: 249171 - DNA, 13 bp, Artificial Sequence
  Oligonucleotide for detection of SNP TSC0060870
tagagattataaa

SEQ ID NO: 249172 - DNA, 13 bp, Artificial Sequence
  Oligonucleotide for detection of SNP TSC0060870
tttataatctcta

SEQ ID NO: 249173 - DNA, 13 bp, Artificial Sequence
  Oligonucleotide for detection of SNP TSC0060870
tagagagtataaa

SEQ ID NO: 249174 - DNA, 13 bp, Artificial Sequence
  Oligonucleotide for detection of SNP TSC0060870
tttatactctcta

SEQ ID NO: 249175 - DNA, 13 bp, Artificial Sequence
  Oligonucleotide for detection of SNP TSC0060871
aattatgatttat

SEQ ID NO: 249176 - DNA, 13 bp, Artificial Sequence
  Oligonucleotide for detection of SNP TSC0060871
ataaatcataatt

SEQ ID NO: 249177 - DNA, 13 bp, Artificial Sequence
  Oligonucleotide for detection of SNP TSC0060871
aattataatttat

SEQ ID NO: 249178 - DNA, 13 bp, Artificial Sequence
  Oligonucleotide for detection of SNP TSC0060871
ataaattataatt

SEQ ID NO: 249179 - DNA, 13 bp, Artificial Sequence
  Oligonucleotide for detection of SNP TSC0060872
aggaatatatatg

SEQ ID NO: 249180 - DNA, 13 bp, Artificial Sequence
  Oligonucleotide for detection of SNP TSC0060872
catatatattcct

SEQ ID NO: 249181 - DNA, 13 bp, Artificial Sequence
  Oligonucleotide for detection of SNP TSC0060872
aggaatgtatatg

SEQ ID NO: 249182 - DNA, 13 bp, Artificial Sequence
  Oligonucleotide for detection of SNP TSC0060872
catatacattcct

SEQ ID NO: 249183 - DNA, 13 bp, Artificial Sequence
  Oligonucleotide for detection of SNP TSC0060872
aggaacgtatatg

SEQ ID NO: 249184 - DNA, 13 bp, Artificial Sequence
  Oligonucleotide for detection of SNP TSC0060872
catatacgttcct

SEQ ID NO: 249185 - DNA, 13 bp, Artificial Sequence
  Oligonucleotide for detection of SNP TSC0060873
tatattattggaa

SEQ ID NO: 249186 - DNA, 13 bp, Artificial Sequence
  Oligonucleotide for detection of SNP TSC0060873
ttccaataatata

SEQ ID NO: 249187 - DNA, 13 bp, Artificial Sequence
  Oligonucleotide for detection of SNP TSC0060873
tatatttttggaa

SEQ ID NO: 249188 - DNA, 13 bp, Artificial Sequence
  Oligonucleotide for detection of SNP TSC0060873
ttccaaaaatata

SEQ ID NO: 249189 - DNA, 13 bp, Artificial Sequence
  Oligonucleotide for detection of SNP TSC0060873
ttttagtagtgtg

SEQ ID NO: 249190 - DNA, 13 bp, Artificial Sequence
  Oligonucleotide for detection of SNP TSC0060873
cacactactaaaa

SEQ ID NO: 249191 - DNA, 13 bp, Artificial Sequence
  Oligonucleotide for detection of SNP TSC0060873
ttttaggagtgtg

SEQ ID NO: 249192 - DNA, 13 bp, Artificial Sequence
  Oligonucleotide for detection of SNP TSC0060873
cacactcctaaaa

SEQ ID NO: 249193 - DNA, 13 bp, Artificial Sequence
  Oligonucleotide for detection of SNP TSC0060874
aaaggggtaatgt

SEQ ID NO: 249194 - DNA, 13 bp, Artificial Sequence
  Oligonucleotide for detection of SNP TSC0060874
acattaccccttt

SEQ ID NO: 249195 - DNA, 13 bp, Artificial Sequence
  Oligonucleotide for detection of SNP TSC0060874
aaagggataatgt

SEQ ID NO: 249196 - DNA, 13 bp, Artificial Sequence
  Oligonucleotide for detection of SNP TSC0060874
acattatcccttt

SEQ ID NO: 249197 - DNA, 13 bp, Artificial Sequence
  Oligonucleotide for detection of SNP TSC0060875
tttaaggtattag

SEQ ID NO: 249198 - DNA, 13 bp, Artificial Sequence
  Oligonucleotide for detection of SNP TSC0060875
ctaataccttaaa

SEQ ID NO: 249199 - DNA, 13 bp, Artificial Sequence
  Oligonucleotide for detection of SNP TSC0060875
tttaagatattag

SEQ ID NO: 249200 - DNA, 13 bp, Artificial Sequence
  Oligonucleotide for detection of SNP TSC0060875
ctaatatcttaaa

SEQ ID NO: 249201 - DNA, 13 bp, Artificial Sequence
  Oligonucleotide for detection of SNP TSC0010444
ttaatgaggttta

SEQ ID NO: 249202 - DNA, 13 bp, Artificial Sequence
  Oligonucleotide for detection of SNP TSC0010444
taaacctcattaa

SEQ ID NO: 249203 - DNA, 13 bp, Artificial Sequence
  Oligonucleotide for detection of SNP TSC0010444
ttaatggggttta

SEQ ID NO: 249204 - DNA, 13 bp, Artificial Sequence
  Oligonucleotide for detection of SNP TSC0010444
taaaccccattaa

SEQ ID NO: 249205 - DNA, 13 bp, Artificial Sequence
  Oligonucleotide for detection of SNP TSC0010445
ttttatcgttttt

SEQ ID NO: 249206 - DNA, 13 bp, Artificial Sequence
  Oligonucleotide for detection of SNP TSC0010445
aaaaacgataaaa

SEQ ID NO: 249207 - DNA, 13 bp, Artificial Sequence
  Oligonucleotide for detection of SNP TSC0010445
aggagtgatagag

SEQ ID NO: 249208 - DNA, 13 bp, Artificial Sequence
  Oligonucleotide for detection of SNP TSC0010445
ctctatcactcct

SEQ ID NO: 249209 - DNA, 13 bp, Artificial Sequence
  Oligonucleotide for detection of SNP TSC0010445
aggagtaatagag

SEQ ID NO: 249210 - DNA, 13 bp, Artificial Sequence
  Oligonucleotide for detection of SNP TSC0010445
ctctattactcct

SEQ ID NO: 249211 - DNA, 13 bp, Artificial Sequence
  Oligonucleotide for detection of SNP TSC0010445
aggagcgatagag

SEQ ID NO: 249212 - DNA, 13 bp, Artificial Sequence
  Oligonucleotide for detection of SNP TSC0010445
ctctatcgctcct

SEQ ID NO: 249213 - DNA, 13 bp, Artificial Sequence
  Oligonucleotide for detection of SNP TSC0010446
taaatttgggttg

SEQ ID NO: 249214 - DNA, 13 bp, Artificial Sequence
  Oligonucleotide for detection of SNP TSC0010446
caacccaaattta

SEQ ID NO: 249215 - DNA, 13 bp, Artificial Sequence
  Oligonucleotide for detection of SNP TSC0010446
taaattcgggttg

SEQ ID NO: 249216 - DNA, 13 bp, Artificial Sequence
  Oligonucleotide for detection of SNP TSC0010446
caacccgaattta

SEQ ID NO: 249217 - DNA, 13 bp, Artificial Sequence
  Oligonucleotide for detection of SNP TSC0060877
ttaaggtgtttta

SEQ ID NO: 249218 - DNA, 13 bp, Artificial Sequence
  Oligonucleotide for detection of SNP TSC0060877
taaaacaccttaa

SEQ ID NO: 249219 - DNA, 13 bp, Artificial Sequence
  Oligonucleotide for detection of SNP TSC0060877
ttaaggcgtttta

SEQ ID NO: 249220 - DNA, 13 bp, Artificial Sequence
  Oligonucleotide for detection of SNP TSC0060877
taaaacgccttaa

SEQ ID NO: 249221 - DNA, 13 bp, Artificial Sequence
  Oligonucleotide for detection of SNP TSC0060877
tggagtgttttga

SEQ ID NO: 249222 - DNA, 13 bp, Artificial Sequence
  Oligonucleotide for detection of SNP TSC0060877
tcaaaacactcca

SEQ ID NO: 249223 - DNA, 13 bp, Artificial Sequence
  Oligonucleotide for detection of SNP TSC0060877
tggagtattttga

SEQ ID NO: 249224 - DNA, 13 bp, Artificial Sequence
  Oligonucleotide for detection of SNP TSC0060877
tcaaaatactcca

SEQ ID NO: 249225 - DNA, 13 bp, Artificial Sequence
  Oligonucleotide for detection of SNP TSC0060877
tggagcgttttga

SEQ ID NO: 249226 - DNA, 13 bp, Artificial Sequence
  Oligonucleotide for detection of SNP TSC0060877
tcaaaacgctcca

SEQ ID NO: 249227 - DNA, 13 bp, Artificial Sequence
  Oligonucleotide for detection of SNP TSC0060878
atgtattgttata

SEQ ID NO: 249228 - DNA, 13 bp, Artificial Sequence
  Oligonucleotide for detection of SNP TSC0060878
tataacaatacat

SEQ ID NO: 249229 - DNA, 13 bp, Artificial Sequence
  Oligonucleotide for detection of SNP TSC0060878
atgtatcgttata

SEQ ID NO: 249230 - DNA, 13 bp, Artificial Sequence
  Oligonucleotide for detection of SNP TSC0060878
tataacgatacat

SEQ ID NO: 249231 - DNA, 13 bp, Artificial Sequence
  Oligonucleotide for detection of SNP TSC0060878
tgtggtggtatat

SEQ ID NO: 249232 - DNA, 13 bp, Artificial Sequence
  Oligonucleotide for detection of SNP TSC0060878
atataccaccaca

SEQ ID NO: 249233 - DNA, 13 bp, Artificial Sequence
  Oligonucleotide for detection of SNP TSC0060878
tgtggtagtatat

SEQ ID NO: 249234 - DNA, 13 bp, Artificial Sequence
  Oligonucleotide for detection of SNP TSC0060878
atatactaccaca

SEQ ID NO: 249235 - DNA, 13 bp, Artificial Sequence
  Oligonucleotide for detection of SNP TSC0060878
tgtggcggtatat

SEQ ID NO: 249236 - DNA, 13 bp, Artificial Sequence
  Oligonucleotide for detection of SNP TSC0060878
atataccgccaca

SEQ ID NO: 249237 - DNA, 13 bp, Artificial Sequence
  Oligonucleotide for detection of SNP TSC0060879
tattgtttgttag

SEQ ID NO: 249238 - DNA, 13 bp, Artificial Sequence
  Oligonucleotide for detection of SNP TSC0060879
ctaacaaacaata

SEQ ID NO: 249239 - DNA, 13 bp, Artificial Sequence
  Oligonucleotide for detection of SNP TSC0060879
ttaatatgtagta

SEQ ID NO: 249240 - DNA, 13 bp, Artificial Sequence
  Oligonucleotide for detection of SNP TSC0060879
tactacatattaa

SEQ ID NO: 249241 - DNA, 13 bp, Artificial Sequence
  Oligonucleotide for detection of SNP TSC0060879
ttaatacgtagta

SEQ ID NO: 249242 - DNA, 13 bp, Artificial Sequence
  Oligonucleotide for detection of SNP TSC0060879
tactacgtattaa

SEQ ID NO: 249243 - DNA, 13 bp, Artificial Sequence
  Oligonucleotide for detection of SNP TSC0060881
taagattgattta

SEQ ID NO: 249244 - DNA, 13 bp, Artificial Sequence
  Oligonucleotide for detection of SNP TSC0060881
taaatcaatctta

SEQ ID NO: 249245 - DNA, 13 bp, Artificial Sequence
  Oligonucleotide for detection of SNP TSC0060881
taagatcgattta

SEQ ID NO: 249246 - DNA, 13 bp, Artificial Sequence
  Oligonucleotide for detection of SNP TSC0060881
taaatcgatctta

SEQ ID NO: 249247 - DNA, 13 bp, Artificial Sequence
  Oligonucleotide for detection of SNP TSC0060881
tgaattggttttg

SEQ ID NO: 249248 - DNA, 13 bp, Artificial Sequence
  Oligonucleotide for detection of SNP TSC0060881
caaaaccaattca

SEQ ID NO: 249249 - DNA, 13 bp, Artificial Sequence
  Oligonucleotide for detection of SNP TSC0060881
tgaattagttttg

SEQ ID NO: 249250 - DNA, 13 bp, Artificial Sequence
  Oligonucleotide for detection of SNP TSC0060881
caaaactaattca

SEQ ID NO: 249251 - DNA, 13 bp, Artificial Sequence
  Oligonucleotide for detection of SNP TSC0060881
tgaatcggttttg

SEQ ID NO: 249252 - DNA, 13 bp, Artificial Sequence
  Oligonucleotide for detection of SNP TSC0060881
caaaaccgattca

SEQ ID NO: 249253 - DNA, 13 bp, Artificial Sequence
  Oligonucleotide for detection of SNP TSC0060882
gttatttgatgty

SEQ ID NO: 249254 - DNA, 13 bp, Artificial Sequence
  Oligonucleotide for detection of SNP TSC0060882
racatcaaataac

SEQ ID NO: 249255 - DNA, 13 bp, Artificial Sequence
  Oligonucleotide for detection of SNP TSC0060882
gttattggatgty

SEQ ID NO: 249256 - DNA, 13 bp, Artificial Sequence
  Oligonucleotide for detection of SNP TSC0060882
racatccaataac

SEQ ID NO: 249257 - DNA, 13 bp, Artificial Sequence
  Oligonucleotide for detection of SNP TSC0060882
gttatcggatgty

SEQ ID NO: 249258 - DNA, 13 bp, Artificial Sequence
  Oligonucleotide for detection of SNP TSC0060882
racatccgataac

SEQ ID NO: 249259 - DNA, 13 bp, Artificial Sequence
  Oligonucleotide for detection of SNP TSC0060882
ggtattagatgay

SEQ ID NO: 249260 - DNA, 13 bp, Artificial Sequence
  Oligonucleotide for detection of SNP TSC0060882
rtcatctaatacc

SEQ ID NO: 249261 - DNA, 13 bp, Artificial Sequence
  Oligonucleotide for detection of SNP TSC0060882
ggtatttgatgay

SEQ ID NO: 249262 - DNA, 13 bp, Artificial Sequence
  Oligonucleotide for detection of SNP TSC0060882
rtcatcaaatacc

SEQ ID NO: 249263 - DNA, 13 bp, Artificial Sequence
  Oligonucleotide for detection of SNP TSC0060882
ggtattcgatgay

SEQ ID NO: 249264 - DNA, 13 bp, Artificial Sequence
  Oligonucleotide for detection of SNP TSC0060882
rtcatcgaatacc

SEQ ID NO: 249265 - DNA, 13 bp, Artificial Sequence
  Oligonucleotide for detection of SNP TSC0060883
tttgaaagttggy

SEQ ID NO: 249266 - DNA, 13 bp, Artificial Sequence
  Oligonucleotide for detection of SNP TSC0060883
rccaactttcaaa

SEQ ID NO: 249267 - DNA, 13 bp, Artificial Sequence
  Oligonucleotide for detection of SNP TSC0060883
tttgaatgttggy

SEQ ID NO: 249268 - DNA, 13 bp, Artificial Sequence
  Oligonucleotide for detection of SNP TSC0060883
rccaacattcaaa

SEQ ID NO: 249269 - DNA, 13 bp, Artificial Sequence
  Oligonucleotide for detection of SNP TSC0060884
gaggatgttggtg

SEQ ID NO: 249270 - DNA, 13 bp, Artificial Sequence
  Oligonucleotide for detection of SNP TSC0060884
caccaacatcctc

SEQ ID NO: 249271 - DNA, 13 bp, Artificial Sequence
  Oligonucleotide for detection of SNP TSC0060884
gaggatattggtg

SEQ ID NO: 249272 - DNA, 13 bp, Artificial Sequence
  Oligonucleotide for detection of SNP TSC0060884
caccaatatcctc

SEQ ID NO: 249273 - DNA, 13 bp, Artificial Sequence
  Oligonucleotide for detection of SNP TSC0060884
gaggacgttggtg

SEQ ID NO: 249274 - DNA, 13 bp, Artificial Sequence
  Oligonucleotide for detection of SNP TSC0060884
caccaacgtcctc

SEQ ID NO: 249275 - DNA, 13 bp, Artificial Sequence
  Oligonucleotide for detection of SNP TSC0060885
agattgaaggtgg

SEQ ID NO: 249276 - DNA, 13 bp, Artificial Sequence
  Oligonucleotide for detection of SNP TSC0060885
ccaccttcaatct

SEQ ID NO: 249277 - DNA, 13 bp, Artificial Sequence
  Oligonucleotide for detection of SNP TSC0060885
agattggaggtgg

SEQ ID NO: 249278 - DNA, 13 bp, Artificial Sequence
  Oligonucleotide for detection of SNP TSC0060885
ccacctccaatct

SEQ ID NO: 249279 - DNA, 13 bp, Artificial Sequence
  Oligonucleotide for detection of SNP TSC0060887
aaaggttggtggg

SEQ ID NO: 249280 - DNA, 13 bp, Artificial Sequence
  Oligonucleotide for detection of SNP TSC0060887
cccaccaaccttt

SEQ ID NO: 249281 - DNA, 13 bp, Artificial Sequence
  Oligonucleotide for detection of SNP TSC0060887
aaaggtcggtggg

SEQ ID NO: 249282 - DNA, 13 bp, Artificial Sequence
  Oligonucleotide for detection of SNP TSC0060887
cccaccgaccttt

SEQ ID NO: 249283 - DNA, 13 bp, Artificial Sequence
  Oligonucleotide for detection of SNP TSC0060887
tttatcggttttt

SEQ ID NO: 249284 - DNA, 13 bp, Artificial Sequence
  Oligonucleotide for detection of SNP TSC0060887
aaaaaccgataaa

SEQ ID NO: 249285 - DNA, 13 bp, Artificial Sequence
  Oligonucleotide for detection of SNP TSC0060889
ttttttgaaataa

SEQ ID NO: 249286 - DNA, 13 bp, Artificial Sequence
  Oligonucleotide for detection of SNP TSC0060889
ttatttcaaaaaa

SEQ ID NO: 249287 - DNA, 13 bp, Artificial Sequence
  Oligonucleotide for detection of SNP TSC0060889
ttgtttgagagag

SEQ ID NO: 249288 - DNA, 13 bp, Artificial Sequence
  Oligonucleotide for detection of SNP TSC0060889
ctctctcaaacaa

SEQ ID NO: 249289 - DNA, 13 bp, Artificial Sequence
  Oligonucleotide for detection of SNP TSC0060889
ttgttttagagag

SEQ ID NO: 249290 - DNA, 13 bp, Artificial Sequence
  Oligonucleotide for detection of SNP TSC0060889
ctctctaaaacaa

SEQ ID NO: 249291 - DNA, 13 bp, Artificial Sequence
  Oligonucleotide for detection of SNP TSC0060891
gaaagagaaaaty

SEQ ID NO: 249292 - DNA, 13 bp, Artificial Sequence
  Oligonucleotide for detection of SNP TSC0060891
rattttctctttc

SEQ ID NO: 249293 - DNA, 13 bp, Artificial Sequence
  Oligonucleotide for detection of SNP TSC0060891
gaaagaaaaaaty

SEQ ID NO: 249294 - DNA, 13 bp, Artificial Sequence
  Oligonucleotide for detection of SNP TSC0060891
rattttttctttc

SEQ ID NO: 249295 - DNA, 13 bp, Artificial Sequence
  Oligonucleotide for detection of SNP TSC0060892
tattttgtttgag

SEQ ID NO: 249296 - DNA, 13 bp, Artificial Sequence
  Oligonucleotide for detection of SNP TSC0060892
ctcaaacaaaata

SEQ ID NO: 249297 - DNA, 13 bp, Artificial Sequence
  Oligonucleotide for detection of SNP TSC0060892
tttaaaaagggta

SEQ ID NO: 249298 - DNA, 13 bp, Artificial Sequence
  Oligonucleotide for detection of SNP TSC0060892
taccctttttaaa

SEQ ID NO: 249299 - DNA, 13 bp, Artificial Sequence
  Oligonucleotide for detection of SNP TSC0060892
tttaaatagggta

SEQ ID NO: 249300 - DNA, 13 bp, Artificial Sequence
  Oligonucleotide for detection of SNP TSC0060892
taccctatttaaa

SEQ ID NO: 249301 - DNA, 13 bp, Artificial Sequence
  Oligonucleotide for detection of SNP TSC0060895
gagaagattttty

SEQ ID NO: 249302 - DNA, 13 bp, Artificial Sequence
  Oligonucleotide for detection of SNP TSC0060895
raaaaatcttctc

SEQ ID NO: 249303 - DNA, 13 bp, Artificial Sequence
  Oligonucleotide for detection of SNP TSC0060895
gagaagtttttty

SEQ ID NO: 249304 - DNA, 13 bp, Artificial Sequence
  Oligonucleotide for detection of SNP TSC0060895
raaaaaacttctc

SEQ ID NO: 249305 - DNA, 13 bp, Artificial Sequence
  Oligonucleotide for detection of SNP TSC0060895
gaaaagtttttty

SEQ ID NO: 249306 - DNA, 13 bp, Artificial Sequence
  Oligonucleotide for detection of SNP TSC0060895
raaaaaacttttc

SEQ ID NO: 249307 - DNA, 13 bp, Artificial Sequence
  Oligonucleotide for detection of SNP TSC0060895
gaaaaggttttty

SEQ ID NO: 249308 - DNA, 13 bp, Artificial Sequence
  Oligonucleotide for detection of SNP TSC0060895
raaaaaccttttc

SEQ ID NO: 249309 - DNA, 13 bp, Artificial Sequence
  Oligonucleotide for detection of SNP TSC0060896
gttaaaatggttg

SEQ ID NO: 249310 - DNA, 13 bp, Artificial Sequence
  Oligonucleotide for detection of SNP TSC0060896
caaccattttaac

SEQ ID NO: 249311 - DNA, 13 bp, Artificial Sequence
  Oligonucleotide for detection of SNP TSC0060896
gttaaagtggttg

SEQ ID NO: 249312 - DNA, 13 bp, Artificial Sequence
  Oligonucleotide for detection of SNP TSC0060896
caaccactttaac

SEQ ID NO: 249313 - DNA, 13 bp, Artificial Sequence
  Oligonucleotide for detection of SNP TSC0060897
tattataagatta

SEQ ID NO: 249314 - DNA, 13 bp, Artificial Sequence
  Oligonucleotide for detection of SNP TSC0060897
taatcttataata

SEQ ID NO: 249315 - DNA, 13 bp, Artificial Sequence
  Oligonucleotide for detection of SNP TSC0060897
tattattagatta

SEQ ID NO: 249316 - DNA, 13 bp, Artificial Sequence
  Oligonucleotide for detection of SNP TSC0060897
taatctaataata

SEQ ID NO: 249317 - DNA, 13 bp, Artificial Sequence
  Oligonucleotide for detection of SNP TSC0060898
ataattagataaa

SEQ ID NO: 249318 - DNA, 13 bp, Artificial Sequence
  Oligonucleotide for detection of SNP TSC0060898
tttatctaattat

SEQ ID NO: 249319 - DNA, 13 bp, Artificial Sequence
  Oligonucleotide for detection of SNP TSC0060898
ataattggataaa

SEQ ID NO: 249320 - DNA, 13 bp, Artificial Sequence
  Oligonucleotide for detection of SNP TSC0060898
tttatccaattat

SEQ ID NO: 249321 - DNA, 13 bp, Artificial Sequence
  Oligonucleotide for detection of SNP TSC0060899
atttttagttggg

SEQ ID NO: 249322 - DNA, 13 bp, Artificial Sequence
  Oligonucleotide for detection of SNP TSC0060899
cccaactaaaaat

SEQ ID NO: 249323 - DNA, 13 bp, Artificial Sequence
  Oligonucleotide for detection of SNP TSC0060899
attttttgttggg

SEQ ID NO: 249324 - DNA, 13 bp, Artificial Sequence
  Oligonucleotide for detection of SNP TSC0060899
cccaacaaaaaat

SEQ ID NO: 249325 - DNA, 13 bp, Artificial Sequence
  Oligonucleotide for detection of SNP TSC0060899
atttttcgttggg

SEQ ID NO: 249326 - DNA, 13 bp, Artificial Sequence
  Oligonucleotide for detection of SNP TSC0060899
cccaacgaaaaat

SEQ ID NO: 249327 - DNA, 13 bp, Artificial Sequence
  Oligonucleotide for detection of SNP TSC0060899
tttaattagagat

SEQ ID NO: 249328 - DNA, 13 bp, Artificial Sequence
  Oligonucleotide for detection of SNP TSC0060899
atctctaattaaa

SEQ ID NO: 249329 - DNA, 13 bp, Artificial Sequence
  Oligonucleotide for detection of SNP TSC0060899
tttaatgagagat

SEQ ID NO: 249330 - DNA, 13 bp, Artificial Sequence
  Oligonucleotide for detection of SNP TSC0060899
atctctcattaaa

SEQ ID NO: 249331 - DNA, 13 bp, Artificial Sequence
  Oligonucleotide for detection of SNP TSC0060899
tttaacgagagat

SEQ ID NO: 249332 - DNA, 13 bp, Artificial Sequence
  Oligonucleotide for detection of SNP TSC0060899
atctctcgttaaa

SEQ ID NO: 249333 - DNA, 13 bp, Artificial Sequence
  Oligonucleotide for detection of SNP TSC0060900
taaaattatataa

SEQ ID NO: 249334 - DNA, 13 bp, Artificial Sequence
  Oligonucleotide for detection of SNP TSC0060900
ttatataatttta

SEQ ID NO: 249335 - DNA, 13 bp, Artificial Sequence
  Oligonucleotide for detection of SNP TSC0060900
taaaatgatataa

SEQ ID NO: 249336 - DNA, 13 bp, Artificial Sequence
  Oligonucleotide for detection of SNP TSC0060900
ttatatcatttta

SEQ ID NO: 249337 - DNA, 13 bp, Artificial Sequence
  Oligonucleotide for detection of SNP TSC0060900
ttatattatttta

SEQ ID NO: 249338 - DNA, 13 bp, Artificial Sequence
  Oligonucleotide for detection of SNP TSC0060900
taaaataatataa

SEQ ID NO: 249339 - DNA, 13 bp, Artificial Sequence
  Oligonucleotide for detection of SNP TSC0060901
ttaatgaaataaa

SEQ ID NO: 249340 - DNA, 13 bp, Artificial Sequence
  Oligonucleotide for detection of SNP TSC0060901
tttatttcattaa

SEQ ID NO: 249341 - DNA, 13 bp, Artificial Sequence
  Oligonucleotide for detection of SNP TSC0060901
ttaatggaataaa

SEQ ID NO: 249342 - DNA, 13 bp, Artificial Sequence
  Oligonucleotide for detection of SNP TSC0060901
tttattccattaa

SEQ ID NO: 249343 - DNA, 13 bp, Artificial Sequence
  Oligonucleotide for detection of SNP TSC0060902
atagagattgtat

SEQ ID NO: 249344 - DNA, 13 bp, Artificial Sequence
  Oligonucleotide for detection of SNP TSC0060902
atacaatctctat

SEQ ID NO: 249345 - DNA, 13 bp, Artificial Sequence
  Oligonucleotide for detection of SNP TSC0060902
atagagtttgtat

SEQ ID NO: 249346 - DNA, 13 bp, Artificial Sequence
  Oligonucleotide for detection of SNP TSC0060902
atacaaactctat

SEQ ID NO: 249347 - DNA, 13 bp, Artificial Sequence
  Oligonucleotide for detection of SNP TSC0060902
atatagtttttat

SEQ ID NO: 249348 - DNA, 13 bp, Artificial Sequence
  Oligonucleotide for detection of SNP TSC0060902
ataaaaactatat

SEQ ID NO: 249349 - DNA, 13 bp, Artificial Sequence
  Oligonucleotide for detection of SNP TSC0060902
atatagattttat

SEQ ID NO: 249350 - DNA, 13 bp, Artificial Sequence
  Oligonucleotide for detection of SNP TSC0060902
ataaaatctatat

SEQ ID NO: 249351 - DNA, 13 bp, Artificial Sequence
  Oligonucleotide for detection of SNP TSC0060904
ttttttatgtata

SEQ ID NO: 249352 - DNA, 13 bp, Artificial Sequence
  Oligonucleotide for detection of SNP TSC0060904
tatacataaaaaa

SEQ ID NO: 249353 - DNA, 13 bp, Artificial Sequence
  Oligonucleotide for detection of SNP TSC0060909
ggaaatgtgttgg

SEQ ID NO: 249354 - DNA, 13 bp, Artificial Sequence
  Oligonucleotide for detection of SNP TSC0060909
ccaacacatttcc

SEQ ID NO: 249355 - DNA, 13 bp, Artificial Sequence
  Oligonucleotide for detection of SNP TSC0060909
ggaaatatgttgg

SEQ ID NO: 249356 - DNA, 13 bp, Artificial Sequence
  Oligonucleotide for detection of SNP TSC0060909
ccaacatatttcc

SEQ ID NO: 249357 - DNA, 13 bp, Artificial Sequence
  Oligonucleotide for detection of SNP TSC0060910
gtgtaggggtatg

SEQ ID NO: 249358 - DNA, 13 bp, Artificial Sequence
  Oligonucleotide for detection of SNP TSC0060910
catacccctacac

SEQ ID NO: 249359 - DNA, 13 bp, Artificial Sequence
  Oligonucleotide for detection of SNP TSC0060910
gtgtaggggtacg

SEQ ID NO: 249360 - DNA, 13 bp, Artificial Sequence
  Oligonucleotide for detection of SNP TSC0060910
cgtacccctacac

SEQ ID NO: 249361 - DNA, 13 bp, Artificial Sequence
  Oligonucleotide for detection of SNP TSC0060911
tgtttagtgtggg

SEQ ID NO: 249362 - DNA, 13 bp, Artificial Sequence
  Oligonucleotide for detection of SNP TSC0060911
cccacactaaaca

SEQ ID NO: 249363 - DNA, 13 bp, Artificial Sequence
  Oligonucleotide for detection of SNP TSC0060911
tgtttaatgtggg

SEQ ID NO: 249364 - DNA, 13 bp, Artificial Sequence
  Oligonucleotide for detection of SNP TSC0060911
cccacattaaaca

SEQ ID NO: 249365 - DNA, 13 bp, Artificial Sequence
  Oligonucleotide for detection of SNP TSC0060912
agttattggaagy

SEQ ID NO: 249366 - DNA, 13 bp, Artificial Sequence
  Oligonucleotide for detection of SNP TSC0060912
rcttccaataact

SEQ ID NO: 249367 - DNA, 13 bp, Artificial Sequence
  Oligonucleotide for detection of SNP TSC0060912
agttatcggaagy

SEQ ID NO: 249368 - DNA, 13 bp, Artificial Sequence
  Oligonucleotide for detection of SNP TSC0060912
rcttccgataact

SEQ ID NO: 249369 - DNA, 13 bp, Artificial Sequence
  Oligonucleotide for detection of SNP TSC0060912
gtttttgatgatt

SEQ ID NO: 249370 - DNA, 13 bp, Artificial Sequence
  Oligonucleotide for detection of SNP TSC0060912
aatcatcaaaaac

SEQ ID NO: 249371 - DNA, 13 bp, Artificial Sequence
  Oligonucleotide for detection of SNP TSC0060912
gtttttaatgatt

SEQ ID NO: 249372 - DNA, 13 bp, Artificial Sequence
  Oligonucleotide for detection of SNP TSC0060912
aatcattaaaaac

SEQ ID NO: 249373 - DNA, 13 bp, Artificial Sequence
  Oligonucleotide for detection of SNP TSC0060912
gttttcgatgatt

SEQ ID NO: 249374 - DNA, 13 bp, Artificial Sequence
  Oligonucleotide for detection of SNP TSC0060912
aatcatcgaaaac

SEQ ID NO: 249375 - DNA, 13 bp, Artificial Sequence
  Oligonucleotide for detection of SNP TSC0060913
tttgttatgaatg

SEQ ID NO: 249376 - DNA, 13 bp, Artificial Sequence
  Oligonucleotide for detection of SNP TSC0060913
cattcataacaaa

SEQ ID NO: 249377 - DNA, 13 bp, Artificial Sequence
  Oligonucleotide for detection of SNP TSC0060913
tttgttgtgaatg

SEQ ID NO: 249378 - DNA, 13 bp, Artificial Sequence
  Oligonucleotide for detection of SNP TSC0060913
cattcacaacaaa

SEQ ID NO: 249379 - DNA, 13 bp, Artificial Sequence
  Oligonucleotide for detection of SNP TSC0060913
tttgtcgtgaatg

SEQ ID NO: 249380 - DNA, 13 bp, Artificial Sequence
  Oligonucleotide for detection of SNP TSC0060913
cattcacgacaaa

SEQ ID NO: 249381 - DNA, 13 bp, Artificial Sequence
  Oligonucleotide for detection of SNP TSC0060913
tatttatgatagg

SEQ ID NO: 249382 - DNA, 13 bp, Artificial Sequence
  Oligonucleotide for detection of SNP TSC0060913
cctatcataaata

SEQ ID NO: 249383 - DNA, 13 bp, Artificial Sequence
  Oligonucleotide for detection of SNP TSC0060913
tatttacgatagg

SEQ ID NO: 249384 - DNA, 13 bp, Artificial Sequence
  Oligonucleotide for detection of SNP TSC0060913
cctatcgtaaata

SEQ ID NO: 249385 - DNA, 13 bp, Artificial Sequence
  Oligonucleotide for detection of SNP TSC0060917
ttattaagagaaa

SEQ ID NO: 249386 - DNA, 13 bp, Artificial Sequence
  Oligonucleotide for detection of SNP TSC0060917
tttctcttaataa

SEQ ID NO: 249387 - DNA, 13 bp, Artificial Sequence
  Oligonucleotide for detection of SNP TSC0060917
ttattatgagaaa

SEQ ID NO: 249388 - DNA, 13 bp, Artificial Sequence
  Oligonucleotide for detection of SNP TSC0060917
tttctcataataa

SEQ ID NO: 249389 - DNA, 13 bp, Artificial Sequence
  Oligonucleotide for detection of SNP TSC0060917
ttttttttgatga

SEQ ID NO: 249390 - DNA, 13 bp, Artificial Sequence
  Oligonucleotide for detection of SNP TSC0060917
tcatcaaaaaaaa

SEQ ID NO: 249391 - DNA, 13 bp, Artificial Sequence
  Oligonucleotide for detection of SNP TSC0060917
ttttttatgatga

SEQ ID NO: 249392 - DNA, 13 bp, Artificial Sequence
  Oligonucleotide for detection of SNP TSC0060917
tcatcataaaaaa

SEQ ID NO: 249393 - DNA, 13 bp, Artificial Sequence
  Oligonucleotide for detection of SNP TSC0060918
tatttagaatatg

SEQ ID NO: 249394 - DNA, 13 bp, Artificial Sequence
  Oligonucleotide for detection of SNP TSC0060918
catattctaaata

SEQ ID NO: 249395 - DNA, 13 bp, Artificial Sequence
  Oligonucleotide for detection of SNP TSC0060918
tatttaaaatatg

SEQ ID NO: 249396 - DNA, 13 bp, Artificial Sequence
  Oligonucleotide for detection of SNP TSC0060918
catattttaaata

SEQ ID NO: 249397 - DNA, 13 bp, Artificial Sequence
  Oligonucleotide for detection of SNP TSC0060920
gaggtaatttttt

SEQ ID NO: 249398 - DNA, 13 bp, Artificial Sequence
  Oligonucleotide for detection of SNP TSC0060920
aaaaaattacctc

SEQ ID NO: 249399 - DNA, 13 bp, Artificial Sequence
  Oligonucleotide for detection of SNP TSC0060920
gaggtattttttt

SEQ ID NO: 249400 - DNA, 13 bp, Artificial Sequence
  Oligonucleotide for detection of SNP TSC0060920
aaaaaaatacctc

SEQ ID NO: 249401 - DNA, 13 bp, Artificial Sequence
  Oligonucleotide for detection of SNP TSC0060920
aaggggttattty

SEQ ID NO: 249402 - DNA, 13 bp, Artificial Sequence
  Oligonucleotide for detection of SNP TSC0060920
raaataacccctt

SEQ ID NO: 249403 - DNA, 13 bp, Artificial Sequence
  Oligonucleotide for detection of SNP TSC0060920
aagggggtattty

SEQ ID NO: 249404 - DNA, 13 bp, Artificial Sequence
  Oligonucleotide for detection of SNP TSC0060920
raaataccccctt

SEQ ID NO: 249405 - DNA, 13 bp, Artificial Sequence
  Oligonucleotide for detection of SNP TSC0060921
ttaagtaaaaggg

SEQ ID NO: 249406 - DNA, 13 bp, Artificial Sequence
  Oligonucleotide for detection of SNP TSC0060921
cccttttacttaa

SEQ ID NO: 249407 - DNA, 13 bp, Artificial Sequence
  Oligonucleotide for detection of SNP TSC0060921
ttaagttaaaggg

SEQ ID NO: 249408 - DNA, 13 bp, Artificial Sequence
  Oligonucleotide for detection of SNP TSC0060921
ccctttaacttaa

SEQ ID NO: 249409 - DNA, 13 bp, Artificial Sequence
  Oligonucleotide for detection of SNP TSC0060921
tttttttgtttga

SEQ ID NO: 249410 - DNA, 13 bp, Artificial Sequence
  Oligonucleotide for detection of SNP TSC0060921
tcaaacaaaaaaa

SEQ ID NO: 249411 - DNA, 13 bp, Artificial Sequence
  Oligonucleotide for detection of SNP TSC0060922
ttaattgaaattt

SEQ ID NO: 249412 - DNA, 13 bp, Artificial Sequence
  Oligonucleotide for detection of SNP TSC0060922
aaatttcaattaa

SEQ ID NO: 249413 - DNA, 13 bp, Artificial Sequence
  Oligonucleotide for detection of SNP TSC0060922
ttaattaaaattt

SEQ ID NO: 249414 - DNA, 13 bp, Artificial Sequence
  Oligonucleotide for detection of SNP TSC0060922
aaattttaattaa

SEQ ID NO: 249415 - DNA, 13 bp, Artificial Sequence
  Oligonucleotide for detection of SNP TSC0060923
ttgtagtttaggg

SEQ ID NO: 249416 - DNA, 13 bp, Artificial Sequence
  Oligonucleotide for detection of SNP TSC0060923
ccctaaactacaa

SEQ ID NO: 249417 - DNA, 13 bp, Artificial Sequence
  Oligonucleotide for detection of SNP TSC0060923
ttgtaggttaggg

SEQ ID NO: 249418 - DNA, 13 bp, Artificial Sequence
  Oligonucleotide for detection of SNP TSC0060923
ccctaacctacaa

SEQ ID NO: 249419 - DNA, 13 bp, Artificial Sequence
  Oligonucleotide for detection of SNP TSC0060923
ttttgaattgtaa

SEQ ID NO: 249420 - DNA, 13 bp, Artificial Sequence
  Oligonucleotide for detection of SNP TSC0060923
ttacaattcaaaa

SEQ ID NO: 249421 - DNA, 13 bp, Artificial Sequence
  Oligonucleotide for detection of SNP TSC0060923
ttttgatttgtaa

SEQ ID NO: 249422 - DNA, 13 bp, Artificial Sequence
  Oligonucleotide for detection of SNP TSC0060923
ttacaaatcaaaa

SEQ ID NO: 249423 - DNA, 13 bp, Artificial Sequence
  Oligonucleotide for detection of SNP TSC0060925
ggagtgatattty

SEQ ID NO: 249424 - DNA, 13 bp, Artificial Sequence
  Oligonucleotide for detection of SNP TSC0060925
raaatatcactcc

SEQ ID NO: 249425 - DNA, 13 bp, Artificial Sequence
  Oligonucleotide for detection of SNP TSC0060925
ggagtggtattty

SEQ ID NO: 249426 - DNA, 13 bp, Artificial Sequence
  Oligonucleotide for detection of SNP TSC0060925
raaataccactcc

SEQ ID NO: 249427 - DNA, 13 bp, Artificial Sequence
  Oligonucleotide for detection of SNP TSC0060925
ggagcgatattty

SEQ ID NO: 249428 - DNA, 13 bp, Artificial Sequence
  Oligonucleotide for detection of SNP TSC0060925
raaatatcgctcc

SEQ ID NO: 249429 - DNA, 13 bp, Artificial Sequence
  Oligonucleotide for detection of SNP TSC0060925
ggagcggtattty

SEQ ID NO: 249430 - DNA, 13 bp, Artificial Sequence
  Oligonucleotide for detection of SNP TSC0060925
raaataccgctcc

SEQ ID NO: 249431 - DNA, 13 bp, Artificial Sequence
  Oligonucleotide for detection of SNP TSC0060926
taataacgatttg

SEQ ID NO: 249432 - DNA, 13 bp, Artificial Sequence
  Oligonucleotide for detection of SNP TSC0060926
caaatcgttatta

SEQ ID NO: 249433 - DNA, 13 bp, Artificial Sequence
  Oligonucleotide for detection of SNP TSC0060926
taaattgttgtta

SEQ ID NO: 249434 - DNA, 13 bp, Artificial Sequence
  Oligonucleotide for detection of SNP TSC0060926
taacaacaattta

SEQ ID NO: 249435 - DNA, 13 bp, Artificial Sequence
  Oligonucleotide for detection of SNP TSC0060926
taaattattgtta

SEQ ID NO: 249436 - DNA, 13 bp, Artificial Sequence
  Oligonucleotide for detection of SNP TSC0060926
taacaataattta

SEQ ID NO: 249437 - DNA, 13 bp, Artificial Sequence
  Oligonucleotide for detection of SNP TSC0060926
taaatcgttgtta

SEQ ID NO: 249438 - DNA, 13 bp, Artificial Sequence
  Oligonucleotide for detection of SNP TSC0060926
taacaacgattta

SEQ ID NO: 249439 - DNA, 13 bp, Artificial Sequence
  Oligonucleotide for detection of SNP TSC0060931
ttaagtaattgga

SEQ ID NO: 249440 - DNA, 13 bp, Artificial Sequence
  Oligonucleotide for detection of SNP TSC0060931
tccaattacttaa

SEQ ID NO: 249441 - DNA, 13 bp, Artificial Sequence
  Oligonucleotide for detection of SNP TSC0060931
ttaagtgattgga

SEQ ID NO: 249442 - DNA, 13 bp, Artificial Sequence
  Oligonucleotide for detection of SNP TSC0060931
tccaatcacttaa

SEQ ID NO: 249443 - DNA, 13 bp, Artificial Sequence
  Oligonucleotide for detection of SNP TSC0060932
tatttaggtttag

SEQ ID NO: 249444 - DNA, 13 bp, Artificial Sequence
  Oligonucleotide for detection of SNP TSC0060932
ctaaacctaaata

SEQ ID NO: 249445 - DNA, 13 bp, Artificial Sequence
  Oligonucleotide for detection of SNP TSC0060932
tatttaagtttag

SEQ ID NO: 249446 - DNA, 13 bp, Artificial Sequence
  Oligonucleotide for detection of SNP TSC0060932
ctaaacttaaata

SEQ ID NO: 249447 - DNA, 13 bp, Artificial Sequence
  Oligonucleotide for detection of SNP TSC0060934
gggaggaggtgaa

SEQ ID NO: 249448 - DNA, 13 bp, Artificial Sequence
  Oligonucleotide for detection of SNP TSC0060934
ttcacctcctccc

SEQ ID NO: 249449 - DNA, 13 bp, Artificial Sequence
  Oligonucleotide for detection of SNP TSC0060934
gggagggggtgaa

SEQ ID NO: 249450 - DNA, 13 bp, Artificial Sequence
  Oligonucleotide for detection of SNP TSC0060934
ttcaccccctccc

SEQ ID NO: 249451 - DNA, 13 bp, Artificial Sequence
  Oligonucleotide for detection of SNP TSC0060935
ttagtaggtttgg

SEQ ID NO: 249452 - DNA, 13 bp, Artificial Sequence
  Oligonucleotide for detection of SNP TSC0060935
ccaaacctactaa

SEQ ID NO: 249453 - DNA, 13 bp, Artificial Sequence
  Oligonucleotide for detection of SNP TSC0060935
ttaggtatgttgg

SEQ ID NO: 249454 - DNA, 13 bp, Artificial Sequence
  Oligonucleotide for detection of SNP TSC0060935
ccaacatacctaa

SEQ ID NO: 249455 - DNA, 13 bp, Artificial Sequence
  Oligonucleotide for detection of SNP TSC0060935
ttaggtttgttgg

SEQ ID NO: 249456 - DNA, 13 bp, Artificial Sequence
  Oligonucleotide for detection of SNP TSC0060935
ccaacaaacctaa

SEQ ID NO: 249457 - DNA, 13 bp, Artificial Sequence
  Oligonucleotide for detection of SNP TSC0060938
aatttcgaagtta

SEQ ID NO: 249458 - DNA, 13 bp, Artificial Sequence
  Oligonucleotide for detection of SNP TSC0060938
taacttcgaaatt

SEQ ID NO: 249459 - DNA, 13 bp, Artificial Sequence
  Oligonucleotide for detection of SNP TSC0060938
tggttttggaatt

SEQ ID NO: 249460 - DNA, 13 bp, Artificial Sequence
  Oligonucleotide for detection of SNP TSC0060938
aattccaaaacca

SEQ ID NO: 249461 - DNA, 13 bp, Artificial Sequence
  Oligonucleotide for detection of SNP TSC0060938
tggtttcggaatt

SEQ ID NO: 249462 - DNA, 13 bp, Artificial Sequence
  Oligonucleotide for detection of SNP TSC0060938
aattccgaaacca

SEQ ID NO: 249463 - DNA, 13 bp, Artificial Sequence
  Oligonucleotide for detection of SNP TSC0060939
tttgtttgtttaa

SEQ ID NO: 249464 - DNA, 13 bp, Artificial Sequence
  Oligonucleotide for detection of SNP TSC0060939
ttaaacaaacaaa

SEQ ID NO: 249465 - DNA, 13 bp, Artificial Sequence
  Oligonucleotide for detection of SNP TSC0060939
tttgttggtttaa

SEQ ID NO: 249466 - DNA, 13 bp, Artificial Sequence
  Oligonucleotide for detection of SNP TSC0060939
ttaaaccaacaaa

SEQ ID NO: 249467 - DNA, 13 bp, Artificial Sequence
  Oligonucleotide for detection of SNP TSC0060939
tttgtcggtttaa

SEQ ID NO: 249468 - DNA, 13 bp, Artificial Sequence
  Oligonucleotide for detection of SNP TSC0060939
ttaaaccgacaaa

SEQ ID NO: 249469 - DNA, 13 bp, Artificial Sequence
  Oligonucleotide for detection of SNP TSC0060939
ttgagtaggtaga

SEQ ID NO: 249470 - DNA, 13 bp, Artificial Sequence
  Oligonucleotide for detection of SNP TSC0060939
tctacctactcaa

SEQ ID NO: 249471 - DNA, 13 bp, Artificial Sequence
  Oligonucleotide for detection of SNP TSC0060939
ttgagttggtaga

SEQ ID NO: 249472 - DNA, 13 bp, Artificial Sequence
  Oligonucleotide for detection of SNP TSC0060939
tctaccaactcaa

SEQ ID NO: 249473 - DNA, 13 bp, Artificial Sequence
  Oligonucleotide for detection of SNP TSC0060939
ttgagtcggtaga

SEQ ID NO: 249474 - DNA, 13 bp, Artificial Sequence
  Oligonucleotide for detection of SNP TSC0060939
tctaccgactcaa

SEQ ID NO: 249475 - DNA, 13 bp, Artificial Sequence
  Oligonucleotide for detection of SNP TSC0060940
atttgggttgagt

SEQ ID NO: 249476 - DNA, 13 bp, Artificial Sequence
  Oligonucleotide for detection of SNP TSC0060940
actcaacccaaat

SEQ ID NO: 249477 - DNA, 13 bp, Artificial Sequence
  Oligonucleotide for detection of SNP TSC0060940
atttggattgagt

SEQ ID NO: 249478 - DNA, 13 bp, Artificial Sequence
  Oligonucleotide for detection of SNP TSC0060940
actcaatccaaat

SEQ ID NO: 249479 - DNA, 13 bp, Artificial Sequence
  Oligonucleotide for detection of SNP TSC0060941
tttgaatttttay

SEQ ID NO: 249480 - DNA, 13 bp, Artificial Sequence
  Oligonucleotide for detection of SNP TSC0060941
rtaaaaattcaaa

SEQ ID NO: 249481 - DNA, 13 bp, Artificial Sequence
  Oligonucleotide for detection of SNP TSC0060941
gtgaaagtttaga

SEQ ID NO: 249482 - DNA, 13 bp, Artificial Sequence
  Oligonucleotide for detection of SNP TSC0060941
tctaaactttcac

SEQ ID NO: 249483 - DNA, 13 bp, Artificial Sequence
  Oligonucleotide for detection of SNP TSC0060941
gtgaaattttaga

SEQ ID NO: 249484 - DNA, 13 bp, Artificial Sequence
  Oligonucleotide for detection of SNP TSC0060941
tctaaaatttcac

SEQ ID NO: 249485 - DNA, 13 bp, Artificial Sequence
  Oligonucleotide for detection of SNP TSC0060942
gttattagtaaga

SEQ ID NO: 249486 - DNA, 13 bp, Artificial Sequence
  Oligonucleotide for detection of SNP TSC0060942
tcttactaataac

SEQ ID NO: 249487 - DNA, 13 bp, Artificial Sequence
  Oligonucleotide for detection of SNP TSC0060942
gttattggtaaga

SEQ ID NO: 249488 - DNA, 13 bp, Artificial Sequence
  Oligonucleotide for detection of SNP TSC0060942
tcttaccaataac

SEQ ID NO: 249489 - DNA, 13 bp, Artificial Sequence
  Oligonucleotide for detection of SNP TSC0060942
gttatcggtaaga

SEQ ID NO: 249490 - DNA, 13 bp, Artificial Sequence
  Oligonucleotide for detection of SNP TSC0060942
tcttaccgataac

SEQ ID NO: 249491 - DNA, 13 bp, Artificial Sequence
  Oligonucleotide for detection of SNP TSC0060944
taggtaataattt

SEQ ID NO: 249492 - DNA, 13 bp, Artificial Sequence
  Oligonucleotide for detection of SNP TSC0060944
aaattattaccta

SEQ ID NO: 249493 - DNA, 13 bp, Artificial Sequence
  Oligonucleotide for detection of SNP TSC0060944
taggtagtaattt

SEQ ID NO: 249494 - DNA, 13 bp, Artificial Sequence
  Oligonucleotide for detection of SNP TSC0060944
aaattactaccta

SEQ ID NO: 249495 - DNA, 13 bp, Artificial Sequence
  Oligonucleotide for detection of SNP TSC0060945
agaaaatgaaaat

SEQ ID NO: 249496 - DNA, 13 bp, Artificial Sequence
  Oligonucleotide for detection of SNP TSC0060945
attttcattttct

SEQ ID NO: 249497 - DNA, 13 bp, Artificial Sequence
  Oligonucleotide for detection of SNP TSC0060945
agaaaacgaaaat

SEQ ID NO: 249498 - DNA, 13 bp, Artificial Sequence
  Oligonucleotide for detection of SNP TSC0060945
attttcgttttct

SEQ ID NO: 249499 - DNA, 13 bp, Artificial Sequence
  Oligonucleotide for detection of SNP TSC0060946
tagtaattgaggg

SEQ ID NO: 249500 - DNA, 13 bp, Artificial Sequence
  Oligonucleotide for detection of SNP TSC0060946
ccctcaattacta

SEQ ID NO: 249501 - DNA, 13 bp, Artificial Sequence
  Oligonucleotide for detection of SNP TSC0060946
tagtaaatgaggg

SEQ ID NO: 249502 - DNA, 13 bp, Artificial Sequence
  Oligonucleotide for detection of SNP TSC0060946
ccctcatttacta

SEQ ID NO: 249503 - DNA, 13 bp, Artificial Sequence
  Oligonucleotide for detection of SNP TSC0060947
ttttatgtatgty

SEQ ID NO: 249504 - DNA, 13 bp, Artificial Sequence
  Oligonucleotide for detection of SNP TSC0060947
racatacataaaa

SEQ ID NO: 249505 - DNA, 13 bp, Artificial Sequence
  Oligonucleotide for detection of SNP TSC0060947
ttttatatatgty

SEQ ID NO: 249506 - DNA, 13 bp, Artificial Sequence
  Oligonucleotide for detection of SNP TSC0060947
racatatataaaa

SEQ ID NO: 249507 - DNA, 13 bp, Artificial Sequence
  Oligonucleotide for detection of SNP TSC0060948
aaaattgagatat

SEQ ID NO: 249508 - DNA, 13 bp, Artificial Sequence
  Oligonucleotide for detection of SNP TSC0060948
atatctcaatttt

SEQ ID NO: 249509 - DNA, 13 bp, Artificial Sequence
  Oligonucleotide for detection of SNP TSC0060948
aaaattaagatat

SEQ ID NO: 249510 - DNA, 13 bp, Artificial Sequence
  Oligonucleotide for detection of SNP TSC0060948
atatcttaatttt

SEQ ID NO: 249511 - DNA, 13 bp, Artificial Sequence
  Oligonucleotide for detection of SNP TSC0060949
aaatataaaattg

SEQ ID NO: 249512 - DNA, 13 bp, Artificial Sequence
  Oligonucleotide for detection of SNP TSC0060949
caattttatattt

SEQ ID NO: 249513 - DNA, 13 bp, Artificial Sequence
  Oligonucleotide for detection of SNP TSC0060949
aaatatgaaattg

SEQ ID NO: 249514 - DNA, 13 bp, Artificial Sequence
  Oligonucleotide for detection of SNP TSC0060949
caatttcatattt

SEQ ID NO: 249515 - DNA, 13 bp, Artificial Sequence
  Oligonucleotide for detection of SNP TSC0060950
tataaattagaaa

SEQ ID NO: 249516 - DNA, 13 bp, Artificial Sequence
  Oligonucleotide for detection of SNP TSC0060950
tttctaatttata

SEQ ID NO: 249517 - DNA, 13 bp, Artificial Sequence
  Oligonucleotide for detection of SNP TSC0060951
aatggttagtttt

SEQ ID NO: 249518 - DNA, 13 bp, Artificial Sequence
  Oligonucleotide for detection of SNP TSC0060951
aaaactaaccatt

SEQ ID NO: 249519 - DNA, 13 bp, Artificial Sequence
  Oligonucleotide for detection of SNP TSC0060951
aatggtgagtttt

SEQ ID NO: 249520 - DNA, 13 bp, Artificial Sequence
  Oligonucleotide for detection of SNP TSC0060951
aaaactcaccatt

SEQ ID NO: 249521 - DNA, 13 bp, Artificial Sequence
  Oligonucleotide for detection of SNP TSC0060951
aaagttaattatt

SEQ ID NO: 249522 - DNA, 13 bp, Artificial Sequence
  Oligonucleotide for detection of SNP TSC0060951
aataattaacttt

SEQ ID NO: 249523 - DNA, 13 bp, Artificial Sequence
  Oligonucleotide for detection of SNP TSC0060951
aaagtttattatt

SEQ ID NO: 249524 - DNA, 13 bp, Artificial Sequence
  Oligonucleotide for detection of SNP TSC0060951
aataataaacttt

SEQ ID NO: 249525 - DNA, 13 bp, Artificial Sequence
  Oligonucleotide for detection of SNP TSC0060952
attttcgttagta

SEQ ID NO: 249526 - DNA, 13 bp, Artificial Sequence
  Oligonucleotide for detection of SNP TSC0060952
tactaacgaaaat

SEQ ID NO: 249527 - DNA, 13 bp, Artificial Sequence
  Oligonucleotide for detection of SNP TSC0060952
tgttggtgaggat

SEQ ID NO: 249528 - DNA, 13 bp, Artificial Sequence
  Oligonucleotide for detection of SNP TSC0060952
atcctcaccaaca

SEQ ID NO: 249529 - DNA, 13 bp, Artificial Sequence
  Oligonucleotide for detection of SNP TSC0060952
tgttggcgaggat

SEQ ID NO: 249530 - DNA, 13 bp, Artificial Sequence
  Oligonucleotide for detection of SNP TSC0060952
atcctcgccaaca

SEQ ID NO: 249531 - DNA, 13 bp, Artificial Sequence
  Oligonucleotide for detection of SNP TSC0060953
ttttaaaaatgga

SEQ ID NO: 249532 - DNA, 13 bp, Artificial Sequence
  Oligonucleotide for detection of SNP TSC0060953
tccatttttaaaa

SEQ ID NO: 249533 - DNA, 13 bp, Artificial Sequence
  Oligonucleotide for detection of SNP TSC0060953
ttttaataatgga

SEQ ID NO: 249534 - DNA, 13 bp, Artificial Sequence
  Oligonucleotide for detection of SNP TSC0060953
tccattattaaaa

SEQ ID NO: 249535 - DNA, 13 bp, Artificial Sequence
  Oligonucleotide for detection of SNP TSC0060956
tcgagtagttggg

SEQ ID NO: 249536 - DNA, 13 bp, Artificial Sequence
  Oligonucleotide for detection of SNP TSC0060956
cccaactactcga

SEQ ID NO: 249537 - DNA, 13 bp, Artificial Sequence
  Oligonucleotide for detection of SNP TSC0060956
tcgagttgttggg

SEQ ID NO: 249538 - DNA, 13 bp, Artificial Sequence
  Oligonucleotide for detection of SNP TSC0060956
cccaacaactcga

SEQ ID NO: 249539 - DNA, 13 bp, Artificial Sequence
  Oligonucleotide for detection of SNP TSC0060956
tttagttatttgg

SEQ ID NO: 249540 - DNA, 13 bp, Artificial Sequence
  Oligonucleotide for detection of SNP TSC0060956
ccaaataactaaa

SEQ ID NO: 249541 - DNA, 13 bp, Artificial Sequence
  Oligonucleotide for detection of SNP TSC0060956
tttagtaatttgg

SEQ ID NO: 249542 - DNA, 13 bp, Artificial Sequence
  Oligonucleotide for detection of SNP TSC0060956
ccaaattactaaa

SEQ ID NO: 249543 - DNA, 13 bp, Artificial Sequence
  Oligonucleotide for detection of SNP TSC0060956
tttagttattcgg

SEQ ID NO: 249544 - DNA, 13 bp, Artificial Sequence
  Oligonucleotide for detection of SNP TSC0060956
ccgaataactaaa

SEQ ID NO: 249545 - DNA, 13 bp, Artificial Sequence
  Oligonucleotide for detection of SNP TSC0060956
tttagtaattcgg

SEQ ID NO: 249546 - DNA, 13 bp, Artificial Sequence
  Oligonucleotide for detection of SNP TSC0060956
ccgaattactaaa

SEQ ID NO: 249547 - DNA, 13 bp, Artificial Sequence
  Oligonucleotide for detection of SNP TSC0060957
taataatggggta

SEQ ID NO: 249548 - DNA, 13 bp, Artificial Sequence
  Oligonucleotide for detection of SNP TSC0060957
taccccattatta

SEQ ID NO: 249549 - DNA, 13 bp, Artificial Sequence
  Oligonucleotide for detection of SNP TSC0060957
taataacggggta

SEQ ID NO: 249550 - DNA, 13 bp, Artificial Sequence
  Oligonucleotide for detection of SNP TSC0060957
taccccgttatta

SEQ ID NO: 249551 - DNA, 13 bp, Artificial Sequence
  Oligonucleotide for detection of SNP TSC0060960
gatggtgtggggg

SEQ ID NO: 249552 - DNA, 13 bp, Artificial Sequence
  Oligonucleotide for detection of SNP TSC0060960
cccccacaccatc

SEQ ID NO: 249553 - DNA, 13 bp, Artificial Sequence
  Oligonucleotide for detection of SNP TSC0060960
gatggtttggggg

SEQ ID NO: 249554 - DNA, 13 bp, Artificial Sequence
  Oligonucleotide for detection of SNP TSC0060960
cccccaaaccatc

SEQ ID NO: 249555 - DNA, 13 bp, Artificial Sequence
  Oligonucleotide for detection of SNP TSC0060960
gatggcgtggggg

SEQ ID NO: 249556 - DNA, 13 bp, Artificial Sequence
  Oligonucleotide for detection of SNP TSC0060960
cccccacgccatc

SEQ ID NO: 249557 - DNA, 13 bp, Artificial Sequence
  Oligonucleotide for detection of SNP TSC0060961
ttttagcgagttt

SEQ ID NO: 249558 - DNA, 13 bp, Artificial Sequence
  Oligonucleotide for detection of SNP TSC0060961
aaactcgctaaaa

SEQ ID NO: 249559 - DNA, 13 bp, Artificial Sequence
  Oligonucleotide for detection of SNP TSC0060961
aggttttttgggg

SEQ ID NO: 249560 - DNA, 13 bp, Artificial Sequence
  Oligonucleotide for detection of SNP TSC0060961
ccccaaaaaacct

SEQ ID NO: 249561 - DNA, 13 bp, Artificial Sequence
  Oligonucleotide for detection of SNP TSC0060961
aggtttgttgggg

SEQ ID NO: 249562 - DNA, 13 bp, Artificial Sequence
  Oligonucleotide for detection of SNP TSC0060961
ccccaacaaacct

SEQ ID NO: 249563 - DNA, 13 bp, Artificial Sequence
  Oligonucleotide for detection of SNP TSC0060961
aggttcgttgggg

SEQ ID NO: 249564 - DNA, 13 bp, Artificial Sequence
  Oligonucleotide for detection of SNP TSC0060961
ccccaacgaacct

SEQ ID NO: 249565 - DNA, 13 bp, Artificial Sequence
  Oligonucleotide for detection of SNP TSC0060962
gagtgaagaggta

SEQ ID NO: 249566 - DNA, 13 bp, Artificial Sequence
  Oligonucleotide for detection of SNP TSC0060962
tacctcttcactc

SEQ ID NO: 249567 - DNA, 13 bp, Artificial Sequence
  Oligonucleotide for detection of SNP TSC0060962
gagtgaggaggta

SEQ ID NO: 249568 - DNA, 13 bp, Artificial Sequence
  Oligonucleotide for detection of SNP TSC0060962
tacctcctcactc

SEQ ID NO: 249569 - DNA, 13 bp, Artificial Sequence
  Oligonucleotide for detection of SNP TSC0060965
ttatgtatggaat

SEQ ID NO: 249570 - DNA, 13 bp, Artificial Sequence
  Oligonucleotide for detection of SNP TSC0060965
attccatacataa

SEQ ID NO: 249571 - DNA, 13 bp, Artificial Sequence
  Oligonucleotide for detection of SNP TSC0060965
ttatgtgtggaat

SEQ ID NO: 249572 - DNA, 13 bp, Artificial Sequence
  Oligonucleotide for detection of SNP TSC0060965
attccacacataa

SEQ ID NO: 249573 - DNA, 13 bp, Artificial Sequence
  Oligonucleotide for detection of SNP TSC0060967
gaaattttattga

SEQ ID NO: 249574 - DNA, 13 bp, Artificial Sequence
  Oligonucleotide for detection of SNP TSC0060967
tcaataaaatttc

SEQ ID NO: 249575 - DNA, 13 bp, Artificial Sequence
  Oligonucleotide for detection of SNP TSC0060967
gaaattgtattga

SEQ ID NO: 249576 - DNA, 13 bp, Artificial Sequence
  Oligonucleotide for detection of SNP TSC0060967
tcaatacaatttc

SEQ ID NO: 249577 - DNA, 13 bp, Artificial Sequence
  Oligonucleotide for detection of SNP TSC0060967
gaaatcgtattga

SEQ ID NO: 249578 - DNA, 13 bp, Artificial Sequence
  Oligonucleotide for detection of SNP TSC0060967
tcaatacgatttc

SEQ ID NO: 249579 - DNA, 13 bp, Artificial Sequence
  Oligonucleotide for detection of SNP TSC0060967
ttagtaggattty

SEQ ID NO: 249580 - DNA, 13 bp, Artificial Sequence
  Oligonucleotide for detection of SNP TSC0060967
raaatcctactaa

SEQ ID NO: 249581 - DNA, 13 bp, Artificial Sequence
  Oligonucleotide for detection of SNP TSC0060967
ttagtatgattty

SEQ ID NO: 249582 - DNA, 13 bp, Artificial Sequence
  Oligonucleotide for detection of SNP TSC0060967
raaatcatactaa

SEQ ID NO: 249583 - DNA, 13 bp, Artificial Sequence
  Oligonucleotide for detection of SNP TSC0060967
ttagtacgattty

SEQ ID NO: 249584 - DNA, 13 bp, Artificial Sequence
  Oligonucleotide for detection of SNP TSC0060967
raaatcgtactaa

SEQ ID NO: 249585 - DNA, 13 bp, Artificial Sequence
  Oligonucleotide for detection of SNP TSC0060968
tttgataattttt

SEQ ID NO: 249586 - DNA, 13 bp, Artificial Sequence
  Oligonucleotide for detection of SNP TSC0060968
aaaaattatcaaa

SEQ ID NO: 249587 - DNA, 13 bp, Artificial Sequence
  Oligonucleotide for detection of SNP TSC0060968
tttgacgattttt

SEQ ID NO: 249588 - DNA, 13 bp, Artificial Sequence
  Oligonucleotide for detection of SNP TSC0060968
aaaaatcgtcaaa

SEQ ID NO: 249589 - DNA, 13 bp, Artificial Sequence
  Oligonucleotide for detection of SNP TSC0060968
aagaattgttaag

SEQ ID NO: 249590 - DNA, 13 bp, Artificial Sequence
  Oligonucleotide for detection of SNP TSC0060968
cttaacaattctt

SEQ ID NO: 249591 - DNA, 13 bp, Artificial Sequence
  Oligonucleotide for detection of SNP TSC0060968
aagaatcgttaag

SEQ ID NO: 249592 - DNA, 13 bp, Artificial Sequence
  Oligonucleotide for detection of SNP TSC0060968
cttaacgattctt

SEQ ID NO: 249593 - DNA, 13 bp, Artificial Sequence
  Oligonucleotide for detection of SNP TSC0060969
ttattagttggay

SEQ ID NO: 249594 - DNA, 13 bp, Artificial Sequence
  Oligonucleotide for detection of SNP TSC0060969
rtccaactaataa

SEQ ID NO: 249595 - DNA, 13 bp, Artificial Sequence
  Oligonucleotide for detection of SNP TSC0060969
ttattaattggay

SEQ ID NO: 249596 - DNA, 13 bp, Artificial Sequence
  Oligonucleotide for detection of SNP TSC0060969
rtccaattaataa

SEQ ID NO: 249597 - DNA, 13 bp, Artificial Sequence
  Oligonucleotide for detection of SNP TSC0060971
ttatgtgagatgt

SEQ ID NO: 249598 - DNA, 13 bp, Artificial Sequence
  Oligonucleotide for detection of SNP TSC0060971
acatctcacataa

SEQ ID NO: 249599 - DNA, 13 bp, Artificial Sequence
  Oligonucleotide for detection of SNP TSC0060971
ttatgtaagatgt

SEQ ID NO: 249600 - DNA, 13 bp, Artificial Sequence
  Oligonucleotide for detection of SNP TSC0060971
acatcttacataa

SEQ ID NO: 249601 - DNA, 13 bp, Artificial Sequence
  Oligonucleotide for detection of SNP TSC0060971
ttatgtgagacgt

SEQ ID NO: 249602 - DNA, 13 bp, Artificial Sequence
  Oligonucleotide for detection of SNP TSC0060971
acgtctcacataa

SEQ ID NO: 249603 - DNA, 13 bp, Artificial Sequence
  Oligonucleotide for detection of SNP TSC0060971
ttatgtaagacgt

SEQ ID NO: 249604 - DNA, 13 bp, Artificial Sequence
  Oligonucleotide for detection of SNP TSC0060971
acgtcttacataa

SEQ ID NO: 249605 - DNA, 13 bp, Artificial Sequence
  Oligonucleotide for detection of SNP TSC0060978
gtagaagtgttty

SEQ ID NO: 249606 - DNA, 13 bp, Artificial Sequence
  Oligonucleotide for detection of SNP TSC0060978
raaacacttctac

SEQ ID NO: 249607 - DNA, 13 bp, Artificial Sequence
  Oligonucleotide for detection of SNP TSC0060978
gtagaaatgttty

SEQ ID NO: 249608 - DNA, 13 bp, Artificial Sequence
  Oligonucleotide for detection of SNP TSC0060978
raaacatttctac

SEQ ID NO: 249609 - DNA, 13 bp, Artificial Sequence
  Oligonucleotide for detection of SNP TSC0060979
gggataaaaatgy

SEQ ID NO: 249610 - DNA, 13 bp, Artificial Sequence
  Oligonucleotide for detection of SNP TSC0060979
rcatttttatccc

SEQ ID NO: 249611 - DNA, 13 bp, Artificial Sequence
  Oligonucleotide for detection of SNP TSC0060979
gggatagaaatgy

SEQ ID NO: 249612 - DNA, 13 bp, Artificial Sequence
  Oligonucleotide for detection of SNP TSC0060979
rcatttctatccc

SEQ ID NO: 249613 - DNA, 13 bp, Artificial Sequence
  Oligonucleotide for detection of SNP TSC0060980
atttatgttaata

SEQ ID NO: 249614 - DNA, 13 bp, Artificial Sequence
  Oligonucleotide for detection of SNP TSC0060980
tattaacataaat

SEQ ID NO: 249615 - DNA, 13 bp, Artificial Sequence
  Oligonucleotide for detection of SNP TSC0060980
atttacgttaata

SEQ ID NO: 249616 - DNA, 13 bp, Artificial Sequence
  Oligonucleotide for detection of SNP TSC0060980
tattaacgtaaat

SEQ ID NO: 249617 - DNA, 13 bp, Artificial Sequence
  Oligonucleotide for detection of SNP TSC0060980
tattgatgtgaat

SEQ ID NO: 249618 - DNA, 13 bp, Artificial Sequence
  Oligonucleotide for detection of SNP TSC0060980
attcacatcaata

SEQ ID NO: 249619 - DNA, 13 bp, Artificial Sequence
  Oligonucleotide for detection of SNP TSC0060980
tattgacgtgaat

SEQ ID NO: 249620 - DNA, 13 bp, Artificial Sequence
  Oligonucleotide for detection of SNP TSC0060980
attcacgtcaata

SEQ ID NO: 249621 - DNA, 13 bp, Artificial Sequence
  Oligonucleotide for detection of SNP TSC0060982
taaaaaatgaaaa

SEQ ID NO: 249622 - DNA, 13 bp, Artificial Sequence
  Oligonucleotide for detection of SNP TSC0060982
ttttcatttttta

SEQ ID NO: 249623 - DNA, 13 bp, Artificial Sequence
  Oligonucleotide for detection of SNP TSC0060982
taaaaattgaaaa

SEQ ID NO: 249624 - DNA, 13 bp, Artificial Sequence
  Oligonucleotide for detection of SNP TSC0060982
ttttcaattttta

SEQ ID NO: 249625 - DNA, 13 bp, Artificial Sequence
  Oligonucleotide for detection of SNP TSC0060983
tatagtaggagay

SEQ ID NO: 249626 - DNA, 13 bp, Artificial Sequence
  Oligonucleotide for detection of SNP TSC0060983
rtctcctactata

SEQ ID NO: 249627 - DNA, 13 bp, Artificial Sequence
  Oligonucleotide for detection of SNP TSC0060983
tatagttggagay

SEQ ID NO: 249628 - DNA, 13 bp, Artificial Sequence
  Oligonucleotide for detection of SNP TSC0060983
rtctccaactata

SEQ ID NO: 249629 - DNA, 13 bp, Artificial Sequence
  Oligonucleotide for detection of SNP TSC0060983
tatagtcggagay

SEQ ID NO: 249630 - DNA, 13 bp, Artificial Sequence
  Oligonucleotide for detection of SNP TSC0060983
rtctccgactata

SEQ ID NO: 249631 - DNA, 13 bp, Artificial Sequence
  Oligonucleotide for detection of SNP TSC0060983
gttttttattata

SEQ ID NO: 249632 - DNA, 13 bp, Artificial Sequence
  Oligonucleotide for detection of SNP TSC0060983
tataataaaaaac

SEQ ID NO: 249633 - DNA, 13 bp, Artificial Sequence
  Oligonucleotide for detection of SNP TSC0060983
gttttcgattata

SEQ ID NO: 249634 - DNA, 13 bp, Artificial Sequence
  Oligonucleotide for detection of SNP TSC0060983
tataatcgaaaac

SEQ ID NO: 249635 - DNA, 13 bp, Artificial Sequence
  Oligonucleotide for detection of SNP TSC0060985
atatttatgttty

SEQ ID NO: 249636 - DNA, 13 bp, Artificial Sequence
  Oligonucleotide for detection of SNP TSC0060985
raaacataaatat

SEQ ID NO: 249637 - DNA, 13 bp, Artificial Sequence
  Oligonucleotide for detection of SNP TSC0060985
atatttttgttty

SEQ ID NO: 249638 - DNA, 13 bp, Artificial Sequence
  Oligonucleotide for detection of SNP TSC0060985
raaacaaaaatat

SEQ ID NO: 249639 - DNA, 13 bp, Artificial Sequence
  Oligonucleotide for detection of SNP TSC0060985
atatttgtgttty

SEQ ID NO: 249640 - DNA, 13 bp, Artificial Sequence
  Oligonucleotide for detection of SNP TSC0060985
raaacacaaatat

SEQ ID NO: 249641 - DNA, 13 bp, Artificial Sequence
  Oligonucleotide for detection of SNP TSC0060985
gagatataagtgt

SEQ ID NO: 249642 - DNA, 13 bp, Artificial Sequence
  Oligonucleotide for detection of SNP TSC0060985
acacttatatctc

SEQ ID NO: 249643 - DNA, 13 bp, Artificial Sequence
  Oligonucleotide for detection of SNP TSC0060985
gagatagaagtgt

SEQ ID NO: 249644 - DNA, 13 bp, Artificial Sequence
  Oligonucleotide for detection of SNP TSC0060985
acacttctatctc

SEQ ID NO: 249645 - DNA, 13 bp, Artificial Sequence
  Oligonucleotide for detection of SNP TSC0060985
gagataaaagtgt

SEQ ID NO: 249646 - DNA, 13 bp, Artificial Sequence
  Oligonucleotide for detection of SNP TSC0060985
acacttttatctc

SEQ ID NO: 249647 - DNA, 13 bp, Artificial Sequence
  Oligonucleotide for detection of SNP TSC0060986
gtggttttatttt

SEQ ID NO: 249648 - DNA, 13 bp, Artificial Sequence
  Oligonucleotide for detection of SNP TSC0060986
aaaataaaaccac

SEQ ID NO: 249649 - DNA, 13 bp, Artificial Sequence
  Oligonucleotide for detection of SNP TSC0060986
aaggtataattay

SEQ ID NO: 249650 - DNA, 13 bp, Artificial Sequence
  Oligonucleotide for detection of SNP TSC0060986
rtaattatacctt

SEQ ID NO: 249651 - DNA, 13 bp, Artificial Sequence
  Oligonucleotide for detection of SNP TSC0060986
aaggtagaattay

SEQ ID NO: 249652 - DNA, 13 bp, Artificial Sequence
  Oligonucleotide for detection of SNP TSC0060986
rtaattctacctt

SEQ ID NO: 249653 - DNA, 13 bp, Artificial Sequence
  Oligonucleotide for detection of SNP TSC0060987
attaggggggaaa

SEQ ID NO: 249654 - DNA, 13 bp, Artificial Sequence
  Oligonucleotide for detection of SNP TSC0060987
tttcccccctaat

SEQ ID NO: 249655 - DNA, 13 bp, Artificial Sequence
  Oligonucleotide for detection of SNP TSC0060987
attaggagggaaa

SEQ ID NO: 249656 - DNA, 13 bp, Artificial Sequence
  Oligonucleotide for detection of SNP TSC0060987
tttccctcctaat

SEQ ID NO: 249657 - DNA, 13 bp, Artificial Sequence
  Oligonucleotide for detection of SNP TSC0060989
tatgttgtagaga

SEQ ID NO: 249658 - DNA, 13 bp, Artificial Sequence
  Oligonucleotide for detection of SNP TSC0060989
tctctacaacata

SEQ ID NO: 249659 - DNA, 13 bp, Artificial Sequence
  Oligonucleotide for detection of SNP TSC0060989
tatgttatagaga

SEQ ID NO: 249660 - DNA, 13 bp, Artificial Sequence
  Oligonucleotide for detection of SNP TSC0060989
tctctataacata

SEQ ID NO: 249661 - DNA, 13 bp, Artificial Sequence
  Oligonucleotide for detection of SNP TSC0060992
aggatggtgtagt

SEQ ID NO: 249662 - DNA, 13 bp, Artificial Sequence
  Oligonucleotide for detection of SNP TSC0060992
actacaccatcct

SEQ ID NO: 249663 - DNA, 13 bp, Artificial Sequence
  Oligonucleotide for detection of SNP TSC0060992
aggatgatgtagt

SEQ ID NO: 249664 - DNA, 13 bp, Artificial Sequence
  Oligonucleotide for detection of SNP TSC0060992
actacatcatcct

SEQ ID NO: 249665 - DNA, 13 bp, Artificial Sequence
  Oligonucleotide for detection of SNP TSC0060993
ttatttgtaaaay

SEQ ID NO: 249666 - DNA, 13 bp, Artificial Sequence
  Oligonucleotide for detection of SNP TSC0060993
rttttacaaataa

SEQ ID NO: 249667 - DNA, 13 bp, Artificial Sequence
  Oligonucleotide for detection of SNP TSC0060993
ttatttataaaay

SEQ ID NO: 249668 - DNA, 13 bp, Artificial Sequence
  Oligonucleotide for detection of SNP TSC0060993
rttttataaataa

SEQ ID NO: 249669 - DNA, 13 bp, Artificial Sequence
  Oligonucleotide for detection of SNP TSC0060995
gattaatggatta

SEQ ID NO: 249670 - DNA, 13 bp, Artificial Sequence
  Oligonucleotide for detection of SNP TSC0060995
taatccattaatc

SEQ ID NO: 249671 - DNA, 13 bp, Artificial Sequence
  Oligonucleotide for detection of SNP TSC0060995
gattaacggatta

SEQ ID NO: 249672 - DNA, 13 bp, Artificial Sequence
  Oligonucleotide for detection of SNP TSC0060995
taatccgttaatc

SEQ ID NO: 249673 - DNA, 13 bp, Artificial Sequence
  Oligonucleotide for detection of SNP TSC0060995
tgatttgttggty

SEQ ID NO: 249674 - DNA, 13 bp, Artificial Sequence
  Oligonucleotide for detection of SNP TSC0060995
raccaacaaatca

SEQ ID NO: 249675 - DNA, 13 bp, Artificial Sequence
  Oligonucleotide for detection of SNP TSC0060995
tgatttattggty

SEQ ID NO: 249676 - DNA, 13 bp, Artificial Sequence
  Oligonucleotide for detection of SNP TSC0060995
raccaataaatca

SEQ ID NO: 249677 - DNA, 13 bp, Artificial Sequence
  Oligonucleotide for detection of SNP TSC0060995
tgattcgttggty

SEQ ID NO: 249678 - DNA, 13 bp, Artificial Sequence
  Oligonucleotide for detection of SNP TSC0060995
raccaacgaatca

SEQ ID NO: 249679 - DNA, 13 bp, Artificial Sequence
  Oligonucleotide for detection of SNP TSC0060996
ggggttattttat

SEQ ID NO: 249680 - DNA, 13 bp, Artificial Sequence
  Oligonucleotide for detection of SNP TSC0060996
ataaaataacccc

SEQ ID NO: 249681 - DNA, 13 bp, Artificial Sequence
  Oligonucleotide for detection of SNP TSC0060996
ggggttgttttat

SEQ ID NO: 249682 - DNA, 13 bp, Artificial Sequence
  Oligonucleotide for detection of SNP TSC0060996
ataaaacaacccc

SEQ ID NO: 249683 - DNA, 13 bp, Artificial Sequence
  Oligonucleotide for detection of SNP TSC0060997
tatttagtggaaa

SEQ ID NO: 249684 - DNA, 13 bp, Artificial Sequence
  Oligonucleotide for detection of SNP TSC0060997
tttccactaaata

SEQ ID NO: 249685 - DNA, 13 bp, Artificial Sequence
  Oligonucleotide for detection of SNP TSC0060997
tatttaatggaaa

SEQ ID NO: 249686 - DNA, 13 bp, Artificial Sequence
  Oligonucleotide for detection of SNP TSC0060997
tttccattaaata

SEQ ID NO: 249687 - DNA, 13 bp, Artificial Sequence
  Oligonucleotide for detection of SNP TSC0060999
taatttaattagg

SEQ ID NO: 249688 - DNA, 13 bp, Artificial Sequence
  Oligonucleotide for detection of SNP TSC0060999
cctaattaaatta

SEQ ID NO: 249689 - DNA, 13 bp, Artificial Sequence
  Oligonucleotide for detection of SNP TSC0060999
taatttgattagg

SEQ ID NO: 249690 - DNA, 13 bp, Artificial Sequence
  Oligonucleotide for detection of SNP TSC0060999
cctaatcaaatta

SEQ ID NO: 249691 - DNA, 13 bp, Artificial Sequence
  Oligonucleotide for detection of SNP TSC0061000
agggaatgttaaa

SEQ ID NO: 249692 - DNA, 13 bp, Artificial Sequence
  Oligonucleotide for detection of SNP TSC0061000
tttaacattccct

SEQ ID NO: 249693 - DNA, 13 bp, Artificial Sequence
  Oligonucleotide for detection of SNP TSC0061000
agggaacgttaaa

SEQ ID NO: 249694 - DNA, 13 bp, Artificial Sequence
  Oligonucleotide for detection of SNP TSC0061000
tttaacgttccct

SEQ ID NO: 249695 - DNA, 13 bp, Artificial Sequence
  Oligonucleotide for detection of SNP TSC0061001
ggaagatgagata

SEQ ID NO: 249696 - DNA, 13 bp, Artificial Sequence
  Oligonucleotide for detection of SNP TSC0061001
tatctcatcttcc

SEQ ID NO: 249697 - DNA, 13 bp, Artificial Sequence
  Oligonucleotide for detection of SNP TSC0061001
ggaagacgagata

SEQ ID NO: 249698 - DNA, 13 bp, Artificial Sequence
  Oligonucleotide for detection of SNP TSC0061001
tatctcgtcttcc

SEQ ID NO: 249699 - DNA, 13 bp, Artificial Sequence
  Oligonucleotide for detection of SNP TSC0061009
ttatttttagagg

SEQ ID NO: 249700 - DNA, 13 bp, Artificial Sequence
  Oligonucleotide for detection of SNP TSC0061009
cctctaaaaataa

SEQ ID NO: 249701 - DNA, 13 bp, Artificial Sequence
  Oligonucleotide for detection of SNP TSC0061009
tttttgagaatga

SEQ ID NO: 249702 - DNA, 13 bp, Artificial Sequence
  Oligonucleotide for detection of SNP TSC0061009
tcattctcaaaaa

SEQ ID NO: 249703 - DNA, 13 bp, Artificial Sequence
  Oligonucleotide for detection of SNP TSC0061010
ttagttatgatty

SEQ ID NO: 249704 - DNA, 13 bp, Artificial Sequence
  Oligonucleotide for detection of SNP TSC0061010
raatcataactaa

SEQ ID NO: 249705 - DNA, 13 bp, Artificial Sequence
  Oligonucleotide for detection of SNP TSC0061010
ttagttgtgatty

SEQ ID NO: 249706 - DNA, 13 bp, Artificial Sequence
  Oligonucleotide for detection of SNP TSC0061010
raatcacaactaa

SEQ ID NO: 249707 - DNA, 13 bp, Artificial Sequence
  Oligonucleotide for detection of SNP TSC0061010
ttagtcgtgatty

SEQ ID NO: 249708 - DNA, 13 bp, Artificial Sequence
  Oligonucleotide for detection of SNP TSC0061010
raatcacgactaa

SEQ ID NO: 249709 - DNA, 13 bp, Artificial Sequence
  Oligonucleotide for detection of SNP TSC0061010
gagttatgattaa

SEQ ID NO: 249710 - DNA, 13 bp, Artificial Sequence
  Oligonucleotide for detection of SNP TSC0061010
ttaatcataactc

SEQ ID NO: 249711 - DNA, 13 bp, Artificial Sequence
  Oligonucleotide for detection of SNP TSC0061010
gagttacgattaa

SEQ ID NO: 249712 - DNA, 13 bp, Artificial Sequence
  Oligonucleotide for detection of SNP TSC0061010
ttaatcgtaactc

SEQ ID NO: 249713 - DNA, 13 bp, Artificial Sequence
  Oligonucleotide for detection of SNP TSC0061011
ggatgtaatttty

SEQ ID NO: 249714 - DNA, 13 bp, Artificial Sequence
  Oligonucleotide for detection of SNP TSC0061011
raaaattacatcc

SEQ ID NO: 249715 - DNA, 13 bp, Artificial Sequence
  Oligonucleotide for detection of SNP TSC0061011
ggatgtgatttty

SEQ ID NO: 249716 - DNA, 13 bp, Artificial Sequence
  Oligonucleotide for detection of SNP TSC0061011
raaaatcacatcc

SEQ ID NO: 249717 - DNA, 13 bp, Artificial Sequence
  Oligonucleotide for detection of SNP TSC0061011
ggatgcgatttty

SEQ ID NO: 249718 - DNA, 13 bp, Artificial Sequence
  Oligonucleotide for detection of SNP TSC0061011
raaaatcgcatcc

SEQ ID NO: 249719 - DNA, 13 bp, Artificial Sequence
  Oligonucleotide for detection of SNP TSC0061012
attttttgtaggy

SEQ ID NO: 249720 - DNA, 13 bp, Artificial Sequence
  Oligonucleotide for detection of SNP TSC0061012
rcctacaaaaaat

SEQ ID NO: 249721 - DNA, 13 bp, Artificial Sequence
  Oligonucleotide for detection of SNP TSC0061012
gtttgtaagaaat

SEQ ID NO: 249722 - DNA, 13 bp, Artificial Sequence
  Oligonucleotide for detection of SNP TSC0061012
atttcttacaaac

SEQ ID NO: 249723 - DNA, 13 bp, Artificial Sequence
  Oligonucleotide for detection of SNP TSC0061012
gtttgttagaaat

SEQ ID NO: 249724 - DNA, 13 bp, Artificial Sequence
  Oligonucleotide for detection of SNP TSC0061012
atttctaacaaac

SEQ ID NO: 249725 - DNA, 13 bp, Artificial Sequence
  Oligonucleotide for detection of SNP TSC0007304
ggaataattagaa

SEQ ID NO: 249726 - DNA, 13 bp, Artificial Sequence
  Oligonucleotide for detection of SNP TSC0007304
ttctaattattcc

SEQ ID NO: 249727 - DNA, 13 bp, Artificial Sequence
  Oligonucleotide for detection of SNP TSC0007304
ggaatagttagaa

SEQ ID NO: 249728 - DNA, 13 bp, Artificial Sequence
  Oligonucleotide for detection of SNP TSC0007304
ttctaactattcc

SEQ ID NO: 249729 - DNA, 13 bp, Artificial Sequence
  Oligonucleotide for detection of SNP TSC0007305
ttaattattgtat

SEQ ID NO: 249730 - DNA, 13 bp, Artificial Sequence
  Oligonucleotide for detection of SNP TSC0007305
atacaataattaa

SEQ ID NO: 249731 - DNA, 13 bp, Artificial Sequence
  Oligonucleotide for detection of SNP TSC0007305
ttaatcgttgtat

SEQ ID NO: 249732 - DNA, 13 bp, Artificial Sequence
  Oligonucleotide for detection of SNP TSC0007305
atacaacgattaa

SEQ ID NO: 249733 - DNA, 13 bp, Artificial Sequence
  Oligonucleotide for detection of SNP TSC0007305
atatagtgattaa

SEQ ID NO: 249734 - DNA, 13 bp, Artificial Sequence
  Oligonucleotide for detection of SNP TSC0007305
ttaatcactatat

SEQ ID NO: 249735 - DNA, 13 bp, Artificial Sequence
  Oligonucleotide for detection of SNP TSC0007305
atatagcgattaa

SEQ ID NO: 249736 - DNA, 13 bp, Artificial Sequence
  Oligonucleotide for detection of SNP TSC0007305
ttaatcgctatat

SEQ ID NO: 249737 - DNA, 13 bp, Artificial Sequence
  Oligonucleotide for detection of SNP TSC0007306
atgtagaagaagy

SEQ ID NO: 249738 - DNA, 13 bp, Artificial Sequence
  Oligonucleotide for detection of SNP TSC0007306
rcttcttctacat

SEQ ID NO: 249739 - DNA, 13 bp, Artificial Sequence
  Oligonucleotide for detection of SNP TSC0007306
atgtaggagaagy

SEQ ID NO: 249740 - DNA, 13 bp, Artificial Sequence
  Oligonucleotide for detection of SNP TSC0007306
rcttctcctacat

SEQ ID NO: 249741 - DNA, 13 bp, Artificial Sequence
  Oligonucleotide for detection of SNP TSC0007395
ttttatatgaagt

SEQ ID NO: 249742 - DNA, 13 bp, Artificial Sequence
  Oligonucleotide for detection of SNP TSC0007395
acttcatataaaa

SEQ ID NO: 249743 - DNA, 13 bp, Artificial Sequence
  Oligonucleotide for detection of SNP TSC0007395
ttttatgtgaagt

SEQ ID NO: 249744 - DNA, 13 bp, Artificial Sequence
  Oligonucleotide for detection of SNP TSC0007395
acttcacataaaa

SEQ ID NO: 249745 - DNA, 13 bp, Artificial Sequence
  Oligonucleotide for detection of SNP TSC0007395
ttttacgtgaagt

SEQ ID NO: 249746 - DNA, 13 bp, Artificial Sequence
  Oligonucleotide for detection of SNP TSC0007395
acttcacgtaaaa

SEQ ID NO: 249747 - DNA, 13 bp, Artificial Sequence
  Oligonucleotide for detection of SNP TSC0007395
attttacgtagag

SEQ ID NO: 249748 - DNA, 13 bp, Artificial Sequence
  Oligonucleotide for detection of SNP TSC0007395
ctctacgtaaaat

SEQ ID NO: 249749 - DNA, 13 bp, Artificial Sequence
  Oligonucleotide for detection of SNP TSC0061013
ggaagtatttggg

SEQ ID NO: 249750 - DNA, 13 bp, Artificial Sequence
  Oligonucleotide for detection of SNP TSC0061013
cccaaatacttcc

SEQ ID NO: 249751 - DNA, 13 bp, Artificial Sequence
  Oligonucleotide for detection of SNP TSC0061013
ggaagtgtttggg

SEQ ID NO: 249752 - DNA, 13 bp, Artificial Sequence
  Oligonucleotide for detection of SNP TSC0061013
cccaaacacttcc

SEQ ID NO: 249753 - DNA, 13 bp, Artificial Sequence
  Oligonucleotide for detection of SNP TSC0061013
ggaagcgtttggg

SEQ ID NO: 249754 - DNA, 13 bp, Artificial Sequence
  Oligonucleotide for detection of SNP TSC0061013
cccaaacgcttcc

SEQ ID NO: 249755 - DNA, 13 bp, Artificial Sequence
  Oligonucleotide for detection of SNP TSC0061013
tttagatgtttty

SEQ ID NO: 249756 - DNA, 13 bp, Artificial Sequence
  Oligonucleotide for detection of SNP TSC0061013
raaaacatctaaa

SEQ ID NO: 249757 - DNA, 13 bp, Artificial Sequence
  Oligonucleotide for detection of SNP TSC0061013
tttagacgtttty

SEQ ID NO: 249758 - DNA, 13 bp, Artificial Sequence
  Oligonucleotide for detection of SNP TSC0061013
raaaacgtctaaa

SEQ ID NO: 249759 - DNA, 13 bp, Artificial Sequence
  Oligonucleotide for detection of SNP TSC0061014
ttatggagaatta

SEQ ID NO: 249760 - DNA, 13 bp, Artificial Sequence
  Oligonucleotide for detection of SNP TSC0061014
taattctccataa

SEQ ID NO: 249761 - DNA, 13 bp, Artificial Sequence
  Oligonucleotide for detection of SNP TSC0061014
ttatggggaatta

SEQ ID NO: 249762 - DNA, 13 bp, Artificial Sequence
  Oligonucleotide for detection of SNP TSC0061014
taattccccataa

SEQ ID NO: 249763 - DNA, 13 bp, Artificial Sequence
  Oligonucleotide for detection of SNP TSC0006175
gtagtatggagga

SEQ ID NO: 249764 - DNA, 13 bp, Artificial Sequence
  Oligonucleotide for detection of SNP TSC0006175
tcctccatactac

SEQ ID NO: 249765 - DNA, 13 bp, Artificial Sequence
  Oligonucleotide for detection of SNP TSC0006175
gtagtacggagga

SEQ ID NO: 249766 - DNA, 13 bp, Artificial Sequence
  Oligonucleotide for detection of SNP TSC0006175
tcctccgtactac

SEQ ID NO: 249767 - DNA, 13 bp, Artificial Sequence
  Oligonucleotide for detection of SNP TSC0061022
tatttatgtaaty

SEQ ID NO: 249768 - DNA, 13 bp, Artificial Sequence
  Oligonucleotide for detection of SNP TSC0061022
rattacataaata

SEQ ID NO: 249769 - DNA, 13 bp, Artificial Sequence
  Oligonucleotide for detection of SNP TSC0061022
gattatataaatg

SEQ ID NO: 249770 - DNA, 13 bp, Artificial Sequence
  Oligonucleotide for detection of SNP TSC0061022
catttatataatc

SEQ ID NO: 249771 - DNA, 13 bp, Artificial Sequence
  Oligonucleotide for detection of SNP TSC0061022
gattatttaaatg

SEQ ID NO: 249772 - DNA, 13 bp, Artificial Sequence
  Oligonucleotide for detection of SNP TSC0061022
catttaaataatc

SEQ ID NO: 249773 - DNA, 13 bp, Artificial Sequence
  Oligonucleotide for detection of SNP TSC0061023
gggagtgaagtgy

SEQ ID NO: 249774 - DNA, 13 bp, Artificial Sequence
  Oligonucleotide for detection of SNP TSC0061023
rcacttcactccc

SEQ ID NO: 249775 - DNA, 13 bp, Artificial Sequence
  Oligonucleotide for detection of SNP TSC0061023
gggagtaaagtgy

SEQ ID NO: 249776 - DNA, 13 bp, Artificial Sequence
  Oligonucleotide for detection of SNP TSC0061023
rcactttactccc

SEQ ID NO: 249777 - DNA, 13 bp, Artificial Sequence
  Oligonucleotide for detection of SNP TSC0061024
ggaaataaattta

SEQ ID NO: 249778 - DNA, 13 bp, Artificial Sequence
  Oligonucleotide for detection of SNP TSC0061024
taaatttatttcc

SEQ ID NO: 249779 - DNA, 13 bp, Artificial Sequence
  Oligonucleotide for detection of SNP TSC0061024
ggaaatgaattta

SEQ ID NO: 249780 - DNA, 13 bp, Artificial Sequence
  Oligonucleotide for detection of SNP TSC0061024
taaattcatttcc

SEQ ID NO: 249781 - DNA, 13 bp, Artificial Sequence
  Oligonucleotide for detection of SNP TSC0061025
tatgtatttatgg

SEQ ID NO: 249782 - DNA, 13 bp, Artificial Sequence
  Oligonucleotide for detection of SNP TSC0061025
ccataaatacata

SEQ ID NO: 249783 - DNA, 13 bp, Artificial Sequence
  Oligonucleotide for detection of SNP TSC0061025
tatgtagttatgg

SEQ ID NO: 249784 - DNA, 13 bp, Artificial Sequence
  Oligonucleotide for detection of SNP TSC0061025
ccataactacata

SEQ ID NO: 249785 - DNA, 13 bp, Artificial Sequence
  Oligonucleotide for detection of SNP TSC0061025
ttatgagtgtata

SEQ ID NO: 249786 - DNA, 13 bp, Artificial Sequence
  Oligonucleotide for detection of SNP TSC0061025
tatacactcataa

SEQ ID NO: 249787 - DNA, 13 bp, Artificial Sequence
  Oligonucleotide for detection of SNP TSC0061025
ttatgattgtata

SEQ ID NO: 249788 - DNA, 13 bp, Artificial Sequence
  Oligonucleotide for detection of SNP TSC0061025
tatacaatcataa

SEQ ID NO: 249789 - DNA, 13 bp, Artificial Sequence
  Oligonucleotide for detection of SNP TSC0061026
attgttgttagay

SEQ ID NO: 249790 - DNA, 13 bp, Artificial Sequence
  Oligonucleotide for detection of SNP TSC0061026
rtctaacaacaat

SEQ ID NO: 249791 - DNA, 13 bp, Artificial Sequence
  Oligonucleotide for detection of SNP TSC0061026
attgttattagay

SEQ ID NO: 249792 - DNA, 13 bp, Artificial Sequence
  Oligonucleotide for detection of SNP TSC0061026
rtctaataacaat

SEQ ID NO: 249793 - DNA, 13 bp, Artificial Sequence
  Oligonucleotide for detection of SNP TSC0061027
gatttttgtgtga

SEQ ID NO: 249794 - DNA, 13 bp, Artificial Sequence
  Oligonucleotide for detection of SNP TSC0061027
tcacacaaaaatc

SEQ ID NO: 249795 - DNA, 13 bp, Artificial Sequence
  Oligonucleotide for detection of SNP TSC0061027
gattttggtgtga

SEQ ID NO: 249796 - DNA, 13 bp, Artificial Sequence
  Oligonucleotide for detection of SNP TSC0061027
tcacaccaaaatc

SEQ ID NO: 249797 - DNA, 13 bp, Artificial Sequence
  Oligonucleotide for detection of SNP TSC0061027
gattttcgtgtga

SEQ ID NO: 249798 - DNA, 13 bp, Artificial Sequence
  Oligonucleotide for detection of SNP TSC0061027
tcacacgaaaatc

SEQ ID NO: 249799 - DNA, 13 bp, Artificial Sequence
  Oligonucleotide for detection of SNP TSC0061027
gatttcggtgtga

SEQ ID NO: 249800 - DNA, 13 bp, Artificial Sequence
  Oligonucleotide for detection of SNP TSC0061027
tcacaccgaaatc

SEQ ID NO: 249801 - DNA, 13 bp, Artificial Sequence
  Oligonucleotide for detection of SNP TSC0061027
ttatatgggggty

SEQ ID NO: 249802 - DNA, 13 bp, Artificial Sequence
  Oligonucleotide for detection of SNP TSC0061027
racccccatataa

SEQ ID NO: 249803 - DNA, 13 bp, Artificial Sequence
  Oligonucleotide for detection of SNP TSC0061027
ttatacgggggty

SEQ ID NO: 249804 - DNA, 13 bp, Artificial Sequence
  Oligonucleotide for detection of SNP TSC0061027
racccccgtataa

SEQ ID NO: 249805 - DNA, 13 bp, Artificial Sequence
  Oligonucleotide for detection of SNP TSC0061027
ttatatcggggty

SEQ ID NO: 249806 - DNA, 13 bp, Artificial Sequence
  Oligonucleotide for detection of SNP TSC0061027
raccccgatataa

SEQ ID NO: 249807 - DNA, 13 bp, Artificial Sequence
  Oligonucleotide for detection of SNP TSC0061028
ttttttattgatt

SEQ ID NO: 249808 - DNA, 13 bp, Artificial Sequence
  Oligonucleotide for detection of SNP TSC0061028
aatcaataaaaaa

SEQ ID NO: 249809 - DNA, 13 bp, Artificial Sequence
  Oligonucleotide for detection of SNP TSC0061028
tttttttttgatt

SEQ ID NO: 249810 - DNA, 13 bp, Artificial Sequence
  Oligonucleotide for detection of SNP TSC0061028
aatcaaaaaaaaa

SEQ ID NO: 249811 - DNA, 13 bp, Artificial Sequence
  Oligonucleotide for detection of SNP TSC0061028
agttagtgagaag

SEQ ID NO: 249812 - DNA, 13 bp, Artificial Sequence
  Oligonucleotide for detection of SNP TSC0061028
cttctcactaact

SEQ ID NO: 249813 - DNA, 13 bp, Artificial Sequence
  Oligonucleotide for detection of SNP TSC0061028
agttagggagaag

SEQ ID NO: 249814 - DNA, 13 bp, Artificial Sequence
  Oligonucleotide for detection of SNP TSC0061028
cttctccctaact

SEQ ID NO: 249815 - DNA, 13 bp, Artificial Sequence
  Oligonucleotide for detection of SNP TSC0061029
atgttagtttggy

SEQ ID NO: 249816 - DNA, 13 bp, Artificial Sequence
  Oligonucleotide for detection of SNP TSC0061029
rccaaactaacat

SEQ ID NO: 249817 - DNA, 13 bp, Artificial Sequence
  Oligonucleotide for detection of SNP TSC0061029
atgttaatttggy

SEQ ID NO: 249818 - DNA, 13 bp, Artificial Sequence
  Oligonucleotide for detection of SNP TSC0061029
rccaaattaacat

SEQ ID NO: 249819 - DNA, 13 bp, Artificial Sequence
  Oligonucleotide for detection of SNP TSC0061030
taatattttaaag

SEQ ID NO: 249820 - DNA, 13 bp, Artificial Sequence
  Oligonucleotide for detection of SNP TSC0061030
ctttaaaatatta

SEQ ID NO: 249821 - DNA, 13 bp, Artificial Sequence
  Oligonucleotide for detection of SNP TSC0061030
taatatgttaaag

SEQ ID NO: 249822 - DNA, 13 bp, Artificial Sequence
  Oligonucleotide for detection of SNP TSC0061030
ctttaacatatta

SEQ ID NO: 249823 - DNA, 13 bp, Artificial Sequence
  Oligonucleotide for detection of SNP TSC0061030
ttttgggatatta

SEQ ID NO: 249824 - DNA, 13 bp, Artificial Sequence
  Oligonucleotide for detection of SNP TSC0061030
taatatcccaaaa

SEQ ID NO: 249825 - DNA, 13 bp, Artificial Sequence
  Oligonucleotide for detection of SNP TSC0061030
ttttggaatatta

SEQ ID NO: 249826 - DNA, 13 bp, Artificial Sequence
  Oligonucleotide for detection of SNP TSC0061030
taatattccaaaa

SEQ ID NO: 249827 - DNA, 13 bp, Artificial Sequence
  Oligonucleotide for detection of SNP TSC0061030
ttttggtatatta

SEQ ID NO: 249828 - DNA, 13 bp, Artificial Sequence
  Oligonucleotide for detection of SNP TSC0061030
taatataccaaaa

SEQ ID NO: 249829 - DNA, 13 bp, Artificial Sequence
  Oligonucleotide for detection of SNP TSC0061031
ataggtgtattty

SEQ ID NO: 249830 - DNA, 13 bp, Artificial Sequence
  Oligonucleotide for detection of SNP TSC0061031
raaatacacctat

SEQ ID NO: 249831 - DNA, 13 bp, Artificial Sequence
  Oligonucleotide for detection of SNP TSC0061031
gaagtggatttat

SEQ ID NO: 249832 - DNA, 13 bp, Artificial Sequence
  Oligonucleotide for detection of SNP TSC0061031
ataaatccacttc

SEQ ID NO: 249833 - DNA, 13 bp, Artificial Sequence
  Oligonucleotide for detection of SNP TSC0061031
gaagtgaatttat

SEQ ID NO: 249834 - DNA, 13 bp, Artificial Sequence
  Oligonucleotide for detection of SNP TSC0061031
ataaattcacttc

SEQ ID NO: 249835 - DNA, 13 bp, Artificial Sequence
  Oligonucleotide for detection of SNP TSC0061031
gaagtgtatttat

SEQ ID NO: 249836 - DNA, 13 bp, Artificial Sequence
  Oligonucleotide for detection of SNP TSC0061031
ataaatacacttc

SEQ ID NO: 249837 - DNA, 13 bp, Artificial Sequence
  Oligonucleotide for detection of SNP TSC0061032
ttagtggtttttg

SEQ ID NO: 249838 - DNA, 13 bp, Artificial Sequence
  Oligonucleotide for detection of SNP TSC0061032
caaaaaccactaa

SEQ ID NO: 249839 - DNA, 13 bp, Artificial Sequence
  Oligonucleotide for detection of SNP TSC0061032
ttagtgatttttg

SEQ ID NO: 249840 - DNA, 13 bp, Artificial Sequence
  Oligonucleotide for detection of SNP TSC0061032
caaaaatcactaa

SEQ ID NO: 249841 - DNA, 13 bp, Artificial Sequence
  Oligonucleotide for detection of SNP TSC0061033
gtagtaaattagy

SEQ ID NO: 249842 - DNA, 13 bp, Artificial Sequence
  Oligonucleotide for detection of SNP TSC0061033
rctaatttactac

SEQ ID NO: 249843 - DNA, 13 bp, Artificial Sequence
  Oligonucleotide for detection of SNP TSC0061033
gtagtatattagy

SEQ ID NO: 249844 - DNA, 13 bp, Artificial Sequence
  Oligonucleotide for detection of SNP TSC0061033
rctaatatactac

SEQ ID NO: 249845 - DNA, 13 bp, Artificial Sequence
  Oligonucleotide for detection of SNP TSC0061033
gttggtttgttgy

SEQ ID NO: 249846 - DNA, 13 bp, Artificial Sequence
  Oligonucleotide for detection of SNP TSC0061033
rcaacaaaccaac

SEQ ID NO: 249847 - DNA, 13 bp, Artificial Sequence
  Oligonucleotide for detection of SNP TSC0061033
gttggtgtgttgy

SEQ ID NO: 249848 - DNA, 13 bp, Artificial Sequence
  Oligonucleotide for detection of SNP TSC0061033
rcaacacaccaac

SEQ ID NO: 249849 - DNA, 13 bp, Artificial Sequence
  Oligonucleotide for detection of SNP TSC0061034
agattagtttggg

SEQ ID NO: 249850 - DNA, 13 bp, Artificial Sequence
  Oligonucleotide for detection of SNP TSC0061034
cccaaactaatct

SEQ ID NO: 249851 - DNA, 13 bp, Artificial Sequence
  Oligonucleotide for detection of SNP TSC0061035
ttattttgtgtty

SEQ ID NO: 249852 - DNA, 13 bp, Artificial Sequence
  Oligonucleotide for detection of SNP TSC0061035
raacacaaaataa

SEQ ID NO: 249853 - DNA, 13 bp, Artificial Sequence
  Oligonucleotide for detection of SNP TSC0061035
ttatttggtgtty

SEQ ID NO: 249854 - DNA, 13 bp, Artificial Sequence
  Oligonucleotide for detection of SNP TSC0061035
raacaccaaataa

SEQ ID NO: 249855 - DNA, 13 bp, Artificial Sequence
  Oligonucleotide for detection of SNP TSC0061035
ttatttcgtgtty

SEQ ID NO: 249856 - DNA, 13 bp, Artificial Sequence
  Oligonucleotide for detection of SNP TSC0061035
raacacgaaataa

SEQ ID NO: 249857 - DNA, 13 bp, Artificial Sequence
  Oligonucleotide for detection of SNP TSC0061035
gagtatgagatga

SEQ ID NO: 249858 - DNA, 13 bp, Artificial Sequence
  Oligonucleotide for detection of SNP TSC0061035
tcatctcatactc

SEQ ID NO: 249859 - DNA, 13 bp, Artificial Sequence
  Oligonucleotide for detection of SNP TSC0061035
gagtattagatga

SEQ ID NO: 249860 - DNA, 13 bp, Artificial Sequence
  Oligonucleotide for detection of SNP TSC0061035
tcatctaatactc

SEQ ID NO: 249861 - DNA, 13 bp, Artificial Sequence
  Oligonucleotide for detection of SNP TSC0061035
gagtacgagatga

SEQ ID NO: 249862 - DNA, 13 bp, Artificial Sequence
  Oligonucleotide for detection of SNP TSC0061035
tcatctcgtactc

SEQ ID NO: 249863 - DNA, 13 bp, Artificial Sequence
  Oligonucleotide for detection of SNP TSC0061036
tattataggttgg

SEQ ID NO: 249864 - DNA, 13 bp, Artificial Sequence
  Oligonucleotide for detection of SNP TSC0061036
ccaacctataata

SEQ ID NO: 249865 - DNA, 13 bp, Artificial Sequence
  Oligonucleotide for detection of SNP TSC0061036
tattattggttgg

SEQ ID NO: 249866 - DNA, 13 bp, Artificial Sequence
  Oligonucleotide for detection of SNP TSC0061036
ccaaccaataata

SEQ ID NO: 249867 - DNA, 13 bp, Artificial Sequence
  Oligonucleotide for detection of SNP TSC0061036
ttaatttataatg

SEQ ID NO: 249868 - DNA, 13 bp, Artificial Sequence
  Oligonucleotide for detection of SNP TSC0061036
cattataaattaa

SEQ ID NO: 249869 - DNA, 13 bp, Artificial Sequence
  Oligonucleotide for detection of SNP TSC0061036
ttaattaataatg

SEQ ID NO: 249870 - DNA, 13 bp, Artificial Sequence
  Oligonucleotide for detection of SNP TSC0061036
cattattaattaa

SEQ ID NO: 249871 - DNA, 13 bp, Artificial Sequence
  Oligonucleotide for detection of SNP TSC0061038
aggaaatggatgg

SEQ ID NO: 249872 - DNA, 13 bp, Artificial Sequence
  Oligonucleotide for detection of SNP TSC0061038
ccatccatttcct

SEQ ID NO: 249873 - DNA, 13 bp, Artificial Sequence
  Oligonucleotide for detection of SNP TSC0061038
aggaaacggatgg

SEQ ID NO: 249874 - DNA, 13 bp, Artificial Sequence
  Oligonucleotide for detection of SNP TSC0061038
ccatccgtttcct

SEQ ID NO: 249875 - DNA, 13 bp, Artificial Sequence
  Oligonucleotide for detection of SNP TSC0061039
agtgtatgttata

SEQ ID NO: 249876 - DNA, 13 bp, Artificial Sequence
  Oligonucleotide for detection of SNP TSC0061039
tataacatacact

SEQ ID NO: 249877 - DNA, 13 bp, Artificial Sequence
  Oligonucleotide for detection of SNP TSC0061039
agtgtacgttata

SEQ ID NO: 249878 - DNA, 13 bp, Artificial Sequence
  Oligonucleotide for detection of SNP TSC0061039
tataacgtacact

SEQ ID NO: 249879 - DNA, 13 bp, Artificial Sequence
  Oligonucleotide for detection of SNP TSC0061039
tatgatgtgtatt

SEQ ID NO: 249880 - DNA, 13 bp, Artificial Sequence
  Oligonucleotide for detection of SNP TSC0061039
aatacacatcata

SEQ ID NO: 249881 - DNA, 13 bp, Artificial Sequence
  Oligonucleotide for detection of SNP TSC0061039
tatgatatgtatt

SEQ ID NO: 249882 - DNA, 13 bp, Artificial Sequence
  Oligonucleotide for detection of SNP TSC0061039
aatacatatcata

SEQ ID NO: 249883 - DNA, 13 bp, Artificial Sequence
  Oligonucleotide for detection of SNP TSC0061039
tatgacgtgtatt

SEQ ID NO: 249884 - DNA, 13 bp, Artificial Sequence
  Oligonucleotide for detection of SNP TSC0061039
aatacacgtcata

SEQ ID NO: 249885 - DNA, 13 bp, Artificial Sequence
  Oligonucleotide for detection of SNP TSC0006998
gtgtgtatatgtt

SEQ ID NO: 249886 - DNA, 13 bp, Artificial Sequence
  Oligonucleotide for detection of SNP TSC0006998
aacatatacacac

SEQ ID NO: 249887 - DNA, 13 bp, Artificial Sequence
  Oligonucleotide for detection of SNP TSC0006998
gtgtgtgtatgtt

SEQ ID NO: 249888 - DNA, 13 bp, Artificial Sequence
  Oligonucleotide for detection of SNP TSC0006998
aacatacacacac

SEQ ID NO: 249889 - DNA, 13 bp, Artificial Sequence
  Oligonucleotide for detection of SNP TSC0006998
gtgtgcgtatgtt

SEQ ID NO: 249890 - DNA, 13 bp, Artificial Sequence
  Oligonucleotide for detection of SNP TSC0006998
aacatacgcacac

SEQ ID NO: 249891 - DNA, 13 bp, Artificial Sequence
  Oligonucleotide for detection of SNP TSC0006999
ttgggagggttta

SEQ ID NO: 249892 - DNA, 13 bp, Artificial Sequence
  Oligonucleotide for detection of SNP TSC0006999
taaaccctcccaa

SEQ ID NO: 249893 - DNA, 13 bp, Artificial Sequence
  Oligonucleotide for detection of SNP TSC0006999
ttgggaaggttta

SEQ ID NO: 249894 - DNA, 13 bp, Artificial Sequence
  Oligonucleotide for detection of SNP TSC0006999
taaaccttcccaa

SEQ ID NO: 249895 - DNA, 13 bp, Artificial Sequence
  Oligonucleotide for detection of SNP TSC0061040
atgtgtgttatag

SEQ ID NO: 249896 - DNA, 13 bp, Artificial Sequence
  Oligonucleotide for detection of SNP TSC0061040
ctataacacacat

SEQ ID NO: 249897 - DNA, 13 bp, Artificial Sequence
  Oligonucleotide for detection of SNP TSC0061040
atgtgtattatag

SEQ ID NO: 249898 - DNA, 13 bp, Artificial Sequence
  Oligonucleotide for detection of SNP TSC0061040
ctataatacacat

SEQ ID NO: 249899 - DNA, 13 bp, Artificial Sequence
  Oligonucleotide for detection of SNP TSC0061040
atgtgcgttatag

SEQ ID NO: 249900 - DNA, 13 bp, Artificial Sequence
  Oligonucleotide for detection of SNP TSC0061040
ctataacgcacat

SEQ ID NO: 249901 - DNA, 13 bp, Artificial Sequence
  Oligonucleotide for detection of SNP TSC0005736
gattttatatata

SEQ ID NO: 249902 - DNA, 13 bp, Artificial Sequence
  Oligonucleotide for detection of SNP TSC0005736
tatatataaaatc

SEQ ID NO: 249903 - DNA, 13 bp, Artificial Sequence
  Oligonucleotide for detection of SNP TSC0005736
gattttttatata

SEQ ID NO: 249904 - DNA, 13 bp, Artificial Sequence
  Oligonucleotide for detection of SNP TSC0005736
tatataaaaaatc

SEQ ID NO: 249905 - DNA, 13 bp, Artificial Sequence
  Oligonucleotide for detection of SNP TSC0005736
tatatataaaaty

SEQ ID NO: 249906 - DNA, 13 bp, Artificial Sequence
  Oligonucleotide for detection of SNP TSC0005736
rattttatatata

SEQ ID NO: 249907 - DNA, 13 bp, Artificial Sequence
  Oligonucleotide for detection of SNP TSC0005736
tatataaaaaaty

SEQ ID NO: 249908 - DNA, 13 bp, Artificial Sequence
  Oligonucleotide for detection of SNP TSC0005736
rattttttatata

SEQ ID NO: 249909 - DNA, 13 bp, Artificial Sequence
  Oligonucleotide for detection of SNP TSC0061041
ggaatttgtgtgy

SEQ ID NO: 249910 - DNA, 13 bp, Artificial Sequence
  Oligonucleotide for detection of SNP TSC0061041
rcacacaaattcc

SEQ ID NO: 249911 - DNA, 13 bp, Artificial Sequence
  Oligonucleotide for detection of SNP TSC0061041
ggaattggtgtgy

SEQ ID NO: 249912 - DNA, 13 bp, Artificial Sequence
  Oligonucleotide for detection of SNP TSC0061041
rcacaccaattcc

SEQ ID NO: 249913 - DNA, 13 bp, Artificial Sequence
  Oligonucleotide for detection of SNP TSC0061041
gtatataaattty

SEQ ID NO: 249914 - DNA, 13 bp, Artificial Sequence
  Oligonucleotide for detection of SNP TSC0061041
raaatttatatac

SEQ ID NO: 249915 - DNA, 13 bp, Artificial Sequence
  Oligonucleotide for detection of SNP TSC0061041
gtatattaattty

SEQ ID NO: 249916 - DNA, 13 bp, Artificial Sequence
  Oligonucleotide for detection of SNP TSC0061041
raaattaatatac

SEQ ID NO: 249917 - DNA, 13 bp, Artificial Sequence
  Oligonucleotide for detection of SNP TSC0061042
ggatgtttttgag

SEQ ID NO: 249918 - DNA, 13 bp, Artificial Sequence
  Oligonucleotide for detection of SNP TSC0061042
ctcaaaaacatcc

SEQ ID NO: 249919 - DNA, 13 bp, Artificial Sequence
  Oligonucleotide for detection of SNP TSC0061042
tttagatgtatty

SEQ ID NO: 249920 - DNA, 13 bp, Artificial Sequence
  Oligonucleotide for detection of SNP TSC0061042
raatacatctaaa

SEQ ID NO: 249921 - DNA, 13 bp, Artificial Sequence
  Oligonucleotide for detection of SNP TSC0061042
tttagaagtatty

SEQ ID NO: 249922 - DNA, 13 bp, Artificial Sequence
  Oligonucleotide for detection of SNP TSC0061042
raatacttctaaa

SEQ ID NO: 249923 - DNA, 13 bp, Artificial Sequence
  Oligonucleotide for detection of SNP TSC0061043
tgagggtagtgty

SEQ ID NO: 249924 - DNA, 13 bp, Artificial Sequence
  Oligonucleotide for detection of SNP TSC0061043
racactaccctca

SEQ ID NO: 249925 - DNA, 13 bp, Artificial Sequence
  Oligonucleotide for detection of SNP TSC0061043
tgaggggagtgty

SEQ ID NO: 249926 - DNA, 13 bp, Artificial Sequence
  Oligonucleotide for detection of SNP TSC0061043
racactcccctca

SEQ ID NO: 249927 - DNA, 13 bp, Artificial Sequence
  Oligonucleotide for detection of SNP TSC0061043
gatattgttttta

SEQ ID NO: 249928 - DNA, 13 bp, Artificial Sequence
  Oligonucleotide for detection of SNP TSC0061043
taaaaacaatatc

SEQ ID NO: 249929 - DNA, 13 bp, Artificial Sequence
  Oligonucleotide for detection of SNP TSC0061043
gatatttttttta

SEQ ID NO: 249930 - DNA, 13 bp, Artificial Sequence
  Oligonucleotide for detection of SNP TSC0061043
taaaaaaaatatc

SEQ ID NO: 249931 - DNA, 13 bp, Artificial Sequence
  Oligonucleotide for detection of SNP TSC0061044
ttgatgggtggta

SEQ ID NO: 249932 - DNA, 13 bp, Artificial Sequence
  Oligonucleotide for detection of SNP TSC0061044
taccacccatcaa

SEQ ID NO: 249933 - DNA, 13 bp, Artificial Sequence
  Oligonucleotide for detection of SNP TSC0061044
ttgatgagtggta

SEQ ID NO: 249934 - DNA, 13 bp, Artificial Sequence
  Oligonucleotide for detection of SNP TSC0061044
taccactcatcaa

SEQ ID NO: 249935 - DNA, 13 bp, Artificial Sequence
  Oligonucleotide for detection of SNP TSC0061044
tcgatgggtggta

SEQ ID NO: 249936 - DNA, 13 bp, Artificial Sequence
  Oligonucleotide for detection of SNP TSC0061044
taccacccatcga

SEQ ID NO: 249937 - DNA, 13 bp, Artificial Sequence
  Oligonucleotide for detection of SNP TSC0061044
tcgatgagtggta

SEQ ID NO: 249938 - DNA, 13 bp, Artificial Sequence
  Oligonucleotide for detection of SNP TSC0061044
taccactcatcga

SEQ ID NO: 249939 - DNA, 13 bp, Artificial Sequence
  Oligonucleotide for detection of SNP TSC0061045
ggatttagaggta

SEQ ID NO: 249940 - DNA, 13 bp, Artificial Sequence
  Oligonucleotide for detection of SNP TSC0061045
tacctctaaatcc

SEQ ID NO: 249941 - DNA, 13 bp, Artificial Sequence
  Oligonucleotide for detection of SNP TSC0061045
ggattttgaggta

SEQ ID NO: 249942 - DNA, 13 bp, Artificial Sequence
  Oligonucleotide for detection of SNP TSC0061045
tacctcaaaatcc

SEQ ID NO: 249943 - DNA, 13 bp, Artificial Sequence
  Oligonucleotide for detection of SNP TSC0061045
ggatttcgaggta

SEQ ID NO: 249944 - DNA, 13 bp, Artificial Sequence
  Oligonucleotide for detection of SNP TSC0061045
tacctcgaaatcc

SEQ ID NO: 249945 - DNA, 13 bp, Artificial Sequence
  Oligonucleotide for detection of SNP TSC0061046
aggaaggtgaggg

SEQ ID NO: 249946 - DNA, 13 bp, Artificial Sequence
  Oligonucleotide for detection of SNP TSC0061046
ccctcaccttcct

SEQ ID NO: 249947 - DNA, 13 bp, Artificial Sequence
  Oligonucleotide for detection of SNP TSC0061046
aggaagatgaggg

SEQ ID NO: 249948 - DNA, 13 bp, Artificial Sequence
  Oligonucleotide for detection of SNP TSC0061046
ccctcatcttcct

SEQ ID NO: 249949 - DNA, 13 bp, Artificial Sequence
  Oligonucleotide for detection of SNP TSC0061047
tttgagttgttta

SEQ ID NO: 249950 - DNA, 13 bp, Artificial Sequence
  Oligonucleotide for detection of SNP TSC0061047
taaacaactcaaa

SEQ ID NO: 249951 - DNA, 13 bp, Artificial Sequence
  Oligonucleotide for detection of SNP TSC0061047
tttgaggtgttta

SEQ ID NO: 249952 - DNA, 13 bp, Artificial Sequence
  Oligonucleotide for detection of SNP TSC0061047
taaacacctcaaa

SEQ ID NO: 249953 - DNA, 13 bp, Artificial Sequence
  Oligonucleotide for detection of SNP TSC0061047
ttcgagttgttta

SEQ ID NO: 249954 - DNA, 13 bp, Artificial Sequence
  Oligonucleotide for detection of SNP TSC0061047
taaacaactcgaa

SEQ ID NO: 249955 - DNA, 13 bp, Artificial Sequence
  Oligonucleotide for detection of SNP TSC0061047
ttcgaggtgttta

SEQ ID NO: 249956 - DNA, 13 bp, Artificial Sequence
  Oligonucleotide for detection of SNP TSC0061047
taaacacctcgaa

SEQ ID NO: 249957 - DNA, 13 bp, Artificial Sequence
  Oligonucleotide for detection of SNP TSC0061047
tgaatattttggg

SEQ ID NO: 249958 - DNA, 13 bp, Artificial Sequence
  Oligonucleotide for detection of SNP TSC0061047
cccaaaatattca

SEQ ID NO: 249959 - DNA, 13 bp, Artificial Sequence
  Oligonucleotide for detection of SNP TSC0061047
tgaataattcggg

SEQ ID NO: 249960 - DNA, 13 bp, Artificial Sequence
  Oligonucleotide for detection of SNP TSC0061047
cccgaattattca

SEQ ID NO: 249961 - DNA, 13 bp, Artificial Sequence
  Oligonucleotide for detection of SNP TSC0061047
tgaatatttcggg

SEQ ID NO: 249962 - DNA, 13 bp, Artificial Sequence
  Oligonucleotide for detection of SNP TSC0061047
cccgaaatattca

SEQ ID NO: 249963 - DNA, 13 bp, Artificial Sequence
  Oligonucleotide for detection of SNP TSC0010687
agtaatatagtta

SEQ ID NO: 249964 - DNA, 13 bp, Artificial Sequence
  Oligonucleotide for detection of SNP TSC0010687
taactatattact

SEQ ID NO: 249965 - DNA, 13 bp, Artificial Sequence
  Oligonucleotide for detection of SNP TSC0010687
agtaatgtagtta

SEQ ID NO: 249966 - DNA, 13 bp, Artificial Sequence
  Oligonucleotide for detection of SNP TSC0010687
taactacattact

SEQ ID NO: 249967 - DNA, 13 bp, Artificial Sequence
  Oligonucleotide for detection of SNP TSC0010687
agtaacgtagtta

SEQ ID NO: 249968 - DNA, 13 bp, Artificial Sequence
  Oligonucleotide for detection of SNP TSC0010687
taactacgttact

SEQ ID NO: 249969 - DNA, 13 bp, Artificial Sequence
  Oligonucleotide for detection of SNP TSC0010687
tagttatgttgtt

SEQ ID NO: 249970 - DNA, 13 bp, Artificial Sequence
  Oligonucleotide for detection of SNP TSC0010687
aacaacataacta

SEQ ID NO: 249971 - DNA, 13 bp, Artificial Sequence
  Oligonucleotide for detection of SNP TSC0010687
tagttacgttgtt

SEQ ID NO: 249972 - DNA, 13 bp, Artificial Sequence
  Oligonucleotide for detection of SNP TSC0010687
aacaacgtaacta

SEQ ID NO: 249973 - DNA, 13 bp, Artificial Sequence
  Oligonucleotide for detection of SNP TSC0005958
ttttttcggaaty

SEQ ID NO: 249974 - DNA, 13 bp, Artificial Sequence
  Oligonucleotide for detection of SNP TSC0005958
rattccgaaaaaa

SEQ ID NO: 249975 - DNA, 13 bp, Artificial Sequence
  Oligonucleotide for detection of SNP TSC0005958
gattttggaggaa

SEQ ID NO: 249976 - DNA, 13 bp, Artificial Sequence
  Oligonucleotide for detection of SNP TSC0005958
ttcctccaaaatc

SEQ ID NO: 249977 - DNA, 13 bp, Artificial Sequence
  Oligonucleotide for detection of SNP TSC0005958
gattttagaggaa

SEQ ID NO: 249978 - DNA, 13 bp, Artificial Sequence
  Oligonucleotide for detection of SNP TSC0005958
ttcctctaaaatc

SEQ ID NO: 249979 - DNA, 13 bp, Artificial Sequence
  Oligonucleotide for detection of SNP TSC0005958
gatttcggaggaa

SEQ ID NO: 249980 - DNA, 13 bp, Artificial Sequence
  Oligonucleotide for detection of SNP TSC0005958
ttcctccgaaatc

SEQ ID NO: 249981 - DNA, 13 bp, Artificial Sequence
  Oligonucleotide for detection of SNP TSC0061049
tttttaattttcg

SEQ ID NO: 249982 - DNA, 13 bp, Artificial Sequence
  Oligonucleotide for detection of SNP TSC0061049
cgaaaattaaaaa

SEQ ID NO: 249983 - DNA, 13 bp, Artificial Sequence
  Oligonucleotide for detection of SNP TSC0061049
tttttatttttcg

SEQ ID NO: 249984 - DNA, 13 bp, Artificial Sequence
  Oligonucleotide for detection of SNP TSC0061049
cgaaaaataaaaa

SEQ ID NO: 249985 - DNA, 13 bp, Artificial Sequence
  Oligonucleotide for detection of SNP TSC0061049
tggaagttggagg

SEQ ID NO: 249986 - DNA, 13 bp, Artificial Sequence
  Oligonucleotide for detection of SNP TSC0061049
cctccaacttcca

SEQ ID NO: 249987 - DNA, 13 bp, Artificial Sequence
  Oligonucleotide for detection of SNP TSC0061049
tggaaggtggagg

SEQ ID NO: 249988 - DNA, 13 bp, Artificial Sequence
  Oligonucleotide for detection of SNP TSC0061049
cctccaccttcca

SEQ ID NO: 249989 - DNA, 13 bp, Artificial Sequence
  Oligonucleotide for detection of SNP TSC0061049
cggaagttggagg

SEQ ID NO: 249990 - DNA, 13 bp, Artificial Sequence
  Oligonucleotide for detection of SNP TSC0061049
cctccaacttccg

SEQ ID NO: 249991 - DNA, 13 bp, Artificial Sequence
  Oligonucleotide for detection of SNP TSC0061049
cggaaggtggagg

SEQ ID NO: 249992 - DNA, 13 bp, Artificial Sequence
  Oligonucleotide for detection of SNP TSC0061049
cctccaccttccg

SEQ ID NO: 249993 - DNA, 13 bp, Artificial Sequence
  Oligonucleotide for detection of SNP TSC0061051
gggttatataaaa

SEQ ID NO: 249994 - DNA, 13 bp, Artificial Sequence
  Oligonucleotide for detection of SNP TSC0061051
ttttatataaccc

SEQ ID NO: 249995 - DNA, 13 bp, Artificial Sequence
  Oligonucleotide for detection of SNP TSC0061051
gggttagataaaa

SEQ ID NO: 249996 - DNA, 13 bp, Artificial Sequence
  Oligonucleotide for detection of SNP TSC0061051
ttttatctaaccc

SEQ ID NO: 249997 - DNA, 13 bp, Artificial Sequence
  Oligonucleotide for detection of SNP TSC0061051
ttttgtatgatty

SEQ ID NO: 249998 - DNA, 13 bp, Artificial Sequence
  Oligonucleotide for detection of SNP TSC0061051
raatcatacaaaa

SEQ ID NO: 249999 - DNA, 13 bp, Artificial Sequence
  Oligonucleotide for detection of SNP TSC0061051
ttttgtttgatty

SEQ ID NO: 250000 - DNA, 13 bp, Artificial Sequence
  Oligonucleotide for detection of SNP TSC0061051
raatcaaacaaaa

SEQ ID NO: 250001 - DNA, 13 bp, Artificial Sequence
  Oligonucleotide for detection of SNP TSC0061052
ttaatatggtaat

SEQ ID NO: 250002 - DNA, 13 bp, Artificial Sequence
  Oligonucleotide for detection of SNP TSC0061052
attaccatattaa

SEQ ID NO: 250003 - DNA, 13 bp, Artificial Sequence
  Oligonucleotide for detection of SNP TSC0061052
ttaatacggtaat

SEQ ID NO: 250004 - DNA, 13 bp, Artificial Sequence
  Oligonucleotide for detection of SNP TSC0061052
attaccgtattaa

SEQ ID NO: 250005 - DNA, 13 bp, Artificial Sequence
  Oligonucleotide for detection of SNP TSC0061052
attgttgtgttga

SEQ ID NO: 250006 - DNA, 13 bp, Artificial Sequence
  Oligonucleotide for detection of SNP TSC0061052
tcaacacaacaat

SEQ ID NO: 250007 - DNA, 13 bp, Artificial Sequence
  Oligonucleotide for detection of SNP TSC0061052
attgttatgttga

SEQ ID NO: 250008 - DNA, 13 bp, Artificial Sequence
  Oligonucleotide for detection of SNP TSC0061052
tcaacataacaat

SEQ ID NO: 250009 - DNA, 13 bp, Artificial Sequence
  Oligonucleotide for detection of SNP TSC0061052
attgtcgtgttga

SEQ ID NO: 250010 - DNA, 13 bp, Artificial Sequence
  Oligonucleotide for detection of SNP TSC0061052
tcaacacgacaat

SEQ ID NO: 250011 - DNA, 13 bp, Artificial Sequence
  Oligonucleotide for detection of SNP TSC0061053
atttaatgagata

SEQ ID NO: 250012 - DNA, 13 bp, Artificial Sequence
  Oligonucleotide for detection of SNP TSC0061053
tatctcattaaat

SEQ ID NO: 250013 - DNA, 13 bp, Artificial Sequence
  Oligonucleotide for detection of SNP TSC0061053
atttaacgagata

SEQ ID NO: 250014 - DNA, 13 bp, Artificial Sequence
  Oligonucleotide for detection of SNP TSC0061053
tatctcgttaaat

SEQ ID NO: 250015 - DNA, 13 bp, Artificial Sequence
  Oligonucleotide for detection of SNP TSC0005273
ggtggggtaggty

SEQ ID NO: 250016 - DNA, 13 bp, Artificial Sequence
  Oligonucleotide for detection of SNP TSC0005273
racctaccccacc

SEQ ID NO: 250017 - DNA, 13 bp, Artificial Sequence
  Oligonucleotide for detection of SNP TSC0005273
ggtgggataggty

SEQ ID NO: 250018 - DNA, 13 bp, Artificial Sequence
  Oligonucleotide for detection of SNP TSC0005273
racctatcccacc

SEQ ID NO: 250019 - DNA, 13 bp, Artificial Sequence
  Oligonucleotide for detection of SNP TSC0061054
gagaaaatgttag

SEQ ID NO: 250020 - DNA, 13 bp, Artificial Sequence
  Oligonucleotide for detection of SNP TSC0061054
ctaacattttctc

SEQ ID NO: 250021 - DNA, 13 bp, Artificial Sequence
  Oligonucleotide for detection of SNP TSC0061054
gagaaattgttag

SEQ ID NO: 250022 - DNA, 13 bp, Artificial Sequence
  Oligonucleotide for detection of SNP TSC0061054
ctaacaatttctc

SEQ ID NO: 250023 - DNA, 13 bp, Artificial Sequence
  Oligonucleotide for detection of SNP TSC0061055
atttttagatata

SEQ ID NO: 250024 - DNA, 13 bp, Artificial Sequence
  Oligonucleotide for detection of SNP TSC0061055
tatatctaaaaat

SEQ ID NO: 250025 - DNA, 13 bp, Artificial Sequence
  Oligonucleotide for detection of SNP TSC0061055
atttttggatata

SEQ ID NO: 250026 - DNA, 13 bp, Artificial Sequence
  Oligonucleotide for detection of SNP TSC0061055
tatatccaaaaat

SEQ ID NO: 250027 - DNA, 13 bp, Artificial Sequence
  Oligonucleotide for detection of SNP TSC0061056
gttgataaagata

SEQ ID NO: 250028 - DNA, 13 bp, Artificial Sequence
  Oligonucleotide for detection of SNP TSC0061056
tatctttatcaac

SEQ ID NO: 250029 - DNA, 13 bp, Artificial Sequence
  Oligonucleotide for detection of SNP TSC0061056
gttgatgaagata

SEQ ID NO: 250030 - DNA, 13 bp, Artificial Sequence
  Oligonucleotide for detection of SNP TSC0061056
tatcttcatcaac

SEQ ID NO: 250031 - DNA, 13 bp, Artificial Sequence
  Oligonucleotide for detection of SNP TSC0061057
atgttagaatgaa

SEQ ID NO: 250032 - DNA, 13 bp, Artificial Sequence
  Oligonucleotide for detection of SNP TSC0061057
ttcattctaacat

SEQ ID NO: 250033 - DNA, 13 bp, Artificial Sequence
  Oligonucleotide for detection of SNP TSC0061057
atgttaaaatgaa

SEQ ID NO: 250034 - DNA, 13 bp, Artificial Sequence
  Oligonucleotide for detection of SNP TSC0061057
ttcattttaacat

SEQ ID NO: 250035 - DNA, 13 bp, Artificial Sequence
  Oligonucleotide for detection of SNP TSC0061058
tatattttattgg

SEQ ID NO: 250036 - DNA, 13 bp, Artificial Sequence
  Oligonucleotide for detection of SNP TSC0061058
ccaataaaatata

SEQ ID NO: 250037 - DNA, 13 bp, Artificial Sequence
  Oligonucleotide for detection of SNP TSC0061058
tatattgtattgg

SEQ ID NO: 250038 - DNA, 13 bp, Artificial Sequence
  Oligonucleotide for detection of SNP TSC0061058
ccaatacaatata

SEQ ID NO: 250039 - DNA, 13 bp, Artificial Sequence
  Oligonucleotide for detection of SNP TSC0061058
tatatcgtattgg

SEQ ID NO: 250040 - DNA, 13 bp, Artificial Sequence
  Oligonucleotide for detection of SNP TSC0061058
ccaatacgatata

SEQ ID NO: 250041 - DNA, 13 bp, Artificial Sequence
  Oligonucleotide for detection of SNP TSC0061058
ttaatgaggtgta

SEQ ID NO: 250042 - DNA, 13 bp, Artificial Sequence
  Oligonucleotide for detection of SNP TSC0061058
tacacctcattaa

SEQ ID NO: 250043 - DNA, 13 bp, Artificial Sequence
  Oligonucleotide for detection of SNP TSC0061058
ttaatgtggtgta

SEQ ID NO: 250044 - DNA, 13 bp, Artificial Sequence
  Oligonucleotide for detection of SNP TSC0061058
tacaccacattaa

SEQ ID NO: 250045 - DNA, 13 bp, Artificial Sequence
  Oligonucleotide for detection of SNP TSC0061058
ttaatgcggtgta

SEQ ID NO: 250046 - DNA, 13 bp, Artificial Sequence
  Oligonucleotide for detection of SNP TSC0061058
tacaccgcattaa

SEQ ID NO: 250047 - DNA, 13 bp, Artificial Sequence
  Oligonucleotide for detection of SNP TSC0061060
atatggaaaaggt

SEQ ID NO: 250048 - DNA, 13 bp, Artificial Sequence
  Oligonucleotide for detection of SNP TSC0061060
accttttccatat

SEQ ID NO: 250049 - DNA, 13 bp, Artificial Sequence
  Oligonucleotide for detection of SNP TSC0061060
atatgggaaaggt

SEQ ID NO: 250050 - DNA, 13 bp, Artificial Sequence
  Oligonucleotide for detection of SNP TSC0061060
acctttcccatat

SEQ ID NO: 250051 - DNA, 13 bp, Artificial Sequence
  Oligonucleotide for detection of SNP TSC0061061
ggatgttgtttag

SEQ ID NO: 250052 - DNA, 13 bp, Artificial Sequence
  Oligonucleotide for detection of SNP TSC0061061
ctaaacaacatcc

SEQ ID NO: 250053 - DNA, 13 bp, Artificial Sequence
  Oligonucleotide for detection of SNP TSC0061061
ggacgttgtttag

SEQ ID NO: 250054 - DNA, 13 bp, Artificial Sequence
  Oligonucleotide for detection of SNP TSC0061061
ctaaacaacgtcc

SEQ ID NO: 250055 - DNA, 13 bp, Artificial Sequence
  Oligonucleotide for detection of SNP TSC0061061
ggatgtcgtttag

SEQ ID NO: 250056 - DNA, 13 bp, Artificial Sequence
  Oligonucleotide for detection of SNP TSC0061061
ctaaacgacatcc

SEQ ID NO: 250057 - DNA, 13 bp, Artificial Sequence
  Oligonucleotide for detection of SNP TSC0061061
ggacgtcgtttag

SEQ ID NO: 250058 - DNA, 13 bp, Artificial Sequence
  Oligonucleotide for detection of SNP TSC0061061
ctaaacgacgtcc

SEQ ID NO: 250059 - DNA, 13 bp, Artificial Sequence
  Oligonucleotide for detection of SNP TSC0061062
gtttagggagttg

SEQ ID NO: 250060 - DNA, 13 bp, Artificial Sequence
  Oligonucleotide for detection of SNP TSC0061062
caactccctaaac

SEQ ID NO: 250061 - DNA, 13 bp, Artificial Sequence
  Oligonucleotide for detection of SNP TSC0061062
gtttagagagttg

SEQ ID NO: 250062 - DNA, 13 bp, Artificial Sequence
  Oligonucleotide for detection of SNP TSC0061062
caactctctaaac

SEQ ID NO: 250063 - DNA, 13 bp, Artificial Sequence
  Oligonucleotide for detection of SNP TSC0061066
ttttattatgttg

SEQ ID NO: 250064 - DNA, 13 bp, Artificial Sequence
  Oligonucleotide for detection of SNP TSC0061066
caacataataaaa

SEQ ID NO: 250065 - DNA, 13 bp, Artificial Sequence
  Oligonucleotide for detection of SNP TSC0061066
ttttatgatgttg

SEQ ID NO: 250066 - DNA, 13 bp, Artificial Sequence
  Oligonucleotide for detection of SNP TSC0061066
caacatcataaaa

SEQ ID NO: 250067 - DNA, 13 bp, Artificial Sequence
  Oligonucleotide for detection of SNP TSC0061066
ttttacgatgttg

SEQ ID NO: 250068 - DNA, 13 bp, Artificial Sequence
  Oligonucleotide for detection of SNP TSC0061066
caacatcgtaaaa

SEQ ID NO: 250069 - DNA, 13 bp, Artificial Sequence
  Oligonucleotide for detection of SNP TSC0061067
gatttagttagty

SEQ ID NO: 250070 - DNA, 13 bp, Artificial Sequence
  Oligonucleotide for detection of SNP TSC0061067
ractaactaaatc

SEQ ID NO: 250071 - DNA, 13 bp, Artificial Sequence
  Oligonucleotide for detection of SNP TSC0061067
gatttaattagty

SEQ ID NO: 250072 - DNA, 13 bp, Artificial Sequence
  Oligonucleotide for detection of SNP TSC0061067
ractaattaaatc

SEQ ID NO: 250073 - DNA, 13 bp, Artificial Sequence
  Oligonucleotide for detection of SNP TSC0061068
gaaaatagttggy

SEQ ID NO: 250074 - DNA, 13 bp, Artificial Sequence
  Oligonucleotide for detection of SNP TSC0061068
rccaactattttc

SEQ ID NO: 250075 - DNA, 13 bp, Artificial Sequence
  Oligonucleotide for detection of SNP TSC0061068
gaaaattgttggy

SEQ ID NO: 250076 - DNA, 13 bp, Artificial Sequence
  Oligonucleotide for detection of SNP TSC0061068
rccaacaattttc

SEQ ID NO: 250077 - DNA, 13 bp, Artificial Sequence
  Oligonucleotide for detection of SNP TSC0061068
gaaaatggttggy

SEQ ID NO: 250078 - DNA, 13 bp, Artificial Sequence
  Oligonucleotide for detection of SNP TSC0061068
rccaaccattttc

SEQ ID NO: 250079 - DNA, 13 bp, Artificial Sequence
  Oligonucleotide for detection of SNP TSC0061068
gaaaatcgttggy

SEQ ID NO: 250080 - DNA, 13 bp, Artificial Sequence
  Oligonucleotide for detection of SNP TSC0061068
rccaacgattttc

SEQ ID NO: 250081 - DNA, 13 bp, Artificial Sequence
  Oligonucleotide for detection of SNP TSC0061068
gttaattatttty

SEQ ID NO: 250082 - DNA, 13 bp, Artificial Sequence
  Oligonucleotide for detection of SNP TSC0061068
raaaataattaac

SEQ ID NO: 250083 - DNA, 13 bp, Artificial Sequence
  Oligonucleotide for detection of SNP TSC0061068
gttaatgatttty

SEQ ID NO: 250084 - DNA, 13 bp, Artificial Sequence
  Oligonucleotide for detection of SNP TSC0061068
raaaatcattaac

SEQ ID NO: 250085 - DNA, 13 bp, Artificial Sequence
  Oligonucleotide for detection of SNP TSC0061068
gttaacgatttty

SEQ ID NO: 250086 - DNA, 13 bp, Artificial Sequence
  Oligonucleotide for detection of SNP TSC0061068
raaaatcgttaac

SEQ ID NO: 250087 - DNA, 13 bp, Artificial Sequence
  Oligonucleotide for detection of SNP TSC0061069
ttagatttttgta

SEQ ID NO: 250088 - DNA, 13 bp, Artificial Sequence
  Oligonucleotide for detection of SNP TSC0061069
tacaaaaatctaa

SEQ ID NO: 250089 - DNA, 13 bp, Artificial Sequence
  Oligonucleotide for detection of SNP TSC0061070
taaatgaaattaa

SEQ ID NO: 250090 - DNA, 13 bp, Artificial Sequence
  Oligonucleotide for detection of SNP TSC0061070
ttaatttcattta

SEQ ID NO: 250091 - DNA, 13 bp, Artificial Sequence
  Oligonucleotide for detection of SNP TSC0061070
taaatgtaattaa

SEQ ID NO: 250092 - DNA, 13 bp, Artificial Sequence
  Oligonucleotide for detection of SNP TSC0061070
ttaattacattta

SEQ ID NO: 250093 - DNA, 13 bp, Artificial Sequence
  Oligonucleotide for detection of SNP TSC0061071
tattttgtagagt

SEQ ID NO: 250094 - DNA, 13 bp, Artificial Sequence
  Oligonucleotide for detection of SNP TSC0061071
actctacaaaata

SEQ ID NO: 250095 - DNA, 13 bp, Artificial Sequence
  Oligonucleotide for detection of SNP TSC0061071
tattttatagagt

SEQ ID NO: 250096 - DNA, 13 bp, Artificial Sequence
  Oligonucleotide for detection of SNP TSC0061071
actctataaaata

SEQ ID NO: 250097 - DNA, 13 bp, Artificial Sequence
  Oligonucleotide for detection of SNP TSC0061072
ttttaggtaggaa

SEQ ID NO: 250098 - DNA, 13 bp, Artificial Sequence
  Oligonucleotide for detection of SNP TSC0061072
ttcctacctaaaa

SEQ ID NO: 250099 - DNA, 13 bp, Artificial Sequence
  Oligonucleotide for detection of SNP TSC0061072
ttttagataggaa

SEQ ID NO: 250100 - DNA, 13 bp, Artificial Sequence
  Oligonucleotide for detection of SNP TSC0061072
ttcctatctaaaa

SEQ ID NO: 250101 - DNA, 13 bp, Artificial Sequence
  Oligonucleotide for detection of SNP TSC0061073
ggtttatgtggta

SEQ ID NO: 250102 - DNA, 13 bp, Artificial Sequence
  Oligonucleotide for detection of SNP TSC0061073
taccacataaacc

SEQ ID NO: 250103 - DNA, 13 bp, Artificial Sequence
  Oligonucleotide for detection of SNP TSC0061073
ggtttacgtggta

SEQ ID NO: 250104 - DNA, 13 bp, Artificial Sequence
  Oligonucleotide for detection of SNP TSC0061073
taccacgtaaacc

SEQ ID NO: 250105 - DNA, 13 bp, Artificial Sequence
  Oligonucleotide for detection of SNP TSC0061073
tgttatgtgagty

SEQ ID NO: 250106 - DNA, 13 bp, Artificial Sequence
  Oligonucleotide for detection of SNP TSC0061073
ractcacataaca

SEQ ID NO: 250107 - DNA, 13 bp, Artificial Sequence
  Oligonucleotide for detection of SNP TSC0061073
tgttatatgagty

SEQ ID NO: 250108 - DNA, 13 bp, Artificial Sequence
  Oligonucleotide for detection of SNP TSC0061073
ractcatataaca

SEQ ID NO: 250109 - DNA, 13 bp, Artificial Sequence
  Oligonucleotide for detection of SNP TSC0061073
tgttacgtgagty

SEQ ID NO: 250110 - DNA, 13 bp, Artificial Sequence
  Oligonucleotide for detection of SNP TSC0061073
ractcacgtaaca

SEQ ID NO: 250111 - DNA, 13 bp, Artificial Sequence
  Oligonucleotide for detection of SNP TSC0008143
ttagttatatgga

SEQ ID NO: 250112 - DNA, 13 bp, Artificial Sequence
  Oligonucleotide for detection of SNP TSC0008143
tccatataactaa

SEQ ID NO: 250113 - DNA, 13 bp, Artificial Sequence
  Oligonucleotide for detection of SNP TSC0008143
ttagttttatgga

SEQ ID NO: 250114 - DNA, 13 bp, Artificial Sequence
  Oligonucleotide for detection of SNP TSC0008143
tccataaaactaa

SEQ ID NO: 250115 - DNA, 13 bp, Artificial Sequence
  Oligonucleotide for detection of SNP TSC0008143
tttatgtggttag

SEQ ID NO: 250116 - DNA, 13 bp, Artificial Sequence
  Oligonucleotide for detection of SNP TSC0008143
ctaaccacataaa

SEQ ID NO: 250117 - DNA, 13 bp, Artificial Sequence
  Oligonucleotide for detection of SNP TSC0008143
tttatggggttag

SEQ ID NO: 250118 - DNA, 13 bp, Artificial Sequence
  Oligonucleotide for detection of SNP TSC0008143
ctaaccccataaa

SEQ ID NO: 250119 - DNA, 13 bp, Artificial Sequence
  Oligonucleotide for detection of SNP TSC0061074
aagggtgtttaat

SEQ ID NO: 250120 - DNA, 13 bp, Artificial Sequence
  Oligonucleotide for detection of SNP TSC0061074
attaaacaccctt

SEQ ID NO: 250121 - DNA, 13 bp, Artificial Sequence
  Oligonucleotide for detection of SNP TSC0061074
aagggtatttaat

SEQ ID NO: 250122 - DNA, 13 bp, Artificial Sequence
  Oligonucleotide for detection of SNP TSC0061074
attaaataccctt

SEQ ID NO: 250123 - DNA, 13 bp, Artificial Sequence
  Oligonucleotide for detection of SNP TSC0061075
ttattgatttaaa

SEQ ID NO: 250124 - DNA, 13 bp, Artificial Sequence
  Oligonucleotide for detection of SNP TSC0061075
tttaaatcaataa

SEQ ID NO: 250125 - DNA, 13 bp, Artificial Sequence
  Oligonucleotide for detection of SNP TSC0061075
ttattggtttaaa

SEQ ID NO: 250126 - DNA, 13 bp, Artificial Sequence
  Oligonucleotide for detection of SNP TSC0061075
tttaaaccaataa

SEQ ID NO: 250127 - DNA, 13 bp, Artificial Sequence
  Oligonucleotide for detection of SNP TSC0061076
attttatggaaat

SEQ ID NO: 250128 - DNA, 13 bp, Artificial Sequence
  Oligonucleotide for detection of SNP TSC0061076
atttccataaaat

SEQ ID NO: 250129 - DNA, 13 bp, Artificial Sequence
  Oligonucleotide for detection of SNP TSC0061076
attttacggaaat

SEQ ID NO: 250130 - DNA, 13 bp, Artificial Sequence
  Oligonucleotide for detection of SNP TSC0061076
atttccgtaaaat

SEQ ID NO: 250131 - DNA, 13 bp, Artificial Sequence
  Oligonucleotide for detection of SNP TSC0061077
attttgggagttt

SEQ ID NO: 250132 - DNA, 13 bp, Artificial Sequence
  Oligonucleotide for detection of SNP TSC0061077
aaactcccaaaat

SEQ ID NO: 250133 - DNA, 13 bp, Artificial Sequence
  Oligonucleotide for detection of SNP TSC0061077
attttgagagttt

SEQ ID NO: 250134 - DNA, 13 bp, Artificial Sequence
  Oligonucleotide for detection of SNP TSC0061077
aaactctcaaaat

SEQ ID NO: 250135 - DNA, 13 bp, Artificial Sequence
  Oligonucleotide for detection of SNP TSC0061078
attataaatatta

SEQ ID NO: 250136 - DNA, 13 bp, Artificial Sequence
  Oligonucleotide for detection of SNP TSC0061078
taatatttataat

SEQ ID NO: 250137 - DNA, 13 bp, Artificial Sequence
  Oligonucleotide for detection of SNP TSC0061078
attatagatatta

SEQ ID NO: 250138 - DNA, 13 bp, Artificial Sequence
  Oligonucleotide for detection of SNP TSC0061078
taatatctataat

SEQ ID NO: 250139 - DNA, 13 bp, Artificial Sequence
  Oligonucleotide for detection of SNP TSC0061079
gtatatattaagg

SEQ ID NO: 250140 - DNA, 13 bp, Artificial Sequence
  Oligonucleotide for detection of SNP TSC0061079
ccttaatatatac

SEQ ID NO: 250141 - DNA, 13 bp, Artificial Sequence
  Oligonucleotide for detection of SNP TSC0061079
gtatatgttaagg

SEQ ID NO: 250142 - DNA, 13 bp, Artificial Sequence
  Oligonucleotide for detection of SNP TSC0061079
ccttaacatatac

SEQ ID NO: 250143 - DNA, 13 bp, Artificial Sequence
  Oligonucleotide for detection of SNP TSC0061079
gtatacgttaagg

SEQ ID NO: 250144 - DNA, 13 bp, Artificial Sequence
  Oligonucleotide for detection of SNP TSC0061079
ccttaacgtatac

SEQ ID NO: 250145 - DNA, 13 bp, Artificial Sequence
  Oligonucleotide for detection of SNP TSC0061079
ttttagtgtgtgy

SEQ ID NO: 250146 - DNA, 13 bp, Artificial Sequence
  Oligonucleotide for detection of SNP TSC0061079
rcacacactaaaa

SEQ ID NO: 250147 - DNA, 13 bp, Artificial Sequence
  Oligonucleotide for detection of SNP TSC0061079
ttttagcgtgtgy

SEQ ID NO: 250148 - DNA, 13 bp, Artificial Sequence
  Oligonucleotide for detection of SNP TSC0061079
rcacacgctaaaa

SEQ ID NO: 250149 - DNA, 13 bp, Artificial Sequence
  Oligonucleotide for detection of SNP TSC0061080
tttaaattgtaay

SEQ ID NO: 250150 - DNA, 13 bp, Artificial Sequence
  Oligonucleotide for detection of SNP TSC0061080
rttacaatttaaa

SEQ ID NO: 250151 - DNA, 13 bp, Artificial Sequence
  Oligonucleotide for detection of SNP TSC0061080
tttaaagtgtaay

SEQ ID NO: 250152 - DNA, 13 bp, Artificial Sequence
  Oligonucleotide for detection of SNP TSC0061080
rttacactttaaa

SEQ ID NO: 250153 - DNA, 13 bp, Artificial Sequence
  Oligonucleotide for detection of SNP TSC0061080
gttgtagtttgaa

SEQ ID NO: 250154 - DNA, 13 bp, Artificial Sequence
  Oligonucleotide for detection of SNP TSC0061080
ttcaaactacaac

SEQ ID NO: 250155 - DNA, 13 bp, Artificial Sequence
  Oligonucleotide for detection of SNP TSC0061080
gttgtattttgaa

SEQ ID NO: 250156 - DNA, 13 bp, Artificial Sequence
  Oligonucleotide for detection of SNP TSC0061080
ttcaaaatacaac

SEQ ID NO: 250157 - DNA, 13 bp, Artificial Sequence
  Oligonucleotide for detection of SNP TSC0005550
atttgtgttttgt

SEQ ID NO: 250158 - DNA, 13 bp, Artificial Sequence
  Oligonucleotide for detection of SNP TSC0005550
acaaaacacaaat

SEQ ID NO: 250159 - DNA, 13 bp, Artificial Sequence
  Oligonucleotide for detection of SNP TSC0005550
atttgtattttgt

SEQ ID NO: 250160 - DNA, 13 bp, Artificial Sequence
  Oligonucleotide for detection of SNP TSC0005550
acaaaatacaaat

SEQ ID NO: 250161 - DNA, 13 bp, Artificial Sequence
  Oligonucleotide for detection of SNP TSC0061081
gaaatgttttgtt

SEQ ID NO: 250162 - DNA, 13 bp, Artificial Sequence
  Oligonucleotide for detection of SNP TSC0061081
aacaaaacatttc

SEQ ID NO: 250163 - DNA, 13 bp, Artificial Sequence
  Oligonucleotide for detection of SNP TSC0061081
gaaatggtttgtt

SEQ ID NO: 250164 - DNA, 13 bp, Artificial Sequence
  Oligonucleotide for detection of SNP TSC0061081
aacaaaccatttc

SEQ ID NO: 250165 - DNA, 13 bp, Artificial Sequence
  Oligonucleotide for detection of SNP TSC0061081
agtaagatattty

SEQ ID NO: 250166 - DNA, 13 bp, Artificial Sequence
  Oligonucleotide for detection of SNP TSC0061081
raaatatcttact

SEQ ID NO: 250167 - DNA, 13 bp, Artificial Sequence
  Oligonucleotide for detection of SNP TSC0061081
agtaagttattty

SEQ ID NO: 250168 - DNA, 13 bp, Artificial Sequence
  Oligonucleotide for detection of SNP TSC0061081
raaataacttact

SEQ ID NO: 250169 - DNA, 13 bp, Artificial Sequence
  Oligonucleotide for detection of SNP TSC0061083
atgtagaatagga

SEQ ID NO: 250170 - DNA, 13 bp, Artificial Sequence
  Oligonucleotide for detection of SNP TSC0061083
tcctattctacat

SEQ ID NO: 250171 - DNA, 13 bp, Artificial Sequence
  Oligonucleotide for detection of SNP TSC0061083
atgtagtatagga

SEQ ID NO: 250172 - DNA, 13 bp, Artificial Sequence
  Oligonucleotide for detection of SNP TSC0061083
tcctatactacat

SEQ ID NO: 250173 - DNA, 13 bp, Artificial Sequence
  Oligonucleotide for detection of SNP TSC0005239
ttatttataatty

SEQ ID NO: 250174 - DNA, 13 bp, Artificial Sequence
  Oligonucleotide for detection of SNP TSC0005239
raattataaataa

SEQ ID NO: 250175 - DNA, 13 bp, Artificial Sequence
  Oligonucleotide for detection of SNP TSC0005239
gagttacgggtaa

SEQ ID NO: 250176 - DNA, 13 bp, Artificial Sequence
  Oligonucleotide for detection of SNP TSC0005239
ttacccgtaactc

SEQ ID NO: 250177 - DNA, 13 bp, Artificial Sequence
  Oligonucleotide for detection of SNP TSC0061086
tattgtagggtag

SEQ ID NO: 250178 - DNA, 13 bp, Artificial Sequence
  Oligonucleotide for detection of SNP TSC0061086
ctaccctacaata

SEQ ID NO: 250179 - DNA, 13 bp, Artificial Sequence
  Oligonucleotide for detection of SNP TSC0061086
tattgtggggtag

SEQ ID NO: 250180 - DNA, 13 bp, Artificial Sequence
  Oligonucleotide for detection of SNP TSC0061086
ctaccccacaata

SEQ ID NO: 250181 - DNA, 13 bp, Artificial Sequence
  Oligonucleotide for detection of SNP TSC0061086
tatcgtagggtag

SEQ ID NO: 250182 - DNA, 13 bp, Artificial Sequence
  Oligonucleotide for detection of SNP TSC0061086
ctaccctacgata

SEQ ID NO: 250183 - DNA, 13 bp, Artificial Sequence
  Oligonucleotide for detection of SNP TSC0061086
tatcgtggggtag

SEQ ID NO: 250184 - DNA, 13 bp, Artificial Sequence
  Oligonucleotide for detection of SNP TSC0061086
ctaccccacgata

SEQ ID NO: 250185 - DNA, 13 bp, Artificial Sequence
  Oligonucleotide for detection of SNP TSC0061087
tgaggtttttatt

SEQ ID NO: 250186 - DNA, 13 bp, Artificial Sequence
  Oligonucleotide for detection of SNP TSC0061087
aataaaaacctca

SEQ ID NO: 250187 - DNA, 13 bp, Artificial Sequence
  Oligonucleotide for detection of SNP TSC0061087
tgaggtgtttatt

SEQ ID NO: 250188 - DNA, 13 bp, Artificial Sequence
  Oligonucleotide for detection of SNP TSC0061087
aataaacacctca

SEQ ID NO: 250189 - DNA, 13 bp, Artificial Sequence
  Oligonucleotide for detection of SNP TSC0061087
agtagagatttta

SEQ ID NO: 250190 - DNA, 13 bp, Artificial Sequence
  Oligonucleotide for detection of SNP TSC0061087
taaaatctctact

SEQ ID NO: 250191 - DNA, 13 bp, Artificial Sequence
  Oligonucleotide for detection of SNP TSC0061087
agtagatatttta

SEQ ID NO: 250192 - DNA, 13 bp, Artificial Sequence
  Oligonucleotide for detection of SNP TSC0061087
taaaatatctact

SEQ ID NO: 250193 - DNA, 13 bp, Artificial Sequence
  Oligonucleotide for detection of SNP TSC0061088
tgttatggttatt

SEQ ID NO: 250194 - DNA, 13 bp, Artificial Sequence
  Oligonucleotide for detection of SNP TSC0061088
aataaccataaca

SEQ ID NO: 250195 - DNA, 13 bp, Artificial Sequence
  Oligonucleotide for detection of SNP TSC0005536
tgttttaggttay

SEQ ID NO: 250196 - DNA, 13 bp, Artificial Sequence
  Oligonucleotide for detection of SNP TSC0005536
rtaacctaaaaca

SEQ ID NO: 250197 - DNA, 13 bp, Artificial Sequence
  Oligonucleotide for detection of SNP TSC0005536
tgttttgggttay

SEQ ID NO: 250198 - DNA, 13 bp, Artificial Sequence
  Oligonucleotide for detection of SNP TSC0005536
rtaacccaaaaca

SEQ ID NO: 250199 - DNA, 13 bp, Artificial Sequence
  Oligonucleotide for detection of SNP TSC0005536
tgtttcgggttay

SEQ ID NO: 250200 - DNA, 13 bp, Artificial Sequence
  Oligonucleotide for detection of SNP TSC0005536
rtaacccgaaaca

SEQ ID NO: 250201 - DNA, 13 bp, Artificial Sequence
  Oligonucleotide for detection of SNP TSC0005536
gtgatttgggata

SEQ ID NO: 250202 - DNA, 13 bp, Artificial Sequence
  Oligonucleotide for detection of SNP TSC0005536
tatcccaaatcac

SEQ ID NO: 250203 - DNA, 13 bp, Artificial Sequence
  Oligonucleotide for detection of SNP TSC0005536
gtgattcgggata

SEQ ID NO: 250204 - DNA, 13 bp, Artificial Sequence
  Oligonucleotide for detection of SNP TSC0005536
tatcccgaatcac

SEQ ID NO: 250205 - DNA, 13 bp, Artificial Sequence
  Oligonucleotide for detection of SNP TSC0005538
gtggggggtggtg

SEQ ID NO: 250206 - DNA, 13 bp, Artificial Sequence
  Oligonucleotide for detection of SNP TSC0005538
caccaccccccac

SEQ ID NO: 250207 - DNA, 13 bp, Artificial Sequence
  Oligonucleotide for detection of SNP TSC0005538
gtggggagtggtg

SEQ ID NO: 250208 - DNA, 13 bp, Artificial Sequence
  Oligonucleotide for detection of SNP TSC0005538
caccactccccac

SEQ ID NO: 250209 - DNA, 13 bp, Artificial Sequence
  Oligonucleotide for detection of SNP TSC0008672
taggataaggtta

SEQ ID NO: 250210 - DNA, 13 bp, Artificial Sequence
  Oligonucleotide for detection of SNP TSC0008672
taaccttatccta

SEQ ID NO: 250211 - DNA, 13 bp, Artificial Sequence
  Oligonucleotide for detection of SNP TSC0008672
taggattaggtta

SEQ ID NO: 250212 - DNA, 13 bp, Artificial Sequence
  Oligonucleotide for detection of SNP TSC0008672
taacctaatccta

SEQ ID NO: 250213 - DNA, 13 bp, Artificial Sequence
  Oligonucleotide for detection of SNP TSC0008672
taggatgaggtta

SEQ ID NO: 250214 - DNA, 13 bp, Artificial Sequence
  Oligonucleotide for detection of SNP TSC0008672
taacctcatccta

SEQ ID NO: 250215 - DNA, 13 bp, Artificial Sequence
  Oligonucleotide for detection of SNP TSC0008672
tagttttatttta

SEQ ID NO: 250216 - DNA, 13 bp, Artificial Sequence
  Oligonucleotide for detection of SNP TSC0008672
taaaataaaacta

SEQ ID NO: 250217 - DNA, 13 bp, Artificial Sequence
  Oligonucleotide for detection of SNP TSC0008672
tagtttgatttta

SEQ ID NO: 250218 - DNA, 13 bp, Artificial Sequence
  Oligonucleotide for detection of SNP TSC0008672
taaaatcaaacta

SEQ ID NO: 250219 - DNA, 13 bp, Artificial Sequence
  Oligonucleotide for detection of SNP TSC0061093
gtgtgtaagggat

SEQ ID NO: 250220 - DNA, 13 bp, Artificial Sequence
  Oligonucleotide for detection of SNP TSC0061093
atcccttacacac

SEQ ID NO: 250221 - DNA, 13 bp, Artificial Sequence
  Oligonucleotide for detection of SNP TSC0061093
gtgtgcgagggat

SEQ ID NO: 250222 - DNA, 13 bp, Artificial Sequence
  Oligonucleotide for detection of SNP TSC0061093
atccctcgcacac

SEQ ID NO: 250223 - DNA, 13 bp, Artificial Sequence
  Oligonucleotide for detection of SNP TSC0061093
attttttgtatay

SEQ ID NO: 250224 - DNA, 13 bp, Artificial Sequence
  Oligonucleotide for detection of SNP TSC0061093
rtatacaaaaaat

SEQ ID NO: 250225 - DNA, 13 bp, Artificial Sequence
  Oligonucleotide for detection of SNP TSC0061093
atttttcgtatay

SEQ ID NO: 250226 - DNA, 13 bp, Artificial Sequence
  Oligonucleotide for detection of SNP TSC0061093
rtatacgaaaaat

SEQ ID NO: 250227 - DNA, 13 bp, Artificial Sequence
  Oligonucleotide for detection of SNP TSC0061094
agttgtataatat

SEQ ID NO: 250228 - DNA, 13 bp, Artificial Sequence
  Oligonucleotide for detection of SNP TSC0061094
atattatacaact

SEQ ID NO: 250229 - DNA, 13 bp, Artificial Sequence
  Oligonucleotide for detection of SNP TSC0061094
agttgtgtaatat

SEQ ID NO: 250230 - DNA, 13 bp, Artificial Sequence
  Oligonucleotide for detection of SNP TSC0061094
atattacacaact

SEQ ID NO: 250231 - DNA, 13 bp, Artificial Sequence
  Oligonucleotide for detection of SNP TSC0061095
tgttatatttaty

SEQ ID NO: 250232 - DNA, 13 bp, Artificial Sequence
  Oligonucleotide for detection of SNP TSC0061095
rataaatataaca

SEQ ID NO: 250233 - DNA, 13 bp, Artificial Sequence
  Oligonucleotide for detection of SNP TSC0061095
tgttatttttaty

SEQ ID NO: 250234 - DNA, 13 bp, Artificial Sequence
  Oligonucleotide for detection of SNP TSC0061095
rataaaaataaca

SEQ ID NO: 250235 - DNA, 13 bp, Artificial Sequence
  Oligonucleotide for detection of SNP TSC0061095
ggtgagtatgata

SEQ ID NO: 250236 - DNA, 13 bp, Artificial Sequence
  Oligonucleotide for detection of SNP TSC0061095
tatcatactcacc

SEQ ID NO: 250237 - DNA, 13 bp, Artificial Sequence
  Oligonucleotide for detection of SNP TSC0061095
ggtgagaatgata

SEQ ID NO: 250238 - DNA, 13 bp, Artificial Sequence
  Oligonucleotide for detection of SNP TSC0061095
tatcattctcacc

SEQ ID NO: 250239 - DNA, 13 bp, Artificial Sequence
  Oligonucleotide for detection of SNP TSC0061096
aaaaatttttttt

SEQ ID NO: 250240 - DNA, 13 bp, Artificial Sequence
  Oligonucleotide for detection of SNP TSC0061096
aaaaaaaattttt

SEQ ID NO: 250241 - DNA, 13 bp, Artificial Sequence
  Oligonucleotide for detection of SNP TSC0061096
aaaagaaattttt

SEQ ID NO: 250242 - DNA, 13 bp, Artificial Sequence
  Oligonucleotide for detection of SNP TSC0061096
aaaaatttctttt

SEQ ID NO: 250243 - DNA, 13 bp, Artificial Sequence
  Oligonucleotide for detection of SNP TSC0061096
aaaagatattttt

SEQ ID NO: 250244 - DNA, 13 bp, Artificial Sequence
  Oligonucleotide for detection of SNP TSC0061096
aaaaatatctttt

SEQ ID NO: 250245 - DNA, 13 bp, Artificial Sequence
  Oligonucleotide for detection of SNP TSC0061097
attaaaagagaaa

SEQ ID NO: 250246 - DNA, 13 bp, Artificial Sequence
  Oligonucleotide for detection of SNP TSC0061097
tttctcttttaat

SEQ ID NO: 250247 - DNA, 13 bp, Artificial Sequence
  Oligonucleotide for detection of SNP TSC0061097
attaaaggagaaa

SEQ ID NO: 250248 - DNA, 13 bp, Artificial Sequence
  Oligonucleotide for detection of SNP TSC0061097
tttctcctttaat

SEQ ID NO: 250249 - DNA, 13 bp, Artificial Sequence
  Oligonucleotide for detection of SNP TSC0061098
gatgttgtgtgaa

SEQ ID NO: 250250 - DNA, 13 bp, Artificial Sequence
  Oligonucleotide for detection of SNP TSC0061098
ttcacacaacatc

SEQ ID NO: 250251 - DNA, 13 bp, Artificial Sequence
  Oligonucleotide for detection of SNP TSC0061098
gatgttatgtgaa

SEQ ID NO: 250252 - DNA, 13 bp, Artificial Sequence
  Oligonucleotide for detection of SNP TSC0061098
ttcacataacatc

SEQ ID NO: 250253 - DNA, 13 bp, Artificial Sequence
  Oligonucleotide for detection of SNP TSC0061098
gatgtcgtgtgaa

SEQ ID NO: 250254 - DNA, 13 bp, Artificial Sequence
  Oligonucleotide for detection of SNP TSC0061098
ttcacacgacatc

SEQ ID NO: 250255 - DNA, 13 bp, Artificial Sequence
  Oligonucleotide for detection of SNP TSC0061099
aaatttatgggtt

SEQ ID NO: 250256 - DNA, 13 bp, Artificial Sequence
  Oligonucleotide for detection of SNP TSC0061099
aacccataaattt

SEQ ID NO: 250257 - DNA, 13 bp, Artificial Sequence
  Oligonucleotide for detection of SNP TSC0061099
aaatttttgggtt

SEQ ID NO: 250258 - DNA, 13 bp, Artificial Sequence
  Oligonucleotide for detection of SNP TSC0061099
aacccaaaaattt

SEQ ID NO: 250259 - DNA, 13 bp, Artificial Sequence
  Oligonucleotide for detection of SNP TSC0061102
tatgttatggttg

SEQ ID NO: 250260 - DNA, 13 bp, Artificial Sequence
  Oligonucleotide for detection of SNP TSC0061102
caaccataacata

SEQ ID NO: 250261 - DNA, 13 bp, Artificial Sequence
  Oligonucleotide for detection of SNP TSC0061102
tatgttgtggttg

SEQ ID NO: 250262 - DNA, 13 bp, Artificial Sequence
  Oligonucleotide for detection of SNP TSC0061102
caaccacaacata

SEQ ID NO: 250263 - DNA, 13 bp, Artificial Sequence
  Oligonucleotide for detection of SNP TSC0061102
tatgttatggtcg

SEQ ID NO: 250264 - DNA, 13 bp, Artificial Sequence
  Oligonucleotide for detection of SNP TSC0061102
cgaccataacata

SEQ ID NO: 250265 - DNA, 13 bp, Artificial Sequence
  Oligonucleotide for detection of SNP TSC0061102
tatgtcgtggttg

SEQ ID NO: 250266 - DNA, 13 bp, Artificial Sequence
  Oligonucleotide for detection of SNP TSC0061102
caaccacgacata

SEQ ID NO: 250267 - DNA, 13 bp, Artificial Sequence
  Oligonucleotide for detection of SNP TSC0061102
tatgttgtggtcg

SEQ ID NO: 250268 - DNA, 13 bp, Artificial Sequence
  Oligonucleotide for detection of SNP TSC0061102
cgaccacaacata

SEQ ID NO: 250269 - DNA, 13 bp, Artificial Sequence
  Oligonucleotide for detection of SNP TSC0061102
tatgtcgtggtcg

SEQ ID NO: 250270 - DNA, 13 bp, Artificial Sequence
  Oligonucleotide for detection of SNP TSC0061102
cgaccacgacata

SEQ ID NO: 250271 - DNA, 13 bp, Artificial Sequence
  Oligonucleotide for detection of SNP TSC0061102
tggttatgatata

SEQ ID NO: 250272 - DNA, 13 bp, Artificial Sequence
  Oligonucleotide for detection of SNP TSC0061102
tatatcataacca

SEQ ID NO: 250273 - DNA, 13 bp, Artificial Sequence
  Oligonucleotide for detection of SNP TSC0061102
cggttatgatata

SEQ ID NO: 250274 - DNA, 13 bp, Artificial Sequence
  Oligonucleotide for detection of SNP TSC0061102
tatatcataaccg

SEQ ID NO: 250275 - DNA, 13 bp, Artificial Sequence
  Oligonucleotide for detection of SNP TSC0061102
tggttacgatata

SEQ ID NO: 250276 - DNA, 13 bp, Artificial Sequence
  Oligonucleotide for detection of SNP TSC0061102
tatatcgtaacca

SEQ ID NO: 250277 - DNA, 13 bp, Artificial Sequence
  Oligonucleotide for detection of SNP TSC0061102
cggttacgatata

SEQ ID NO: 250278 - DNA, 13 bp, Artificial Sequence
  Oligonucleotide for detection of SNP TSC0061102
tatatcgtaaccg

SEQ ID NO: 250279 - DNA, 13 bp, Artificial Sequence
  Oligonucleotide for detection of SNP TSC0061103
agataaagtatta

SEQ ID NO: 250280 - DNA, 13 bp, Artificial Sequence
  Oligonucleotide for detection of SNP TSC0061103
taatactttatct

SEQ ID NO: 250281 - DNA, 13 bp, Artificial Sequence
  Oligonucleotide for detection of SNP TSC0061103
agataaggtatta

SEQ ID NO: 250282 - DNA, 13 bp, Artificial Sequence
  Oligonucleotide for detection of SNP TSC0061103
taataccttatct

SEQ ID NO: 250283 - DNA, 13 bp, Artificial Sequence
  Oligonucleotide for detection of SNP TSC0061106
tatataatgtgaa

SEQ ID NO: 250284 - DNA, 13 bp, Artificial Sequence
  Oligonucleotide for detection of SNP TSC0061106
ttcacattatata

SEQ ID NO: 250285 - DNA, 13 bp, Artificial Sequence
  Oligonucleotide for detection of SNP TSC0061106
tatatagtgtgaa

SEQ ID NO: 250286 - DNA, 13 bp, Artificial Sequence
  Oligonucleotide for detection of SNP TSC0061106
ttcacactatata

SEQ ID NO: 250287 - DNA, 13 bp, Artificial Sequence
  Oligonucleotide for detection of SNP TSC0061113
gtataaatatatg

SEQ ID NO: 250288 - DNA, 13 bp, Artificial Sequence
  Oligonucleotide for detection of SNP TSC0061113
catatatttatac

SEQ ID NO: 250289 - DNA, 13 bp, Artificial Sequence
  Oligonucleotide for detection of SNP TSC0061113
gtataattatatg

SEQ ID NO: 250290 - DNA, 13 bp, Artificial Sequence
  Oligonucleotide for detection of SNP TSC0061113
catataattatac

SEQ ID NO: 250291 - DNA, 13 bp, Artificial Sequence
  Oligonucleotide for detection of SNP TSC0061113
tatgtatttatgy

SEQ ID NO: 250292 - DNA, 13 bp, Artificial Sequence
  Oligonucleotide for detection of SNP TSC0061113
rcataaatacata

SEQ ID NO: 250293 - DNA, 13 bp, Artificial Sequence
  Oligonucleotide for detection of SNP TSC0061114
gatattagaaata

SEQ ID NO: 250294 - DNA, 13 bp, Artificial Sequence
  Oligonucleotide for detection of SNP TSC0061114
tatttctaatatc

SEQ ID NO: 250295 - DNA, 13 bp, Artificial Sequence
  Oligonucleotide for detection of SNP TSC0061114
gatattggaaata

SEQ ID NO: 250296 - DNA, 13 bp, Artificial Sequence
  Oligonucleotide for detection of SNP TSC0061114
tatttccaatatc

SEQ ID NO: 250297 - DNA, 13 bp, Artificial Sequence
  Oligonucleotide for detection of SNP TSC0061114
gatatcggaaata

SEQ ID NO: 250298 - DNA, 13 bp, Artificial Sequence
  Oligonucleotide for detection of SNP TSC0061114
tatttccgatatc

SEQ ID NO: 250299 - DNA, 13 bp, Artificial Sequence
  Oligonucleotide for detection of SNP TSC0061115
ttgtaggttttty

SEQ ID NO: 250300 - DNA, 13 bp, Artificial Sequence
  Oligonucleotide for detection of SNP TSC0061115
raaaaacctacaa

SEQ ID NO: 250301 - DNA, 13 bp, Artificial Sequence
  Oligonucleotide for detection of SNP TSC0061116
aatagagaggagg

SEQ ID NO: 250302 - DNA, 13 bp, Artificial Sequence
  Oligonucleotide for detection of SNP TSC0061116
cctcctctctatt

SEQ ID NO: 250303 - DNA, 13 bp, Artificial Sequence
  Oligonucleotide for detection of SNP TSC0061116
aatagataggagg

SEQ ID NO: 250304 - DNA, 13 bp, Artificial Sequence
  Oligonucleotide for detection of SNP TSC0061116
cctcctatctatt

SEQ ID NO: 250305 - DNA, 13 bp, Artificial Sequence
  Oligonucleotide for detection of SNP TSC0061118
tttaaagtgggtt

SEQ ID NO: 250306 - DNA, 13 bp, Artificial Sequence
  Oligonucleotide for detection of SNP TSC0061118
aacccactttaaa

SEQ ID NO: 250307 - DNA, 13 bp, Artificial Sequence
  Oligonucleotide for detection of SNP TSC0061118
tttaaaatgggtt

SEQ ID NO: 250308 - DNA, 13 bp, Artificial Sequence
  Oligonucleotide for detection of SNP TSC0061118
aacccattttaaa

SEQ ID NO: 250309 - DNA, 13 bp, Artificial Sequence
  Oligonucleotide for detection of SNP TSC0061119
ttgtataaaagty

SEQ ID NO: 250310 - DNA, 13 bp, Artificial Sequence
  Oligonucleotide for detection of SNP TSC0061119
racttttatacaa

SEQ ID NO: 250311 - DNA, 13 bp, Artificial Sequence
  Oligonucleotide for detection of SNP TSC0061119
ttgtatgaaagty

SEQ ID NO: 250312 - DNA, 13 bp, Artificial Sequence
  Oligonucleotide for detection of SNP TSC0061119
ractttcatacaa

SEQ ID NO: 250313 - DNA, 13 bp, Artificial Sequence
  Oligonucleotide for detection of SNP TSC0061121
atattaaaaatag

SEQ ID NO: 250314 - DNA, 13 bp, Artificial Sequence
  Oligonucleotide for detection of SNP TSC0061121
ctatttttaatat

SEQ ID NO: 250315 - DNA, 13 bp, Artificial Sequence
  Oligonucleotide for detection of SNP TSC0061121
atattagaaatag

SEQ ID NO: 250316 - DNA, 13 bp, Artificial Sequence
  Oligonucleotide for detection of SNP TSC0061121
ctatttctaatat

SEQ ID NO: 250317 - DNA, 13 bp, Artificial Sequence
  Oligonucleotide for detection of SNP TSC0061123
ataggagggtatg

SEQ ID NO: 250318 - DNA, 13 bp, Artificial Sequence
  Oligonucleotide for detection of SNP TSC0061123
cataccctcctat

SEQ ID NO: 250319 - DNA, 13 bp, Artificial Sequence
  Oligonucleotide for detection of SNP TSC0061123
ataggaaggtatg

SEQ ID NO: 250320 - DNA, 13 bp, Artificial Sequence
  Oligonucleotide for detection of SNP TSC0061123
cataccttcctat

SEQ ID NO: 250321 - DNA, 13 bp, Artificial Sequence
  Oligonucleotide for detection of SNP TSC0061123
ataggagggtacg

SEQ ID NO: 250322 - DNA, 13 bp, Artificial Sequence
  Oligonucleotide for detection of SNP TSC0061123
cgtaccctcctat

SEQ ID NO: 250323 - DNA, 13 bp, Artificial Sequence
  Oligonucleotide for detection of SNP TSC0061123
ataggaaggtacg

SEQ ID NO: 250324 - DNA, 13 bp, Artificial Sequence
  Oligonucleotide for detection of SNP TSC0061123
cgtaccttcctat

SEQ ID NO: 250325 - DNA, 13 bp, Artificial Sequence
  Oligonucleotide for detection of SNP TSC0061124
ttgggttgttgtt

SEQ ID NO: 250326 - DNA, 13 bp, Artificial Sequence
  Oligonucleotide for detection of SNP TSC0061124
aacaacaacccaa

SEQ ID NO: 250327 - DNA, 13 bp, Artificial Sequence
  Oligonucleotide for detection of SNP TSC0061124
ttgggtcgttgtt

SEQ ID NO: 250328 - DNA, 13 bp, Artificial Sequence
  Oligonucleotide for detection of SNP TSC0061124
aacaacgacccaa

SEQ ID NO: 250329 - DNA, 13 bp, Artificial Sequence
  Oligonucleotide for detection of SNP TSC0061124
aataatggtttag

SEQ ID NO: 250330 - DNA, 13 bp, Artificial Sequence
  Oligonucleotide for detection of SNP TSC0061124
ctaaaccattatt

SEQ ID NO: 250331 - DNA, 13 bp, Artificial Sequence
  Oligonucleotide for detection of SNP TSC0061124
aataatagtttag

SEQ ID NO: 250332 - DNA, 13 bp, Artificial Sequence
  Oligonucleotide for detection of SNP TSC0061124
ctaaactattatt

SEQ ID NO: 250333 - DNA, 13 bp, Artificial Sequence
  Oligonucleotide for detection of SNP TSC0061124
aataacggtttag

SEQ ID NO: 250334 - DNA, 13 bp, Artificial Sequence
  Oligonucleotide for detection of SNP TSC0061124
ctaaaccgttatt

SEQ ID NO: 250335 - DNA, 13 bp, Artificial Sequence
  Oligonucleotide for detection of SNP TSC0061125
ttgtttattatgy

SEQ ID NO: 250336 - DNA, 13 bp, Artificial Sequence
  Oligonucleotide for detection of SNP TSC0061125
rcataataaacaa

SEQ ID NO: 250337 - DNA, 13 bp, Artificial Sequence
  Oligonucleotide for detection of SNP TSC0061125
ttgttttttatgy

SEQ ID NO: 250338 - DNA, 13 bp, Artificial Sequence
  Oligonucleotide for detection of SNP TSC0061125
rcataaaaaacaa

SEQ ID NO: 250339 - DNA, 13 bp, Artificial Sequence
  Oligonucleotide for detection of SNP TSC0061125
ttgtttattacgy

SEQ ID NO: 250340 - DNA, 13 bp, Artificial Sequence
  Oligonucleotide for detection of SNP TSC0061125
rcgtaataaacaa

SEQ ID NO: 250341 - DNA, 13 bp, Artificial Sequence
  Oligonucleotide for detection of SNP TSC0061125
ttgttttttacgy

SEQ ID NO: 250342 - DNA, 13 bp, Artificial Sequence
  Oligonucleotide for detection of SNP TSC0061125
rcgtaaaaaacaa

SEQ ID NO: 250343 - DNA, 13 bp, Artificial Sequence
  Oligonucleotide for detection of SNP TSC0061125
gtgtggtgaataa

SEQ ID NO: 250344 - DNA, 13 bp, Artificial Sequence
  Oligonucleotide for detection of SNP TSC0061125
ttattcaccacac

SEQ ID NO: 250345 - DNA, 13 bp, Artificial Sequence
  Oligonucleotide for detection of SNP TSC0061125
gtgtggggaataa

SEQ ID NO: 250346 - DNA, 13 bp, Artificial Sequence
  Oligonucleotide for detection of SNP TSC0061125
ttattccccacac

SEQ ID NO: 250347 - DNA, 13 bp, Artificial Sequence
  Oligonucleotide for detection of SNP TSC0061125
gcgtggtgaataa

SEQ ID NO: 250348 - DNA, 13 bp, Artificial Sequence
  Oligonucleotide for detection of SNP TSC0061125
ttattcaccacgc

SEQ ID NO: 250349 - DNA, 13 bp, Artificial Sequence
  Oligonucleotide for detection of SNP TSC0061125
gcgtggggaataa

SEQ ID NO: 250350 - DNA, 13 bp, Artificial Sequence
  Oligonucleotide for detection of SNP TSC0061125
ttattccccacgc

SEQ ID NO: 250351 - DNA, 13 bp, Artificial Sequence
  Oligonucleotide for detection of SNP TSC0061127
aaaaaggtggaag

SEQ ID NO: 250352 - DNA, 13 bp, Artificial Sequence
  Oligonucleotide for detection of SNP TSC0061127
cttccaccttttt

SEQ ID NO: 250353 - DNA, 13 bp, Artificial Sequence
  Oligonucleotide for detection of SNP TSC0061127
aaaaagatggaag

SEQ ID NO: 250354 - DNA, 13 bp, Artificial Sequence
  Oligonucleotide for detection of SNP TSC0061127
cttccatcttttt

SEQ ID NO: 250355 - DNA, 13 bp, Artificial Sequence
  Oligonucleotide for detection of SNP TSC0061128
ttagtaaatattt

SEQ ID NO: 250356 - DNA, 13 bp, Artificial Sequence
  Oligonucleotide for detection of SNP TSC0061128
aaatatttactaa

SEQ ID NO: 250357 - DNA, 13 bp, Artificial Sequence
  Oligonucleotide for detection of SNP TSC0061128
ttagtatatattt

SEQ ID NO: 250358 - DNA, 13 bp, Artificial Sequence
  Oligonucleotide for detection of SNP TSC0061128
aaatatatactaa

SEQ ID NO: 250359 - DNA, 13 bp, Artificial Sequence
  Oligonucleotide for detection of SNP TSC0061128
aaatatatattaa

SEQ ID NO: 250360 - DNA, 13 bp, Artificial Sequence
  Oligonucleotide for detection of SNP TSC0061128
ttaatatatattt

SEQ ID NO: 250361 - DNA, 13 bp, Artificial Sequence
  Oligonucleotide for detection of SNP TSC0061131
aagagaagtaagt

SEQ ID NO: 250362 - DNA, 13 bp, Artificial Sequence
  Oligonucleotide for detection of SNP TSC0061131
acttacttctctt

SEQ ID NO: 250363 - DNA, 13 bp, Artificial Sequence
  Oligonucleotide for detection of SNP TSC0061131
aagagaggtaagt

SEQ ID NO: 250364 - DNA, 13 bp, Artificial Sequence
  Oligonucleotide for detection of SNP TSC0061131
acttacctctctt

SEQ ID NO: 250365 - DNA, 13 bp, Artificial Sequence
  Oligonucleotide for detection of SNP TSC0061132
gtaattattttty

SEQ ID NO: 250366 - DNA, 13 bp, Artificial Sequence
  Oligonucleotide for detection of SNP TSC0061132
raaaaataattac

SEQ ID NO: 250367 - DNA, 13 bp, Artificial Sequence
  Oligonucleotide for detection of SNP TSC0061133
gaattttattgtg

SEQ ID NO: 250368 - DNA, 13 bp, Artificial Sequence
  Oligonucleotide for detection of SNP TSC0061133
cacaataaaattc

SEQ ID NO: 250369 - DNA, 13 bp, Artificial Sequence
  Oligonucleotide for detection of SNP TSC0061133
gaatttgattgtg

SEQ ID NO: 250370 - DNA, 13 bp, Artificial Sequence
  Oligonucleotide for detection of SNP TSC0061133
cacaatcaaattc

SEQ ID NO: 250371 - DNA, 13 bp, Artificial Sequence
  Oligonucleotide for detection of SNP TSC0061133
gaattttattgcg

SEQ ID NO: 250372 - DNA, 13 bp, Artificial Sequence
  Oligonucleotide for detection of SNP TSC0061133
cgcaataaaattc

SEQ ID NO: 250373 - DNA, 13 bp, Artificial Sequence
  Oligonucleotide for detection of SNP TSC0061133
gaatttgattgcg

SEQ ID NO: 250374 - DNA, 13 bp, Artificial Sequence
  Oligonucleotide for detection of SNP TSC0061133
cgcaatcaaattc

SEQ ID NO: 250375 - DNA, 13 bp, Artificial Sequence
  Oligonucleotide for detection of SNP TSC0061133
tgtagtaaaatty

SEQ ID NO: 250376 - DNA, 13 bp, Artificial Sequence
  Oligonucleotide for detection of SNP TSC0061133
raattttactaca

SEQ ID NO: 250377 - DNA, 13 bp, Artificial Sequence
  Oligonucleotide for detection of SNP TSC0061133
tgtagttaaatty

SEQ ID NO: 250378 - DNA, 13 bp, Artificial Sequence
  Oligonucleotide for detection of SNP TSC0061133
raatttaactaca

SEQ ID NO: 250379 - DNA, 13 bp, Artificial Sequence
  Oligonucleotide for detection of SNP TSC0061133
cgtagtaaaatty

SEQ ID NO: 250380 - DNA, 13 bp, Artificial Sequence
  Oligonucleotide for detection of SNP TSC0061133
raattttactacg

SEQ ID NO: 250381 - DNA, 13 bp, Artificial Sequence
  Oligonucleotide for detection of SNP TSC0061133
cgtagttaaatty

SEQ ID NO: 250382 - DNA, 13 bp, Artificial Sequence
  Oligonucleotide for detection of SNP TSC0061133
raatttaactacg

SEQ ID NO: 250383 - DNA, 13 bp, Artificial Sequence
  Oligonucleotide for detection of SNP TSC0061134
tttgagtttttgy

SEQ ID NO: 250384 - DNA, 13 bp, Artificial Sequence
  Oligonucleotide for detection of SNP TSC0061134
rcaaaaactcaaa

SEQ ID NO: 250385 - DNA, 13 bp, Artificial Sequence
  Oligonucleotide for detection of SNP TSC0061134
tttgaggttttgy

SEQ ID NO: 250386 - DNA, 13 bp, Artificial Sequence
  Oligonucleotide for detection of SNP TSC0061134
rcaaaacctcaaa

SEQ ID NO: 250387 - DNA, 13 bp, Artificial Sequence
  Oligonucleotide for detection of SNP TSC0061134
ttcgagtttttgy

SEQ ID NO: 250388 - DNA, 13 bp, Artificial Sequence
  Oligonucleotide for detection of SNP TSC0061134
rcaaaaactcgaa

SEQ ID NO: 250389 - DNA, 13 bp, Artificial Sequence
  Oligonucleotide for detection of SNP TSC0061134
ttcgaggttttgy

SEQ ID NO: 250390 - DNA, 13 bp, Artificial Sequence
  Oligonucleotide for detection of SNP TSC0061134
rcaaaacctcgaa

SEQ ID NO: 250391 - DNA, 13 bp, Artificial Sequence
  Oligonucleotide for detection of SNP TSC0061134
gtaagaatttgga

SEQ ID NO: 250392 - DNA, 13 bp, Artificial Sequence
  Oligonucleotide for detection of SNP TSC0061134
tccaaattcttac

SEQ ID NO: 250393 - DNA, 13 bp, Artificial Sequence
  Oligonucleotide for detection of SNP TSC0061134
gtaagattttgga

SEQ ID NO: 250394 - DNA, 13 bp, Artificial Sequence
  Oligonucleotide for detection of SNP TSC0061134
tccaaaatcttac

SEQ ID NO: 250395 - DNA, 13 bp, Artificial Sequence
  Oligonucleotide for detection of SNP TSC0061134
gtaagaattcgga

SEQ ID NO: 250396 - DNA, 13 bp, Artificial Sequence
  Oligonucleotide for detection of SNP TSC0061134
tccgaattcttac

SEQ ID NO: 250397 - DNA, 13 bp, Artificial Sequence
  Oligonucleotide for detection of SNP TSC0061134
gtaagatttcgga

SEQ ID NO: 250398 - DNA, 13 bp, Artificial Sequence
  Oligonucleotide for detection of SNP TSC0061134
tccgaaatcttac

SEQ ID NO: 250399 - DNA, 13 bp, Artificial Sequence
  Oligonucleotide for detection of SNP TSC0061135
ataaagattgaty

SEQ ID NO: 250400 - DNA, 13 bp, Artificial Sequence
  Oligonucleotide for detection of SNP TSC0061135
ratcaatctttat

SEQ ID NO: 250401 - DNA, 13 bp, Artificial Sequence
  Oligonucleotide for detection of SNP TSC0061135
ataaagtttgaty

SEQ ID NO: 250402 - DNA, 13 bp, Artificial Sequence
  Oligonucleotide for detection of SNP TSC0061135
ratcaaactttat

SEQ ID NO: 250403 - DNA, 13 bp, Artificial Sequence
  Oligonucleotide for detection of SNP TSC0061135
ggttagtttttgt

SEQ ID NO: 250404 - DNA, 13 bp, Artificial Sequence
  Oligonucleotide for detection of SNP TSC0061135
acaaaaactaacc

SEQ ID NO: 250405 - DNA, 13 bp, Artificial Sequence
  Oligonucleotide for detection of SNP TSC0061135
ggttagattttgt

SEQ ID NO: 250406 - DNA, 13 bp, Artificial Sequence
  Oligonucleotide for detection of SNP TSC0061135
acaaaatctaacc

SEQ ID NO: 250407 - DNA, 13 bp, Artificial Sequence
  Oligonucleotide for detection of SNP TSC0061136
aaaaagtgtaata

SEQ ID NO: 250408 - DNA, 13 bp, Artificial Sequence
  Oligonucleotide for detection of SNP TSC0061136
tattacacttttt

SEQ ID NO: 250409 - DNA, 13 bp, Artificial Sequence
  Oligonucleotide for detection of SNP TSC0061136
aaaaagcgtaata

SEQ ID NO: 250410 - DNA, 13 bp, Artificial Sequence
  Oligonucleotide for detection of SNP TSC0061136
tattacgcttttt

SEQ ID NO: 250411 - DNA, 13 bp, Artificial Sequence
  Oligonucleotide for detection of SNP TSC0061139
aggtatatgggtg

SEQ ID NO: 250412 - DNA, 13 bp, Artificial Sequence
  Oligonucleotide for detection of SNP TSC0061139
cacccatatacct

SEQ ID NO: 250413 - DNA, 13 bp, Artificial Sequence
  Oligonucleotide for detection of SNP TSC0061139
aggtatgtgggtg

SEQ ID NO: 250414 - DNA, 13 bp, Artificial Sequence
  Oligonucleotide for detection of SNP TSC0061139
cacccacatacct

SEQ ID NO: 250415 - DNA, 13 bp, Artificial Sequence
  Oligonucleotide for detection of SNP TSC0061139
aggtacgtgggtg

SEQ ID NO: 250416 - DNA, 13 bp, Artificial Sequence
  Oligonucleotide for detection of SNP TSC0061139
cacccacgtacct

SEQ ID NO: 250417 - DNA, 13 bp, Artificial Sequence
  Oligonucleotide for detection of SNP TSC0061140
tttagtaagaagg

SEQ ID NO: 250418 - DNA, 13 bp, Artificial Sequence
  Oligonucleotide for detection of SNP TSC0061140
ccttcttactaaa

SEQ ID NO: 250419 - DNA, 13 bp, Artificial Sequence
  Oligonucleotide for detection of SNP TSC0061140
tttagtgagaagg

SEQ ID NO: 250420 - DNA, 13 bp, Artificial Sequence
  Oligonucleotide for detection of SNP TSC0061140
ccttctcactaaa

SEQ ID NO: 250421 - DNA, 13 bp, Artificial Sequence
  Oligonucleotide for detection of SNP TSC0061142
agataatggttag

SEQ ID NO: 250422 - DNA, 13 bp, Artificial Sequence
  Oligonucleotide for detection of SNP TSC0061142
ctaaccattatct

SEQ ID NO: 250423 - DNA, 13 bp, Artificial Sequence
  Oligonucleotide for detection of SNP TSC0061142
agataacggttag

SEQ ID NO: 250424 - DNA, 13 bp, Artificial Sequence
  Oligonucleotide for detection of SNP TSC0061142
ctaaccgttatct

SEQ ID NO: 250425 - DNA, 13 bp, Artificial Sequence
  Oligonucleotide for detection of SNP TSC0061143
tgtaatattttat

SEQ ID NO: 250426 - DNA, 13 bp, Artificial Sequence
  Oligonucleotide for detection of SNP TSC0061143
ataaaatattaca

SEQ ID NO: 250427 - DNA, 13 bp, Artificial Sequence
  Oligonucleotide for detection of SNP TSC0061143
tgtaatgttttat

SEQ ID NO: 250428 - DNA, 13 bp, Artificial Sequence
  Oligonucleotide for detection of SNP TSC0061143
ataaaacattaca

SEQ ID NO: 250429 - DNA, 13 bp, Artificial Sequence
  Oligonucleotide for detection of SNP TSC0061144
tgttgaatttgta

SEQ ID NO: 250430 - DNA, 13 bp, Artificial Sequence
  Oligonucleotide for detection of SNP TSC0061144
tacaaattcaaca

SEQ ID NO: 250431 - DNA, 13 bp, Artificial Sequence
  Oligonucleotide for detection of SNP TSC0061144
tgttgagtttgta

SEQ ID NO: 250432 - DNA, 13 bp, Artificial Sequence
  Oligonucleotide for detection of SNP TSC0061144
tacaaactcaaca

SEQ ID NO: 250433 - DNA, 13 bp, Artificial Sequence
  Oligonucleotide for detection of SNP TSC0061145
ttatgtatattay

SEQ ID NO: 250434 - DNA, 13 bp, Artificial Sequence
  Oligonucleotide for detection of SNP TSC0061145
rtaatatacataa

SEQ ID NO: 250435 - DNA, 13 bp, Artificial Sequence
  Oligonucleotide for detection of SNP TSC0061145
ttatgtgtattay

SEQ ID NO: 250436 - DNA, 13 bp, Artificial Sequence
  Oligonucleotide for detection of SNP TSC0061145
rtaatacacataa

SEQ ID NO: 250437 - DNA, 13 bp, Artificial Sequence
  Oligonucleotide for detection of SNP TSC0061146
ttatgtatttata

SEQ ID NO: 250438 - DNA, 13 bp, Artificial Sequence
  Oligonucleotide for detection of SNP TSC0061146
tataaatacataa

SEQ ID NO: 250439 - DNA, 13 bp, Artificial Sequence
  Oligonucleotide for detection of SNP TSC0061147
aatatataaatga

SEQ ID NO: 250440 - DNA, 13 bp, Artificial Sequence
  Oligonucleotide for detection of SNP TSC0061147
tcatttatatatt

SEQ ID NO: 250441 - DNA, 13 bp, Artificial Sequence
  Oligonucleotide for detection of SNP TSC0061147
aatatagaaatga

SEQ ID NO: 250442 - DNA, 13 bp, Artificial Sequence
  Oligonucleotide for detection of SNP TSC0061147
tcatttctatatt

SEQ ID NO: 250443 - DNA, 13 bp, Artificial Sequence
  Oligonucleotide for detection of SNP TSC0061147
ttatttatatatt

SEQ ID NO: 250444 - DNA, 13 bp, Artificial Sequence
  Oligonucleotide for detection of SNP TSC0061147
aatatataaataa

SEQ ID NO: 250445 - DNA, 13 bp, Artificial Sequence
  Oligonucleotide for detection of SNP TSC0061147
ttatttttatatt

SEQ ID NO: 250446 - DNA, 13 bp, Artificial Sequence
  Oligonucleotide for detection of SNP TSC0061147
aatataaaaataa

SEQ ID NO: 250447 - DNA, 13 bp, Artificial Sequence
  Oligonucleotide for detection of SNP TSC0061148
ttagaatgagtag

SEQ ID NO: 250448 - DNA, 13 bp, Artificial Sequence
  Oligonucleotide for detection of SNP TSC0061148
ctactcattctaa

SEQ ID NO: 250449 - DNA, 13 bp, Artificial Sequence
  Oligonucleotide for detection of SNP TSC0061148
ttagaacgagtag

SEQ ID NO: 250450 - DNA, 13 bp, Artificial Sequence
  Oligonucleotide for detection of SNP TSC0061148
ctactcgttctaa

SEQ ID NO: 250451 - DNA, 13 bp, Artificial Sequence
  Oligonucleotide for detection of SNP TSC0061149
attttgatattta

SEQ ID NO: 250452 - DNA, 13 bp, Artificial Sequence
  Oligonucleotide for detection of SNP TSC0061149
taaatatcaaaat

SEQ ID NO: 250453 - DNA, 13 bp, Artificial Sequence
  Oligonucleotide for detection of SNP TSC0061149
tgggtattagagt

SEQ ID NO: 250454 - DNA, 13 bp, Artificial Sequence
  Oligonucleotide for detection of SNP TSC0061149
actctaataccca

SEQ ID NO: 250455 - DNA, 13 bp, Artificial Sequence
  Oligonucleotide for detection of SNP TSC0061151
tgtggatgtgtat

SEQ ID NO: 250456 - DNA, 13 bp, Artificial Sequence
  Oligonucleotide for detection of SNP TSC0061151
atacacatccaca

SEQ ID NO: 250457 - DNA, 13 bp, Artificial Sequence
  Oligonucleotide for detection of SNP TSC0061151
tgtggacgtgtat

SEQ ID NO: 250458 - DNA, 13 bp, Artificial Sequence
  Oligonucleotide for detection of SNP TSC0061151
atacacgtccaca

SEQ ID NO: 250459 - DNA, 13 bp, Artificial Sequence
  Oligonucleotide for detection of SNP TSC0061151
atgtatgtttata

SEQ ID NO: 250460 - DNA, 13 bp, Artificial Sequence
  Oligonucleotide for detection of SNP TSC0061151
tataaacatacat

SEQ ID NO: 250461 - DNA, 13 bp, Artificial Sequence
  Oligonucleotide for detection of SNP TSC0061151
atgtacgtttata

SEQ ID NO: 250462 - DNA, 13 bp, Artificial Sequence
  Oligonucleotide for detection of SNP TSC0061151
tataaacgtacat

SEQ ID NO: 250463 - DNA, 13 bp, Artificial Sequence
  Oligonucleotide for detection of SNP TSC0061156
gagttaaaattty

SEQ ID NO: 250464 - DNA, 13 bp, Artificial Sequence
  Oligonucleotide for detection of SNP TSC0061156
raaattttaactc

SEQ ID NO: 250465 - DNA, 13 bp, Artificial Sequence
  Oligonucleotide for detection of SNP TSC0061156
gagttagaattty

SEQ ID NO: 250466 - DNA, 13 bp, Artificial Sequence
  Oligonucleotide for detection of SNP TSC0061156
raaattctaactc

SEQ ID NO: 250467 - DNA, 13 bp, Artificial Sequence
  Oligonucleotide for detection of SNP TSC0061157
aaataatatggat

SEQ ID NO: 250468 - DNA, 13 bp, Artificial Sequence
  Oligonucleotide for detection of SNP TSC0061157
atccatattattt

SEQ ID NO: 250469 - DNA, 13 bp, Artificial Sequence
  Oligonucleotide for detection of SNP TSC0061157
aaataagatggat

SEQ ID NO: 250470 - DNA, 13 bp, Artificial Sequence
  Oligonucleotide for detection of SNP TSC0061157
atccatcttattt

SEQ ID NO: 250471 - DNA, 13 bp, Artificial Sequence
  Oligonucleotide for detection of SNP TSC0061157
atttattttgttt

SEQ ID NO: 250472 - DNA, 13 bp, Artificial Sequence
  Oligonucleotide for detection of SNP TSC0061157
aaacaaaataaat

SEQ ID NO: 250473 - DNA, 13 bp, Artificial Sequence
  Oligonucleotide for detection of SNP TSC0061159
tgtttgaagattt

SEQ ID NO: 250474 - DNA, 13 bp, Artificial Sequence
  Oligonucleotide for detection of SNP TSC0061159
aaatcttcaaaca

SEQ ID NO: 250475 - DNA, 13 bp, Artificial Sequence
  Oligonucleotide for detection of SNP TSC0061159
tgtttggagattt

SEQ ID NO: 250476 - DNA, 13 bp, Artificial Sequence
  Oligonucleotide for detection of SNP TSC0061159
aaatctccaaaca

SEQ ID NO: 250477 - DNA, 13 bp, Artificial Sequence
  Oligonucleotide for detection of SNP TSC0061160
aattttaattagy

SEQ ID NO: 250478 - DNA, 13 bp, Artificial Sequence
  Oligonucleotide for detection of SNP TSC0061160
rctaattaaaatt

SEQ ID NO: 250479 - DNA, 13 bp, Artificial Sequence
  Oligonucleotide for detection of SNP TSC0061160
aatttttattagy

SEQ ID NO: 250480 - DNA, 13 bp, Artificial Sequence
  Oligonucleotide for detection of SNP TSC0061160
rctaataaaaatt

SEQ ID NO: 250481 - DNA, 13 bp, Artificial Sequence
  Oligonucleotide for detection of SNP TSC0061160
gttaattggggtt

SEQ ID NO: 250482 - DNA, 13 bp, Artificial Sequence
  Oligonucleotide for detection of SNP TSC0061160
aaccccaattaac

SEQ ID NO: 250483 - DNA, 13 bp, Artificial Sequence
  Oligonucleotide for detection of SNP TSC0061160
gttaataggggtt

SEQ ID NO: 250484 - DNA, 13 bp, Artificial Sequence
  Oligonucleotide for detection of SNP TSC0061160
aacccctattaac

SEQ ID NO: 250485 - DNA, 13 bp, Artificial Sequence
  Oligonucleotide for detection of SNP TSC0061164
attgataatgtaa

SEQ ID NO: 250486 - DNA, 13 bp, Artificial Sequence
  Oligonucleotide for detection of SNP TSC0061164
ttacattatcaat

SEQ ID NO: 250487 - DNA, 13 bp, Artificial Sequence
  Oligonucleotide for detection of SNP TSC0061164
attgatgatgtaa

SEQ ID NO: 250488 - DNA, 13 bp, Artificial Sequence
  Oligonucleotide for detection of SNP TSC0061164
ttacatcatcaat

SEQ ID NO: 250489 - DNA, 13 bp, Artificial Sequence
  Oligonucleotide for detection of SNP TSC0061164
attgataacgtaa

SEQ ID NO: 250490 - DNA, 13 bp, Artificial Sequence
  Oligonucleotide for detection of SNP TSC0061164
ttacgttatcaat

SEQ ID NO: 250491 - DNA, 13 bp, Artificial Sequence
  Oligonucleotide for detection of SNP TSC0061164
attgatgacgtaa

SEQ ID NO: 250492 - DNA, 13 bp, Artificial Sequence
  Oligonucleotide for detection of SNP TSC0061164
ttacgtcatcaat

SEQ ID NO: 250493 - DNA, 13 bp, Artificial Sequence
  Oligonucleotide for detection of SNP TSC0061165
ataaaagttttty

SEQ ID NO: 250494 - DNA, 13 bp, Artificial Sequence
  Oligonucleotide for detection of SNP TSC0061165
raaaaacttttat

SEQ ID NO: 250495 - DNA, 13 bp, Artificial Sequence
  Oligonucleotide for detection of SNP TSC0061165
ataaaaattttty

SEQ ID NO: 250496 - DNA, 13 bp, Artificial Sequence
  Oligonucleotide for detection of SNP TSC0061165
raaaaatttttat

SEQ ID NO: 250497 - DNA, 13 bp, Artificial Sequence
  Oligonucleotide for detection of SNP TSC0061168
taatatagaaaaa

SEQ ID NO: 250498 - DNA, 13 bp, Artificial Sequence
  Oligonucleotide for detection of SNP TSC0061168
tttttctatatta

SEQ ID NO: 250499 - DNA, 13 bp, Artificial Sequence
  Oligonucleotide for detection of SNP TSC0061168
taatatggaaaaa

SEQ ID NO: 250500 - DNA, 13 bp, Artificial Sequence
  Oligonucleotide for detection of SNP TSC0061168
tttttccatatta

SEQ ID NO: 250501 - DNA, 13 bp, Artificial Sequence
  Oligonucleotide for detection of SNP TSC0061168
taatacggaaaaa

SEQ ID NO: 250502 - DNA, 13 bp, Artificial Sequence
  Oligonucleotide for detection of SNP TSC0061168
tttttccgtatta

SEQ ID NO: 250503 - DNA, 13 bp, Artificial Sequence
  Oligonucleotide for detection of SNP TSC0061169
gtgattgttttag

SEQ ID NO: 250504 - DNA, 13 bp, Artificial Sequence
  Oligonucleotide for detection of SNP TSC0061169
ctaaaacaatcac

SEQ ID NO: 250505 - DNA, 13 bp, Artificial Sequence
  Oligonucleotide for detection of SNP TSC0061169
gtgattattttag

SEQ ID NO: 250506 - DNA, 13 bp, Artificial Sequence
  Oligonucleotide for detection of SNP TSC0061169
ctaaaataatcac

SEQ ID NO: 250507 - DNA, 13 bp, Artificial Sequence
  Oligonucleotide for detection of SNP TSC0061170
ataggatggtagg

SEQ ID NO: 250508 - DNA, 13 bp, Artificial Sequence
  Oligonucleotide for detection of SNP TSC0061170
cctaccatcctat

SEQ ID NO: 250509 - DNA, 13 bp, Artificial Sequence
  Oligonucleotide for detection of SNP TSC0061170
ataggacggtagg

SEQ ID NO: 250510 - DNA, 13 bp, Artificial Sequence
  Oligonucleotide for detection of SNP TSC0061170
cctaccgtcctat

SEQ ID NO: 250511 - DNA, 13 bp, Artificial Sequence
  Oligonucleotide for detection of SNP TSC0061175
aagagtatgtagt

SEQ ID NO: 250512 - DNA, 13 bp, Artificial Sequence
  Oligonucleotide for detection of SNP TSC0061175
actacatactctt

SEQ ID NO: 250513 - DNA, 13 bp, Artificial Sequence
  Oligonucleotide for detection of SNP TSC0061175
aagagtttgtagt

SEQ ID NO: 250514 - DNA, 13 bp, Artificial Sequence
  Oligonucleotide for detection of SNP TSC0061175
actacaaactctt

SEQ ID NO: 250515 - DNA, 13 bp, Artificial Sequence
  Oligonucleotide for detection of SNP TSC0061175
attataagttttt

SEQ ID NO: 250516 - DNA, 13 bp, Artificial Sequence
  Oligonucleotide for detection of SNP TSC0061175
aaaaacttataat

SEQ ID NO: 250517 - DNA, 13 bp, Artificial Sequence
  Oligonucleotide for detection of SNP TSC0061177
ttgaagatttgaa

SEQ ID NO: 250518 - DNA, 13 bp, Artificial Sequence
  Oligonucleotide for detection of SNP TSC0061177
ttcaaatcttcaa

SEQ ID NO: 250519 - DNA, 13 bp, Artificial Sequence
  Oligonucleotide for detection of SNP TSC0061177
ttgaaggtttgaa

SEQ ID NO: 250520 - DNA, 13 bp, Artificial Sequence
  Oligonucleotide for detection of SNP TSC0061177
ttcaaaccttcaa

SEQ ID NO: 250521 - DNA, 13 bp, Artificial Sequence
  Oligonucleotide for detection of SNP TSC0061177
tcgaagatttgaa

SEQ ID NO: 250522 - DNA, 13 bp, Artificial Sequence
  Oligonucleotide for detection of SNP TSC0061177
ttcaaatcttcga

SEQ ID NO: 250523 - DNA, 13 bp, Artificial Sequence
  Oligonucleotide for detection of SNP TSC0061177
tcgaaggtttgaa

SEQ ID NO: 250524 - DNA, 13 bp, Artificial Sequence
  Oligonucleotide for detection of SNP TSC0061177
ttcaaaccttcga

SEQ ID NO: 250525 - DNA, 13 bp, Artificial Sequence
  Oligonucleotide for detection of SNP TSC0061177
ttgaagattcgaa

SEQ ID NO: 250526 - DNA, 13 bp, Artificial Sequence
  Oligonucleotide for detection of SNP TSC0061177
ttcgaatcttcaa

SEQ ID NO: 250527 - DNA, 13 bp, Artificial Sequence
  Oligonucleotide for detection of SNP TSC0061177
ttgaaggttcgaa

SEQ ID NO: 250528 - DNA, 13 bp, Artificial Sequence
  Oligonucleotide for detection of SNP TSC0061177
ttcgaaccttcaa

SEQ ID NO: 250529 - DNA, 13 bp, Artificial Sequence
  Oligonucleotide for detection of SNP TSC0061177
tcgaagattcgaa

SEQ ID NO: 250530 - DNA, 13 bp, Artificial Sequence
  Oligonucleotide for detection of SNP TSC0061177
ttcgaatcttcga

SEQ ID NO: 250531 - DNA, 13 bp, Artificial Sequence
  Oligonucleotide for detection of SNP TSC0061177
tcgaaggttcgaa

SEQ ID NO: 250532 - DNA, 13 bp, Artificial Sequence
  Oligonucleotide for detection of SNP TSC0061177
ttcgaaccttcga

SEQ ID NO: 250533 - DNA, 13 bp, Artificial Sequence
  Oligonucleotide for detection of SNP TSC0007112
aaatatagggaaa

SEQ ID NO: 250534 - DNA, 13 bp, Artificial Sequence
  Oligonucleotide for detection of SNP TSC0007112
tttccctatattt

SEQ ID NO: 250535 - DNA, 13 bp, Artificial Sequence
  Oligonucleotide for detection of SNP TSC0007112
aaatatggggaaa

SEQ ID NO: 250536 - DNA, 13 bp, Artificial Sequence
  Oligonucleotide for detection of SNP TSC0007112
tttccccatattt

SEQ ID NO: 250537 - DNA, 13 bp, Artificial Sequence
  Oligonucleotide for detection of SNP TSC0000856
gagggtaaagtta

SEQ ID NO: 250538 - DNA, 13 bp, Artificial Sequence
  Oligonucleotide for detection of SNP TSC0000856
taactttaccctc

SEQ ID NO: 250539 - DNA, 13 bp, Artificial Sequence
  Oligonucleotide for detection of SNP TSC0000856
gagggtgaagtta

SEQ ID NO: 250540 - DNA, 13 bp, Artificial Sequence
  Oligonucleotide for detection of SNP TSC0000856
taacttcaccctc

SEQ ID NO: 250541 - DNA, 13 bp, Artificial Sequence
  Oligonucleotide for detection of SNP TSC0000856
gagggcgaagtta

SEQ ID NO: 250542 - DNA, 13 bp, Artificial Sequence
  Oligonucleotide for detection of SNP TSC0000856
taacttcgccctc

SEQ ID NO: 250543 - DNA, 13 bp, Artificial Sequence
  Oligonucleotide for detection of SNP TSC0061178
tatttatatatty

SEQ ID NO: 250544 - DNA, 13 bp, Artificial Sequence
  Oligonucleotide for detection of SNP TSC0061178
raatatataaata

SEQ ID NO: 250545 - DNA, 13 bp, Artificial Sequence
  Oligonucleotide for detection of SNP TSC0061178
tatttagatatty

SEQ ID NO: 250546 - DNA, 13 bp, Artificial Sequence
  Oligonucleotide for detection of SNP TSC0061178
raatatctaaata

SEQ ID NO: 250547 - DNA, 13 bp, Artificial Sequence
  Oligonucleotide for detection of SNP TSC0061178
gagtgtatgagtg

SEQ ID NO: 250548 - DNA, 13 bp, Artificial Sequence
  Oligonucleotide for detection of SNP TSC0061178
cactcatacactc

SEQ ID NO: 250549 - DNA, 13 bp, Artificial Sequence
  Oligonucleotide for detection of SNP TSC0061178
gagtgtttgagtg

SEQ ID NO: 250550 - DNA, 13 bp, Artificial Sequence
  Oligonucleotide for detection of SNP TSC0061178
cactcaaacactc

SEQ ID NO: 250551 - DNA, 13 bp, Artificial Sequence
  Oligonucleotide for detection of SNP TSC0061179
atattgtttgtag

SEQ ID NO: 250552 - DNA, 13 bp, Artificial Sequence
  Oligonucleotide for detection of SNP TSC0061179
ctacaaacaatat

SEQ ID NO: 250553 - DNA, 13 bp, Artificial Sequence
  Oligonucleotide for detection of SNP TSC0061179
atattggttgtag

SEQ ID NO: 250554 - DNA, 13 bp, Artificial Sequence
  Oligonucleotide for detection of SNP TSC0061179
ctacaaccaatat

SEQ ID NO: 250555 - DNA, 13 bp, Artificial Sequence
  Oligonucleotide for detection of SNP TSC0061179
ttgtaaataatat

SEQ ID NO: 250556 - DNA, 13 bp, Artificial Sequence
  Oligonucleotide for detection of SNP TSC0061179
atattatttacaa

SEQ ID NO: 250557 - DNA, 13 bp, Artificial Sequence
  Oligonucleotide for detection of SNP TSC0061179
ttgtaattaatat

SEQ ID NO: 250558 - DNA, 13 bp, Artificial Sequence
  Oligonucleotide for detection of SNP TSC0061179
atattaattacaa

SEQ ID NO: 250559 - DNA, 13 bp, Artificial Sequence
  Oligonucleotide for detection of SNP TSC0061180
gtataagaattga

SEQ ID NO: 250560 - DNA, 13 bp, Artificial Sequence
  Oligonucleotide for detection of SNP TSC0061180
tcaattcttatac

SEQ ID NO: 250561 - DNA, 13 bp, Artificial Sequence
  Oligonucleotide for detection of SNP TSC0061180
gtataaaaattga

SEQ ID NO: 250562 - DNA, 13 bp, Artificial Sequence
  Oligonucleotide for detection of SNP TSC0061180
tcaatttttatac

SEQ ID NO: 250563 - DNA, 13 bp, Artificial Sequence
  Oligonucleotide for detection of SNP TSC0061180
gtataagaatcga

SEQ ID NO: 250564 - DNA, 13 bp, Artificial Sequence
  Oligonucleotide for detection of SNP TSC0061180
tcgattcttatac

SEQ ID NO: 250565 - DNA, 13 bp, Artificial Sequence
  Oligonucleotide for detection of SNP TSC0061180
gtataaaaatcga

SEQ ID NO: 250566 - DNA, 13 bp, Artificial Sequence
  Oligonucleotide for detection of SNP TSC0061180
tcgatttttatac

SEQ ID NO: 250567 - DNA, 13 bp, Artificial Sequence
  Oligonucleotide for detection of SNP TSC0061182
atgtatgaggaga

SEQ ID NO: 250568 - DNA, 13 bp, Artificial Sequence
  Oligonucleotide for detection of SNP TSC0061182
tctcctcatacat

SEQ ID NO: 250569 - DNA, 13 bp, Artificial Sequence
  Oligonucleotide for detection of SNP TSC0061182
atgtataaggaga

SEQ ID NO: 250570 - DNA, 13 bp, Artificial Sequence
  Oligonucleotide for detection of SNP TSC0061182
tctccttatacat

SEQ ID NO: 250571 - DNA, 13 bp, Artificial Sequence
  Oligonucleotide for detection of SNP TSC0061182
atgtacgaggaga

SEQ ID NO: 250572 - DNA, 13 bp, Artificial Sequence
  Oligonucleotide for detection of SNP TSC0061182
tctcctcgtacat

SEQ ID NO: 250573 - DNA, 13 bp, Artificial Sequence
  Oligonucleotide for detection of SNP TSC0061184
agaatatgagtaa

SEQ ID NO: 250574 - DNA, 13 bp, Artificial Sequence
  Oligonucleotide for detection of SNP TSC0061184
ttactcatattct

SEQ ID NO: 250575 - DNA, 13 bp, Artificial Sequence
  Oligonucleotide for detection of SNP TSC0061184
agaataggagtaa

SEQ ID NO: 250576 - DNA, 13 bp, Artificial Sequence
  Oligonucleotide for detection of SNP TSC0061184
ttactcctattct

SEQ ID NO: 250577 - DNA, 13 bp, Artificial Sequence
  Oligonucleotide for detection of SNP TSC0061188
tgttttttagtta

SEQ ID NO: 250578 - DNA, 13 bp, Artificial Sequence
  Oligonucleotide for detection of SNP TSC0061188
taactaaaaaaca

SEQ ID NO: 250579 - DNA, 13 bp, Artificial Sequence
  Oligonucleotide for detection of SNP TSC0061188
tgttttgtagtta

SEQ ID NO: 250580 - DNA, 13 bp, Artificial Sequence
  Oligonucleotide for detection of SNP TSC0061188
taactacaaaaca

SEQ ID NO: 250581 - DNA, 13 bp, Artificial Sequence
  Oligonucleotide for detection of SNP TSC0061188
tgtttcgtagtta

SEQ ID NO: 250582 - DNA, 13 bp, Artificial Sequence
  Oligonucleotide for detection of SNP TSC0061188
taactacgaaaca

SEQ ID NO: 250583 - DNA, 13 bp, Artificial Sequence
  Oligonucleotide for detection of SNP TSC0061188
taattgagaagta

SEQ ID NO: 250584 - DNA, 13 bp, Artificial Sequence
  Oligonucleotide for detection of SNP TSC0061188
tacttctcaatta

SEQ ID NO: 250585 - DNA, 13 bp, Artificial Sequence
  Oligonucleotide for detection of SNP TSC0061188
taattgtgaagta

SEQ ID NO: 250586 - DNA, 13 bp, Artificial Sequence
  Oligonucleotide for detection of SNP TSC0061188
tacttcacaatta

SEQ ID NO: 250587 - DNA, 13 bp, Artificial Sequence
  Oligonucleotide for detection of SNP TSC0061188
taattgcgaagta

SEQ ID NO: 250588 - DNA, 13 bp, Artificial Sequence
  Oligonucleotide for detection of SNP TSC0061188
tacttcgcaatta

SEQ ID NO: 250589 - DNA, 13 bp, Artificial Sequence
  Oligonucleotide for detection of SNP TSC0061191
gggtataaaagtg

SEQ ID NO: 250590 - DNA, 13 bp, Artificial Sequence
  Oligonucleotide for detection of SNP TSC0061191
cacttttataccc

SEQ ID NO: 250591 - DNA, 13 bp, Artificial Sequence
  Oligonucleotide for detection of SNP TSC0061191
gggtattaaagtg

SEQ ID NO: 250592 - DNA, 13 bp, Artificial Sequence
  Oligonucleotide for detection of SNP TSC0061191
cactttaataccc

SEQ ID NO: 250593 - DNA, 13 bp, Artificial Sequence
  Oligonucleotide for detection of SNP TSC0061192
gtagggaagggag

SEQ ID NO: 250594 - DNA, 13 bp, Artificial Sequence
  Oligonucleotide for detection of SNP TSC0061192
ctcccttccctac

SEQ ID NO: 250595 - DNA, 13 bp, Artificial Sequence
  Oligonucleotide for detection of SNP TSC0061192
gtagggtagggag

SEQ ID NO: 250596 - DNA, 13 bp, Artificial Sequence
  Oligonucleotide for detection of SNP TSC0061192
ctccctaccctac

SEQ ID NO: 250597 - DNA, 13 bp, Artificial Sequence
  Oligonucleotide for detection of SNP TSC0061193
atattgaatgggg

SEQ ID NO: 250598 - DNA, 13 bp, Artificial Sequence
  Oligonucleotide for detection of SNP TSC0061193
ccccattcaatat

SEQ ID NO: 250599 - DNA, 13 bp, Artificial Sequence
  Oligonucleotide for detection of SNP TSC0061193
atattgtatgggg

SEQ ID NO: 250600 - DNA, 13 bp, Artificial Sequence
  Oligonucleotide for detection of SNP TSC0061193
ccccatacaatat

SEQ ID NO: 250601 - DNA, 13 bp, Artificial Sequence
  Oligonucleotide for detection of SNP TSC0061193
ttttatttaatgt

SEQ ID NO: 250602 - DNA, 13 bp, Artificial Sequence
  Oligonucleotide for detection of SNP TSC0061193
acattaaataaaa

SEQ ID NO: 250603 - DNA, 13 bp, Artificial Sequence
  Oligonucleotide for detection of SNP TSC0061193
ttttatataatgt

SEQ ID NO: 250604 - DNA, 13 bp, Artificial Sequence
  Oligonucleotide for detection of SNP TSC0061193
acattatataaaa

SEQ ID NO: 250605 - DNA, 13 bp, Artificial Sequence
  Oligonucleotide for detection of SNP TSC0061194
tggtattattttg

SEQ ID NO: 250606 - DNA, 13 bp, Artificial Sequence
  Oligonucleotide for detection of SNP TSC0061194
caaaataatacca

SEQ ID NO: 250607 - DNA, 13 bp, Artificial Sequence
  Oligonucleotide for detection of SNP TSC0061194
taagatagtgtta

SEQ ID NO: 250608 - DNA, 13 bp, Artificial Sequence
  Oligonucleotide for detection of SNP TSC0061194
taacactatctta

SEQ ID NO: 250609 - DNA, 13 bp, Artificial Sequence
  Oligonucleotide for detection of SNP TSC0061195
gaagtaggatata

SEQ ID NO: 250610 - DNA, 13 bp, Artificial Sequence
  Oligonucleotide for detection of SNP TSC0061195
tatatcctacttc

SEQ ID NO: 250611 - DNA, 13 bp, Artificial Sequence
  Oligonucleotide for detection of SNP TSC0061195
gaagtaagatata

SEQ ID NO: 250612 - DNA, 13 bp, Artificial Sequence
  Oligonucleotide for detection of SNP TSC0061195
tatatcttacttc

SEQ ID NO: 250613 - DNA, 13 bp, Artificial Sequence
  Oligonucleotide for detection of SNP TSC0061196
agtgtagtatttt

SEQ ID NO: 250614 - DNA, 13 bp, Artificial Sequence
  Oligonucleotide for detection of SNP TSC0061196
aaaatactacact

SEQ ID NO: 250615 - DNA, 13 bp, Artificial Sequence
  Oligonucleotide for detection of SNP TSC0061196
agtgtaatatttt

SEQ ID NO: 250616 - DNA, 13 bp, Artificial Sequence
  Oligonucleotide for detection of SNP TSC0061196
aaaatattacact

SEQ ID NO: 250617 - DNA, 13 bp, Artificial Sequence
  Oligonucleotide for detection of SNP TSC0061197
ggaaatggtattt

SEQ ID NO: 250618 - DNA, 13 bp, Artificial Sequence
  Oligonucleotide for detection of SNP TSC0061197
aaataccatttcc

SEQ ID NO: 250619 - DNA, 13 bp, Artificial Sequence
  Oligonucleotide for detection of SNP TSC0061199
attttttgaaggt

SEQ ID NO: 250620 - DNA, 13 bp, Artificial Sequence
  Oligonucleotide for detection of SNP TSC0061199
accttcaaaaaat

SEQ ID NO: 250621 - DNA, 13 bp, Artificial Sequence
  Oligonucleotide for detection of SNP TSC0061199
atttttcgaaggt

SEQ ID NO: 250622 - DNA, 13 bp, Artificial Sequence
  Oligonucleotide for detection of SNP TSC0061199
accttcgaaaaat

SEQ ID NO: 250623 - DNA, 13 bp, Artificial Sequence
  Oligonucleotide for detection of SNP TSC0061199
atttttggggaat

SEQ ID NO: 250624 - DNA, 13 bp, Artificial Sequence
  Oligonucleotide for detection of SNP TSC0061199
attccccaaaaat

SEQ ID NO: 250625 - DNA, 13 bp, Artificial Sequence
  Oligonucleotide for detection of SNP TSC0061199
atttttagggaat

SEQ ID NO: 250626 - DNA, 13 bp, Artificial Sequence
  Oligonucleotide for detection of SNP TSC0061199
attccctaaaaat

SEQ ID NO: 250627 - DNA, 13 bp, Artificial Sequence
  Oligonucleotide for detection of SNP TSC0061199
attttcggggaat

SEQ ID NO: 250628 - DNA, 13 bp, Artificial Sequence
  Oligonucleotide for detection of SNP TSC0061199
attccccgaaaat

SEQ ID NO: 250629 - DNA, 13 bp, Artificial Sequence
  Oligonucleotide for detection of SNP TSC0061200
taaggtagtttgg

SEQ ID NO: 250630 - DNA, 13 bp, Artificial Sequence
  Oligonucleotide for detection of SNP TSC0061200
ccaaactacctta

SEQ ID NO: 250631 - DNA, 13 bp, Artificial Sequence
  Oligonucleotide for detection of SNP TSC0061200
taaggttgtttgg

SEQ ID NO: 250632 - DNA, 13 bp, Artificial Sequence
  Oligonucleotide for detection of SNP TSC0061200
ccaaacaacctta

SEQ ID NO: 250633 - DNA, 13 bp, Artificial Sequence
  Oligonucleotide for detection of SNP TSC0061201
ggagtatgggtta

SEQ ID NO: 250634 - DNA, 13 bp, Artificial Sequence
  Oligonucleotide for detection of SNP TSC0061201
taacccatactcc

SEQ ID NO: 250635 - DNA, 13 bp, Artificial Sequence
  Oligonucleotide for detection of SNP TSC0061201
ggagtacgggtta

SEQ ID NO: 250636 - DNA, 13 bp, Artificial Sequence
  Oligonucleotide for detection of SNP TSC0061201
taacccgtactcc

SEQ ID NO: 250637 - DNA, 13 bp, Artificial Sequence
  Oligonucleotide for detection of SNP TSC0061202
tgaaaaaaattgg

SEQ ID NO: 250638 - DNA, 13 bp, Artificial Sequence
  Oligonucleotide for detection of SNP TSC0061202
ccaatttttttca

SEQ ID NO: 250639 - DNA, 13 bp, Artificial Sequence
  Oligonucleotide for detection of SNP TSC0061202
tgaaaataattgg

SEQ ID NO: 250640 - DNA, 13 bp, Artificial Sequence
  Oligonucleotide for detection of SNP TSC0061202
ccaattattttca

SEQ ID NO: 250641 - DNA, 13 bp, Artificial Sequence
  Oligonucleotide for detection of SNP TSC0061202
ttaatttttttta

SEQ ID NO: 250642 - DNA, 13 bp, Artificial Sequence
  Oligonucleotide for detection of SNP TSC0061202
taaaaaaaattaa

SEQ ID NO: 250643 - DNA, 13 bp, Artificial Sequence
  Oligonucleotide for detection of SNP TSC0061204
gtggtagaggtag

SEQ ID NO: 250644 - DNA, 13 bp, Artificial Sequence
  Oligonucleotide for detection of SNP TSC0061204
ctacctctaccac

SEQ ID NO: 250645 - DNA, 13 bp, Artificial Sequence
  Oligonucleotide for detection of SNP TSC0061204
gtggtaaaggtag

SEQ ID NO: 250646 - DNA, 13 bp, Artificial Sequence
  Oligonucleotide for detection of SNP TSC0061204
ctacctttaccac

SEQ ID NO: 250647 - DNA, 13 bp, Artificial Sequence
  Oligonucleotide for detection of SNP TSC0008732
ttagttgggtgta

SEQ ID NO: 250648 - DNA, 13 bp, Artificial Sequence
  Oligonucleotide for detection of SNP TSC0008732
tacacccaactaa

SEQ ID NO: 250649 - DNA, 13 bp, Artificial Sequence
  Oligonucleotide for detection of SNP TSC0008732
ttagttaggtgta

SEQ ID NO: 250650 - DNA, 13 bp, Artificial Sequence
  Oligonucleotide for detection of SNP TSC0008732
tacacctaactaa

SEQ ID NO: 250651 - DNA, 13 bp, Artificial Sequence
  Oligonucleotide for detection of SNP TSC0008732
ttagtcgggtgta

SEQ ID NO: 250652 - DNA, 13 bp, Artificial Sequence
  Oligonucleotide for detection of SNP TSC0008732
tacacccgactaa

SEQ ID NO: 250653 - DNA, 13 bp, Artificial Sequence
  Oligonucleotide for detection of SNP TSC0008732
ttagttaggcgta

SEQ ID NO: 250654 - DNA, 13 bp, Artificial Sequence
  Oligonucleotide for detection of SNP TSC0008732
tacgcctaactaa

SEQ ID NO: 250655 - DNA, 13 bp, Artificial Sequence
  Oligonucleotide for detection of SNP TSC0008732
ttagttgggcgta

SEQ ID NO: 250656 - DNA, 13 bp, Artificial Sequence
  Oligonucleotide for detection of SNP TSC0008732
tacgcccaactaa

SEQ ID NO: 250657 - DNA, 13 bp, Artificial Sequence
  Oligonucleotide for detection of SNP TSC0008732
ttagtcgggcgta

SEQ ID NO: 250658 - DNA, 13 bp, Artificial Sequence
  Oligonucleotide for detection of SNP TSC0008732
tacgcccgactaa

SEQ ID NO: 250659 - DNA, 13 bp, Artificial Sequence
  Oligonucleotide for detection of SNP TSC0061205
agttttcgttaaa

SEQ ID NO: 250660 - DNA, 13 bp, Artificial Sequence
  Oligonucleotide for detection of SNP TSC0061205
tttaacgaaaact

SEQ ID NO: 250661 - DNA, 13 bp, Artificial Sequence
  Oligonucleotide for detection of SNP TSC0061205
tttaatgaaaatt

SEQ ID NO: 250662 - DNA, 13 bp, Artificial Sequence
  Oligonucleotide for detection of SNP TSC0061205
aattttcattaaa

SEQ ID NO: 250663 - DNA, 13 bp, Artificial Sequence
  Oligonucleotide for detection of SNP TSC0061205
tttaacgaaaatt

SEQ ID NO: 250664 - DNA, 13 bp, Artificial Sequence
  Oligonucleotide for detection of SNP TSC0061205
aattttcgttaaa

SEQ ID NO: 250665 - DNA, 13 bp, Artificial Sequence
  Oligonucleotide for detection of SNP TSC0061206
taaattatttgtt

SEQ ID NO: 250666 - DNA, 13 bp, Artificial Sequence
  Oligonucleotide for detection of SNP TSC0061206
aacaaataattta

SEQ ID NO: 250667 - DNA, 13 bp, Artificial Sequence
  Oligonucleotide for detection of SNP TSC0061206
taaattttttgtt

SEQ ID NO: 250668 - DNA, 13 bp, Artificial Sequence
  Oligonucleotide for detection of SNP TSC0061206
aacaaaaaattta

SEQ ID NO: 250669 - DNA, 13 bp, Artificial Sequence
  Oligonucleotide for detection of SNP TSC0061206
agtaaataattta

SEQ ID NO: 250670 - DNA, 13 bp, Artificial Sequence
  Oligonucleotide for detection of SNP TSC0061206
taaattatttact

SEQ ID NO: 250671 - DNA, 13 bp, Artificial Sequence
  Oligonucleotide for detection of SNP TSC0061206
agtaaagaattta

SEQ ID NO: 250672 - DNA, 13 bp, Artificial Sequence
  Oligonucleotide for detection of SNP TSC0061206
taaattctttact

SEQ ID NO: 250673 - DNA, 13 bp, Artificial Sequence
  Oligonucleotide for detection of SNP TSC0061207
gaattattttttt

SEQ ID NO: 250674 - DNA, 13 bp, Artificial Sequence
  Oligonucleotide for detection of SNP TSC0061207
aaaaaaataattc

SEQ ID NO: 250675 - DNA, 13 bp, Artificial Sequence
  Oligonucleotide for detection of SNP TSC0061207
agaaaaataatty

SEQ ID NO: 250676 - DNA, 13 bp, Artificial Sequence
  Oligonucleotide for detection of SNP TSC0061207
raattatttttct

SEQ ID NO: 250677 - DNA, 13 bp, Artificial Sequence
  Oligonucleotide for detection of SNP TSC0061207
agaaaattaatty

SEQ ID NO: 250678 - DNA, 13 bp, Artificial Sequence
  Oligonucleotide for detection of SNP TSC0061207
raattaattttct

SEQ ID NO: 250679 - DNA, 13 bp, Artificial Sequence
  Oligonucleotide for detection of SNP TSC0061210
ggtatgaaatgaa

SEQ ID NO: 250680 - DNA, 13 bp, Artificial Sequence
  Oligonucleotide for detection of SNP TSC0061210
ttcatttcatacc

SEQ ID NO: 250681 - DNA, 13 bp, Artificial Sequence
  Oligonucleotide for detection of SNP TSC0061210
ggtatggaatgaa

SEQ ID NO: 250682 - DNA, 13 bp, Artificial Sequence
  Oligonucleotide for detection of SNP TSC0061210
ttcattccatacc

SEQ ID NO: 250683 - DNA, 13 bp, Artificial Sequence
  Oligonucleotide for detection of SNP TSC0061210
ggtatgaaacgaa

SEQ ID NO: 250684 - DNA, 13 bp, Artificial Sequence
  Oligonucleotide for detection of SNP TSC0061210
ttcgtttcatacc

SEQ ID NO: 250685 - DNA, 13 bp, Artificial Sequence
  Oligonucleotide for detection of SNP TSC0061210
ggtatggaacgaa

SEQ ID NO: 250686 - DNA, 13 bp, Artificial Sequence
  Oligonucleotide for detection of SNP TSC0061210
ttcgttccatacc

SEQ ID NO: 250687 - DNA, 13 bp, Artificial Sequence
  Oligonucleotide for detection of SNP TSC0061211
ggaagatgaagat

SEQ ID NO: 250688 - DNA, 13 bp, Artificial Sequence
  Oligonucleotide for detection of SNP TSC0061211
atcttcatcttcc

SEQ ID NO: 250689 - DNA, 13 bp, Artificial Sequence
  Oligonucleotide for detection of SNP TSC0061211
ggaagacgaagat

SEQ ID NO: 250690 - DNA, 13 bp, Artificial Sequence
  Oligonucleotide for detection of SNP TSC0061211
atcttcgtcttcc

SEQ ID NO: 250691 - DNA, 13 bp, Artificial Sequence
  Oligonucleotide for detection of SNP TSC0061212
aaagaattttgtg

SEQ ID NO: 250692 - DNA, 13 bp, Artificial Sequence
  Oligonucleotide for detection of SNP TSC0061212
cacaaaattcttt

SEQ ID NO: 250693 - DNA, 13 bp, Artificial Sequence
  Oligonucleotide for detection of SNP TSC0061212
aaagaagtttgtg

SEQ ID NO: 250694 - DNA, 13 bp, Artificial Sequence
  Oligonucleotide for detection of SNP TSC0061212
cacaaacttcttt

SEQ ID NO: 250695 - DNA, 13 bp, Artificial Sequence
  Oligonucleotide for detection of SNP TSC0061212
tatagagtttttt

SEQ ID NO: 250696 - DNA, 13 bp, Artificial Sequence
  Oligonucleotide for detection of SNP TSC0061212
aaaaaactctata

SEQ ID NO: 250697 - DNA, 13 bp, Artificial Sequence
  Oligonucleotide for detection of SNP TSC0061212
tatagattttttt

SEQ ID NO: 250698 - DNA, 13 bp, Artificial Sequence
  Oligonucleotide for detection of SNP TSC0061212
aaaaaaatctata

SEQ ID NO: 250699 - DNA, 13 bp, Artificial Sequence
  Oligonucleotide for detection of SNP TSC0061213
attggattttgtt

SEQ ID NO: 250700 - DNA, 13 bp, Artificial Sequence
  Oligonucleotide for detection of SNP TSC0061213
aacaaaatccaat

SEQ ID NO: 250701 - DNA, 13 bp, Artificial Sequence
  Oligonucleotide for detection of SNP TSC0061213
attggagtttgtt

SEQ ID NO: 250702 - DNA, 13 bp, Artificial Sequence
  Oligonucleotide for detection of SNP TSC0061213
aacaaactccaat

SEQ ID NO: 250703 - DNA, 13 bp, Artificial Sequence
  Oligonucleotide for detection of SNP TSC0061213
aatagagtttaat

SEQ ID NO: 250704 - DNA, 13 bp, Artificial Sequence
  Oligonucleotide for detection of SNP TSC0061213
attaaactctatt

SEQ ID NO: 250705 - DNA, 13 bp, Artificial Sequence
  Oligonucleotide for detection of SNP TSC0061213
aatagattttaat

SEQ ID NO: 250706 - DNA, 13 bp, Artificial Sequence
  Oligonucleotide for detection of SNP TSC0061213
attaaaatctatt

SEQ ID NO: 250707 - DNA, 13 bp, Artificial Sequence
  Oligonucleotide for detection of SNP TSC0010309
ttgataaaattta

SEQ ID NO: 250708 - DNA, 13 bp, Artificial Sequence
  Oligonucleotide for detection of SNP TSC0010309
taaattttatcaa

SEQ ID NO: 250709 - DNA, 13 bp, Artificial Sequence
  Oligonucleotide for detection of SNP TSC0010309
ttgatagaattta

SEQ ID NO: 250710 - DNA, 13 bp, Artificial Sequence
  Oligonucleotide for detection of SNP TSC0010309
taaattctatcaa

SEQ ID NO: 250711 - DNA, 13 bp, Artificial Sequence
  Oligonucleotide for detection of SNP TSC0007062
taatagtaaattt

SEQ ID NO: 250712 - DNA, 13 bp, Artificial Sequence
  Oligonucleotide for detection of SNP TSC0007062
aaatttactatta

SEQ ID NO: 250713 - DNA, 13 bp, Artificial Sequence
  Oligonucleotide for detection of SNP TSC0007062
taataggaaattt

SEQ ID NO: 250714 - DNA, 13 bp, Artificial Sequence
  Oligonucleotide for detection of SNP TSC0007062
aaatttcctatta

SEQ ID NO: 250715 - DNA, 13 bp, Artificial Sequence
  Oligonucleotide for detection of SNP TSC0007062
agatttgttgtta

SEQ ID NO: 250716 - DNA, 13 bp, Artificial Sequence
  Oligonucleotide for detection of SNP TSC0007062
taacaacaaatct

SEQ ID NO: 250717 - DNA, 13 bp, Artificial Sequence
  Oligonucleotide for detection of SNP TSC0007062
agattttttgtta

SEQ ID NO: 250718 - DNA, 13 bp, Artificial Sequence
  Oligonucleotide for detection of SNP TSC0007062
taacaaaaaatct

SEQ ID NO: 250719 - DNA, 13 bp, Artificial Sequence
  Oligonucleotide for detection of SNP TSC0007064
atgatatttttty

SEQ ID NO: 250720 - DNA, 13 bp, Artificial Sequence
  Oligonucleotide for detection of SNP TSC0007064
raaaaaatatcat

SEQ ID NO: 250721 - DNA, 13 bp, Artificial Sequence
  Oligonucleotide for detection of SNP TSC0007064
gaaaaggtgttat

SEQ ID NO: 250722 - DNA, 13 bp, Artificial Sequence
  Oligonucleotide for detection of SNP TSC0007064
ataacaccttttc

SEQ ID NO: 250723 - DNA, 13 bp, Artificial Sequence
  Oligonucleotide for detection of SNP TSC0007064
gaaaagttgttat

SEQ ID NO: 250724 - DNA, 13 bp, Artificial Sequence
  Oligonucleotide for detection of SNP TSC0007064
ataacaacttttc

SEQ ID NO: 250725 - DNA, 13 bp, Artificial Sequence
  Oligonucleotide for detection of SNP TSC0061216
gggttgaaaaata

SEQ ID NO: 250726 - DNA, 13 bp, Artificial Sequence
  Oligonucleotide for detection of SNP TSC0061216
tatttttcaaccc

SEQ ID NO: 250727 - DNA, 13 bp, Artificial Sequence
  Oligonucleotide for detection of SNP TSC0061216
gggttggaaaata

SEQ ID NO: 250728 - DNA, 13 bp, Artificial Sequence
  Oligonucleotide for detection of SNP TSC0061216
tattttccaaccc

SEQ ID NO: 250729 - DNA, 13 bp, Artificial Sequence
  Oligonucleotide for detection of SNP TSC0005976
attaatgattgaa

SEQ ID NO: 250730 - DNA, 13 bp, Artificial Sequence
  Oligonucleotide for detection of SNP TSC0005976
ttcaatcattaat

SEQ ID NO: 250731 - DNA, 13 bp, Artificial Sequence
  Oligonucleotide for detection of SNP TSC0005976
attaataattgaa

SEQ ID NO: 250732 - DNA, 13 bp, Artificial Sequence
  Oligonucleotide for detection of SNP TSC0005976
ttcaattattaat

SEQ ID NO: 250733 - DNA, 13 bp, Artificial Sequence
  Oligonucleotide for detection of SNP TSC0061217
aaataaggttgtt

SEQ ID NO: 250734 - DNA, 13 bp, Artificial Sequence
  Oligonucleotide for detection of SNP TSC0061217
aacaaccttattt

SEQ ID NO: 250735 - DNA, 13 bp, Artificial Sequence
  Oligonucleotide for detection of SNP TSC0061217
aaataaagttgtt

SEQ ID NO: 250736 - DNA, 13 bp, Artificial Sequence
  Oligonucleotide for detection of SNP TSC0061217
aacaactttattt

SEQ ID NO: 250737 - DNA, 13 bp, Artificial Sequence
  Oligonucleotide for detection of SNP TSC0061218
aaaataataagga

SEQ ID NO: 250738 - DNA, 13 bp, Artificial Sequence
  Oligonucleotide for detection of SNP TSC0061218
tccttattatttt

SEQ ID NO: 250739 - DNA, 13 bp, Artificial Sequence
  Oligonucleotide for detection of SNP TSC0061218
aaaatagtaagga

SEQ ID NO: 250740 - DNA, 13 bp, Artificial Sequence
  Oligonucleotide for detection of SNP TSC0061218
tccttactatttt

SEQ ID NO: 250741 - DNA, 13 bp, Artificial Sequence
  Oligonucleotide for detection of SNP TSC0005667
gttttgattagat

SEQ ID NO: 250742 - DNA, 13 bp, Artificial Sequence
  Oligonucleotide for detection of SNP TSC0005667
atctaatcaaaac

SEQ ID NO: 250743 - DNA, 13 bp, Artificial Sequence
  Oligonucleotide for detection of SNP TSC0005667
gttttggttagat

SEQ ID NO: 250744 - DNA, 13 bp, Artificial Sequence
  Oligonucleotide for detection of SNP TSC0005667
atctaaccaaaac

SEQ ID NO: 250745 - DNA, 13 bp, Artificial Sequence
  Oligonucleotide for detection of SNP TSC0005668
gtttgttttttga

SEQ ID NO: 250746 - DNA, 13 bp, Artificial Sequence
  Oligonucleotide for detection of SNP TSC0005668
tcaaaaaacaaac

SEQ ID NO: 250747 - DNA, 13 bp, Artificial Sequence
  Oligonucleotide for detection of SNP TSC0005668
gtttgtgttttga

SEQ ID NO: 250748 - DNA, 13 bp, Artificial Sequence
  Oligonucleotide for detection of SNP TSC0005668
tcaaaacacaaac

SEQ ID NO: 250749 - DNA, 13 bp, Artificial Sequence
  Oligonucleotide for detection of SNP TSC0005668
ttaagagatagay

SEQ ID NO: 250750 - DNA, 13 bp, Artificial Sequence
  Oligonucleotide for detection of SNP TSC0005668
rtctatctcttaa

SEQ ID NO: 250751 - DNA, 13 bp, Artificial Sequence
  Oligonucleotide for detection of SNP TSC0005668
ttaagatatagay

SEQ ID NO: 250752 - DNA, 13 bp, Artificial Sequence
  Oligonucleotide for detection of SNP TSC0005668
rtctatatcttaa

SEQ ID NO: 250753 - DNA, 13 bp, Artificial Sequence
  Oligonucleotide for detection of SNP TSC0005669
ttatgatgagaag

SEQ ID NO: 250754 - DNA, 13 bp, Artificial Sequence
  Oligonucleotide for detection of SNP TSC0005669
cttctcatcataa

SEQ ID NO: 250755 - DNA, 13 bp, Artificial Sequence
  Oligonucleotide for detection of SNP TSC0005669
ttatgacgagaag

SEQ ID NO: 250756 - DNA, 13 bp, Artificial Sequence
  Oligonucleotide for detection of SNP TSC0005669
cttctcgtcataa

SEQ ID NO: 250757 - DNA, 13 bp, Artificial Sequence
  Oligonucleotide for detection of SNP TSC0061219
taagagagttttg

SEQ ID NO: 250758 - DNA, 13 bp, Artificial Sequence
  Oligonucleotide for detection of SNP TSC0061219
caaaactctctta

SEQ ID NO: 250759 - DNA, 13 bp, Artificial Sequence
  Oligonucleotide for detection of SNP TSC0061219
taagagtgttttg

SEQ ID NO: 250760 - DNA, 13 bp, Artificial Sequence
  Oligonucleotide for detection of SNP TSC0061219
caaaacactctta

SEQ ID NO: 250761 - DNA, 13 bp, Artificial Sequence
  Oligonucleotide for detection of SNP TSC0061219
taagagcgttttg

SEQ ID NO: 250762 - DNA, 13 bp, Artificial Sequence
  Oligonucleotide for detection of SNP TSC0061219
caaaacgctctta

SEQ ID NO: 250763 - DNA, 13 bp, Artificial Sequence
  Oligonucleotide for detection of SNP TSC0061219
tagggtttttttg

SEQ ID NO: 250764 - DNA, 13 bp, Artificial Sequence
  Oligonucleotide for detection of SNP TSC0061219
caaaaaaacccta

SEQ ID NO: 250765 - DNA, 13 bp, Artificial Sequence
  Oligonucleotide for detection of SNP TSC0061219
tagggtgtttttg

SEQ ID NO: 250766 - DNA, 13 bp, Artificial Sequence
  Oligonucleotide for detection of SNP TSC0061219
caaaaacacccta

SEQ ID NO: 250767 - DNA, 13 bp, Artificial Sequence
  Oligonucleotide for detection of SNP TSC0061219
tagggcgtttttg

SEQ ID NO: 250768 - DNA, 13 bp, Artificial Sequence
  Oligonucleotide for detection of SNP TSC0061219
caaaaacgcccta

SEQ ID NO: 250769 - DNA, 13 bp, Artificial Sequence
  Oligonucleotide for detection of SNP TSC0061223
aaaagggaaattg

SEQ ID NO: 250770 - DNA, 13 bp, Artificial Sequence
  Oligonucleotide for detection of SNP TSC0061223
caatttccctttt

SEQ ID NO: 250771 - DNA, 13 bp, Artificial Sequence
  Oligonucleotide for detection of SNP TSC0061223
aaaaggaaaattg

SEQ ID NO: 250772 - DNA, 13 bp, Artificial Sequence
  Oligonucleotide for detection of SNP TSC0061223
caattttcctttt

SEQ ID NO: 250773 - DNA, 13 bp, Artificial Sequence
  Oligonucleotide for detection of SNP TSC0061224
ggtaagaaggata

SEQ ID NO: 250774 - DNA, 13 bp, Artificial Sequence
  Oligonucleotide for detection of SNP TSC0061224
tatccttcttacc

SEQ ID NO: 250775 - DNA, 13 bp, Artificial Sequence
  Oligonucleotide for detection of SNP TSC0061224
ggtaagtaggata

SEQ ID NO: 250776 - DNA, 13 bp, Artificial Sequence
  Oligonucleotide for detection of SNP TSC0061224
tatcctacttacc

SEQ ID NO: 250777 - DNA, 13 bp, Artificial Sequence
  Oligonucleotide for detection of SNP TSC0061225
tggaggtaatagt

SEQ ID NO: 250778 - DNA, 13 bp, Artificial Sequence
  Oligonucleotide for detection of SNP TSC0061225
actattacctcca

SEQ ID NO: 250779 - DNA, 13 bp, Artificial Sequence
  Oligonucleotide for detection of SNP TSC0061225
tggagggaatagt

SEQ ID NO: 250780 - DNA, 13 bp, Artificial Sequence
  Oligonucleotide for detection of SNP TSC0061225
actattccctcca

SEQ ID NO: 250781 - DNA, 13 bp, Artificial Sequence
  Oligonucleotide for detection of SNP TSC0061226
tgttggaaagttg

SEQ ID NO: 250782 - DNA, 13 bp, Artificial Sequence
  Oligonucleotide for detection of SNP TSC0061226
caactttccaaca

SEQ ID NO: 250783 - DNA, 13 bp, Artificial Sequence
  Oligonucleotide for detection of SNP TSC0061226
tgttggtaagttg

SEQ ID NO: 250784 - DNA, 13 bp, Artificial Sequence
  Oligonucleotide for detection of SNP TSC0061226
caacttaccaaca

SEQ ID NO: 250785 - DNA, 13 bp, Artificial Sequence
  Oligonucleotide for detection of SNP TSC0061226
tagttttttaata

SEQ ID NO: 250786 - DNA, 13 bp, Artificial Sequence
  Oligonucleotide for detection of SNP TSC0061226
tattaaaaaacta

SEQ ID NO: 250787 - DNA, 13 bp, Artificial Sequence
  Oligonucleotide for detection of SNP TSC0061226
tagtttgttaata

SEQ ID NO: 250788 - DNA, 13 bp, Artificial Sequence
  Oligonucleotide for detection of SNP TSC0061226
tattaacaaacta

SEQ ID NO: 250789 - DNA, 13 bp, Artificial Sequence
  Oligonucleotide for detection of SNP TSC0061227
tgttgaattagtg

SEQ ID NO: 250790 - DNA, 13 bp, Artificial Sequence
  Oligonucleotide for detection of SNP TSC0061227
cactaattcaaca

SEQ ID NO: 250791 - DNA, 13 bp, Artificial Sequence
  Oligonucleotide for detection of SNP TSC0061227
tgttgatttagtg

SEQ ID NO: 250792 - DNA, 13 bp, Artificial Sequence
  Oligonucleotide for detection of SNP TSC0061227
cactaaatcaaca

SEQ ID NO: 250793 - DNA, 13 bp, Artificial Sequence
  Oligonucleotide for detection of SNP TSC0061227
tattaatttagta

SEQ ID NO: 250794 - DNA, 13 bp, Artificial Sequence
  Oligonucleotide for detection of SNP TSC0061227
tactaaattaata

SEQ ID NO: 250795 - DNA, 13 bp, Artificial Sequence
  Oligonucleotide for detection of SNP TSC0061227
tattaagttagta

SEQ ID NO: 250796 - DNA, 13 bp, Artificial Sequence
  Oligonucleotide for detection of SNP TSC0061227
tactaacttaata

SEQ ID NO: 250797 - DNA, 13 bp, Artificial Sequence
  Oligonucleotide for detection of SNP TSC0061229
gaatgtatattta

SEQ ID NO: 250798 - DNA, 13 bp, Artificial Sequence
  Oligonucleotide for detection of SNP TSC0061229
taaatatacattc

SEQ ID NO: 250799 - DNA, 13 bp, Artificial Sequence
  Oligonucleotide for detection of SNP TSC0061229
gaatgtgtattta

SEQ ID NO: 250800 - DNA, 13 bp, Artificial Sequence
  Oligonucleotide for detection of SNP TSC0061229
taaatacacattc

SEQ ID NO: 250801 - DNA, 13 bp, Artificial Sequence
  Oligonucleotide for detection of SNP TSC0061229
gaatgcgtattta

SEQ ID NO: 250802 - DNA, 13 bp, Artificial Sequence
  Oligonucleotide for detection of SNP TSC0061229
taaatacgcattc

SEQ ID NO: 250803 - DNA, 13 bp, Artificial Sequence
  Oligonucleotide for detection of SNP TSC0061229
taaatgtgtatty

SEQ ID NO: 250804 - DNA, 13 bp, Artificial Sequence
  Oligonucleotide for detection of SNP TSC0061229
raatacacattta

SEQ ID NO: 250805 - DNA, 13 bp, Artificial Sequence
  Oligonucleotide for detection of SNP TSC0061229
taaatgcgtatty

SEQ ID NO: 250806 - DNA, 13 bp, Artificial Sequence
  Oligonucleotide for detection of SNP TSC0061229
raatacgcattta

SEQ ID NO: 250807 - DNA, 13 bp, Artificial Sequence
  Oligonucleotide for detection of SNP TSC0061230
ttttataataatt

SEQ ID NO: 250808 - DNA, 13 bp, Artificial Sequence
  Oligonucleotide for detection of SNP TSC0061230
aattattataaaa

SEQ ID NO: 250809 - DNA, 13 bp, Artificial Sequence
  Oligonucleotide for detection of SNP TSC0061230
ttttatgataatt

SEQ ID NO: 250810 - DNA, 13 bp, Artificial Sequence
  Oligonucleotide for detection of SNP TSC0061230
aattatcataaaa

SEQ ID NO: 250811 - DNA, 13 bp, Artificial Sequence
  Oligonucleotide for detection of SNP TSC0061230
aattattgtggga

SEQ ID NO: 250812 - DNA, 13 bp, Artificial Sequence
  Oligonucleotide for detection of SNP TSC0061230
tcccacaataatt

SEQ ID NO: 250813 - DNA, 13 bp, Artificial Sequence
  Oligonucleotide for detection of SNP TSC0061230
aattatcgtggga

SEQ ID NO: 250814 - DNA, 13 bp, Artificial Sequence
  Oligonucleotide for detection of SNP TSC0061230
tcccacgataatt

SEQ ID NO: 250815 - DNA, 13 bp, Artificial Sequence
  Oligonucleotide for detection of SNP TSC0061231
agtagatgaagay

SEQ ID NO: 250816 - DNA, 13 bp, Artificial Sequence
  Oligonucleotide for detection of SNP TSC0061231
rtcttcatctact

SEQ ID NO: 250817 - DNA, 13 bp, Artificial Sequence
  Oligonucleotide for detection of SNP TSC0061231
agtagacgaagay

SEQ ID NO: 250818 - DNA, 13 bp, Artificial Sequence
  Oligonucleotide for detection of SNP TSC0061231
rtcttcgtctact

SEQ ID NO: 250819 - DNA, 13 bp, Artificial Sequence
  Oligonucleotide for detection of SNP TSC0061232
ggagatagtttta

SEQ ID NO: 250820 - DNA, 13 bp, Artificial Sequence
  Oligonucleotide for detection of SNP TSC0061232
taaaactatctcc

SEQ ID NO: 250821 - DNA, 13 bp, Artificial Sequence
  Oligonucleotide for detection of SNP TSC0061232
ggagatggtttta

SEQ ID NO: 250822 - DNA, 13 bp, Artificial Sequence
  Oligonucleotide for detection of SNP TSC0061232
taaaaccatctcc

SEQ ID NO: 250823 - DNA, 13 bp, Artificial Sequence
  Oligonucleotide for detection of SNP TSC0061232
ggagacggtttta

SEQ ID NO: 250824 - DNA, 13 bp, Artificial Sequence
  Oligonucleotide for detection of SNP TSC0061232
taaaaccgtctcc

SEQ ID NO: 250825 - DNA, 13 bp, Artificial Sequence
  Oligonucleotide for detection of SNP TSC0061232
tgaggttgtttty

SEQ ID NO: 250826 - DNA, 13 bp, Artificial Sequence
  Oligonucleotide for detection of SNP TSC0061232
raaaacaacctca

SEQ ID NO: 250827 - DNA, 13 bp, Artificial Sequence
  Oligonucleotide for detection of SNP TSC0061232
tgaggtcgtttty

SEQ ID NO: 250828 - DNA, 13 bp, Artificial Sequence
  Oligonucleotide for detection of SNP TSC0061232
raaaacgacctca

SEQ ID NO: 250829 - DNA, 13 bp, Artificial Sequence
  Oligonucleotide for detection of SNP TSC0061233
atgattaatgtta

SEQ ID NO: 250830 - DNA, 13 bp, Artificial Sequence
  Oligonucleotide for detection of SNP TSC0061233
taacattaatcat

SEQ ID NO: 250831 - DNA, 13 bp, Artificial Sequence
  Oligonucleotide for detection of SNP TSC0061233
atgattgatgtta

SEQ ID NO: 250832 - DNA, 13 bp, Artificial Sequence
  Oligonucleotide for detection of SNP TSC0061233
taacatcaatcat

SEQ ID NO: 250833 - DNA, 13 bp, Artificial Sequence
  Oligonucleotide for detection of SNP TSC0061233
acgattaatgtta

SEQ ID NO: 250834 - DNA, 13 bp, Artificial Sequence
  Oligonucleotide for detection of SNP TSC0061233
taacattaatcgt

SEQ ID NO: 250835 - DNA, 13 bp, Artificial Sequence
  Oligonucleotide for detection of SNP TSC0061233
acgattgatgtta

SEQ ID NO: 250836 - DNA, 13 bp, Artificial Sequence
  Oligonucleotide for detection of SNP TSC0061233
taacatcaatcgt

SEQ ID NO: 250837 - DNA, 13 bp, Artificial Sequence
  Oligonucleotide for detection of SNP TSC0061233
atgatcgatgtta

SEQ ID NO: 250838 - DNA, 13 bp, Artificial Sequence
  Oligonucleotide for detection of SNP TSC0061233
taacatcgatcat

SEQ ID NO: 250839 - DNA, 13 bp, Artificial Sequence
  Oligonucleotide for detection of SNP TSC0061233
acgatcgatgtta

SEQ ID NO: 250840 - DNA, 13 bp, Artificial Sequence
  Oligonucleotide for detection of SNP TSC0061233
taacatcgatcgt

SEQ ID NO: 250841 - DNA, 13 bp, Artificial Sequence
  Oligonucleotide for detection of SNP TSC0061233
tgatattgattgt

SEQ ID NO: 250842 - DNA, 13 bp, Artificial Sequence
  Oligonucleotide for detection of SNP TSC0061233
acaatcaatatca

SEQ ID NO: 250843 - DNA, 13 bp, Artificial Sequence
  Oligonucleotide for detection of SNP TSC0061233
tgatattgatcgt

SEQ ID NO: 250844 - DNA, 13 bp, Artificial Sequence
  Oligonucleotide for detection of SNP TSC0061233
acgatcaatatca

SEQ ID NO: 250845 - DNA, 13 bp, Artificial Sequence
  Oligonucleotide for detection of SNP TSC0061233
tgatatcgattgt

SEQ ID NO: 250846 - DNA, 13 bp, Artificial Sequence
  Oligonucleotide for detection of SNP TSC0061233
acaatcgatatca

SEQ ID NO: 250847 - DNA, 13 bp, Artificial Sequence
  Oligonucleotide for detection of SNP TSC0061233
tgatatcgatcgt

SEQ ID NO: 250848 - DNA, 13 bp, Artificial Sequence
  Oligonucleotide for detection of SNP TSC0061233
acgatcgatatca

SEQ ID NO: 250849 - DNA, 13 bp, Artificial Sequence
  Oligonucleotide for detection of SNP TSC0061234
ttttagcgatttt

SEQ ID NO: 250850 - DNA, 13 bp, Artificial Sequence
  Oligonucleotide for detection of SNP TSC0061234
aaaatcgctaaaa

SEQ ID NO: 250851 - DNA, 13 bp, Artificial Sequence
  Oligonucleotide for detection of SNP TSC0061234
aaaattgttggga

SEQ ID NO: 250852 - DNA, 13 bp, Artificial Sequence
  Oligonucleotide for detection of SNP TSC0061234
tcccaacaatttt

SEQ ID NO: 250853 - DNA, 13 bp, Artificial Sequence
  Oligonucleotide for detection of SNP TSC0061234
aaaattattggga

SEQ ID NO: 250854 - DNA, 13 bp, Artificial Sequence
  Oligonucleotide for detection of SNP TSC0061234
tcccaataatttt

SEQ ID NO: 250855 - DNA, 13 bp, Artificial Sequence
  Oligonucleotide for detection of SNP TSC0061234
aaaatcgttggga

SEQ ID NO: 250856 - DNA, 13 bp, Artificial Sequence
  Oligonucleotide for detection of SNP TSC0061234
tcccaacgatttt

SEQ ID NO: 250857 - DNA, 13 bp, Artificial Sequence
  Oligonucleotide for detection of SNP TSC0061235
gtgggagttgagg

SEQ ID NO: 250858 - DNA, 13 bp, Artificial Sequence
  Oligonucleotide for detection of SNP TSC0061235
cctcaactcccac

SEQ ID NO: 250859 - DNA, 13 bp, Artificial Sequence
  Oligonucleotide for detection of SNP TSC0061235
gtgggaattgagg

SEQ ID NO: 250860 - DNA, 13 bp, Artificial Sequence
  Oligonucleotide for detection of SNP TSC0061235
cctcaattcccac

SEQ ID NO: 250861 - DNA, 13 bp, Artificial Sequence
  Oligonucleotide for detection of SNP TSC0061236
gtggttagtgatt

SEQ ID NO: 250862 - DNA, 13 bp, Artificial Sequence
  Oligonucleotide for detection of SNP TSC0061236
aatcactaaccac

SEQ ID NO: 250863 - DNA, 13 bp, Artificial Sequence
  Oligonucleotide for detection of SNP TSC0061236
gtggttggtgatt

SEQ ID NO: 250864 - DNA, 13 bp, Artificial Sequence
  Oligonucleotide for detection of SNP TSC0061236
aatcaccaaccac

SEQ ID NO: 250865 - DNA, 13 bp, Artificial Sequence
  Oligonucleotide for detection of SNP TSC0061236
gtggtcggtgatt

SEQ ID NO: 250866 - DNA, 13 bp, Artificial Sequence
  Oligonucleotide for detection of SNP TSC0061236
aatcaccgaccac

SEQ ID NO: 250867 - DNA, 13 bp, Artificial Sequence
  Oligonucleotide for detection of SNP TSC0061236
aattattgattay

SEQ ID NO: 250868 - DNA, 13 bp, Artificial Sequence
  Oligonucleotide for detection of SNP TSC0061236
rtaatcaataatt

SEQ ID NO: 250869 - DNA, 13 bp, Artificial Sequence
  Oligonucleotide for detection of SNP TSC0061236
aattatcgattay

SEQ ID NO: 250870 - DNA, 13 bp, Artificial Sequence
  Oligonucleotide for detection of SNP TSC0061236
rtaatcgataatt

SEQ ID NO: 250871 - DNA, 13 bp, Artificial Sequence
  Oligonucleotide for detection of SNP TSC0061237
ttaggatgaaaty

SEQ ID NO: 250872 - DNA, 13 bp, Artificial Sequence
  Oligonucleotide for detection of SNP TSC0061237
ratttcatcctaa

SEQ ID NO: 250873 - DNA, 13 bp, Artificial Sequence
  Oligonucleotide for detection of SNP TSC0061237
ttaggacgaaaty

SEQ ID NO: 250874 - DNA, 13 bp, Artificial Sequence
  Oligonucleotide for detection of SNP TSC0061237
ratttcgtcctaa

SEQ ID NO: 250875 - DNA, 13 bp, Artificial Sequence
  Oligonucleotide for detection of SNP TSC0061240
aaagttagatatt

SEQ ID NO: 250876 - DNA, 13 bp, Artificial Sequence
  Oligonucleotide for detection of SNP TSC0061240
aatatctaacttt

SEQ ID NO: 250877 - DNA, 13 bp, Artificial Sequence
  Oligonucleotide for detection of SNP TSC0061240
aaagttggatatt

SEQ ID NO: 250878 - DNA, 13 bp, Artificial Sequence
  Oligonucleotide for detection of SNP TSC0061240
aatatccaacttt

SEQ ID NO: 250879 - DNA, 13 bp, Artificial Sequence
  Oligonucleotide for detection of SNP TSC0061240
aaagtcggatatt

SEQ ID NO: 250880 - DNA, 13 bp, Artificial Sequence
  Oligonucleotide for detection of SNP TSC0061240
aatatccgacttt

SEQ ID NO: 250881 - DNA, 13 bp, Artificial Sequence
  Oligonucleotide for detection of SNP TSC0061240
agtgtttggtttt

SEQ ID NO: 250882 - DNA, 13 bp, Artificial Sequence
  Oligonucleotide for detection of SNP TSC0061240
aaaaccaaacact

SEQ ID NO: 250883 - DNA, 13 bp, Artificial Sequence
  Oligonucleotide for detection of SNP TSC0061240
agtgttcggtttt

SEQ ID NO: 250884 - DNA, 13 bp, Artificial Sequence
  Oligonucleotide for detection of SNP TSC0061240
aaaaccgaacact

SEQ ID NO: 250885 - DNA, 13 bp, Artificial Sequence
  Oligonucleotide for detection of SNP TSC0061241
gagtgtggatttt

SEQ ID NO: 250886 - DNA, 13 bp, Artificial Sequence
  Oligonucleotide for detection of SNP TSC0061241
aaaatccacactc

SEQ ID NO: 250887 - DNA, 13 bp, Artificial Sequence
  Oligonucleotide for detection of SNP TSC0061241
gagtgtagatttt

SEQ ID NO: 250888 - DNA, 13 bp, Artificial Sequence
  Oligonucleotide for detection of SNP TSC0061241
aaaatctacactc

SEQ ID NO: 250889 - DNA, 13 bp, Artificial Sequence
  Oligonucleotide for detection of SNP TSC0061242
atagttgaggtty

SEQ ID NO: 250890 - DNA, 13 bp, Artificial Sequence
  Oligonucleotide for detection of SNP TSC0061242
raacctcaactat

SEQ ID NO: 250891 - DNA, 13 bp, Artificial Sequence
  Oligonucleotide for detection of SNP TSC0061242
atagttaaggtty

SEQ ID NO: 250892 - DNA, 13 bp, Artificial Sequence
  Oligonucleotide for detection of SNP TSC0061242
raaccttaactat

SEQ ID NO: 250893 - DNA, 13 bp, Artificial Sequence
  Oligonucleotide for detection of SNP TSC0061243
attataagaatay

SEQ ID NO: 250894 - DNA, 13 bp, Artificial Sequence
  Oligonucleotide for detection of SNP TSC0061243
rtattcttataat

SEQ ID NO: 250895 - DNA, 13 bp, Artificial Sequence
  Oligonucleotide for detection of SNP TSC0061243
attataggaatay

SEQ ID NO: 250896 - DNA, 13 bp, Artificial Sequence
  Oligonucleotide for detection of SNP TSC0061243
rtattcctataat

SEQ ID NO: 250897 - DNA, 13 bp, Artificial Sequence
  Oligonucleotide for detection of SNP TSC0061245
gaaagttgttttg

SEQ ID NO: 250898 - DNA, 13 bp, Artificial Sequence
  Oligonucleotide for detection of SNP TSC0061245
caaaacaactttc

SEQ ID NO: 250899 - DNA, 13 bp, Artificial Sequence
  Oligonucleotide for detection of SNP TSC0061245
gaaagtcgttttg

SEQ ID NO: 250900 - DNA, 13 bp, Artificial Sequence
  Oligonucleotide for detection of SNP TSC0061245
caaaacgactttc

SEQ ID NO: 250901 - DNA, 13 bp, Artificial Sequence
  Oligonucleotide for detection of SNP TSC0061245
gaaagttgtttcg

SEQ ID NO: 250902 - DNA, 13 bp, Artificial Sequence
  Oligonucleotide for detection of SNP TSC0061245
cgaaacaactttc

SEQ ID NO: 250903 - DNA, 13 bp, Artificial Sequence
  Oligonucleotide for detection of SNP TSC0061245
gaaagtcgtttcg

SEQ ID NO: 250904 - DNA, 13 bp, Artificial Sequence
  Oligonucleotide for detection of SNP TSC0061245
cgaaacgactttc

SEQ ID NO: 250905 - DNA, 13 bp, Artificial Sequence
  Oligonucleotide for detection of SNP TSC0061245
tgaaatggtttty

SEQ ID NO: 250906 - DNA, 13 bp, Artificial Sequence
  Oligonucleotide for detection of SNP TSC0061245
raaaaccatttca

SEQ ID NO: 250907 - DNA, 13 bp, Artificial Sequence
  Oligonucleotide for detection of SNP TSC0061245
tgaaatagtttty

SEQ ID NO: 250908 - DNA, 13 bp, Artificial Sequence
  Oligonucleotide for detection of SNP TSC0061245
raaaactatttca

SEQ ID NO: 250909 - DNA, 13 bp, Artificial Sequence
  Oligonucleotide for detection of SNP TSC0061245
cgaaatggtttty

SEQ ID NO: 250910 - DNA, 13 bp, Artificial Sequence
  Oligonucleotide for detection of SNP TSC0061245
raaaaccatttcg

SEQ ID NO: 250911 - DNA, 13 bp, Artificial Sequence
  Oligonucleotide for detection of SNP TSC0061245
cgaaatagtttty

SEQ ID NO: 250912 - DNA, 13 bp, Artificial Sequence
  Oligonucleotide for detection of SNP TSC0061245
raaaactatttcg

SEQ ID NO: 250913 - DNA, 13 bp, Artificial Sequence
  Oligonucleotide for detection of SNP TSC0061245
tgaaacggtttty

SEQ ID NO: 250914 - DNA, 13 bp, Artificial Sequence
  Oligonucleotide for detection of SNP TSC0061245
raaaaccgtttca

SEQ ID NO: 250915 - DNA, 13 bp, Artificial Sequence
  Oligonucleotide for detection of SNP TSC0061245
cgaaacggtttty

SEQ ID NO: 250916 - DNA, 13 bp, Artificial Sequence
  Oligonucleotide for detection of SNP TSC0061245
raaaaccgtttcg

SEQ ID NO: 250917 - DNA, 13 bp, Artificial Sequence
  Oligonucleotide for detection of SNP TSC0061246
tagttgatatgtt

SEQ ID NO: 250918 - DNA, 13 bp, Artificial Sequence
  Oligonucleotide for detection of SNP TSC0061246
aacatatcaacta

SEQ ID NO: 250919 - DNA, 13 bp, Artificial Sequence
  Oligonucleotide for detection of SNP TSC0061246
tagttggtatgtt

SEQ ID NO: 250920 - DNA, 13 bp, Artificial Sequence
  Oligonucleotide for detection of SNP TSC0061246
aacataccaacta

SEQ ID NO: 250921 - DNA, 13 bp, Artificial Sequence
  Oligonucleotide for detection of SNP TSC0061246
tagtcgatatgtt

SEQ ID NO: 250922 - DNA, 13 bp, Artificial Sequence
  Oligonucleotide for detection of SNP TSC0061246
aacatatcgacta

SEQ ID NO: 250923 - DNA, 13 bp, Artificial Sequence
  Oligonucleotide for detection of SNP TSC0061246
tagtcggtatgtt

SEQ ID NO: 250924 - DNA, 13 bp, Artificial Sequence
  Oligonucleotide for detection of SNP TSC0061246
aacataccgacta

SEQ ID NO: 250925 - DNA, 13 bp, Artificial Sequence
  Oligonucleotide for detection of SNP TSC0061246
tagttgatacgtt

SEQ ID NO: 250926 - DNA, 13 bp, Artificial Sequence
  Oligonucleotide for detection of SNP TSC0061246
aacgtatcaacta

SEQ ID NO: 250927 - DNA, 13 bp, Artificial Sequence
  Oligonucleotide for detection of SNP TSC0061246
tagttggtacgtt

SEQ ID NO: 250928 - DNA, 13 bp, Artificial Sequence
  Oligonucleotide for detection of SNP TSC0061246
aacgtaccaacta

SEQ ID NO: 250929 - DNA, 13 bp, Artificial Sequence
  Oligonucleotide for detection of SNP TSC0061246
tagtcgatacgtt

SEQ ID NO: 250930 - DNA, 13 bp, Artificial Sequence
  Oligonucleotide for detection of SNP TSC0061246
aacgtatcgacta

SEQ ID NO: 250931 - DNA, 13 bp, Artificial Sequence
  Oligonucleotide for detection of SNP TSC0061246
tagtcggtacgtt

SEQ ID NO: 250932 - DNA, 13 bp, Artificial Sequence
  Oligonucleotide for detection of SNP TSC0061246
aacgtaccgacta

SEQ ID NO: 250933 - DNA, 13 bp, Artificial Sequence
  Oligonucleotide for detection of SNP TSC0061247
ttttagatgatat

SEQ ID NO: 250934 - DNA, 13 bp, Artificial Sequence
  Oligonucleotide for detection of SNP TSC0061247
atatcatctaaaa

SEQ ID NO: 250935 - DNA, 13 bp, Artificial Sequence
  Oligonucleotide for detection of SNP TSC0061247
ttttagttgatat

SEQ ID NO: 250936 - DNA, 13 bp, Artificial Sequence
  Oligonucleotide for detection of SNP TSC0061247
atatcaactaaaa

SEQ ID NO: 250937 - DNA, 13 bp, Artificial Sequence
  Oligonucleotide for detection of SNP TSC0061247
atattatttgaga

SEQ ID NO: 250938 - DNA, 13 bp, Artificial Sequence
  Oligonucleotide for detection of SNP TSC0061247
tctcaaataatat

SEQ ID NO: 250939 - DNA, 13 bp, Artificial Sequence
  Oligonucleotide for detection of SNP TSC0061247
atattagttgaga

SEQ ID NO: 250940 - DNA, 13 bp, Artificial Sequence
  Oligonucleotide for detection of SNP TSC0061247
tctcaactaatat

SEQ ID NO: 250941 - DNA, 13 bp, Artificial Sequence
  Oligonucleotide for detection of SNP TSC0061248
tttagaatattgy

SEQ ID NO: 250942 - DNA, 13 bp, Artificial Sequence
  Oligonucleotide for detection of SNP TSC0061248
rcaatattctaaa

SEQ ID NO: 250943 - DNA, 13 bp, Artificial Sequence
  Oligonucleotide for detection of SNP TSC0061248
tttagagtattgy

SEQ ID NO: 250944 - DNA, 13 bp, Artificial Sequence
  Oligonucleotide for detection of SNP TSC0061248
rcaatactctaaa

SEQ ID NO: 250945 - DNA, 13 bp, Artificial Sequence
  Oligonucleotide for detection of SNP TSC0061249
atggggttttttt

SEQ ID NO: 250946 - DNA, 13 bp, Artificial Sequence
  Oligonucleotide for detection of SNP TSC0061249
aaaaaaaccccat

SEQ ID NO: 250947 - DNA, 13 bp, Artificial Sequence
  Oligonucleotide for detection of SNP TSC0061249
atgggggtttttt

SEQ ID NO: 250948 - DNA, 13 bp, Artificial Sequence
  Oligonucleotide for detection of SNP TSC0061249
aaaaaacccccat

SEQ ID NO: 250949 - DNA, 13 bp, Artificial Sequence
  Oligonucleotide for detection of SNP TSC0061250
ggtttatgttggg

SEQ ID NO: 250950 - DNA, 13 bp, Artificial Sequence
  Oligonucleotide for detection of SNP TSC0061250
cccaacataaacc

SEQ ID NO: 250951 - DNA, 13 bp, Artificial Sequence
  Oligonucleotide for detection of SNP TSC0061250
ggtttacgttggg

SEQ ID NO: 250952 - DNA, 13 bp, Artificial Sequence
  Oligonucleotide for detection of SNP TSC0061250
cccaacgtaaacc

SEQ ID NO: 250953 - DNA, 13 bp, Artificial Sequence
  Oligonucleotide for detection of SNP TSC0061250
ggtttatgtcggg

SEQ ID NO: 250954 - DNA, 13 bp, Artificial Sequence
  Oligonucleotide for detection of SNP TSC0061250
cccgacataaacc

SEQ ID NO: 250955 - DNA, 13 bp, Artificial Sequence
  Oligonucleotide for detection of SNP TSC0061250
ggtttacgtcggg

SEQ ID NO: 250956 - DNA, 13 bp, Artificial Sequence
  Oligonucleotide for detection of SNP TSC0061250
cccgacgtaaacc

SEQ ID NO: 250957 - DNA, 13 bp, Artificial Sequence
  Oligonucleotide for detection of SNP TSC0061250
tttgatgtgaaty

SEQ ID NO: 250958 - DNA, 13 bp, Artificial Sequence
  Oligonucleotide for detection of SNP TSC0061250
rattcacatcaaa

SEQ ID NO: 250959 - DNA, 13 bp, Artificial Sequence
  Oligonucleotide for detection of SNP TSC0061250
tttgatatgaaty

SEQ ID NO: 250960 - DNA, 13 bp, Artificial Sequence
  Oligonucleotide for detection of SNP TSC0061250
rattcatatcaaa

SEQ ID NO: 250961 - DNA, 13 bp, Artificial Sequence
  Oligonucleotide for detection of SNP TSC0061250
ttcgatgtgaaty

SEQ ID NO: 250962 - DNA, 13 bp, Artificial Sequence
  Oligonucleotide for detection of SNP TSC0061250
rattcacatcgaa

SEQ ID NO: 250963 - DNA, 13 bp, Artificial Sequence
  Oligonucleotide for detection of SNP TSC0061250
ttcgatatgaaty

SEQ ID NO: 250964 - DNA, 13 bp, Artificial Sequence
  Oligonucleotide for detection of SNP TSC0061250
rattcatatcgaa

SEQ ID NO: 250965 - DNA, 13 bp, Artificial Sequence
  Oligonucleotide for detection of SNP TSC0061250
tttgacgtgaaty

SEQ ID NO: 250966 - DNA, 13 bp, Artificial Sequence
  Oligonucleotide for detection of SNP TSC0061250
rattcacgtcaaa

SEQ ID NO: 250967 - DNA, 13 bp, Artificial Sequence
  Oligonucleotide for detection of SNP TSC0061250
ttcgacgtgaaty

SEQ ID NO: 250968 - DNA, 13 bp, Artificial Sequence
  Oligonucleotide for detection of SNP TSC0061250
rattcacgtcgaa

SEQ ID NO: 250969 - DNA, 13 bp, Artificial Sequence
  Oligonucleotide for detection of SNP TSC0061251
gagtaaattaagt

SEQ ID NO: 250970 - DNA, 13 bp, Artificial Sequence
  Oligonucleotide for detection of SNP TSC0061251
acttaatttactc

SEQ ID NO: 250971 - DNA, 13 bp, Artificial Sequence
  Oligonucleotide for detection of SNP TSC0061251
gagtaatttaagt

SEQ ID NO: 250972 - DNA, 13 bp, Artificial Sequence
  Oligonucleotide for detection of SNP TSC0061251
acttaaattactc

SEQ ID NO: 250973 - DNA, 13 bp, Artificial Sequence
  Oligonucleotide for detection of SNP TSC0061251
gagtaagttaagt

SEQ ID NO: 250974 - DNA, 13 bp, Artificial Sequence
  Oligonucleotide for detection of SNP TSC0061251
acttaacttactc

SEQ ID NO: 250975 - DNA, 13 bp, Artificial Sequence
  Oligonucleotide for detection of SNP TSC0061251
atttggtttatty

SEQ ID NO: 250976 - DNA, 13 bp, Artificial Sequence
  Oligonucleotide for detection of SNP TSC0061251
raataaaccaaat

SEQ ID NO: 250977 - DNA, 13 bp, Artificial Sequence
  Oligonucleotide for detection of SNP TSC0061251
atttgggttatty

SEQ ID NO: 250978 - DNA, 13 bp, Artificial Sequence
  Oligonucleotide for detection of SNP TSC0061251
raataacccaaat

SEQ ID NO: 250979 - DNA, 13 bp, Artificial Sequence
  Oligonucleotide for detection of SNP TSC0061251
atttggattatty

SEQ ID NO: 250980 - DNA, 13 bp, Artificial Sequence
  Oligonucleotide for detection of SNP TSC0061251
raataatccaaat

SEQ ID NO: 250981 - DNA, 13 bp, Artificial Sequence
  Oligonucleotide for detection of SNP TSC0061253
aatttatgtagga

SEQ ID NO: 250982 - DNA, 13 bp, Artificial Sequence
  Oligonucleotide for detection of SNP TSC0061253
tcctacataaatt

SEQ ID NO: 250983 - DNA, 13 bp, Artificial Sequence
  Oligonucleotide for detection of SNP TSC0061253
aatttacgtagga

SEQ ID NO: 250984 - DNA, 13 bp, Artificial Sequence
  Oligonucleotide for detection of SNP TSC0061253
tcctacgtaaatt

SEQ ID NO: 250985 - DNA, 13 bp, Artificial Sequence
  Oligonucleotide for detection of SNP TSC0061254
atgattaatatat

SEQ ID NO: 250986 - DNA, 13 bp, Artificial Sequence
  Oligonucleotide for detection of SNP TSC0061254
atatattaatcat

SEQ ID NO: 250987 - DNA, 13 bp, Artificial Sequence
  Oligonucleotide for detection of SNP TSC0061254
atgattgatatat

SEQ ID NO: 250988 - DNA, 13 bp, Artificial Sequence
  Oligonucleotide for detection of SNP TSC0061254
atatatcaatcat

SEQ ID NO: 250989 - DNA, 13 bp, Artificial Sequence
  Oligonucleotide for detection of SNP TSC0061254
atgatcgatatat

SEQ ID NO: 250990 - DNA, 13 bp, Artificial Sequence
  Oligonucleotide for detection of SNP TSC0061254
atatatcgatcat

SEQ ID NO: 250991 - DNA, 13 bp, Artificial Sequence
  Oligonucleotide for detection of SNP TSC0061254
atatattgattat

SEQ ID NO: 250992 - DNA, 13 bp, Artificial Sequence
  Oligonucleotide for detection of SNP TSC0061254
ataatcaatatat

SEQ ID NO: 250993 - DNA, 13 bp, Artificial Sequence
  Oligonucleotide for detection of SNP TSC0061254
atatatcgattat

SEQ ID NO: 250994 - DNA, 13 bp, Artificial Sequence
  Oligonucleotide for detection of SNP TSC0061254
ataatcgatatat

SEQ ID NO: 250995 - DNA, 13 bp, Artificial Sequence
  Oligonucleotide for detection of SNP TSC0061255
gtatttagattat

SEQ ID NO: 250996 - DNA, 13 bp, Artificial Sequence
  Oligonucleotide for detection of SNP TSC0061255
ataatctaaatac

SEQ ID NO: 250997 - DNA, 13 bp, Artificial Sequence
  Oligonucleotide for detection of SNP TSC0061255
gtatttggattat

SEQ ID NO: 250998 - DNA, 13 bp, Artificial Sequence
  Oligonucleotide for detection of SNP TSC0061255
ataatccaaatac

SEQ ID NO: 250999 - DNA, 13 bp, Artificial Sequence
  Oligonucleotide for detection of SNP TSC0061255
gtattcggattat

SEQ ID NO: 251000 - DNA, 13 bp, Artificial Sequence
  Oligonucleotide for detection of SNP TSC0061255
ataatccgaatac

SEQ ID NO: 251001 - DNA, 13 bp, Artificial Sequence
  Oligonucleotide for detection of SNP TSC0061255
atgatttgagtgy

SEQ ID NO: 251002 - DNA, 13 bp, Artificial Sequence
  Oligonucleotide for detection of SNP TSC0061255
rcactcaaatcat

SEQ ID NO: 251003 - DNA, 13 bp, Artificial Sequence
  Oligonucleotide for detection of SNP TSC0061255
atgattcgagtgy

SEQ ID NO: 251004 - DNA, 13 bp, Artificial Sequence
  Oligonucleotide for detection of SNP TSC0061255
rcactcgaatcat

SEQ ID NO: 251005 - DNA, 13 bp, Artificial Sequence
  Oligonucleotide for detection of SNP TSC0061257
ttaatatagtgga

SEQ ID NO: 251006 - DNA, 13 bp, Artificial Sequence
  Oligonucleotide for detection of SNP TSC0061257
tccactatattaa

SEQ ID NO: 251007 - DNA, 13 bp, Artificial Sequence
  Oligonucleotide for detection of SNP TSC0061257
ttaatagagtgga

SEQ ID NO: 251008 - DNA, 13 bp, Artificial Sequence
  Oligonucleotide for detection of SNP TSC0061257
tccactctattaa

SEQ ID NO: 251009 - DNA, 13 bp, Artificial Sequence
  Oligonucleotide for detection of SNP TSC0061259
tgtatttgattag

SEQ ID NO: 251010 - DNA, 13 bp, Artificial Sequence
  Oligonucleotide for detection of SNP TSC0061259
ctaatcaaataca

SEQ ID NO: 251011 - DNA, 13 bp, Artificial Sequence
  Oligonucleotide for detection of SNP TSC0061259
cgtatttgattag

SEQ ID NO: 251012 - DNA, 13 bp, Artificial Sequence
  Oligonucleotide for detection of SNP TSC0061259
ctaatcaaatacg

SEQ ID NO: 251013 - DNA, 13 bp, Artificial Sequence
  Oligonucleotide for detection of SNP TSC0061259
tgtattcgattag

SEQ ID NO: 251014 - DNA, 13 bp, Artificial Sequence
  Oligonucleotide for detection of SNP TSC0061259
ctaatcgaataca

SEQ ID NO: 251015 - DNA, 13 bp, Artificial Sequence
  Oligonucleotide for detection of SNP TSC0061259
cgtattcgattag

SEQ ID NO: 251016 - DNA, 13 bp, Artificial Sequence
  Oligonucleotide for detection of SNP TSC0061259
ctaatcgaatacg

SEQ ID NO: 251017 - DNA, 13 bp, Artificial Sequence
  Oligonucleotide for detection of SNP TSC0061263
gagggtttttgty

SEQ ID NO: 251018 - DNA, 13 bp, Artificial Sequence
  Oligonucleotide for detection of SNP TSC0061263
racaaaaaccctc

SEQ ID NO: 251019 - DNA, 13 bp, Artificial Sequence
  Oligonucleotide for detection of SNP TSC0061263
gagggtgtttgty

SEQ ID NO: 251020 - DNA, 13 bp, Artificial Sequence
  Oligonucleotide for detection of SNP TSC0061263
racaaacaccctc

SEQ ID NO: 251021 - DNA, 13 bp, Artificial Sequence
  Oligonucleotide for detection of SNP TSC0061263
ggtaaggatttty

SEQ ID NO: 251022 - DNA, 13 bp, Artificial Sequence
  Oligonucleotide for detection of SNP TSC0061263
raaaatccttacc

SEQ ID NO: 251023 - DNA, 13 bp, Artificial Sequence
  Oligonucleotide for detection of SNP TSC0061263
ggtaagaatttty

SEQ ID NO: 251024 - DNA, 13 bp, Artificial Sequence
  Oligonucleotide for detection of SNP TSC0061263
raaaattcttacc

SEQ ID NO: 251025 - DNA, 13 bp, Artificial Sequence
  Oligonucleotide for detection of SNP TSC0061263
ggtaagtatttty

SEQ ID NO: 251026 - DNA, 13 bp, Artificial Sequence
  Oligonucleotide for detection of SNP TSC0061263
raaaatacttacc

SEQ ID NO: 251027 - DNA, 13 bp, Artificial Sequence
  Oligonucleotide for detection of SNP TSC0061264
tatttagattttg

SEQ ID NO: 251028 - DNA, 13 bp, Artificial Sequence
  Oligonucleotide for detection of SNP TSC0061264
caaaatctaaata

SEQ ID NO: 251029 - DNA, 13 bp, Artificial Sequence
  Oligonucleotide for detection of SNP TSC0061264
tagggtttgagtg

SEQ ID NO: 251030 - DNA, 13 bp, Artificial Sequence
  Oligonucleotide for detection of SNP TSC0061264
cactcaaacccta

SEQ ID NO: 251031 - DNA, 13 bp, Artificial Sequence
  Oligonucleotide for detection of SNP TSC0061264
tagggtgtgagtg

SEQ ID NO: 251032 - DNA, 13 bp, Artificial Sequence
  Oligonucleotide for detection of SNP TSC0061264
cactcacacccta

SEQ ID NO: 251033 - DNA, 13 bp, Artificial Sequence
  Oligonucleotide for detection of SNP TSC0061267
gtttttaaaaatg

SEQ ID NO: 251034 - DNA, 13 bp, Artificial Sequence
  Oligonucleotide for detection of SNP TSC0061267
catttttaaaaac

SEQ ID NO: 251035 - DNA, 13 bp, Artificial Sequence
  Oligonucleotide for detection of SNP TSC0061267
gtttttgaaaatg

SEQ ID NO: 251036 - DNA, 13 bp, Artificial Sequence
  Oligonucleotide for detection of SNP TSC0061267
cattttcaaaaac

SEQ ID NO: 251037 - DNA, 13 bp, Artificial Sequence
  Oligonucleotide for detection of SNP TSC0061269
tttttatgattaa

SEQ ID NO: 251038 - DNA, 13 bp, Artificial Sequence
  Oligonucleotide for detection of SNP TSC0061269
ttaatcataaaaa

SEQ ID NO: 251039 - DNA, 13 bp, Artificial Sequence
  Oligonucleotide for detection of SNP TSC0061269
tttttaggattaa

SEQ ID NO: 251040 - DNA, 13 bp, Artificial Sequence
  Oligonucleotide for detection of SNP TSC0061269
ttaatcctaaaaa

SEQ ID NO: 251041 - DNA, 13 bp, Artificial Sequence
  Oligonucleotide for detection of SNP TSC0061269
ttaattgtaaagg

SEQ ID NO: 251042 - DNA, 13 bp, Artificial Sequence
  Oligonucleotide for detection of SNP TSC0061269
cctttacaattaa

SEQ ID NO: 251043 - DNA, 13 bp, Artificial Sequence
  Oligonucleotide for detection of SNP TSC0061269
ttaattttaaagg

SEQ ID NO: 251044 - DNA, 13 bp, Artificial Sequence
  Oligonucleotide for detection of SNP TSC0061269
cctttaaaattaa

SEQ ID NO: 251045 - DNA, 13 bp, Artificial Sequence
  Oligonucleotide for detection of SNP TSC0061269
ttaatcgtaaagg

SEQ ID NO: 251046 - DNA, 13 bp, Artificial Sequence
  Oligonucleotide for detection of SNP TSC0061269
cctttacgattaa

SEQ ID NO: 251047 - DNA, 13 bp, Artificial Sequence
  Oligonucleotide for detection of SNP TSC0061270
tttttagtaatat

SEQ ID NO: 251048 - DNA, 13 bp, Artificial Sequence
  Oligonucleotide for detection of SNP TSC0061270
atattactaaaaa

SEQ ID NO: 251049 - DNA, 13 bp, Artificial Sequence
  Oligonucleotide for detection of SNP TSC0061271
attgttataaaaa

SEQ ID NO: 251050 - DNA, 13 bp, Artificial Sequence
  Oligonucleotide for detection of SNP TSC0061271
tttttataacaat

SEQ ID NO: 251051 - DNA, 13 bp, Artificial Sequence
  Oligonucleotide for detection of SNP TSC0061271
attgtcgtaaaaa

SEQ ID NO: 251052 - DNA, 13 bp, Artificial Sequence
  Oligonucleotide for detection of SNP TSC0061271
tttttacgacaat

SEQ ID NO: 251053 - DNA, 13 bp, Artificial Sequence
  Oligonucleotide for detection of SNP TSC0061275
gaaaagaagtata

SEQ ID NO: 251054 - DNA, 13 bp, Artificial Sequence
  Oligonucleotide for detection of SNP TSC0061275
tatacttcttttc

SEQ ID NO: 251055 - DNA, 13 bp, Artificial Sequence
  Oligonucleotide for detection of SNP TSC0061275
gaaaagtagtata

SEQ ID NO: 251056 - DNA, 13 bp, Artificial Sequence
  Oligonucleotide for detection of SNP TSC0061275
tatactacttttc

SEQ ID NO: 251057 - DNA, 13 bp, Artificial Sequence
  Oligonucleotide for detection of SNP TSC0061278
ggtgatgtttttt

SEQ ID NO: 251058 - DNA, 13 bp, Artificial Sequence
  Oligonucleotide for detection of SNP TSC0061278
aaaaaacatcacc

SEQ ID NO: 251059 - DNA, 13 bp, Artificial Sequence
  Oligonucleotide for detection of SNP TSC0061278
ggtgatatttttt

SEQ ID NO: 251060 - DNA, 13 bp, Artificial Sequence
  Oligonucleotide for detection of SNP TSC0061278
aaaaaatatcacc

SEQ ID NO: 251061 - DNA, 13 bp, Artificial Sequence
  Oligonucleotide for detection of SNP TSC0061280
tagggtagaatty

SEQ ID NO: 251062 - DNA, 13 bp, Artificial Sequence
  Oligonucleotide for detection of SNP TSC0061280
raattctacccta

SEQ ID NO: 251063 - DNA, 13 bp, Artificial Sequence
  Oligonucleotide for detection of SNP TSC0061280
tagggtggaatty

SEQ ID NO: 251064 - DNA, 13 bp, Artificial Sequence
  Oligonucleotide for detection of SNP TSC0061280
raattccacccta

SEQ ID NO: 251065 - DNA, 13 bp, Artificial Sequence
  Oligonucleotide for detection of SNP TSC0061280
tagggcggaatty

SEQ ID NO: 251066 - DNA, 13 bp, Artificial Sequence
  Oligonucleotide for detection of SNP TSC0061280
raattccgcccta

SEQ ID NO: 251067 - DNA, 13 bp, Artificial Sequence
  Oligonucleotide for detection of SNP TSC0061280
gaattttgttttg

SEQ ID NO: 251068 - DNA, 13 bp, Artificial Sequence
  Oligonucleotide for detection of SNP TSC0061280
caaaacaaaattc

SEQ ID NO: 251069 - DNA, 13 bp, Artificial Sequence
  Oligonucleotide for detection of SNP TSC0061280
gaatttcgttttg

SEQ ID NO: 251070 - DNA, 13 bp, Artificial Sequence
  Oligonucleotide for detection of SNP TSC0061280
caaaacgaaattc

SEQ ID NO: 251071 - DNA, 13 bp, Artificial Sequence
  Oligonucleotide for detection of SNP TSC0061281
ggtagataaataa

SEQ ID NO: 251072 - DNA, 13 bp, Artificial Sequence
  Oligonucleotide for detection of SNP TSC0061281
ttatttatctacc

SEQ ID NO: 251073 - DNA, 13 bp, Artificial Sequence
  Oligonucleotide for detection of SNP TSC0061281
ggtagagaaataa

SEQ ID NO: 251074 - DNA, 13 bp, Artificial Sequence
  Oligonucleotide for detection of SNP TSC0061281
ttatttctctacc

SEQ ID NO: 251075 - DNA, 13 bp, Artificial Sequence
  Oligonucleotide for detection of SNP TSC0061285
gttgtgttgtggt

SEQ ID NO: 251076 - DNA, 13 bp, Artificial Sequence
  Oligonucleotide for detection of SNP TSC0061285
accacaacacaac

SEQ ID NO: 251077 - DNA, 13 bp, Artificial Sequence
  Oligonucleotide for detection of SNP TSC0061285
gttgtggtgtggt

SEQ ID NO: 251078 - DNA, 13 bp, Artificial Sequence
  Oligonucleotide for detection of SNP TSC0061285
accacaccacaac

SEQ ID NO: 251079 - DNA, 13 bp, Artificial Sequence
  Oligonucleotide for detection of SNP TSC0061285
attataatatagy

SEQ ID NO: 251080 - DNA, 13 bp, Artificial Sequence
  Oligonucleotide for detection of SNP TSC0061285
rctatattataat

SEQ ID NO: 251081 - DNA, 13 bp, Artificial Sequence
  Oligonucleotide for detection of SNP TSC0061285
attatattatagy

SEQ ID NO: 251082 - DNA, 13 bp, Artificial Sequence
  Oligonucleotide for detection of SNP TSC0061285
rctataatataat

SEQ ID NO: 251083 - DNA, 13 bp, Artificial Sequence
  Oligonucleotide for detection of SNP TSC0061287
gtagtaaaataay

SEQ ID NO: 251084 - DNA, 13 bp, Artificial Sequence
  Oligonucleotide for detection of SNP TSC0061287
rttattttactac

SEQ ID NO: 251085 - DNA, 13 bp, Artificial Sequence
  Oligonucleotide for detection of SNP TSC0061287
gtagtataataay

SEQ ID NO: 251086 - DNA, 13 bp, Artificial Sequence
  Oligonucleotide for detection of SNP TSC0061287
rttattatactac

SEQ ID NO: 251087 - DNA, 13 bp, Artificial Sequence
  Oligonucleotide for detection of SNP TSC0061287
gttattttattay

SEQ ID NO: 251088 - DNA, 13 bp, Artificial Sequence
  Oligonucleotide for detection of SNP TSC0061287
rtaataaaataac

SEQ ID NO: 251089 - DNA, 13 bp, Artificial Sequence
  Oligonucleotide for detection of SNP TSC0061287
gttattgtattay

SEQ ID NO: 251090 - DNA, 13 bp, Artificial Sequence
  Oligonucleotide for detection of SNP TSC0061287
rtaatacaataac

SEQ ID NO: 251091 - DNA, 13 bp, Artificial Sequence
  Oligonucleotide for detection of SNP TSC0061288
ttagaaattaaat

SEQ ID NO: 251092 - DNA, 13 bp, Artificial Sequence
  Oligonucleotide for detection of SNP TSC0061288
atttaatttctaa

SEQ ID NO: 251093 - DNA, 13 bp, Artificial Sequence
  Oligonucleotide for detection of SNP TSC0061288
ttagaagttaaat

SEQ ID NO: 251094 - DNA, 13 bp, Artificial Sequence
  Oligonucleotide for detection of SNP TSC0061288
atttaacttctaa

SEQ ID NO: 251095 - DNA, 13 bp, Artificial Sequence
  Oligonucleotide for detection of SNP TSC0061291
attgtaaagtaag

SEQ ID NO: 251096 - DNA, 13 bp, Artificial Sequence
  Oligonucleotide for detection of SNP TSC0061291
cttactttacaat

SEQ ID NO: 251097 - DNA, 13 bp, Artificial Sequence
  Oligonucleotide for detection of SNP TSC0061291
attgtagagtaag

SEQ ID NO: 251098 - DNA, 13 bp, Artificial Sequence
  Oligonucleotide for detection of SNP TSC0061291
cttactctacaat

SEQ ID NO: 251099 - DNA, 13 bp, Artificial Sequence
  Oligonucleotide for detection of SNP TSC0061293
aaggaagtgaagg

SEQ ID NO: 251100 - DNA, 13 bp, Artificial Sequence
  Oligonucleotide for detection of SNP TSC0061293
ccttcacttcctt

SEQ ID NO: 251101 - DNA, 13 bp, Artificial Sequence
  Oligonucleotide for detection of SNP TSC0061293
aaggaaatgaagg

SEQ ID NO: 251102 - DNA, 13 bp, Artificial Sequence
  Oligonucleotide for detection of SNP TSC0061293
ccttcatttcctt

SEQ ID NO: 251103 - DNA, 13 bp, Artificial Sequence
  Oligonucleotide for detection of SNP TSC0061294
tgttttttgagta

SEQ ID NO: 251104 - DNA, 13 bp, Artificial Sequence
  Oligonucleotide for detection of SNP TSC0061294
tactcaaaaaaca

SEQ ID NO: 251105 - DNA, 13 bp, Artificial Sequence
  Oligonucleotide for detection of SNP TSC0061294
tgttttgtgagta

SEQ ID NO: 251106 - DNA, 13 bp, Artificial Sequence
  Oligonucleotide for detection of SNP TSC0061294
tactcacaaaaca

SEQ ID NO: 251107 - DNA, 13 bp, Artificial Sequence
  Oligonucleotide for detection of SNP TSC0061294
cgttttttgagta

SEQ ID NO: 251108 - DNA, 13 bp, Artificial Sequence
  Oligonucleotide for detection of SNP TSC0061294
tactcaaaaaacg

SEQ ID NO: 251109 - DNA, 13 bp, Artificial Sequence
  Oligonucleotide for detection of SNP TSC0061294
cgttttgtgagta

SEQ ID NO: 251110 - DNA, 13 bp, Artificial Sequence
  Oligonucleotide for detection of SNP TSC0061294
tactcacaaaacg

SEQ ID NO: 251111 - DNA, 13 bp, Artificial Sequence
  Oligonucleotide for detection of SNP TSC0061294
tgtttcgtgagta

SEQ ID NO: 251112 - DNA, 13 bp, Artificial Sequence
  Oligonucleotide for detection of SNP TSC0061294
tactcacgaaaca

SEQ ID NO: 251113 - DNA, 13 bp, Artificial Sequence
  Oligonucleotide for detection of SNP TSC0061294
cgtttcgtgagta

SEQ ID NO: 251114 - DNA, 13 bp, Artificial Sequence
  Oligonucleotide for detection of SNP TSC0061294
tactcacgaaacg

SEQ ID NO: 251115 - DNA, 13 bp, Artificial Sequence
  Oligonucleotide for detection of SNP TSC0061294
tatttatgaagtg

SEQ ID NO: 251116 - DNA, 13 bp, Artificial Sequence
  Oligonucleotide for detection of SNP TSC0061294
cacttcataaata

SEQ ID NO: 251117 - DNA, 13 bp, Artificial Sequence
  Oligonucleotide for detection of SNP TSC0061294
tatttaggaagcg

SEQ ID NO: 251118 - DNA, 13 bp, Artificial Sequence
  Oligonucleotide for detection of SNP TSC0061294
cgcttcctaaata

SEQ ID NO: 251119 - DNA, 13 bp, Artificial Sequence
  Oligonucleotide for detection of SNP TSC0061294
tatttacgaagtg

SEQ ID NO: 251120 - DNA, 13 bp, Artificial Sequence
  Oligonucleotide for detection of SNP TSC0061294
cacttcgtaaata

SEQ ID NO: 251121 - DNA, 13 bp, Artificial Sequence
  Oligonucleotide for detection of SNP TSC0061294
tatttatgaagcg

SEQ ID NO: 251122 - DNA, 13 bp, Artificial Sequence
  Oligonucleotide for detection of SNP TSC0061294
cgcttcataaata

SEQ ID NO: 251123 - DNA, 13 bp, Artificial Sequence
  Oligonucleotide for detection of SNP TSC0061294
tatttacgaagcg

SEQ ID NO: 251124 - DNA, 13 bp, Artificial Sequence
  Oligonucleotide for detection of SNP TSC0061294
cgcttcgtaaata

SEQ ID NO: 251125 - DNA, 13 bp, Artificial Sequence
  Oligonucleotide for detection of SNP TSC0061295
ttaattagattgt

SEQ ID NO: 251126 - DNA, 13 bp, Artificial Sequence
  Oligonucleotide for detection of SNP TSC0061295
acaatctaattaa

SEQ ID NO: 251127 - DNA, 13 bp, Artificial Sequence
  Oligonucleotide for detection of SNP TSC0061295
ttaattggattgt

SEQ ID NO: 251128 - DNA, 13 bp, Artificial Sequence
  Oligonucleotide for detection of SNP TSC0061295
acaatccaattaa

SEQ ID NO: 251129 - DNA, 13 bp, Artificial Sequence
  Oligonucleotide for detection of SNP TSC0061295
ttaatcggattgt

SEQ ID NO: 251130 - DNA, 13 bp, Artificial Sequence
  Oligonucleotide for detection of SNP TSC0061295
acaatccgattaa

SEQ ID NO: 251131 - DNA, 13 bp, Artificial Sequence
  Oligonucleotide for detection of SNP TSC0061295
ataatttgattgg

SEQ ID NO: 251132 - DNA, 13 bp, Artificial Sequence
  Oligonucleotide for detection of SNP TSC0061295
ccaatcaaattat

SEQ ID NO: 251133 - DNA, 13 bp, Artificial Sequence
  Oligonucleotide for detection of SNP TSC0061295
ataattcgattgg

SEQ ID NO: 251134 - DNA, 13 bp, Artificial Sequence
  Oligonucleotide for detection of SNP TSC0061295
ccaatcgaattat

SEQ ID NO: 251135 - DNA, 13 bp, Artificial Sequence
  Oligonucleotide for detection of SNP TSC0061296
tttttgatttatg

SEQ ID NO: 251136 - DNA, 13 bp, Artificial Sequence
  Oligonucleotide for detection of SNP TSC0061296
cataaatcaaaaa

SEQ ID NO: 251137 - DNA, 13 bp, Artificial Sequence
  Oligonucleotide for detection of SNP TSC0061296
tttttgttttatg

SEQ ID NO: 251138 - DNA, 13 bp, Artificial Sequence
  Oligonucleotide for detection of SNP TSC0061296
cataaaacaaaaa

SEQ ID NO: 251139 - DNA, 13 bp, Artificial Sequence
  Oligonucleotide for detection of SNP TSC0061296
tttttgatttacg

SEQ ID NO: 251140 - DNA, 13 bp, Artificial Sequence
  Oligonucleotide for detection of SNP TSC0061296
cgtaaatcaaaaa

SEQ ID NO: 251141 - DNA, 13 bp, Artificial Sequence
  Oligonucleotide for detection of SNP TSC0061296
tttttgttttacg

SEQ ID NO: 251142 - DNA, 13 bp, Artificial Sequence
  Oligonucleotide for detection of SNP TSC0061296
cgtaaaacaaaaa

SEQ ID NO: 251143 - DNA, 13 bp, Artificial Sequence
  Oligonucleotide for detection of SNP TSC0061296
tgtgggttagaaa

SEQ ID NO: 251144 - DNA, 13 bp, Artificial Sequence
  Oligonucleotide for detection of SNP TSC0061296
tttctaacccaca

SEQ ID NO: 251145 - DNA, 13 bp, Artificial Sequence
  Oligonucleotide for detection of SNP TSC0061296
tgtgggatagaaa

SEQ ID NO: 251146 - DNA, 13 bp, Artificial Sequence
  Oligonucleotide for detection of SNP TSC0061296
tttctatcccaca

SEQ ID NO: 251147 - DNA, 13 bp, Artificial Sequence
  Oligonucleotide for detection of SNP TSC0061296
cgtgggttagaaa

SEQ ID NO: 251148 - DNA, 13 bp, Artificial Sequence
  Oligonucleotide for detection of SNP TSC0061296
tttctaacccacg

SEQ ID NO: 251149 - DNA, 13 bp, Artificial Sequence
  Oligonucleotide for detection of SNP TSC0061296
cgtgggatagaaa

SEQ ID NO: 251150 - DNA, 13 bp, Artificial Sequence
  Oligonucleotide for detection of SNP TSC0061296
tttctatcccacg

SEQ ID NO: 251151 - DNA, 13 bp, Artificial Sequence
  Oligonucleotide for detection of SNP TSC0061297
ttttatgtttcgt

SEQ ID NO: 251152 - DNA, 13 bp, Artificial Sequence
  Oligonucleotide for detection of SNP TSC0061297
acgaaacataaaa

SEQ ID NO: 251153 - DNA, 13 bp, Artificial Sequence
  Oligonucleotide for detection of SNP TSC0061297
ttttatatttcgt

SEQ ID NO: 251154 - DNA, 13 bp, Artificial Sequence
  Oligonucleotide for detection of SNP TSC0061297
acgaaatataaaa

SEQ ID NO: 251155 - DNA, 13 bp, Artificial Sequence
  Oligonucleotide for detection of SNP TSC0061298
gtatagtggtttt

SEQ ID NO: 251156 - DNA, 13 bp, Artificial Sequence
  Oligonucleotide for detection of SNP TSC0061298
aaaaccactatac

SEQ ID NO: 251157 - DNA, 13 bp, Artificial Sequence
  Oligonucleotide for detection of SNP TSC0061298
gtatagcggtttt

SEQ ID NO: 251158 - DNA, 13 bp, Artificial Sequence
  Oligonucleotide for detection of SNP TSC0061298
aaaaccgctatac

SEQ ID NO: 251159 - DNA, 13 bp, Artificial Sequence
  Oligonucleotide for detection of SNP TSC0061298
aaaattgttgtay

SEQ ID NO: 251160 - DNA, 13 bp, Artificial Sequence
  Oligonucleotide for detection of SNP TSC0061298
rtacaacaatttt

SEQ ID NO: 251161 - DNA, 13 bp, Artificial Sequence
  Oligonucleotide for detection of SNP TSC0061298
aaaattattgtay

SEQ ID NO: 251162 - DNA, 13 bp, Artificial Sequence
  Oligonucleotide for detection of SNP TSC0061298
rtacaataatttt

SEQ ID NO: 251163 - DNA, 13 bp, Artificial Sequence
  Oligonucleotide for detection of SNP TSC0061298
aaaatcgttgtay

SEQ ID NO: 251164 - DNA, 13 bp, Artificial Sequence
  Oligonucleotide for detection of SNP TSC0061298
rtacaacgatttt

SEQ ID NO: 251165 - DNA, 13 bp, Artificial Sequence
  Oligonucleotide for detection of SNP TSC0061299
gtggagtgaagaa

SEQ ID NO: 251166 - DNA, 13 bp, Artificial Sequence
  Oligonucleotide for detection of SNP TSC0061299
ttcttcactccac

SEQ ID NO: 251167 - DNA, 13 bp, Artificial Sequence
  Oligonucleotide for detection of SNP TSC0061299
gtggagagaagaa

SEQ ID NO: 251168 - DNA, 13 bp, Artificial Sequence
  Oligonucleotide for detection of SNP TSC0061299
ttcttctctccac

SEQ ID NO: 251169 - DNA, 13 bp, Artificial Sequence
  Oligonucleotide for detection of SNP TSC0061301
ttagaaagagagg

SEQ ID NO: 251170 - DNA, 13 bp, Artificial Sequence
  Oligonucleotide for detection of SNP TSC0061301
cctctctttctaa

SEQ ID NO: 251171 - DNA, 13 bp, Artificial Sequence
  Oligonucleotide for detection of SNP TSC0061301
ttagaatgagagg

SEQ ID NO: 251172 - DNA, 13 bp, Artificial Sequence
  Oligonucleotide for detection of SNP TSC0061301
cctctcattctaa

SEQ ID NO: 251173 - DNA, 13 bp, Artificial Sequence
  Oligonucleotide for detection of SNP TSC0061301
ttagaacgagagg

SEQ ID NO: 251174 - DNA, 13 bp, Artificial Sequence
  Oligonucleotide for detection of SNP TSC0061301
cctctcgttctaa

SEQ ID NO: 251175 - DNA, 13 bp, Artificial Sequence
  Oligonucleotide for detection of SNP TSC0061305
agttaattttggt

SEQ ID NO: 251176 - DNA, 13 bp, Artificial Sequence
  Oligonucleotide for detection of SNP TSC0061305
accaaaattaact

SEQ ID NO: 251177 - DNA, 13 bp, Artificial Sequence
  Oligonucleotide for detection of SNP TSC0061305
agttaagtttggt

SEQ ID NO: 251178 - DNA, 13 bp, Artificial Sequence
  Oligonucleotide for detection of SNP TSC0061305
accaaacttaact

SEQ ID NO: 251179 - DNA, 13 bp, Artificial Sequence
  Oligonucleotide for detection of SNP TSC0061305
attaaagttgatt

SEQ ID NO: 251180 - DNA, 13 bp, Artificial Sequence
  Oligonucleotide for detection of SNP TSC0061305
aatcaactttaat

SEQ ID NO: 251181 - DNA, 13 bp, Artificial Sequence
  Oligonucleotide for detection of SNP TSC0061305
attaaatttgatt

SEQ ID NO: 251182 - DNA, 13 bp, Artificial Sequence
  Oligonucleotide for detection of SNP TSC0061305
aatcaaatttaat

SEQ ID NO: 251183 - DNA, 13 bp, Artificial Sequence
  Oligonucleotide for detection of SNP TSC0061306
ttgtttttaaaag

SEQ ID NO: 251184 - DNA, 13 bp, Artificial Sequence
  Oligonucleotide for detection of SNP TSC0061306
cttttaaaaacaa

SEQ ID NO: 251185 - DNA, 13 bp, Artificial Sequence
  Oligonucleotide for detection of SNP TSC0061306
ttgtttataaaag

SEQ ID NO: 251186 - DNA, 13 bp, Artificial Sequence
  Oligonucleotide for detection of SNP TSC0061306
cttttataaacaa

SEQ ID NO: 251187 - DNA, 13 bp, Artificial Sequence
  Oligonucleotide for detection of SNP TSC0061310
tgtgttaggtttt

SEQ ID NO: 251188 - DNA, 13 bp, Artificial Sequence
  Oligonucleotide for detection of SNP TSC0061310
aaaacctaacaca

SEQ ID NO: 251189 - DNA, 13 bp, Artificial Sequence
  Oligonucleotide for detection of SNP TSC0061310
tgtgttgggtttt

SEQ ID NO: 251190 - DNA, 13 bp, Artificial Sequence
  Oligonucleotide for detection of SNP TSC0061310
aaaacccaacaca

SEQ ID NO: 251191 - DNA, 13 bp, Artificial Sequence
  Oligonucleotide for detection of SNP TSC0061310
tgtgtcgggtttt

SEQ ID NO: 251192 - DNA, 13 bp, Artificial Sequence
  Oligonucleotide for detection of SNP TSC0061310
aaaacccgacaca

SEQ ID NO: 251193 - DNA, 13 bp, Artificial Sequence
  Oligonucleotide for detection of SNP TSC0061310
agggtttggtata

SEQ ID NO: 251194 - DNA, 13 bp, Artificial Sequence
  Oligonucleotide for detection of SNP TSC0061310
tataccaaaccct

SEQ ID NO: 251195 - DNA, 13 bp, Artificial Sequence
  Oligonucleotide for detection of SNP TSC0061310
agggttcggtata

SEQ ID NO: 251196 - DNA, 13 bp, Artificial Sequence
  Oligonucleotide for detection of SNP TSC0061310
tataccgaaccct

SEQ ID NO: 251197 - DNA, 13 bp, Artificial Sequence
  Oligonucleotide for detection of SNP TSC0061311
aatttaaggttat

SEQ ID NO: 251198 - DNA, 13 bp, Artificial Sequence
  Oligonucleotide for detection of SNP TSC0061311
ataaccttaaatt

SEQ ID NO: 251199 - DNA, 13 bp, Artificial Sequence
  Oligonucleotide for detection of SNP TSC0061311
aatttagggttat

SEQ ID NO: 251200 - DNA, 13 bp, Artificial Sequence
  Oligonucleotide for detection of SNP TSC0061311
ataaccctaaatt

SEQ ID NO: 251201 - DNA, 13 bp, Artificial Sequence
  Oligonucleotide for detection of SNP TSC0061313
gagttagaattay

SEQ ID NO: 251202 - DNA, 13 bp, Artificial Sequence
  Oligonucleotide for detection of SNP TSC0061313
rtaattctaactc

SEQ ID NO: 251203 - DNA, 13 bp, Artificial Sequence
  Oligonucleotide for detection of SNP TSC0061313
gagttaaaattay

SEQ ID NO: 251204 - DNA, 13 bp, Artificial Sequence
  Oligonucleotide for detection of SNP TSC0061313
rtaattttaactc

SEQ ID NO: 251205 - DNA, 13 bp, Artificial Sequence
  Oligonucleotide for detection of SNP TSC0061314
tagaatgtataaa

SEQ ID NO: 251206 - DNA, 13 bp, Artificial Sequence
  Oligonucleotide for detection of SNP TSC0061314
tttatacattcta

SEQ ID NO: 251207 - DNA, 13 bp, Artificial Sequence
  Oligonucleotide for detection of SNP TSC0061314
tagaatatataaa

SEQ ID NO: 251208 - DNA, 13 bp, Artificial Sequence
  Oligonucleotide for detection of SNP TSC0061314
tttatatattcta

SEQ ID NO: 251209 - DNA, 13 bp, Artificial Sequence
  Oligonucleotide for detection of SNP TSC0061317
tataggaatgggg

SEQ ID NO: 251210 - DNA, 13 bp, Artificial Sequence
  Oligonucleotide for detection of SNP TSC0061317
ccccattcctata

SEQ ID NO: 251211 - DNA, 13 bp, Artificial Sequence
  Oligonucleotide for detection of SNP TSC0061317
tatagggatgggg

SEQ ID NO: 251212 - DNA, 13 bp, Artificial Sequence
  Oligonucleotide for detection of SNP TSC0061317
ccccatccctata

SEQ ID NO: 251213 - DNA, 13 bp, Artificial Sequence
  Oligonucleotide for detection of SNP TSC0061318
ggagtatatttta

SEQ ID NO: 251214 - DNA, 13 bp, Artificial Sequence
  Oligonucleotide for detection of SNP TSC0061318
taaaatatactcc

SEQ ID NO: 251215 - DNA, 13 bp, Artificial Sequence
  Oligonucleotide for detection of SNP TSC0061318
ggagtagatttta

SEQ ID NO: 251216 - DNA, 13 bp, Artificial Sequence
  Oligonucleotide for detection of SNP TSC0061318
taaaatctactcc

SEQ ID NO: 251217 - DNA, 13 bp, Artificial Sequence
  Oligonucleotide for detection of SNP TSC0061318
tggaatgtattty

SEQ ID NO: 251218 - DNA, 13 bp, Artificial Sequence
  Oligonucleotide for detection of SNP TSC0061318
raaatacattcca

SEQ ID NO: 251219 - DNA, 13 bp, Artificial Sequence
  Oligonucleotide for detection of SNP TSC0061318
tggaatttattty

SEQ ID NO: 251220 - DNA, 13 bp, Artificial Sequence
  Oligonucleotide for detection of SNP TSC0061318
raaataaattcca

SEQ ID NO: 251221 - DNA, 13 bp, Artificial Sequence
  Oligonucleotide for detection of SNP TSC0061319
gagttagattata

SEQ ID NO: 251222 - DNA, 13 bp, Artificial Sequence
  Oligonucleotide for detection of SNP TSC0061319
tataatctaactc

SEQ ID NO: 251223 - DNA, 13 bp, Artificial Sequence
  Oligonucleotide for detection of SNP TSC0061319
gagttaaattata

SEQ ID NO: 251224 - DNA, 13 bp, Artificial Sequence
  Oligonucleotide for detection of SNP TSC0061319
tataatttaactc

SEQ ID NO: 251225 - DNA, 13 bp, Artificial Sequence
  Oligonucleotide for detection of SNP TSC0061320
ggtagatgggtag

SEQ ID NO: 251226 - DNA, 13 bp, Artificial Sequence
  Oligonucleotide for detection of SNP TSC0061320
ctacccatctacc

SEQ ID NO: 251227 - DNA, 13 bp, Artificial Sequence
  Oligonucleotide for detection of SNP TSC0061320
ggtagacgggtag

SEQ ID NO: 251228 - DNA, 13 bp, Artificial Sequence
  Oligonucleotide for detection of SNP TSC0061320
ctacccgtctacc

SEQ ID NO: 251229 - DNA, 13 bp, Artificial Sequence
  Oligonucleotide for detection of SNP TSC0061321
attttaatgggta

SEQ ID NO: 251230 - DNA, 13 bp, Artificial Sequence
  Oligonucleotide for detection of SNP TSC0061321
tacccattaaaat

SEQ ID NO: 251231 - DNA, 13 bp, Artificial Sequence
  Oligonucleotide for detection of SNP TSC0061321
attttagtgggta

SEQ ID NO: 251232 - DNA, 13 bp, Artificial Sequence
  Oligonucleotide for detection of SNP TSC0061321
tacccactaaaat

SEQ ID NO: 251233 - DNA, 13 bp, Artificial Sequence
  Oligonucleotide for detection of SNP TSC0061325
aggttttgataga

SEQ ID NO: 251234 - DNA, 13 bp, Artificial Sequence
  Oligonucleotide for detection of SNP TSC0061325
tctatcaaaacct

SEQ ID NO: 251235 - DNA, 13 bp, Artificial Sequence
  Oligonucleotide for detection of SNP TSC0061325
aggtttcgataga

SEQ ID NO: 251236 - DNA, 13 bp, Artificial Sequence
  Oligonucleotide for detection of SNP TSC0061325
tctatcgaaacct

SEQ ID NO: 251237 - DNA, 13 bp, Artificial Sequence
  Oligonucleotide for detection of SNP TSC0061325
tttgttgaggttt

SEQ ID NO: 251238 - DNA, 13 bp, Artificial Sequence
  Oligonucleotide for detection of SNP TSC0061325
aaacctcaacaaa

SEQ ID NO: 251239 - DNA, 13 bp, Artificial Sequence
  Oligonucleotide for detection of SNP TSC0061325
tttgttaaggttt

SEQ ID NO: 251240 - DNA, 13 bp, Artificial Sequence
  Oligonucleotide for detection of SNP TSC0061325
aaaccttaacaaa

SEQ ID NO: 251241 - DNA, 13 bp, Artificial Sequence
  Oligonucleotide for detection of SNP TSC0061325
tttgtcgaggttt

SEQ ID NO: 251242 - DNA, 13 bp, Artificial Sequence
  Oligonucleotide for detection of SNP TSC0061325
aaacctcgacaaa

SEQ ID NO: 251243 - DNA, 13 bp, Artificial Sequence
  Oligonucleotide for detection of SNP TSC0061326
gatgaagttttat

SEQ ID NO: 251244 - DNA, 13 bp, Artificial Sequence
  Oligonucleotide for detection of SNP TSC0061326
ataaaacttcatc

SEQ ID NO: 251245 - DNA, 13 bp, Artificial Sequence
  Oligonucleotide for detection of SNP TSC0061326
gatgaaattttat

SEQ ID NO: 251246 - DNA, 13 bp, Artificial Sequence
  Oligonucleotide for detection of SNP TSC0061326
ataaaatttcatc

SEQ ID NO: 251247 - DNA, 13 bp, Artificial Sequence
  Oligonucleotide for detection of SNP TSC0006761
gtgagatgtgttt

SEQ ID NO: 251248 - DNA, 13 bp, Artificial Sequence
  Oligonucleotide for detection of SNP TSC0006761
aaacacatctcac

SEQ ID NO: 251249 - DNA, 13 bp, Artificial Sequence
  Oligonucleotide for detection of SNP TSC0006761
gtgagacgtgttt

SEQ ID NO: 251250 - DNA, 13 bp, Artificial Sequence
  Oligonucleotide for detection of SNP TSC0006761
aaacacgtctcac

SEQ ID NO: 251251 - DNA, 13 bp, Artificial Sequence
  Oligonucleotide for detection of SNP TSC0006762
tgtagtgagttat

SEQ ID NO: 251252 - DNA, 13 bp, Artificial Sequence
  Oligonucleotide for detection of SNP TSC0006762
ataactcactaca

SEQ ID NO: 251253 - DNA, 13 bp, Artificial Sequence
  Oligonucleotide for detection of SNP TSC0006762
tgtagtaagttat

SEQ ID NO: 251254 - DNA, 13 bp, Artificial Sequence
  Oligonucleotide for detection of SNP TSC0006762
ataacttactaca

SEQ ID NO: 251255 - DNA, 13 bp, Artificial Sequence
  Oligonucleotide for detection of SNP TSC0061330
ttgttgggggaat

SEQ ID NO: 251256 - DNA, 13 bp, Artificial Sequence
  Oligonucleotide for detection of SNP TSC0061330
attcccccaacaa

SEQ ID NO: 251257 - DNA, 13 bp, Artificial Sequence
  Oligonucleotide for detection of SNP TSC0061330
ttgttgagggaat

SEQ ID NO: 251258 - DNA, 13 bp, Artificial Sequence
  Oligonucleotide for detection of SNP TSC0061330
attccctcaacaa

SEQ ID NO: 251259 - DNA, 13 bp, Artificial Sequence
  Oligonucleotide for detection of SNP TSC0061334
aggtaggtaaaat

SEQ ID NO: 251260 - DNA, 13 bp, Artificial Sequence
  Oligonucleotide for detection of SNP TSC0061334
attttacctacct

SEQ ID NO: 251261 - DNA, 13 bp, Artificial Sequence
  Oligonucleotide for detection of SNP TSC0061334
aggtagataaaat

SEQ ID NO: 251262 - DNA, 13 bp, Artificial Sequence
  Oligonucleotide for detection of SNP TSC0061334
attttatctacct

SEQ ID NO: 251263 - DNA, 13 bp, Artificial Sequence
  Oligonucleotide for detection of SNP TSC0061335
aaaggatttttgg

SEQ ID NO: 251264 - DNA, 13 bp, Artificial Sequence
  Oligonucleotide for detection of SNP TSC0061335
ccaaaaatccttt

SEQ ID NO: 251265 - DNA, 13 bp, Artificial Sequence
  Oligonucleotide for detection of SNP TSC0061335
aaaggagttttgg

SEQ ID NO: 251266 - DNA, 13 bp, Artificial Sequence
  Oligonucleotide for detection of SNP TSC0061335
ccaaaactccttt

SEQ ID NO: 251267 - DNA, 13 bp, Artificial Sequence
  Oligonucleotide for detection of SNP TSC0061336
gggtaatggggtt

SEQ ID NO: 251268 - DNA, 13 bp, Artificial Sequence
  Oligonucleotide for detection of SNP TSC0061336
aaccccattaccc

SEQ ID NO: 251269 - DNA, 13 bp, Artificial Sequence
  Oligonucleotide for detection of SNP TSC0061336
gggtaacggggtt

SEQ ID NO: 251270 - DNA, 13 bp, Artificial Sequence
  Oligonucleotide for detection of SNP TSC0061336
aaccccgttaccc

SEQ ID NO: 251271 - DNA, 13 bp, Artificial Sequence
  Oligonucleotide for detection of SNP TSC0061337
gttgttaaatttg

SEQ ID NO: 251272 - DNA, 13 bp, Artificial Sequence
  Oligonucleotide for detection of SNP TSC0061337
caaatttaacaac

SEQ ID NO: 251273 - DNA, 13 bp, Artificial Sequence
  Oligonucleotide for detection of SNP TSC0061337
gttgttgaatttg

SEQ ID NO: 251274 - DNA, 13 bp, Artificial Sequence
  Oligonucleotide for detection of SNP TSC0061337
caaattcaacaac

SEQ ID NO: 251275 - DNA, 13 bp, Artificial Sequence
  Oligonucleotide for detection of SNP TSC0061338
tttgttttggggg

SEQ ID NO: 251276 - DNA, 13 bp, Artificial Sequence
  Oligonucleotide for detection of SNP TSC0061338
cccccaaaacaaa

SEQ ID NO: 251277 - DNA, 13 bp, Artificial Sequence
  Oligonucleotide for detection of SNP TSC0061338
tttgttgtggggg

SEQ ID NO: 251278 - DNA, 13 bp, Artificial Sequence
  Oligonucleotide for detection of SNP TSC0061338
cccccacaacaaa

SEQ ID NO: 251279 - DNA, 13 bp, Artificial Sequence
  Oligonucleotide for detection of SNP TSC0061339
taaaaggaaaaty

SEQ ID NO: 251280 - DNA, 13 bp, Artificial Sequence
  Oligonucleotide for detection of SNP TSC0061339
rattttcctttta

SEQ ID NO: 251281 - DNA, 13 bp, Artificial Sequence
  Oligonucleotide for detection of SNP TSC0061339
taaaagtaaaaty

SEQ ID NO: 251282 - DNA, 13 bp, Artificial Sequence
  Oligonucleotide for detection of SNP TSC0061339
rattttactttta

SEQ ID NO: 251283 - DNA, 13 bp, Artificial Sequence
  Oligonucleotide for detection of SNP TSC0061340
tgatatttttatg

SEQ ID NO: 251284 - DNA, 13 bp, Artificial Sequence
  Oligonucleotide for detection of SNP TSC0061340
cataaaaatatca

SEQ ID NO: 251285 - DNA, 13 bp, Artificial Sequence
  Oligonucleotide for detection of SNP TSC0061340
tgatatgtttatg

SEQ ID NO: 251286 - DNA, 13 bp, Artificial Sequence
  Oligonucleotide for detection of SNP TSC0061340
cataaacatatca

SEQ ID NO: 251287 - DNA, 13 bp, Artificial Sequence
  Oligonucleotide for detection of SNP TSC0061340
tatagggatatta

SEQ ID NO: 251288 - DNA, 13 bp, Artificial Sequence
  Oligonucleotide for detection of SNP TSC0061340
taatatccctata

SEQ ID NO: 251289 - DNA, 13 bp, Artificial Sequence
  Oligonucleotide for detection of SNP TSC0061340
tataggtatatta

SEQ ID NO: 251290 - DNA, 13 bp, Artificial Sequence
  Oligonucleotide for detection of SNP TSC0061340
taatatacctata

SEQ ID NO: 251291 - DNA, 13 bp, Artificial Sequence
  Oligonucleotide for detection of SNP TSC0061341
aagtttgttatga

SEQ ID NO: 251292 - DNA, 13 bp, Artificial Sequence
  Oligonucleotide for detection of SNP TSC0061341
tcataacaaactt

SEQ ID NO: 251293 - DNA, 13 bp, Artificial Sequence
  Oligonucleotide for detection of SNP TSC0061341
aagtttattatga

SEQ ID NO: 251294 - DNA, 13 bp, Artificial Sequence
  Oligonucleotide for detection of SNP TSC0061341
tcataataaactt

SEQ ID NO: 251295 - DNA, 13 bp, Artificial Sequence
  Oligonucleotide for detection of SNP TSC0061342
tagttaagtttta

SEQ ID NO: 251296 - DNA, 13 bp, Artificial Sequence
  Oligonucleotide for detection of SNP TSC0061342
taaaacttaacta

SEQ ID NO: 251297 - DNA, 13 bp, Artificial Sequence
  Oligonucleotide for detection of SNP TSC0061342
tagttatgtttta

SEQ ID NO: 251298 - DNA, 13 bp, Artificial Sequence
  Oligonucleotide for detection of SNP TSC0061342
taaaacataacta

SEQ ID NO: 251299 - DNA, 13 bp, Artificial Sequence
  Oligonucleotide for detection of SNP TSC0061342
tgggatttggttg

SEQ ID NO: 251300 - DNA, 13 bp, Artificial Sequence
  Oligonucleotide for detection of SNP TSC0061342
caaccaaatccca

SEQ ID NO: 251301 - DNA, 13 bp, Artificial Sequence
  Oligonucleotide for detection of SNP TSC0061342
tgggatatggttg

SEQ ID NO: 251302 - DNA, 13 bp, Artificial Sequence
  Oligonucleotide for detection of SNP TSC0061342
caaccatatccca

SEQ ID NO: 251303 - DNA, 13 bp, Artificial Sequence
  Oligonucleotide for detection of SNP TSC0061344
tatgattgttgtt

SEQ ID NO: 251304 - DNA, 13 bp, Artificial Sequence
  Oligonucleotide for detection of SNP TSC0061344
aacaacaatcata

SEQ ID NO: 251305 - DNA, 13 bp, Artificial Sequence
  Oligonucleotide for detection of SNP TSC0061344
tacgattgttgtt

SEQ ID NO: 251306 - DNA, 13 bp, Artificial Sequence
  Oligonucleotide for detection of SNP TSC0061344
aacaacaatcgta

SEQ ID NO: 251307 - DNA, 13 bp, Artificial Sequence
  Oligonucleotide for detection of SNP TSC0061344
tatgatcgttgtt

SEQ ID NO: 251308 - DNA, 13 bp, Artificial Sequence
  Oligonucleotide for detection of SNP TSC0061344
aacaacgatcata

SEQ ID NO: 251309 - DNA, 13 bp, Artificial Sequence
  Oligonucleotide for detection of SNP TSC0061344
tacgatcgttgtt

SEQ ID NO: 251310 - DNA, 13 bp, Artificial Sequence
  Oligonucleotide for detection of SNP TSC0061344
aacaacgatcgta

SEQ ID NO: 251311 - DNA, 13 bp, Artificial Sequence
  Oligonucleotide for detection of SNP TSC0061344
aatagtgattgta

SEQ ID NO: 251312 - DNA, 13 bp, Artificial Sequence
  Oligonucleotide for detection of SNP TSC0061344
tacaatcactatt

SEQ ID NO: 251313 - DNA, 13 bp, Artificial Sequence
  Oligonucleotide for detection of SNP TSC0061344
aatagtaattgta

SEQ ID NO: 251314 - DNA, 13 bp, Artificial Sequence
  Oligonucleotide for detection of SNP TSC0061344
tacaattactatt

SEQ ID NO: 251315 - DNA, 13 bp, Artificial Sequence
  Oligonucleotide for detection of SNP TSC0061344
aatagcgattgta

SEQ ID NO: 251316 - DNA, 13 bp, Artificial Sequence
  Oligonucleotide for detection of SNP TSC0061344
tacaatcgctatt

SEQ ID NO: 251317 - DNA, 13 bp, Artificial Sequence
  Oligonucleotide for detection of SNP TSC0061344
aatagtaatcgta

SEQ ID NO: 251318 - DNA, 13 bp, Artificial Sequence
  Oligonucleotide for detection of SNP TSC0061344
tacgattactatt

SEQ ID NO: 251319 - DNA, 13 bp, Artificial Sequence
  Oligonucleotide for detection of SNP TSC0061344
aatagtgatcgta

SEQ ID NO: 251320 - DNA, 13 bp, Artificial Sequence
  Oligonucleotide for detection of SNP TSC0061344
tacgatcactatt

SEQ ID NO: 251321 - DNA, 13 bp, Artificial Sequence
  Oligonucleotide for detection of SNP TSC0061344
aatagcgatcgta

SEQ ID NO: 251322 - DNA, 13 bp, Artificial Sequence
  Oligonucleotide for detection of SNP TSC0061344
tacgatcgctatt

SEQ ID NO: 251323 - DNA, 13 bp, Artificial Sequence
  Oligonucleotide for detection of SNP TSC0061345
tattggaatattg

SEQ ID NO: 251324 - DNA, 13 bp, Artificial Sequence
  Oligonucleotide for detection of SNP TSC0061345
caatattccaata

SEQ ID NO: 251325 - DNA, 13 bp, Artificial Sequence
  Oligonucleotide for detection of SNP TSC0061345
tattgggatattg

SEQ ID NO: 251326 - DNA, 13 bp, Artificial Sequence
  Oligonucleotide for detection of SNP TSC0061345
caatatcccaata

SEQ ID NO: 251327 - DNA, 13 bp, Artificial Sequence
  Oligonucleotide for detection of SNP TSC0061345
tatcggaatattg

SEQ ID NO: 251328 - DNA, 13 bp, Artificial Sequence
  Oligonucleotide for detection of SNP TSC0061345
caatattccgata

SEQ ID NO: 251329 - DNA, 13 bp, Artificial Sequence
  Oligonucleotide for detection of SNP TSC0061345
tatcgggatattg

SEQ ID NO: 251330 - DNA, 13 bp, Artificial Sequence
  Oligonucleotide for detection of SNP TSC0061345
caatatcccgata

SEQ ID NO: 251331 - DNA, 13 bp, Artificial Sequence
  Oligonucleotide for detection of SNP TSC0061346
gaatggtggatty

SEQ ID NO: 251332 - DNA, 13 bp, Artificial Sequence
  Oligonucleotide for detection of SNP TSC0061346
raatccaccattc

SEQ ID NO: 251333 - DNA, 13 bp, Artificial Sequence
  Oligonucleotide for detection of SNP TSC0061346
gaatgggggatty

SEQ ID NO: 251334 - DNA, 13 bp, Artificial Sequence
  Oligonucleotide for detection of SNP TSC0061346
raatcccccattc

SEQ ID NO: 251335 - DNA, 13 bp, Artificial Sequence
  Oligonucleotide for detection of SNP TSC0061346
gaacggtggatty

SEQ ID NO: 251336 - DNA, 13 bp, Artificial Sequence
  Oligonucleotide for detection of SNP TSC0061346
raatccaccgttc

SEQ ID NO: 251337 - DNA, 13 bp, Artificial Sequence
  Oligonucleotide for detection of SNP TSC0061346
gaacgggggatty

SEQ ID NO: 251338 - DNA, 13 bp, Artificial Sequence
  Oligonucleotide for detection of SNP TSC0061346
raatcccccgttc

SEQ ID NO: 251339 - DNA, 13 bp, Artificial Sequence
  Oligonucleotide for detection of SNP TSC0061346
ggatttattgtty

SEQ ID NO: 251340 - DNA, 13 bp, Artificial Sequence
  Oligonucleotide for detection of SNP TSC0061346
raacaataaatcc

SEQ ID NO: 251341 - DNA, 13 bp, Artificial Sequence
  Oligonucleotide for detection of SNP TSC0061346
ggattttttgtty

SEQ ID NO: 251342 - DNA, 13 bp, Artificial Sequence
  Oligonucleotide for detection of SNP TSC0061346
raacaaaaaatcc

SEQ ID NO: 251343 - DNA, 13 bp, Artificial Sequence
  Oligonucleotide for detection of SNP TSC0061346
ggatttatcgtty

SEQ ID NO: 251344 - DNA, 13 bp, Artificial Sequence
  Oligonucleotide for detection of SNP TSC0061346
raacgataaatcc

SEQ ID NO: 251345 - DNA, 13 bp, Artificial Sequence
  Oligonucleotide for detection of SNP TSC0061346
ggatttttcgtty

SEQ ID NO: 251346 - DNA, 13 bp, Artificial Sequence
  Oligonucleotide for detection of SNP TSC0061346
raacgaaaaatcc

SEQ ID NO: 251347 - DNA, 13 bp, Artificial Sequence
  Oligonucleotide for detection of SNP TSC0061347
tttgatggggtgg

SEQ ID NO: 251348 - DNA, 13 bp, Artificial Sequence
  Oligonucleotide for detection of SNP TSC0061347
ccaccccatcaaa

SEQ ID NO: 251349 - DNA, 13 bp, Artificial Sequence
  Oligonucleotide for detection of SNP TSC0061347
tttgatagggtgg

SEQ ID NO: 251350 - DNA, 13 bp, Artificial Sequence
  Oligonucleotide for detection of SNP TSC0061347
ccaccctatcaaa

SEQ ID NO: 251351 - DNA, 13 bp, Artificial Sequence
  Oligonucleotide for detection of SNP TSC0061347
tttgatggggcgg

SEQ ID NO: 251352 - DNA, 13 bp, Artificial Sequence
  Oligonucleotide for detection of SNP TSC0061347
ccgccccatcaaa

SEQ ID NO: 251353 - DNA, 13 bp, Artificial Sequence
  Oligonucleotide for detection of SNP TSC0061347
tttgatagggcgg

SEQ ID NO: 251354 - DNA, 13 bp, Artificial Sequence
  Oligonucleotide for detection of SNP TSC0061347
ccgccctatcaaa

SEQ ID NO: 251355 - DNA, 13 bp, Artificial Sequence
  Oligonucleotide for detection of SNP TSC0061348
ttttgattattty

SEQ ID NO: 251356 - DNA, 13 bp, Artificial Sequence
  Oligonucleotide for detection of SNP TSC0061348
raaataatcaaaa

SEQ ID NO: 251357 - DNA, 13 bp, Artificial Sequence
  Oligonucleotide for detection of SNP TSC0061348
ggaatggttaggg

SEQ ID NO: 251358 - DNA, 13 bp, Artificial Sequence
  Oligonucleotide for detection of SNP TSC0061348
ccctaaccattcc

SEQ ID NO: 251359 - DNA, 13 bp, Artificial Sequence
  Oligonucleotide for detection of SNP TSC0061348
ggaatgtttaggg

SEQ ID NO: 251360 - DNA, 13 bp, Artificial Sequence
  Oligonucleotide for detection of SNP TSC0061348
ccctaaacattcc

SEQ ID NO: 251361 - DNA, 13 bp, Artificial Sequence
  Oligonucleotide for detection of SNP TSC0061349
agggaaggtaatg

SEQ ID NO: 251362 - DNA, 13 bp, Artificial Sequence
  Oligonucleotide for detection of SNP TSC0061349
cattaccttccct

SEQ ID NO: 251363 - DNA, 13 bp, Artificial Sequence
  Oligonucleotide for detection of SNP TSC0061349
agggaaagtaatg

SEQ ID NO: 251364 - DNA, 13 bp, Artificial Sequence
  Oligonucleotide for detection of SNP TSC0061349
cattactttccct

SEQ ID NO: 251365 - DNA, 13 bp, Artificial Sequence
  Oligonucleotide for detection of SNP TSC0061350
attttaaggttga

SEQ ID NO: 251366 - DNA, 13 bp, Artificial Sequence
  Oligonucleotide for detection of SNP TSC0061350
tcaaccttaaaat

SEQ ID NO: 251367 - DNA, 13 bp, Artificial Sequence
  Oligonucleotide for detection of SNP TSC0061350
attttagggttga

SEQ ID NO: 251368 - DNA, 13 bp, Artificial Sequence
  Oligonucleotide for detection of SNP TSC0061350
tcaaccctaaaat

SEQ ID NO: 251369 - DNA, 13 bp, Artificial Sequence
  Oligonucleotide for detection of SNP TSC0061351
agttggtaggaaa

SEQ ID NO: 251370 - DNA, 13 bp, Artificial Sequence
  Oligonucleotide for detection of SNP TSC0061351
tttcctaccaact

SEQ ID NO: 251371 - DNA, 13 bp, Artificial Sequence
  Oligonucleotide for detection of SNP TSC0061351
agttgggaggaaa

SEQ ID NO: 251372 - DNA, 13 bp, Artificial Sequence
  Oligonucleotide for detection of SNP TSC0061351
tttcctcccaact

SEQ ID NO: 251373 - DNA, 13 bp, Artificial Sequence
  Oligonucleotide for detection of SNP TSC0061351
tttttttttaatt

SEQ ID NO: 251374 - DNA, 13 bp, Artificial Sequence
  Oligonucleotide for detection of SNP TSC0061351
aattaaaaaaaaa

SEQ ID NO: 251375 - DNA, 13 bp, Artificial Sequence
  Oligonucleotide for detection of SNP TSC0061352
ttaggtgtgataa

SEQ ID NO: 251376 - DNA, 13 bp, Artificial Sequence
  Oligonucleotide for detection of SNP TSC0061352
ttatcacacctaa

SEQ ID NO: 251377 - DNA, 13 bp, Artificial Sequence
  Oligonucleotide for detection of SNP TSC0061352
ttaggtatgataa

SEQ ID NO: 251378 - DNA, 13 bp, Artificial Sequence
  Oligonucleotide for detection of SNP TSC0061352
ttatcatacctaa

SEQ ID NO: 251379 - DNA, 13 bp, Artificial Sequence
  Oligonucleotide for detection of SNP TSC0061353
ttatgtttggata

SEQ ID NO: 251380 - DNA, 13 bp, Artificial Sequence
  Oligonucleotide for detection of SNP TSC0061353
tatccaaacataa

SEQ ID NO: 251381 - DNA, 13 bp, Artificial Sequence
  Oligonucleotide for detection of SNP TSC0061353
ttatgtgtggata

SEQ ID NO: 251382 - DNA, 13 bp, Artificial Sequence
  Oligonucleotide for detection of SNP TSC0061353
tatccacacataa

SEQ ID NO: 251383 - DNA, 13 bp, Artificial Sequence
  Oligonucleotide for detection of SNP TSC0061353
ttacgtttggata

SEQ ID NO: 251384 - DNA, 13 bp, Artificial Sequence
  Oligonucleotide for detection of SNP TSC0061353
tatccaaacgtaa

SEQ ID NO: 251385 - DNA, 13 bp, Artificial Sequence
  Oligonucleotide for detection of SNP TSC0061353
ttacgtgtggata

SEQ ID NO: 251386 - DNA, 13 bp, Artificial Sequence
  Oligonucleotide for detection of SNP TSC0061353
tatccacacgtaa

SEQ ID NO: 251387 - DNA, 13 bp, Artificial Sequence
  Oligonucleotide for detection of SNP TSC0061353
ttatgcgtggata

SEQ ID NO: 251388 - DNA, 13 bp, Artificial Sequence
  Oligonucleotide for detection of SNP TSC0061353
tatccacgcataa

SEQ ID NO: 251389 - DNA, 13 bp, Artificial Sequence
  Oligonucleotide for detection of SNP TSC0061353
ttacgcgtggata

SEQ ID NO: 251390 - DNA, 13 bp, Artificial Sequence
  Oligonucleotide for detection of SNP TSC0061353
tatccacgcgtaa

SEQ ID NO: 251391 - DNA, 13 bp, Artificial Sequence
  Oligonucleotide for detection of SNP TSC0061353
tatttaggtgtgg

SEQ ID NO: 251392 - DNA, 13 bp, Artificial Sequence
  Oligonucleotide for detection of SNP TSC0061353
ccacacctaaata

SEQ ID NO: 251393 - DNA, 13 bp, Artificial Sequence
  Oligonucleotide for detection of SNP TSC0061353
tatttatgtgtgg

SEQ ID NO: 251394 - DNA, 13 bp, Artificial Sequence
  Oligonucleotide for detection of SNP TSC0061353
ccacacataaata

SEQ ID NO: 251395 - DNA, 13 bp, Artificial Sequence
  Oligonucleotide for detection of SNP TSC0061353
tatttaggcgtgg

SEQ ID NO: 251396 - DNA, 13 bp, Artificial Sequence
  Oligonucleotide for detection of SNP TSC0061353
ccacgcctaaata

SEQ ID NO: 251397 - DNA, 13 bp, Artificial Sequence
  Oligonucleotide for detection of SNP TSC0061353
tatttacgtgtgg

SEQ ID NO: 251398 - DNA, 13 bp, Artificial Sequence
  Oligonucleotide for detection of SNP TSC0061353
ccacacgtaaata

SEQ ID NO: 251399 - DNA, 13 bp, Artificial Sequence
  Oligonucleotide for detection of SNP TSC0061353
tatttatgcgtgg

SEQ ID NO: 251400 - DNA, 13 bp, Artificial Sequence
  Oligonucleotide for detection of SNP TSC0061353
ccacgcataaata

SEQ ID NO: 251401 - DNA, 13 bp, Artificial Sequence
  Oligonucleotide for detection of SNP TSC0061353
tatttacgcgtgg

SEQ ID NO: 251402 - DNA, 13 bp, Artificial Sequence
  Oligonucleotide for detection of SNP TSC0061353
ccacgcgtaaata

SEQ ID NO: 251403 - DNA, 13 bp, Artificial Sequence
  Oligonucleotide for detection of SNP TSC0061354
atttagaagatta

SEQ ID NO: 251404 - DNA, 13 bp, Artificial Sequence
  Oligonucleotide for detection of SNP TSC0061354
taatcttctaaat

SEQ ID NO: 251405 - DNA, 13 bp, Artificial Sequence
  Oligonucleotide for detection of SNP TSC0061354
atttaggagatta

SEQ ID NO: 251406 - DNA, 13 bp, Artificial Sequence
  Oligonucleotide for detection of SNP TSC0061354
taatctcctaaat

SEQ ID NO: 251407 - DNA, 13 bp, Artificial Sequence
  Oligonucleotide for detection of SNP TSC0061356
agtttaaatgtgg

SEQ ID NO: 251408 - DNA, 13 bp, Artificial Sequence
  Oligonucleotide for detection of SNP TSC0061356
ccacatttaaact

SEQ ID NO: 251409 - DNA, 13 bp, Artificial Sequence
  Oligonucleotide for detection of SNP TSC0061356
agtttatatgtgg

SEQ ID NO: 251410 - DNA, 13 bp, Artificial Sequence
  Oligonucleotide for detection of SNP TSC0061356
ccacatataaact

SEQ ID NO: 251411 - DNA, 13 bp, Artificial Sequence
  Oligonucleotide for detection of SNP TSC0061356
agtttaaacgtgg

SEQ ID NO: 251412 - DNA, 13 bp, Artificial Sequence
  Oligonucleotide for detection of SNP TSC0061356
ccacgtttaaact

SEQ ID NO: 251413 - DNA, 13 bp, Artificial Sequence
  Oligonucleotide for detection of SNP TSC0061356
agtttatacgtgg

SEQ ID NO: 251414 - DNA, 13 bp, Artificial Sequence
  Oligonucleotide for detection of SNP TSC0061356
ccacgtataaact

SEQ ID NO: 251415 - DNA, 13 bp, Artificial Sequence
  Oligonucleotide for detection of SNP TSC0061356
ttatgtttgggtt

SEQ ID NO: 251416 - DNA, 13 bp, Artificial Sequence
  Oligonucleotide for detection of SNP TSC0061356
aacccaaacataa

SEQ ID NO: 251417 - DNA, 13 bp, Artificial Sequence
  Oligonucleotide for detection of SNP TSC0061356
ttatgtgtgggtt

SEQ ID NO: 251418 - DNA, 13 bp, Artificial Sequence
  Oligonucleotide for detection of SNP TSC0061356
aacccacacataa

SEQ ID NO: 251419 - DNA, 13 bp, Artificial Sequence
  Oligonucleotide for detection of SNP TSC0061356
ttacgtttgggtt

SEQ ID NO: 251420 - DNA, 13 bp, Artificial Sequence
  Oligonucleotide for detection of SNP TSC0061356
aacccaaacgtaa

SEQ ID NO: 251421 - DNA, 13 bp, Artificial Sequence
  Oligonucleotide for detection of SNP TSC0061356
ttacgtgtgggtt

SEQ ID NO: 251422 - DNA, 13 bp, Artificial Sequence
  Oligonucleotide for detection of SNP TSC0061356
aacccacacgtaa

SEQ ID NO: 251423 - DNA, 13 bp, Artificial Sequence
  Oligonucleotide for detection of SNP TSC0061357
ttgaggggtggty

SEQ ID NO: 251424 - DNA, 13 bp, Artificial Sequence
  Oligonucleotide for detection of SNP TSC0061357
raccacccctcaa

SEQ ID NO: 251425 - DNA, 13 bp, Artificial Sequence
  Oligonucleotide for detection of SNP TSC0061357
ttgaggagtggty

SEQ ID NO: 251426 - DNA, 13 bp, Artificial Sequence
  Oligonucleotide for detection of SNP TSC0061357
raccactcctcaa

SEQ ID NO: 251427 - DNA, 13 bp, Artificial Sequence
  Oligonucleotide for detection of SNP TSC0061357
ttgaggggcggty

SEQ ID NO: 251428 - DNA, 13 bp, Artificial Sequence
  Oligonucleotide for detection of SNP TSC0061357
raccgcccctcaa

SEQ ID NO: 251429 - DNA, 13 bp, Artificial Sequence
  Oligonucleotide for detection of SNP TSC0061357
ttgaggagcggty

SEQ ID NO: 251430 - DNA, 13 bp, Artificial Sequence
  Oligonucleotide for detection of SNP TSC0061357
raccgctcctcaa

SEQ ID NO: 251431 - DNA, 13 bp, Artificial Sequence
  Oligonucleotide for detection of SNP TSC0061358
ttattttttgtta

SEQ ID NO: 251432 - DNA, 13 bp, Artificial Sequence
  Oligonucleotide for detection of SNP TSC0061358
taacaaaaaataa

SEQ ID NO: 251433 - DNA, 13 bp, Artificial Sequence
  Oligonucleotide for detection of SNP TSC0061358
tggtaaaaggtgg

SEQ ID NO: 251434 - DNA, 13 bp, Artificial Sequence
  Oligonucleotide for detection of SNP TSC0061358
ccaccttttacca

SEQ ID NO: 251435 - DNA, 13 bp, Artificial Sequence
  Oligonucleotide for detection of SNP TSC0061358
tggtaataggtgg

SEQ ID NO: 251436 - DNA, 13 bp, Artificial Sequence
  Oligonucleotide for detection of SNP TSC0061358
ccacctattacca

SEQ ID NO: 251437 - DNA, 13 bp, Artificial Sequence
  Oligonucleotide for detection of SNP TSC0061361
aaattatggttaa

SEQ ID NO: 251438 - DNA, 13 bp, Artificial Sequence
  Oligonucleotide for detection of SNP TSC0061361
ttaaccataattt

SEQ ID NO: 251439 - DNA, 13 bp, Artificial Sequence
  Oligonucleotide for detection of SNP TSC0061361
aaattacggttaa

SEQ ID NO: 251440 - DNA, 13 bp, Artificial Sequence
  Oligonucleotide for detection of SNP TSC0061361
ttaaccgtaattt

SEQ ID NO: 251441 - DNA, 13 bp, Artificial Sequence
  Oligonucleotide for detection of SNP TSC0061361
ttggttgtgattt

SEQ ID NO: 251442 - DNA, 13 bp, Artificial Sequence
  Oligonucleotide for detection of SNP TSC0061361
aaatcacaaccaa

SEQ ID NO: 251443 - DNA, 13 bp, Artificial Sequence
  Oligonucleotide for detection of SNP TSC0061361
ttggttatgattt

SEQ ID NO: 251444 - DNA, 13 bp, Artificial Sequence
  Oligonucleotide for detection of SNP TSC0061361
aaatcataaccaa

SEQ ID NO: 251445 - DNA, 13 bp, Artificial Sequence
  Oligonucleotide for detection of SNP TSC0061361
ttggtcgtgattt

SEQ ID NO: 251446 - DNA, 13 bp, Artificial Sequence
  Oligonucleotide for detection of SNP TSC0061361
aaatcacgaccaa

SEQ ID NO: 251447 - DNA, 13 bp, Artificial Sequence
  Oligonucleotide for detection of SNP TSC0061362
aagaagattaatt

SEQ ID NO: 251448 - DNA, 13 bp, Artificial Sequence
  Oligonucleotide for detection of SNP TSC0061362
aattaatcttctt

SEQ ID NO: 251449 - DNA, 13 bp, Artificial Sequence
  Oligonucleotide for detection of SNP TSC0061362
aagaagtttaatt

SEQ ID NO: 251450 - DNA, 13 bp, Artificial Sequence
  Oligonucleotide for detection of SNP TSC0061362
aattaaacttctt

SEQ ID NO: 251451 - DNA, 13 bp, Artificial Sequence
  Oligonucleotide for detection of SNP TSC0061363
gaatttatattta

SEQ ID NO: 251452 - DNA, 13 bp, Artificial Sequence
  Oligonucleotide for detection of SNP TSC0061363
taaatataaattc

SEQ ID NO: 251453 - DNA, 13 bp, Artificial Sequence
  Oligonucleotide for detection of SNP TSC0061363
tgaatatggatty

SEQ ID NO: 251454 - DNA, 13 bp, Artificial Sequence
  Oligonucleotide for detection of SNP TSC0061363
raatccatattca

SEQ ID NO: 251455 - DNA, 13 bp, Artificial Sequence
  Oligonucleotide for detection of SNP TSC0061363
tgaatacggatty

SEQ ID NO: 251456 - DNA, 13 bp, Artificial Sequence
  Oligonucleotide for detection of SNP TSC0061363
raatccgtattca

SEQ ID NO: 251457 - DNA, 13 bp, Artificial Sequence
  Oligonucleotide for detection of SNP TSC0061364
tatataagttttt

SEQ ID NO: 251458 - DNA, 13 bp, Artificial Sequence
  Oligonucleotide for detection of SNP TSC0061364
aaaaacttatata

SEQ ID NO: 251459 - DNA, 13 bp, Artificial Sequence
  Oligonucleotide for detection of SNP TSC0061364
tatatatgttttt

SEQ ID NO: 251460 - DNA, 13 bp, Artificial Sequence
  Oligonucleotide for detection of SNP TSC0061364
aaaaacatatata

SEQ ID NO: 251461 - DNA, 13 bp, Artificial Sequence
  Oligonucleotide for detection of SNP TSC0061364
aggagtttgtata

SEQ ID NO: 251462 - DNA, 13 bp, Artificial Sequence
  Oligonucleotide for detection of SNP TSC0061364
tatacaaactcct

SEQ ID NO: 251463 - DNA, 13 bp, Artificial Sequence
  Oligonucleotide for detection of SNP TSC0061364
aggagtatgtata

SEQ ID NO: 251464 - DNA, 13 bp, Artificial Sequence
  Oligonucleotide for detection of SNP TSC0061364
tatacatactcct

SEQ ID NO: 251465 - DNA, 13 bp, Artificial Sequence
  Oligonucleotide for detection of SNP TSC0061367
tgaaggtatgttg

SEQ ID NO: 251466 - DNA, 13 bp, Artificial Sequence
  Oligonucleotide for detection of SNP TSC0061367
caacataccttca

SEQ ID NO: 251467 - DNA, 13 bp, Artificial Sequence
  Oligonucleotide for detection of SNP TSC0061367
tgaagggatgttg

SEQ ID NO: 251468 - DNA, 13 bp, Artificial Sequence
  Oligonucleotide for detection of SNP TSC0061367
caacatcccttca

SEQ ID NO: 251469 - DNA, 13 bp, Artificial Sequence
  Oligonucleotide for detection of SNP TSC0061367
taatatgttttta

SEQ ID NO: 251470 - DNA, 13 bp, Artificial Sequence
  Oligonucleotide for detection of SNP TSC0061367
taaaaacatatta

SEQ ID NO: 251471 - DNA, 13 bp, Artificial Sequence
  Oligonucleotide for detection of SNP TSC0061367
taatattttttta

SEQ ID NO: 251472 - DNA, 13 bp, Artificial Sequence
  Oligonucleotide for detection of SNP TSC0061367
taaaaaaatatta

SEQ ID NO: 251473 - DNA, 13 bp, Artificial Sequence
  Oligonucleotide for detection of SNP TSC0008865
ttatatgtgagtg

SEQ ID NO: 251474 - DNA, 13 bp, Artificial Sequence
  Oligonucleotide for detection of SNP TSC0008865
cactcacatataa

SEQ ID NO: 251475 - DNA, 13 bp, Artificial Sequence
  Oligonucleotide for detection of SNP TSC0008865
ttatatatgagtg

SEQ ID NO: 251476 - DNA, 13 bp, Artificial Sequence
  Oligonucleotide for detection of SNP TSC0008865
cactcatatataa

SEQ ID NO: 251477 - DNA, 13 bp, Artificial Sequence
  Oligonucleotide for detection of SNP TSC0061368
tagtatataagat

SEQ ID NO: 251478 - DNA, 13 bp, Artificial Sequence
  Oligonucleotide for detection of SNP TSC0061368
atcttatatacta

SEQ ID NO: 251479 - DNA, 13 bp, Artificial Sequence
  Oligonucleotide for detection of SNP TSC0061368
tagtatgtaagat

SEQ ID NO: 251480 - DNA, 13 bp, Artificial Sequence
  Oligonucleotide for detection of SNP TSC0061368
atcttacatacta

SEQ ID NO: 251481 - DNA, 13 bp, Artificial Sequence
  Oligonucleotide for detection of SNP TSC0061368
tagtacgtaagat

SEQ ID NO: 251482 - DNA, 13 bp, Artificial Sequence
  Oligonucleotide for detection of SNP TSC0061368
atcttacgtacta

SEQ ID NO: 251483 - DNA, 13 bp, Artificial Sequence
  Oligonucleotide for detection of SNP TSC0061368
attttatgtgtta

SEQ ID NO: 251484 - DNA, 13 bp, Artificial Sequence
  Oligonucleotide for detection of SNP TSC0061368
taacacataaaat

SEQ ID NO: 251485 - DNA, 13 bp, Artificial Sequence
  Oligonucleotide for detection of SNP TSC0061368
attttacgtgtta

SEQ ID NO: 251486 - DNA, 13 bp, Artificial Sequence
  Oligonucleotide for detection of SNP TSC0061368
taacacgtaaaat

SEQ ID NO: 251487 - DNA, 13 bp, Artificial Sequence
  Oligonucleotide for detection of SNP TSC0061369
ttgatgatttata

SEQ ID NO: 251488 - DNA, 13 bp, Artificial Sequence
  Oligonucleotide for detection of SNP TSC0061369
tataaatcatcaa

SEQ ID NO: 251489 - DNA, 13 bp, Artificial Sequence
  Oligonucleotide for detection of SNP TSC0061369
ttgatgttttata

SEQ ID NO: 251490 - DNA, 13 bp, Artificial Sequence
  Oligonucleotide for detection of SNP TSC0061369
tataaaacatcaa

SEQ ID NO: 251491 - DNA, 13 bp, Artificial Sequence
  Oligonucleotide for detection of SNP TSC0061369
tcgatgatttata

SEQ ID NO: 251492 - DNA, 13 bp, Artificial Sequence
  Oligonucleotide for detection of SNP TSC0061369
tataaatcatcga

SEQ ID NO: 251493 - DNA, 13 bp, Artificial Sequence
  Oligonucleotide for detection of SNP TSC0061369
tcgatgttttata

SEQ ID NO: 251494 - DNA, 13 bp, Artificial Sequence
  Oligonucleotide for detection of SNP TSC0061369
tataaaacatcga

SEQ ID NO: 251495 - DNA, 13 bp, Artificial Sequence
  Oligonucleotide for detection of SNP TSC0061369
tatgggttattga

SEQ ID NO: 251496 - DNA, 13 bp, Artificial Sequence
  Oligonucleotide for detection of SNP TSC0061369
tcaataacccata

SEQ ID NO: 251497 - DNA, 13 bp, Artificial Sequence
  Oligonucleotide for detection of SNP TSC0061369
tatggggtattga

SEQ ID NO: 251498 - DNA, 13 bp, Artificial Sequence
  Oligonucleotide for detection of SNP TSC0061369
tcaataccccata

SEQ ID NO: 251499 - DNA, 13 bp, Artificial Sequence
  Oligonucleotide for detection of SNP TSC0061369
tatgggttatcga

SEQ ID NO: 251500 - DNA, 13 bp, Artificial Sequence
  Oligonucleotide for detection of SNP TSC0061369
tcgataacccata

SEQ ID NO: 251501 - DNA, 13 bp, Artificial Sequence
  Oligonucleotide for detection of SNP TSC0061369
tatggggtatcga

SEQ ID NO: 251502 - DNA, 13 bp, Artificial Sequence
  Oligonucleotide for detection of SNP TSC0061369
tcgataccccata

SEQ ID NO: 251503 - DNA, 13 bp, Artificial Sequence
  Oligonucleotide for detection of SNP TSC0061370
tatttatgtagta

SEQ ID NO: 251504 - DNA, 13 bp, Artificial Sequence
  Oligonucleotide for detection of SNP TSC0061370
tactacataaata

SEQ ID NO: 251505 - DNA, 13 bp, Artificial Sequence
  Oligonucleotide for detection of SNP TSC0061370
tatttacgtagta

SEQ ID NO: 251506 - DNA, 13 bp, Artificial Sequence
  Oligonucleotide for detection of SNP TSC0061370
tactacgtaaata

SEQ ID NO: 251507 - DNA, 13 bp, Artificial Sequence
  Oligonucleotide for detection of SNP TSC0061370
tattacgtaggtg

SEQ ID NO: 251508 - DNA, 13 bp, Artificial Sequence
  Oligonucleotide for detection of SNP TSC0061370
cacctacgtaata

SEQ ID NO: 251509 - DNA, 13 bp, Artificial Sequence
  Oligonucleotide for detection of SNP TSC0061371
atttatatagtaa

SEQ ID NO: 251510 - DNA, 13 bp, Artificial Sequence
  Oligonucleotide for detection of SNP TSC0061371
ttactatataaat

SEQ ID NO: 251511 - DNA, 13 bp, Artificial Sequence
  Oligonucleotide for detection of SNP TSC0061371
atttatgtagtaa

SEQ ID NO: 251512 - DNA, 13 bp, Artificial Sequence
  Oligonucleotide for detection of SNP TSC0061371
ttactacataaat

SEQ ID NO: 251513 - DNA, 13 bp, Artificial Sequence
  Oligonucleotide for detection of SNP TSC0061371
atttacgtagtaa

SEQ ID NO: 251514 - DNA, 13 bp, Artificial Sequence
  Oligonucleotide for detection of SNP TSC0061371
ttactacgtaaat

SEQ ID NO: 251515 - DNA, 13 bp, Artificial Sequence
  Oligonucleotide for detection of SNP TSC0061371
ttattatgtaggt

SEQ ID NO: 251516 - DNA, 13 bp, Artificial Sequence
  Oligonucleotide for detection of SNP TSC0061371
acctacataataa

SEQ ID NO: 251517 - DNA, 13 bp, Artificial Sequence
  Oligonucleotide for detection of SNP TSC0061371
ttattacgtaggt

SEQ ID NO: 251518 - DNA, 13 bp, Artificial Sequence
  Oligonucleotide for detection of SNP TSC0061371
acctacgtaataa

SEQ ID NO: 251519 - DNA, 13 bp, Artificial Sequence
  Oligonucleotide for detection of SNP TSC0061372
gagtatgaattgg

SEQ ID NO: 251520 - DNA, 13 bp, Artificial Sequence
  Oligonucleotide for detection of SNP TSC0061372
ccaattcatactc

SEQ ID NO: 251521 - DNA, 13 bp, Artificial Sequence
  Oligonucleotide for detection of SNP TSC0061372
gagtataaattgg

SEQ ID NO: 251522 - DNA, 13 bp, Artificial Sequence
  Oligonucleotide for detection of SNP TSC0061372
ccaatttatactc

SEQ ID NO: 251523 - DNA, 13 bp, Artificial Sequence
  Oligonucleotide for detection of SNP TSC0061373
ttgattattatag

SEQ ID NO: 251524 - DNA, 13 bp, Artificial Sequence
  Oligonucleotide for detection of SNP TSC0061373
ctataataatcaa

SEQ ID NO: 251525 - DNA, 13 bp, Artificial Sequence
  Oligonucleotide for detection of SNP TSC0061373
ttgatttttatag

SEQ ID NO: 251526 - DNA, 13 bp, Artificial Sequence
  Oligonucleotide for detection of SNP TSC0061373
ctataaaaatcaa

SEQ ID NO: 251527 - DNA, 13 bp, Artificial Sequence
  Oligonucleotide for detection of SNP TSC0061373
ttatggtaattag

SEQ ID NO: 251528 - DNA, 13 bp, Artificial Sequence
  Oligonucleotide for detection of SNP TSC0061373
ctaattaccataa

SEQ ID NO: 251529 - DNA, 13 bp, Artificial Sequence
  Oligonucleotide for detection of SNP TSC0061373
ttatggaaattag

SEQ ID NO: 251530 - DNA, 13 bp, Artificial Sequence
  Oligonucleotide for detection of SNP TSC0061373
ctaatttccataa

SEQ ID NO: 251531 - DNA, 13 bp, Artificial Sequence
  Oligonucleotide for detection of SNP TSC0061374
ttttagaataaat

SEQ ID NO: 251532 - DNA, 13 bp, Artificial Sequence
  Oligonucleotide for detection of SNP TSC0061374
atttattctaaaa

SEQ ID NO: 251533 - DNA, 13 bp, Artificial Sequence
  Oligonucleotide for detection of SNP TSC0061374
ttttaggataaat

SEQ ID NO: 251534 - DNA, 13 bp, Artificial Sequence
  Oligonucleotide for detection of SNP TSC0061374
atttatcctaaaa

SEQ ID NO: 251535 - DNA, 13 bp, Artificial Sequence
  Oligonucleotide for detection of SNP TSC0061379
aaatatattgtay

SEQ ID NO: 251536 - DNA, 13 bp, Artificial Sequence
  Oligonucleotide for detection of SNP TSC0061379
rtacaatatattt

SEQ ID NO: 251537 - DNA, 13 bp, Artificial Sequence
  Oligonucleotide for detection of SNP TSC0061379
aaatatgttgtay

SEQ ID NO: 251538 - DNA, 13 bp, Artificial Sequence
  Oligonucleotide for detection of SNP TSC0061379
rtacaacatattt

SEQ ID NO: 251539 - DNA, 13 bp, Artificial Sequence
  Oligonucleotide for detection of SNP TSC0061380
ttggattattatt

SEQ ID NO: 251540 - DNA, 13 bp, Artificial Sequence
  Oligonucleotide for detection of SNP TSC0061380
aataataatccaa

SEQ ID NO: 251541 - DNA, 13 bp, Artificial Sequence
  Oligonucleotide for detection of SNP TSC0061380
ttggatgattatt

SEQ ID NO: 251542 - DNA, 13 bp, Artificial Sequence
  Oligonucleotide for detection of SNP TSC0061380
aataatcatccaa

SEQ ID NO: 251543 - DNA, 13 bp, Artificial Sequence
  Oligonucleotide for detection of SNP TSC0061380
aatgataatttag

SEQ ID NO: 251544 - DNA, 13 bp, Artificial Sequence
  Oligonucleotide for detection of SNP TSC0061380
ctaaattatcatt

SEQ ID NO: 251545 - DNA, 13 bp, Artificial Sequence
  Oligonucleotide for detection of SNP TSC0061380
aatgattatttag

SEQ ID NO: 251546 - DNA, 13 bp, Artificial Sequence
  Oligonucleotide for detection of SNP TSC0061380
ctaaataatcatt

SEQ ID NO: 251547 - DNA, 13 bp, Artificial Sequence
  Oligonucleotide for detection of SNP TSC0005247
gaaagtgtataat

SEQ ID NO: 251548 - DNA, 13 bp, Artificial Sequence
  Oligonucleotide for detection of SNP TSC0005247
attatacactttc

SEQ ID NO: 251549 - DNA, 13 bp, Artificial Sequence
  Oligonucleotide for detection of SNP TSC0005247
gaaagtatataat

SEQ ID NO: 251550 - DNA, 13 bp, Artificial Sequence
  Oligonucleotide for detection of SNP TSC0005247
attatatactttc

SEQ ID NO: 251551 - DNA, 13 bp, Artificial Sequence
  Oligonucleotide for detection of SNP TSC0061382
tttattgtattag

SEQ ID NO: 251552 - DNA, 13 bp, Artificial Sequence
  Oligonucleotide for detection of SNP TSC0061382
ctaatacaataaa

SEQ ID NO: 251553 - DNA, 13 bp, Artificial Sequence
  Oligonucleotide for detection of SNP TSC0061382
tttattatattag

SEQ ID NO: 251554 - DNA, 13 bp, Artificial Sequence
  Oligonucleotide for detection of SNP TSC0061382
ctaatataataaa

SEQ ID NO: 251555 - DNA, 13 bp, Artificial Sequence
  Oligonucleotide for detection of SNP TSC0061383
atgtagtgagaag

SEQ ID NO: 251556 - DNA, 13 bp, Artificial Sequence
  Oligonucleotide for detection of SNP TSC0061383
cttctcactacat

SEQ ID NO: 251557 - DNA, 13 bp, Artificial Sequence
  Oligonucleotide for detection of SNP TSC0061383
atgtagcgagaag

SEQ ID NO: 251558 - DNA, 13 bp, Artificial Sequence
  Oligonucleotide for detection of SNP TSC0061383
cttctcgctacat

SEQ ID NO: 251559 - DNA, 13 bp, Artificial Sequence
  Oligonucleotide for detection of SNP TSC0061384
agttgatggagta

SEQ ID NO: 251560 - DNA, 13 bp, Artificial Sequence
  Oligonucleotide for detection of SNP TSC0061384
tactccatcaact

SEQ ID NO: 251561 - DNA, 13 bp, Artificial Sequence
  Oligonucleotide for detection of SNP TSC0061384
agttgacggagta

SEQ ID NO: 251562 - DNA, 13 bp, Artificial Sequence
  Oligonucleotide for detection of SNP TSC0061384
tactccgtcaact

SEQ ID NO: 251563 - DNA, 13 bp, Artificial Sequence
  Oligonucleotide for detection of SNP TSC0005498
ggatagatgaaag

SEQ ID NO: 251564 - DNA, 13 bp, Artificial Sequence
  Oligonucleotide for detection of SNP TSC0005498
ctttcatctatcc

SEQ ID NO: 251565 - DNA, 13 bp, Artificial Sequence
  Oligonucleotide for detection of SNP TSC0005498
ggataggtgaaag

SEQ ID NO: 251566 - DNA, 13 bp, Artificial Sequence
  Oligonucleotide for detection of SNP TSC0005498
ctttcacctatcc

SEQ ID NO: 251567 - DNA, 13 bp, Artificial Sequence
  Oligonucleotide for detection of SNP TSC0008914
atagaaatatata

SEQ ID NO: 251568 - DNA, 13 bp, Artificial Sequence
  Oligonucleotide for detection of SNP TSC0008914
tatatatttctat

SEQ ID NO: 251569 - DNA, 13 bp, Artificial Sequence
  Oligonucleotide for detection of SNP TSC0061385
atgaataaaagga

SEQ ID NO: 251570 - DNA, 13 bp, Artificial Sequence
  Oligonucleotide for detection of SNP TSC0061385
tccttttattcat

SEQ ID NO: 251571 - DNA, 13 bp, Artificial Sequence
  Oligonucleotide for detection of SNP TSC0061385
atgaatgaaagga

SEQ ID NO: 251572 - DNA, 13 bp, Artificial Sequence
  Oligonucleotide for detection of SNP TSC0061385
tcctttcattcat

SEQ ID NO: 251573 - DNA, 13 bp, Artificial Sequence
  Oligonucleotide for detection of SNP TSC0061385
acgaataaaagga

SEQ ID NO: 251574 - DNA, 13 bp, Artificial Sequence
  Oligonucleotide for detection of SNP TSC0061385
tccttttattcgt

SEQ ID NO: 251575 - DNA, 13 bp, Artificial Sequence
  Oligonucleotide for detection of SNP TSC0061385
acgaatgaaagga

SEQ ID NO: 251576 - DNA, 13 bp, Artificial Sequence
  Oligonucleotide for detection of SNP TSC0061385
tcctttcattcgt

SEQ ID NO: 251577 - DNA, 13 bp, Artificial Sequence
  Oligonucleotide for detection of SNP TSC0061385
atgaacgaaagga

SEQ ID NO: 251578 - DNA, 13 bp, Artificial Sequence
  Oligonucleotide for detection of SNP TSC0061385
tcctttcgttcat

SEQ ID NO: 251579 - DNA, 13 bp, Artificial Sequence
  Oligonucleotide for detection of SNP TSC0061385
acgaacgaaagga

SEQ ID NO: 251580 - DNA, 13 bp, Artificial Sequence
  Oligonucleotide for detection of SNP TSC0061385
tcctttcgttcgt

SEQ ID NO: 251581 - DNA, 13 bp, Artificial Sequence
  Oligonucleotide for detection of SNP TSC0061385
ttttttcgttcgt

SEQ ID NO: 251582 - DNA, 13 bp, Artificial Sequence
  Oligonucleotide for detection of SNP TSC0061385
acgaacgaaaaaa

SEQ ID NO: 251583 - DNA, 13 bp, Artificial Sequence
  Oligonucleotide for detection of SNP TSC0000447
aagttagtgttta

SEQ ID NO: 251584 - DNA, 13 bp, Artificial Sequence
  Oligonucleotide for detection of SNP TSC0000447
taaacactaactt

SEQ ID NO: 251585 - DNA, 13 bp, Artificial Sequence
  Oligonucleotide for detection of SNP TSC0000447
aagttaatgttta

SEQ ID NO: 251586 - DNA, 13 bp, Artificial Sequence
  Oligonucleotide for detection of SNP TSC0000447
taaacattaactt

SEQ ID NO: 251587 - DNA, 13 bp, Artificial Sequence
  Oligonucleotide for detection of SNP TSC0000448
atttatattttga

SEQ ID NO: 251588 - DNA, 13 bp, Artificial Sequence
  Oligonucleotide for detection of SNP TSC0000448
tcaaaatataaat

SEQ ID NO: 251589 - DNA, 13 bp, Artificial Sequence
  Oligonucleotide for detection of SNP TSC0000448
atttattttttga

SEQ ID NO: 251590 - DNA, 13 bp, Artificial Sequence
  Oligonucleotide for detection of SNP TSC0000448
tcaaaaaataaat

SEQ ID NO: 251591 - DNA, 13 bp, Artificial Sequence
  Oligonucleotide for detection of SNP TSC0000448
ttaaagtatagat

SEQ ID NO: 251592 - DNA, 13 bp, Artificial Sequence
  Oligonucleotide for detection of SNP TSC0000448
atctatactttaa

SEQ ID NO: 251593 - DNA, 13 bp, Artificial Sequence
  Oligonucleotide for detection of SNP TSC0000448
ttaaaggatagat

SEQ ID NO: 251594 - DNA, 13 bp, Artificial Sequence
  Oligonucleotide for detection of SNP TSC0000448
atctatcctttaa

SEQ ID NO: 251595 - DNA, 13 bp, Artificial Sequence
  Oligonucleotide for detection of SNP TSC0061387
tttttaaaggggt

SEQ ID NO: 251596 - DNA, 13 bp, Artificial Sequence
  Oligonucleotide for detection of SNP TSC0061387
acccctttaaaaa

SEQ ID NO: 251597 - DNA, 13 bp, Artificial Sequence
  Oligonucleotide for detection of SNP TSC0061387
tttttataggggt

SEQ ID NO: 251598 - DNA, 13 bp, Artificial Sequence
  Oligonucleotide for detection of SNP TSC0061387
acccctataaaaa

SEQ ID NO: 251599 - DNA, 13 bp, Artificial Sequence
  Oligonucleotide for detection of SNP TSC0061387
atttttttgggag

SEQ ID NO: 251600 - DNA, 13 bp, Artificial Sequence
  Oligonucleotide for detection of SNP TSC0061387
ctcccaaaaaaat

SEQ ID NO: 251601 - DNA, 13 bp, Artificial Sequence
  Oligonucleotide for detection of SNP TSC0061387
atttttgtgggag

SEQ ID NO: 251602 - DNA, 13 bp, Artificial Sequence
  Oligonucleotide for detection of SNP TSC0061387
ctcccacaaaaat

SEQ ID NO: 251603 - DNA, 13 bp, Artificial Sequence
  Oligonucleotide for detection of SNP TSC0061389
tttattatgagga

SEQ ID NO: 251604 - DNA, 13 bp, Artificial Sequence
  Oligonucleotide for detection of SNP TSC0061389
tcctcataataaa

SEQ ID NO: 251605 - DNA, 13 bp, Artificial Sequence
  Oligonucleotide for detection of SNP TSC0061389
tttattgtgagga

SEQ ID NO: 251606 - DNA, 13 bp, Artificial Sequence
  Oligonucleotide for detection of SNP TSC0061389
tcctcacaataaa

SEQ ID NO: 251607 - DNA, 13 bp, Artificial Sequence
  Oligonucleotide for detection of SNP TSC0061389
tttatcgtgagga

SEQ ID NO: 251608 - DNA, 13 bp, Artificial Sequence
  Oligonucleotide for detection of SNP TSC0061389
tcctcacgataaa

SEQ ID NO: 251609 - DNA, 13 bp, Artificial Sequence
  Oligonucleotide for detection of SNP TSC0061389
tttttatggtgga

SEQ ID NO: 251610 - DNA, 13 bp, Artificial Sequence
  Oligonucleotide for detection of SNP TSC0061389
tccaccataaaaa

SEQ ID NO: 251611 - DNA, 13 bp, Artificial Sequence
  Oligonucleotide for detection of SNP TSC0061389
tttttacggtgga

SEQ ID NO: 251612 - DNA, 13 bp, Artificial Sequence
  Oligonucleotide for detection of SNP TSC0061389
tccaccgtaaaaa

SEQ ID NO: 251613 - DNA, 13 bp, Artificial Sequence
  Oligonucleotide for detection of SNP TSC0061390
gtttaggtaattt

SEQ ID NO: 251614 - DNA, 13 bp, Artificial Sequence
  Oligonucleotide for detection of SNP TSC0061390
aaattacctaaac

SEQ ID NO: 251615 - DNA, 13 bp, Artificial Sequence
  Oligonucleotide for detection of SNP TSC0061390
gtttagttaattt

SEQ ID NO: 251616 - DNA, 13 bp, Artificial Sequence
  Oligonucleotide for detection of SNP TSC0061390
aaattaactaaac

SEQ ID NO: 251617 - DNA, 13 bp, Artificial Sequence
  Oligonucleotide for detection of SNP TSC0061392
aagtagggattta

SEQ ID NO: 251618 - DNA, 13 bp, Artificial Sequence
  Oligonucleotide for detection of SNP TSC0061392
taaatccctactt

SEQ ID NO: 251619 - DNA, 13 bp, Artificial Sequence
  Oligonucleotide for detection of SNP TSC0061392
aagtagagattta

SEQ ID NO: 251620 - DNA, 13 bp, Artificial Sequence
  Oligonucleotide for detection of SNP TSC0061392
taaatctctactt

SEQ ID NO: 251621 - DNA, 13 bp, Artificial Sequence
  Oligonucleotide for detection of SNP TSC0061393
atttgtaggttgt

SEQ ID NO: 251622 - DNA, 13 bp, Artificial Sequence
  Oligonucleotide for detection of SNP TSC0061393
acaacctacaaat

SEQ ID NO: 251623 - DNA, 13 bp, Artificial Sequence
  Oligonucleotide for detection of SNP TSC0061393
atttgtgggttgt

SEQ ID NO: 251624 - DNA, 13 bp, Artificial Sequence
  Oligonucleotide for detection of SNP TSC0061393
acaacccacaaat

SEQ ID NO: 251625 - DNA, 13 bp, Artificial Sequence
  Oligonucleotide for detection of SNP TSC0061398
taaattatttgat

SEQ ID NO: 251626 - DNA, 13 bp, Artificial Sequence
  Oligonucleotide for detection of SNP TSC0061398
atcaaataattta

SEQ ID NO: 251627 - DNA, 13 bp, Artificial Sequence
  Oligonucleotide for detection of SNP TSC0061398
taaattttttgat

SEQ ID NO: 251628 - DNA, 13 bp, Artificial Sequence
  Oligonucleotide for detection of SNP TSC0061398
atcaaaaaattta

SEQ ID NO: 251629 - DNA, 13 bp, Artificial Sequence
  Oligonucleotide for detection of SNP TSC0061398
attaaatggttta

SEQ ID NO: 251630 - DNA, 13 bp, Artificial Sequence
  Oligonucleotide for detection of SNP TSC0061398
taaaccatttaat

SEQ ID NO: 251631 - DNA, 13 bp, Artificial Sequence
  Oligonucleotide for detection of SNP TSC0061398
attaaagggttta

SEQ ID NO: 251632 - DNA, 13 bp, Artificial Sequence
  Oligonucleotide for detection of SNP TSC0061398
taaaccctttaat

SEQ ID NO: 251633 - DNA, 13 bp, Artificial Sequence
  Oligonucleotide for detection of SNP TSC0061399
gattggagtgttg

SEQ ID NO: 251634 - DNA, 13 bp, Artificial Sequence
  Oligonucleotide for detection of SNP TSC0061399
caacactccaatc

SEQ ID NO: 251635 - DNA, 13 bp, Artificial Sequence
  Oligonucleotide for detection of SNP TSC0061399
gattggggtgttg

SEQ ID NO: 251636 - DNA, 13 bp, Artificial Sequence
  Oligonucleotide for detection of SNP TSC0061399
caacaccccaatc

SEQ ID NO: 251637 - DNA, 13 bp, Artificial Sequence
  Oligonucleotide for detection of SNP TSC0061400
ttggttgagggtg

SEQ ID NO: 251638 - DNA, 13 bp, Artificial Sequence
  Oligonucleotide for detection of SNP TSC0061400
caccctcaaccaa

SEQ ID NO: 251639 - DNA, 13 bp, Artificial Sequence
  Oligonucleotide for detection of SNP TSC0061400
ttggttaagggtg

SEQ ID NO: 251640 - DNA, 13 bp, Artificial Sequence
  Oligonucleotide for detection of SNP TSC0061400
cacccttaaccaa

SEQ ID NO: 251641 - DNA, 13 bp, Artificial Sequence
  Oligonucleotide for detection of SNP TSC0061401
gttggaaatttgg

SEQ ID NO: 251642 - DNA, 13 bp, Artificial Sequence
  Oligonucleotide for detection of SNP TSC0061401
ccaaatttccaac

SEQ ID NO: 251643 - DNA, 13 bp, Artificial Sequence
  Oligonucleotide for detection of SNP TSC0061401
gttggagatttgg

SEQ ID NO: 251644 - DNA, 13 bp, Artificial Sequence
  Oligonucleotide for detection of SNP TSC0061401
ccaaatctccaac

SEQ ID NO: 251645 - DNA, 13 bp, Artificial Sequence
  Oligonucleotide for detection of SNP TSC0061401
gtcggaaatttgg

SEQ ID NO: 251646 - DNA, 13 bp, Artificial Sequence
  Oligonucleotide for detection of SNP TSC0061401
ccaaatttccgac

SEQ ID NO: 251647 - DNA, 13 bp, Artificial Sequence
  Oligonucleotide for detection of SNP TSC0061401
gtcggagatttgg

SEQ ID NO: 251648 - DNA, 13 bp, Artificial Sequence
  Oligonucleotide for detection of SNP TSC0061401
ccaaatctccgac

SEQ ID NO: 251649 - DNA, 13 bp, Artificial Sequence
  Oligonucleotide for detection of SNP TSC0061402
tgttagggtggta

SEQ ID NO: 251650 - DNA, 13 bp, Artificial Sequence
  Oligonucleotide for detection of SNP TSC0061402
taccaccctaaca

SEQ ID NO: 251651 - DNA, 13 bp, Artificial Sequence
  Oligonucleotide for detection of SNP TSC0061402
tgttagagtggta

SEQ ID NO: 251652 - DNA, 13 bp, Artificial Sequence
  Oligonucleotide for detection of SNP TSC0061402
taccactctaaca

SEQ ID NO: 251653 - DNA, 13 bp, Artificial Sequence
  Oligonucleotide for detection of SNP TSC0061403
tttagagaattat

SEQ ID NO: 251654 - DNA, 13 bp, Artificial Sequence
  Oligonucleotide for detection of SNP TSC0061403
ataattctctaaa

SEQ ID NO: 251655 - DNA, 13 bp, Artificial Sequence
  Oligonucleotide for detection of SNP TSC0061403
tttagaaaattat

SEQ ID NO: 251656 - DNA, 13 bp, Artificial Sequence
  Oligonucleotide for detection of SNP TSC0061403
ataattttctaaa

SEQ ID NO: 251657 - DNA, 13 bp, Artificial Sequence
  Oligonucleotide for detection of SNP TSC0061404
aatattggaaaty

SEQ ID NO: 251658 - DNA, 13 bp, Artificial Sequence
  Oligonucleotide for detection of SNP TSC0061404
ratttccaatatt

SEQ ID NO: 251659 - DNA, 13 bp, Artificial Sequence
  Oligonucleotide for detection of SNP TSC0061404
aatattagaaaty

SEQ ID NO: 251660 - DNA, 13 bp, Artificial Sequence
  Oligonucleotide for detection of SNP TSC0061404
ratttctaatatt

SEQ ID NO: 251661 - DNA, 13 bp, Artificial Sequence
  Oligonucleotide for detection of SNP TSC0061405
ggatagtgggtga

SEQ ID NO: 251662 - DNA, 13 bp, Artificial Sequence
  Oligonucleotide for detection of SNP TSC0061405
tcacccactatcc

SEQ ID NO: 251663 - DNA, 13 bp, Artificial Sequence
  Oligonucleotide for detection of SNP TSC0061405
ggatagcgggtga

SEQ ID NO: 251664 - DNA, 13 bp, Artificial Sequence
  Oligonucleotide for detection of SNP TSC0061405
tcacccgctatcc

SEQ ID NO: 251665 - DNA, 13 bp, Artificial Sequence
  Oligonucleotide for detection of SNP TSC0061405
ttattcgttgtty

SEQ ID NO: 251666 - DNA, 13 bp, Artificial Sequence
  Oligonucleotide for detection of SNP TSC0061405
raacaacgaataa

SEQ ID NO: 251667 - DNA, 13 bp, Artificial Sequence
  Oligonucleotide for detection of SNP TSC0061406
gttgtgtataagg

SEQ ID NO: 251668 - DNA, 13 bp, Artificial Sequence
  Oligonucleotide for detection of SNP TSC0061406
ccttatacacaac

SEQ ID NO: 251669 - DNA, 13 bp, Artificial Sequence
  Oligonucleotide for detection of SNP TSC0061406
gttgtggataagg

SEQ ID NO: 251670 - DNA, 13 bp, Artificial Sequence
  Oligonucleotide for detection of SNP TSC0061406
ccttatccacaac

SEQ ID NO: 251671 - DNA, 13 bp, Artificial Sequence
  Oligonucleotide for detection of SNP TSC0061406
gtcgtgtataagg

SEQ ID NO: 251672 - DNA, 13 bp, Artificial Sequence
  Oligonucleotide for detection of SNP TSC0061406
ccttatacacgac

SEQ ID NO: 251673 - DNA, 13 bp, Artificial Sequence
  Oligonucleotide for detection of SNP TSC0061406
gtcgtggataagg

SEQ ID NO: 251674 - DNA, 13 bp, Artificial Sequence
  Oligonucleotide for detection of SNP TSC0061406
ccttatccacgac

SEQ ID NO: 251675 - DNA, 13 bp, Artificial Sequence
  Oligonucleotide for detection of SNP TSC0061406
ttttgtgtatggy

SEQ ID NO: 251676 - DNA, 13 bp, Artificial Sequence
  Oligonucleotide for detection of SNP TSC0061406
rccatacacaaaa

SEQ ID NO: 251677 - DNA, 13 bp, Artificial Sequence
  Oligonucleotide for detection of SNP TSC0061406
ttttgtttatggy

SEQ ID NO: 251678 - DNA, 13 bp, Artificial Sequence
  Oligonucleotide for detection of SNP TSC0061406
rccataaacaaaa

SEQ ID NO: 251679 - DNA, 13 bp, Artificial Sequence
  Oligonucleotide for detection of SNP TSC0061406
ttttgtgtacggy

SEQ ID NO: 251680 - DNA, 13 bp, Artificial Sequence
  Oligonucleotide for detection of SNP TSC0061406
rccgtacacaaaa

SEQ ID NO: 251681 - DNA, 13 bp, Artificial Sequence
  Oligonucleotide for detection of SNP TSC0061406
ttttgtttacggy

SEQ ID NO: 251682 - DNA, 13 bp, Artificial Sequence
  Oligonucleotide for detection of SNP TSC0061406
rccgtaaacaaaa

SEQ ID NO: 251683 - DNA, 13 bp, Artificial Sequence
  Oligonucleotide for detection of SNP TSC0061412
tgattagatatta

SEQ ID NO: 251684 - DNA, 13 bp, Artificial Sequence
  Oligonucleotide for detection of SNP TSC0061412
taatatctaatca

SEQ ID NO: 251685 - DNA, 13 bp, Artificial Sequence
  Oligonucleotide for detection of SNP TSC0061412
tgattaaatatta

SEQ ID NO: 251686 - DNA, 13 bp, Artificial Sequence
  Oligonucleotide for detection of SNP TSC0061412
taatatttaatca

SEQ ID NO: 251687 - DNA, 13 bp, Artificial Sequence
  Oligonucleotide for detection of SNP TSC0061413
gtatttttagggg

SEQ ID NO: 251688 - DNA, 13 bp, Artificial Sequence
  Oligonucleotide for detection of SNP TSC0061413
cccctaaaaatac

SEQ ID NO: 251689 - DNA, 13 bp, Artificial Sequence
  Oligonucleotide for detection of SNP TSC0061413
gtatttgtagggg

SEQ ID NO: 251690 - DNA, 13 bp, Artificial Sequence
  Oligonucleotide for detection of SNP TSC0061413
cccctacaaatac

SEQ ID NO: 251691 - DNA, 13 bp, Artificial Sequence
  Oligonucleotide for detection of SNP TSC0061417
taatagatattag

SEQ ID NO: 251692 - DNA, 13 bp, Artificial Sequence
  Oligonucleotide for detection of SNP TSC0061417
ctaatatctatta

SEQ ID NO: 251693 - DNA, 13 bp, Artificial Sequence
  Oligonucleotide for detection of SNP TSC0061417
taataggtattag

SEQ ID NO: 251694 - DNA, 13 bp, Artificial Sequence
  Oligonucleotide for detection of SNP TSC0061417
ctaatacctatta

SEQ ID NO: 251695 - DNA, 13 bp, Artificial Sequence
  Oligonucleotide for detection of SNP TSC0061418
tggagtagaagty

SEQ ID NO: 251696 - DNA, 13 bp, Artificial Sequence
  Oligonucleotide for detection of SNP TSC0061418
racttctactcca

SEQ ID NO: 251697 - DNA, 13 bp, Artificial Sequence
  Oligonucleotide for detection of SNP TSC0061418
tggagtggaagty

SEQ ID NO: 251698 - DNA, 13 bp, Artificial Sequence
  Oligonucleotide for detection of SNP TSC0061418
racttccactcca

SEQ ID NO: 251699 - DNA, 13 bp, Artificial Sequence
  Oligonucleotide for detection of SNP TSC0061418
tggagcggaagty

SEQ ID NO: 251700 - DNA, 13 bp, Artificial Sequence
  Oligonucleotide for detection of SNP TSC0061418
racttccgctcca

SEQ ID NO: 251701 - DNA, 13 bp, Artificial Sequence
  Oligonucleotide for detection of SNP TSC0061418
ggttttcgtttta

SEQ ID NO: 251702 - DNA, 13 bp, Artificial Sequence
  Oligonucleotide for detection of SNP TSC0061418
taaaacgaaaacc

SEQ ID NO: 251703 - DNA, 13 bp, Artificial Sequence
  Oligonucleotide for detection of SNP TSC0061419
ttgttaaataggt

SEQ ID NO: 251704 - DNA, 13 bp, Artificial Sequence
  Oligonucleotide for detection of SNP TSC0061419
acctatttaacaa

SEQ ID NO: 251705 - DNA, 13 bp, Artificial Sequence
  Oligonucleotide for detection of SNP TSC0061419
ttgttatataggt

SEQ ID NO: 251706 - DNA, 13 bp, Artificial Sequence
  Oligonucleotide for detection of SNP TSC0061419
acctatataacaa

SEQ ID NO: 251707 - DNA, 13 bp, Artificial Sequence
  Oligonucleotide for detection of SNP TSC0061419
atttatttaataa

SEQ ID NO: 251708 - DNA, 13 bp, Artificial Sequence
  Oligonucleotide for detection of SNP TSC0061419
ttattaaataaat

SEQ ID NO: 251709 - DNA, 13 bp, Artificial Sequence
  Oligonucleotide for detection of SNP TSC0061421
tatttagtaaagy

SEQ ID NO: 251710 - DNA, 13 bp, Artificial Sequence
  Oligonucleotide for detection of SNP TSC0061421
rctttactaaata

SEQ ID NO: 251711 - DNA, 13 bp, Artificial Sequence
  Oligonucleotide for detection of SNP TSC0061421
tatttaataaagy

SEQ ID NO: 251712 - DNA, 13 bp, Artificial Sequence
  Oligonucleotide for detection of SNP TSC0061421
rctttattaaata

SEQ ID NO: 251713 - DNA, 13 bp, Artificial Sequence
  Oligonucleotide for detection of SNP TSC0061422
gtttttaagtgty

SEQ ID NO: 251714 - DNA, 13 bp, Artificial Sequence
  Oligonucleotide for detection of SNP TSC0061422
racacttaaaaac

SEQ ID NO: 251715 - DNA, 13 bp, Artificial Sequence
  Oligonucleotide for detection of SNP TSC0061422
gtttttgagtgty

SEQ ID NO: 251716 - DNA, 13 bp, Artificial Sequence
  Oligonucleotide for detection of SNP TSC0061422
racactcaaaaac

SEQ ID NO: 251717 - DNA, 13 bp, Artificial Sequence
  Oligonucleotide for detection of SNP TSC0061422
gttttcgagtgty

SEQ ID NO: 251718 - DNA, 13 bp, Artificial Sequence
  Oligonucleotide for detection of SNP TSC0061422
racactcgaaaac

SEQ ID NO: 251719 - DNA, 13 bp, Artificial Sequence
  Oligonucleotide for detection of SNP TSC0061422
gatatttgagagy

SEQ ID NO: 251720 - DNA, 13 bp, Artificial Sequence
  Oligonucleotide for detection of SNP TSC0061422
rctctcaaatatc

SEQ ID NO: 251721 - DNA, 13 bp, Artificial Sequence
  Oligonucleotide for detection of SNP TSC0061422
gatattcgagagy

SEQ ID NO: 251722 - DNA, 13 bp, Artificial Sequence
  Oligonucleotide for detection of SNP TSC0061422
rctctcgaatatc

SEQ ID NO: 251723 - DNA, 13 bp, Artificial Sequence
  Oligonucleotide for detection of SNP TSC0061427
taatatagggaga

SEQ ID NO: 251724 - DNA, 13 bp, Artificial Sequence
  Oligonucleotide for detection of SNP TSC0061427
tctccctatatta

SEQ ID NO: 251725 - DNA, 13 bp, Artificial Sequence
  Oligonucleotide for detection of SNP TSC0061427
taatatggggaga

SEQ ID NO: 251726 - DNA, 13 bp, Artificial Sequence
  Oligonucleotide for detection of SNP TSC0061427
tctccccatatta

SEQ ID NO: 251727 - DNA, 13 bp, Artificial Sequence
  Oligonucleotide for detection of SNP TSC0061427
taatacggggaga

SEQ ID NO: 251728 - DNA, 13 bp, Artificial Sequence
  Oligonucleotide for detection of SNP TSC0061427
tctccccgtatta

SEQ ID NO: 251729 - DNA, 13 bp, Artificial Sequence
  Oligonucleotide for detection of SNP TSC0061433
gaaaaagtaattt

SEQ ID NO: 251730 - DNA, 13 bp, Artificial Sequence
  Oligonucleotide for detection of SNP TSC0061433
aaattactttttc

SEQ ID NO: 251731 - DNA, 13 bp, Artificial Sequence
  Oligonucleotide for detection of SNP TSC0061433
gaaaaaataattt

SEQ ID NO: 251732 - DNA, 13 bp, Artificial Sequence
  Oligonucleotide for detection of SNP TSC0061433
aaattattttttc

SEQ ID NO: 251733 - DNA, 13 bp, Artificial Sequence
  Oligonucleotide for detection of SNP TSC0008682
gggtttaattttt

SEQ ID NO: 251734 - DNA, 13 bp, Artificial Sequence
  Oligonucleotide for detection of SNP TSC0008682
aaaaattaaaccc

SEQ ID NO: 251735 - DNA, 13 bp, Artificial Sequence
  Oligonucleotide for detection of SNP TSC0008682
gggttttattttt

SEQ ID NO: 251736 - DNA, 13 bp, Artificial Sequence
  Oligonucleotide for detection of SNP TSC0008682
aaaaataaaaccc

SEQ ID NO: 251737 - DNA, 13 bp, Artificial Sequence
  Oligonucleotide for detection of SNP TSC0008682
aaaaattaaatty

SEQ ID NO: 251738 - DNA, 13 bp, Artificial Sequence
  Oligonucleotide for detection of SNP TSC0008682
raatttaattttt

SEQ ID NO: 251739 - DNA, 13 bp, Artificial Sequence
  Oligonucleotide for detection of SNP TSC0008682
aaaaataaaatty

SEQ ID NO: 251740 - DNA, 13 bp, Artificial Sequence
  Oligonucleotide for detection of SNP TSC0008682
raattttattttt

SEQ ID NO: 251741 - DNA, 13 bp, Artificial Sequence
  Oligonucleotide for detection of SNP TSC0009122
ggtgagtgagggy

SEQ ID NO: 251742 - DNA, 13 bp, Artificial Sequence
  Oligonucleotide for detection of SNP TSC0009122
rccctcactcacc

SEQ ID NO: 251743 - DNA, 13 bp, Artificial Sequence
  Oligonucleotide for detection of SNP TSC0009122
ggtgagcgagggy

SEQ ID NO: 251744 - DNA, 13 bp, Artificial Sequence
  Oligonucleotide for detection of SNP TSC0009122
rccctcgctcacc

SEQ ID NO: 251745 - DNA, 13 bp, Artificial Sequence
  Oligonucleotide for detection of SNP TSC0004631
atttagaaatttt

SEQ ID NO: 251746 - DNA, 13 bp, Artificial Sequence
  Oligonucleotide for detection of SNP TSC0004631
aaaatttctaaat

SEQ ID NO: 251747 - DNA, 13 bp, Artificial Sequence
  Oligonucleotide for detection of SNP TSC0004631
atttagtaatttt

SEQ ID NO: 251748 - DNA, 13 bp, Artificial Sequence
  Oligonucleotide for detection of SNP TSC0004631
aaaattactaaat

SEQ ID NO: 251749 - DNA, 13 bp, Artificial Sequence
  Oligonucleotide for detection of SNP TSC0004631
agggtttttgggt

SEQ ID NO: 251750 - DNA, 13 bp, Artificial Sequence
  Oligonucleotide for detection of SNP TSC0004631
acccaaaaaccct

SEQ ID NO: 251751 - DNA, 13 bp, Artificial Sequence
  Oligonucleotide for detection of SNP TSC0004631
agggttgttgggt

SEQ ID NO: 251752 - DNA, 13 bp, Artificial Sequence
  Oligonucleotide for detection of SNP TSC0004631
acccaacaaccct

SEQ ID NO: 251753 - DNA, 13 bp, Artificial Sequence
  Oligonucleotide for detection of SNP TSC0009161
tattataagtaat

SEQ ID NO: 251754 - DNA, 13 bp, Artificial Sequence
  Oligonucleotide for detection of SNP TSC0009161
attacttataata

SEQ ID NO: 251755 - DNA, 13 bp, Artificial Sequence
  Oligonucleotide for detection of SNP TSC0009161
tattatgagtaat

SEQ ID NO: 251756 - DNA, 13 bp, Artificial Sequence
  Oligonucleotide for detection of SNP TSC0009161
attactcataata

SEQ ID NO: 251757 - DNA, 13 bp, Artificial Sequence
  Oligonucleotide for detection of SNP TSC0009161
tattacgagtaat

SEQ ID NO: 251758 - DNA, 13 bp, Artificial Sequence
  Oligonucleotide for detection of SNP TSC0009161
attactcgtaata

SEQ ID NO: 251759 - DNA, 13 bp, Artificial Sequence
  Oligonucleotide for detection of SNP TSC0009161
attgtttgtaata

SEQ ID NO: 251760 - DNA, 13 bp, Artificial Sequence
  Oligonucleotide for detection of SNP TSC0009161
tattacaaacaat

SEQ ID NO: 251761 - DNA, 13 bp, Artificial Sequence
  Oligonucleotide for detection of SNP TSC0009161
attgttcgtaata

SEQ ID NO: 251762 - DNA, 13 bp, Artificial Sequence
  Oligonucleotide for detection of SNP TSC0009161
tattacgaacaat

SEQ ID NO: 251763 - DNA, 13 bp, Artificial Sequence
  Oligonucleotide for detection of SNP TSC0061439
tatttagtaataa

SEQ ID NO: 251764 - DNA, 13 bp, Artificial Sequence
  Oligonucleotide for detection of SNP TSC0061439
ttattactaaata

SEQ ID NO: 251765 - DNA, 13 bp, Artificial Sequence
  Oligonucleotide for detection of SNP TSC0006693
taattagtttttt

SEQ ID NO: 251766 - DNA, 13 bp, Artificial Sequence
  Oligonucleotide for detection of SNP TSC0006693
aaaaaactaatta

SEQ ID NO: 251767 - DNA, 13 bp, Artificial Sequence
  Oligonucleotide for detection of SNP TSC0006694
atttagaaattaa

SEQ ID NO: 251768 - DNA, 13 bp, Artificial Sequence
  Oligonucleotide for detection of SNP TSC0006694
ttaatttctaaat

SEQ ID NO: 251769 - DNA, 13 bp, Artificial Sequence
  Oligonucleotide for detection of SNP TSC0061444
tttgttattttgg

SEQ ID NO: 251770 - DNA, 13 bp, Artificial Sequence
  Oligonucleotide for detection of SNP TSC0061444
ccaaaataacaaa

SEQ ID NO: 251771 - DNA, 13 bp, Artificial Sequence
  Oligonucleotide for detection of SNP TSC0061445
tattaagtatttg

SEQ ID NO: 251772 - DNA, 13 bp, Artificial Sequence
  Oligonucleotide for detection of SNP TSC0061445
caaatacttaata

SEQ ID NO: 251773 - DNA, 13 bp, Artificial Sequence
  Oligonucleotide for detection of SNP TSC0061445
tattaattatttg

SEQ ID NO: 251774 - DNA, 13 bp, Artificial Sequence
  Oligonucleotide for detection of SNP TSC0061445
caaataattaata

SEQ ID NO: 251775 - DNA, 13 bp, Artificial Sequence
  Oligonucleotide for detection of SNP TSC0061445
taaatgtttgatg

SEQ ID NO: 251776 - DNA, 13 bp, Artificial Sequence
  Oligonucleotide for detection of SNP TSC0061445
catcaaacattta

SEQ ID NO: 251777 - DNA, 13 bp, Artificial Sequence
  Oligonucleotide for detection of SNP TSC0061445
taaatggttgatg

SEQ ID NO: 251778 - DNA, 13 bp, Artificial Sequence
  Oligonucleotide for detection of SNP TSC0061445
catcaaccattta

SEQ ID NO: 251779 - DNA, 13 bp, Artificial Sequence
  Oligonucleotide for detection of SNP TSC0061446
aatgaatgtattg

SEQ ID NO: 251780 - DNA, 13 bp, Artificial Sequence
  Oligonucleotide for detection of SNP TSC0061446
caatacattcatt

SEQ ID NO: 251781 - DNA, 13 bp, Artificial Sequence
  Oligonucleotide for detection of SNP TSC0061446
aatgaacgtattg

SEQ ID NO: 251782 - DNA, 13 bp, Artificial Sequence
  Oligonucleotide for detection of SNP TSC0061446
caatacgttcatt

SEQ ID NO: 251783 - DNA, 13 bp, Artificial Sequence
  Oligonucleotide for detection of SNP TSC0061446
aatgaatgtatcg

SEQ ID NO: 251784 - DNA, 13 bp, Artificial Sequence
  Oligonucleotide for detection of SNP TSC0061446
cgatacattcatt

SEQ ID NO: 251785 - DNA, 13 bp, Artificial Sequence
  Oligonucleotide for detection of SNP TSC0061446
aatgaacgtatcg

SEQ ID NO: 251786 - DNA, 13 bp, Artificial Sequence
  Oligonucleotide for detection of SNP TSC0061446
cgatacgttcatt

SEQ ID NO: 251787 - DNA, 13 bp, Artificial Sequence
  Oligonucleotide for detection of SNP TSC0061446
cggtgtgtttatt

SEQ ID NO: 251788 - DNA, 13 bp, Artificial Sequence
  Oligonucleotide for detection of SNP TSC0061446
aataaacacaccg

SEQ ID NO: 251789 - DNA, 13 bp, Artificial Sequence
  Oligonucleotide for detection of SNP TSC0061446
cggtgtatttatt

SEQ ID NO: 251790 - DNA, 13 bp, Artificial Sequence
  Oligonucleotide for detection of SNP TSC0061446
aataaatacaccg

SEQ ID NO: 251791 - DNA, 13 bp, Artificial Sequence
  Oligonucleotide for detection of SNP TSC0061446
tggtgcgtttatt

SEQ ID NO: 251792 - DNA, 13 bp, Artificial Sequence
  Oligonucleotide for detection of SNP TSC0061446
aataaacgcacca

SEQ ID NO: 251793 - DNA, 13 bp, Artificial Sequence
  Oligonucleotide for detection of SNP TSC0061446
cggtgcgtttatt

SEQ ID NO: 251794 - DNA, 13 bp, Artificial Sequence
  Oligonucleotide for detection of SNP TSC0061446
aataaacgcaccg

SEQ ID NO: 251795 - DNA, 13 bp, Artificial Sequence
  Oligonucleotide for detection of SNP TSC0009942
attattatagaga

SEQ ID NO: 251796 - DNA, 13 bp, Artificial Sequence
  Oligonucleotide for detection of SNP TSC0009942
tctctataataat

SEQ ID NO: 251797 - DNA, 13 bp, Artificial Sequence
  Oligonucleotide for detection of SNP TSC0009942
attattgtagaga

SEQ ID NO: 251798 - DNA, 13 bp, Artificial Sequence
  Oligonucleotide for detection of SNP TSC0009942
tctctacaataat

SEQ ID NO: 251799 - DNA, 13 bp, Artificial Sequence
  Oligonucleotide for detection of SNP TSC0061448
gttaagagattag

SEQ ID NO: 251800 - DNA, 13 bp, Artificial Sequence
  Oligonucleotide for detection of SNP TSC0061448
ctaatctcttaac

SEQ ID NO: 251801 - DNA, 13 bp, Artificial Sequence
  Oligonucleotide for detection of SNP TSC0061448
gttaagtgattag

SEQ ID NO: 251802 - DNA, 13 bp, Artificial Sequence
  Oligonucleotide for detection of SNP TSC0061448
ctaatcacttaac

SEQ ID NO: 251803 - DNA, 13 bp, Artificial Sequence
  Oligonucleotide for detection of SNP TSC0061448
gttaagcgattag

SEQ ID NO: 251804 - DNA, 13 bp, Artificial Sequence
  Oligonucleotide for detection of SNP TSC0061448
ctaatcgcttaac

SEQ ID NO: 251805 - DNA, 13 bp, Artificial Sequence
  Oligonucleotide for detection of SNP TSC0061448
ttgatcgtttggy

SEQ ID NO: 251806 - DNA, 13 bp, Artificial Sequence
  Oligonucleotide for detection of SNP TSC0061448
rccaaacgatcaa

SEQ ID NO: 251807 - DNA, 13 bp, Artificial Sequence
  Oligonucleotide for detection of SNP TSC0061449
attatttatggtt

SEQ ID NO: 251808 - DNA, 13 bp, Artificial Sequence
  Oligonucleotide for detection of SNP TSC0061449
aaccataaataat

SEQ ID NO: 251809 - DNA, 13 bp, Artificial Sequence
  Oligonucleotide for detection of SNP TSC0061449
attattgatggtt

SEQ ID NO: 251810 - DNA, 13 bp, Artificial Sequence
  Oligonucleotide for detection of SNP TSC0061449
aaccatcaataat

SEQ ID NO: 251811 - DNA, 13 bp, Artificial Sequence
  Oligonucleotide for detection of SNP TSC0061449
agttatgagtaat

SEQ ID NO: 251812 - DNA, 13 bp, Artificial Sequence
  Oligonucleotide for detection of SNP TSC0061449
attactcataact

SEQ ID NO: 251813 - DNA, 13 bp, Artificial Sequence
  Oligonucleotide for detection of SNP TSC0061449
agttattagtaat

SEQ ID NO: 251814 - DNA, 13 bp, Artificial Sequence
  Oligonucleotide for detection of SNP TSC0061449
attactaataact

SEQ ID NO: 251815 - DNA, 13 bp, Artificial Sequence
  Oligonucleotide for detection of SNP TSC0061450
gttttgaggttag

SEQ ID NO: 251816 - DNA, 13 bp, Artificial Sequence
  Oligonucleotide for detection of SNP TSC0061450
ctaacctcaaaac

SEQ ID NO: 251817 - DNA, 13 bp, Artificial Sequence
  Oligonucleotide for detection of SNP TSC0061450
gttttggggttag

SEQ ID NO: 251818 - DNA, 13 bp, Artificial Sequence
  Oligonucleotide for detection of SNP TSC0061450
ctaaccccaaaac

SEQ ID NO: 251819 - DNA, 13 bp, Artificial Sequence
  Oligonucleotide for detection of SNP TSC0061453
aaaaatgtgtgtg

SEQ ID NO: 251820 - DNA, 13 bp, Artificial Sequence
  Oligonucleotide for detection of SNP TSC0061453
cacacacattttt

SEQ ID NO: 251821 - DNA, 13 bp, Artificial Sequence
  Oligonucleotide for detection of SNP TSC0061453
aaaaatatgtgtg

SEQ ID NO: 251822 - DNA, 13 bp, Artificial Sequence
  Oligonucleotide for detection of SNP TSC0061453
cacacatattttt

SEQ ID NO: 251823 - DNA, 13 bp, Artificial Sequence
  Oligonucleotide for detection of SNP TSC0009863
aagatattttata

SEQ ID NO: 251824 - DNA, 13 bp, Artificial Sequence
  Oligonucleotide for detection of SNP TSC0009863
tataaaatatctt

SEQ ID NO: 251825 - DNA, 13 bp, Artificial Sequence
  Oligonucleotide for detection of SNP TSC0009863
aagatagtttata

SEQ ID NO: 251826 - DNA, 13 bp, Artificial Sequence
  Oligonucleotide for detection of SNP TSC0009863
tataaactatctt

SEQ ID NO: 251827 - DNA, 13 bp, Artificial Sequence
  Oligonucleotide for detection of SNP TSC0009863
tataaggtatttt

SEQ ID NO: 251828 - DNA, 13 bp, Artificial Sequence
  Oligonucleotide for detection of SNP TSC0009863
aaaataccttata

SEQ ID NO: 251829 - DNA, 13 bp, Artificial Sequence
  Oligonucleotide for detection of SNP TSC0009863
tataagttatttt

SEQ ID NO: 251830 - DNA, 13 bp, Artificial Sequence
  Oligonucleotide for detection of SNP TSC0009863
aaaataacttata

SEQ ID NO: 251831 - DNA, 13 bp, Artificial Sequence
  Oligonucleotide for detection of SNP TSC0061454
tatttttgtgtat

SEQ ID NO: 251832 - DNA, 13 bp, Artificial Sequence
  Oligonucleotide for detection of SNP TSC0061454
atacacaaaaata

SEQ ID NO: 251833 - DNA, 13 bp, Artificial Sequence
  Oligonucleotide for detection of SNP TSC0061454
tattttggtgtat

SEQ ID NO: 251834 - DNA, 13 bp, Artificial Sequence
  Oligonucleotide for detection of SNP TSC0061454
atacaccaaaata

SEQ ID NO: 251835 - DNA, 13 bp, Artificial Sequence
  Oligonucleotide for detection of SNP TSC0061454
tatttcggtgtat

SEQ ID NO: 251836 - DNA, 13 bp, Artificial Sequence
  Oligonucleotide for detection of SNP TSC0061454
atacaccgaaata

SEQ ID NO: 251837 - DNA, 13 bp, Artificial Sequence
  Oligonucleotide for detection of SNP TSC0061454
atatataggaata

SEQ ID NO: 251838 - DNA, 13 bp, Artificial Sequence
  Oligonucleotide for detection of SNP TSC0061454
tattcctatatat

SEQ ID NO: 251839 - DNA, 13 bp, Artificial Sequence
  Oligonucleotide for detection of SNP TSC0061454
atatattggaata

SEQ ID NO: 251840 - DNA, 13 bp, Artificial Sequence
  Oligonucleotide for detection of SNP TSC0061454
tattccaatatat

SEQ ID NO: 251841 - DNA, 13 bp, Artificial Sequence
  Oligonucleotide for detection of SNP TSC0061454
atatatcggaata

SEQ ID NO: 251842 - DNA, 13 bp, Artificial Sequence
  Oligonucleotide for detection of SNP TSC0061454
tattccgatatat

SEQ ID NO: 251843 - DNA, 13 bp, Artificial Sequence
  Oligonucleotide for detection of SNP TSC0004641
agaatatatagta

SEQ ID NO: 251844 - DNA, 13 bp, Artificial Sequence
  Oligonucleotide for detection of SNP TSC0004641
tactatatattct

SEQ ID NO: 251845 - DNA, 13 bp, Artificial Sequence
  Oligonucleotide for detection of SNP TSC0004641
agaatagatagta

SEQ ID NO: 251846 - DNA, 13 bp, Artificial Sequence
  Oligonucleotide for detection of SNP TSC0004641
tactatctattct

SEQ ID NO: 251847 - DNA, 13 bp, Artificial Sequence
  Oligonucleotide for detection of SNP TSC0004641
tgttgtatatttt

SEQ ID NO: 251848 - DNA, 13 bp, Artificial Sequence
  Oligonucleotide for detection of SNP TSC0004641
aaaatatacaaca

SEQ ID NO: 251849 - DNA, 13 bp, Artificial Sequence
  Oligonucleotide for detection of SNP TSC0004641
tgttgtttatttt

SEQ ID NO: 251850 - DNA, 13 bp, Artificial Sequence
  Oligonucleotide for detection of SNP TSC0004641
aaaataaacaaca

SEQ ID NO: 251851 - DNA, 13 bp, Artificial Sequence
  Oligonucleotide for detection of SNP TSC0061455
tataatgattata

SEQ ID NO: 251852 - DNA, 13 bp, Artificial Sequence
  Oligonucleotide for detection of SNP TSC0061455
tataatcattata

SEQ ID NO: 251853 - DNA, 13 bp, Artificial Sequence
  Oligonucleotide for detection of SNP TSC0006918
ttatatattgtat

SEQ ID NO: 251854 - DNA, 13 bp, Artificial Sequence
  Oligonucleotide for detection of SNP TSC0006918
atacaatatataa

SEQ ID NO: 251855 - DNA, 13 bp, Artificial Sequence
  Oligonucleotide for detection of SNP TSC0006918
ttatattttgtat

SEQ ID NO: 251856 - DNA, 13 bp, Artificial Sequence
  Oligonucleotide for detection of SNP TSC0006918
atacaaaatataa

SEQ ID NO: 251857 - DNA, 13 bp, Artificial Sequence
  Oligonucleotide for detection of SNP TSC0006918
atgtagtgtgtga

SEQ ID NO: 251858 - DNA, 13 bp, Artificial Sequence
  Oligonucleotide for detection of SNP TSC0006918
tcacacactacat

SEQ ID NO: 251859 - DNA, 13 bp, Artificial Sequence
  Oligonucleotide for detection of SNP TSC0006918
atgtagagtgtga

SEQ ID NO: 251860 - DNA, 13 bp, Artificial Sequence
  Oligonucleotide for detection of SNP TSC0006918
tcacactctacat

SEQ ID NO: 251861 - DNA, 13 bp, Artificial Sequence
  Oligonucleotide for detection of SNP TSC0061456
ataaaagatggtt

SEQ ID NO: 251862 - DNA, 13 bp, Artificial Sequence
  Oligonucleotide for detection of SNP TSC0061456
aaccatcttttat

SEQ ID NO: 251863 - DNA, 13 bp, Artificial Sequence
  Oligonucleotide for detection of SNP TSC0061456
ataaaaaatggtt

SEQ ID NO: 251864 - DNA, 13 bp, Artificial Sequence
  Oligonucleotide for detection of SNP TSC0061456
aaccattttttat

SEQ ID NO: 251865 - DNA, 13 bp, Artificial Sequence
  Oligonucleotide for detection of SNP TSC0061456
ataaaagacggtt

SEQ ID NO: 251866 - DNA, 13 bp, Artificial Sequence
  Oligonucleotide for detection of SNP TSC0061456
aaccgtcttttat

SEQ ID NO: 251867 - DNA, 13 bp, Artificial Sequence
  Oligonucleotide for detection of SNP TSC0061456
ataaaaaacggtt

SEQ ID NO: 251868 - DNA, 13 bp, Artificial Sequence
  Oligonucleotide for detection of SNP TSC0061456
aaccgttttttat

SEQ ID NO: 251869 - DNA, 13 bp, Artificial Sequence
  Oligonucleotide for detection of SNP TSC0061457
ttaattattaata

SEQ ID NO: 251870 - DNA, 13 bp, Artificial Sequence
  Oligonucleotide for detection of SNP TSC0061457
tattaataattaa

SEQ ID NO: 251871 - DNA, 13 bp, Artificial Sequence
  Oligonucleotide for detection of SNP TSC0061457
ttaattgttaata

SEQ ID NO: 251872 - DNA, 13 bp, Artificial Sequence
  Oligonucleotide for detection of SNP TSC0061457
tattaacaattaa

SEQ ID NO: 251873 - DNA, 13 bp, Artificial Sequence
  Oligonucleotide for detection of SNP TSC0061458
gttatttggtgay

SEQ ID NO: 251874 - DNA, 13 bp, Artificial Sequence
  Oligonucleotide for detection of SNP TSC0061458
rtcaccaaataac

SEQ ID NO: 251875 - DNA, 13 bp, Artificial Sequence
  Oligonucleotide for detection of SNP TSC0061458
gttattcggtgay

SEQ ID NO: 251876 - DNA, 13 bp, Artificial Sequence
  Oligonucleotide for detection of SNP TSC0061458
rtcaccgaataac

SEQ ID NO: 251877 - DNA, 13 bp, Artificial Sequence
  Oligonucleotide for detection of SNP TSC0061458
gttattgagtagy

SEQ ID NO: 251878 - DNA, 13 bp, Artificial Sequence
  Oligonucleotide for detection of SNP TSC0061458
rctactcaataac

SEQ ID NO: 251879 - DNA, 13 bp, Artificial Sequence
  Oligonucleotide for detection of SNP TSC0061458
gttattaagtagy

SEQ ID NO: 251880 - DNA, 13 bp, Artificial Sequence
  Oligonucleotide for detection of SNP TSC0061458
rctacttaataac

SEQ ID NO: 251881 - DNA, 13 bp, Artificial Sequence
  Oligonucleotide for detection of SNP TSC0061458
gttatcgagtagy

SEQ ID NO: 251882 - DNA, 13 bp, Artificial Sequence
  Oligonucleotide for detection of SNP TSC0061458
rctactcgataac

SEQ ID NO: 251883 - DNA, 13 bp, Artificial Sequence
  Oligonucleotide for detection of SNP TSC0061459
tgatttatagtag

SEQ ID NO: 251884 - DNA, 13 bp, Artificial Sequence
  Oligonucleotide for detection of SNP TSC0061459
ctactataaatca

SEQ ID NO: 251885 - DNA, 13 bp, Artificial Sequence
  Oligonucleotide for detection of SNP TSC0061459
tgatttttagtag

SEQ ID NO: 251886 - DNA, 13 bp, Artificial Sequence
  Oligonucleotide for detection of SNP TSC0061459
ctactaaaaatca

SEQ ID NO: 251887 - DNA, 13 bp, Artificial Sequence
  Oligonucleotide for detection of SNP TSC0061459
ttattgtgaatta

SEQ ID NO: 251888 - DNA, 13 bp, Artificial Sequence
  Oligonucleotide for detection of SNP TSC0061459
taattcacaataa

SEQ ID NO: 251889 - DNA, 13 bp, Artificial Sequence
  Oligonucleotide for detection of SNP TSC0061459
ttattgggaatta

SEQ ID NO: 251890 - DNA, 13 bp, Artificial Sequence
  Oligonucleotide for detection of SNP TSC0061459
taattcccaataa

SEQ ID NO: 251891 - DNA, 13 bp, Artificial Sequence
  Oligonucleotide for detection of SNP TSC0061460
tttagttaggtgt

SEQ ID NO: 251892 - DNA, 13 bp, Artificial Sequence
  Oligonucleotide for detection of SNP TSC0061460
acacctaactaaa

SEQ ID NO: 251893 - DNA, 13 bp, Artificial Sequence
  Oligonucleotide for detection of SNP TSC0061460
tttagtgaggtgt

SEQ ID NO: 251894 - DNA, 13 bp, Artificial Sequence
  Oligonucleotide for detection of SNP TSC0061460
acacctcactaaa

SEQ ID NO: 251895 - DNA, 13 bp, Artificial Sequence
  Oligonucleotide for detection of SNP TSC0061460
tttagcgaggtgt

SEQ ID NO: 251896 - DNA, 13 bp, Artificial Sequence
  Oligonucleotide for detection of SNP TSC0061460
acacctcgctaaa

SEQ ID NO: 251897 - DNA, 13 bp, Artificial Sequence
  Oligonucleotide for detection of SNP TSC0061460
atatttggttggg

SEQ ID NO: 251898 - DNA, 13 bp, Artificial Sequence
  Oligonucleotide for detection of SNP TSC0061460
cccaaccaaatat

SEQ ID NO: 251899 - DNA, 13 bp, Artificial Sequence
  Oligonucleotide for detection of SNP TSC0061460
atattttgttggg

SEQ ID NO: 251900 - DNA, 13 bp, Artificial Sequence
  Oligonucleotide for detection of SNP TSC0061460
cccaacaaaatat

SEQ ID NO: 251901 - DNA, 13 bp, Artificial Sequence
  Oligonucleotide for detection of SNP TSC0061460
atatttcgttggg

SEQ ID NO: 251902 - DNA, 13 bp, Artificial Sequence
  Oligonucleotide for detection of SNP TSC0061460
cccaacgaaatat

SEQ ID NO: 251903 - DNA, 13 bp, Artificial Sequence
  Oligonucleotide for detection of SNP TSC0061461
agtttaaagagag

SEQ ID NO: 251904 - DNA, 13 bp, Artificial Sequence
  Oligonucleotide for detection of SNP TSC0061461
ctctctttaaact

SEQ ID NO: 251905 - DNA, 13 bp, Artificial Sequence
  Oligonucleotide for detection of SNP TSC0061461
agtttagagagag

SEQ ID NO: 251906 - DNA, 13 bp, Artificial Sequence
  Oligonucleotide for detection of SNP TSC0061461
ctctctctaaact

SEQ ID NO: 251907 - DNA, 13 bp, Artificial Sequence
  Oligonucleotide for detection of SNP TSC0008377
tgggttgttaaag

SEQ ID NO: 251908 - DNA, 13 bp, Artificial Sequence
  Oligonucleotide for detection of SNP TSC0008377
ctttaacaaccca

SEQ ID NO: 251909 - DNA, 13 bp, Artificial Sequence
  Oligonucleotide for detection of SNP TSC0008377
tgggttattaaag

SEQ ID NO: 251910 - DNA, 13 bp, Artificial Sequence
  Oligonucleotide for detection of SNP TSC0008377
ctttaataaccca

SEQ ID NO: 251911 - DNA, 13 bp, Artificial Sequence
  Oligonucleotide for detection of SNP TSC0061462
gttttttgtatag

SEQ ID NO: 251912 - DNA, 13 bp, Artificial Sequence
  Oligonucleotide for detection of SNP TSC0061462
ctatacaaaaaac

SEQ ID NO: 251913 - DNA, 13 bp, Artificial Sequence
  Oligonucleotide for detection of SNP TSC0061462
gtttttcgtatag

SEQ ID NO: 251914 - DNA, 13 bp, Artificial Sequence
  Oligonucleotide for detection of SNP TSC0061462
ctatacgaaaaac

SEQ ID NO: 251915 - DNA, 13 bp, Artificial Sequence
  Oligonucleotide for detection of SNP TSC0061462
ttgtatgggaagy

SEQ ID NO: 251916 - DNA, 13 bp, Artificial Sequence
  Oligonucleotide for detection of SNP TSC0061462
rcttcccatacaa

SEQ ID NO: 251917 - DNA, 13 bp, Artificial Sequence
  Oligonucleotide for detection of SNP TSC0061462
ttgtataggaagy

SEQ ID NO: 251918 - DNA, 13 bp, Artificial Sequence
  Oligonucleotide for detection of SNP TSC0061462
rcttcctatacaa

SEQ ID NO: 251919 - DNA, 13 bp, Artificial Sequence
  Oligonucleotide for detection of SNP TSC0061462
ttgtacgggaagy

SEQ ID NO: 251920 - DNA, 13 bp, Artificial Sequence
  Oligonucleotide for detection of SNP TSC0061462
rcttcccgtacaa

SEQ ID NO: 251921 - DNA, 13 bp, Artificial Sequence
  Oligonucleotide for detection of SNP TSC0061467
atatgtatgttat

SEQ ID NO: 251922 - DNA, 13 bp, Artificial Sequence
  Oligonucleotide for detection of SNP TSC0061467
ataacatacatat

SEQ ID NO: 251923 - DNA, 13 bp, Artificial Sequence
  Oligonucleotide for detection of SNP TSC0061467
atatgtgtgttat

SEQ ID NO: 251924 - DNA, 13 bp, Artificial Sequence
  Oligonucleotide for detection of SNP TSC0061467
ataacacacatat

SEQ ID NO: 251925 - DNA, 13 bp, Artificial Sequence
  Oligonucleotide for detection of SNP TSC0061467
atatgcgtgttat

SEQ ID NO: 251926 - DNA, 13 bp, Artificial Sequence
  Oligonucleotide for detection of SNP TSC0061467
ataacacgcatat

SEQ ID NO: 251927 - DNA, 13 bp, Artificial Sequence
  Oligonucleotide for detection of SNP TSC0061467
ataatatgtatgt

SEQ ID NO: 251928 - DNA, 13 bp, Artificial Sequence
  Oligonucleotide for detection of SNP TSC0061467
acatacatattat

SEQ ID NO: 251929 - DNA, 13 bp, Artificial Sequence
  Oligonucleotide for detection of SNP TSC0061467
ataatacgtatgt

SEQ ID NO: 251930 - DNA, 13 bp, Artificial Sequence
  Oligonucleotide for detection of SNP TSC0061467
acatacgtattat

SEQ ID NO: 251931 - DNA, 13 bp, Artificial Sequence
  Oligonucleotide for detection of SNP TSC0061468
aaaagggaaaatg

SEQ ID NO: 251932 - DNA, 13 bp, Artificial Sequence
  Oligonucleotide for detection of SNP TSC0061468
cattttccctttt

SEQ ID NO: 251933 - DNA, 13 bp, Artificial Sequence
  Oligonucleotide for detection of SNP TSC0061468
aaaaggaaaaatg

SEQ ID NO: 251934 - DNA, 13 bp, Artificial Sequence
  Oligonucleotide for detection of SNP TSC0061468
catttttcctttt

SEQ ID NO: 251935 - DNA, 13 bp, Artificial Sequence
  Oligonucleotide for detection of SNP TSC0061469
ttagatatgagta

SEQ ID NO: 251936 - DNA, 13 bp, Artificial Sequence
  Oligonucleotide for detection of SNP TSC0061469
tactcatatctaa

SEQ ID NO: 251937 - DNA, 13 bp, Artificial Sequence
  Oligonucleotide for detection of SNP TSC0061469
ttagatgtgagta

SEQ ID NO: 251938 - DNA, 13 bp, Artificial Sequence
  Oligonucleotide for detection of SNP TSC0061469
tactcacatctaa

SEQ ID NO: 251939 - DNA, 13 bp, Artificial Sequence
  Oligonucleotide for detection of SNP TSC0061470
tagtgtattagty

SEQ ID NO: 251940 - DNA, 13 bp, Artificial Sequence
  Oligonucleotide for detection of SNP TSC0061470
ractaatacacta

SEQ ID NO: 251941 - DNA, 13 bp, Artificial Sequence
  Oligonucleotide for detection of SNP TSC0061470
tagtgttttagty

SEQ ID NO: 251942 - DNA, 13 bp, Artificial Sequence
  Oligonucleotide for detection of SNP TSC0061470
ractaaaacacta

SEQ ID NO: 251943 - DNA, 13 bp, Artificial Sequence
  Oligonucleotide for detection of SNP TSC0061470
ggttaatatatta

SEQ ID NO: 251944 - DNA, 13 bp, Artificial Sequence
  Oligonucleotide for detection of SNP TSC0061470
taatatattaacc

SEQ ID NO: 251945 - DNA, 13 bp, Artificial Sequence
  Oligonucleotide for detection of SNP TSC0061470
ggttaagatatta

SEQ ID NO: 251946 - DNA, 13 bp, Artificial Sequence
  Oligonucleotide for detection of SNP TSC0061470
taatatcttaacc

SEQ ID NO: 251947 - DNA, 13 bp, Artificial Sequence
  Oligonucleotide for detection of SNP TSC0061473
ttggtgtttttat

SEQ ID NO: 251948 - DNA, 13 bp, Artificial Sequence
  Oligonucleotide for detection of SNP TSC0061473
ataaaaacaccaa

SEQ ID NO: 251949 - DNA, 13 bp, Artificial Sequence
  Oligonucleotide for detection of SNP TSC0061473
ttggtggttttat

SEQ ID NO: 251950 - DNA, 13 bp, Artificial Sequence
  Oligonucleotide for detection of SNP TSC0061473
ataaaaccaccaa

SEQ ID NO: 251951 - DNA, 13 bp, Artificial Sequence
  Oligonucleotide for detection of SNP TSC0061473
ataagggtattaa

SEQ ID NO: 251952 - DNA, 13 bp, Artificial Sequence
  Oligonucleotide for detection of SNP TSC0061473
ttaatacccttat

SEQ ID NO: 251953 - DNA, 13 bp, Artificial Sequence
  Oligonucleotide for detection of SNP TSC0061473
ataaggttattaa

SEQ ID NO: 251954 - DNA, 13 bp, Artificial Sequence
  Oligonucleotide for detection of SNP TSC0061473
ttaataaccttat

SEQ ID NO: 251955 - DNA, 13 bp, Artificial Sequence
  Oligonucleotide for detection of SNP TSC0061475
aaattatgagtag

SEQ ID NO: 251956 - DNA, 13 bp, Artificial Sequence
  Oligonucleotide for detection of SNP TSC0061475
ctactcataattt

SEQ ID NO: 251957 - DNA, 13 bp, Artificial Sequence
  Oligonucleotide for detection of SNP TSC0061475
aaattaggagtag

SEQ ID NO: 251958 - DNA, 13 bp, Artificial Sequence
  Oligonucleotide for detection of SNP TSC0061475
ctactcctaattt

SEQ ID NO: 251959 - DNA, 13 bp, Artificial Sequence
  Oligonucleotide for detection of SNP TSC0061476
ttttaaatgtttg

SEQ ID NO: 251960 - DNA, 13 bp, Artificial Sequence
  Oligonucleotide for detection of SNP TSC0061476
caaacatttaaaa

SEQ ID NO: 251961 - DNA, 13 bp, Artificial Sequence
  Oligonucleotide for detection of SNP TSC0061476
ttttaagtgtttg

SEQ ID NO: 251962 - DNA, 13 bp, Artificial Sequence
  Oligonucleotide for detection of SNP TSC0061476
caaacacttaaaa

SEQ ID NO: 251963 - DNA, 13 bp, Artificial Sequence
  Oligonucleotide for detection of SNP TSC0061477
atttatgggtaga

SEQ ID NO: 251964 - DNA, 13 bp, Artificial Sequence
  Oligonucleotide for detection of SNP TSC0061477
tctacccataaat

SEQ ID NO: 251965 - DNA, 13 bp, Artificial Sequence
  Oligonucleotide for detection of SNP TSC0061477
atttataggtaga

SEQ ID NO: 251966 - DNA, 13 bp, Artificial Sequence
  Oligonucleotide for detection of SNP TSC0061477
tctacctataaat

SEQ ID NO: 251967 - DNA, 13 bp, Artificial Sequence
  Oligonucleotide for detection of SNP TSC0061478
ttaaaagtaattg

SEQ ID NO: 251968 - DNA, 13 bp, Artificial Sequence
  Oligonucleotide for detection of SNP TSC0061478
caattacttttaa

SEQ ID NO: 251969 - DNA, 13 bp, Artificial Sequence
  Oligonucleotide for detection of SNP TSC0061478
ttaaaaataattg

SEQ ID NO: 251970 - DNA, 13 bp, Artificial Sequence
  Oligonucleotide for detection of SNP TSC0061478
caattatttttaa

SEQ ID NO: 251971 - DNA, 13 bp, Artificial Sequence
  Oligonucleotide for detection of SNP TSC0061479
tagataaatgtag

SEQ ID NO: 251972 - DNA, 13 bp, Artificial Sequence
  Oligonucleotide for detection of SNP TSC0061479
ctacatttatcta

SEQ ID NO: 251973 - DNA, 13 bp, Artificial Sequence
  Oligonucleotide for detection of SNP TSC0061479
tagatatatgtag

SEQ ID NO: 251974 - DNA, 13 bp, Artificial Sequence
  Oligonucleotide for detection of SNP TSC0061479
ctacatatatcta

SEQ ID NO: 251975 - DNA, 13 bp, Artificial Sequence
  Oligonucleotide for detection of SNP TSC0061479
ttgtatttgttta

SEQ ID NO: 251976 - DNA, 13 bp, Artificial Sequence
  Oligonucleotide for detection of SNP TSC0061479
taaacaaatacaa

SEQ ID NO: 251977 - DNA, 13 bp, Artificial Sequence
  Oligonucleotide for detection of SNP TSC0061481
tggaaatgaagtt

SEQ ID NO: 251978 - DNA, 13 bp, Artificial Sequence
  Oligonucleotide for detection of SNP TSC0061481
aacttcatttcca

SEQ ID NO: 251979 - DNA, 13 bp, Artificial Sequence
  Oligonucleotide for detection of SNP TSC0061481
tggaaaggaagtt

SEQ ID NO: 251980 - DNA, 13 bp, Artificial Sequence
  Oligonucleotide for detection of SNP TSC0061481
aacttcctttcca

SEQ ID NO: 251981 - DNA, 13 bp, Artificial Sequence
  Oligonucleotide for detection of SNP TSC0061482
ggaaatggggtta

SEQ ID NO: 251982 - DNA, 13 bp, Artificial Sequence
  Oligonucleotide for detection of SNP TSC0061482
taaccccatttcc

SEQ ID NO: 251983 - DNA, 13 bp, Artificial Sequence
  Oligonucleotide for detection of SNP TSC0061482
ggaaatagggtta

SEQ ID NO: 251984 - DNA, 13 bp, Artificial Sequence
  Oligonucleotide for detection of SNP TSC0061482
taaccctatttcc

SEQ ID NO: 251985 - DNA, 13 bp, Artificial Sequence
  Oligonucleotide for detection of SNP TSC0061482
ggaaacggggtta

SEQ ID NO: 251986 - DNA, 13 bp, Artificial Sequence
  Oligonucleotide for detection of SNP TSC0061482
taaccccgtttcc

SEQ ID NO: 251987 - DNA, 13 bp, Artificial Sequence
  Oligonucleotide for detection of SNP TSC0061486
atttttaagtaaa

SEQ ID NO: 251988 - DNA, 13 bp, Artificial Sequence
  Oligonucleotide for detection of SNP TSC0061486
tttacttaaaaat

SEQ ID NO: 251989 - DNA, 13 bp, Artificial Sequence
  Oligonucleotide for detection of SNP TSC0061486
attttttagtaaa

SEQ ID NO: 251990 - DNA, 13 bp, Artificial Sequence
  Oligonucleotide for detection of SNP TSC0061486
tttactaaaaaat

SEQ ID NO: 251991 - DNA, 13 bp, Artificial Sequence
  Oligonucleotide for detection of SNP TSC0061488
ataggattaaata

SEQ ID NO: 251992 - DNA, 13 bp, Artificial Sequence
  Oligonucleotide for detection of SNP TSC0061488
tatttaatcctat

SEQ ID NO: 251993 - DNA, 13 bp, Artificial Sequence
  Oligonucleotide for detection of SNP TSC0061488
ataggagtaaata

SEQ ID NO: 251994 - DNA, 13 bp, Artificial Sequence
  Oligonucleotide for detection of SNP TSC0061488
tatttactcctat

SEQ ID NO: 251995 - DNA, 13 bp, Artificial Sequence
  Oligonucleotide for detection of SNP TSC0061488
tatttaattttgt

SEQ ID NO: 251996 - DNA, 13 bp, Artificial Sequence
  Oligonucleotide for detection of SNP TSC0061488
acaaaattaaata

SEQ ID NO: 251997 - DNA, 13 bp, Artificial Sequence
  Oligonucleotide for detection of SNP TSC0061489
tgttgtatgaaag

SEQ ID NO: 251998 - DNA, 13 bp, Artificial Sequence
  Oligonucleotide for detection of SNP TSC0061489
ctttcatacaaca

SEQ ID NO: 251999 - DNA, 13 bp, Artificial Sequence
  Oligonucleotide for detection of SNP TSC0061489
tgttgtttgaaag

SEQ ID NO: 252000 - DNA, 13 bp, Artificial Sequence
  Oligonucleotide for detection of SNP TSC0061489
ctttcaaacaaca

SEQ ID NO: 252001 - DNA, 13 bp, Artificial Sequence
  Oligonucleotide for detection of SNP TSC0061489
tttttatatagta

SEQ ID NO: 252002 - DNA, 13 bp, Artificial Sequence
  Oligonucleotide for detection of SNP TSC0061489
tactatataaaaa

SEQ ID NO: 252003 - DNA, 13 bp, Artificial Sequence
  Oligonucleotide for detection of SNP TSC0061490
ttatttagttaag

SEQ ID NO: 252004 - DNA, 13 bp, Artificial Sequence
  Oligonucleotide for detection of SNP TSC0061490
cttaactaaataa

SEQ ID NO: 252005 - DNA, 13 bp, Artificial Sequence
  Oligonucleotide for detection of SNP TSC0061490
ttatttggttaag

SEQ ID NO: 252006 - DNA, 13 bp, Artificial Sequence
  Oligonucleotide for detection of SNP TSC0061490
cttaaccaaataa

SEQ ID NO: 252007 - DNA, 13 bp, Artificial Sequence
  Oligonucleotide for detection of SNP TSC0061492
tagttaatagaat

SEQ ID NO: 252008 - DNA, 13 bp, Artificial Sequence
  Oligonucleotide for detection of SNP TSC0061492
attctattaacta

SEQ ID NO: 252009 - DNA, 13 bp, Artificial Sequence
  Oligonucleotide for detection of SNP TSC0061492
tagttagtagaat

SEQ ID NO: 252010 - DNA, 13 bp, Artificial Sequence
  Oligonucleotide for detection of SNP TSC0061492
attctactaacta

SEQ ID NO: 252011 - DNA, 13 bp, Artificial Sequence
  Oligonucleotide for detection of SNP TSC0061495
aatataattaggy

SEQ ID NO: 252012 - DNA, 13 bp, Artificial Sequence
  Oligonucleotide for detection of SNP TSC0061495
rcctaattatatt

SEQ ID NO: 252013 - DNA, 13 bp, Artificial Sequence
  Oligonucleotide for detection of SNP TSC0061495
aatatagttaggy

SEQ ID NO: 252014 - DNA, 13 bp, Artificial Sequence
  Oligonucleotide for detection of SNP TSC0061495
rcctaactatatt

SEQ ID NO: 252015 - DNA, 13 bp, Artificial Sequence
  Oligonucleotide for detection of SNP TSC0005730
atttaataatagt

SEQ ID NO: 252016 - DNA, 13 bp, Artificial Sequence
  Oligonucleotide for detection of SNP TSC0005730
actattattaaat

SEQ ID NO: 252017 - DNA, 13 bp, Artificial Sequence
  Oligonucleotide for detection of SNP TSC0005730
atttaagaatagt

SEQ ID NO: 252018 - DNA, 13 bp, Artificial Sequence
  Oligonucleotide for detection of SNP TSC0005730
actattcttaaat

SEQ ID NO: 252019 - DNA, 13 bp, Artificial Sequence
  Oligonucleotide for detection of SNP TSC0061499
taattttggatat

SEQ ID NO: 252020 - DNA, 13 bp, Artificial Sequence
  Oligonucleotide for detection of SNP TSC0061499
atatccaaaatta

SEQ ID NO: 252021 - DNA, 13 bp, Artificial Sequence
  Oligonucleotide for detection of SNP TSC0061499
taatttcggatat

SEQ ID NO: 252022 - DNA, 13 bp, Artificial Sequence
  Oligonucleotide for detection of SNP TSC0061499
atatccgaaatta

SEQ ID NO: 252023 - DNA, 13 bp, Artificial Sequence
  Oligonucleotide for detection of SNP TSC0061499
atgtttgaaatta

SEQ ID NO: 252024 - DNA, 13 bp, Artificial Sequence
  Oligonucleotide for detection of SNP TSC0061499
taatttcaaacat

SEQ ID NO: 252025 - DNA, 13 bp, Artificial Sequence
  Oligonucleotide for detection of SNP TSC0061499
atgtttaaaatta

SEQ ID NO: 252026 - DNA, 13 bp, Artificial Sequence
  Oligonucleotide for detection of SNP TSC0061499
taattttaaacat

SEQ ID NO: 252027 - DNA, 13 bp, Artificial Sequence
  Oligonucleotide for detection of SNP TSC0061499
atgttcgaaatta

SEQ ID NO: 252028 - DNA, 13 bp, Artificial Sequence
  Oligonucleotide for detection of SNP TSC0061499
taatttcgaacat

SEQ ID NO: 252029 - DNA, 13 bp, Artificial Sequence
  Oligonucleotide for detection of SNP TSC0061500
gataaagtttaat

SEQ ID NO: 252030 - DNA, 13 bp, Artificial Sequence
  Oligonucleotide for detection of SNP TSC0061500
attaaactttatc

SEQ ID NO: 252031 - DNA, 13 bp, Artificial Sequence
  Oligonucleotide for detection of SNP TSC0061500
gataaaatttaat

SEQ ID NO: 252032 - DNA, 13 bp, Artificial Sequence
  Oligonucleotide for detection of SNP TSC0061500
attaaattttatc

SEQ ID NO: 252033 - DNA, 13 bp, Artificial Sequence
  Oligonucleotide for detection of SNP TSC0061501
ttaaatttataaa

SEQ ID NO: 252034 - DNA, 13 bp, Artificial Sequence
  Oligonucleotide for detection of SNP TSC0061501
tttataaatttaa

SEQ ID NO: 252035 - DNA, 13 bp, Artificial Sequence
  Oligonucleotide for detection of SNP TSC0061501
tttatgtgtttag

SEQ ID NO: 252036 - DNA, 13 bp, Artificial Sequence
  Oligonucleotide for detection of SNP TSC0061501
ctaaacacataaa

SEQ ID NO: 252037 - DNA, 13 bp, Artificial Sequence
  Oligonucleotide for detection of SNP TSC0061501
tttatgagtttag

SEQ ID NO: 252038 - DNA, 13 bp, Artificial Sequence
  Oligonucleotide for detection of SNP TSC0061501
ctaaactcataaa

SEQ ID NO: 252039 - DNA, 13 bp, Artificial Sequence
  Oligonucleotide for detection of SNP TSC0061502
ttaaaattatttt

SEQ ID NO: 252040 - DNA, 13 bp, Artificial Sequence
  Oligonucleotide for detection of SNP TSC0061502
aaaataattttaa

SEQ ID NO: 252041 - DNA, 13 bp, Artificial Sequence
  Oligonucleotide for detection of SNP TSC0061502
agagtgtttttgg

SEQ ID NO: 252042 - DNA, 13 bp, Artificial Sequence
  Oligonucleotide for detection of SNP TSC0061502
ccaaaaacactct

SEQ ID NO: 252043 - DNA, 13 bp, Artificial Sequence
  Oligonucleotide for detection of SNP TSC0061502
agagtggttttgg

SEQ ID NO: 252044 - DNA, 13 bp, Artificial Sequence
  Oligonucleotide for detection of SNP TSC0061502
ccaaaaccactct

SEQ ID NO: 252045 - DNA, 13 bp, Artificial Sequence
  Oligonucleotide for detection of SNP TSC0061504
tttaaagtagtta

SEQ ID NO: 252046 - DNA, 13 bp, Artificial Sequence
  Oligonucleotide for detection of SNP TSC0061504
taactactttaaa

SEQ ID NO: 252047 - DNA, 13 bp, Artificial Sequence
  Oligonucleotide for detection of SNP TSC0006500
atgtgtatagtty

SEQ ID NO: 252048 - DNA, 13 bp, Artificial Sequence
  Oligonucleotide for detection of SNP TSC0006500
raactatacacat

SEQ ID NO: 252049 - DNA, 13 bp, Artificial Sequence
  Oligonucleotide for detection of SNP TSC0006500
atgtgtttagtty

SEQ ID NO: 252050 - DNA, 13 bp, Artificial Sequence
  Oligonucleotide for detection of SNP TSC0006500
raactaaacacat

SEQ ID NO: 252051 - DNA, 13 bp, Artificial Sequence
  Oligonucleotide for detection of SNP TSC0006500
ggattatgtatat

SEQ ID NO: 252052 - DNA, 13 bp, Artificial Sequence
  Oligonucleotide for detection of SNP TSC0006500
atatacataatcc

SEQ ID NO: 252053 - DNA, 13 bp, Artificial Sequence
  Oligonucleotide for detection of SNP TSC0006500
ggattaggtatat

SEQ ID NO: 252054 - DNA, 13 bp, Artificial Sequence
  Oligonucleotide for detection of SNP TSC0006500
atatacctaatcc

SEQ ID NO: 252055 - DNA, 13 bp, Artificial Sequence
  Oligonucleotide for detection of SNP TSC0061508
ttggatttttgtt

SEQ ID NO: 252056 - DNA, 13 bp, Artificial Sequence
  Oligonucleotide for detection of SNP TSC0061508
aacaaaaatccaa

SEQ ID NO: 252057 - DNA, 13 bp, Artificial Sequence
  Oligonucleotide for detection of SNP TSC0061508
ttggatgtttgtt

SEQ ID NO: 252058 - DNA, 13 bp, Artificial Sequence
  Oligonucleotide for detection of SNP TSC0061508
aacaaacatccaa

SEQ ID NO: 252059 - DNA, 13 bp, Artificial Sequence
  Oligonucleotide for detection of SNP TSC0061508
agtagggatttag

SEQ ID NO: 252060 - DNA, 13 bp, Artificial Sequence
  Oligonucleotide for detection of SNP TSC0061508
ctaaatccctact

SEQ ID NO: 252061 - DNA, 13 bp, Artificial Sequence
  Oligonucleotide for detection of SNP TSC0061508
agtaggtatttag

SEQ ID NO: 252062 - DNA, 13 bp, Artificial Sequence
  Oligonucleotide for detection of SNP TSC0061508
ctaaatacctact

SEQ ID NO: 252063 - DNA, 13 bp, Artificial Sequence
  Oligonucleotide for detection of SNP TSC0061512
atatatatgtgtt

SEQ ID NO: 252064 - DNA, 13 bp, Artificial Sequence
  Oligonucleotide for detection of SNP TSC0061512
aacacatatatat

SEQ ID NO: 252065 - DNA, 13 bp, Artificial Sequence
  Oligonucleotide for detection of SNP TSC0061512
atatatgtgtgtt

SEQ ID NO: 252066 - DNA, 13 bp, Artificial Sequence
  Oligonucleotide for detection of SNP TSC0061512
aacacacatatat

SEQ ID NO: 252067 - DNA, 13 bp, Artificial Sequence
  Oligonucleotide for detection of SNP TSC0061514
attataatattty

SEQ ID NO: 252068 - DNA, 13 bp, Artificial Sequence
  Oligonucleotide for detection of SNP TSC0061514
raaatattataat

SEQ ID NO: 252069 - DNA, 13 bp, Artificial Sequence
  Oligonucleotide for detection of SNP TSC0061514
attatagtattty

SEQ ID NO: 252070 - DNA, 13 bp, Artificial Sequence
  Oligonucleotide for detection of SNP TSC0061514
raaatactataat

SEQ ID NO: 252071 - DNA, 13 bp, Artificial Sequence
  Oligonucleotide for detection of SNP TSC0061515
gttttagggtggy

SEQ ID NO: 252072 - DNA, 13 bp, Artificial Sequence
  Oligonucleotide for detection of SNP TSC0061515
rccaccctaaaac

SEQ ID NO: 252073 - DNA, 13 bp, Artificial Sequence
  Oligonucleotide for detection of SNP TSC0061515
gttttaaggtggy

SEQ ID NO: 252074 - DNA, 13 bp, Artificial Sequence
  Oligonucleotide for detection of SNP TSC0061515
rccaccttaaaac

SEQ ID NO: 252075 - DNA, 13 bp, Artificial Sequence
  Oligonucleotide for detection of SNP TSC0006017
ttggtgttatttt

SEQ ID NO: 252076 - DNA, 13 bp, Artificial Sequence
  Oligonucleotide for detection of SNP TSC0006017
aaaataacaccaa

SEQ ID NO: 252077 - DNA, 13 bp, Artificial Sequence
  Oligonucleotide for detection of SNP TSC0006017
ttggtggtatttt

SEQ ID NO: 252078 - DNA, 13 bp, Artificial Sequence
  Oligonucleotide for detection of SNP TSC0006017
aaaataccaccaa

SEQ ID NO: 252079 - DNA, 13 bp, Artificial Sequence
  Oligonucleotide for detection of SNP TSC0006017
ttggcgttatttt

SEQ ID NO: 252080 - DNA, 13 bp, Artificial Sequence
  Oligonucleotide for detection of SNP TSC0006017
aaaataacgccaa

SEQ ID NO: 252081 - DNA, 13 bp, Artificial Sequence
  Oligonucleotide for detection of SNP TSC0006017
ttggcggtatttt

SEQ ID NO: 252082 - DNA, 13 bp, Artificial Sequence
  Oligonucleotide for detection of SNP TSC0006017
aaaataccgccaa

SEQ ID NO: 252083 - DNA, 13 bp, Artificial Sequence
  Oligonucleotide for detection of SNP TSC0006017
aaggtagtgttaa

SEQ ID NO: 252084 - DNA, 13 bp, Artificial Sequence
  Oligonucleotide for detection of SNP TSC0006017
ttaacactacctt

SEQ ID NO: 252085 - DNA, 13 bp, Artificial Sequence
  Oligonucleotide for detection of SNP TSC0006017
aaggtattgttaa

SEQ ID NO: 252086 - DNA, 13 bp, Artificial Sequence
  Oligonucleotide for detection of SNP TSC0006017
ttaacaatacctt

SEQ ID NO: 252087 - DNA, 13 bp, Artificial Sequence
  Oligonucleotide for detection of SNP TSC0006017
aaggtagcgttaa

SEQ ID NO: 252088 - DNA, 13 bp, Artificial Sequence
  Oligonucleotide for detection of SNP TSC0006017
ttaacgctacctt

SEQ ID NO: 252089 - DNA, 13 bp, Artificial Sequence
  Oligonucleotide for detection of SNP TSC0006017
aaggtatcgttaa

SEQ ID NO: 252090 - DNA, 13 bp, Artificial Sequence
  Oligonucleotide for detection of SNP TSC0006017
ttaacgatacctt

SEQ ID NO: 252091 - DNA, 13 bp, Artificial Sequence
  Oligonucleotide for detection of SNP TSC0061517
ataagtaagaagt

SEQ ID NO: 252092 - DNA, 13 bp, Artificial Sequence
  Oligonucleotide for detection of SNP TSC0061517
acttcttacttat

SEQ ID NO: 252093 - DNA, 13 bp, Artificial Sequence
  Oligonucleotide for detection of SNP TSC0061517
ataagttagaagt

SEQ ID NO: 252094 - DNA, 13 bp, Artificial Sequence
  Oligonucleotide for detection of SNP TSC0061517
acttctaacttat

SEQ ID NO: 252095 - DNA, 13 bp, Artificial Sequence
  Oligonucleotide for detection of SNP TSC0061517
attttttatttgt

SEQ ID NO: 252096 - DNA, 13 bp, Artificial Sequence
  Oligonucleotide for detection of SNP TSC0061517
acaaataaaaaat

SEQ ID NO: 252097 - DNA, 13 bp, Artificial Sequence
  Oligonucleotide for detection of SNP TSC0061517
atttttgatttgt

SEQ ID NO: 252098 - DNA, 13 bp, Artificial Sequence
  Oligonucleotide for detection of SNP TSC0061517
acaaatcaaaaat

SEQ ID NO: 252099 - DNA, 13 bp, Artificial Sequence
  Oligonucleotide for detection of SNP TSC0061518
ttaaagatgtagt

SEQ ID NO: 252100 - DNA, 13 bp, Artificial Sequence
  Oligonucleotide for detection of SNP TSC0061518
actacatctttaa

SEQ ID NO: 252101 - DNA, 13 bp, Artificial Sequence
  Oligonucleotide for detection of SNP TSC0061518
ttaaagttgtagt

SEQ ID NO: 252102 - DNA, 13 bp, Artificial Sequence
  Oligonucleotide for detection of SNP TSC0061518
actacaactttaa

SEQ ID NO: 252103 - DNA, 13 bp, Artificial Sequence
  Oligonucleotide for detection of SNP TSC0061518
attatatttttga

SEQ ID NO: 252104 - DNA, 13 bp, Artificial Sequence
  Oligonucleotide for detection of SNP TSC0061518
tcaaaaatataat

SEQ ID NO: 252105 - DNA, 13 bp, Artificial Sequence
  Oligonucleotide for detection of SNP TSC0061518
attatagttttga

SEQ ID NO: 252106 - DNA, 13 bp, Artificial Sequence
  Oligonucleotide for detection of SNP TSC0061518
tcaaaactataat

SEQ ID NO: 252107 - DNA, 13 bp, Artificial Sequence
  Oligonucleotide for detection of SNP TSC0061518
attataattttga

SEQ ID NO: 252108 - DNA, 13 bp, Artificial Sequence
  Oligonucleotide for detection of SNP TSC0061518
tcaaaattataat

SEQ ID NO: 252109 - DNA, 13 bp, Artificial Sequence
  Oligonucleotide for detection of SNP TSC0061519
tatagaagaagaa

SEQ ID NO: 252110 - DNA, 13 bp, Artificial Sequence
  Oligonucleotide for detection of SNP TSC0061519
ttcttcttctata

SEQ ID NO: 252111 - DNA, 13 bp, Artificial Sequence
  Oligonucleotide for detection of SNP TSC0061519
tatagaggaagaa

SEQ ID NO: 252112 - DNA, 13 bp, Artificial Sequence
  Oligonucleotide for detection of SNP TSC0061519
ttcttcctctata

SEQ ID NO: 252113 - DNA, 13 bp, Artificial Sequence
  Oligonucleotide for detection of SNP TSC0061520
tttaattggtatt

SEQ ID NO: 252114 - DNA, 13 bp, Artificial Sequence
  Oligonucleotide for detection of SNP TSC0061520
aataccaattaaa

SEQ ID NO: 252115 - DNA, 13 bp, Artificial Sequence
  Oligonucleotide for detection of SNP TSC0061520
tttaatcggtatt

SEQ ID NO: 252116 - DNA, 13 bp, Artificial Sequence
  Oligonucleotide for detection of SNP TSC0061520
aataccgattaaa

SEQ ID NO: 252117 - DNA, 13 bp, Artificial Sequence
  Oligonucleotide for detection of SNP TSC0061520
aatgttgattaaa

SEQ ID NO: 252118 - DNA, 13 bp, Artificial Sequence
  Oligonucleotide for detection of SNP TSC0061520
tttaatcaacatt

SEQ ID NO: 252119 - DNA, 13 bp, Artificial Sequence
  Oligonucleotide for detection of SNP TSC0061520
aatgttaattaaa

SEQ ID NO: 252120 - DNA, 13 bp, Artificial Sequence
  Oligonucleotide for detection of SNP TSC0061520
tttaattaacatt

SEQ ID NO: 252121 - DNA, 13 bp, Artificial Sequence
  Oligonucleotide for detection of SNP TSC0061520
aatgtcgattaaa

SEQ ID NO: 252122 - DNA, 13 bp, Artificial Sequence
  Oligonucleotide for detection of SNP TSC0061520
tttaatcgacatt

SEQ ID NO: 252123 - DNA, 13 bp, Artificial Sequence
  Oligonucleotide for detection of SNP TSC0061521
atgatatttatga

SEQ ID NO: 252124 - DNA, 13 bp, Artificial Sequence
  Oligonucleotide for detection of SNP TSC0061521
tcataaatatcat

SEQ ID NO: 252125 - DNA, 13 bp, Artificial Sequence
  Oligonucleotide for detection of SNP TSC0061521
atgatagttatga

SEQ ID NO: 252126 - DNA, 13 bp, Artificial Sequence
  Oligonucleotide for detection of SNP TSC0061521
tcataactatcat

SEQ ID NO: 252127 - DNA, 13 bp, Artificial Sequence
  Oligonucleotide for detection of SNP TSC0061522
gatttaatgaaaa

SEQ ID NO: 252128 - DNA, 13 bp, Artificial Sequence
  Oligonucleotide for detection of SNP TSC0061522
ttttcattaaatc

SEQ ID NO: 252129 - DNA, 13 bp, Artificial Sequence
  Oligonucleotide for detection of SNP TSC0061522
gatttagtgaaaa

SEQ ID NO: 252130 - DNA, 13 bp, Artificial Sequence
  Oligonucleotide for detection of SNP TSC0061522
ttttcactaaatc

SEQ ID NO: 252131 - DNA, 13 bp, Artificial Sequence
  Oligonucleotide for detection of SNP TSC0061525
tgtaaagataaaa

SEQ ID NO: 252132 - DNA, 13 bp, Artificial Sequence
  Oligonucleotide for detection of SNP TSC0061525
ttttatctttaca

SEQ ID NO: 252133 - DNA, 13 bp, Artificial Sequence
  Oligonucleotide for detection of SNP TSC0061525
tgtaaaaataaaa

SEQ ID NO: 252134 - DNA, 13 bp, Artificial Sequence
  Oligonucleotide for detection of SNP TSC0061525
ttttatttttaca

SEQ ID NO: 252135 - DNA, 13 bp, Artificial Sequence
  Oligonucleotide for detection of SNP TSC0061526
taatttattgaga

SEQ ID NO: 252136 - DNA, 13 bp, Artificial Sequence
  Oligonucleotide for detection of SNP TSC0061526
tctcaataaatta

SEQ ID NO: 252137 - DNA, 13 bp, Artificial Sequence
  Oligonucleotide for detection of SNP TSC0061526
taatttgttgaga

SEQ ID NO: 252138 - DNA, 13 bp, Artificial Sequence
  Oligonucleotide for detection of SNP TSC0061526
tctcaacaaatta

SEQ ID NO: 252139 - DNA, 13 bp, Artificial Sequence
  Oligonucleotide for detection of SNP TSC0061526
taattcgttgaga

SEQ ID NO: 252140 - DNA, 13 bp, Artificial Sequence
  Oligonucleotide for detection of SNP TSC0061526
tctcaacgaatta

SEQ ID NO: 252141 - DNA, 13 bp, Artificial Sequence
  Oligonucleotide for detection of SNP TSC0061526
ttttagtgaatta

SEQ ID NO: 252142 - DNA, 13 bp, Artificial Sequence
  Oligonucleotide for detection of SNP TSC0061526
taattcactaaaa

SEQ ID NO: 252143 - DNA, 13 bp, Artificial Sequence
  Oligonucleotide for detection of SNP TSC0061526
ttttagcgaatta

SEQ ID NO: 252144 - DNA, 13 bp, Artificial Sequence
  Oligonucleotide for detection of SNP TSC0061526
taattcgctaaaa

SEQ ID NO: 252145 - DNA, 13 bp, Artificial Sequence
  Oligonucleotide for detection of SNP TSC0061528
aatttaggagtaa

SEQ ID NO: 252146 - DNA, 13 bp, Artificial Sequence
  Oligonucleotide for detection of SNP TSC0061528
ttactcctaaatt

SEQ ID NO: 252147 - DNA, 13 bp, Artificial Sequence
  Oligonucleotide for detection of SNP TSC0061528
aatttaagagtaa

SEQ ID NO: 252148 - DNA, 13 bp, Artificial Sequence
  Oligonucleotide for detection of SNP TSC0061528
ttactcttaaatt

SEQ ID NO: 252149 - DNA, 13 bp, Artificial Sequence
  Oligonucleotide for detection of SNP TSC0061529
gttggagaaatgg

SEQ ID NO: 252150 - DNA, 13 bp, Artificial Sequence
  Oligonucleotide for detection of SNP TSC0061529
ccatttctccaac

SEQ ID NO: 252151 - DNA, 13 bp, Artificial Sequence
  Oligonucleotide for detection of SNP TSC0061529
gttggaaaaatgg

SEQ ID NO: 252152 - DNA, 13 bp, Artificial Sequence
  Oligonucleotide for detection of SNP TSC0061529
ccatttttccaac

SEQ ID NO: 252153 - DNA, 13 bp, Artificial Sequence
  Oligonucleotide for detection of SNP TSC0061530
tttataaagtgaa

SEQ ID NO: 252154 - DNA, 13 bp, Artificial Sequence
  Oligonucleotide for detection of SNP TSC0061530
ttcactttataaa

SEQ ID NO: 252155 - DNA, 13 bp, Artificial Sequence
  Oligonucleotide for detection of SNP TSC0061530
tttatatagtgaa

SEQ ID NO: 252156 - DNA, 13 bp, Artificial Sequence
  Oligonucleotide for detection of SNP TSC0061530
ttcactatataaa

SEQ ID NO: 252157 - DNA, 13 bp, Artificial Sequence
  Oligonucleotide for detection of SNP TSC0061530
tttattttatgaa

SEQ ID NO: 252158 - DNA, 13 bp, Artificial Sequence
  Oligonucleotide for detection of SNP TSC0061530
ttcataaaataaa

SEQ ID NO: 252159 - DNA, 13 bp, Artificial Sequence
  Oligonucleotide for detection of SNP TSC0061531
tggtttatttgtt

SEQ ID NO: 252160 - DNA, 13 bp, Artificial Sequence
  Oligonucleotide for detection of SNP TSC0061531
aacaaataaacca

SEQ ID NO: 252161 - DNA, 13 bp, Artificial Sequence
  Oligonucleotide for detection of SNP TSC0061531
tggtttgtttgtt

SEQ ID NO: 252162 - DNA, 13 bp, Artificial Sequence
  Oligonucleotide for detection of SNP TSC0061531
aacaaacaaacca

SEQ ID NO: 252163 - DNA, 13 bp, Artificial Sequence
  Oligonucleotide for detection of SNP TSC0061531
tggttcgtttgtt

SEQ ID NO: 252164 - DNA, 13 bp, Artificial Sequence
  Oligonucleotide for detection of SNP TSC0061531
aacaaacgaacca

SEQ ID NO: 252165 - DNA, 13 bp, Artificial Sequence
  Oligonucleotide for detection of SNP TSC0061531
agtaagtgagtta

SEQ ID NO: 252166 - DNA, 13 bp, Artificial Sequence
  Oligonucleotide for detection of SNP TSC0061531
taactcacttact

SEQ ID NO: 252167 - DNA, 13 bp, Artificial Sequence
  Oligonucleotide for detection of SNP TSC0061531
agtaagcgagtta

SEQ ID NO: 252168 - DNA, 13 bp, Artificial Sequence
  Oligonucleotide for detection of SNP TSC0061531
taactcgcttact

SEQ ID NO: 252169 - DNA, 13 bp, Artificial Sequence
  Oligonucleotide for detection of SNP TSC0061532
agattttatttta

SEQ ID NO: 252170 - DNA, 13 bp, Artificial Sequence
  Oligonucleotide for detection of SNP TSC0061532
taaaataaaatct

SEQ ID NO: 252171 - DNA, 13 bp, Artificial Sequence
  Oligonucleotide for detection of SNP TSC0061532
tgagatcgagttt

SEQ ID NO: 252172 - DNA, 13 bp, Artificial Sequence
  Oligonucleotide for detection of SNP TSC0061532
aaactcgatctca

SEQ ID NO: 252173 - DNA, 13 bp, Artificial Sequence
  Oligonucleotide for detection of SNP TSC0005532
atgtggtggggta

SEQ ID NO: 252174 - DNA, 13 bp, Artificial Sequence
  Oligonucleotide for detection of SNP TSC0005532
taccccaccacat

SEQ ID NO: 252175 - DNA, 13 bp, Artificial Sequence
  Oligonucleotide for detection of SNP TSC0005532
atgtggcggggta

SEQ ID NO: 252176 - DNA, 13 bp, Artificial Sequence
  Oligonucleotide for detection of SNP TSC0005532
taccccgccacat

SEQ ID NO: 252177 - DNA, 13 bp, Artificial Sequence
  Oligonucleotide for detection of SNP TSC0005532
tgttttgttatat

SEQ ID NO: 252178 - DNA, 13 bp, Artificial Sequence
  Oligonucleotide for detection of SNP TSC0005532
atataacaaaaca

SEQ ID NO: 252179 - DNA, 13 bp, Artificial Sequence
  Oligonucleotide for detection of SNP TSC0005532
tgttttattatat

SEQ ID NO: 252180 - DNA, 13 bp, Artificial Sequence
  Oligonucleotide for detection of SNP TSC0005532
atataataaaaca

SEQ ID NO: 252181 - DNA, 13 bp, Artificial Sequence
  Oligonucleotide for detection of SNP TSC0005532
tgtttcgttatat

SEQ ID NO: 252182 - DNA, 13 bp, Artificial Sequence
  Oligonucleotide for detection of SNP TSC0005532
atataacgaaaca

SEQ ID NO: 252183 - DNA, 13 bp, Artificial Sequence
  Oligonucleotide for detection of SNP TSC0005533
aaatagatgttaa

SEQ ID NO: 252184 - DNA, 13 bp, Artificial Sequence
  Oligonucleotide for detection of SNP TSC0005533
ttaacatctattt

SEQ ID NO: 252185 - DNA, 13 bp, Artificial Sequence
  Oligonucleotide for detection of SNP TSC0005533
aaataggtgttaa

SEQ ID NO: 252186 - DNA, 13 bp, Artificial Sequence
  Oligonucleotide for detection of SNP TSC0005533
ttaacacctattt

SEQ ID NO: 252187 - DNA, 13 bp, Artificial Sequence
  Oligonucleotide for detection of SNP TSC0061533
ttaggtgaataaa

SEQ ID NO: 252188 - DNA, 13 bp, Artificial Sequence
  Oligonucleotide for detection of SNP TSC0061533
tttattcacctaa

SEQ ID NO: 252189 - DNA, 13 bp, Artificial Sequence
  Oligonucleotide for detection of SNP TSC0061533
ttaggtaaataaa

SEQ ID NO: 252190 - DNA, 13 bp, Artificial Sequence
  Oligonucleotide for detection of SNP TSC0061533
tttatttacctaa

SEQ ID NO: 252191 - DNA, 13 bp, Artificial Sequence
  Oligonucleotide for detection of SNP TSC0061534
gttagaaataatt

SEQ ID NO: 252192 - DNA, 13 bp, Artificial Sequence
  Oligonucleotide for detection of SNP TSC0061534
aattatttctaac

SEQ ID NO: 252193 - DNA, 13 bp, Artificial Sequence
  Oligonucleotide for detection of SNP TSC0061534
gttagatataatt

SEQ ID NO: 252194 - DNA, 13 bp, Artificial Sequence
  Oligonucleotide for detection of SNP TSC0061534
aattatatctaac

SEQ ID NO: 252195 - DNA, 13 bp, Artificial Sequence
  Oligonucleotide for detection of SNP TSC0061534
agttgtttttgay

SEQ ID NO: 252196 - DNA, 13 bp, Artificial Sequence
  Oligonucleotide for detection of SNP TSC0061534
rtcaaaaacaact

SEQ ID NO: 252197 - DNA, 13 bp, Artificial Sequence
  Oligonucleotide for detection of SNP TSC0061534
agttgtgtttgay

SEQ ID NO: 252198 - DNA, 13 bp, Artificial Sequence
  Oligonucleotide for detection of SNP TSC0061534
rtcaaacacaact

SEQ ID NO: 252199 - DNA, 13 bp, Artificial Sequence
  Oligonucleotide for detection of SNP TSC0061535
aatttttaagggy

SEQ ID NO: 252200 - DNA, 13 bp, Artificial Sequence
  Oligonucleotide for detection of SNP TSC0061535
rcccttaaaaatt

SEQ ID NO: 252201 - DNA, 13 bp, Artificial Sequence
  Oligonucleotide for detection of SNP TSC0061535
aattttaaagggy

SEQ ID NO: 252202 - DNA, 13 bp, Artificial Sequence
  Oligonucleotide for detection of SNP TSC0061535
rccctttaaaatt

SEQ ID NO: 252203 - DNA, 13 bp, Artificial Sequence
  Oligonucleotide for detection of SNP TSC0061536
atgaattgttgtg

SEQ ID NO: 252204 - DNA, 13 bp, Artificial Sequence
  Oligonucleotide for detection of SNP TSC0061536
cacaacaattcat

SEQ ID NO: 252205 - DNA, 13 bp, Artificial Sequence
  Oligonucleotide for detection of SNP TSC0061536
atgaatcgttgtg

SEQ ID NO: 252206 - DNA, 13 bp, Artificial Sequence
  Oligonucleotide for detection of SNP TSC0061536
cacaacgattcat

SEQ ID NO: 252207 - DNA, 13 bp, Artificial Sequence
  Oligonucleotide for detection of SNP TSC0061536
tatagtggtttat

SEQ ID NO: 252208 - DNA, 13 bp, Artificial Sequence
  Oligonucleotide for detection of SNP TSC0061536
ataaaccactata

SEQ ID NO: 252209 - DNA, 13 bp, Artificial Sequence
  Oligonucleotide for detection of SNP TSC0061536
tatagtagtttat

SEQ ID NO: 252210 - DNA, 13 bp, Artificial Sequence
  Oligonucleotide for detection of SNP TSC0061536
ataaactactata

SEQ ID NO: 252211 - DNA, 13 bp, Artificial Sequence
  Oligonucleotide for detection of SNP TSC0061536
tatagcggtttat

SEQ ID NO: 252212 - DNA, 13 bp, Artificial Sequence
  Oligonucleotide for detection of SNP TSC0061536
ataaaccgctata

SEQ ID NO: 252213 - DNA, 13 bp, Artificial Sequence
  Oligonucleotide for detection of SNP TSC0010427
aaaggaggaaatg

SEQ ID NO: 252214 - DNA, 13 bp, Artificial Sequence
  Oligonucleotide for detection of SNP TSC0010427
catttcctccttt

SEQ ID NO: 252215 - DNA, 13 bp, Artificial Sequence
  Oligonucleotide for detection of SNP TSC0010427
aaaggaagaaatg

SEQ ID NO: 252216 - DNA, 13 bp, Artificial Sequence
  Oligonucleotide for detection of SNP TSC0010427
catttcttccttt

SEQ ID NO: 252217 - DNA, 13 bp, Artificial Sequence
  Oligonucleotide for detection of SNP TSC0010427
aaaggaggaaacg

SEQ ID NO: 252218 - DNA, 13 bp, Artificial Sequence
  Oligonucleotide for detection of SNP TSC0010427
cgtttcctccttt

SEQ ID NO: 252219 - DNA, 13 bp, Artificial Sequence
  Oligonucleotide for detection of SNP TSC0010427
aaaggaagaaacg

SEQ ID NO: 252220 - DNA, 13 bp, Artificial Sequence
  Oligonucleotide for detection of SNP TSC0010427
cgtttcttccttt

SEQ ID NO: 252221 - DNA, 13 bp, Artificial Sequence
  Oligonucleotide for detection of SNP TSC0061538
gatgtatttgaat

SEQ ID NO: 252222 - DNA, 13 bp, Artificial Sequence
  Oligonucleotide for detection of SNP TSC0061538
attcaaatacatc

SEQ ID NO: 252223 - DNA, 13 bp, Artificial Sequence
  Oligonucleotide for detection of SNP TSC0061538
gatgtagttgaat

SEQ ID NO: 252224 - DNA, 13 bp, Artificial Sequence
  Oligonucleotide for detection of SNP TSC0061538
attcaactacatc

SEQ ID NO: 252225 - DNA, 13 bp, Artificial Sequence
  Oligonucleotide for detection of SNP TSC0061538
atttagatgtaty

SEQ ID NO: 252226 - DNA, 13 bp, Artificial Sequence
  Oligonucleotide for detection of SNP TSC0061538
ratacatctaaat

SEQ ID NO: 252227 - DNA, 13 bp, Artificial Sequence
  Oligonucleotide for detection of SNP TSC0061538
atttagttgtaty

SEQ ID NO: 252228 - DNA, 13 bp, Artificial Sequence
  Oligonucleotide for detection of SNP TSC0061538
ratacaactaaat

SEQ ID NO: 252229 - DNA, 13 bp, Artificial Sequence
  Oligonucleotide for detection of SNP TSC0061539
ttgttaattttag

SEQ ID NO: 252230 - DNA, 13 bp, Artificial Sequence
  Oligonucleotide for detection of SNP TSC0061539
ctaaaattaacaa

SEQ ID NO: 252231 - DNA, 13 bp, Artificial Sequence
  Oligonucleotide for detection of SNP TSC0061539
ttgttatttttag

SEQ ID NO: 252232 - DNA, 13 bp, Artificial Sequence
  Oligonucleotide for detection of SNP TSC0061539
ctaaaaataacaa

SEQ ID NO: 252233 - DNA, 13 bp, Artificial Sequence
  Oligonucleotide for detection of SNP TSC0061539
ttggagttagtag

SEQ ID NO: 252234 - DNA, 13 bp, Artificial Sequence
  Oligonucleotide for detection of SNP TSC0061539
ctactaactccaa

SEQ ID NO: 252235 - DNA, 13 bp, Artificial Sequence
  Oligonucleotide for detection of SNP TSC0061539
ttggaggtagtag

SEQ ID NO: 252236 - DNA, 13 bp, Artificial Sequence
  Oligonucleotide for detection of SNP TSC0061539
ctactacctccaa

SEQ ID NO: 252237 - DNA, 13 bp, Artificial Sequence
  Oligonucleotide for detection of SNP TSC0061540
ggtttaattttta

SEQ ID NO: 252238 - DNA, 13 bp, Artificial Sequence
  Oligonucleotide for detection of SNP TSC0061540
taaaaattaaacc

SEQ ID NO: 252239 - DNA, 13 bp, Artificial Sequence
  Oligonucleotide for detection of SNP TSC0009258
gttgttagggggy

SEQ ID NO: 252240 - DNA, 13 bp, Artificial Sequence
  Oligonucleotide for detection of SNP TSC0009258
rccccctaacaac

SEQ ID NO: 252241 - DNA, 13 bp, Artificial Sequence
  Oligonucleotide for detection of SNP TSC0009258
gttgtttgggggy

SEQ ID NO: 252242 - DNA, 13 bp, Artificial Sequence
  Oligonucleotide for detection of SNP TSC0009258
rcccccaaacaac

SEQ ID NO: 252243 - DNA, 13 bp, Artificial Sequence
  Oligonucleotide for detection of SNP TSC0009258
gttgttcgggggy

SEQ ID NO: 252244 - DNA, 13 bp, Artificial Sequence
  Oligonucleotide for detection of SNP TSC0009258
rcccccgaacaac

SEQ ID NO: 252245 - DNA, 13 bp, Artificial Sequence
  Oligonucleotide for detection of SNP TSC0009258
gttttttggtaay

SEQ ID NO: 252246 - DNA, 13 bp, Artificial Sequence
  Oligonucleotide for detection of SNP TSC0009258
rttaccaaaaaac

SEQ ID NO: 252247 - DNA, 13 bp, Artificial Sequence
  Oligonucleotide for detection of SNP TSC0009258
gtttttgggtaay

SEQ ID NO: 252248 - DNA, 13 bp, Artificial Sequence
  Oligonucleotide for detection of SNP TSC0009258
rttacccaaaaac

SEQ ID NO: 252249 - DNA, 13 bp, Artificial Sequence
  Oligonucleotide for detection of SNP TSC0009258
gttttcgggtaay

SEQ ID NO: 252250 - DNA, 13 bp, Artificial Sequence
  Oligonucleotide for detection of SNP TSC0009258
rttacccgaaaac

SEQ ID NO: 252251 - DNA, 13 bp, Artificial Sequence
  Oligonucleotide for detection of SNP TSC0010299
atgataatgtggt

SEQ ID NO: 252252 - DNA, 13 bp, Artificial Sequence
  Oligonucleotide for detection of SNP TSC0010299
accacattatcat

SEQ ID NO: 252253 - DNA, 13 bp, Artificial Sequence
  Oligonucleotide for detection of SNP TSC0010299
atgatagtgtggt

SEQ ID NO: 252254 - DNA, 13 bp, Artificial Sequence
  Oligonucleotide for detection of SNP TSC0010299
accacactatcat

SEQ ID NO: 252255 - DNA, 13 bp, Artificial Sequence
  Oligonucleotide for detection of SNP TSC0061543
ggagtttggaggg

SEQ ID NO: 252256 - DNA, 13 bp, Artificial Sequence
  Oligonucleotide for detection of SNP TSC0061543
ccctccaaactcc

SEQ ID NO: 252257 - DNA, 13 bp, Artificial Sequence
  Oligonucleotide for detection of SNP TSC0061543
ggagttcggaggg

SEQ ID NO: 252258 - DNA, 13 bp, Artificial Sequence
  Oligonucleotide for detection of SNP TSC0061543
ccctccgaactcc

SEQ ID NO: 252259 - DNA, 13 bp, Artificial Sequence
  Oligonucleotide for detection of SNP TSC0061544
atagttataatag

SEQ ID NO: 252260 - DNA, 13 bp, Artificial Sequence
  Oligonucleotide for detection of SNP TSC0061544
ctattataactat

SEQ ID NO: 252261 - DNA, 13 bp, Artificial Sequence
  Oligonucleotide for detection of SNP TSC0061544
atagttgtaatag

SEQ ID NO: 252262 - DNA, 13 bp, Artificial Sequence
  Oligonucleotide for detection of SNP TSC0061544
ctattacaactat

SEQ ID NO: 252263 - DNA, 13 bp, Artificial Sequence
  Oligonucleotide for detection of SNP TSC0061544
atagtcgtaatag

SEQ ID NO: 252264 - DNA, 13 bp, Artificial Sequence
  Oligonucleotide for detection of SNP TSC0061544
ctattacgactat

SEQ ID NO: 252265 - DNA, 13 bp, Artificial Sequence
  Oligonucleotide for detection of SNP TSC0061544
ttgttatgattgt

SEQ ID NO: 252266 - DNA, 13 bp, Artificial Sequence
  Oligonucleotide for detection of SNP TSC0061544
acaatcataacaa

SEQ ID NO: 252267 - DNA, 13 bp, Artificial Sequence
  Oligonucleotide for detection of SNP TSC0061544
ttgttacgattgt

SEQ ID NO: 252268 - DNA, 13 bp, Artificial Sequence
  Oligonucleotide for detection of SNP TSC0061544
acaatcgtaacaa

SEQ ID NO: 252269 - DNA, 13 bp, Artificial Sequence
  Oligonucleotide for detection of SNP TSC0061546
ttataaatttagt

SEQ ID NO: 252270 - DNA, 13 bp, Artificial Sequence
  Oligonucleotide for detection of SNP TSC0061546
actaaatttataa

SEQ ID NO: 252271 - DNA, 13 bp, Artificial Sequence
  Oligonucleotide for detection of SNP TSC0061546
ttataagtttagt

SEQ ID NO: 252272 - DNA, 13 bp, Artificial Sequence
  Oligonucleotide for detection of SNP TSC0061546
actaaacttataa

SEQ ID NO: 252273 - DNA, 13 bp, Artificial Sequence
  Oligonucleotide for detection of SNP TSC0061547
ttatgagtgatgg

SEQ ID NO: 252274 - DNA, 13 bp, Artificial Sequence
  Oligonucleotide for detection of SNP TSC0061547
ccatcactcataa

SEQ ID NO: 252275 - DNA, 13 bp, Artificial Sequence
  Oligonucleotide for detection of SNP TSC0061547
ttatgaatgatgg

SEQ ID NO: 252276 - DNA, 13 bp, Artificial Sequence
  Oligonucleotide for detection of SNP TSC0061547
ccatcattcataa

SEQ ID NO: 252277 - DNA, 13 bp, Artificial Sequence
  Oligonucleotide for detection of SNP TSC0061547
ttacgagtgatgg

SEQ ID NO: 252278 - DNA, 13 bp, Artificial Sequence
  Oligonucleotide for detection of SNP TSC0061547
ccatcactcgtaa

SEQ ID NO: 252279 - DNA, 13 bp, Artificial Sequence
  Oligonucleotide for detection of SNP TSC0061547
ttacgaatgatgg

SEQ ID NO: 252280 - DNA, 13 bp, Artificial Sequence
  Oligonucleotide for detection of SNP TSC0061547
ccatcattcgtaa

SEQ ID NO: 252281 - DNA, 13 bp, Artificial Sequence
  Oligonucleotide for detection of SNP TSC0061547
ttatgagcgatgg

SEQ ID NO: 252282 - DNA, 13 bp, Artificial Sequence
  Oligonucleotide for detection of SNP TSC0061547
ccatcgctcataa

SEQ ID NO: 252283 - DNA, 13 bp, Artificial Sequence
  Oligonucleotide for detection of SNP TSC0061547
ttatgaacgatgg

SEQ ID NO: 252284 - DNA, 13 bp, Artificial Sequence
  Oligonucleotide for detection of SNP TSC0061547
ccatcgttcataa

SEQ ID NO: 252285 - DNA, 13 bp, Artificial Sequence
  Oligonucleotide for detection of SNP TSC0061547
ttatgagtgacgg

SEQ ID NO: 252286 - DNA, 13 bp, Artificial Sequence
  Oligonucleotide for detection of SNP TSC0061547
ccgtcactcataa

SEQ ID NO: 252287 - DNA, 13 bp, Artificial Sequence
  Oligonucleotide for detection of SNP TSC0061547
ttatgaatgacgg

SEQ ID NO: 252288 - DNA, 13 bp, Artificial Sequence
  Oligonucleotide for detection of SNP TSC0061547
ccgtcattcataa

SEQ ID NO: 252289 - DNA, 13 bp, Artificial Sequence
  Oligonucleotide for detection of SNP TSC0061547
ttacgagcgatgg

SEQ ID NO: 252290 - DNA, 13 bp, Artificial Sequence
  Oligonucleotide for detection of SNP TSC0061547
ccatcgctcgtaa

SEQ ID NO: 252291 - DNA, 13 bp, Artificial Sequence
  Oligonucleotide for detection of SNP TSC0061547
ttacgaacgatgg

SEQ ID NO: 252292 - DNA, 13 bp, Artificial Sequence
  Oligonucleotide for detection of SNP TSC0061547
ccatcgttcgtaa

SEQ ID NO: 252293 - DNA, 13 bp, Artificial Sequence
  Oligonucleotide for detection of SNP TSC0061547
ttacgagtgacgg

SEQ ID NO: 252294 - DNA, 13 bp, Artificial Sequence
  Oligonucleotide for detection of SNP TSC0061547
ccgtcactcgtaa

SEQ ID NO: 252295 - DNA, 13 bp, Artificial Sequence
  Oligonucleotide for detection of SNP TSC0061547
ttacgaatgacgg

SEQ ID NO: 252296 - DNA, 13 bp, Artificial Sequence
  Oligonucleotide for detection of SNP TSC0061547
ccgtcattcgtaa

SEQ ID NO: 252297 - DNA, 13 bp, Artificial Sequence
  Oligonucleotide for detection of SNP TSC0061547
ttatgagcgacgg

SEQ ID NO: 252298 - DNA, 13 bp, Artificial Sequence
  Oligonucleotide for detection of SNP TSC0061547
ccgtcgctcataa

SEQ ID NO: 252299 - DNA, 13 bp, Artificial Sequence
  Oligonucleotide for detection of SNP TSC0061547
ttatgaacgacgg

SEQ ID NO: 252300 - DNA, 13 bp, Artificial Sequence
  Oligonucleotide for detection of SNP TSC0061547
ccgtcgttcataa

SEQ ID NO: 252301 - DNA, 13 bp, Artificial Sequence
  Oligonucleotide for detection of SNP TSC0061547
ttacgagcgacgg

SEQ ID NO: 252302 - DNA, 13 bp, Artificial Sequence
  Oligonucleotide for detection of SNP TSC0061547
ccgtcgctcgtaa

SEQ ID NO: 252303 - DNA, 13 bp, Artificial Sequence
  Oligonucleotide for detection of SNP TSC0061547
ttacgaacgacgg

SEQ ID NO: 252304 - DNA, 13 bp, Artificial Sequence
  Oligonucleotide for detection of SNP TSC0061547
ccgtcgttcgtaa

SEQ ID NO: 252305 - DNA, 13 bp, Artificial Sequence
  Oligonucleotide for detection of SNP TSC0061548
tgatttatatagt

SEQ ID NO: 252306 - DNA, 13 bp, Artificial Sequence
  Oligonucleotide for detection of SNP TSC0061548
actatataaatca

SEQ ID NO: 252307 - DNA, 13 bp, Artificial Sequence
  Oligonucleotide for detection of SNP TSC0061548
tgatttgtatagt

SEQ ID NO: 252308 - DNA, 13 bp, Artificial Sequence
  Oligonucleotide for detection of SNP TSC0061548
actatacaaatca

SEQ ID NO: 252309 - DNA, 13 bp, Artificial Sequence
  Oligonucleotide for detection of SNP TSC0061548
tgattcgtatagt

SEQ ID NO: 252310 - DNA, 13 bp, Artificial Sequence
  Oligonucleotide for detection of SNP TSC0061548
actatacgaatca

SEQ ID NO: 252311 - DNA, 13 bp, Artificial Sequence
  Oligonucleotide for detection of SNP TSC0061548
attgtgtgaatta

SEQ ID NO: 252312 - DNA, 13 bp, Artificial Sequence
  Oligonucleotide for detection of SNP TSC0061548
taattcacacaat

SEQ ID NO: 252313 - DNA, 13 bp, Artificial Sequence
  Oligonucleotide for detection of SNP TSC0061548
attgtgcgaatta

SEQ ID NO: 252314 - DNA, 13 bp, Artificial Sequence
  Oligonucleotide for detection of SNP TSC0061548
taattcgcacaat

SEQ ID NO: 252315 - DNA, 13 bp, Artificial Sequence
  Oligonucleotide for detection of SNP TSC0061549
attgagtgtggta

SEQ ID NO: 252316 - DNA, 13 bp, Artificial Sequence
  Oligonucleotide for detection of SNP TSC0061549
taccacactcaat

SEQ ID NO: 252317 - DNA, 13 bp, Artificial Sequence
  Oligonucleotide for detection of SNP TSC0061549
attgagcgtggta

SEQ ID NO: 252318 - DNA, 13 bp, Artificial Sequence
  Oligonucleotide for detection of SNP TSC0061549
taccacgctcaat

SEQ ID NO: 252319 - DNA, 13 bp, Artificial Sequence
  Oligonucleotide for detection of SNP TSC0061550
agtaggatgaatg

SEQ ID NO: 252320 - DNA, 13 bp, Artificial Sequence
  Oligonucleotide for detection of SNP TSC0061550
cattcatcctact

SEQ ID NO: 252321 - DNA, 13 bp, Artificial Sequence
  Oligonucleotide for detection of SNP TSC0061550
agtaggttgaatg

SEQ ID NO: 252322 - DNA, 13 bp, Artificial Sequence
  Oligonucleotide for detection of SNP TSC0061550
cattcaacctact

SEQ ID NO: 252323 - DNA, 13 bp, Artificial Sequence
  Oligonucleotide for detection of SNP TSC0061551
atttatttaaaga

SEQ ID NO: 252324 - DNA, 13 bp, Artificial Sequence
  Oligonucleotide for detection of SNP TSC0061551
tctttaaataaat

SEQ ID NO: 252325 - DNA, 13 bp, Artificial Sequence
  Oligonucleotide for detection of SNP TSC0061551
tttttatatgggt

SEQ ID NO: 252326 - DNA, 13 bp, Artificial Sequence
  Oligonucleotide for detection of SNP TSC0061551
acccatataaaaa

SEQ ID NO: 252327 - DNA, 13 bp, Artificial Sequence
  Oligonucleotide for detection of SNP TSC0061551
tttttaaatgggt

SEQ ID NO: 252328 - DNA, 13 bp, Artificial Sequence
  Oligonucleotide for detection of SNP TSC0061551
acccatttaaaaa

SEQ ID NO: 252329 - DNA, 13 bp, Artificial Sequence
  Oligonucleotide for detection of SNP TSC0061552
ataaattgtttga

SEQ ID NO: 252330 - DNA, 13 bp, Artificial Sequence
  Oligonucleotide for detection of SNP TSC0061552
tcaaacaatttat

SEQ ID NO: 252331 - DNA, 13 bp, Artificial Sequence
  Oligonucleotide for detection of SNP TSC0061552
ataaatggtttga

SEQ ID NO: 252332 - DNA, 13 bp, Artificial Sequence
  Oligonucleotide for detection of SNP TSC0061552
tcaaaccatttat

SEQ ID NO: 252333 - DNA, 13 bp, Artificial Sequence
  Oligonucleotide for detection of SNP TSC0061552
ataaatcgtttga

SEQ ID NO: 252334 - DNA, 13 bp, Artificial Sequence
  Oligonucleotide for detection of SNP TSC0061552
tcaaacgatttat

SEQ ID NO: 252335 - DNA, 13 bp, Artificial Sequence
  Oligonucleotide for detection of SNP TSC0061552
ttaaatgatttgt

SEQ ID NO: 252336 - DNA, 13 bp, Artificial Sequence
  Oligonucleotide for detection of SNP TSC0061552
acaaatcatttaa

SEQ ID NO: 252337 - DNA, 13 bp, Artificial Sequence
  Oligonucleotide for detection of SNP TSC0061552
ttaaattatttgt

SEQ ID NO: 252338 - DNA, 13 bp, Artificial Sequence
  Oligonucleotide for detection of SNP TSC0061552
acaaataatttaa

SEQ ID NO: 252339 - DNA, 13 bp, Artificial Sequence
  Oligonucleotide for detection of SNP TSC0061552
ttaaacgatttgt

SEQ ID NO: 252340 - DNA, 13 bp, Artificial Sequence
  Oligonucleotide for detection of SNP TSC0061552
acaaatcgtttaa

SEQ ID NO: 252341 - DNA, 13 bp, Artificial Sequence
  Oligonucleotide for detection of SNP TSC0061553
ttattaaattaty

SEQ ID NO: 252342 - DNA, 13 bp, Artificial Sequence
  Oligonucleotide for detection of SNP TSC0061553
rataatttaataa

SEQ ID NO: 252343 - DNA, 13 bp, Artificial Sequence
  Oligonucleotide for detection of SNP TSC0061554
ttttggtgtgttg

SEQ ID NO: 252344 - DNA, 13 bp, Artificial Sequence
  Oligonucleotide for detection of SNP TSC0061554
caacacaccaaaa

SEQ ID NO: 252345 - DNA, 13 bp, Artificial Sequence
  Oligonucleotide for detection of SNP TSC0061554
ttttggggtgttg

SEQ ID NO: 252346 - DNA, 13 bp, Artificial Sequence
  Oligonucleotide for detection of SNP TSC0061554
caacaccccaaaa

SEQ ID NO: 252347 - DNA, 13 bp, Artificial Sequence
  Oligonucleotide for detection of SNP TSC0061554
ttttggcgtgttg

SEQ ID NO: 252348 - DNA, 13 bp, Artificial Sequence
  Oligonucleotide for detection of SNP TSC0061554
caacacgccaaaa

SEQ ID NO: 252349 - DNA, 13 bp, Artificial Sequence
  Oligonucleotide for detection of SNP TSC0061554
taatatgttaaga

SEQ ID NO: 252350 - DNA, 13 bp, Artificial Sequence
  Oligonucleotide for detection of SNP TSC0061554
tcttaacatatta

SEQ ID NO: 252351 - DNA, 13 bp, Artificial Sequence
  Oligonucleotide for detection of SNP TSC0061554
taatattttaaga

SEQ ID NO: 252352 - DNA, 13 bp, Artificial Sequence
  Oligonucleotide for detection of SNP TSC0061554
tcttaaaatatta

SEQ ID NO: 252353 - DNA, 13 bp, Artificial Sequence
  Oligonucleotide for detection of SNP TSC0061554
taatacgttaaga

SEQ ID NO: 252354 - DNA, 13 bp, Artificial Sequence
  Oligonucleotide for detection of SNP TSC0061554
tcttaacgtatta

SEQ ID NO: 252355 - DNA, 13 bp, Artificial Sequence
  Oligonucleotide for detection of SNP TSC0061556
ttaattagttgat

SEQ ID NO: 252356 - DNA, 13 bp, Artificial Sequence
  Oligonucleotide for detection of SNP TSC0061556
atcaactaattaa

SEQ ID NO: 252357 - DNA, 13 bp, Artificial Sequence
  Oligonucleotide for detection of SNP TSC0061556
ttaattggttgat

SEQ ID NO: 252358 - DNA, 13 bp, Artificial Sequence
  Oligonucleotide for detection of SNP TSC0061556
atcaaccaattaa

SEQ ID NO: 252359 - DNA, 13 bp, Artificial Sequence
  Oligonucleotide for detection of SNP TSC0061558
ggtgattgaggag

SEQ ID NO: 252360 - DNA, 13 bp, Artificial Sequence
  Oligonucleotide for detection of SNP TSC0061558
ctcctcaatcacc

SEQ ID NO: 252361 - DNA, 13 bp, Artificial Sequence
  Oligonucleotide for detection of SNP TSC0061558
ggtgatcgaggag

SEQ ID NO: 252362 - DNA, 13 bp, Artificial Sequence
  Oligonucleotide for detection of SNP TSC0061558
ctcctcgatcacc

SEQ ID NO: 252363 - DNA, 13 bp, Artificial Sequence
  Oligonucleotide for detection of SNP TSC0061561
ttagatgtgttag

SEQ ID NO: 252364 - DNA, 13 bp, Artificial Sequence
  Oligonucleotide for detection of SNP TSC0061561
ctaacacatctaa

SEQ ID NO: 252365 - DNA, 13 bp, Artificial Sequence
  Oligonucleotide for detection of SNP TSC0061561
ttagatatgttag

SEQ ID NO: 252366 - DNA, 13 bp, Artificial Sequence
  Oligonucleotide for detection of SNP TSC0061561
ctaacatatctaa

SEQ ID NO: 252367 - DNA, 13 bp, Artificial Sequence
  Oligonucleotide for detection of SNP TSC0061561
ttagacgtgttag

SEQ ID NO: 252368 - DNA, 13 bp, Artificial Sequence
  Oligonucleotide for detection of SNP TSC0061561
ctaacacgtctaa

SEQ ID NO: 252369 - DNA, 13 bp, Artificial Sequence
  Oligonucleotide for detection of SNP TSC0061564
tgtgtgggtatat

SEQ ID NO: 252370 - DNA, 13 bp, Artificial Sequence
  Oligonucleotide for detection of SNP TSC0061564
atatacccacaca

SEQ ID NO: 252371 - DNA, 13 bp, Artificial Sequence
  Oligonucleotide for detection of SNP TSC0061564
tgtgtgtgtatat

SEQ ID NO: 252372 - DNA, 13 bp, Artificial Sequence
  Oligonucleotide for detection of SNP TSC0061564
atatacacacaca

SEQ ID NO: 252373 - DNA, 13 bp, Artificial Sequence
  Oligonucleotide for detection of SNP TSC0061564
tgtgtgcgtatat

SEQ ID NO: 252374 - DNA, 13 bp, Artificial Sequence
  Oligonucleotide for detection of SNP TSC0061564
atatacgcacaca

SEQ ID NO: 252375 - DNA, 13 bp, Artificial Sequence
  Oligonucleotide for detection of SNP TSC0061565
ggtatagataggy

SEQ ID NO: 252376 - DNA, 13 bp, Artificial Sequence
  Oligonucleotide for detection of SNP TSC0061565
rcctatctatacc

SEQ ID NO: 252377 - DNA, 13 bp, Artificial Sequence
  Oligonucleotide for detection of SNP TSC0061565
ggtataaataggy

SEQ ID NO: 252378 - DNA, 13 bp, Artificial Sequence
  Oligonucleotide for detection of SNP TSC0061565
rcctatttatacc

SEQ ID NO: 252379 - DNA, 13 bp, Artificial Sequence
  Oligonucleotide for detection of SNP TSC0061567
gagatttgtttat

SEQ ID NO: 252380 - DNA, 13 bp, Artificial Sequence
  Oligonucleotide for detection of SNP TSC0061567
ataaacaaatctc

SEQ ID NO: 252381 - DNA, 13 bp, Artificial Sequence
  Oligonucleotide for detection of SNP TSC0061567
gagattcgtttat

SEQ ID NO: 252382 - DNA, 13 bp, Artificial Sequence
  Oligonucleotide for detection of SNP TSC0061567
ataaacgaatctc

SEQ ID NO: 252383 - DNA, 13 bp, Artificial Sequence
  Oligonucleotide for detection of SNP TSC0061567
atggatggattty

SEQ ID NO: 252384 - DNA, 13 bp, Artificial Sequence
  Oligonucleotide for detection of SNP TSC0061567
raaatccatccat

SEQ ID NO: 252385 - DNA, 13 bp, Artificial Sequence
  Oligonucleotide for detection of SNP TSC0061567
atggatagattty

SEQ ID NO: 252386 - DNA, 13 bp, Artificial Sequence
  Oligonucleotide for detection of SNP TSC0061567
raaatctatccat

SEQ ID NO: 252387 - DNA, 13 bp, Artificial Sequence
  Oligonucleotide for detection of SNP TSC0061567
atggacggattty

SEQ ID NO: 252388 - DNA, 13 bp, Artificial Sequence
  Oligonucleotide for detection of SNP TSC0061567
raaatccgtccat

SEQ ID NO: 252389 - DNA, 13 bp, Artificial Sequence
  Oligonucleotide for detection of SNP TSC0061568
ttttgtatggaaa

SEQ ID NO: 252390 - DNA, 13 bp, Artificial Sequence
  Oligonucleotide for detection of SNP TSC0061568
tttccatacaaaa

SEQ ID NO: 252391 - DNA, 13 bp, Artificial Sequence
  Oligonucleotide for detection of SNP TSC0061568
ttttgtttggaaa

SEQ ID NO: 252392 - DNA, 13 bp, Artificial Sequence
  Oligonucleotide for detection of SNP TSC0061568
tttccaaacaaaa

SEQ ID NO: 252393 - DNA, 13 bp, Artificial Sequence
  Oligonucleotide for detection of SNP TSC0061568
tttttaggtaaaa

SEQ ID NO: 252394 - DNA, 13 bp, Artificial Sequence
  Oligonucleotide for detection of SNP TSC0061568
ttttacctaaaaa

SEQ ID NO: 252395 - DNA, 13 bp, Artificial Sequence
  Oligonucleotide for detection of SNP TSC0061569
agtttgttaatgg

SEQ ID NO: 252396 - DNA, 13 bp, Artificial Sequence
  Oligonucleotide for detection of SNP TSC0061569
ccattaacaaact

SEQ ID NO: 252397 - DNA, 13 bp, Artificial Sequence
  Oligonucleotide for detection of SNP TSC0061569
agtttggtaatgg

SEQ ID NO: 252398 - DNA, 13 bp, Artificial Sequence
  Oligonucleotide for detection of SNP TSC0061569
ccattaccaaact

SEQ ID NO: 252399 - DNA, 13 bp, Artificial Sequence
  Oligonucleotide for detection of SNP TSC0061569
ttattgttaaatt

SEQ ID NO: 252400 - DNA, 13 bp, Artificial Sequence
  Oligonucleotide for detection of SNP TSC0061569
aatttaacaataa

SEQ ID NO: 252401 - DNA, 13 bp, Artificial Sequence
  Oligonucleotide for detection of SNP TSC0061571
aaaaaagttatat

SEQ ID NO: 252402 - DNA, 13 bp, Artificial Sequence
  Oligonucleotide for detection of SNP TSC0061571
atataactttttt

SEQ ID NO: 252403 - DNA, 13 bp, Artificial Sequence
  Oligonucleotide for detection of SNP TSC0061572
gagtagtggagty

SEQ ID NO: 252404 - DNA, 13 bp, Artificial Sequence
  Oligonucleotide for detection of SNP TSC0061572
ractccactactc

SEQ ID NO: 252405 - DNA, 13 bp, Artificial Sequence
  Oligonucleotide for detection of SNP TSC0061572
gagtagcggagty

SEQ ID NO: 252406 - DNA, 13 bp, Artificial Sequence
  Oligonucleotide for detection of SNP TSC0061572
ractccgctactc

SEQ ID NO: 252407 - DNA, 13 bp, Artificial Sequence
  Oligonucleotide for detection of SNP TSC0061574
ttaatagatagat

SEQ ID NO: 252408 - DNA, 13 bp, Artificial Sequence
  Oligonucleotide for detection of SNP TSC0061574
atctatctattaa

SEQ ID NO: 252409 - DNA, 13 bp, Artificial Sequence
  Oligonucleotide for detection of SNP TSC0061574
ttaataaatagat

SEQ ID NO: 252410 - DNA, 13 bp, Artificial Sequence
  Oligonucleotide for detection of SNP TSC0061574
atctatttattaa

SEQ ID NO: 252411 - DNA, 13 bp, Artificial Sequence
  Oligonucleotide for detection of SNP TSC0061576
tttatatgtagga

SEQ ID NO: 252412 - DNA, 13 bp, Artificial Sequence
  Oligonucleotide for detection of SNP TSC0061576
tcctacatataaa

SEQ ID NO: 252413 - DNA, 13 bp, Artificial Sequence
  Oligonucleotide for detection of SNP TSC0061576
tttataggtagga

SEQ ID NO: 252414 - DNA, 13 bp, Artificial Sequence
  Oligonucleotide for detection of SNP TSC0061576
tcctacctataaa

SEQ ID NO: 252415 - DNA, 13 bp, Artificial Sequence
  Oligonucleotide for detection of SNP TSC0061576
ttttgtatgtggg

SEQ ID NO: 252416 - DNA, 13 bp, Artificial Sequence
  Oligonucleotide for detection of SNP TSC0061576
cccacatacaaaa

SEQ ID NO: 252417 - DNA, 13 bp, Artificial Sequence
  Oligonucleotide for detection of SNP TSC0061576
ttttgtttgtggg

SEQ ID NO: 252418 - DNA, 13 bp, Artificial Sequence
  Oligonucleotide for detection of SNP TSC0061576
cccacaaacaaaa

SEQ ID NO: 252419 - DNA, 13 bp, Artificial Sequence
  Oligonucleotide for detection of SNP TSC0061578
aaatttggtatag

SEQ ID NO: 252420 - DNA, 13 bp, Artificial Sequence
  Oligonucleotide for detection of SNP TSC0061578
ctataccaaattt

SEQ ID NO: 252421 - DNA, 13 bp, Artificial Sequence
  Oligonucleotide for detection of SNP TSC0061578
aaatttagtatag

SEQ ID NO: 252422 - DNA, 13 bp, Artificial Sequence
  Oligonucleotide for detection of SNP TSC0061578
ctatactaaattt

SEQ ID NO: 252423 - DNA, 13 bp, Artificial Sequence
  Oligonucleotide for detection of SNP TSC0061579
ataaatgaaaatg

SEQ ID NO: 252424 - DNA, 13 bp, Artificial Sequence
  Oligonucleotide for detection of SNP TSC0061579
cattttcatttat

SEQ ID NO: 252425 - DNA, 13 bp, Artificial Sequence
  Oligonucleotide for detection of SNP TSC0061579
ataaataaaaatg

SEQ ID NO: 252426 - DNA, 13 bp, Artificial Sequence
  Oligonucleotide for detection of SNP TSC0061579
catttttatttat

SEQ ID NO: 252427 - DNA, 13 bp, Artificial Sequence
  Oligonucleotide for detection of SNP TSC0061580
aattaaatttata

SEQ ID NO: 252428 - DNA, 13 bp, Artificial Sequence
  Oligonucleotide for detection of SNP TSC0061580
tataaatttaatt

SEQ ID NO: 252429 - DNA, 13 bp, Artificial Sequence
  Oligonucleotide for detection of SNP TSC0061580
aattaattttata

SEQ ID NO: 252430 - DNA, 13 bp, Artificial Sequence
  Oligonucleotide for detection of SNP TSC0061580
tataaaattaatt

SEQ ID NO: 252431 - DNA, 13 bp, Artificial Sequence
  Oligonucleotide for detection of SNP TSC0061580
tatagatttggtt

SEQ ID NO: 252432 - DNA, 13 bp, Artificial Sequence
  Oligonucleotide for detection of SNP TSC0061580
aaccaaatctata

SEQ ID NO: 252433 - DNA, 13 bp, Artificial Sequence
  Oligonucleotide for detection of SNP TSC0061580
tatagaattggtt

SEQ ID NO: 252434 - DNA, 13 bp, Artificial Sequence
  Oligonucleotide for detection of SNP TSC0061580
aaccaattctata

SEQ ID NO: 252435 - DNA, 13 bp, Artificial Sequence
  Oligonucleotide for detection of SNP TSC0061582
agatattagttgt

SEQ ID NO: 252436 - DNA, 13 bp, Artificial Sequence
  Oligonucleotide for detection of SNP TSC0061582
acaactaatatct

SEQ ID NO: 252437 - DNA, 13 bp, Artificial Sequence
  Oligonucleotide for detection of SNP TSC0061582
agatatgagttgt

SEQ ID NO: 252438 - DNA, 13 bp, Artificial Sequence
  Oligonucleotide for detection of SNP TSC0061582
acaactcatatct

SEQ ID NO: 252439 - DNA, 13 bp, Artificial Sequence
  Oligonucleotide for detection of SNP TSC0061582
agatacgagttgt

SEQ ID NO: 252440 - DNA, 13 bp, Artificial Sequence
  Oligonucleotide for detection of SNP TSC0061582
acaactcgtatct

SEQ ID NO: 252441 - DNA, 13 bp, Artificial Sequence
  Oligonucleotide for detection of SNP TSC0061582
ataattggtgttt

SEQ ID NO: 252442 - DNA, 13 bp, Artificial Sequence
  Oligonucleotide for detection of SNP TSC0061582
aaacaccaattat

SEQ ID NO: 252443 - DNA, 13 bp, Artificial Sequence
  Oligonucleotide for detection of SNP TSC0061582
ataatttgtgttt

SEQ ID NO: 252444 - DNA, 13 bp, Artificial Sequence
  Oligonucleotide for detection of SNP TSC0061582
aaacacaaattat

SEQ ID NO: 252445 - DNA, 13 bp, Artificial Sequence
  Oligonucleotide for detection of SNP TSC0061582
ataattcgtgttt

SEQ ID NO: 252446 - DNA, 13 bp, Artificial Sequence
  Oligonucleotide for detection of SNP TSC0061582
aaacacgaattat

SEQ ID NO: 252447 - DNA, 13 bp, Artificial Sequence
  Oligonucleotide for detection of SNP TSC0007032
tttggattttgag

SEQ ID NO: 252448 - DNA, 13 bp, Artificial Sequence
  Oligonucleotide for detection of SNP TSC0007032
ctcaaaatccaaa

SEQ ID NO: 252449 - DNA, 13 bp, Artificial Sequence
  Oligonucleotide for detection of SNP TSC0007032
tttggagtttgag

SEQ ID NO: 252450 - DNA, 13 bp, Artificial Sequence
  Oligonucleotide for detection of SNP TSC0007032
ctcaaactccaaa

SEQ ID NO: 252451 - DNA, 13 bp, Artificial Sequence
  Oligonucleotide for detection of SNP TSC0007032
tttagaatttaaa

SEQ ID NO: 252452 - DNA, 13 bp, Artificial Sequence
  Oligonucleotide for detection of SNP TSC0007032
tttaaattctaaa

SEQ ID NO: 252453 - DNA, 13 bp, Artificial Sequence
  Oligonucleotide for detection of SNP TSC0007032
tttagattttaaa

SEQ ID NO: 252454 - DNA, 13 bp, Artificial Sequence
  Oligonucleotide for detection of SNP TSC0007032
tttaaaatctaaa

SEQ ID NO: 252455 - DNA, 13 bp, Artificial Sequence
  Oligonucleotide for detection of SNP TSC0061586
gatttaatgagat

SEQ ID NO: 252456 - DNA, 13 bp, Artificial Sequence
  Oligonucleotide for detection of SNP TSC0061586
atctcattaaatc

SEQ ID NO: 252457 - DNA, 13 bp, Artificial Sequence
  Oligonucleotide for detection of SNP TSC0061586
gatttagtgagat

SEQ ID NO: 252458 - DNA, 13 bp, Artificial Sequence
  Oligonucleotide for detection of SNP TSC0061586
atctcactaaatc

SEQ ID NO: 252459 - DNA, 13 bp, Artificial Sequence
  Oligonucleotide for detection of SNP TSC0061589
atagatgagtttt

SEQ ID NO: 252460 - DNA, 13 bp, Artificial Sequence
  Oligonucleotide for detection of SNP TSC0061589
aaaactcatctat

SEQ ID NO: 252461 - DNA, 13 bp, Artificial Sequence
  Oligonucleotide for detection of SNP TSC0061589
atagataagtttt

SEQ ID NO: 252462 - DNA, 13 bp, Artificial Sequence
  Oligonucleotide for detection of SNP TSC0061589
aaaacttatctat

SEQ ID NO: 252463 - DNA, 13 bp, Artificial Sequence
  Oligonucleotide for detection of SNP TSC0061590
ttgtatagattat

SEQ ID NO: 252464 - DNA, 13 bp, Artificial Sequence
  Oligonucleotide for detection of SNP TSC0061590
ataatctatacaa

SEQ ID NO: 252465 - DNA, 13 bp, Artificial Sequence
  Oligonucleotide for detection of SNP TSC0061590
ttgtatggattat

SEQ ID NO: 252466 - DNA, 13 bp, Artificial Sequence
  Oligonucleotide for detection of SNP TSC0061590
ataatccatacaa

SEQ ID NO: 252467 - DNA, 13 bp, Artificial Sequence
  Oligonucleotide for detection of SNP TSC0061590
ttgtacggattat

SEQ ID NO: 252468 - DNA, 13 bp, Artificial Sequence
  Oligonucleotide for detection of SNP TSC0061590
ataatccgtacaa

SEQ ID NO: 252469 - DNA, 13 bp, Artificial Sequence
  Oligonucleotide for detection of SNP TSC0061590
ataatttgtgtaa

SEQ ID NO: 252470 - DNA, 13 bp, Artificial Sequence
  Oligonucleotide for detection of SNP TSC0061590
ttacacaaattat

SEQ ID NO: 252471 - DNA, 13 bp, Artificial Sequence
  Oligonucleotide for detection of SNP TSC0061590
ataattcgtgtaa

SEQ ID NO: 252472 - DNA, 13 bp, Artificial Sequence
  Oligonucleotide for detection of SNP TSC0061590
ttacacgaattat

SEQ ID NO: 252473 - DNA, 13 bp, Artificial Sequence
  Oligonucleotide for detection of SNP TSC0061591
tgtaatggttttt

SEQ ID NO: 252474 - DNA, 13 bp, Artificial Sequence
  Oligonucleotide for detection of SNP TSC0061591
aaaaaccattaca

SEQ ID NO: 252475 - DNA, 13 bp, Artificial Sequence
  Oligonucleotide for detection of SNP TSC0061591
aagggtaattgta

SEQ ID NO: 252476 - DNA, 13 bp, Artificial Sequence
  Oligonucleotide for detection of SNP TSC0061591
tacaattaccctt

SEQ ID NO: 252477 - DNA, 13 bp, Artificial Sequence
  Oligonucleotide for detection of SNP TSC0061591
aagggttattgta

SEQ ID NO: 252478 - DNA, 13 bp, Artificial Sequence
  Oligonucleotide for detection of SNP TSC0061591
tacaataaccctt

SEQ ID NO: 252479 - DNA, 13 bp, Artificial Sequence
  Oligonucleotide for detection of SNP TSC0061592
ttttaaggagaay

SEQ ID NO: 252480 - DNA, 13 bp, Artificial Sequence
  Oligonucleotide for detection of SNP TSC0061592
rttctccttaaaa

SEQ ID NO: 252481 - DNA, 13 bp, Artificial Sequence
  Oligonucleotide for detection of SNP TSC0061592
ttttaaagagaay

SEQ ID NO: 252482 - DNA, 13 bp, Artificial Sequence
  Oligonucleotide for detection of SNP TSC0061592
rttctctttaaaa

SEQ ID NO: 252483 - DNA, 13 bp, Artificial Sequence
  Oligonucleotide for detection of SNP TSC0061593
attatagatagay

SEQ ID NO: 252484 - DNA, 13 bp, Artificial Sequence
  Oligonucleotide for detection of SNP TSC0061593
rtctatctataat

SEQ ID NO: 252485 - DNA, 13 bp, Artificial Sequence
  Oligonucleotide for detection of SNP TSC0061593
attataaatagay

SEQ ID NO: 252486 - DNA, 13 bp, Artificial Sequence
  Oligonucleotide for detection of SNP TSC0061593
rtctatttataat

SEQ ID NO: 252487 - DNA, 13 bp, Artificial Sequence
  Oligonucleotide for detection of SNP TSC0061594
atggtgaaaatty

SEQ ID NO: 252488 - DNA, 13 bp, Artificial Sequence
  Oligonucleotide for detection of SNP TSC0061594
raattttcaccat

SEQ ID NO: 252489 - DNA, 13 bp, Artificial Sequence
  Oligonucleotide for detection of SNP TSC0061594
atggtggaaatty

SEQ ID NO: 252490 - DNA, 13 bp, Artificial Sequence
  Oligonucleotide for detection of SNP TSC0061594
raatttccaccat

SEQ ID NO: 252491 - DNA, 13 bp, Artificial Sequence
  Oligonucleotide for detection of SNP TSC0061595
agagatataatta

SEQ ID NO: 252492 - DNA, 13 bp, Artificial Sequence
  Oligonucleotide for detection of SNP TSC0061595
taattatatctct

SEQ ID NO: 252493 - DNA, 13 bp, Artificial Sequence
  Oligonucleotide for detection of SNP TSC0061595
agagatgtaatta

SEQ ID NO: 252494 - DNA, 13 bp, Artificial Sequence
  Oligonucleotide for detection of SNP TSC0061595
taattacatctct

SEQ ID NO: 252495 - DNA, 13 bp, Artificial Sequence
  Oligonucleotide for detection of SNP TSC0061596
gatgtaagatagg

SEQ ID NO: 252496 - DNA, 13 bp, Artificial Sequence
  Oligonucleotide for detection of SNP TSC0061596
cctatcttacatc

SEQ ID NO: 252497 - DNA, 13 bp, Artificial Sequence
  Oligonucleotide for detection of SNP TSC0061596
gatgtaggatagg

SEQ ID NO: 252498 - DNA, 13 bp, Artificial Sequence
  Oligonucleotide for detection of SNP TSC0061596
cctatcctacatc

SEQ ID NO: 252499 - DNA, 13 bp, Artificial Sequence
  Oligonucleotide for detection of SNP TSC0061597
gttattgttttty

SEQ ID NO: 252500 - DNA, 13 bp, Artificial Sequence
  Oligonucleotide for detection of SNP TSC0061597
raaaaacaataac

SEQ ID NO: 252501 - DNA, 13 bp, Artificial Sequence
  Oligonucleotide for detection of SNP TSC0061598
tttgtatggtatt

SEQ ID NO: 252502 - DNA, 13 bp, Artificial Sequence
  Oligonucleotide for detection of SNP TSC0061598
aataccatacaaa

SEQ ID NO: 252503 - DNA, 13 bp, Artificial Sequence
  Oligonucleotide for detection of SNP TSC0061598
tttgtacggtatt

SEQ ID NO: 252504 - DNA, 13 bp, Artificial Sequence
  Oligonucleotide for detection of SNP TSC0061598
aataccgtacaaa

SEQ ID NO: 252505 - DNA, 13 bp, Artificial Sequence
  Oligonucleotide for detection of SNP TSC0061598
aatgttgtgtaag

SEQ ID NO: 252506 - DNA, 13 bp, Artificial Sequence
  Oligonucleotide for detection of SNP TSC0061598
cttacacaacatt

SEQ ID NO: 252507 - DNA, 13 bp, Artificial Sequence
  Oligonucleotide for detection of SNP TSC0061598
aatgttatgtaag

SEQ ID NO: 252508 - DNA, 13 bp, Artificial Sequence
  Oligonucleotide for detection of SNP TSC0061598
cttacataacatt

SEQ ID NO: 252509 - DNA, 13 bp, Artificial Sequence
  Oligonucleotide for detection of SNP TSC0061598
aatgtcgtgtaag

SEQ ID NO: 252510 - DNA, 13 bp, Artificial Sequence
  Oligonucleotide for detection of SNP TSC0061598
cttacacgacatt

SEQ ID NO: 252511 - DNA, 13 bp, Artificial Sequence
  Oligonucleotide for detection of SNP TSC0061599
gatttaagtaatt

SEQ ID NO: 252512 - DNA, 13 bp, Artificial Sequence
  Oligonucleotide for detection of SNP TSC0061599
aattacttaaatc

SEQ ID NO: 252513 - DNA, 13 bp, Artificial Sequence
  Oligonucleotide for detection of SNP TSC0061599
gatttaggtaatt

SEQ ID NO: 252514 - DNA, 13 bp, Artificial Sequence
  Oligonucleotide for detection of SNP TSC0061599
aattacctaaatc

SEQ ID NO: 252515 - DNA, 13 bp, Artificial Sequence
  Oligonucleotide for detection of SNP TSC0061601
gaatttattttaa

SEQ ID NO: 252516 - DNA, 13 bp, Artificial Sequence
  Oligonucleotide for detection of SNP TSC0061601
ttaaaataaattc

SEQ ID NO: 252517 - DNA, 13 bp, Artificial Sequence
  Oligonucleotide for detection of SNP TSC0061601
gaatttgttttaa

SEQ ID NO: 252518 - DNA, 13 bp, Artificial Sequence
  Oligonucleotide for detection of SNP TSC0061601
ttaaaacaaattc

SEQ ID NO: 252519 - DNA, 13 bp, Artificial Sequence
  Oligonucleotide for detection of SNP TSC0061602
tagaaggaaaatt

SEQ ID NO: 252520 - DNA, 13 bp, Artificial Sequence
  Oligonucleotide for detection of SNP TSC0061602
aattttccttcta

SEQ ID NO: 252521 - DNA, 13 bp, Artificial Sequence
  Oligonucleotide for detection of SNP TSC0061602
tagaagaaaaatt

SEQ ID NO: 252522 - DNA, 13 bp, Artificial Sequence
  Oligonucleotide for detection of SNP TSC0061602
aatttttcttcta

SEQ ID NO: 252523 - DNA, 13 bp, Artificial Sequence
  Oligonucleotide for detection of SNP TSC0061603
agggagtaagtty

SEQ ID NO: 252524 - DNA, 13 bp, Artificial Sequence
  Oligonucleotide for detection of SNP TSC0061603
raacttactccct

SEQ ID NO: 252525 - DNA, 13 bp, Artificial Sequence
  Oligonucleotide for detection of SNP TSC0061603
agggaggaagtty

SEQ ID NO: 252526 - DNA, 13 bp, Artificial Sequence
  Oligonucleotide for detection of SNP TSC0061603
raacttcctccct

SEQ ID NO: 252527 - DNA, 13 bp, Artificial Sequence
  Oligonucleotide for detection of SNP TSC0061604
ggtattttgtggy

SEQ ID NO: 252528 - DNA, 13 bp, Artificial Sequence
  Oligonucleotide for detection of SNP TSC0061604
rccacaaaatacc

SEQ ID NO: 252529 - DNA, 13 bp, Artificial Sequence
  Oligonucleotide for detection of SNP TSC0061604
ggtattgtgtggy

SEQ ID NO: 252530 - DNA, 13 bp, Artificial Sequence
  Oligonucleotide for detection of SNP TSC0061604
rccacacaatacc

SEQ ID NO: 252531 - DNA, 13 bp, Artificial Sequence
  Oligonucleotide for detection of SNP TSC0061604
ggtattttgcggy

SEQ ID NO: 252532 - DNA, 13 bp, Artificial Sequence
  Oligonucleotide for detection of SNP TSC0061604
rccgcaaaatacc

SEQ ID NO: 252533 - DNA, 13 bp, Artificial Sequence
  Oligonucleotide for detection of SNP TSC0061604
ggtatcgtgtggy

SEQ ID NO: 252534 - DNA, 13 bp, Artificial Sequence
  Oligonucleotide for detection of SNP TSC0061604
rccacacgatacc

SEQ ID NO: 252535 - DNA, 13 bp, Artificial Sequence
  Oligonucleotide for detection of SNP TSC0061604
ggtattgtgcggy

SEQ ID NO: 252536 - DNA, 13 bp, Artificial Sequence
  Oligonucleotide for detection of SNP TSC0061604
rccgcacaatacc

SEQ ID NO: 252537 - DNA, 13 bp, Artificial Sequence
  Oligonucleotide for detection of SNP TSC0061604
ggtatcgtgcggy

SEQ ID NO: 252538 - DNA, 13 bp, Artificial Sequence
  Oligonucleotide for detection of SNP TSC0061604
rccgcacgatacc

SEQ ID NO: 252539 - DNA, 13 bp, Artificial Sequence
  Oligonucleotide for detection of SNP TSC0061604
gttgtaagatgty

SEQ ID NO: 252540 - DNA, 13 bp, Artificial Sequence
  Oligonucleotide for detection of SNP TSC0061604
racatcttacaac

SEQ ID NO: 252541 - DNA, 13 bp, Artificial Sequence
  Oligonucleotide for detection of SNP TSC0061604
gttgtatgatgty

SEQ ID NO: 252542 - DNA, 13 bp, Artificial Sequence
  Oligonucleotide for detection of SNP TSC0061604
racatcatacaac

SEQ ID NO: 252543 - DNA, 13 bp, Artificial Sequence
  Oligonucleotide for detection of SNP TSC0061604
gtcgtaagatgty

SEQ ID NO: 252544 - DNA, 13 bp, Artificial Sequence
  Oligonucleotide for detection of SNP TSC0061604
racatcttacgac

SEQ ID NO: 252545 - DNA, 13 bp, Artificial Sequence
  Oligonucleotide for detection of SNP TSC0061604
gtcgtatgatgty

SEQ ID NO: 252546 - DNA, 13 bp, Artificial Sequence
  Oligonucleotide for detection of SNP TSC0061604
racatcatacgac

SEQ ID NO: 252547 - DNA, 13 bp, Artificial Sequence
  Oligonucleotide for detection of SNP TSC0061604
gttgtacgatgty

SEQ ID NO: 252548 - DNA, 13 bp, Artificial Sequence
  Oligonucleotide for detection of SNP TSC0061604
racatcgtacaac

SEQ ID NO: 252549 - DNA, 13 bp, Artificial Sequence
  Oligonucleotide for detection of SNP TSC0061604
gtcgtacgatgty

SEQ ID NO: 252550 - DNA, 13 bp, Artificial Sequence
  Oligonucleotide for detection of SNP TSC0061604
racatcgtacgac

SEQ ID NO: 252551 - DNA, 13 bp, Artificial Sequence
  Oligonucleotide for detection of SNP TSC0061606
ataatagaatggt

SEQ ID NO: 252552 - DNA, 13 bp, Artificial Sequence
  Oligonucleotide for detection of SNP TSC0061606
accattctattat

SEQ ID NO: 252553 - DNA, 13 bp, Artificial Sequence
  Oligonucleotide for detection of SNP TSC0061606
ataataaaatggt

SEQ ID NO: 252554 - DNA, 13 bp, Artificial Sequence
  Oligonucleotide for detection of SNP TSC0061606
accattttattat

SEQ ID NO: 252555 - DNA, 13 bp, Artificial Sequence
  Oligonucleotide for detection of SNP TSC0061608
ggtggaggtttag

SEQ ID NO: 252556 - DNA, 13 bp, Artificial Sequence
  Oligonucleotide for detection of SNP TSC0061608
ctaaacctccacc

SEQ ID NO: 252557 - DNA, 13 bp, Artificial Sequence
  Oligonucleotide for detection of SNP TSC0061608
ggtggaagtttag

SEQ ID NO: 252558 - DNA, 13 bp, Artificial Sequence
  Oligonucleotide for detection of SNP TSC0061608
ctaaacttccacc

SEQ ID NO: 252559 - DNA, 13 bp, Artificial Sequence
  Oligonucleotide for detection of SNP TSC0061609
tgtgagggtggta

SEQ ID NO: 252560 - DNA, 13 bp, Artificial Sequence
  Oligonucleotide for detection of SNP TSC0061609
taccaccctcaca

SEQ ID NO: 252561 - DNA, 13 bp, Artificial Sequence
  Oligonucleotide for detection of SNP TSC0061609
tgtgagagtggta

SEQ ID NO: 252562 - DNA, 13 bp, Artificial Sequence
  Oligonucleotide for detection of SNP TSC0061609
taccactctcaca

SEQ ID NO: 252563 - DNA, 13 bp, Artificial Sequence
  Oligonucleotide for detection of SNP TSC0061614
ttttgtgtaatat

SEQ ID NO: 252564 - DNA, 13 bp, Artificial Sequence
  Oligonucleotide for detection of SNP TSC0061614
atattacacaaaa

SEQ ID NO: 252565 - DNA, 13 bp, Artificial Sequence
  Oligonucleotide for detection of SNP TSC0061614
ttttgtataatat

SEQ ID NO: 252566 - DNA, 13 bp, Artificial Sequence
  Oligonucleotide for detection of SNP TSC0061614
atattatacaaaa

SEQ ID NO: 252567 - DNA, 13 bp, Artificial Sequence
  Oligonucleotide for detection of SNP TSC0061615
aagtatgtttggt

SEQ ID NO: 252568 - DNA, 13 bp, Artificial Sequence
  Oligonucleotide for detection of SNP TSC0061615
accaaacatactt

SEQ ID NO: 252569 - DNA, 13 bp, Artificial Sequence
  Oligonucleotide for detection of SNP TSC0061615
aagtatatttggt

SEQ ID NO: 252570 - DNA, 13 bp, Artificial Sequence
  Oligonucleotide for detection of SNP TSC0061615
accaaatatactt

SEQ ID NO: 252571 - DNA, 13 bp, Artificial Sequence
  Oligonucleotide for detection of SNP TSC0061616
tggaaagtatgga

SEQ ID NO: 252572 - DNA, 13 bp, Artificial Sequence
  Oligonucleotide for detection of SNP TSC0061616
tccatactttcca

SEQ ID NO: 252573 - DNA, 13 bp, Artificial Sequence
  Oligonucleotide for detection of SNP TSC0061616
tggaaaatatgga

SEQ ID NO: 252574 - DNA, 13 bp, Artificial Sequence
  Oligonucleotide for detection of SNP TSC0061616
tccatattttcca

SEQ ID NO: 252575 - DNA, 13 bp, Artificial Sequence
  Oligonucleotide for detection of SNP TSC0061617
gtggtatgtaaga

SEQ ID NO: 252576 - DNA, 13 bp, Artificial Sequence
  Oligonucleotide for detection of SNP TSC0061617
tcttacataccac

SEQ ID NO: 252577 - DNA, 13 bp, Artificial Sequence
  Oligonucleotide for detection of SNP TSC0061617
gtggtacgtaaga

SEQ ID NO: 252578 - DNA, 13 bp, Artificial Sequence
  Oligonucleotide for detection of SNP TSC0061617
tcttacgtaccac

SEQ ID NO: 252579 - DNA, 13 bp, Artificial Sequence
  Oligonucleotide for detection of SNP TSC0061617
ttttatatgttay

SEQ ID NO: 252580 - DNA, 13 bp, Artificial Sequence
  Oligonucleotide for detection of SNP TSC0061617
rtaacatataaaa

SEQ ID NO: 252581 - DNA, 13 bp, Artificial Sequence
  Oligonucleotide for detection of SNP TSC0061617
ttttacgtgttay

SEQ ID NO: 252582 - DNA, 13 bp, Artificial Sequence
  Oligonucleotide for detection of SNP TSC0061617
rtaacacgtaaaa

SEQ ID NO: 252583 - DNA, 13 bp, Artificial Sequence
  Oligonucleotide for detection of SNP TSC0061618
tattaaattttaa

SEQ ID NO: 252584 - DNA, 13 bp, Artificial Sequence
  Oligonucleotide for detection of SNP TSC0061618
ttaaaatttaata

SEQ ID NO: 252585 - DNA, 13 bp, Artificial Sequence
  Oligonucleotide for detection of SNP TSC0061618
tattaatttttaa

SEQ ID NO: 252586 - DNA, 13 bp, Artificial Sequence
  Oligonucleotide for detection of SNP TSC0061618
ttaaaaattaata

SEQ ID NO: 252587 - DNA, 13 bp, Artificial Sequence
  Oligonucleotide for detection of SNP TSC0061618
ttgaagtttgatg

SEQ ID NO: 252588 - DNA, 13 bp, Artificial Sequence
  Oligonucleotide for detection of SNP TSC0061618
catcaaacttcaa

SEQ ID NO: 252589 - DNA, 13 bp, Artificial Sequence
  Oligonucleotide for detection of SNP TSC0061618
ttgaaggttgatg

SEQ ID NO: 252590 - DNA, 13 bp, Artificial Sequence
  Oligonucleotide for detection of SNP TSC0061618
catcaaccttcaa

SEQ ID NO: 252591 - DNA, 13 bp, Artificial Sequence
  Oligonucleotide for detection of SNP TSC0061619
tgttgagttttaa

SEQ ID NO: 252592 - DNA, 13 bp, Artificial Sequence
  Oligonucleotide for detection of SNP TSC0061619
ttaaaactcaaca

SEQ ID NO: 252593 - DNA, 13 bp, Artificial Sequence
  Oligonucleotide for detection of SNP TSC0061619
tgttgaattttaa

SEQ ID NO: 252594 - DNA, 13 bp, Artificial Sequence
  Oligonucleotide for detection of SNP TSC0061619
ttaaaattcaaca

SEQ ID NO: 252595 - DNA, 13 bp, Artificial Sequence
  Oligonucleotide for detection of SNP TSC0061620
ataatggaaataa

SEQ ID NO: 252596 - DNA, 13 bp, Artificial Sequence
  Oligonucleotide for detection of SNP TSC0061620
ttatttccattat

SEQ ID NO: 252597 - DNA, 13 bp, Artificial Sequence
  Oligonucleotide for detection of SNP TSC0061620
ataatgaaaataa

SEQ ID NO: 252598 - DNA, 13 bp, Artificial Sequence
  Oligonucleotide for detection of SNP TSC0061620
ttattttcattat

SEQ ID NO: 252599 - DNA, 13 bp, Artificial Sequence
  Oligonucleotide for detection of SNP TSC0006552
gtatgtaatgtga

SEQ ID NO: 252600 - DNA, 13 bp, Artificial Sequence
  Oligonucleotide for detection of SNP TSC0006552
tcacattacatac

SEQ ID NO: 252601 - DNA, 13 bp, Artificial Sequence
  Oligonucleotide for detection of SNP TSC0006552
gtatgtgatgtga

SEQ ID NO: 252602 - DNA, 13 bp, Artificial Sequence
  Oligonucleotide for detection of SNP TSC0006552
tcacatcacatac

SEQ ID NO: 252603 - DNA, 13 bp, Artificial Sequence
  Oligonucleotide for detection of SNP TSC0061622
aaatatatatttt

SEQ ID NO: 252604 - DNA, 13 bp, Artificial Sequence
  Oligonucleotide for detection of SNP TSC0061622
aaaatatatattt

SEQ ID NO: 252605 - DNA, 13 bp, Artificial Sequence
  Oligonucleotide for detection of SNP TSC0061622
aaatatgtatttt

SEQ ID NO: 252606 - DNA, 13 bp, Artificial Sequence
  Oligonucleotide for detection of SNP TSC0061622
aaaatacatattt

SEQ ID NO: 252607 - DNA, 13 bp, Artificial Sequence
  Oligonucleotide for detection of SNP TSC0008604
aaattgtttagga

SEQ ID NO: 252608 - DNA, 13 bp, Artificial Sequence
  Oligonucleotide for detection of SNP TSC0008604
tcctaaacaattt

SEQ ID NO: 252609 - DNA, 13 bp, Artificial Sequence
  Oligonucleotide for detection of SNP TSC0008604
aaattgattagga

SEQ ID NO: 252610 - DNA, 13 bp, Artificial Sequence
  Oligonucleotide for detection of SNP TSC0008604
tcctaatcaattt

SEQ ID NO: 252611 - DNA, 13 bp, Artificial Sequence
  Oligonucleotide for detection of SNP TSC0008605
agaatatgagagg

SEQ ID NO: 252612 - DNA, 13 bp, Artificial Sequence
  Oligonucleotide for detection of SNP TSC0008605
cctctcatattct

SEQ ID NO: 252613 - DNA, 13 bp, Artificial Sequence
  Oligonucleotide for detection of SNP TSC0008605
agaatacgagagg

SEQ ID NO: 252614 - DNA, 13 bp, Artificial Sequence
  Oligonucleotide for detection of SNP TSC0008605
cctctcgtattct

SEQ ID NO: 252615 - DNA, 13 bp, Artificial Sequence
  Oligonucleotide for detection of SNP TSC0061623
ttttttggtgtta

SEQ ID NO: 252616 - DNA, 13 bp, Artificial Sequence
  Oligonucleotide for detection of SNP TSC0061623
taacaccaaaaaa

SEQ ID NO: 252617 - DNA, 13 bp, Artificial Sequence
  Oligonucleotide for detection of SNP TSC0061623
taatataaaggga

SEQ ID NO: 252618 - DNA, 13 bp, Artificial Sequence
  Oligonucleotide for detection of SNP TSC0061623
tccctttatatta

SEQ ID NO: 252619 - DNA, 13 bp, Artificial Sequence
  Oligonucleotide for detection of SNP TSC0061623
taatattaaggga

SEQ ID NO: 252620 - DNA, 13 bp, Artificial Sequence
  Oligonucleotide for detection of SNP TSC0061623
tcccttaatatta

SEQ ID NO: 252621 - DNA, 13 bp, Artificial Sequence
  Oligonucleotide for detection of SNP TSC0061624
agaattgtatatg

SEQ ID NO: 252622 - DNA, 13 bp, Artificial Sequence
  Oligonucleotide for detection of SNP TSC0061624
catatacaattct

SEQ ID NO: 252623 - DNA, 13 bp, Artificial Sequence
  Oligonucleotide for detection of SNP TSC0061624
agaattatatatg

SEQ ID NO: 252624 - DNA, 13 bp, Artificial Sequence
  Oligonucleotide for detection of SNP TSC0061624
catatataattct

SEQ ID NO: 252625 - DNA, 13 bp, Artificial Sequence
  Oligonucleotide for detection of SNP TSC0061628
gttgtgtggatat

SEQ ID NO: 252626 - DNA, 13 bp, Artificial Sequence
  Oligonucleotide for detection of SNP TSC0061628
atatccacacaac

SEQ ID NO: 252627 - DNA, 13 bp, Artificial Sequence
  Oligonucleotide for detection of SNP TSC0061628
gttgtgcggatat

SEQ ID NO: 252628 - DNA, 13 bp, Artificial Sequence
  Oligonucleotide for detection of SNP TSC0061628
atatccgcacaac

SEQ ID NO: 252629 - DNA, 13 bp, Artificial Sequence
  Oligonucleotide for detection of SNP TSC0061628
atatttgtatagy

SEQ ID NO: 252630 - DNA, 13 bp, Artificial Sequence
  Oligonucleotide for detection of SNP TSC0061628
rctatacaaatat

SEQ ID NO: 252631 - DNA, 13 bp, Artificial Sequence
  Oligonucleotide for detection of SNP TSC0061628
atatttatatagy

SEQ ID NO: 252632 - DNA, 13 bp, Artificial Sequence
  Oligonucleotide for detection of SNP TSC0061628
rctatataaatat

SEQ ID NO: 252633 - DNA, 13 bp, Artificial Sequence
  Oligonucleotide for detection of SNP TSC0061628
atattcgtatagy

SEQ ID NO: 252634 - DNA, 13 bp, Artificial Sequence
  Oligonucleotide for detection of SNP TSC0061628
rctatacgaatat

SEQ ID NO: 252635 - DNA, 13 bp, Artificial Sequence
  Oligonucleotide for detection of SNP TSC0061629
ggtagaattgtty

SEQ ID NO: 252636 - DNA, 13 bp, Artificial Sequence
  Oligonucleotide for detection of SNP TSC0061629
raacaattctacc

SEQ ID NO: 252637 - DNA, 13 bp, Artificial Sequence
  Oligonucleotide for detection of SNP TSC0061629
ggtagagttgtty

SEQ ID NO: 252638 - DNA, 13 bp, Artificial Sequence
  Oligonucleotide for detection of SNP TSC0061629
raacaactctacc

SEQ ID NO: 252639 - DNA, 13 bp, Artificial Sequence
  Oligonucleotide for detection of SNP TSC0061631
tagaatgtttaaa

SEQ ID NO: 252640 - DNA, 13 bp, Artificial Sequence
  Oligonucleotide for detection of SNP TSC0061631
tttaaacattcta

SEQ ID NO: 252641 - DNA, 13 bp, Artificial Sequence
  Oligonucleotide for detection of SNP TSC0061631
tagaatatttaaa

SEQ ID NO: 252642 - DNA, 13 bp, Artificial Sequence
  Oligonucleotide for detection of SNP TSC0061631
tttaaatattcta

SEQ ID NO: 252643 - DNA, 13 bp, Artificial Sequence
  Oligonucleotide for detection of SNP TSC0061631
tagaacgtttaaa

SEQ ID NO: 252644 - DNA, 13 bp, Artificial Sequence
  Oligonucleotide for detection of SNP TSC0061631
tttaaacgttcta

SEQ ID NO: 252645 - DNA, 13 bp, Artificial Sequence
  Oligonucleotide for detection of SNP TSC0061633
agaatttgttgty

SEQ ID NO: 252646 - DNA, 13 bp, Artificial Sequence
  Oligonucleotide for detection of SNP TSC0061633
racaacaaattct

SEQ ID NO: 252647 - DNA, 13 bp, Artificial Sequence
  Oligonucleotide for detection of SNP TSC0061633
ggtagtaggtttt

SEQ ID NO: 252648 - DNA, 13 bp, Artificial Sequence
  Oligonucleotide for detection of SNP TSC0061633
aaaacctactacc

SEQ ID NO: 252649 - DNA, 13 bp, Artificial Sequence
  Oligonucleotide for detection of SNP TSC0061633
ggtagttggtttt

SEQ ID NO: 252650 - DNA, 13 bp, Artificial Sequence
  Oligonucleotide for detection of SNP TSC0061633
aaaaccaactacc

SEQ ID NO: 252651 - DNA, 13 bp, Artificial Sequence
  Oligonucleotide for detection of SNP TSC0061633
ggtagtcggtttt

SEQ ID NO: 252652 - DNA, 13 bp, Artificial Sequence
  Oligonucleotide for detection of SNP TSC0061633
aaaaccgactacc

SEQ ID NO: 252653 - DNA, 13 bp, Artificial Sequence
  Oligonucleotide for detection of SNP TSC0061634
ttgttagggtagy

SEQ ID NO: 252654 - DNA, 13 bp, Artificial Sequence
  Oligonucleotide for detection of SNP TSC0061634
rctaccctaacaa

SEQ ID NO: 252655 - DNA, 13 bp, Artificial Sequence
  Oligonucleotide for detection of SNP TSC0061634
ttgttaaggtagy

SEQ ID NO: 252656 - DNA, 13 bp, Artificial Sequence
  Oligonucleotide for detection of SNP TSC0061634
rctaccttaacaa

SEQ ID NO: 252657 - DNA, 13 bp, Artificial Sequence
  Oligonucleotide for detection of SNP TSC0061634
tcgttagggtagy

SEQ ID NO: 252658 - DNA, 13 bp, Artificial Sequence
  Oligonucleotide for detection of SNP TSC0061634
rctaccctaacga

SEQ ID NO: 252659 - DNA, 13 bp, Artificial Sequence
  Oligonucleotide for detection of SNP TSC0061634
tcgttaaggtagy

SEQ ID NO: 252660 - DNA, 13 bp, Artificial Sequence
  Oligonucleotide for detection of SNP TSC0061634
rctaccttaacga

SEQ ID NO: 252661 - DNA, 13 bp, Artificial Sequence
  Oligonucleotide for detection of SNP TSC0061635
tatttttaaggaa

SEQ ID NO: 252662 - DNA, 13 bp, Artificial Sequence
  Oligonucleotide for detection of SNP TSC0061635
ttccttaaaaata

SEQ ID NO: 252663 - DNA, 13 bp, Artificial Sequence
  Oligonucleotide for detection of SNP TSC0061635
tattttgaaggaa

SEQ ID NO: 252664 - DNA, 13 bp, Artificial Sequence
  Oligonucleotide for detection of SNP TSC0061635
ttccttcaaaata

SEQ ID NO: 252665 - DNA, 13 bp, Artificial Sequence
  Oligonucleotide for detection of SNP TSC0061635
ttttttaagaata

SEQ ID NO: 252666 - DNA, 13 bp, Artificial Sequence
  Oligonucleotide for detection of SNP TSC0061635
tattcttaaaaaa

SEQ ID NO: 252667 - DNA, 13 bp, Artificial Sequence
  Oligonucleotide for detection of SNP TSC0061635
tttttttagaata

SEQ ID NO: 252668 - DNA, 13 bp, Artificial Sequence
  Oligonucleotide for detection of SNP TSC0061635
tattctaaaaaaa

SEQ ID NO: 252669 - DNA, 13 bp, Artificial Sequence
  Oligonucleotide for detection of SNP TSC0061638
tttaggttttgag

SEQ ID NO: 252670 - DNA, 13 bp, Artificial Sequence
  Oligonucleotide for detection of SNP TSC0061638
ctcaaaacctaaa

SEQ ID NO: 252671 - DNA, 13 bp, Artificial Sequence
  Oligonucleotide for detection of SNP TSC0061638
tttagggtttgag

SEQ ID NO: 252672 - DNA, 13 bp, Artificial Sequence
  Oligonucleotide for detection of SNP TSC0061638
ctcaaaccctaaa

SEQ ID NO: 252673 - DNA, 13 bp, Artificial Sequence
  Oligonucleotide for detection of SNP TSC0061638
tttaaagtttggg

SEQ ID NO: 252674 - DNA, 13 bp, Artificial Sequence
  Oligonucleotide for detection of SNP TSC0061638
cccaaactttaaa

SEQ ID NO: 252675 - DNA, 13 bp, Artificial Sequence
  Oligonucleotide for detection of SNP TSC0061638
tttaaattttggg

SEQ ID NO: 252676 - DNA, 13 bp, Artificial Sequence
  Oligonucleotide for detection of SNP TSC0061638
cccaaaatttaaa

SEQ ID NO: 252677 - DNA, 13 bp, Artificial Sequence
  Oligonucleotide for detection of SNP TSC0061640
ttaggaaattata

SEQ ID NO: 252678 - DNA, 13 bp, Artificial Sequence
  Oligonucleotide for detection of SNP TSC0061640
tataatttcctaa

SEQ ID NO: 252679 - DNA, 13 bp, Artificial Sequence
  Oligonucleotide for detection of SNP TSC0061640
ttaggagattata

SEQ ID NO: 252680 - DNA, 13 bp, Artificial Sequence
  Oligonucleotide for detection of SNP TSC0061640
tataatctcctaa

SEQ ID NO: 252681 - DNA, 13 bp, Artificial Sequence
  Oligonucleotide for detection of SNP TSC0061641
aggttttggataa

SEQ ID NO: 252682 - DNA, 13 bp, Artificial Sequence
  Oligonucleotide for detection of SNP TSC0061641
ttatccaaaacct

SEQ ID NO: 252683 - DNA, 13 bp, Artificial Sequence
  Oligonucleotide for detection of SNP TSC0061641
aggtttcggataa

SEQ ID NO: 252684 - DNA, 13 bp, Artificial Sequence
  Oligonucleotide for detection of SNP TSC0061641
ttatccgaaacct

SEQ ID NO: 252685 - DNA, 13 bp, Artificial Sequence
  Oligonucleotide for detection of SNP TSC0061641
ttatttggagttt

SEQ ID NO: 252686 - DNA, 13 bp, Artificial Sequence
  Oligonucleotide for detection of SNP TSC0061641
aaactccaaataa

SEQ ID NO: 252687 - DNA, 13 bp, Artificial Sequence
  Oligonucleotide for detection of SNP TSC0061641
ttatttagagttt

SEQ ID NO: 252688 - DNA, 13 bp, Artificial Sequence
  Oligonucleotide for detection of SNP TSC0061641
aaactctaaataa

SEQ ID NO: 252689 - DNA, 13 bp, Artificial Sequence
  Oligonucleotide for detection of SNP TSC0061641
ttattcggagttt

SEQ ID NO: 252690 - DNA, 13 bp, Artificial Sequence
  Oligonucleotide for detection of SNP TSC0061641
aaactccgaataa

SEQ ID NO: 252691 - DNA, 13 bp, Artificial Sequence
  Oligonucleotide for detection of SNP TSC0061644
gaatatatagaga

SEQ ID NO: 252692 - DNA, 13 bp, Artificial Sequence
  Oligonucleotide for detection of SNP TSC0061644
tctctatatattc

SEQ ID NO: 252693 - DNA, 13 bp, Artificial Sequence
  Oligonucleotide for detection of SNP TSC0061644
gaatatgtagaga

SEQ ID NO: 252694 - DNA, 13 bp, Artificial Sequence
  Oligonucleotide for detection of SNP TSC0061644
tctctacatattc

SEQ ID NO: 252695 - DNA, 13 bp, Artificial Sequence
  Oligonucleotide for detection of SNP TSC0061645
gtaatatgataaa

SEQ ID NO: 252696 - DNA, 13 bp, Artificial Sequence
  Oligonucleotide for detection of SNP TSC0061645
tttatcatattac

SEQ ID NO: 252697 - DNA, 13 bp, Artificial Sequence
  Oligonucleotide for detection of SNP TSC0061645
gtaatacgataaa

SEQ ID NO: 252698 - DNA, 13 bp, Artificial Sequence
  Oligonucleotide for detection of SNP TSC0061645
tttatcgtattac

SEQ ID NO: 252699 - DNA, 13 bp, Artificial Sequence
  Oligonucleotide for detection of SNP TSC0061645
tttgttgtattay

SEQ ID NO: 252700 - DNA, 13 bp, Artificial Sequence
  Oligonucleotide for detection of SNP TSC0061645
rtaatacaacaaa

SEQ ID NO: 252701 - DNA, 13 bp, Artificial Sequence
  Oligonucleotide for detection of SNP TSC0061645
tttgttatattay

SEQ ID NO: 252702 - DNA, 13 bp, Artificial Sequence
  Oligonucleotide for detection of SNP TSC0061645
rtaatataacaaa

SEQ ID NO: 252703 - DNA, 13 bp, Artificial Sequence
  Oligonucleotide for detection of SNP TSC0061645
tttgtcgtattay

SEQ ID NO: 252704 - DNA, 13 bp, Artificial Sequence
  Oligonucleotide for detection of SNP TSC0061645
rtaatacgacaaa

SEQ ID NO: 252705 - DNA, 13 bp, Artificial Sequence
  Oligonucleotide for detection of SNP TSC0061646
aaaatgatgtgat

SEQ ID NO: 252706 - DNA, 13 bp, Artificial Sequence
  Oligonucleotide for detection of SNP TSC0061646
atcacatcatttt

SEQ ID NO: 252707 - DNA, 13 bp, Artificial Sequence
  Oligonucleotide for detection of SNP TSC0061646
aaaatgttgtgat

SEQ ID NO: 252708 - DNA, 13 bp, Artificial Sequence
  Oligonucleotide for detection of SNP TSC0061646
atcacaacatttt

SEQ ID NO: 252709 - DNA, 13 bp, Artificial Sequence
  Oligonucleotide for detection of SNP TSC0061649
ttattaaattggy

SEQ ID NO: 252710 - DNA, 13 bp, Artificial Sequence
  Oligonucleotide for detection of SNP TSC0061649
rccaatttaataa

SEQ ID NO: 252711 - DNA, 13 bp, Artificial Sequence
  Oligonucleotide for detection of SNP TSC0061649
ttattatattggy

SEQ ID NO: 252712 - DNA, 13 bp, Artificial Sequence
  Oligonucleotide for detection of SNP TSC0061649
rccaatataataa

SEQ ID NO: 252713 - DNA, 13 bp, Artificial Sequence
  Oligonucleotide for detection of SNP TSC0061650
gttaggtgtggtt

SEQ ID NO: 252714 - DNA, 13 bp, Artificial Sequence
  Oligonucleotide for detection of SNP TSC0061650
aaccacacctaac

SEQ ID NO: 252715 - DNA, 13 bp, Artificial Sequence
  Oligonucleotide for detection of SNP TSC0061650
gttaggcgtggtt

SEQ ID NO: 252716 - DNA, 13 bp, Artificial Sequence
  Oligonucleotide for detection of SNP TSC0061650
aaccacgcctaac

SEQ ID NO: 252717 - DNA, 13 bp, Artificial Sequence
  Oligonucleotide for detection of SNP TSC0061650
aattatgtttggy

SEQ ID NO: 252718 - DNA, 13 bp, Artificial Sequence
  Oligonucleotide for detection of SNP TSC0061650
rccaaacataatt

SEQ ID NO: 252719 - DNA, 13 bp, Artificial Sequence
  Oligonucleotide for detection of SNP TSC0061650
aattatatttggy

SEQ ID NO: 252720 - DNA, 13 bp, Artificial Sequence
  Oligonucleotide for detection of SNP TSC0061650
rccaaatataatt

SEQ ID NO: 252721 - DNA, 13 bp, Artificial Sequence
  Oligonucleotide for detection of SNP TSC0061650
aattacgtttggy

SEQ ID NO: 252722 - DNA, 13 bp, Artificial Sequence
  Oligonucleotide for detection of SNP TSC0061650
rccaaacgtaatt

SEQ ID NO: 252723 - DNA, 13 bp, Artificial Sequence
  Oligonucleotide for detection of SNP TSC0061652
ggttaaaaaagga

SEQ ID NO: 252724 - DNA, 13 bp, Artificial Sequence
  Oligonucleotide for detection of SNP TSC0061652
tccttttttaacc

SEQ ID NO: 252725 - DNA, 13 bp, Artificial Sequence
  Oligonucleotide for detection of SNP TSC0061652
ggttaagaaagga

SEQ ID NO: 252726 - DNA, 13 bp, Artificial Sequence
  Oligonucleotide for detection of SNP TSC0061652
tcctttcttaacc

SEQ ID NO: 252727 - DNA, 13 bp, Artificial Sequence
  Oligonucleotide for detection of SNP TSC0061653
gtatgtggtgagg

SEQ ID NO: 252728 - DNA, 13 bp, Artificial Sequence
  Oligonucleotide for detection of SNP TSC0061653
cctcaccacatac

SEQ ID NO: 252729 - DNA, 13 bp, Artificial Sequence
  Oligonucleotide for detection of SNP TSC0061653
gtatgtagtgagg

SEQ ID NO: 252730 - DNA, 13 bp, Artificial Sequence
  Oligonucleotide for detection of SNP TSC0061653
cctcactacatac

SEQ ID NO: 252731 - DNA, 13 bp, Artificial Sequence
  Oligonucleotide for detection of SNP TSC0061654
ttgtttagaaggg

SEQ ID NO: 252732 - DNA, 13 bp, Artificial Sequence
  Oligonucleotide for detection of SNP TSC0061654
cccttctaaacaa

SEQ ID NO: 252733 - DNA, 13 bp, Artificial Sequence
  Oligonucleotide for detection of SNP TSC0061654
ttgtttggaaggg

SEQ ID NO: 252734 - DNA, 13 bp, Artificial Sequence
  Oligonucleotide for detection of SNP TSC0061654
cccttccaaacaa

SEQ ID NO: 252735 - DNA, 13 bp, Artificial Sequence
  Oligonucleotide for detection of SNP TSC0061655
tattacgtgtaty

SEQ ID NO: 252736 - DNA, 13 bp, Artificial Sequence
  Oligonucleotide for detection of SNP TSC0061655
ratacacgtaata

SEQ ID NO: 252737 - DNA, 13 bp, Artificial Sequence
  Oligonucleotide for detection of SNP TSC0061655
ggtgtatgtggtg

SEQ ID NO: 252738 - DNA, 13 bp, Artificial Sequence
  Oligonucleotide for detection of SNP TSC0061655
caccacatacacc

SEQ ID NO: 252739 - DNA, 13 bp, Artificial Sequence
  Oligonucleotide for detection of SNP TSC0061655
ggtgtacgtggtg

SEQ ID NO: 252740 - DNA, 13 bp, Artificial Sequence
  Oligonucleotide for detection of SNP TSC0061655
caccacgtacacc

SEQ ID NO: 252741 - DNA, 13 bp, Artificial Sequence
  Oligonucleotide for detection of SNP TSC0061656
attgattgggaat

SEQ ID NO: 252742 - DNA, 13 bp, Artificial Sequence
  Oligonucleotide for detection of SNP TSC0061656
attcccaatcaat

SEQ ID NO: 252743 - DNA, 13 bp, Artificial Sequence
  Oligonucleotide for detection of SNP TSC0061656
attgatcgggaat

SEQ ID NO: 252744 - DNA, 13 bp, Artificial Sequence
  Oligonucleotide for detection of SNP TSC0061656
attcccgatcaat

SEQ ID NO: 252745 - DNA, 13 bp, Artificial Sequence
  Oligonucleotide for detection of SNP TSC0061656
atttttggttagt

SEQ ID NO: 252746 - DNA, 13 bp, Artificial Sequence
  Oligonucleotide for detection of SNP TSC0061656
actaaccaaaaat

SEQ ID NO: 252747 - DNA, 13 bp, Artificial Sequence
  Oligonucleotide for detection of SNP TSC0061656
atttttagttagt

SEQ ID NO: 252748 - DNA, 13 bp, Artificial Sequence
  Oligonucleotide for detection of SNP TSC0061656
actaactaaaaat

SEQ ID NO: 252749 - DNA, 13 bp, Artificial Sequence
  Oligonucleotide for detection of SNP TSC0061656
attttcggttagt

SEQ ID NO: 252750 - DNA, 13 bp, Artificial Sequence
  Oligonucleotide for detection of SNP TSC0061656
actaaccgaaaat

SEQ ID NO: 252751 - DNA, 13 bp, Artificial Sequence
  Oligonucleotide for detection of SNP TSC0061657
agggtgatagatt

SEQ ID NO: 252752 - DNA, 13 bp, Artificial Sequence
  Oligonucleotide for detection of SNP TSC0061657
aatctatcaccct

SEQ ID NO: 252753 - DNA, 13 bp, Artificial Sequence
  Oligonucleotide for detection of SNP TSC0061657
agggtggtagatt

SEQ ID NO: 252754 - DNA, 13 bp, Artificial Sequence
  Oligonucleotide for detection of SNP TSC0061657
aatctaccaccct

SEQ ID NO: 252755 - DNA, 13 bp, Artificial Sequence
  Oligonucleotide for detection of SNP TSC0061659
ttatgtttaaaat

SEQ ID NO: 252756 - DNA, 13 bp, Artificial Sequence
  Oligonucleotide for detection of SNP TSC0061659
attttaaacataa

SEQ ID NO: 252757 - DNA, 13 bp, Artificial Sequence
  Oligonucleotide for detection of SNP TSC0010762
gatgataggtgaa

SEQ ID NO: 252758 - DNA, 13 bp, Artificial Sequence
  Oligonucleotide for detection of SNP TSC0010762
ttcacctatcatc

SEQ ID NO: 252759 - DNA, 13 bp, Artificial Sequence
  Oligonucleotide for detection of SNP TSC0010762
gatgattggtgaa

SEQ ID NO: 252760 - DNA, 13 bp, Artificial Sequence
  Oligonucleotide for detection of SNP TSC0010762
ttcaccaatcatc

SEQ ID NO: 252761 - DNA, 13 bp, Artificial Sequence
  Oligonucleotide for detection of SNP TSC0010762
tttattagttaty

SEQ ID NO: 252762 - DNA, 13 bp, Artificial Sequence
  Oligonucleotide for detection of SNP TSC0010762
rataactaataaa

SEQ ID NO: 252763 - DNA, 13 bp, Artificial Sequence
  Oligonucleotide for detection of SNP TSC0061663
agttagttgtggt

SEQ ID NO: 252764 - DNA, 13 bp, Artificial Sequence
  Oligonucleotide for detection of SNP TSC0061663
accacaactaact

SEQ ID NO: 252765 - DNA, 13 bp, Artificial Sequence
  Oligonucleotide for detection of SNP TSC0061663
attatatttggtt

SEQ ID NO: 252766 - DNA, 13 bp, Artificial Sequence
  Oligonucleotide for detection of SNP TSC0061663
aaccaaatataat

SEQ ID NO: 252767 - DNA, 13 bp, Artificial Sequence
  Oligonucleotide for detection of SNP TSC0061663
attataattggtt

SEQ ID NO: 252768 - DNA, 13 bp, Artificial Sequence
  Oligonucleotide for detection of SNP TSC0061663
aaccaattataat

SEQ ID NO: 252769 - DNA, 13 bp, Artificial Sequence
  Oligonucleotide for detection of SNP TSC0061664
ttaagtaaattay

SEQ ID NO: 252770 - DNA, 13 bp, Artificial Sequence
  Oligonucleotide for detection of SNP TSC0061664
rtaatttacttaa

SEQ ID NO: 252771 - DNA, 13 bp, Artificial Sequence
  Oligonucleotide for detection of SNP TSC0061664
ttaagttaattay

SEQ ID NO: 252772 - DNA, 13 bp, Artificial Sequence
  Oligonucleotide for detection of SNP TSC0061664
rtaattaacttaa

SEQ ID NO: 252773 - DNA, 13 bp, Artificial Sequence
  Oligonucleotide for detection of SNP TSC0061664
gtagttgatttga

SEQ ID NO: 252774 - DNA, 13 bp, Artificial Sequence
  Oligonucleotide for detection of SNP TSC0061664
tcaaatcaactac

SEQ ID NO: 252775 - DNA, 13 bp, Artificial Sequence
  Oligonucleotide for detection of SNP TSC0061668
ggtatagtaatag

SEQ ID NO: 252776 - DNA, 13 bp, Artificial Sequence
  Oligonucleotide for detection of SNP TSC0061668
ctattactatacc

SEQ ID NO: 252777 - DNA, 13 bp, Artificial Sequence
  Oligonucleotide for detection of SNP TSC0061668
ggtataataatag

SEQ ID NO: 252778 - DNA, 13 bp, Artificial Sequence
  Oligonucleotide for detection of SNP TSC0061668
ctattattatacc

SEQ ID NO: 252779 - DNA, 13 bp, Artificial Sequence
  Oligonucleotide for detection of SNP TSC0061669
aggttgagagtty

SEQ ID NO: 252780 - DNA, 13 bp, Artificial Sequence
  Oligonucleotide for detection of SNP TSC0061669
raactctcaacct

SEQ ID NO: 252781 - DNA, 13 bp, Artificial Sequence
  Oligonucleotide for detection of SNP TSC0061669
aggttgtgagtty

SEQ ID NO: 252782 - DNA, 13 bp, Artificial Sequence
  Oligonucleotide for detection of SNP TSC0061669
raactcacaacct

SEQ ID NO: 252783 - DNA, 13 bp, Artificial Sequence
  Oligonucleotide for detection of SNP TSC0061669
gagtttttagttt

SEQ ID NO: 252784 - DNA, 13 bp, Artificial Sequence
  Oligonucleotide for detection of SNP TSC0061669
aaactaaaaactc

SEQ ID NO: 252785 - DNA, 13 bp, Artificial Sequence
  Oligonucleotide for detection of SNP TSC0061669
gagtttatagttt

SEQ ID NO: 252786 - DNA, 13 bp, Artificial Sequence
  Oligonucleotide for detection of SNP TSC0061669
aaactataaactc

SEQ ID NO: 252787 - DNA, 13 bp, Artificial Sequence
  Oligonucleotide for detection of SNP TSC0061670
attggtgtgattt

SEQ ID NO: 252788 - DNA, 13 bp, Artificial Sequence
  Oligonucleotide for detection of SNP TSC0061670
aaatcacaccaat

SEQ ID NO: 252789 - DNA, 13 bp, Artificial Sequence
  Oligonucleotide for detection of SNP TSC0061670
attggtatgattt

SEQ ID NO: 252790 - DNA, 13 bp, Artificial Sequence
  Oligonucleotide for detection of SNP TSC0061670
aaatcataccaat

SEQ ID NO: 252791 - DNA, 13 bp, Artificial Sequence
  Oligonucleotide for detection of SNP TSC0061670
attggcgtgattt

SEQ ID NO: 252792 - DNA, 13 bp, Artificial Sequence
  Oligonucleotide for detection of SNP TSC0061670
aaatcacgccaat

SEQ ID NO: 252793 - DNA, 13 bp, Artificial Sequence
  Oligonucleotide for detection of SNP TSC0061671
attggtatgtgay

SEQ ID NO: 252794 - DNA, 13 bp, Artificial Sequence
  Oligonucleotide for detection of SNP TSC0061671
rtcacataccaat

SEQ ID NO: 252795 - DNA, 13 bp, Artificial Sequence
  Oligonucleotide for detection of SNP TSC0061671
attggtgtgtgay

SEQ ID NO: 252796 - DNA, 13 bp, Artificial Sequence
  Oligonucleotide for detection of SNP TSC0061671
rtcacacaccaat

SEQ ID NO: 252797 - DNA, 13 bp, Artificial Sequence
  Oligonucleotide for detection of SNP TSC0061672
tttttatatttgt

SEQ ID NO: 252798 - DNA, 13 bp, Artificial Sequence
  Oligonucleotide for detection of SNP TSC0061672
acaaatataaaaa

SEQ ID NO: 252799 - DNA, 13 bp, Artificial Sequence
  Oligonucleotide for detection of SNP TSC0061672
ataaatgtaaaaa

SEQ ID NO: 252800 - DNA, 13 bp, Artificial Sequence
  Oligonucleotide for detection of SNP TSC0061672
tttttacatttat

SEQ ID NO: 252801 - DNA, 13 bp, Artificial Sequence
  Oligonucleotide for detection of SNP TSC0061673
tggggtatatttg

SEQ ID NO: 252802 - DNA, 13 bp, Artificial Sequence
  Oligonucleotide for detection of SNP TSC0061673
caaatatacccca

SEQ ID NO: 252803 - DNA, 13 bp, Artificial Sequence
  Oligonucleotide for detection of SNP TSC0061673
tggggtgtatttg

SEQ ID NO: 252804 - DNA, 13 bp, Artificial Sequence
  Oligonucleotide for detection of SNP TSC0061673
caaatacacccca

SEQ ID NO: 252805 - DNA, 13 bp, Artificial Sequence
  Oligonucleotide for detection of SNP TSC0061674
tgtggttgtaagg

SEQ ID NO: 252806 - DNA, 13 bp, Artificial Sequence
  Oligonucleotide for detection of SNP TSC0061674
ccttacaaccaca

SEQ ID NO: 252807 - DNA, 13 bp, Artificial Sequence
  Oligonucleotide for detection of SNP TSC0061674
tgtggtcgtaagg

SEQ ID NO: 252808 - DNA, 13 bp, Artificial Sequence
  Oligonucleotide for detection of SNP TSC0061674
ccttacgaccaca

SEQ ID NO: 252809 - DNA, 13 bp, Artificial Sequence
  Oligonucleotide for detection of SNP TSC0061675
tttatataagatt

SEQ ID NO: 252810 - DNA, 13 bp, Artificial Sequence
  Oligonucleotide for detection of SNP TSC0061675
aatcttatataaa

SEQ ID NO: 252811 - DNA, 13 bp, Artificial Sequence
  Oligonucleotide for detection of SNP TSC0061675
tttatagaagatt

SEQ ID NO: 252812 - DNA, 13 bp, Artificial Sequence
  Oligonucleotide for detection of SNP TSC0061675
aatcttctataaa

SEQ ID NO: 252813 - DNA, 13 bp, Artificial Sequence
  Oligonucleotide for detection of SNP TSC0061675
aattttatatgga

SEQ ID NO: 252814 - DNA, 13 bp, Artificial Sequence
  Oligonucleotide for detection of SNP TSC0061675
tccatataaaatt

SEQ ID NO: 252815 - DNA, 13 bp, Artificial Sequence
  Oligonucleotide for detection of SNP TSC0061675
aattttttatgga

SEQ ID NO: 252816 - DNA, 13 bp, Artificial Sequence
  Oligonucleotide for detection of SNP TSC0061675
tccataaaaaatt

SEQ ID NO: 252817 - DNA, 13 bp, Artificial Sequence
  Oligonucleotide for detection of SNP TSC0061678
aagaatataagty

SEQ ID NO: 252818 - DNA, 13 bp, Artificial Sequence
  Oligonucleotide for detection of SNP TSC0061678
racttatattctt

SEQ ID NO: 252819 - DNA, 13 bp, Artificial Sequence
  Oligonucleotide for detection of SNP TSC0061678
aagaatgtaagty

SEQ ID NO: 252820 - DNA, 13 bp, Artificial Sequence
  Oligonucleotide for detection of SNP TSC0061678
racttacattctt

SEQ ID NO: 252821 - DNA, 13 bp, Artificial Sequence
  Oligonucleotide for detection of SNP TSC0061678
aagaacgtaagty

SEQ ID NO: 252822 - DNA, 13 bp, Artificial Sequence
  Oligonucleotide for detection of SNP TSC0061678
racttacgttctt

SEQ ID NO: 252823 - DNA, 13 bp, Artificial Sequence
  Oligonucleotide for detection of SNP TSC0061678
ggtttgtgttttt

SEQ ID NO: 252824 - DNA, 13 bp, Artificial Sequence
  Oligonucleotide for detection of SNP TSC0061678
aaaaacacaaacc

SEQ ID NO: 252825 - DNA, 13 bp, Artificial Sequence
  Oligonucleotide for detection of SNP TSC0061678
ggtttgcgttttt

SEQ ID NO: 252826 - DNA, 13 bp, Artificial Sequence
  Oligonucleotide for detection of SNP TSC0061678
aaaaacgcaaacc

SEQ ID NO: 252827 - DNA, 13 bp, Artificial Sequence
  Oligonucleotide for detection of SNP TSC0061679
ttagataatttat

SEQ ID NO: 252828 - DNA, 13 bp, Artificial Sequence
  Oligonucleotide for detection of SNP TSC0061679
ataaattatctaa

SEQ ID NO: 252829 - DNA, 13 bp, Artificial Sequence
  Oligonucleotide for detection of SNP TSC0061679
ttagattatttat

SEQ ID NO: 252830 - DNA, 13 bp, Artificial Sequence
  Oligonucleotide for detection of SNP TSC0061679
ataaataatctaa

SEQ ID NO: 252831 - DNA, 13 bp, Artificial Sequence
  Oligonucleotide for detection of SNP TSC0061679
atgagttatttag

SEQ ID NO: 252832 - DNA, 13 bp, Artificial Sequence
  Oligonucleotide for detection of SNP TSC0061679
ctaaataactcat

SEQ ID NO: 252833 - DNA, 13 bp, Artificial Sequence
  Oligonucleotide for detection of SNP TSC0061679
atgagtgatttag

SEQ ID NO: 252834 - DNA, 13 bp, Artificial Sequence
  Oligonucleotide for detection of SNP TSC0061679
ctaaatcactcat

SEQ ID NO: 252835 - DNA, 13 bp, Artificial Sequence
  Oligonucleotide for detection of SNP TSC0061680
atgagtgatatta

SEQ ID NO: 252836 - DNA, 13 bp, Artificial Sequence
  Oligonucleotide for detection of SNP TSC0061680
taatatcactcat

SEQ ID NO: 252837 - DNA, 13 bp, Artificial Sequence
  Oligonucleotide for detection of SNP TSC0061680
atgagtaatatta

SEQ ID NO: 252838 - DNA, 13 bp, Artificial Sequence
  Oligonucleotide for detection of SNP TSC0061680
taatattactcat

SEQ ID NO: 252839 - DNA, 13 bp, Artificial Sequence
  Oligonucleotide for detection of SNP TSC0061681
gttttgtgttgay

SEQ ID NO: 252840 - DNA, 13 bp, Artificial Sequence
  Oligonucleotide for detection of SNP TSC0061681
rtcaacacaaaac

SEQ ID NO: 252841 - DNA, 13 bp, Artificial Sequence
  Oligonucleotide for detection of SNP TSC0061681
gttttgggttgay

SEQ ID NO: 252842 - DNA, 13 bp, Artificial Sequence
  Oligonucleotide for detection of SNP TSC0061681
rtcaacccaaaac

SEQ ID NO: 252843 - DNA, 13 bp, Artificial Sequence
  Oligonucleotide for detection of SNP TSC0061681
gttagtatagggy

SEQ ID NO: 252844 - DNA, 13 bp, Artificial Sequence
  Oligonucleotide for detection of SNP TSC0061681
rccctatactaac

SEQ ID NO: 252845 - DNA, 13 bp, Artificial Sequence
  Oligonucleotide for detection of SNP TSC0061681
gttagtttagggy

SEQ ID NO: 252846 - DNA, 13 bp, Artificial Sequence
  Oligonucleotide for detection of SNP TSC0061681
rccctaaactaac

SEQ ID NO: 252847 - DNA, 13 bp, Artificial Sequence
  Oligonucleotide for detection of SNP TSC0061682
attaacgttataa

SEQ ID NO: 252848 - DNA, 13 bp, Artificial Sequence
  Oligonucleotide for detection of SNP TSC0061682
ttataacgttaat

SEQ ID NO: 252849 - DNA, 13 bp, Artificial Sequence
  Oligonucleotide for detection of SNP TSC0061682
ttatgatgttgat

SEQ ID NO: 252850 - DNA, 13 bp, Artificial Sequence
  Oligonucleotide for detection of SNP TSC0061682
atcaacatcataa

SEQ ID NO: 252851 - DNA, 13 bp, Artificial Sequence
  Oligonucleotide for detection of SNP TSC0061682
ttatgacgttgat

SEQ ID NO: 252852 - DNA, 13 bp, Artificial Sequence
  Oligonucleotide for detection of SNP TSC0061682
atcaacgtcataa

SEQ ID NO: 252853 - DNA, 13 bp, Artificial Sequence
  Oligonucleotide for detection of SNP TSC0061683
agtataaagttaa

SEQ ID NO: 252854 - DNA, 13 bp, Artificial Sequence
  Oligonucleotide for detection of SNP TSC0061683
ttaactttatact

SEQ ID NO: 252855 - DNA, 13 bp, Artificial Sequence
  Oligonucleotide for detection of SNP TSC0061683
agtatagagttaa

SEQ ID NO: 252856 - DNA, 13 bp, Artificial Sequence
  Oligonucleotide for detection of SNP TSC0061683
ttaactctatact

SEQ ID NO: 252857 - DNA, 13 bp, Artificial Sequence
  Oligonucleotide for detection of SNP TSC0061684
aagagtatattta

SEQ ID NO: 252858 - DNA, 13 bp, Artificial Sequence
  Oligonucleotide for detection of SNP TSC0061684
taaatatactctt

SEQ ID NO: 252859 - DNA, 13 bp, Artificial Sequence
  Oligonucleotide for detection of SNP TSC0061684
aagagtttattta

SEQ ID NO: 252860 - DNA, 13 bp, Artificial Sequence
  Oligonucleotide for detection of SNP TSC0061684
taaataaactctt

SEQ ID NO: 252861 - DNA, 13 bp, Artificial Sequence
  Oligonucleotide for detection of SNP TSC0061684
tagataggttttt

SEQ ID NO: 252862 - DNA, 13 bp, Artificial Sequence
  Oligonucleotide for detection of SNP TSC0061684
aaaaacctatcta

SEQ ID NO: 252863 - DNA, 13 bp, Artificial Sequence
  Oligonucleotide for detection of SNP TSC0061685
gtgttttgttaat

SEQ ID NO: 252864 - DNA, 13 bp, Artificial Sequence
  Oligonucleotide for detection of SNP TSC0061685
attaacaaaacac

SEQ ID NO: 252865 - DNA, 13 bp, Artificial Sequence
  Oligonucleotide for detection of SNP TSC0061685
gtgtttggttaat

SEQ ID NO: 252866 - DNA, 13 bp, Artificial Sequence
  Oligonucleotide for detection of SNP TSC0061685
attaaccaaacac

SEQ ID NO: 252867 - DNA, 13 bp, Artificial Sequence
  Oligonucleotide for detection of SNP TSC0061685
gtgtttcgttaat

SEQ ID NO: 252868 - DNA, 13 bp, Artificial Sequence
  Oligonucleotide for detection of SNP TSC0061685
attaacgaaacac

SEQ ID NO: 252869 - DNA, 13 bp, Artificial Sequence
  Oligonucleotide for detection of SNP TSC0061685
gtgttcggttaat

SEQ ID NO: 252870 - DNA, 13 bp, Artificial Sequence
  Oligonucleotide for detection of SNP TSC0061685
attaaccgaacac

SEQ ID NO: 252871 - DNA, 13 bp, Artificial Sequence
  Oligonucleotide for detection of SNP TSC0061685
attaatggagtay

SEQ ID NO: 252872 - DNA, 13 bp, Artificial Sequence
  Oligonucleotide for detection of SNP TSC0061685
rtactccattaat

SEQ ID NO: 252873 - DNA, 13 bp, Artificial Sequence
  Oligonucleotide for detection of SNP TSC0061685
attaattgagtay

SEQ ID NO: 252874 - DNA, 13 bp, Artificial Sequence
  Oligonucleotide for detection of SNP TSC0061685
rtactcaattaat

SEQ ID NO: 252875 - DNA, 13 bp, Artificial Sequence
  Oligonucleotide for detection of SNP TSC0061685
attaacggagtay

SEQ ID NO: 252876 - DNA, 13 bp, Artificial Sequence
  Oligonucleotide for detection of SNP TSC0061685
rtactccgttaat

SEQ ID NO: 252877 - DNA, 13 bp, Artificial Sequence
  Oligonucleotide for detection of SNP TSC0061685
attaatcgagtay

SEQ ID NO: 252878 - DNA, 13 bp, Artificial Sequence
  Oligonucleotide for detection of SNP TSC0061685
rtactcgattaat

SEQ ID NO: 252879 - DNA, 13 bp, Artificial Sequence
  Oligonucleotide for detection of SNP TSC0061686
gttattaggtttt

SEQ ID NO: 252880 - DNA, 13 bp, Artificial Sequence
  Oligonucleotide for detection of SNP TSC0061686
aaaacctaataac

SEQ ID NO: 252881 - DNA, 13 bp, Artificial Sequence
  Oligonucleotide for detection of SNP TSC0061686
gttattgggtttt

SEQ ID NO: 252882 - DNA, 13 bp, Artificial Sequence
  Oligonucleotide for detection of SNP TSC0061686
aaaacccaataac

SEQ ID NO: 252883 - DNA, 13 bp, Artificial Sequence
  Oligonucleotide for detection of SNP TSC0061686
gttatcgggtttt

SEQ ID NO: 252884 - DNA, 13 bp, Artificial Sequence
  Oligonucleotide for detection of SNP TSC0061686
aaaacccgataac

SEQ ID NO: 252885 - DNA, 13 bp, Artificial Sequence
  Oligonucleotide for detection of SNP TSC0061686
agaatttggtagy

SEQ ID NO: 252886 - DNA, 13 bp, Artificial Sequence
  Oligonucleotide for detection of SNP TSC0061686
rctaccaaattct

SEQ ID NO: 252887 - DNA, 13 bp, Artificial Sequence
  Oligonucleotide for detection of SNP TSC0061686
agaattcggtagy

SEQ ID NO: 252888 - DNA, 13 bp, Artificial Sequence
  Oligonucleotide for detection of SNP TSC0061686
rctaccgaattct

SEQ ID NO: 252889 - DNA, 13 bp, Artificial Sequence
  Oligonucleotide for detection of SNP TSC0061687
tagattaagattt

SEQ ID NO: 252890 - DNA, 13 bp, Artificial Sequence
  Oligonucleotide for detection of SNP TSC0061687
aaatcttaatcta

SEQ ID NO: 252891 - DNA, 13 bp, Artificial Sequence
  Oligonucleotide for detection of SNP TSC0061687
tagattgagattt

SEQ ID NO: 252892 - DNA, 13 bp, Artificial Sequence
  Oligonucleotide for detection of SNP TSC0061687
aaatctcaatcta

SEQ ID NO: 252893 - DNA, 13 bp, Artificial Sequence
  Oligonucleotide for detection of SNP TSC0061688
ggaattatatgtt

SEQ ID NO: 252894 - DNA, 13 bp, Artificial Sequence
  Oligonucleotide for detection of SNP TSC0061688
aacatataattcc

SEQ ID NO: 252895 - DNA, 13 bp, Artificial Sequence
  Oligonucleotide for detection of SNP TSC0061688
ggaattgtatgtt

SEQ ID NO: 252896 - DNA, 13 bp, Artificial Sequence
  Oligonucleotide for detection of SNP TSC0061688
aacatacaattcc

SEQ ID NO: 252897 - DNA, 13 bp, Artificial Sequence
  Oligonucleotide for detection of SNP TSC0061688
ggaatcgtatgtt

SEQ ID NO: 252898 - DNA, 13 bp, Artificial Sequence
  Oligonucleotide for detection of SNP TSC0061688
aacatacgattcc

SEQ ID NO: 252899 - DNA, 13 bp, Artificial Sequence
  Oligonucleotide for detection of SNP TSC0061688
aatatgtggttty

SEQ ID NO: 252900 - DNA, 13 bp, Artificial Sequence
  Oligonucleotide for detection of SNP TSC0061688
raaaccacatatt

SEQ ID NO: 252901 - DNA, 13 bp, Artificial Sequence
  Oligonucleotide for detection of SNP TSC0061688
aatatgcggttty

SEQ ID NO: 252902 - DNA, 13 bp, Artificial Sequence
  Oligonucleotide for detection of SNP TSC0061688
raaaccgcatatt

SEQ ID NO: 252903 - DNA, 13 bp, Artificial Sequence
  Oligonucleotide for detection of SNP TSC0061690
attttaaggatgy

SEQ ID NO: 252904 - DNA, 13 bp, Artificial Sequence
  Oligonucleotide for detection of SNP TSC0061690
rcatccttaaaat

SEQ ID NO: 252905 - DNA, 13 bp, Artificial Sequence
  Oligonucleotide for detection of SNP TSC0061690
attttagggatgy

SEQ ID NO: 252906 - DNA, 13 bp, Artificial Sequence
  Oligonucleotide for detection of SNP TSC0061690
rcatccctaaaat

SEQ ID NO: 252907 - DNA, 13 bp, Artificial Sequence
  Oligonucleotide for detection of SNP TSC0061691
ttattaagagtay

SEQ ID NO: 252908 - DNA, 13 bp, Artificial Sequence
  Oligonucleotide for detection of SNP TSC0061691
rtactcttaataa

SEQ ID NO: 252909 - DNA, 13 bp, Artificial Sequence
  Oligonucleotide for detection of SNP TSC0061691
ttattaggagtay

SEQ ID NO: 252910 - DNA, 13 bp, Artificial Sequence
  Oligonucleotide for detection of SNP TSC0061691
rtactcctaataa

SEQ ID NO: 252911 - DNA, 13 bp, Artificial Sequence
  Oligonucleotide for detection of SNP TSC0061692
tgggggattgagg

SEQ ID NO: 252912 - DNA, 13 bp, Artificial Sequence
  Oligonucleotide for detection of SNP TSC0061692
cctcaatccccca

SEQ ID NO: 252913 - DNA, 13 bp, Artificial Sequence
  Oligonucleotide for detection of SNP TSC0061692
tggggggttgagg

SEQ ID NO: 252914 - DNA, 13 bp, Artificial Sequence
  Oligonucleotide for detection of SNP TSC0061692
cctcaacccccca

SEQ ID NO: 252915 - DNA, 13 bp, Artificial Sequence
  Oligonucleotide for detection of SNP TSC0061695
ttttgttggaaga

SEQ ID NO: 252916 - DNA, 13 bp, Artificial Sequence
  Oligonucleotide for detection of SNP TSC0061695
tcttccaacaaaa

SEQ ID NO: 252917 - DNA, 13 bp, Artificial Sequence
  Oligonucleotide for detection of SNP TSC0061695
ttttgtgggaaga

SEQ ID NO: 252918 - DNA, 13 bp, Artificial Sequence
  Oligonucleotide for detection of SNP TSC0061695
tcttcccacaaaa

SEQ ID NO: 252919 - DNA, 13 bp, Artificial Sequence
  Oligonucleotide for detection of SNP TSC0009905
tatgtttgtaaty

SEQ ID NO: 252920 - DNA, 13 bp, Artificial Sequence
  Oligonucleotide for detection of SNP TSC0009905
rattacaaacata

SEQ ID NO: 252921 - DNA, 13 bp, Artificial Sequence
  Oligonucleotide for detection of SNP TSC0009905
tacgtttgtaaty

SEQ ID NO: 252922 - DNA, 13 bp, Artificial Sequence
  Oligonucleotide for detection of SNP TSC0009905
rattacaaacgta

SEQ ID NO: 252923 - DNA, 13 bp, Artificial Sequence
  Oligonucleotide for detection of SNP TSC0009905
tacgttggtaaty

SEQ ID NO: 252924 - DNA, 13 bp, Artificial Sequence
  Oligonucleotide for detection of SNP TSC0009905
rattaccaacgta

SEQ ID NO: 252925 - DNA, 13 bp, Artificial Sequence
  Oligonucleotide for detection of SNP TSC0009905
tacgtcggtaaty

SEQ ID NO: 252926 - DNA, 13 bp, Artificial Sequence
  Oligonucleotide for detection of SNP TSC0009905
rattaccgacgta

SEQ ID NO: 252927 - DNA, 13 bp, Artificial Sequence
  Oligonucleotide for detection of SNP TSC0009905
gattattggtgtg

SEQ ID NO: 252928 - DNA, 13 bp, Artificial Sequence
  Oligonucleotide for detection of SNP TSC0009905
cacaccaataatc

SEQ ID NO: 252929 - DNA, 13 bp, Artificial Sequence
  Oligonucleotide for detection of SNP TSC0009905
gattataggcgtg

SEQ ID NO: 252930 - DNA, 13 bp, Artificial Sequence
  Oligonucleotide for detection of SNP TSC0009905
cacgcctataatc

SEQ ID NO: 252931 - DNA, 13 bp, Artificial Sequence
  Oligonucleotide for detection of SNP TSC0009905
gattatcggtgtg

SEQ ID NO: 252932 - DNA, 13 bp, Artificial Sequence
  Oligonucleotide for detection of SNP TSC0009905
cacaccgataatc

SEQ ID NO: 252933 - DNA, 13 bp, Artificial Sequence
  Oligonucleotide for detection of SNP TSC0009905
gattattggcgtg

SEQ ID NO: 252934 - DNA, 13 bp, Artificial Sequence
  Oligonucleotide for detection of SNP TSC0009905
cacgccaataatc

SEQ ID NO: 252935 - DNA, 13 bp, Artificial Sequence
  Oligonucleotide for detection of SNP TSC0009905
gattatcggcgtg

SEQ ID NO: 252936 - DNA, 13 bp, Artificial Sequence
  Oligonucleotide for detection of SNP TSC0009905
cacgccgataatc

SEQ ID NO: 252937 - DNA, 13 bp, Artificial Sequence
  Oligonucleotide for detection of SNP TSC0061696
tgttgatggtgtt

SEQ ID NO: 252938 - DNA, 13 bp, Artificial Sequence
  Oligonucleotide for detection of SNP TSC0061696
aacaccatcaaca

SEQ ID NO: 252939 - DNA, 13 bp, Artificial Sequence
  Oligonucleotide for detection of SNP TSC0061696
tgttgacggtgtt

SEQ ID NO: 252940 - DNA, 13 bp, Artificial Sequence
  Oligonucleotide for detection of SNP TSC0061696
aacaccgtcaaca

SEQ ID NO: 252941 - DNA, 13 bp, Artificial Sequence
  Oligonucleotide for detection of SNP TSC0061696
agtattgttaata

SEQ ID NO: 252942 - DNA, 13 bp, Artificial Sequence
  Oligonucleotide for detection of SNP TSC0061696
tattaacaatact

SEQ ID NO: 252943 - DNA, 13 bp, Artificial Sequence
  Oligonucleotide for detection of SNP TSC0061696
agtattattaata

SEQ ID NO: 252944 - DNA, 13 bp, Artificial Sequence
  Oligonucleotide for detection of SNP TSC0061696
tattaataatact

SEQ ID NO: 252945 - DNA, 13 bp, Artificial Sequence
  Oligonucleotide for detection of SNP TSC0061696
agtatcgttaata

SEQ ID NO: 252946 - DNA, 13 bp, Artificial Sequence
  Oligonucleotide for detection of SNP TSC0061696
tattaacgatact

SEQ ID NO: 252947 - DNA, 13 bp, Artificial Sequence
  Oligonucleotide for detection of SNP TSC0061697
gtttgtataggaa

SEQ ID NO: 252948 - DNA, 13 bp, Artificial Sequence
  Oligonucleotide for detection of SNP TSC0061697
ttcctatacaaac

SEQ ID NO: 252949 - DNA, 13 bp, Artificial Sequence
  Oligonucleotide for detection of SNP TSC0061697
gtttgtgtaggaa

SEQ ID NO: 252950 - DNA, 13 bp, Artificial Sequence
  Oligonucleotide for detection of SNP TSC0061697
ttcctacacaaac

SEQ ID NO: 252951 - DNA, 13 bp, Artificial Sequence
  Oligonucleotide for detection of SNP TSC0061698
aaaaatgtaattt

SEQ ID NO: 252952 - DNA, 13 bp, Artificial Sequence
  Oligonucleotide for detection of SNP TSC0061698
aaattacattttt

SEQ ID NO: 252953 - DNA, 13 bp, Artificial Sequence
  Oligonucleotide for detection of SNP TSC0061700
tataagtttttaa

SEQ ID NO: 252954 - DNA, 13 bp, Artificial Sequence
  Oligonucleotide for detection of SNP TSC0061700
ttaaaaacttata

SEQ ID NO: 252955 - DNA, 13 bp, Artificial Sequence
  Oligonucleotide for detection of SNP TSC0061700
tataaggttttaa

SEQ ID NO: 252956 - DNA, 13 bp, Artificial Sequence
  Oligonucleotide for detection of SNP TSC0061700
ttaaaaccttata

SEQ ID NO: 252957 - DNA, 13 bp, Artificial Sequence
  Oligonucleotide for detection of SNP TSC0061700
ttagaggtttatg

SEQ ID NO: 252958 - DNA, 13 bp, Artificial Sequence
  Oligonucleotide for detection of SNP TSC0061700
cataaacctctaa

SEQ ID NO: 252959 - DNA, 13 bp, Artificial Sequence
  Oligonucleotide for detection of SNP TSC0061700
ttagagttttatg

SEQ ID NO: 252960 - DNA, 13 bp, Artificial Sequence
  Oligonucleotide for detection of SNP TSC0061700
cataaaactctaa

SEQ ID NO: 252961 - DNA, 13 bp, Artificial Sequence
  Oligonucleotide for detection of SNP TSC0061701
aaagatattagta

SEQ ID NO: 252962 - DNA, 13 bp, Artificial Sequence
  Oligonucleotide for detection of SNP TSC0061701
tactaatatcttt

SEQ ID NO: 252963 - DNA, 13 bp, Artificial Sequence
  Oligonucleotide for detection of SNP TSC0061701
aaagattttagta

SEQ ID NO: 252964 - DNA, 13 bp, Artificial Sequence
  Oligonucleotide for detection of SNP TSC0061701
tactaaaatcttt

SEQ ID NO: 252965 - DNA, 13 bp, Artificial Sequence
  Oligonucleotide for detection of SNP TSC0061701
tgttggtgttttt

SEQ ID NO: 252966 - DNA, 13 bp, Artificial Sequence
  Oligonucleotide for detection of SNP TSC0061701
aaaaacaccaaca

SEQ ID NO: 252967 - DNA, 13 bp, Artificial Sequence
  Oligonucleotide for detection of SNP TSC0061701
tgttggggttttt

SEQ ID NO: 252968 - DNA, 13 bp, Artificial Sequence
  Oligonucleotide for detection of SNP TSC0061701
aaaaaccccaaca

SEQ ID NO: 252969 - DNA, 13 bp, Artificial Sequence
  Oligonucleotide for detection of SNP TSC0061702
aaagggaataagg

SEQ ID NO: 252970 - DNA, 13 bp, Artificial Sequence
  Oligonucleotide for detection of SNP TSC0061702
ccttattcccttt

SEQ ID NO: 252971 - DNA, 13 bp, Artificial Sequence
  Oligonucleotide for detection of SNP TSC0061702
aaaggggataagg

SEQ ID NO: 252972 - DNA, 13 bp, Artificial Sequence
  Oligonucleotide for detection of SNP TSC0061702
ccttatccccttt

SEQ ID NO: 252973 - DNA, 13 bp, Artificial Sequence
  Oligonucleotide for detection of SNP TSC0005786
aatattgtggggg

SEQ ID NO: 252974 - DNA, 13 bp, Artificial Sequence
  Oligonucleotide for detection of SNP TSC0005786
cccccacaatatt

SEQ ID NO: 252975 - DNA, 13 bp, Artificial Sequence
  Oligonucleotide for detection of SNP TSC0005786
aatattatggggg

SEQ ID NO: 252976 - DNA, 13 bp, Artificial Sequence
  Oligonucleotide for detection of SNP TSC0005786
cccccataatatt

SEQ ID NO: 252977 - DNA, 13 bp, Artificial Sequence
  Oligonucleotide for detection of SNP TSC0005787
attttttatgatt

SEQ ID NO: 252978 - DNA, 13 bp, Artificial Sequence
  Oligonucleotide for detection of SNP TSC0005787
aatcataaaaaat

SEQ ID NO: 252979 - DNA, 13 bp, Artificial Sequence
  Oligonucleotide for detection of SNP TSC0005787
atttttaacgatt

SEQ ID NO: 252980 - DNA, 13 bp, Artificial Sequence
  Oligonucleotide for detection of SNP TSC0005787
aatcgttaaaaat

SEQ ID NO: 252981 - DNA, 13 bp, Artificial Sequence
  Oligonucleotide for detection of SNP TSC0005787
attttttacgatt

SEQ ID NO: 252982 - DNA, 13 bp, Artificial Sequence
  Oligonucleotide for detection of SNP TSC0005787
aatcgtaaaaaat

SEQ ID NO: 252983 - DNA, 13 bp, Artificial Sequence
  Oligonucleotide for detection of SNP TSC0005787
agttgttaaaaat

SEQ ID NO: 252984 - DNA, 13 bp, Artificial Sequence
  Oligonucleotide for detection of SNP TSC0005787
atttttaacaact

SEQ ID NO: 252985 - DNA, 13 bp, Artificial Sequence
  Oligonucleotide for detection of SNP TSC0005787
agttgtgaaaaat

SEQ ID NO: 252986 - DNA, 13 bp, Artificial Sequence
  Oligonucleotide for detection of SNP TSC0005787
atttttcacaact

SEQ ID NO: 252987 - DNA, 13 bp, Artificial Sequence
  Oligonucleotide for detection of SNP TSC0005787
agtcgttaaaaat

SEQ ID NO: 252988 - DNA, 13 bp, Artificial Sequence
  Oligonucleotide for detection of SNP TSC0005787
atttttaacgact

SEQ ID NO: 252989 - DNA, 13 bp, Artificial Sequence
  Oligonucleotide for detection of SNP TSC0005787
agtcgtgaaaaat

SEQ ID NO: 252990 - DNA, 13 bp, Artificial Sequence
  Oligonucleotide for detection of SNP TSC0005787
atttttcacgact

SEQ ID NO: 252991 - DNA, 13 bp, Artificial Sequence
  Oligonucleotide for detection of SNP TSC0008155
tgggtgtggatay

SEQ ID NO: 252992 - DNA, 13 bp, Artificial Sequence
  Oligonucleotide for detection of SNP TSC0008155
rtatccacaccca

SEQ ID NO: 252993 - DNA, 13 bp, Artificial Sequence
  Oligonucleotide for detection of SNP TSC0008155
tgggtggggatay

SEQ ID NO: 252994 - DNA, 13 bp, Artificial Sequence
  Oligonucleotide for detection of SNP TSC0008155
rtatccccaccca

SEQ ID NO: 252995 - DNA, 13 bp, Artificial Sequence
  Oligonucleotide for detection of SNP TSC0008155
gtgtttatattta

SEQ ID NO: 252996 - DNA, 13 bp, Artificial Sequence
  Oligonucleotide for detection of SNP TSC0008155
taaatataaacac

SEQ ID NO: 252997 - DNA, 13 bp, Artificial Sequence
  Oligonucleotide for detection of SNP TSC0008155
gtgtttttattta

SEQ ID NO: 252998 - DNA, 13 bp, Artificial Sequence
  Oligonucleotide for detection of SNP TSC0008155
taaataaaaacac

SEQ ID NO: 252999 - DNA, 13 bp, Artificial Sequence
  Oligonucleotide for detection of SNP TSC0061703
tttaaataaagty

SEQ ID NO: 253000 - DNA, 13 bp, Artificial Sequence
  Oligonucleotide for detection of SNP TSC0061703
ractttatttaaa

SEQ ID NO: 253001 - DNA, 13 bp, Artificial Sequence
  Oligonucleotide for detection of SNP TSC0061703
tttaaagaaagty

SEQ ID NO: 253002 - DNA, 13 bp, Artificial Sequence
  Oligonucleotide for detection of SNP TSC0061703
ractttctttaaa

SEQ ID NO: 253003 - DNA, 13 bp, Artificial Sequence
  Oligonucleotide for detection of SNP TSC0061703
ggttttgtttaga

SEQ ID NO: 253004 - DNA, 13 bp, Artificial Sequence
  Oligonucleotide for detection of SNP TSC0061703
tctaaacaaaacc

SEQ ID NO: 253005 - DNA, 13 bp, Artificial Sequence
  Oligonucleotide for detection of SNP TSC0061703
ggttttttttaga

SEQ ID NO: 253006 - DNA, 13 bp, Artificial Sequence
  Oligonucleotide for detection of SNP TSC0061703
tctaaaaaaaacc

SEQ ID NO: 253007 - DNA, 13 bp, Artificial Sequence
  Oligonucleotide for detection of SNP TSC0061704
atttcgattgtat

SEQ ID NO: 253008 - DNA, 13 bp, Artificial Sequence
  Oligonucleotide for detection of SNP TSC0061704
atacaatcgaaat

SEQ ID NO: 253009 - DNA, 13 bp, Artificial Sequence
  Oligonucleotide for detection of SNP TSC0061704
atttcgtttgtat

SEQ ID NO: 253010 - DNA, 13 bp, Artificial Sequence
  Oligonucleotide for detection of SNP TSC0061704
atacaaacgaaat

SEQ ID NO: 253011 - DNA, 13 bp, Artificial Sequence
  Oligonucleotide for detection of SNP TSC0061704
atatagttgaagt

SEQ ID NO: 253012 - DNA, 13 bp, Artificial Sequence
  Oligonucleotide for detection of SNP TSC0061704
acttcaactatat

SEQ ID NO: 253013 - DNA, 13 bp, Artificial Sequence
  Oligonucleotide for detection of SNP TSC0061704
atatagatgaagt

SEQ ID NO: 253014 - DNA, 13 bp, Artificial Sequence
  Oligonucleotide for detection of SNP TSC0061704
acttcatctatat

SEQ ID NO: 253015 - DNA, 13 bp, Artificial Sequence
  Oligonucleotide for detection of SNP TSC0061704
atatagtcgaagt

SEQ ID NO: 253016 - DNA, 13 bp, Artificial Sequence
  Oligonucleotide for detection of SNP TSC0061704
acttcgactatat

SEQ ID NO: 253017 - DNA, 13 bp, Artificial Sequence
  Oligonucleotide for detection of SNP TSC0061704
atatagacgaagt

SEQ ID NO: 253018 - DNA, 13 bp, Artificial Sequence
  Oligonucleotide for detection of SNP TSC0061704
acttcgtctatat

SEQ ID NO: 253019 - DNA, 13 bp, Artificial Sequence
  Oligonucleotide for detection of SNP TSC0061705
tatttatatttga

SEQ ID NO: 253020 - DNA, 13 bp, Artificial Sequence
  Oligonucleotide for detection of SNP TSC0061705
tcaaatataaata

SEQ ID NO: 253021 - DNA, 13 bp, Artificial Sequence
  Oligonucleotide for detection of SNP TSC0061705
tatttagatttga

SEQ ID NO: 253022 - DNA, 13 bp, Artificial Sequence
  Oligonucleotide for detection of SNP TSC0061705
tcaaatctaaata

SEQ ID NO: 253023 - DNA, 13 bp, Artificial Sequence
  Oligonucleotide for detection of SNP TSC0061705
ttaaatataaatg

SEQ ID NO: 253024 - DNA, 13 bp, Artificial Sequence
  Oligonucleotide for detection of SNP TSC0061705
catttatatttaa

SEQ ID NO: 253025 - DNA, 13 bp, Artificial Sequence
  Oligonucleotide for detection of SNP TSC0061705
ttaaatttaaatg

SEQ ID NO: 253026 - DNA, 13 bp, Artificial Sequence
  Oligonucleotide for detection of SNP TSC0061705
catttaaatttaa

SEQ ID NO: 253027 - DNA, 13 bp, Artificial Sequence
  Oligonucleotide for detection of SNP TSC0061706
agatatatataaa

SEQ ID NO: 253028 - DNA, 13 bp, Artificial Sequence
  Oligonucleotide for detection of SNP TSC0061706
tttatatatatct

SEQ ID NO: 253029 - DNA, 13 bp, Artificial Sequence
  Oligonucleotide for detection of SNP TSC0061706
agatatgtataaa

SEQ ID NO: 253030 - DNA, 13 bp, Artificial Sequence
  Oligonucleotide for detection of SNP TSC0061706
tttatacatatct

SEQ ID NO: 253031 - DNA, 13 bp, Artificial Sequence
  Oligonucleotide for detection of SNP TSC0061706
agatacgtataaa

SEQ ID NO: 253032 - DNA, 13 bp, Artificial Sequence
  Oligonucleotide for detection of SNP TSC0061706
tttatacgtatct

SEQ ID NO: 253033 - DNA, 13 bp, Artificial Sequence
  Oligonucleotide for detection of SNP TSC0061707
gtagataggggta

SEQ ID NO: 253034 - DNA, 13 bp, Artificial Sequence
  Oligonucleotide for detection of SNP TSC0061707
tacccctatctac

SEQ ID NO: 253035 - DNA, 13 bp, Artificial Sequence
  Oligonucleotide for detection of SNP TSC0061707
gtagattggggta

SEQ ID NO: 253036 - DNA, 13 bp, Artificial Sequence
  Oligonucleotide for detection of SNP TSC0061707
taccccaatctac

SEQ ID NO: 253037 - DNA, 13 bp, Artificial Sequence
  Oligonucleotide for detection of SNP TSC0061707
tatttttgtttay

SEQ ID NO: 253038 - DNA, 13 bp, Artificial Sequence
  Oligonucleotide for detection of SNP TSC0061707
rtaaacaaaaata

SEQ ID NO: 253039 - DNA, 13 bp, Artificial Sequence
  Oligonucleotide for detection of SNP TSC0061707
tattttagtttay

SEQ ID NO: 253040 - DNA, 13 bp, Artificial Sequence
  Oligonucleotide for detection of SNP TSC0061707
rtaaactaaaata

SEQ ID NO: 253041 - DNA, 13 bp, Artificial Sequence
  Oligonucleotide for detection of SNP TSC0061708
ttaaataatttag

SEQ ID NO: 253042 - DNA, 13 bp, Artificial Sequence
  Oligonucleotide for detection of SNP TSC0061708
ctaaattatttaa

SEQ ID NO: 253043 - DNA, 13 bp, Artificial Sequence
  Oligonucleotide for detection of SNP TSC0061708
ttaaatgatttag

SEQ ID NO: 253044 - DNA, 13 bp, Artificial Sequence
  Oligonucleotide for detection of SNP TSC0061708
ctaaatcatttaa

SEQ ID NO: 253045 - DNA, 13 bp, Artificial Sequence
  Oligonucleotide for detection of SNP TSC0006570
ttttgtagtttgy

SEQ ID NO: 253046 - DNA, 13 bp, Artificial Sequence
  Oligonucleotide for detection of SNP TSC0006570
rcaaactacaaaa

SEQ ID NO: 253047 - DNA, 13 bp, Artificial Sequence
  Oligonucleotide for detection of SNP TSC0006570
ttttgtggtttgy

SEQ ID NO: 253048 - DNA, 13 bp, Artificial Sequence
  Oligonucleotide for detection of SNP TSC0006570
rcaaaccacaaaa

SEQ ID NO: 253049 - DNA, 13 bp, Artificial Sequence
  Oligonucleotide for detection of SNP TSC0006570
ttttgcggtttgy

SEQ ID NO: 253050 - DNA, 13 bp, Artificial Sequence
  Oligonucleotide for detection of SNP TSC0006570
rcaaaccgcaaaa

SEQ ID NO: 253051 - DNA, 13 bp, Artificial Sequence
  Oligonucleotide for detection of SNP TSC0006570
gtaaattgtaaaa

SEQ ID NO: 253052 - DNA, 13 bp, Artificial Sequence
  Oligonucleotide for detection of SNP TSC0006570
ttttacaatttac

SEQ ID NO: 253053 - DNA, 13 bp, Artificial Sequence
  Oligonucleotide for detection of SNP TSC0006570
gtaaatcgtaaaa

SEQ ID NO: 253054 - DNA, 13 bp, Artificial Sequence
  Oligonucleotide for detection of SNP TSC0006570
ttttacgatttac

SEQ ID NO: 253055 - DNA, 13 bp, Artificial Sequence
  Oligonucleotide for detection of SNP TSC0006571
agaataatatgta

SEQ ID NO: 253056 - DNA, 13 bp, Artificial Sequence
  Oligonucleotide for detection of SNP TSC0006571
tacatattattct

SEQ ID NO: 253057 - DNA, 13 bp, Artificial Sequence
  Oligonucleotide for detection of SNP TSC0006571
agaatagtatgta

SEQ ID NO: 253058 - DNA, 13 bp, Artificial Sequence
  Oligonucleotide for detection of SNP TSC0006571
tacatactattct

SEQ ID NO: 253059 - DNA, 13 bp, Artificial Sequence
  Oligonucleotide for detection of SNP TSC0061712
gaaaataagaatg

SEQ ID NO: 253060 - DNA, 13 bp, Artificial Sequence
  Oligonucleotide for detection of SNP TSC0061712
cattcttattttc

SEQ ID NO: 253061 - DNA, 13 bp, Artificial Sequence
  Oligonucleotide for detection of SNP TSC0061712
gaaaatgagaatg

SEQ ID NO: 253062 - DNA, 13 bp, Artificial Sequence
  Oligonucleotide for detection of SNP TSC0061712
cattctcattttc

SEQ ID NO: 253063 - DNA, 13 bp, Artificial Sequence
  Oligonucleotide for detection of SNP TSC0061712
gaaaacgagaatg

SEQ ID NO: 253064 - DNA, 13 bp, Artificial Sequence
  Oligonucleotide for detection of SNP TSC0061712
cattctcgttttc

SEQ ID NO: 253065 - DNA, 13 bp, Artificial Sequence
  Oligonucleotide for detection of SNP TSC0061715
gtatttttgaata

SEQ ID NO: 253066 - DNA, 13 bp, Artificial Sequence
  Oligonucleotide for detection of SNP TSC0061715
tattcaaaaatac

SEQ ID NO: 253067 - DNA, 13 bp, Artificial Sequence
  Oligonucleotide for detection of SNP TSC0061715
gtatttgtgaata

SEQ ID NO: 253068 - DNA, 13 bp, Artificial Sequence
  Oligonucleotide for detection of SNP TSC0061715
tattcacaaatac

SEQ ID NO: 253069 - DNA, 13 bp, Artificial Sequence
  Oligonucleotide for detection of SNP TSC0061715
gtattttcgaata

SEQ ID NO: 253070 - DNA, 13 bp, Artificial Sequence
  Oligonucleotide for detection of SNP TSC0061715
tattcgaaaatac

SEQ ID NO: 253071 - DNA, 13 bp, Artificial Sequence
  Oligonucleotide for detection of SNP TSC0061715
gtatttgcgaata

SEQ ID NO: 253072 - DNA, 13 bp, Artificial Sequence
  Oligonucleotide for detection of SNP TSC0061715
tattcgcaaatac

SEQ ID NO: 253073 - DNA, 13 bp, Artificial Sequence
  Oligonucleotide for detection of SNP TSC0061715
tgtttggaagtay

SEQ ID NO: 253074 - DNA, 13 bp, Artificial Sequence
  Oligonucleotide for detection of SNP TSC0061715
rtacttccaaaca

SEQ ID NO: 253075 - DNA, 13 bp, Artificial Sequence
  Oligonucleotide for detection of SNP TSC0061715
tgtttgtaagtay

SEQ ID NO: 253076 - DNA, 13 bp, Artificial Sequence
  Oligonucleotide for detection of SNP TSC0061715
rtacttacaaaca

SEQ ID NO: 253077 - DNA, 13 bp, Artificial Sequence
  Oligonucleotide for detection of SNP TSC0061715
tgttcggaagtay

SEQ ID NO: 253078 - DNA, 13 bp, Artificial Sequence
  Oligonucleotide for detection of SNP TSC0061715
rtacttccgaaca

SEQ ID NO: 253079 - DNA, 13 bp, Artificial Sequence
  Oligonucleotide for detection of SNP TSC0061715
tgttcgtaagtay

SEQ ID NO: 253080 - DNA, 13 bp, Artificial Sequence
  Oligonucleotide for detection of SNP TSC0061715
rtacttacgaaca

SEQ ID NO: 253081 - DNA, 13 bp, Artificial Sequence
  Oligonucleotide for detection of SNP TSC0061716
aagagtaaaggaa

SEQ ID NO: 253082 - DNA, 13 bp, Artificial Sequence
  Oligonucleotide for detection of SNP TSC0061716
ttcctttactctt

SEQ ID NO: 253083 - DNA, 13 bp, Artificial Sequence
  Oligonucleotide for detection of SNP TSC0061716
aagagttaaggaa

SEQ ID NO: 253084 - DNA, 13 bp, Artificial Sequence
  Oligonucleotide for detection of SNP TSC0061716
ttccttaactctt

SEQ ID NO: 253085 - DNA, 13 bp, Artificial Sequence
  Oligonucleotide for detection of SNP TSC0061717
tggttaagtgagy

SEQ ID NO: 253086 - DNA, 13 bp, Artificial Sequence
  Oligonucleotide for detection of SNP TSC0061717
rctcacttaacca

SEQ ID NO: 253087 - DNA, 13 bp, Artificial Sequence
  Oligonucleotide for detection of SNP TSC0061717
tggttaggtgagy

SEQ ID NO: 253088 - DNA, 13 bp, Artificial Sequence
  Oligonucleotide for detection of SNP TSC0061717
rctcacctaacca

SEQ ID NO: 253089 - DNA, 13 bp, Artificial Sequence
  Oligonucleotide for detection of SNP TSC0061718
aggatgaaagttg

SEQ ID NO: 253090 - DNA, 13 bp, Artificial Sequence
  Oligonucleotide for detection of SNP TSC0061718
caactttcatcct

SEQ ID NO: 253091 - DNA, 13 bp, Artificial Sequence
  Oligonucleotide for detection of SNP TSC0061718
aggatgtaagttg

SEQ ID NO: 253092 - DNA, 13 bp, Artificial Sequence
  Oligonucleotide for detection of SNP TSC0061718
caacttacatcct

SEQ ID NO: 253093 - DNA, 13 bp, Artificial Sequence
  Oligonucleotide for detection of SNP TSC0061720
tatattagtggty

SEQ ID NO: 253094 - DNA, 13 bp, Artificial Sequence
  Oligonucleotide for detection of SNP TSC0061720
raccactaatata

SEQ ID NO: 253095 - DNA, 13 bp, Artificial Sequence
  Oligonucleotide for detection of SNP TSC0061720
tatatttgtggty

SEQ ID NO: 253096 - DNA, 13 bp, Artificial Sequence
  Oligonucleotide for detection of SNP TSC0061720
raccacaaatata

SEQ ID NO: 253097 - DNA, 13 bp, Artificial Sequence
  Oligonucleotide for detection of SNP TSC0061720
tatattcgtggty

SEQ ID NO: 253098 - DNA, 13 bp, Artificial Sequence
  Oligonucleotide for detection of SNP TSC0061720
raccacgaatata

SEQ ID NO: 253099 - DNA, 13 bp, Artificial Sequence
  Oligonucleotide for detection of SNP TSC0061720
gattattgatgtg

SEQ ID NO: 253100 - DNA, 13 bp, Artificial Sequence
  Oligonucleotide for detection of SNP TSC0061720
cacatcaataatc

SEQ ID NO: 253101 - DNA, 13 bp, Artificial Sequence
  Oligonucleotide for detection of SNP TSC0061720
gattatggatgtg

SEQ ID NO: 253102 - DNA, 13 bp, Artificial Sequence
  Oligonucleotide for detection of SNP TSC0061720
cacatccataatc

SEQ ID NO: 253103 - DNA, 13 bp, Artificial Sequence
  Oligonucleotide for detection of SNP TSC0061720
gattatagatgtg

SEQ ID NO: 253104 - DNA, 13 bp, Artificial Sequence
  Oligonucleotide for detection of SNP TSC0061720
cacatctataatc

SEQ ID NO: 253105 - DNA, 13 bp, Artificial Sequence
  Oligonucleotide for detection of SNP TSC0061720
gattacggatgtg

SEQ ID NO: 253106 - DNA, 13 bp, Artificial Sequence
  Oligonucleotide for detection of SNP TSC0061720
cacatccgtaatc

SEQ ID NO: 253107 - DNA, 13 bp, Artificial Sequence
  Oligonucleotide for detection of SNP TSC0005804
aggtttgtatttt

SEQ ID NO: 253108 - DNA, 13 bp, Artificial Sequence
  Oligonucleotide for detection of SNP TSC0005804
aaaatacaaacct

SEQ ID NO: 253109 - DNA, 13 bp, Artificial Sequence
  Oligonucleotide for detection of SNP TSC0005804
aggtttatatttt

SEQ ID NO: 253110 - DNA, 13 bp, Artificial Sequence
  Oligonucleotide for detection of SNP TSC0005804
aaaatataaacct

SEQ ID NO: 253111 - DNA, 13 bp, Artificial Sequence
  Oligonucleotide for detection of SNP TSC0004607
agtttgggtaagt

SEQ ID NO: 253112 - DNA, 13 bp, Artificial Sequence
  Oligonucleotide for detection of SNP TSC0004607
acttacccaaact

SEQ ID NO: 253113 - DNA, 13 bp, Artificial Sequence
  Oligonucleotide for detection of SNP TSC0004607
agtttgagtaagt

SEQ ID NO: 253114 - DNA, 13 bp, Artificial Sequence
  Oligonucleotide for detection of SNP TSC0004607
acttactcaaact

SEQ ID NO: 253115 - DNA, 13 bp, Artificial Sequence
  Oligonucleotide for detection of SNP TSC0061721
agttttaaaatty

SEQ ID NO: 253116 - DNA, 13 bp, Artificial Sequence
  Oligonucleotide for detection of SNP TSC0061721
raattttaaaact

SEQ ID NO: 253117 - DNA, 13 bp, Artificial Sequence
  Oligonucleotide for detection of SNP TSC0061721
agtttttaaatty

SEQ ID NO: 253118 - DNA, 13 bp, Artificial Sequence
  Oligonucleotide for detection of SNP TSC0061721
raatttaaaaact

SEQ ID NO: 253119 - DNA, 13 bp, Artificial Sequence
  Oligonucleotide for detection of SNP TSC0061724
tttattgtaaaty

SEQ ID NO: 253120 - DNA, 13 bp, Artificial Sequence
  Oligonucleotide for detection of SNP TSC0061724
ratttacaataaa

SEQ ID NO: 253121 - DNA, 13 bp, Artificial Sequence
  Oligonucleotide for detection of SNP TSC0061724
tttattataaaty

SEQ ID NO: 253122 - DNA, 13 bp, Artificial Sequence
  Oligonucleotide for detection of SNP TSC0061724
ratttataataaa

SEQ ID NO: 253123 - DNA, 13 bp, Artificial Sequence
  Oligonucleotide for detection of SNP TSC0061725
agaattatgaaaa

SEQ ID NO: 253124 - DNA, 13 bp, Artificial Sequence
  Oligonucleotide for detection of SNP TSC0061725
ttttcataattct

SEQ ID NO: 253125 - DNA, 13 bp, Artificial Sequence
  Oligonucleotide for detection of SNP TSC0061725
agaattttgaaaa

SEQ ID NO: 253126 - DNA, 13 bp, Artificial Sequence
  Oligonucleotide for detection of SNP TSC0061725
ttttcaaaattct

SEQ ID NO: 253127 - DNA, 13 bp, Artificial Sequence
  Oligonucleotide for detection of SNP TSC0010727
aataagttgtatt

SEQ ID NO: 253128 - DNA, 13 bp, Artificial Sequence
  Oligonucleotide for detection of SNP TSC0010727
aatacaacttatt

SEQ ID NO: 253129 - DNA, 13 bp, Artificial Sequence
  Oligonucleotide for detection of SNP TSC0010727
aataaggtgtatt

SEQ ID NO: 253130 - DNA, 13 bp, Artificial Sequence
  Oligonucleotide for detection of SNP TSC0010727
aatacaccttatt

SEQ ID NO: 253131 - DNA, 13 bp, Artificial Sequence
  Oligonucleotide for detection of SNP TSC0010727
aatgtattttatt

SEQ ID NO: 253132 - DNA, 13 bp, Artificial Sequence
  Oligonucleotide for detection of SNP TSC0010727
aataaaatacatt

SEQ ID NO: 253133 - DNA, 13 bp, Artificial Sequence
  Oligonucleotide for detection of SNP TSC0061726
gaaggggaggtty

SEQ ID NO: 253134 - DNA, 13 bp, Artificial Sequence
  Oligonucleotide for detection of SNP TSC0061726
raacctccccttc

SEQ ID NO: 253135 - DNA, 13 bp, Artificial Sequence
  Oligonucleotide for detection of SNP TSC0061726
gaagggaaggtty

SEQ ID NO: 253136 - DNA, 13 bp, Artificial Sequence
  Oligonucleotide for detection of SNP TSC0061726
raaccttcccttc

SEQ ID NO: 253137 - DNA, 13 bp, Artificial Sequence
  Oligonucleotide for detection of SNP TSC0007932
tggggtttatagg

SEQ ID NO: 253138 - DNA, 13 bp, Artificial Sequence
  Oligonucleotide for detection of SNP TSC0007932
cctataaacccca

SEQ ID NO: 253139 - DNA, 13 bp, Artificial Sequence
  Oligonucleotide for detection of SNP TSC0007932
tggggtgtatagg

SEQ ID NO: 253140 - DNA, 13 bp, Artificial Sequence
  Oligonucleotide for detection of SNP TSC0007932
cctatacacccca

SEQ ID NO: 253141 - DNA, 13 bp, Artificial Sequence
  Oligonucleotide for detection of SNP TSC0007932
tttataaatttta

SEQ ID NO: 253142 - DNA, 13 bp, Artificial Sequence
  Oligonucleotide for detection of SNP TSC0007932
taaaatttataaa

SEQ ID NO: 253143 - DNA, 13 bp, Artificial Sequence
  Oligonucleotide for detection of SNP TSC0061728
tagtttcgatttt

SEQ ID NO: 253144 - DNA, 13 bp, Artificial Sequence
  Oligonucleotide for detection of SNP TSC0061728
aaaatcgaaacta

SEQ ID NO: 253145 - DNA, 13 bp, Artificial Sequence
  Oligonucleotide for detection of SNP TSC0061728
aagattgaaatta

SEQ ID NO: 253146 - DNA, 13 bp, Artificial Sequence
  Oligonucleotide for detection of SNP TSC0061728
taatttcaatctt

SEQ ID NO: 253147 - DNA, 13 bp, Artificial Sequence
  Oligonucleotide for detection of SNP TSC0061728
aagattaaaatta

SEQ ID NO: 253148 - DNA, 13 bp, Artificial Sequence
  Oligonucleotide for detection of SNP TSC0061728
taattttaatctt

SEQ ID NO: 253149 - DNA, 13 bp, Artificial Sequence
  Oligonucleotide for detection of SNP TSC0061728
aagatcgaaatta

SEQ ID NO: 253150 - DNA, 13 bp, Artificial Sequence
  Oligonucleotide for detection of SNP TSC0061728
taatttcgatctt

SEQ ID NO: 253151 - DNA, 13 bp, Artificial Sequence
  Oligonucleotide for detection of SNP TSC0000765
aaaatatgttata

SEQ ID NO: 253152 - DNA, 13 bp, Artificial Sequence
  Oligonucleotide for detection of SNP TSC0000765
tataacatatttt

SEQ ID NO: 253153 - DNA, 13 bp, Artificial Sequence
  Oligonucleotide for detection of SNP TSC0000765
aaaatacgttata

SEQ ID NO: 253154 - DNA, 13 bp, Artificial Sequence
  Oligonucleotide for detection of SNP TSC0000765
tataacgtatttt

SEQ ID NO: 253155 - DNA, 13 bp, Artificial Sequence
  Oligonucleotide for detection of SNP TSC0000765
tgtaatgtgtttt

SEQ ID NO: 253156 - DNA, 13 bp, Artificial Sequence
  Oligonucleotide for detection of SNP TSC0000765
aaaacacattaca

SEQ ID NO: 253157 - DNA, 13 bp, Artificial Sequence
  Oligonucleotide for detection of SNP TSC0000765
tgtaatatgtttt

SEQ ID NO: 253158 - DNA, 13 bp, Artificial Sequence
  Oligonucleotide for detection of SNP TSC0000765
aaaacatattaca

SEQ ID NO: 253159 - DNA, 13 bp, Artificial Sequence
  Oligonucleotide for detection of SNP TSC0000765
tgtaacgtgtttt

SEQ ID NO: 253160 - DNA, 13 bp, Artificial Sequence
  Oligonucleotide for detection of SNP TSC0000765
aaaacacgttaca

SEQ ID NO: 253161 - DNA, 13 bp, Artificial Sequence
  Oligonucleotide for detection of SNP TSC0061732
gtggaagtattgg

SEQ ID NO: 253162 - DNA, 13 bp, Artificial Sequence
  Oligonucleotide for detection of SNP TSC0061732
ccaatacttccac

SEQ ID NO: 253163 - DNA, 13 bp, Artificial Sequence
  Oligonucleotide for detection of SNP TSC0061732
gtggaaatattgg

SEQ ID NO: 253164 - DNA, 13 bp, Artificial Sequence
  Oligonucleotide for detection of SNP TSC0061732
ccaatatttccac

SEQ ID NO: 253165 - DNA, 13 bp, Artificial Sequence
  Oligonucleotide for detection of SNP TSC0061733
atgttatttttta

SEQ ID NO: 253166 - DNA, 13 bp, Artificial Sequence
  Oligonucleotide for detection of SNP TSC0061733
taaaaaataacat

SEQ ID NO: 253167 - DNA, 13 bp, Artificial Sequence
  Oligonucleotide for detection of SNP TSC0061733
taaaggatggtat

SEQ ID NO: 253168 - DNA, 13 bp, Artificial Sequence
  Oligonucleotide for detection of SNP TSC0061733
ataccatccttta

SEQ ID NO: 253169 - DNA, 13 bp, Artificial Sequence
  Oligonucleotide for detection of SNP TSC0061733
taaaggttggtat

SEQ ID NO: 253170 - DNA, 13 bp, Artificial Sequence
  Oligonucleotide for detection of SNP TSC0061733
ataccaaccttta

SEQ ID NO: 253171 - DNA, 13 bp, Artificial Sequence
  Oligonucleotide for detection of SNP TSC0061734
gataaaagtttta

SEQ ID NO: 253172 - DNA, 13 bp, Artificial Sequence
  Oligonucleotide for detection of SNP TSC0061734
taaaacttttatc

SEQ ID NO: 253173 - DNA, 13 bp, Artificial Sequence
  Oligonucleotide for detection of SNP TSC0061735
tttgaaaggaaag

SEQ ID NO: 253174 - DNA, 13 bp, Artificial Sequence
  Oligonucleotide for detection of SNP TSC0061735
ctttcctttcaaa

SEQ ID NO: 253175 - DNA, 13 bp, Artificial Sequence
  Oligonucleotide for detection of SNP TSC0061735
tttgaatggaaag

SEQ ID NO: 253176 - DNA, 13 bp, Artificial Sequence
  Oligonucleotide for detection of SNP TSC0061735
ctttccattcaaa

SEQ ID NO: 253177 - DNA, 13 bp, Artificial Sequence
  Oligonucleotide for detection of SNP TSC0061737
ttattagagatta

SEQ ID NO: 253178 - DNA, 13 bp, Artificial Sequence
  Oligonucleotide for detection of SNP TSC0061737
taatctctaataa

SEQ ID NO: 253179 - DNA, 13 bp, Artificial Sequence
  Oligonucleotide for detection of SNP TSC0061737
ttattaaagatta

SEQ ID NO: 253180 - DNA, 13 bp, Artificial Sequence
  Oligonucleotide for detection of SNP TSC0061737
taatctttaataa

SEQ ID NO: 253181 - DNA, 13 bp, Artificial Sequence
  Oligonucleotide for detection of SNP TSC0061738
aaaaatataaaga

SEQ ID NO: 253182 - DNA, 13 bp, Artificial Sequence
  Oligonucleotide for detection of SNP TSC0061738
tctttatattttt

SEQ ID NO: 253183 - DNA, 13 bp, Artificial Sequence
  Oligonucleotide for detection of SNP TSC0061738
aaaaatttaaaga

SEQ ID NO: 253184 - DNA, 13 bp, Artificial Sequence
  Oligonucleotide for detection of SNP TSC0061738
tctttaaattttt

SEQ ID NO: 253185 - DNA, 13 bp, Artificial Sequence
  Oligonucleotide for detection of SNP TSC0061739
atatggtttttat

SEQ ID NO: 253186 - DNA, 13 bp, Artificial Sequence
  Oligonucleotide for detection of SNP TSC0061739
ataaaaaccatat

SEQ ID NO: 253187 - DNA, 13 bp, Artificial Sequence
  Oligonucleotide for detection of SNP TSC0061739
atatgggttttat

SEQ ID NO: 253188 - DNA, 13 bp, Artificial Sequence
  Oligonucleotide for detection of SNP TSC0061739
ataaaacccatat

SEQ ID NO: 253189 - DNA, 13 bp, Artificial Sequence
  Oligonucleotide for detection of SNP TSC0061739
atgaaagttatat

SEQ ID NO: 253190 - DNA, 13 bp, Artificial Sequence
  Oligonucleotide for detection of SNP TSC0061739
atataactttcat

SEQ ID NO: 253191 - DNA, 13 bp, Artificial Sequence
  Oligonucleotide for detection of SNP TSC0061739
atgaaatttatat

SEQ ID NO: 253192 - DNA, 13 bp, Artificial Sequence
  Oligonucleotide for detection of SNP TSC0061739
atataaatttcat

SEQ ID NO: 253193 - DNA, 13 bp, Artificial Sequence
  Oligonucleotide for detection of SNP TSC0061746
agagaattttaat

SEQ ID NO: 253194 - DNA, 13 bp, Artificial Sequence
  Oligonucleotide for detection of SNP TSC0061746
attaaaattctct

SEQ ID NO: 253195 - DNA, 13 bp, Artificial Sequence
  Oligonucleotide for detection of SNP TSC0061746
agagaagtttaat

SEQ ID NO: 253196 - DNA, 13 bp, Artificial Sequence
  Oligonucleotide for detection of SNP TSC0061746
attaaacttctct

SEQ ID NO: 253197 - DNA, 13 bp, Artificial Sequence
  Oligonucleotide for detection of SNP TSC0061747
ttatgttttaata

SEQ ID NO: 253198 - DNA, 13 bp, Artificial Sequence
  Oligonucleotide for detection of SNP TSC0061747
tattaaaacataa

SEQ ID NO: 253199 - DNA, 13 bp, Artificial Sequence
  Oligonucleotide for detection of SNP TSC0061747
tgttaatatatag

SEQ ID NO: 253200 - DNA, 13 bp, Artificial Sequence
  Oligonucleotide for detection of SNP TSC0061747
ctatatattaaca

SEQ ID NO: 253201 - DNA, 13 bp, Artificial Sequence
  Oligonucleotide for detection of SNP TSC0061747
tgttaagatatag

SEQ ID NO: 253202 - DNA, 13 bp, Artificial Sequence
  Oligonucleotide for detection of SNP TSC0061747
ctatatcttaaca

SEQ ID NO: 253203 - DNA, 13 bp, Artificial Sequence
  Oligonucleotide for detection of SNP TSC0008448
ttatgggagaggt

SEQ ID NO: 253204 - DNA, 13 bp, Artificial Sequence
  Oligonucleotide for detection of SNP TSC0008448
acctctcccataa

SEQ ID NO: 253205 - DNA, 13 bp, Artificial Sequence
  Oligonucleotide for detection of SNP TSC0008448
ttatggaagaggt

SEQ ID NO: 253206 - DNA, 13 bp, Artificial Sequence
  Oligonucleotide for detection of SNP TSC0008448
acctcttccataa

SEQ ID NO: 253207 - DNA, 13 bp, Artificial Sequence
  Oligonucleotide for detection of SNP TSC0008448
ttacgggagaggt

SEQ ID NO: 253208 - DNA, 13 bp, Artificial Sequence
  Oligonucleotide for detection of SNP TSC0008448
acctctcccgtaa

SEQ ID NO: 253209 - DNA, 13 bp, Artificial Sequence
  Oligonucleotide for detection of SNP TSC0008448
ttacggaagaggt

SEQ ID NO: 253210 - DNA, 13 bp, Artificial Sequence
  Oligonucleotide for detection of SNP TSC0008448
acctcttccgtaa

SEQ ID NO: 253211 - DNA, 13 bp, Artificial Sequence
  Oligonucleotide for detection of SNP TSC0008449
atgaagtaaatta

SEQ ID NO: 253212 - DNA, 13 bp, Artificial Sequence
  Oligonucleotide for detection of SNP TSC0008449
taatttacttcat

SEQ ID NO: 253213 - DNA, 13 bp, Artificial Sequence
  Oligonucleotide for detection of SNP TSC0008449
atgaaggaaatta

SEQ ID NO: 253214 - DNA, 13 bp, Artificial Sequence
  Oligonucleotide for detection of SNP TSC0008449
taatttccttcat

SEQ ID NO: 253215 - DNA, 13 bp, Artificial Sequence
  Oligonucleotide for detection of SNP TSC0061749
tttgagtttaaat

SEQ ID NO: 253216 - DNA, 13 bp, Artificial Sequence
  Oligonucleotide for detection of SNP TSC0061749
atttaaactcaaa

SEQ ID NO: 253217 - DNA, 13 bp, Artificial Sequence
  Oligonucleotide for detection of SNP TSC0061749
tttgaggttaaat

SEQ ID NO: 253218 - DNA, 13 bp, Artificial Sequence
  Oligonucleotide for detection of SNP TSC0061749
atttaacctcaaa

SEQ ID NO: 253219 - DNA, 13 bp, Artificial Sequence
  Oligonucleotide for detection of SNP TSC0061749
atttgattttagg

SEQ ID NO: 253220 - DNA, 13 bp, Artificial Sequence
  Oligonucleotide for detection of SNP TSC0061749
cctaaaatcaaat

SEQ ID NO: 253221 - DNA, 13 bp, Artificial Sequence
  Oligonucleotide for detection of SNP TSC0061750
ttatgtgattgay

SEQ ID NO: 253222 - DNA, 13 bp, Artificial Sequence
  Oligonucleotide for detection of SNP TSC0061750
rtcaatcacataa

SEQ ID NO: 253223 - DNA, 13 bp, Artificial Sequence
  Oligonucleotide for detection of SNP TSC0061750
ttatgtaattgay

SEQ ID NO: 253224 - DNA, 13 bp, Artificial Sequence
  Oligonucleotide for detection of SNP TSC0061750
rtcaattacataa

SEQ ID NO: 253225 - DNA, 13 bp, Artificial Sequence
  Oligonucleotide for detection of SNP TSC0061750
ttacgtgattgay

SEQ ID NO: 253226 - DNA, 13 bp, Artificial Sequence
  Oligonucleotide for detection of SNP TSC0061750
rtcaatcacgtaa

SEQ ID NO: 253227 - DNA, 13 bp, Artificial Sequence
  Oligonucleotide for detection of SNP TSC0061750
ttacgtaattgay

SEQ ID NO: 253228 - DNA, 13 bp, Artificial Sequence
  Oligonucleotide for detection of SNP TSC0061750
rtcaattacgtaa

SEQ ID NO: 253229 - DNA, 13 bp, Artificial Sequence
  Oligonucleotide for detection of SNP TSC0061753
atatatttgtttt

SEQ ID NO: 253230 - DNA, 13 bp, Artificial Sequence
  Oligonucleotide for detection of SNP TSC0061753
aaaacaaatatat

SEQ ID NO: 253231 - DNA, 13 bp, Artificial Sequence
  Oligonucleotide for detection of SNP TSC0061753
atatatgtgtttt

SEQ ID NO: 253232 - DNA, 13 bp, Artificial Sequence
  Oligonucleotide for detection of SNP TSC0061753
aaaacacatatat

SEQ ID NO: 253233 - DNA, 13 bp, Artificial Sequence
  Oligonucleotide for detection of SNP TSC0061753
aaggtagatgtgt

SEQ ID NO: 253234 - DNA, 13 bp, Artificial Sequence
  Oligonucleotide for detection of SNP TSC0061753
acacatctacctt

SEQ ID NO: 253235 - DNA, 13 bp, Artificial Sequence
  Oligonucleotide for detection of SNP TSC0061753
aaggtatatgtgt

SEQ ID NO: 253236 - DNA, 13 bp, Artificial Sequence
  Oligonucleotide for detection of SNP TSC0061753
acacatatacctt

SEQ ID NO: 253237 - DNA, 13 bp, Artificial Sequence
  Oligonucleotide for detection of SNP TSC0061757
agttgtatggtty

SEQ ID NO: 253238 - DNA, 13 bp, Artificial Sequence
  Oligonucleotide for detection of SNP TSC0061757
raaccatacaact

SEQ ID NO: 253239 - DNA, 13 bp, Artificial Sequence
  Oligonucleotide for detection of SNP TSC0061757
agttgtttggtty

SEQ ID NO: 253240 - DNA, 13 bp, Artificial Sequence
  Oligonucleotide for detection of SNP TSC0061757
raaccaaacaact

SEQ ID NO: 253241 - DNA, 13 bp, Artificial Sequence
  Oligonucleotide for detection of SNP TSC0061757
gggttatatagtt

SEQ ID NO: 253242 - DNA, 13 bp, Artificial Sequence
  Oligonucleotide for detection of SNP TSC0061757
aactatataaccc

SEQ ID NO: 253243 - DNA, 13 bp, Artificial Sequence
  Oligonucleotide for detection of SNP TSC0061757
gggttagatagtt

SEQ ID NO: 253244 - DNA, 13 bp, Artificial Sequence
  Oligonucleotide for detection of SNP TSC0061757
aactatctaaccc

SEQ ID NO: 253245 - DNA, 13 bp, Artificial Sequence
  Oligonucleotide for detection of SNP TSC0061761
taaagagttgtty

SEQ ID NO: 253246 - DNA, 13 bp, Artificial Sequence
  Oligonucleotide for detection of SNP TSC0061761
raacaactcttta

SEQ ID NO: 253247 - DNA, 13 bp, Artificial Sequence
  Oligonucleotide for detection of SNP TSC0061761
taaagaattgtty

SEQ ID NO: 253248 - DNA, 13 bp, Artificial Sequence
  Oligonucleotide for detection of SNP TSC0061761
raacaattcttta

SEQ ID NO: 253249 - DNA, 13 bp, Artificial Sequence
  Oligonucleotide for detection of SNP TSC0061766
aaaaaaaatttgg

SEQ ID NO: 253250 - DNA, 13 bp, Artificial Sequence
  Oligonucleotide for detection of SNP TSC0061766
ccaaatttttttt

SEQ ID NO: 253251 - DNA, 13 bp, Artificial Sequence
  Oligonucleotide for detection of SNP TSC0061766
aaaaaatatttgg

SEQ ID NO: 253252 - DNA, 13 bp, Artificial Sequence
  Oligonucleotide for detection of SNP TSC0061766
ccaaatatttttt

SEQ ID NO: 253253 - DNA, 13 bp, Artificial Sequence
  Oligonucleotide for detection of SNP TSC0061766
ttaagtttttttt

SEQ ID NO: 253254 - DNA, 13 bp, Artificial Sequence
  Oligonucleotide for detection of SNP TSC0061766
aaaaaaaacttaa

SEQ ID NO: 253255 - DNA, 13 bp, Artificial Sequence
  Oligonucleotide for detection of SNP TSC0061767
tgtatgtggtaaa

SEQ ID NO: 253256 - DNA, 13 bp, Artificial Sequence
  Oligonucleotide for detection of SNP TSC0061767
tttaccacataca

SEQ ID NO: 253257 - DNA, 13 bp, Artificial Sequence
  Oligonucleotide for detection of SNP TSC0061767
tgtatggggtaaa

SEQ ID NO: 253258 - DNA, 13 bp, Artificial Sequence
  Oligonucleotide for detection of SNP TSC0061767
tttaccccataca

SEQ ID NO: 253259 - DNA, 13 bp, Artificial Sequence
  Oligonucleotide for detection of SNP TSC0006504
taagaaaaaatga

SEQ ID NO: 253260 - DNA, 13 bp, Artificial Sequence
  Oligonucleotide for detection of SNP TSC0006504
tcattttttctta

SEQ ID NO: 253261 - DNA, 13 bp, Artificial Sequence
  Oligonucleotide for detection of SNP TSC0006504
taagaagaaatga

SEQ ID NO: 253262 - DNA, 13 bp, Artificial Sequence
  Oligonucleotide for detection of SNP TSC0006504
tcatttcttctta

SEQ ID NO: 253263 - DNA, 13 bp, Artificial Sequence
  Oligonucleotide for detection of SNP TSC0061770
tagaatagtaaag

SEQ ID NO: 253264 - DNA, 13 bp, Artificial Sequence
  Oligonucleotide for detection of SNP TSC0061770
ctttactattcta

SEQ ID NO: 253265 - DNA, 13 bp, Artificial Sequence
  Oligonucleotide for detection of SNP TSC0061770
tagaatggtaaag

SEQ ID NO: 253266 - DNA, 13 bp, Artificial Sequence
  Oligonucleotide for detection of SNP TSC0061770
ctttaccattcta

SEQ ID NO: 253267 - DNA, 13 bp, Artificial Sequence
  Oligonucleotide for detection of SNP TSC0061770
tagaacggtaaag

SEQ ID NO: 253268 - DNA, 13 bp, Artificial Sequence
  Oligonucleotide for detection of SNP TSC0061770
ctttaccgttcta

SEQ ID NO: 253269 - DNA, 13 bp, Artificial Sequence
  Oligonucleotide for detection of SNP TSC0061773
tttatgatgtaaa

SEQ ID NO: 253270 - DNA, 13 bp, Artificial Sequence
  Oligonucleotide for detection of SNP TSC0061773
tttacatcataaa

SEQ ID NO: 253271 - DNA, 13 bp, Artificial Sequence
  Oligonucleotide for detection of SNP TSC0061773
tttatgttgtaaa

SEQ ID NO: 253272 - DNA, 13 bp, Artificial Sequence
  Oligonucleotide for detection of SNP TSC0061773
tttacaacataaa

SEQ ID NO: 253273 - DNA, 13 bp, Artificial Sequence
  Oligonucleotide for detection of SNP TSC0061773
tttatattatgag

SEQ ID NO: 253274 - DNA, 13 bp, Artificial Sequence
  Oligonucleotide for detection of SNP TSC0061773
ctcataatataaa

SEQ ID NO: 253275 - DNA, 13 bp, Artificial Sequence
  Oligonucleotide for detection of SNP TSC0061773
tttatagtatgag

SEQ ID NO: 253276 - DNA, 13 bp, Artificial Sequence
  Oligonucleotide for detection of SNP TSC0061773
ctcatactataaa

SEQ ID NO: 253277 - DNA, 13 bp, Artificial Sequence
  Oligonucleotide for detection of SNP TSC0061774
ttttttttagaat

SEQ ID NO: 253278 - DNA, 13 bp, Artificial Sequence
  Oligonucleotide for detection of SNP TSC0061774
attctaaaaaaaa

SEQ ID NO: 253279 - DNA, 13 bp, Artificial Sequence
  Oligonucleotide for detection of SNP TSC0061774
attttgaaggaga

SEQ ID NO: 253280 - DNA, 13 bp, Artificial Sequence
  Oligonucleotide for detection of SNP TSC0061774
tctccttcaaaat

SEQ ID NO: 253281 - DNA, 13 bp, Artificial Sequence
  Oligonucleotide for detection of SNP TSC0061774
attttgtaggaga

SEQ ID NO: 253282 - DNA, 13 bp, Artificial Sequence
  Oligonucleotide for detection of SNP TSC0061774
tctcctacaaaat

SEQ ID NO: 253283 - DNA, 13 bp, Artificial Sequence
  Oligonucleotide for detection of SNP TSC0061777
aaagaaggagtay

SEQ ID NO: 253284 - DNA, 13 bp, Artificial Sequence
  Oligonucleotide for detection of SNP TSC0061777
rtactccttcttt

SEQ ID NO: 253285 - DNA, 13 bp, Artificial Sequence
  Oligonucleotide for detection of SNP TSC0061777
aaagaaagagtay

SEQ ID NO: 253286 - DNA, 13 bp, Artificial Sequence
  Oligonucleotide for detection of SNP TSC0061777
rtactctttcttt

SEQ ID NO: 253287 - DNA, 13 bp, Artificial Sequence
  Oligonucleotide for detection of SNP TSC0061780
tgatttagtttty

SEQ ID NO: 253288 - DNA, 13 bp, Artificial Sequence
  Oligonucleotide for detection of SNP TSC0061780
raaaactaaatca

SEQ ID NO: 253289 - DNA, 13 bp, Artificial Sequence
  Oligonucleotide for detection of SNP TSC0061780
tgatttggtttty

SEQ ID NO: 253290 - DNA, 13 bp, Artificial Sequence
  Oligonucleotide for detection of SNP TSC0061780
raaaaccaaatca

SEQ ID NO: 253291 - DNA, 13 bp, Artificial Sequence
  Oligonucleotide for detection of SNP TSC0061780
cgatttagtttty

SEQ ID NO: 253292 - DNA, 13 bp, Artificial Sequence
  Oligonucleotide for detection of SNP TSC0061780
raaaactaaatcg

SEQ ID NO: 253293 - DNA, 13 bp, Artificial Sequence
  Oligonucleotide for detection of SNP TSC0061780
cgatttggtttty

SEQ ID NO: 253294 - DNA, 13 bp, Artificial Sequence
  Oligonucleotide for detection of SNP TSC0061780
raaaaccaaatcg

SEQ ID NO: 253295 - DNA, 13 bp, Artificial Sequence
  Oligonucleotide for detection of SNP TSC0061780
tgattcggtttty

SEQ ID NO: 253296 - DNA, 13 bp, Artificial Sequence
  Oligonucleotide for detection of SNP TSC0061780
raaaaccgaatca

SEQ ID NO: 253297 - DNA, 13 bp, Artificial Sequence
  Oligonucleotide for detection of SNP TSC0061780
cgattcggtttty

SEQ ID NO: 253298 - DNA, 13 bp, Artificial Sequence
  Oligonucleotide for detection of SNP TSC0061780
raaaaccgaatcg

SEQ ID NO: 253299 - DNA, 13 bp, Artificial Sequence
  Oligonucleotide for detection of SNP TSC0061780
ggaggttgagttg

SEQ ID NO: 253300 - DNA, 13 bp, Artificial Sequence
  Oligonucleotide for detection of SNP TSC0061780
caactcaacctcc

SEQ ID NO: 253301 - DNA, 13 bp, Artificial Sequence
  Oligonucleotide for detection of SNP TSC0061780
ggaggttgagtcg

SEQ ID NO: 253302 - DNA, 13 bp, Artificial Sequence
  Oligonucleotide for detection of SNP TSC0061780
cgactcaacctcc

SEQ ID NO: 253303 - DNA, 13 bp, Artificial Sequence
  Oligonucleotide for detection of SNP TSC0061780
ggaggtcgagttg

SEQ ID NO: 253304 - DNA, 13 bp, Artificial Sequence
  Oligonucleotide for detection of SNP TSC0061780
caactcgacctcc

SEQ ID NO: 253305 - DNA, 13 bp, Artificial Sequence
  Oligonucleotide for detection of SNP TSC0061780
ggaggtcgagtcg

SEQ ID NO: 253306 - DNA, 13 bp, Artificial Sequence
  Oligonucleotide for detection of SNP TSC0061780
cgactcgacctcc

SEQ ID NO: 253307 - DNA, 13 bp, Artificial Sequence
  Oligonucleotide for detection of SNP TSC0061781
tgttaatgaataa

SEQ ID NO: 253308 - DNA, 13 bp, Artificial Sequence
  Oligonucleotide for detection of SNP TSC0061781
ttattcattaaca

SEQ ID NO: 253309 - DNA, 13 bp, Artificial Sequence
  Oligonucleotide for detection of SNP TSC0061781
tgttaacgaataa

SEQ ID NO: 253310 - DNA, 13 bp, Artificial Sequence
  Oligonucleotide for detection of SNP TSC0061781
ttattcgttaaca

SEQ ID NO: 253311 - DNA, 13 bp, Artificial Sequence
  Oligonucleotide for detection of SNP TSC0061781
ttgtttgttagta

SEQ ID NO: 253312 - DNA, 13 bp, Artificial Sequence
  Oligonucleotide for detection of SNP TSC0061781
tactaacaaacaa

SEQ ID NO: 253313 - DNA, 13 bp, Artificial Sequence
  Oligonucleotide for detection of SNP TSC0061781
ttgtttattagta

SEQ ID NO: 253314 - DNA, 13 bp, Artificial Sequence
  Oligonucleotide for detection of SNP TSC0061781
tactaataaacaa

SEQ ID NO: 253315 - DNA, 13 bp, Artificial Sequence
  Oligonucleotide for detection of SNP TSC0061781
ttgttcgttagta

SEQ ID NO: 253316 - DNA, 13 bp, Artificial Sequence
  Oligonucleotide for detection of SNP TSC0061781
tactaacgaacaa

SEQ ID NO: 253317 - DNA, 13 bp, Artificial Sequence
  Oligonucleotide for detection of SNP TSC0061782
tatgaatatttat

SEQ ID NO: 253318 - DNA, 13 bp, Artificial Sequence
  Oligonucleotide for detection of SNP TSC0061782
ataaatattcata

SEQ ID NO: 253319 - DNA, 13 bp, Artificial Sequence
  Oligonucleotide for detection of SNP TSC0061782
tatgaagatttat

SEQ ID NO: 253320 - DNA, 13 bp, Artificial Sequence
  Oligonucleotide for detection of SNP TSC0061782
ataaatcttcata

SEQ ID NO: 253321 - DNA, 13 bp, Artificial Sequence
  Oligonucleotide for detection of SNP TSC0061782
ataaatttttatg

SEQ ID NO: 253322 - DNA, 13 bp, Artificial Sequence
  Oligonucleotide for detection of SNP TSC0061782
cataaaaatttat

SEQ ID NO: 253323 - DNA, 13 bp, Artificial Sequence
  Oligonucleotide for detection of SNP TSC0061794
atgttgatttaag

SEQ ID NO: 253324 - DNA, 13 bp, Artificial Sequence
  Oligonucleotide for detection of SNP TSC0061794
cttaaatcaacat

SEQ ID NO: 253325 - DNA, 13 bp, Artificial Sequence
  Oligonucleotide for detection of SNP TSC0061794
atgttgttttaag

SEQ ID NO: 253326 - DNA, 13 bp, Artificial Sequence
  Oligonucleotide for detection of SNP TSC0061794
cttaaaacaacat

SEQ ID NO: 253327 - DNA, 13 bp, Artificial Sequence
  Oligonucleotide for detection of SNP TSC0061794
tttaagttagtat

SEQ ID NO: 253328 - DNA, 13 bp, Artificial Sequence
  Oligonucleotide for detection of SNP TSC0061794
atactaacttaaa

SEQ ID NO: 253329 - DNA, 13 bp, Artificial Sequence
  Oligonucleotide for detection of SNP TSC0061794
tttaaggtagtat

SEQ ID NO: 253330 - DNA, 13 bp, Artificial Sequence
  Oligonucleotide for detection of SNP TSC0061794
atactaccttaaa

SEQ ID NO: 253331 - DNA, 13 bp, Artificial Sequence
  Oligonucleotide for detection of SNP TSC0061795
tattttgatttgg

SEQ ID NO: 253332 - DNA, 13 bp, Artificial Sequence
  Oligonucleotide for detection of SNP TSC0061795
ccaaatcaaaata

SEQ ID NO: 253333 - DNA, 13 bp, Artificial Sequence
  Oligonucleotide for detection of SNP TSC0061795
tatttcgatttgg

SEQ ID NO: 253334 - DNA, 13 bp, Artificial Sequence
  Oligonucleotide for detection of SNP TSC0061795
ccaaatcgaaata

SEQ ID NO: 253335 - DNA, 13 bp, Artificial Sequence
  Oligonucleotide for detection of SNP TSC0061795
ttaaattggagtg

SEQ ID NO: 253336 - DNA, 13 bp, Artificial Sequence
  Oligonucleotide for detection of SNP TSC0061795
cactccaatttaa

SEQ ID NO: 253337 - DNA, 13 bp, Artificial Sequence
  Oligonucleotide for detection of SNP TSC0061795
ttaaatcggagtg

SEQ ID NO: 253338 - DNA, 13 bp, Artificial Sequence
  Oligonucleotide for detection of SNP TSC0061795
cactccgatttaa

SEQ ID NO: 253339 - DNA, 13 bp, Artificial Sequence
  Oligonucleotide for detection of SNP TSC0061796
ttgtttatttaag

SEQ ID NO: 253340 - DNA, 13 bp, Artificial Sequence
  Oligonucleotide for detection of SNP TSC0061796
cttaaataaacaa

SEQ ID NO: 253341 - DNA, 13 bp, Artificial Sequence
  Oligonucleotide for detection of SNP TSC0061796
ttgtttgtttaag

SEQ ID NO: 253342 - DNA, 13 bp, Artificial Sequence
  Oligonucleotide for detection of SNP TSC0061796
cttaaacaaacaa

SEQ ID NO: 253343 - DNA, 13 bp, Artificial Sequence
  Oligonucleotide for detection of SNP TSC0061797
aagtatagaatgy

SEQ ID NO: 253344 - DNA, 13 bp, Artificial Sequence
  Oligonucleotide for detection of SNP TSC0061797
rcattctatactt

SEQ ID NO: 253345 - DNA, 13 bp, Artificial Sequence
  Oligonucleotide for detection of SNP TSC0061797
aagtatggaatgy

SEQ ID NO: 253346 - DNA, 13 bp, Artificial Sequence
  Oligonucleotide for detection of SNP TSC0061797
rcattccatactt

SEQ ID NO: 253347 - DNA, 13 bp, Artificial Sequence
  Oligonucleotide for detection of SNP TSC0061797
aagtacggaatgy

SEQ ID NO: 253348 - DNA, 13 bp, Artificial Sequence
  Oligonucleotide for detection of SNP TSC0061797
rcattccgtactt

SEQ ID NO: 253349 - DNA, 13 bp, Artificial Sequence
  Oligonucleotide for detection of SNP TSC0061797
gtattttgtgttt

SEQ ID NO: 253350 - DNA, 13 bp, Artificial Sequence
  Oligonucleotide for detection of SNP TSC0061797
aaacacaaaatac

SEQ ID NO: 253351 - DNA, 13 bp, Artificial Sequence
  Oligonucleotide for detection of SNP TSC0061797
gtatttcgtgttt

SEQ ID NO: 253352 - DNA, 13 bp, Artificial Sequence
  Oligonucleotide for detection of SNP TSC0061797
aaacacgaaatac

SEQ ID NO: 253353 - DNA, 13 bp, Artificial Sequence
  Oligonucleotide for detection of SNP TSC0061798
gggtggtggggag

SEQ ID NO: 253354 - DNA, 13 bp, Artificial Sequence
  Oligonucleotide for detection of SNP TSC0061798
ctccccaccaccc

SEQ ID NO: 253355 - DNA, 13 bp, Artificial Sequence
  Oligonucleotide for detection of SNP TSC0061798
gggtggcggggag

SEQ ID NO: 253356 - DNA, 13 bp, Artificial Sequence
  Oligonucleotide for detection of SNP TSC0061798
ctccccgccaccc

SEQ ID NO: 253357 - DNA, 13 bp, Artificial Sequence
  Oligonucleotide for detection of SNP TSC0061802
ttttagaaaattt

SEQ ID NO: 253358 - DNA, 13 bp, Artificial Sequence
  Oligonucleotide for detection of SNP TSC0061802
aaattttctaaaa

SEQ ID NO: 253359 - DNA, 13 bp, Artificial Sequence
  Oligonucleotide for detection of SNP TSC0006090
tattttaagaatg

SEQ ID NO: 253360 - DNA, 13 bp, Artificial Sequence
  Oligonucleotide for detection of SNP TSC0006090
cattcttaaaata

SEQ ID NO: 253361 - DNA, 13 bp, Artificial Sequence
  Oligonucleotide for detection of SNP TSC0006090
tattttgagaatg

SEQ ID NO: 253362 - DNA, 13 bp, Artificial Sequence
  Oligonucleotide for detection of SNP TSC0006090
cattctcaaaata

SEQ ID NO: 253363 - DNA, 13 bp, Artificial Sequence
  Oligonucleotide for detection of SNP TSC0061806
ttagtaggaatgy

SEQ ID NO: 253364 - DNA, 13 bp, Artificial Sequence
  Oligonucleotide for detection of SNP TSC0061806
rcattcctactaa

SEQ ID NO: 253365 - DNA, 13 bp, Artificial Sequence
  Oligonucleotide for detection of SNP TSC0061806
ttagtaagaatgy

SEQ ID NO: 253366 - DNA, 13 bp, Artificial Sequence
  Oligonucleotide for detection of SNP TSC0061806
rcattcttactaa

SEQ ID NO: 253367 - DNA, 13 bp, Artificial Sequence
  Oligonucleotide for detection of SNP TSC0061808
gttaggtgttaaa

SEQ ID NO: 253368 - DNA, 13 bp, Artificial Sequence
  Oligonucleotide for detection of SNP TSC0061808
tttaacacctaac

SEQ ID NO: 253369 - DNA, 13 bp, Artificial Sequence
  Oligonucleotide for detection of SNP TSC0061808
gttaggcgttaaa

SEQ ID NO: 253370 - DNA, 13 bp, Artificial Sequence
  Oligonucleotide for detection of SNP TSC0061808
tttaacgcctaac

SEQ ID NO: 253371 - DNA, 13 bp, Artificial Sequence
  Oligonucleotide for detection of SNP TSC0061808
tttagtgtttgay

SEQ ID NO: 253372 - DNA, 13 bp, Artificial Sequence
  Oligonucleotide for detection of SNP TSC0061808
rtcaaacactaaa

SEQ ID NO: 253373 - DNA, 13 bp, Artificial Sequence
  Oligonucleotide for detection of SNP TSC0061808
tttagtatttgay

SEQ ID NO: 253374 - DNA, 13 bp, Artificial Sequence
  Oligonucleotide for detection of SNP TSC0061808
rtcaaatactaaa

SEQ ID NO: 253375 - DNA, 13 bp, Artificial Sequence
  Oligonucleotide for detection of SNP TSC0061808
tttagcgtttgay

SEQ ID NO: 253376 - DNA, 13 bp, Artificial Sequence
  Oligonucleotide for detection of SNP TSC0061808
rtcaaacgctaaa

SEQ ID NO: 253377 - DNA, 13 bp, Artificial Sequence
  Oligonucleotide for detection of SNP TSC0061810
tgaaaatgtatga

SEQ ID NO: 253378 - DNA, 13 bp, Artificial Sequence
  Oligonucleotide for detection of SNP TSC0061810
tcatacattttca

SEQ ID NO: 253379 - DNA, 13 bp, Artificial Sequence
  Oligonucleotide for detection of SNP TSC0061810
tgaaaaggtatga

SEQ ID NO: 253380 - DNA, 13 bp, Artificial Sequence
  Oligonucleotide for detection of SNP TSC0061810
tcataccttttca

SEQ ID NO: 253381 - DNA, 13 bp, Artificial Sequence
  Oligonucleotide for detection of SNP TSC0061813
ggttatataagta

SEQ ID NO: 253382 - DNA, 13 bp, Artificial Sequence
  Oligonucleotide for detection of SNP TSC0061813
tacttatataacc

SEQ ID NO: 253383 - DNA, 13 bp, Artificial Sequence
  Oligonucleotide for detection of SNP TSC0061813
ggttatgtaagta

SEQ ID NO: 253384 - DNA, 13 bp, Artificial Sequence
  Oligonucleotide for detection of SNP TSC0061813
tacttacataacc

SEQ ID NO: 253385 - DNA, 13 bp, Artificial Sequence
  Oligonucleotide for detection of SNP TSC0061813
ggttacgtaagta

SEQ ID NO: 253386 - DNA, 13 bp, Artificial Sequence
  Oligonucleotide for detection of SNP TSC0061813
tacttacgtaacc

SEQ ID NO: 253387 - DNA, 13 bp, Artificial Sequence
  Oligonucleotide for detection of SNP TSC0061813
tgtttatgtggty

SEQ ID NO: 253388 - DNA, 13 bp, Artificial Sequence
  Oligonucleotide for detection of SNP TSC0061813
raccacataaaca

SEQ ID NO: 253389 - DNA, 13 bp, Artificial Sequence
  Oligonucleotide for detection of SNP TSC0061813
tgtttacgtggty

SEQ ID NO: 253390 - DNA, 13 bp, Artificial Sequence
  Oligonucleotide for detection of SNP TSC0061813
raccacgtaaaca

SEQ ID NO: 253391 - DNA, 13 bp, Artificial Sequence
  Oligonucleotide for detection of SNP TSC0010337
ttaaatagaatgy

SEQ ID NO: 253392 - DNA, 13 bp, Artificial Sequence
  Oligonucleotide for detection of SNP TSC0010337
rcattctatttaa

SEQ ID NO: 253393 - DNA, 13 bp, Artificial Sequence
  Oligonucleotide for detection of SNP TSC0010337
ttaaatggaatgy

SEQ ID NO: 253394 - DNA, 13 bp, Artificial Sequence
  Oligonucleotide for detection of SNP TSC0010337
rcattccatttaa

SEQ ID NO: 253395 - DNA, 13 bp, Artificial Sequence
  Oligonucleotide for detection of SNP TSC0005427
atataaggtattt

SEQ ID NO: 253396 - DNA, 13 bp, Artificial Sequence
  Oligonucleotide for detection of SNP TSC0005427
aaataccttatat

SEQ ID NO: 253397 - DNA, 13 bp, Artificial Sequence
  Oligonucleotide for detection of SNP TSC0005427
atataaagtattt

SEQ ID NO: 253398 - DNA, 13 bp, Artificial Sequence
  Oligonucleotide for detection of SNP TSC0005427
aaatactttatat

SEQ ID NO: 253399 - DNA, 13 bp, Artificial Sequence
  Oligonucleotide for detection of SNP TSC0005428
gtaaaataggtaa

SEQ ID NO: 253400 - DNA, 13 bp, Artificial Sequence
  Oligonucleotide for detection of SNP TSC0005428
ttacctattttac

SEQ ID NO: 253401 - DNA, 13 bp, Artificial Sequence
  Oligonucleotide for detection of SNP TSC0005428
gtaaaaaaggtaa

SEQ ID NO: 253402 - DNA, 13 bp, Artificial Sequence
  Oligonucleotide for detection of SNP TSC0005428
ttaccttttttac

SEQ ID NO: 253403 - DNA, 13 bp, Artificial Sequence
  Oligonucleotide for detection of SNP TSC0061814
tattttggttata

SEQ ID NO: 253404 - DNA, 13 bp, Artificial Sequence
  Oligonucleotide for detection of SNP TSC0061814
tataaccaaaata

SEQ ID NO: 253405 - DNA, 13 bp, Artificial Sequence
  Oligonucleotide for detection of SNP TSC0061814
tattttagttata

SEQ ID NO: 253406 - DNA, 13 bp, Artificial Sequence
  Oligonucleotide for detection of SNP TSC0061814
tataactaaaata

SEQ ID NO: 253407 - DNA, 13 bp, Artificial Sequence
  Oligonucleotide for detection of SNP TSC0061815
ttacgtatttata

SEQ ID NO: 253408 - DNA, 13 bp, Artificial Sequence
  Oligonucleotide for detection of SNP TSC0061815
tataaatacgtaa

SEQ ID NO: 253409 - DNA, 13 bp, Artificial Sequence
  Oligonucleotide for detection of SNP TSC0061815
ttacgtgtttata

SEQ ID NO: 253410 - DNA, 13 bp, Artificial Sequence
  Oligonucleotide for detection of SNP TSC0061815
tataaacacgtaa

SEQ ID NO: 253411 - DNA, 13 bp, Artificial Sequence
  Oligonucleotide for detection of SNP TSC0061816
ggttgatggaaat

SEQ ID NO: 253412 - DNA, 13 bp, Artificial Sequence
  Oligonucleotide for detection of SNP TSC0061816
atttccatcaacc

SEQ ID NO: 253413 - DNA, 13 bp, Artificial Sequence
  Oligonucleotide for detection of SNP TSC0061816
ggttgacggaaat

SEQ ID NO: 253414 - DNA, 13 bp, Artificial Sequence
  Oligonucleotide for detection of SNP TSC0061816
atttccgtcaacc

SEQ ID NO: 253415 - DNA, 13 bp, Artificial Sequence
  Oligonucleotide for detection of SNP TSC0061816
atttttgttagty

SEQ ID NO: 253416 - DNA, 13 bp, Artificial Sequence
  Oligonucleotide for detection of SNP TSC0061816
ractaacaaaaat

SEQ ID NO: 253417 - DNA, 13 bp, Artificial Sequence
  Oligonucleotide for detection of SNP TSC0061816
atttttattagty

SEQ ID NO: 253418 - DNA, 13 bp, Artificial Sequence
  Oligonucleotide for detection of SNP TSC0061816
ractaataaaaat

SEQ ID NO: 253419 - DNA, 13 bp, Artificial Sequence
  Oligonucleotide for detection of SNP TSC0061816
attttcgttagty

SEQ ID NO: 253420 - DNA, 13 bp, Artificial Sequence
  Oligonucleotide for detection of SNP TSC0061816
ractaacgaaaat

SEQ ID NO: 253421 - DNA, 13 bp, Artificial Sequence
  Oligonucleotide for detection of SNP TSC0061817
tgtatatggtata

SEQ ID NO: 253422 - DNA, 13 bp, Artificial Sequence
  Oligonucleotide for detection of SNP TSC0061817
tataccatataca

SEQ ID NO: 253423 - DNA, 13 bp, Artificial Sequence
  Oligonucleotide for detection of SNP TSC0061817
tgtatacggtata

SEQ ID NO: 253424 - DNA, 13 bp, Artificial Sequence
  Oligonucleotide for detection of SNP TSC0061817
tataccgtataca

SEQ ID NO: 253425 - DNA, 13 bp, Artificial Sequence
  Oligonucleotide for detection of SNP TSC0061817
tatattgtgtata

SEQ ID NO: 253426 - DNA, 13 bp, Artificial Sequence
  Oligonucleotide for detection of SNP TSC0061817
tatacacaatata

SEQ ID NO: 253427 - DNA, 13 bp, Artificial Sequence
  Oligonucleotide for detection of SNP TSC0061817
tatattatgtata

SEQ ID NO: 253428 - DNA, 13 bp, Artificial Sequence
  Oligonucleotide for detection of SNP TSC0061817
tatacataatata

SEQ ID NO: 253429 - DNA, 13 bp, Artificial Sequence
  Oligonucleotide for detection of SNP TSC0061817
tatatcgtgtata

SEQ ID NO: 253430 - DNA, 13 bp, Artificial Sequence
  Oligonucleotide for detection of SNP TSC0061817
tatacacgatata

SEQ ID NO: 253431 - DNA, 13 bp, Artificial Sequence
  Oligonucleotide for detection of SNP TSC0061818
taatatattagtg

SEQ ID NO: 253432 - DNA, 13 bp, Artificial Sequence
  Oligonucleotide for detection of SNP TSC0061818
cactaatatatta

SEQ ID NO: 253433 - DNA, 13 bp, Artificial Sequence
  Oligonucleotide for detection of SNP TSC0061818
taatatgttagtg

SEQ ID NO: 253434 - DNA, 13 bp, Artificial Sequence
  Oligonucleotide for detection of SNP TSC0061818
cactaacatatta

SEQ ID NO: 253435 - DNA, 13 bp, Artificial Sequence
  Oligonucleotide for detection of SNP TSC0061818
taatacgttagtg

SEQ ID NO: 253436 - DNA, 13 bp, Artificial Sequence
  Oligonucleotide for detection of SNP TSC0061818
cactaacgtatta

SEQ ID NO: 253437 - DNA, 13 bp, Artificial Sequence
  Oligonucleotide for detection of SNP TSC0061818
tattgatgtattg

SEQ ID NO: 253438 - DNA, 13 bp, Artificial Sequence
  Oligonucleotide for detection of SNP TSC0061818
caatacatcaata

SEQ ID NO: 253439 - DNA, 13 bp, Artificial Sequence
  Oligonucleotide for detection of SNP TSC0061818
tattgacgtattg

SEQ ID NO: 253440 - DNA, 13 bp, Artificial Sequence
  Oligonucleotide for detection of SNP TSC0061818
caatacgtcaata

SEQ ID NO: 253441 - DNA, 13 bp, Artificial Sequence
  Oligonucleotide for detection of SNP TSC0061819
tgagtaatatata

SEQ ID NO: 253442 - DNA, 13 bp, Artificial Sequence
  Oligonucleotide for detection of SNP TSC0061819
tatatattactca

SEQ ID NO: 253443 - DNA, 13 bp, Artificial Sequence
  Oligonucleotide for detection of SNP TSC0061819
tgagtagtatata

SEQ ID NO: 253444 - DNA, 13 bp, Artificial Sequence
  Oligonucleotide for detection of SNP TSC0061819
tatatactactca

SEQ ID NO: 253445 - DNA, 13 bp, Artificial Sequence
  Oligonucleotide for detection of SNP TSC0005500
tgaaaattttagg

SEQ ID NO: 253446 - DNA, 13 bp, Artificial Sequence
  Oligonucleotide for detection of SNP TSC0005500
cctaaaattttca

SEQ ID NO: 253447 - DNA, 13 bp, Artificial Sequence
  Oligonucleotide for detection of SNP TSC0005500
tgaaaagtttagg

SEQ ID NO: 253448 - DNA, 13 bp, Artificial Sequence
  Oligonucleotide for detection of SNP TSC0005500
cctaaacttttca

SEQ ID NO: 253449 - DNA, 13 bp, Artificial Sequence
  Oligonucleotide for detection of SNP TSC0061820
ttaaatttaagta

SEQ ID NO: 253450 - DNA, 13 bp, Artificial Sequence
  Oligonucleotide for detection of SNP TSC0061820
tacttaaatttaa

SEQ ID NO: 253451 - DNA, 13 bp, Artificial Sequence
  Oligonucleotide for detection of SNP TSC0010044
tattgtatagtat

SEQ ID NO: 253452 - DNA, 13 bp, Artificial Sequence
  Oligonucleotide for detection of SNP TSC0010044
atactatacaata

SEQ ID NO: 253453 - DNA, 13 bp, Artificial Sequence
  Oligonucleotide for detection of SNP TSC0010044
tattgtgtagtat

SEQ ID NO: 253454 - DNA, 13 bp, Artificial Sequence
  Oligonucleotide for detection of SNP TSC0010044
atactacacaata

SEQ ID NO: 253455 - DNA, 13 bp, Artificial Sequence
  Oligonucleotide for detection of SNP TSC0010045
ggttgttggggta

SEQ ID NO: 253456 - DNA, 13 bp, Artificial Sequence
  Oligonucleotide for detection of SNP TSC0010045
taccccaacaacc

SEQ ID NO: 253457 - DNA, 13 bp, Artificial Sequence
  Oligonucleotide for detection of SNP TSC0010045
ggttgtcggggta

SEQ ID NO: 253458 - DNA, 13 bp, Artificial Sequence
  Oligonucleotide for detection of SNP TSC0010045
taccccgacaacc

SEQ ID NO: 253459 - DNA, 13 bp, Artificial Sequence
  Oligonucleotide for detection of SNP TSC0010045
tgttttggtagty

SEQ ID NO: 253460 - DNA, 13 bp, Artificial Sequence
  Oligonucleotide for detection of SNP TSC0010045
ractaccaaaaca

SEQ ID NO: 253461 - DNA, 13 bp, Artificial Sequence
  Oligonucleotide for detection of SNP TSC0010045
tgttttagtagty

SEQ ID NO: 253462 - DNA, 13 bp, Artificial Sequence
  Oligonucleotide for detection of SNP TSC0010045
ractactaaaaca

SEQ ID NO: 253463 - DNA, 13 bp, Artificial Sequence
  Oligonucleotide for detection of SNP TSC0010045
tgtttcggtagty

SEQ ID NO: 253464 - DNA, 13 bp, Artificial Sequence
  Oligonucleotide for detection of SNP TSC0010045
ractaccgaaaca

SEQ ID NO: 253465 - DNA, 13 bp, Artificial Sequence
  Oligonucleotide for detection of SNP TSC0061822
gatgaaattttay

SEQ ID NO: 253466 - DNA, 13 bp, Artificial Sequence
  Oligonucleotide for detection of SNP TSC0061822
rtaaaatttcatc

SEQ ID NO: 253467 - DNA, 13 bp, Artificial Sequence
  Oligonucleotide for detection of SNP TSC0061822
gatgaatttttay

SEQ ID NO: 253468 - DNA, 13 bp, Artificial Sequence
  Oligonucleotide for detection of SNP TSC0061822
rtaaaaattcatc

SEQ ID NO: 253469 - DNA, 13 bp, Artificial Sequence
  Oligonucleotide for detection of SNP TSC0061822
gtagagttttaty

SEQ ID NO: 253470 - DNA, 13 bp, Artificial Sequence
  Oligonucleotide for detection of SNP TSC0061822
rataaaactctac

SEQ ID NO: 253471 - DNA, 13 bp, Artificial Sequence
  Oligonucleotide for detection of SNP TSC0061822
gtagagatttaty

SEQ ID NO: 253472 - DNA, 13 bp, Artificial Sequence
  Oligonucleotide for detection of SNP TSC0061822
rataaatctctac

SEQ ID NO: 253473 - DNA, 13 bp, Artificial Sequence
  Oligonucleotide for detection of SNP TSC0007616
ttgttatggttaa

SEQ ID NO: 253474 - DNA, 13 bp, Artificial Sequence
  Oligonucleotide for detection of SNP TSC0007616
ttaaccataacaa

SEQ ID NO: 253475 - DNA, 13 bp, Artificial Sequence
  Oligonucleotide for detection of SNP TSC0007616
ttgttacggttaa

SEQ ID NO: 253476 - DNA, 13 bp, Artificial Sequence
  Oligonucleotide for detection of SNP TSC0007616
ttaaccgtaacaa

SEQ ID NO: 253477 - DNA, 13 bp, Artificial Sequence
  Oligonucleotide for detection of SNP TSC0007616
ttggttgtaataa

SEQ ID NO: 253478 - DNA, 13 bp, Artificial Sequence
  Oligonucleotide for detection of SNP TSC0007616
ttattacaaccaa

SEQ ID NO: 253479 - DNA, 13 bp, Artificial Sequence
  Oligonucleotide for detection of SNP TSC0007616
ttggttataataa

SEQ ID NO: 253480 - DNA, 13 bp, Artificial Sequence
  Oligonucleotide for detection of SNP TSC0007616
ttattataaccaa

SEQ ID NO: 253481 - DNA, 13 bp, Artificial Sequence
  Oligonucleotide for detection of SNP TSC0007616
ttggtcgtaataa

SEQ ID NO: 253482 - DNA, 13 bp, Artificial Sequence
  Oligonucleotide for detection of SNP TSC0007616
ttattacgaccaa

SEQ ID NO: 253483 - DNA, 13 bp, Artificial Sequence
  Oligonucleotide for detection of SNP TSC0007617
tagtgatgtgtga

SEQ ID NO: 253484 - DNA, 13 bp, Artificial Sequence
  Oligonucleotide for detection of SNP TSC0007617
tcacacatcacta

SEQ ID NO: 253485 - DNA, 13 bp, Artificial Sequence
  Oligonucleotide for detection of SNP TSC0007617
tagtgacgtgtga

SEQ ID NO: 253486 - DNA, 13 bp, Artificial Sequence
  Oligonucleotide for detection of SNP TSC0007617
tcacacgtcacta

SEQ ID NO: 253487 - DNA, 13 bp, Artificial Sequence
  Oligonucleotide for detection of SNP TSC0007617
tagtgatgcgtga

SEQ ID NO: 253488 - DNA, 13 bp, Artificial Sequence
  Oligonucleotide for detection of SNP TSC0007617
tcacgcatcacta

SEQ ID NO: 253489 - DNA, 13 bp, Artificial Sequence
  Oligonucleotide for detection of SNP TSC0007617
tagtgacgcgtga

SEQ ID NO: 253490 - DNA, 13 bp, Artificial Sequence
  Oligonucleotide for detection of SNP TSC0007617
tcacgcgtcacta

SEQ ID NO: 253491 - DNA, 13 bp, Artificial Sequence
  Oligonucleotide for detection of SNP TSC0007617
ttacgtgttattg

SEQ ID NO: 253492 - DNA, 13 bp, Artificial Sequence
  Oligonucleotide for detection of SNP TSC0007617
caataacacgtaa

SEQ ID NO: 253493 - DNA, 13 bp, Artificial Sequence
  Oligonucleotide for detection of SNP TSC0007617
ttacgtattattg

SEQ ID NO: 253494 - DNA, 13 bp, Artificial Sequence
  Oligonucleotide for detection of SNP TSC0007617
caataatacgtaa

SEQ ID NO: 253495 - DNA, 13 bp, Artificial Sequence
  Oligonucleotide for detection of SNP TSC0007617
ttatgcgttattg

SEQ ID NO: 253496 - DNA, 13 bp, Artificial Sequence
  Oligonucleotide for detection of SNP TSC0007617
caataacgcataa

SEQ ID NO: 253497 - DNA, 13 bp, Artificial Sequence
  Oligonucleotide for detection of SNP TSC0007617
ttacgcgttattg

SEQ ID NO: 253498 - DNA, 13 bp, Artificial Sequence
  Oligonucleotide for detection of SNP TSC0007617
caataacgcgtaa

SEQ ID NO: 253499 - DNA, 13 bp, Artificial Sequence
  Oligonucleotide for detection of SNP TSC0061823
tagtttttttggt

SEQ ID NO: 253500 - DNA, 13 bp, Artificial Sequence
  Oligonucleotide for detection of SNP TSC0061823
accaaaaaaacta

SEQ ID NO: 253501 - DNA, 13 bp, Artificial Sequence
  Oligonucleotide for detection of SNP TSC0061823
tagtttgtttggt

SEQ ID NO: 253502 - DNA, 13 bp, Artificial Sequence
  Oligonucleotide for detection of SNP TSC0061823
accaaacaaacta

SEQ ID NO: 253503 - DNA, 13 bp, Artificial Sequence
  Oligonucleotide for detection of SNP TSC0061823
attagaaaaatta

SEQ ID NO: 253504 - DNA, 13 bp, Artificial Sequence
  Oligonucleotide for detection of SNP TSC0061823
taatttttctaat

SEQ ID NO: 253505 - DNA, 13 bp, Artificial Sequence
  Oligonucleotide for detection of SNP TSC0006436
ggtatatagtaag

SEQ ID NO: 253506 - DNA, 13 bp, Artificial Sequence
  Oligonucleotide for detection of SNP TSC0006436
cttactatatacc

SEQ ID NO: 253507 - DNA, 13 bp, Artificial Sequence
  Oligonucleotide for detection of SNP TSC0006436
ggtatagagtaag

SEQ ID NO: 253508 - DNA, 13 bp, Artificial Sequence
  Oligonucleotide for detection of SNP TSC0006436
cttactctatacc

SEQ ID NO: 253509 - DNA, 13 bp, Artificial Sequence
  Oligonucleotide for detection of SNP TSC0061825
aatttatgaggga

SEQ ID NO: 253510 - DNA, 13 bp, Artificial Sequence
  Oligonucleotide for detection of SNP TSC0061825
tccctcataaatt

SEQ ID NO: 253511 - DNA, 13 bp, Artificial Sequence
  Oligonucleotide for detection of SNP TSC0061825
aatttacgaggga

SEQ ID NO: 253512 - DNA, 13 bp, Artificial Sequence
  Oligonucleotide for detection of SNP TSC0061825
tccctcgtaaatt

SEQ ID NO: 253513 - DNA, 13 bp, Artificial Sequence
  Oligonucleotide for detection of SNP TSC0008912
gttaataggtata

SEQ ID NO: 253514 - DNA, 13 bp, Artificial Sequence
  Oligonucleotide for detection of SNP TSC0008912
tatacctattaac

SEQ ID NO: 253515 - DNA, 13 bp, Artificial Sequence
  Oligonucleotide for detection of SNP TSC0008912
gttaatgggtata

SEQ ID NO: 253516 - DNA, 13 bp, Artificial Sequence
  Oligonucleotide for detection of SNP TSC0008912
tatacccattaac

SEQ ID NO: 253517 - DNA, 13 bp, Artificial Sequence
  Oligonucleotide for detection of SNP TSC0008912
gttaacgggtata

SEQ ID NO: 253518 - DNA, 13 bp, Artificial Sequence
  Oligonucleotide for detection of SNP TSC0008912
tatacccgttaac

SEQ ID NO: 253519 - DNA, 13 bp, Artificial Sequence
  Oligonucleotide for detection of SNP TSC0008912
tgtatttgttaay

SEQ ID NO: 253520 - DNA, 13 bp, Artificial Sequence
  Oligonucleotide for detection of SNP TSC0008912
rttaacaaataca

SEQ ID NO: 253521 - DNA, 13 bp, Artificial Sequence
  Oligonucleotide for detection of SNP TSC0008912
tgtattcgttaay

SEQ ID NO: 253522 - DNA, 13 bp, Artificial Sequence
  Oligonucleotide for detection of SNP TSC0008912
rttaacgaataca

SEQ ID NO: 253523 - DNA, 13 bp, Artificial Sequence
  Oligonucleotide for detection of SNP TSC0008938
ttatttggtaatt

SEQ ID NO: 253524 - DNA, 13 bp, Artificial Sequence
  Oligonucleotide for detection of SNP TSC0008938
aattaccaaataa

SEQ ID NO: 253525 - DNA, 13 bp, Artificial Sequence
  Oligonucleotide for detection of SNP TSC0008938
aattatgaggtag

SEQ ID NO: 253526 - DNA, 13 bp, Artificial Sequence
  Oligonucleotide for detection of SNP TSC0008938
ctacctcataatt

SEQ ID NO: 253527 - DNA, 13 bp, Artificial Sequence
  Oligonucleotide for detection of SNP TSC0008938
aattattaggtag

SEQ ID NO: 253528 - DNA, 13 bp, Artificial Sequence
  Oligonucleotide for detection of SNP TSC0008938
ctacctaataatt

SEQ ID NO: 253529 - DNA, 13 bp, Artificial Sequence
  Oligonucleotide for detection of SNP TSC0008938
aattacgaggtag

SEQ ID NO: 253530 - DNA, 13 bp, Artificial Sequence
  Oligonucleotide for detection of SNP TSC0008938
ctacctcgtaatt

SEQ ID NO: 253531 - DNA, 13 bp, Artificial Sequence
  Oligonucleotide for detection of SNP TSC0061829
gttgtgatattag

SEQ ID NO: 253532 - DNA, 13 bp, Artificial Sequence
  Oligonucleotide for detection of SNP TSC0061829
ctaatatcacaac

SEQ ID NO: 253533 - DNA, 13 bp, Artificial Sequence
  Oligonucleotide for detection of SNP TSC0061829
gttgtggtattag

SEQ ID NO: 253534 - DNA, 13 bp, Artificial Sequence
  Oligonucleotide for detection of SNP TSC0061829
ctaataccacaac

SEQ ID NO: 253535 - DNA, 13 bp, Artificial Sequence
  Oligonucleotide for detection of SNP TSC0061830
gtaattgttagga

SEQ ID NO: 253536 - DNA, 13 bp, Artificial Sequence
  Oligonucleotide for detection of SNP TSC0061830
tcctaacaattac

SEQ ID NO: 253537 - DNA, 13 bp, Artificial Sequence
  Oligonucleotide for detection of SNP TSC0061830
gtaattattagga

SEQ ID NO: 253538 - DNA, 13 bp, Artificial Sequence
  Oligonucleotide for detection of SNP TSC0061830
tcctaataattac

SEQ ID NO: 253539 - DNA, 13 bp, Artificial Sequence
  Oligonucleotide for detection of SNP TSC0061831
ttatagatataaa

SEQ ID NO: 253540 - DNA, 13 bp, Artificial Sequence
  Oligonucleotide for detection of SNP TSC0061831
tttatatctataa

SEQ ID NO: 253541 - DNA, 13 bp, Artificial Sequence
  Oligonucleotide for detection of SNP TSC0061831
ttatagttataaa

SEQ ID NO: 253542 - DNA, 13 bp, Artificial Sequence
  Oligonucleotide for detection of SNP TSC0061831
tttataactataa

SEQ ID NO: 253543 - DNA, 13 bp, Artificial Sequence
  Oligonucleotide for detection of SNP TSC0061831
tttatatttataa

SEQ ID NO: 253544 - DNA, 13 bp, Artificial Sequence
  Oligonucleotide for detection of SNP TSC0061831
ttataaatataaa

SEQ ID NO: 253545 - DNA, 13 bp, Artificial Sequence
  Oligonucleotide for detection of SNP TSC0061831
tttataattataa

SEQ ID NO: 253546 - DNA, 13 bp, Artificial Sequence
  Oligonucleotide for detection of SNP TSC0061831
ttataattataaa

SEQ ID NO: 253547 - DNA, 13 bp, Artificial Sequence
  Oligonucleotide for detection of SNP TSC0061832
taaaatatattag

SEQ ID NO: 253548 - DNA, 13 bp, Artificial Sequence
  Oligonucleotide for detection of SNP TSC0061832
ctaatatatttta

SEQ ID NO: 253549 - DNA, 13 bp, Artificial Sequence
  Oligonucleotide for detection of SNP TSC0061832
taaaatgtattag

SEQ ID NO: 253550 - DNA, 13 bp, Artificial Sequence
  Oligonucleotide for detection of SNP TSC0061832
ctaatacatttta

SEQ ID NO: 253551 - DNA, 13 bp, Artificial Sequence
  Oligonucleotide for detection of SNP TSC0061832
taaaacgtattag

SEQ ID NO: 253552 - DNA, 13 bp, Artificial Sequence
  Oligonucleotide for detection of SNP TSC0061832
ctaatacgtttta

SEQ ID NO: 253553 - DNA, 13 bp, Artificial Sequence
  Oligonucleotide for detection of SNP TSC0008382
tattatggtaaay

SEQ ID NO: 253554 - DNA, 13 bp, Artificial Sequence
  Oligonucleotide for detection of SNP TSC0008382
rtttaccataata

SEQ ID NO: 253555 - DNA, 13 bp, Artificial Sequence
  Oligonucleotide for detection of SNP TSC0008382
tattatagtaaay

SEQ ID NO: 253556 - DNA, 13 bp, Artificial Sequence
  Oligonucleotide for detection of SNP TSC0008382
rtttactataata

SEQ ID NO: 253557 - DNA, 13 bp, Artificial Sequence
  Oligonucleotide for detection of SNP TSC0008973
atatggaaaaagy

SEQ ID NO: 253558 - DNA, 13 bp, Artificial Sequence
  Oligonucleotide for detection of SNP TSC0008973
rctttttccatat

SEQ ID NO: 253559 - DNA, 13 bp, Artificial Sequence
  Oligonucleotide for detection of SNP TSC0008973
atatggtaaaagy

SEQ ID NO: 253560 - DNA, 13 bp, Artificial Sequence
  Oligonucleotide for detection of SNP TSC0008973
rcttttaccatat

SEQ ID NO: 253561 - DNA, 13 bp, Artificial Sequence
  Oligonucleotide for detection of SNP TSC0061835
aaaattatagaat

SEQ ID NO: 253562 - DNA, 13 bp, Artificial Sequence
  Oligonucleotide for detection of SNP TSC0061835
attctataatttt

SEQ ID NO: 253563 - DNA, 13 bp, Artificial Sequence
  Oligonucleotide for detection of SNP TSC0061835
aaaattgtagaat

SEQ ID NO: 253564 - DNA, 13 bp, Artificial Sequence
  Oligonucleotide for detection of SNP TSC0061835
attctacaatttt

SEQ ID NO: 253565 - DNA, 13 bp, Artificial Sequence
  Oligonucleotide for detection of SNP TSC0061835
aaaatcgtagaat

SEQ ID NO: 253566 - DNA, 13 bp, Artificial Sequence
  Oligonucleotide for detection of SNP TSC0061835
attctacgatttt

SEQ ID NO: 253567 - DNA, 13 bp, Artificial Sequence
  Oligonucleotide for detection of SNP TSC0009406
ggaaagtgaagta

SEQ ID NO: 253568 - DNA, 13 bp, Artificial Sequence
  Oligonucleotide for detection of SNP TSC0009406
tacttcactttcc

SEQ ID NO: 253569 - DNA, 13 bp, Artificial Sequence
  Oligonucleotide for detection of SNP TSC0009406
ggaaagggaagta

SEQ ID NO: 253570 - DNA, 13 bp, Artificial Sequence
  Oligonucleotide for detection of SNP TSC0009406
tacttccctttcc

SEQ ID NO: 253571 - DNA, 13 bp, Artificial Sequence
  Oligonucleotide for detection of SNP TSC0009406
ggaaagcgaagta

SEQ ID NO: 253572 - DNA, 13 bp, Artificial Sequence
  Oligonucleotide for detection of SNP TSC0009406
tacttcgctttcc

SEQ ID NO: 253573 - DNA, 13 bp, Artificial Sequence
  Oligonucleotide for detection of SNP TSC0061836
ttttaaggagtta

SEQ ID NO: 253574 - DNA, 13 bp, Artificial Sequence
  Oligonucleotide for detection of SNP TSC0061836
taactccttaaaa

SEQ ID NO: 253575 - DNA, 13 bp, Artificial Sequence
  Oligonucleotide for detection of SNP TSC0061836
ttttaaagagtta

SEQ ID NO: 253576 - DNA, 13 bp, Artificial Sequence
  Oligonucleotide for detection of SNP TSC0061836
taactctttaaaa

SEQ ID NO: 253577 - DNA, 13 bp, Artificial Sequence
  Oligonucleotide for detection of SNP TSC0061837
ttaggatgatata

SEQ ID NO: 253578 - DNA, 13 bp, Artificial Sequence
  Oligonucleotide for detection of SNP TSC0061837
tatatcatcctaa

SEQ ID NO: 253579 - DNA, 13 bp, Artificial Sequence
  Oligonucleotide for detection of SNP TSC0061837
ttaggaggatata

SEQ ID NO: 253580 - DNA, 13 bp, Artificial Sequence
  Oligonucleotide for detection of SNP TSC0061837
tatatcctcctaa

SEQ ID NO: 253581 - DNA, 13 bp, Artificial Sequence
  Oligonucleotide for detection of SNP TSC0061837
tgtgttattttag

SEQ ID NO: 253582 - DNA, 13 bp, Artificial Sequence
  Oligonucleotide for detection of SNP TSC0061837
ctaaaataacaca

SEQ ID NO: 253583 - DNA, 13 bp, Artificial Sequence
  Oligonucleotide for detection of SNP TSC0061837
tgtgtttttttag

SEQ ID NO: 253584 - DNA, 13 bp, Artificial Sequence
  Oligonucleotide for detection of SNP TSC0061837
ctaaaaaaacaca

SEQ ID NO: 253585 - DNA, 13 bp, Artificial Sequence
  Oligonucleotide for detection of SNP TSC0001418
ttattgattgtta

SEQ ID NO: 253586 - DNA, 13 bp, Artificial Sequence
  Oligonucleotide for detection of SNP TSC0001418
taacaatcaataa

SEQ ID NO: 253587 - DNA, 13 bp, Artificial Sequence
  Oligonucleotide for detection of SNP TSC0001418
ttattgtttgtta

SEQ ID NO: 253588 - DNA, 13 bp, Artificial Sequence
  Oligonucleotide for detection of SNP TSC0001418
taacaaacaataa

SEQ ID NO: 253589 - DNA, 13 bp, Artificial Sequence
  Oligonucleotide for detection of SNP TSC0001418
tggtagttagtgg

SEQ ID NO: 253590 - DNA, 13 bp, Artificial Sequence
  Oligonucleotide for detection of SNP TSC0001418
ccactaactacca

SEQ ID NO: 253591 - DNA, 13 bp, Artificial Sequence
  Oligonucleotide for detection of SNP TSC0001418
tggtagatagtgg

SEQ ID NO: 253592 - DNA, 13 bp, Artificial Sequence
  Oligonucleotide for detection of SNP TSC0001418
ccactatctacca

SEQ ID NO: 253593 - DNA, 13 bp, Artificial Sequence
  Oligonucleotide for detection of SNP TSC0001419
tgtattgaggtty

SEQ ID NO: 253594 - DNA, 13 bp, Artificial Sequence
  Oligonucleotide for detection of SNP TSC0001419
raacctcaataca

SEQ ID NO: 253595 - DNA, 13 bp, Artificial Sequence
  Oligonucleotide for detection of SNP TSC0001419
tgtattaaggtty

SEQ ID NO: 253596 - DNA, 13 bp, Artificial Sequence
  Oligonucleotide for detection of SNP TSC0001419
raaccttaataca

SEQ ID NO: 253597 - DNA, 13 bp, Artificial Sequence
  Oligonucleotide for detection of SNP TSC0007307
atttaagtaaaaa

SEQ ID NO: 253598 - DNA, 13 bp, Artificial Sequence
  Oligonucleotide for detection of SNP TSC0007307
tttttacttaaat

SEQ ID NO: 253599 - DNA, 13 bp, Artificial Sequence
  Oligonucleotide for detection of SNP TSC0007308
tttggttgggagt

SEQ ID NO: 253600 - DNA, 13 bp, Artificial Sequence
  Oligonucleotide for detection of SNP TSC0007308
actcccaaccaaa

SEQ ID NO: 253601 - DNA, 13 bp, Artificial Sequence
  Oligonucleotide for detection of SNP TSC0007308
tttggtcgggagt

SEQ ID NO: 253602 - DNA, 13 bp, Artificial Sequence
  Oligonucleotide for detection of SNP TSC0007308
actcccgaccaaa

SEQ ID NO: 253603 - DNA, 13 bp, Artificial Sequence
  Oligonucleotide for detection of SNP TSC0007308
atttttggttaaa

SEQ ID NO: 253604 - DNA, 13 bp, Artificial Sequence
  Oligonucleotide for detection of SNP TSC0007308
tttaaccaaaaat

SEQ ID NO: 253605 - DNA, 13 bp, Artificial Sequence
  Oligonucleotide for detection of SNP TSC0007308
atttttagttaaa

SEQ ID NO: 253606 - DNA, 13 bp, Artificial Sequence
  Oligonucleotide for detection of SNP TSC0007308
tttaactaaaaat

SEQ ID NO: 253607 - DNA, 13 bp, Artificial Sequence
  Oligonucleotide for detection of SNP TSC0007308
attttcggttaaa

SEQ ID NO: 253608 - DNA, 13 bp, Artificial Sequence
  Oligonucleotide for detection of SNP TSC0007308
tttaaccgaaaat

SEQ ID NO: 253609 - DNA, 13 bp, Artificial Sequence
  Oligonucleotide for detection of SNP TSC0061838
tggtttggttttg

SEQ ID NO: 253610 - DNA, 13 bp, Artificial Sequence
  Oligonucleotide for detection of SNP TSC0061838
caaaaccaaacca

SEQ ID NO: 253611 - DNA, 13 bp, Artificial Sequence
  Oligonucleotide for detection of SNP TSC0061838
tggtttagttttg

SEQ ID NO: 253612 - DNA, 13 bp, Artificial Sequence
  Oligonucleotide for detection of SNP TSC0061838
caaaactaaacca

SEQ ID NO: 253613 - DNA, 13 bp, Artificial Sequence
  Oligonucleotide for detection of SNP TSC0061839
tgttatgggttag

SEQ ID NO: 253614 - DNA, 13 bp, Artificial Sequence
  Oligonucleotide for detection of SNP TSC0061839
ctaacccataaca

SEQ ID NO: 253615 - DNA, 13 bp, Artificial Sequence
  Oligonucleotide for detection of SNP TSC0061839
ttggttaataata

SEQ ID NO: 253616 - DNA, 13 bp, Artificial Sequence
  Oligonucleotide for detection of SNP TSC0061839
tattattaaccaa

SEQ ID NO: 253617 - DNA, 13 bp, Artificial Sequence
  Oligonucleotide for detection of SNP TSC0061839
ttggtttataata

SEQ ID NO: 253618 - DNA, 13 bp, Artificial Sequence
  Oligonucleotide for detection of SNP TSC0061839
tattataaaccaa

SEQ ID NO: 253619 - DNA, 13 bp, Artificial Sequence
  Oligonucleotide for detection of SNP TSC0008741
ttgattgaaatga

SEQ ID NO: 253620 - DNA, 13 bp, Artificial Sequence
  Oligonucleotide for detection of SNP TSC0008741
tcatttcaatcaa

SEQ ID NO: 253621 - DNA, 13 bp, Artificial Sequence
  Oligonucleotide for detection of SNP TSC0008741
ttgattaaaatga

SEQ ID NO: 253622 - DNA, 13 bp, Artificial Sequence
  Oligonucleotide for detection of SNP TSC0008741
tcattttaatcaa

SEQ ID NO: 253623 - DNA, 13 bp, Artificial Sequence
  Oligonucleotide for detection of SNP TSC0008741
ttgatcgaaatga

SEQ ID NO: 253624 - DNA, 13 bp, Artificial Sequence
  Oligonucleotide for detection of SNP TSC0008741
tcatttcgatcaa

SEQ ID NO: 253625 - DNA, 13 bp, Artificial Sequence
  Oligonucleotide for detection of SNP TSC0061841
ataaagagatgaa

SEQ ID NO: 253626 - DNA, 13 bp, Artificial Sequence
  Oligonucleotide for detection of SNP TSC0061841
ttcatctctttat

SEQ ID NO: 253627 - DNA, 13 bp, Artificial Sequence
  Oligonucleotide for detection of SNP TSC0061841
ataaagggatgaa

SEQ ID NO: 253628 - DNA, 13 bp, Artificial Sequence
  Oligonucleotide for detection of SNP TSC0061841
ttcatccctttat

SEQ ID NO: 253629 - DNA, 13 bp, Artificial Sequence
  Oligonucleotide for detection of SNP TSC0061842
ttaattgttggtt

SEQ ID NO: 253630 - DNA, 13 bp, Artificial Sequence
  Oligonucleotide for detection of SNP TSC0061842
aaccaacaattaa

SEQ ID NO: 253631 - DNA, 13 bp, Artificial Sequence
  Oligonucleotide for detection of SNP TSC0061842
ttaattattggtt

SEQ ID NO: 253632 - DNA, 13 bp, Artificial Sequence
  Oligonucleotide for detection of SNP TSC0061842
aaccaataattaa

SEQ ID NO: 253633 - DNA, 13 bp, Artificial Sequence
  Oligonucleotide for detection of SNP TSC0061843
attaattttatty

SEQ ID NO: 253634 - DNA, 13 bp, Artificial Sequence
  Oligonucleotide for detection of SNP TSC0061843
raataaaattaat

SEQ ID NO: 253635 - DNA, 13 bp, Artificial Sequence
  Oligonucleotide for detection of SNP TSC0061843
attaatgttatty

SEQ ID NO: 253636 - DNA, 13 bp, Artificial Sequence
  Oligonucleotide for detection of SNP TSC0061843
raataacattaat

SEQ ID NO: 253637 - DNA, 13 bp, Artificial Sequence
  Oligonucleotide for detection of SNP TSC0061843
gggtagaattggt

SEQ ID NO: 253638 - DNA, 13 bp, Artificial Sequence
  Oligonucleotide for detection of SNP TSC0061843
accaattctaccc

SEQ ID NO: 253639 - DNA, 13 bp, Artificial Sequence
  Oligonucleotide for detection of SNP TSC0061843
gggtagtattggt

SEQ ID NO: 253640 - DNA, 13 bp, Artificial Sequence
  Oligonucleotide for detection of SNP TSC0061843
accaatactaccc

SEQ ID NO: 253641 - DNA, 13 bp, Artificial Sequence
  Oligonucleotide for detection of SNP TSC0061844
gggagagtgtatg

SEQ ID NO: 253642 - DNA, 13 bp, Artificial Sequence
  Oligonucleotide for detection of SNP TSC0061844
catacactctccc

SEQ ID NO: 253643 - DNA, 13 bp, Artificial Sequence
  Oligonucleotide for detection of SNP TSC0061844
gggagaatgtatg

SEQ ID NO: 253644 - DNA, 13 bp, Artificial Sequence
  Oligonucleotide for detection of SNP TSC0061844
catacattctccc

SEQ ID NO: 253645 - DNA, 13 bp, Artificial Sequence
  Oligonucleotide for detection of SNP TSC0061845
attatttgttgtt

SEQ ID NO: 253646 - DNA, 13 bp, Artificial Sequence
  Oligonucleotide for detection of SNP TSC0061845
aacaacaaataat

SEQ ID NO: 253647 - DNA, 13 bp, Artificial Sequence
  Oligonucleotide for detection of SNP TSC0061845
attattggttgtt

SEQ ID NO: 253648 - DNA, 13 bp, Artificial Sequence
  Oligonucleotide for detection of SNP TSC0061845
aacaaccaataat

SEQ ID NO: 253649 - DNA, 13 bp, Artificial Sequence
  Oligonucleotide for detection of SNP TSC0061845
attattcgttgtt

SEQ ID NO: 253650 - DNA, 13 bp, Artificial Sequence
  Oligonucleotide for detection of SNP TSC0061845
aacaacgaataat

SEQ ID NO: 253651 - DNA, 13 bp, Artificial Sequence
  Oligonucleotide for detection of SNP TSC0061845
agtaatgagtagt

SEQ ID NO: 253652 - DNA, 13 bp, Artificial Sequence
  Oligonucleotide for detection of SNP TSC0061845
actactcattact

SEQ ID NO: 253653 - DNA, 13 bp, Artificial Sequence
  Oligonucleotide for detection of SNP TSC0061845
agtaattagtagt

SEQ ID NO: 253654 - DNA, 13 bp, Artificial Sequence
  Oligonucleotide for detection of SNP TSC0061845
actactaattact

SEQ ID NO: 253655 - DNA, 13 bp, Artificial Sequence
  Oligonucleotide for detection of SNP TSC0061845
agtaacgagtagt

SEQ ID NO: 253656 - DNA, 13 bp, Artificial Sequence
  Oligonucleotide for detection of SNP TSC0061845
actactcgttact

SEQ ID NO: 253657 - DNA, 13 bp, Artificial Sequence
  Oligonucleotide for detection of SNP TSC0061847
aaagagatagtga

SEQ ID NO: 253658 - DNA, 13 bp, Artificial Sequence
  Oligonucleotide for detection of SNP TSC0061847
tcactatctcttt

SEQ ID NO: 253659 - DNA, 13 bp, Artificial Sequence
  Oligonucleotide for detection of SNP TSC0061847
aaagaggtagtga

SEQ ID NO: 253660 - DNA, 13 bp, Artificial Sequence
  Oligonucleotide for detection of SNP TSC0061847
tcactacctcttt

SEQ ID NO: 253661 - DNA, 13 bp, Artificial Sequence
  Oligonucleotide for detection of SNP TSC0061848
gagtttaatatta

SEQ ID NO: 253662 - DNA, 13 bp, Artificial Sequence
  Oligonucleotide for detection of SNP TSC0061848
taatattaaactc

SEQ ID NO: 253663 - DNA, 13 bp, Artificial Sequence
  Oligonucleotide for detection of SNP TSC0061848
gagtttgatatta

SEQ ID NO: 253664 - DNA, 13 bp, Artificial Sequence
  Oligonucleotide for detection of SNP TSC0061848
taatatcaaactc

SEQ ID NO: 253665 - DNA, 13 bp, Artificial Sequence
  Oligonucleotide for detection of SNP TSC0061848
gagttcgatatta

SEQ ID NO: 253666 - DNA, 13 bp, Artificial Sequence
  Oligonucleotide for detection of SNP TSC0061848
taatatcgaactc

SEQ ID NO: 253667 - DNA, 13 bp, Artificial Sequence
  Oligonucleotide for detection of SNP TSC0061848
tagtgttgaatty

SEQ ID NO: 253668 - DNA, 13 bp, Artificial Sequence
  Oligonucleotide for detection of SNP TSC0061848
raattcaacacta

SEQ ID NO: 253669 - DNA, 13 bp, Artificial Sequence
  Oligonucleotide for detection of SNP TSC0061848
tagtgtcgaatty

SEQ ID NO: 253670 - DNA, 13 bp, Artificial Sequence
  Oligonucleotide for detection of SNP TSC0061848
raattcgacacta

SEQ ID NO: 253671 - DNA, 13 bp, Artificial Sequence
  Oligonucleotide for detection of SNP TSC0009012
ttatggtgtatty

SEQ ID NO: 253672 - DNA, 13 bp, Artificial Sequence
  Oligonucleotide for detection of SNP TSC0009012
raatacaccataa

SEQ ID NO: 253673 - DNA, 13 bp, Artificial Sequence
  Oligonucleotide for detection of SNP TSC0009012
ttatggggtatty

SEQ ID NO: 253674 - DNA, 13 bp, Artificial Sequence
  Oligonucleotide for detection of SNP TSC0009012
raataccccataa

SEQ ID NO: 253675 - DNA, 13 bp, Artificial Sequence
  Oligonucleotide for detection of SNP TSC0009012
ttatggcgtatty

SEQ ID NO: 253676 - DNA, 13 bp, Artificial Sequence
  Oligonucleotide for detection of SNP TSC0009012
raatacgccataa

SEQ ID NO: 253677 - DNA, 13 bp, Artificial Sequence
  Oligonucleotide for detection of SNP TSC0009012
gagtgtgttataa

SEQ ID NO: 253678 - DNA, 13 bp, Artificial Sequence
  Oligonucleotide for detection of SNP TSC0009012
ttataacacactc

SEQ ID NO: 253679 - DNA, 13 bp, Artificial Sequence
  Oligonucleotide for detection of SNP TSC0009012
gagtgttttataa

SEQ ID NO: 253680 - DNA, 13 bp, Artificial Sequence
  Oligonucleotide for detection of SNP TSC0009012
ttataaaacactc

SEQ ID NO: 253681 - DNA, 13 bp, Artificial Sequence
  Oligonucleotide for detection of SNP TSC0009012
gagtgcgttataa

SEQ ID NO: 253682 - DNA, 13 bp, Artificial Sequence
  Oligonucleotide for detection of SNP TSC0009012
ttataacgcactc

SEQ ID NO: 253683 - DNA, 13 bp, Artificial Sequence
  Oligonucleotide for detection of SNP TSC0061852
attattttgtttg

SEQ ID NO: 253684 - DNA, 13 bp, Artificial Sequence
  Oligonucleotide for detection of SNP TSC0061852
caaacaaaataat

SEQ ID NO: 253685 - DNA, 13 bp, Artificial Sequence
  Oligonucleotide for detection of SNP TSC0061852
attattgtgtttg

SEQ ID NO: 253686 - DNA, 13 bp, Artificial Sequence
  Oligonucleotide for detection of SNP TSC0061852
caaacacaataat

SEQ ID NO: 253687 - DNA, 13 bp, Artificial Sequence
  Oligonucleotide for detection of SNP TSC0061852
taggtaaagtggt

SEQ ID NO: 253688 - DNA, 13 bp, Artificial Sequence
  Oligonucleotide for detection of SNP TSC0061852
accactttaccta

SEQ ID NO: 253689 - DNA, 13 bp, Artificial Sequence
  Oligonucleotide for detection of SNP TSC0061852
taggtatagtggt

SEQ ID NO: 253690 - DNA, 13 bp, Artificial Sequence
  Oligonucleotide for detection of SNP TSC0061852
accactataccta

SEQ ID NO: 253691 - DNA, 13 bp, Artificial Sequence
  Oligonucleotide for detection of SNP TSC0061853
tagattaggatta

SEQ ID NO: 253692 - DNA, 13 bp, Artificial Sequence
  Oligonucleotide for detection of SNP TSC0061853
taatcctaatcta

SEQ ID NO: 253693 - DNA, 13 bp, Artificial Sequence
  Oligonucleotide for detection of SNP TSC0061853
tagattgggatta

SEQ ID NO: 253694 - DNA, 13 bp, Artificial Sequence
  Oligonucleotide for detection of SNP TSC0061853
taatcccaatcta

SEQ ID NO: 253695 - DNA, 13 bp, Artificial Sequence
  Oligonucleotide for detection of SNP TSC0061853
tagatcgggatta

SEQ ID NO: 253696 - DNA, 13 bp, Artificial Sequence
  Oligonucleotide for detection of SNP TSC0061853
taatcccgatcta

SEQ ID NO: 253697 - DNA, 13 bp, Artificial Sequence
  Oligonucleotide for detection of SNP TSC0061853
taattttgattta

SEQ ID NO: 253698 - DNA, 13 bp, Artificial Sequence
  Oligonucleotide for detection of SNP TSC0061853
taaatcaaaatta

SEQ ID NO: 253699 - DNA, 13 bp, Artificial Sequence
  Oligonucleotide for detection of SNP TSC0061853
taatttcgattta

SEQ ID NO: 253700 - DNA, 13 bp, Artificial Sequence
  Oligonucleotide for detection of SNP TSC0061853
taaatcgaaatta

SEQ ID NO: 253701 - DNA, 13 bp, Artificial Sequence
  Oligonucleotide for detection of SNP TSC0010339
taaataattttty

SEQ ID NO: 253702 - DNA, 13 bp, Artificial Sequence
  Oligonucleotide for detection of SNP TSC0010339
raaaaattattta

SEQ ID NO: 253703 - DNA, 13 bp, Artificial Sequence
  Oligonucleotide for detection of SNP TSC0005693
tagggttggtaga

SEQ ID NO: 253704 - DNA, 13 bp, Artificial Sequence
  Oligonucleotide for detection of SNP TSC0005693
tctaccaacccta

SEQ ID NO: 253705 - DNA, 13 bp, Artificial Sequence
  Oligonucleotide for detection of SNP TSC0005693
tagggtcggtaga

SEQ ID NO: 253706 - DNA, 13 bp, Artificial Sequence
  Oligonucleotide for detection of SNP TSC0005693
tctaccgacccta

SEQ ID NO: 253707 - DNA, 13 bp, Artificial Sequence
  Oligonucleotide for detection of SNP TSC0010907
aaaaaagaaaata

SEQ ID NO: 253708 - DNA, 13 bp, Artificial Sequence
  Oligonucleotide for detection of SNP TSC0010907
tattttctttttt

SEQ ID NO: 253709 - DNA, 13 bp, Artificial Sequence
  Oligonucleotide for detection of SNP TSC0010908
tgtaagaaaagta

SEQ ID NO: 253710 - DNA, 13 bp, Artificial Sequence
  Oligonucleotide for detection of SNP TSC0010908
tacttttcttaca

SEQ ID NO: 253711 - DNA, 13 bp, Artificial Sequence
  Oligonucleotide for detection of SNP TSC0010908
tgtaagtaaagta

SEQ ID NO: 253712 - DNA, 13 bp, Artificial Sequence
  Oligonucleotide for detection of SNP TSC0010908
tactttacttaca

SEQ ID NO: 253713 - DNA, 13 bp, Artificial Sequence
  Oligonucleotide for detection of SNP TSC0008402
gggtatatattgg

SEQ ID NO: 253714 - DNA, 13 bp, Artificial Sequence
  Oligonucleotide for detection of SNP TSC0008402
ccaatatataccc

SEQ ID NO: 253715 - DNA, 13 bp, Artificial Sequence
  Oligonucleotide for detection of SNP TSC0008402
gggtatttattgg

SEQ ID NO: 253716 - DNA, 13 bp, Artificial Sequence
  Oligonucleotide for detection of SNP TSC0008402
ccaataaataccc

SEQ ID NO: 253717 - DNA, 13 bp, Artificial Sequence
  Oligonucleotide for detection of SNP TSC0008402
ttagtgtgtatty

SEQ ID NO: 253718 - DNA, 13 bp, Artificial Sequence
  Oligonucleotide for detection of SNP TSC0008402
raatacacactaa

SEQ ID NO: 253719 - DNA, 13 bp, Artificial Sequence
  Oligonucleotide for detection of SNP TSC0008402
ttagtgggtatty

SEQ ID NO: 253720 - DNA, 13 bp, Artificial Sequence
  Oligonucleotide for detection of SNP TSC0008402
raatacccactaa

SEQ ID NO: 253721 - DNA, 13 bp, Artificial Sequence
  Oligonucleotide for detection of SNP TSC0061855
ggggagttaatta

SEQ ID NO: 253722 - DNA, 13 bp, Artificial Sequence
  Oligonucleotide for detection of SNP TSC0061855
taattaactcccc

SEQ ID NO: 253723 - DNA, 13 bp, Artificial Sequence
  Oligonucleotide for detection of SNP TSC0061855
ggggaggtaatta

SEQ ID NO: 253724 - DNA, 13 bp, Artificial Sequence
  Oligonucleotide for detection of SNP TSC0061855
taattacctcccc

SEQ ID NO: 253725 - DNA, 13 bp, Artificial Sequence
  Oligonucleotide for detection of SNP TSC0061855
taattaattttty

SEQ ID NO: 253726 - DNA, 13 bp, Artificial Sequence
  Oligonucleotide for detection of SNP TSC0061855
raaaaattaatta

SEQ ID NO: 253727 - DNA, 13 bp, Artificial Sequence
  Oligonucleotide for detection of SNP TSC0061855
taattatttttty

SEQ ID NO: 253728 - DNA, 13 bp, Artificial Sequence
  Oligonucleotide for detection of SNP TSC0061855
raaaaaataatta

SEQ ID NO: 253729 - DNA, 13 bp, Artificial Sequence
  Oligonucleotide for detection of SNP TSC0061856
atggtgtgtgatt

SEQ ID NO: 253730 - DNA, 13 bp, Artificial Sequence
  Oligonucleotide for detection of SNP TSC0061856
aatcacacaccat

SEQ ID NO: 253731 - DNA, 13 bp, Artificial Sequence
  Oligonucleotide for detection of SNP TSC0061856
atggtgcgtgatt

SEQ ID NO: 253732 - DNA, 13 bp, Artificial Sequence
  Oligonucleotide for detection of SNP TSC0061856
aatcacgcaccat

SEQ ID NO: 253733 - DNA, 13 bp, Artificial Sequence
  Oligonucleotide for detection of SNP TSC0061856
aattatgtattat

SEQ ID NO: 253734 - DNA, 13 bp, Artificial Sequence
  Oligonucleotide for detection of SNP TSC0061856
ataatacataatt

SEQ ID NO: 253735 - DNA, 13 bp, Artificial Sequence
  Oligonucleotide for detection of SNP TSC0061856
aattatatattat

SEQ ID NO: 253736 - DNA, 13 bp, Artificial Sequence
  Oligonucleotide for detection of SNP TSC0061856
ataatatataatt

SEQ ID NO: 253737 - DNA, 13 bp, Artificial Sequence
  Oligonucleotide for detection of SNP TSC0061857
aggtttaatatag

SEQ ID NO: 253738 - DNA, 13 bp, Artificial Sequence
  Oligonucleotide for detection of SNP TSC0061857
ctatattaaacct

SEQ ID NO: 253739 - DNA, 13 bp, Artificial Sequence
  Oligonucleotide for detection of SNP TSC0061857
aggttttatatag

SEQ ID NO: 253740 - DNA, 13 bp, Artificial Sequence
  Oligonucleotide for detection of SNP TSC0061857
ctatataaaacct

SEQ ID NO: 253741 - DNA, 13 bp, Artificial Sequence
  Oligonucleotide for detection of SNP TSC0061858
tagttatgtaatt

SEQ ID NO: 253742 - DNA, 13 bp, Artificial Sequence
  Oligonucleotide for detection of SNP TSC0061858
aattacataacta

SEQ ID NO: 253743 - DNA, 13 bp, Artificial Sequence
  Oligonucleotide for detection of SNP TSC0061858
tagttacgtaatt

SEQ ID NO: 253744 - DNA, 13 bp, Artificial Sequence
  Oligonucleotide for detection of SNP TSC0061858
aattacgtaacta

SEQ ID NO: 253745 - DNA, 13 bp, Artificial Sequence
  Oligonucleotide for detection of SNP TSC0061858
aattatgtaatta

SEQ ID NO: 253746 - DNA, 13 bp, Artificial Sequence
  Oligonucleotide for detection of SNP TSC0061858
taattacataatt

SEQ ID NO: 253747 - DNA, 13 bp, Artificial Sequence
  Oligonucleotide for detection of SNP TSC0061858
aattatataatta

SEQ ID NO: 253748 - DNA, 13 bp, Artificial Sequence
  Oligonucleotide for detection of SNP TSC0061858
taattatataatt

SEQ ID NO: 253749 - DNA, 13 bp, Artificial Sequence
  Oligonucleotide for detection of SNP TSC0061858
aattacgtaatta

SEQ ID NO: 253750 - DNA, 13 bp, Artificial Sequence
  Oligonucleotide for detection of SNP TSC0061858
taattacgtaatt

SEQ ID NO: 253751 - DNA, 13 bp, Artificial Sequence
  Oligonucleotide for detection of SNP TSC0061859
tagttatgatgga

SEQ ID NO: 253752 - DNA, 13 bp, Artificial Sequence
  Oligonucleotide for detection of SNP TSC0061859
tccatcataacta

SEQ ID NO: 253753 - DNA, 13 bp, Artificial Sequence
  Oligonucleotide for detection of SNP TSC0061859
tagttacgatgga

SEQ ID NO: 253754 - DNA, 13 bp, Artificial Sequence
  Oligonucleotide for detection of SNP TSC0061859
tccatcgtaacta

SEQ ID NO: 253755 - DNA, 13 bp, Artificial Sequence
  Oligonucleotide for detection of SNP TSC0061860
tgatggatttttg

SEQ ID NO: 253756 - DNA, 13 bp, Artificial Sequence
  Oligonucleotide for detection of SNP TSC0061860
caaaaatccatca

SEQ ID NO: 253757 - DNA, 13 bp, Artificial Sequence
  Oligonucleotide for detection of SNP TSC0061860
tgatgggtttttg

SEQ ID NO: 253758 - DNA, 13 bp, Artificial Sequence
  Oligonucleotide for detection of SNP TSC0061860
caaaaacccatca

SEQ ID NO: 253759 - DNA, 13 bp, Artificial Sequence
  Oligonucleotide for detection of SNP TSC0061860
cgatggatttttg

SEQ ID NO: 253760 - DNA, 13 bp, Artificial Sequence
  Oligonucleotide for detection of SNP TSC0061860
caaaaatccatcg

SEQ ID NO: 253761 - DNA, 13 bp, Artificial Sequence
  Oligonucleotide for detection of SNP TSC0061860
cgatgggtttttg

SEQ ID NO: 253762 - DNA, 13 bp, Artificial Sequence
  Oligonucleotide for detection of SNP TSC0061860
caaaaacccatcg

SEQ ID NO: 253763 - DNA, 13 bp, Artificial Sequence
  Oligonucleotide for detection of SNP TSC0061861
tggattattggat

SEQ ID NO: 253764 - DNA, 13 bp, Artificial Sequence
  Oligonucleotide for detection of SNP TSC0061861
atccaataatcca

SEQ ID NO: 253765 - DNA, 13 bp, Artificial Sequence
  Oligonucleotide for detection of SNP TSC0061861
tggatttttggat

SEQ ID NO: 253766 - DNA, 13 bp, Artificial Sequence
  Oligonucleotide for detection of SNP TSC0061861
atccaaaaatcca

SEQ ID NO: 253767 - DNA, 13 bp, Artificial Sequence
  Oligonucleotide for detection of SNP TSC0061869
ttggggtttggaa

SEQ ID NO: 253768 - DNA, 13 bp, Artificial Sequence
  Oligonucleotide for detection of SNP TSC0061869
ttccaaaccccaa

SEQ ID NO: 253769 - DNA, 13 bp, Artificial Sequence
  Oligonucleotide for detection of SNP TSC0061869
ttgggggttggaa

SEQ ID NO: 253770 - DNA, 13 bp, Artificial Sequence
  Oligonucleotide for detection of SNP TSC0061869
ttccaacccccaa

SEQ ID NO: 253771 - DNA, 13 bp, Artificial Sequence
  Oligonucleotide for detection of SNP TSC0061870
agtagtatatttt

SEQ ID NO: 253772 - DNA, 13 bp, Artificial Sequence
  Oligonucleotide for detection of SNP TSC0061870
aaaatatactact

SEQ ID NO: 253773 - DNA, 13 bp, Artificial Sequence
  Oligonucleotide for detection of SNP TSC0061870
agtagtgtatttt

SEQ ID NO: 253774 - DNA, 13 bp, Artificial Sequence
  Oligonucleotide for detection of SNP TSC0061870
aaaatacactact

SEQ ID NO: 253775 - DNA, 13 bp, Artificial Sequence
  Oligonucleotide for detection of SNP TSC0004754
gttttttgaagag

SEQ ID NO: 253776 - DNA, 13 bp, Artificial Sequence
  Oligonucleotide for detection of SNP TSC0004754
ctcttcaaaaaac

SEQ ID NO: 253777 - DNA, 13 bp, Artificial Sequence
  Oligonucleotide for detection of SNP TSC0004754
gtttttcgaagag

SEQ ID NO: 253778 - DNA, 13 bp, Artificial Sequence
  Oligonucleotide for detection of SNP TSC0004754
ctcttcgaaaaac

SEQ ID NO: 253779 - DNA, 13 bp, Artificial Sequence
  Oligonucleotide for detection of SNP TSC0004754
ttttttgagaggy

SEQ ID NO: 253780 - DNA, 13 bp, Artificial Sequence
  Oligonucleotide for detection of SNP TSC0004754
rcctctcaaaaaa

SEQ ID NO: 253781 - DNA, 13 bp, Artificial Sequence
  Oligonucleotide for detection of SNP TSC0004754
ttttttaagaggy

SEQ ID NO: 253782 - DNA, 13 bp, Artificial Sequence
  Oligonucleotide for detection of SNP TSC0004754
rcctcttaaaaaa

SEQ ID NO: 253783 - DNA, 13 bp, Artificial Sequence
  Oligonucleotide for detection of SNP TSC0004754
tttttcgagaggy

SEQ ID NO: 253784 - DNA, 13 bp, Artificial Sequence
  Oligonucleotide for detection of SNP TSC0004754
rcctctcgaaaaa

SEQ ID NO: 253785 - DNA, 13 bp, Artificial Sequence
  Oligonucleotide for detection of SNP TSC0004755
aaattagaagtga

SEQ ID NO: 253786 - DNA, 13 bp, Artificial Sequence
  Oligonucleotide for detection of SNP TSC0004755
tcacttctaattt

SEQ ID NO: 253787 - DNA, 13 bp, Artificial Sequence
  Oligonucleotide for detection of SNP TSC0004755
aaattaaaagtga

SEQ ID NO: 253788 - DNA, 13 bp, Artificial Sequence
  Oligonucleotide for detection of SNP TSC0004755
tcacttttaattt

SEQ ID NO: 253789 - DNA, 13 bp, Artificial Sequence
  Oligonucleotide for detection of SNP TSC0061872
ttaggtggagaay

SEQ ID NO: 253790 - DNA, 13 bp, Artificial Sequence
  Oligonucleotide for detection of SNP TSC0061872
rttctccacctaa

SEQ ID NO: 253791 - DNA, 13 bp, Artificial Sequence
  Oligonucleotide for detection of SNP TSC0061872
ttaggtagagaay

SEQ ID NO: 253792 - DNA, 13 bp, Artificial Sequence
  Oligonucleotide for detection of SNP TSC0061872
rttctctacctaa

SEQ ID NO: 253793 - DNA, 13 bp, Artificial Sequence
  Oligonucleotide for detection of SNP TSC0061873
tatagttttttgt

SEQ ID NO: 253794 - DNA, 13 bp, Artificial Sequence
  Oligonucleotide for detection of SNP TSC0061873
acaaaaaactata

SEQ ID NO: 253795 - DNA, 13 bp, Artificial Sequence
  Oligonucleotide for detection of SNP TSC0061873
tatagtgttttgt

SEQ ID NO: 253796 - DNA, 13 bp, Artificial Sequence
  Oligonucleotide for detection of SNP TSC0061873
acaaaacactata

SEQ ID NO: 253797 - DNA, 13 bp, Artificial Sequence
  Oligonucleotide for detection of SNP TSC0061874
tgttatgttgtag

SEQ ID NO: 253798 - DNA, 13 bp, Artificial Sequence
  Oligonucleotide for detection of SNP TSC0061874
ctacaacataaca

SEQ ID NO: 253799 - DNA, 13 bp, Artificial Sequence
  Oligonucleotide for detection of SNP TSC0061874
tgttatattgtag

SEQ ID NO: 253800 - DNA, 13 bp, Artificial Sequence
  Oligonucleotide for detection of SNP TSC0061874
ctacaatataaca

SEQ ID NO: 253801 - DNA, 13 bp, Artificial Sequence
  Oligonucleotide for detection of SNP TSC0061875
tttaaattgtggt

SEQ ID NO: 253802 - DNA, 13 bp, Artificial Sequence
  Oligonucleotide for detection of SNP TSC0061875
accacaatttaaa

SEQ ID NO: 253803 - DNA, 13 bp, Artificial Sequence
  Oligonucleotide for detection of SNP TSC0061875
tttaaagtgtggt

SEQ ID NO: 253804 - DNA, 13 bp, Artificial Sequence
  Oligonucleotide for detection of SNP TSC0061875
accacactttaaa

SEQ ID NO: 253805 - DNA, 13 bp, Artificial Sequence
  Oligonucleotide for detection of SNP TSC0061875
attatattttgag

SEQ ID NO: 253806 - DNA, 13 bp, Artificial Sequence
  Oligonucleotide for detection of SNP TSC0061875
ctcaaaatataat

SEQ ID NO: 253807 - DNA, 13 bp, Artificial Sequence
  Oligonucleotide for detection of SNP TSC0061876
ttttttagtgatg

SEQ ID NO: 253808 - DNA, 13 bp, Artificial Sequence
  Oligonucleotide for detection of SNP TSC0061876
catcactaaaaaa

SEQ ID NO: 253809 - DNA, 13 bp, Artificial Sequence
  Oligonucleotide for detection of SNP TSC0061877
ttaaaagtaaaat

SEQ ID NO: 253810 - DNA, 13 bp, Artificial Sequence
  Oligonucleotide for detection of SNP TSC0061877
attttacttttaa

SEQ ID NO: 253811 - DNA, 13 bp, Artificial Sequence
  Oligonucleotide for detection of SNP TSC0061878
gatgtagtttagy

SEQ ID NO: 253812 - DNA, 13 bp, Artificial Sequence
  Oligonucleotide for detection of SNP TSC0061878
rctaaactacatc

SEQ ID NO: 253813 - DNA, 13 bp, Artificial Sequence
  Oligonucleotide for detection of SNP TSC0061878
gatgtaatttagy

SEQ ID NO: 253814 - DNA, 13 bp, Artificial Sequence
  Oligonucleotide for detection of SNP TSC0061878
rctaaattacatc

SEQ ID NO: 253815 - DNA, 13 bp, Artificial Sequence
  Oligonucleotide for detection of SNP TSC0061883
tggtgtatttttt

SEQ ID NO: 253816 - DNA, 13 bp, Artificial Sequence
  Oligonucleotide for detection of SNP TSC0061883
aaaaaatacacca

SEQ ID NO: 253817 - DNA, 13 bp, Artificial Sequence
  Oligonucleotide for detection of SNP TSC0061883
tggtgtttttttt

SEQ ID NO: 253818 - DNA, 13 bp, Artificial Sequence
  Oligonucleotide for detection of SNP TSC0061883
aaaaaaaacacca

SEQ ID NO: 253819 - DNA, 13 bp, Artificial Sequence
  Oligonucleotide for detection of SNP TSC0061883
tggcgtatttttt

SEQ ID NO: 253820 - DNA, 13 bp, Artificial Sequence
  Oligonucleotide for detection of SNP TSC0061883
aaaaaatacgcca

SEQ ID NO: 253821 - DNA, 13 bp, Artificial Sequence
  Oligonucleotide for detection of SNP TSC0061883
tggcgtttttttt

SEQ ID NO: 253822 - DNA, 13 bp, Artificial Sequence
  Oligonucleotide for detection of SNP TSC0061883
aaaaaaaacgcca

SEQ ID NO: 253823 - DNA, 13 bp, Artificial Sequence
  Oligonucleotide for detection of SNP TSC0061883
aaaaaatatgtta

SEQ ID NO: 253824 - DNA, 13 bp, Artificial Sequence
  Oligonucleotide for detection of SNP TSC0061883
taacatatttttt

SEQ ID NO: 253825 - DNA, 13 bp, Artificial Sequence
  Oligonucleotide for detection of SNP TSC0061883
aaaaaagatgtta

SEQ ID NO: 253826 - DNA, 13 bp, Artificial Sequence
  Oligonucleotide for detection of SNP TSC0061883
taacatctttttt

SEQ ID NO: 253827 - DNA, 13 bp, Artificial Sequence
  Oligonucleotide for detection of SNP TSC0061883
aaaaaatacgtta

SEQ ID NO: 253828 - DNA, 13 bp, Artificial Sequence
  Oligonucleotide for detection of SNP TSC0061883
taacgtatttttt

SEQ ID NO: 253829 - DNA, 13 bp, Artificial Sequence
  Oligonucleotide for detection of SNP TSC0061883
aaaaaagacgtta

SEQ ID NO: 253830 - DNA, 13 bp, Artificial Sequence
  Oligonucleotide for detection of SNP TSC0061883
taacgtctttttt

SEQ ID NO: 253831 - DNA, 13 bp, Artificial Sequence
  Oligonucleotide for detection of SNP TSC0061884
tgaagatatagta

SEQ ID NO: 253832 - DNA, 13 bp, Artificial Sequence
  Oligonucleotide for detection of SNP TSC0061884
tactatatcttca

SEQ ID NO: 253833 - DNA, 13 bp, Artificial Sequence
  Oligonucleotide for detection of SNP TSC0061884
tgaagaaatagta

SEQ ID NO: 253834 - DNA, 13 bp, Artificial Sequence
  Oligonucleotide for detection of SNP TSC0061884
tactatttcttca

SEQ ID NO: 253835 - DNA, 13 bp, Artificial Sequence
  Oligonucleotide for detection of SNP TSC0061889
gaaagtaggtatt

SEQ ID NO: 253836 - DNA, 13 bp, Artificial Sequence
  Oligonucleotide for detection of SNP TSC0061889
aatacctactttc

SEQ ID NO: 253837 - DNA, 13 bp, Artificial Sequence
  Oligonucleotide for detection of SNP TSC0061889
gaaagtgggtatt

SEQ ID NO: 253838 - DNA, 13 bp, Artificial Sequence
  Oligonucleotide for detection of SNP TSC0061889
aatacccactttc

SEQ ID NO: 253839 - DNA, 13 bp, Artificial Sequence
  Oligonucleotide for detection of SNP TSC0061890
attgggtattagg

SEQ ID NO: 253840 - DNA, 13 bp, Artificial Sequence
  Oligonucleotide for detection of SNP TSC0061890
cctaatacccaat

SEQ ID NO: 253841 - DNA, 13 bp, Artificial Sequence
  Oligonucleotide for detection of SNP TSC0061890
attggggattagg

SEQ ID NO: 253842 - DNA, 13 bp, Artificial Sequence
  Oligonucleotide for detection of SNP TSC0061890
cctaatccccaat

SEQ ID NO: 253843 - DNA, 13 bp, Artificial Sequence
  Oligonucleotide for detection of SNP TSC0061890
tttaatttttaat

SEQ ID NO: 253844 - DNA, 13 bp, Artificial Sequence
  Oligonucleotide for detection of SNP TSC0061890
attaaaaattaaa

SEQ ID NO: 253845 - DNA, 13 bp, Artificial Sequence
  Oligonucleotide for detection of SNP TSC0061892
agaatagttttty

SEQ ID NO: 253846 - DNA, 13 bp, Artificial Sequence
  Oligonucleotide for detection of SNP TSC0061892
raaaaactattct

SEQ ID NO: 253847 - DNA, 13 bp, Artificial Sequence
  Oligonucleotide for detection of SNP TSC0061894
tgttttataattg

SEQ ID NO: 253848 - DNA, 13 bp, Artificial Sequence
  Oligonucleotide for detection of SNP TSC0061894
caattataaaaca

SEQ ID NO: 253849 - DNA, 13 bp, Artificial Sequence
  Oligonucleotide for detection of SNP TSC0061894
tgttttttaattg

SEQ ID NO: 253850 - DNA, 13 bp, Artificial Sequence
  Oligonucleotide for detection of SNP TSC0061894
caattaaaaaaca

SEQ ID NO: 253851 - DNA, 13 bp, Artificial Sequence
  Oligonucleotide for detection of SNP TSC0061894
tagttatagagta

SEQ ID NO: 253852 - DNA, 13 bp, Artificial Sequence
  Oligonucleotide for detection of SNP TSC0061894
tactctataacta

SEQ ID NO: 253853 - DNA, 13 bp, Artificial Sequence
  Oligonucleotide for detection of SNP TSC0061894
tagttaaagagta

SEQ ID NO: 253854 - DNA, 13 bp, Artificial Sequence
  Oligonucleotide for detection of SNP TSC0061894
tactctttaacta

SEQ ID NO: 253855 - DNA, 13 bp, Artificial Sequence
  Oligonucleotide for detection of SNP TSC0061895
gttttttatttag

SEQ ID NO: 253856 - DNA, 13 bp, Artificial Sequence
  Oligonucleotide for detection of SNP TSC0061895
ctaaataaaaaac

SEQ ID NO: 253857 - DNA, 13 bp, Artificial Sequence
  Oligonucleotide for detection of SNP TSC0061895
ttaaattgaagay

SEQ ID NO: 253858 - DNA, 13 bp, Artificial Sequence
  Oligonucleotide for detection of SNP TSC0061895
rtcttcaatttaa

SEQ ID NO: 253859 - DNA, 13 bp, Artificial Sequence
  Oligonucleotide for detection of SNP TSC0061895
ttaaatggaagay

SEQ ID NO: 253860 - DNA, 13 bp, Artificial Sequence
  Oligonucleotide for detection of SNP TSC0061895
rtcttccatttaa

SEQ ID NO: 253861 - DNA, 13 bp, Artificial Sequence
  Oligonucleotide for detection of SNP TSC0061896
gagagttgaattt

SEQ ID NO: 253862 - DNA, 13 bp, Artificial Sequence
  Oligonucleotide for detection of SNP TSC0061896
aaattcaactctc

SEQ ID NO: 253863 - DNA, 13 bp, Artificial Sequence
  Oligonucleotide for detection of SNP TSC0061896
gagagtcgaattt

SEQ ID NO: 253864 - DNA, 13 bp, Artificial Sequence
  Oligonucleotide for detection of SNP TSC0061896
aaattcgactctc

SEQ ID NO: 253865 - DNA, 13 bp, Artificial Sequence
  Oligonucleotide for detection of SNP TSC0061897
gtagaagaggaaa

SEQ ID NO: 253866 - DNA, 13 bp, Artificial Sequence
  Oligonucleotide for detection of SNP TSC0061897
tttcctcttctac

SEQ ID NO: 253867 - DNA, 13 bp, Artificial Sequence
  Oligonucleotide for detection of SNP TSC0061897
gtagaaaaggaaa

SEQ ID NO: 253868 - DNA, 13 bp, Artificial Sequence
  Oligonucleotide for detection of SNP TSC0061897
tttccttttctac

SEQ ID NO: 253869 - DNA, 13 bp, Artificial Sequence
  Oligonucleotide for detection of SNP TSC0061899
gatttattgagty

SEQ ID NO: 253870 - DNA, 13 bp, Artificial Sequence
  Oligonucleotide for detection of SNP TSC0061899
ractcaataaatc

SEQ ID NO: 253871 - DNA, 13 bp, Artificial Sequence
  Oligonucleotide for detection of SNP TSC0061899
gatttagtgagty

SEQ ID NO: 253872 - DNA, 13 bp, Artificial Sequence
  Oligonucleotide for detection of SNP TSC0061899
ractcactaaatc

SEQ ID NO: 253873 - DNA, 13 bp, Artificial Sequence
  Oligonucleotide for detection of SNP TSC0061899
ggtttagtgaaty

SEQ ID NO: 253874 - DNA, 13 bp, Artificial Sequence
  Oligonucleotide for detection of SNP TSC0061899
rattcactaaacc

SEQ ID NO: 253875 - DNA, 13 bp, Artificial Sequence
  Oligonucleotide for detection of SNP TSC0061899
ggtttattgaaty

SEQ ID NO: 253876 - DNA, 13 bp, Artificial Sequence
  Oligonucleotide for detection of SNP TSC0061899
rattcaataaacc

SEQ ID NO: 253877 - DNA, 13 bp, Artificial Sequence
  Oligonucleotide for detection of SNP TSC0061908
atggttatttttt

SEQ ID NO: 253878 - DNA, 13 bp, Artificial Sequence
  Oligonucleotide for detection of SNP TSC0061908
aaaaaataaccat

SEQ ID NO: 253879 - DNA, 13 bp, Artificial Sequence
  Oligonucleotide for detection of SNP TSC0061909
tgaatgagattga

SEQ ID NO: 253880 - DNA, 13 bp, Artificial Sequence
  Oligonucleotide for detection of SNP TSC0061909
tcaatctcattca

SEQ ID NO: 253881 - DNA, 13 bp, Artificial Sequence
  Oligonucleotide for detection of SNP TSC0061909
tgaatgtgattga

SEQ ID NO: 253882 - DNA, 13 bp, Artificial Sequence
  Oligonucleotide for detection of SNP TSC0061909
tcaatcacattca

SEQ ID NO: 253883 - DNA, 13 bp, Artificial Sequence
  Oligonucleotide for detection of SNP TSC0061909
tgaatgcgattga

SEQ ID NO: 253884 - DNA, 13 bp, Artificial Sequence
  Oligonucleotide for detection of SNP TSC0061909
tcaatcgcattca

SEQ ID NO: 253885 - DNA, 13 bp, Artificial Sequence
  Oligonucleotide for detection of SNP TSC0061909
ttaatcgtattta

SEQ ID NO: 253886 - DNA, 13 bp, Artificial Sequence
  Oligonucleotide for detection of SNP TSC0061909
taaatacgattaa

SEQ ID NO: 253887 - DNA, 13 bp, Artificial Sequence
  Oligonucleotide for detection of SNP TSC0061910
aagtaagttttay

SEQ ID NO: 253888 - DNA, 13 bp, Artificial Sequence
  Oligonucleotide for detection of SNP TSC0061910
rtaaaacttactt

SEQ ID NO: 253889 - DNA, 13 bp, Artificial Sequence
  Oligonucleotide for detection of SNP TSC0061910
aagtaaattttay

SEQ ID NO: 253890 - DNA, 13 bp, Artificial Sequence
  Oligonucleotide for detection of SNP TSC0061910
rtaaaatttactt

SEQ ID NO: 253891 - DNA, 13 bp, Artificial Sequence
  Oligonucleotide for detection of SNP TSC0061912
attttttaataat

SEQ ID NO: 253892 - DNA, 13 bp, Artificial Sequence
  Oligonucleotide for detection of SNP TSC0061912
attattaaaaaat

SEQ ID NO: 253893 - DNA, 13 bp, Artificial Sequence
  Oligonucleotide for detection of SNP TSC0061912
atttttgaataat

SEQ ID NO: 253894 - DNA, 13 bp, Artificial Sequence
  Oligonucleotide for detection of SNP TSC0061912
attattcaaaaat

SEQ ID NO: 253895 - DNA, 13 bp, Artificial Sequence
  Oligonucleotide for detection of SNP TSC0061912
attgttgaaaaat

SEQ ID NO: 253896 - DNA, 13 bp, Artificial Sequence
  Oligonucleotide for detection of SNP TSC0061912
atttttcaacaat

SEQ ID NO: 253897 - DNA, 13 bp, Artificial Sequence
  Oligonucleotide for detection of SNP TSC0061912
attgtttaaaaat

SEQ ID NO: 253898 - DNA, 13 bp, Artificial Sequence
  Oligonucleotide for detection of SNP TSC0061912
atttttaaacaat

SEQ ID NO: 253899 - DNA, 13 bp, Artificial Sequence
  Oligonucleotide for detection of SNP TSC0061913
aattgatagaaag

SEQ ID NO: 253900 - DNA, 13 bp, Artificial Sequence
  Oligonucleotide for detection of SNP TSC0061913
ctttctatcaatt

SEQ ID NO: 253901 - DNA, 13 bp, Artificial Sequence
  Oligonucleotide for detection of SNP TSC0061913
aattgagagaaag

SEQ ID NO: 253902 - DNA, 13 bp, Artificial Sequence
  Oligonucleotide for detection of SNP TSC0061913
ctttctctcaatt

SEQ ID NO: 253903 - DNA, 13 bp, Artificial Sequence
  Oligonucleotide for detection of SNP TSC0061914
gtaaagggtattg

SEQ ID NO: 253904 - DNA, 13 bp, Artificial Sequence
  Oligonucleotide for detection of SNP TSC0061914
caataccctttac

SEQ ID NO: 253905 - DNA, 13 bp, Artificial Sequence
  Oligonucleotide for detection of SNP TSC0061914
gtaaagagtattg

SEQ ID NO: 253906 - DNA, 13 bp, Artificial Sequence
  Oligonucleotide for detection of SNP TSC0061914
caatactctttac

SEQ ID NO: 253907 - DNA, 13 bp, Artificial Sequence
  Oligonucleotide for detection of SNP TSC0061915
ttgttatgatttt

SEQ ID NO: 253908 - DNA, 13 bp, Artificial Sequence
  Oligonucleotide for detection of SNP TSC0061915
aaaatcataacaa

SEQ ID NO: 253909 - DNA, 13 bp, Artificial Sequence
  Oligonucleotide for detection of SNP TSC0061915
ttgttacgatttt

SEQ ID NO: 253910 - DNA, 13 bp, Artificial Sequence
  Oligonucleotide for detection of SNP TSC0061915
aaaatcgtaacaa

SEQ ID NO: 253911 - DNA, 13 bp, Artificial Sequence
  Oligonucleotide for detection of SNP TSC0061915
aaaattgtagtaa

SEQ ID NO: 253912 - DNA, 13 bp, Artificial Sequence
  Oligonucleotide for detection of SNP TSC0061915
ttactacaatttt

SEQ ID NO: 253913 - DNA, 13 bp, Artificial Sequence
  Oligonucleotide for detection of SNP TSC0061915
aaaattatagtaa

SEQ ID NO: 253914 - DNA, 13 bp, Artificial Sequence
  Oligonucleotide for detection of SNP TSC0061915
ttactataatttt

SEQ ID NO: 253915 - DNA, 13 bp, Artificial Sequence
  Oligonucleotide for detection of SNP TSC0061915
aaaatcgtagtaa

SEQ ID NO: 253916 - DNA, 13 bp, Artificial Sequence
  Oligonucleotide for detection of SNP TSC0061915
ttactacgatttt

SEQ ID NO: 253917 - DNA, 13 bp, Artificial Sequence
  Oligonucleotide for detection of SNP TSC0061921
atgttaaaattty

SEQ ID NO: 253918 - DNA, 13 bp, Artificial Sequence
  Oligonucleotide for detection of SNP TSC0061921
raaattttaacat

SEQ ID NO: 253919 - DNA, 13 bp, Artificial Sequence
  Oligonucleotide for detection of SNP TSC0061921
atgttagaattty

SEQ ID NO: 253920 - DNA, 13 bp, Artificial Sequence
  Oligonucleotide for detection of SNP TSC0061921
raaattctaacat

SEQ ID NO: 253921 - DNA, 13 bp, Artificial Sequence
  Oligonucleotide for detection of SNP TSC0007978
aaggagtttattg

SEQ ID NO: 253922 - DNA, 13 bp, Artificial Sequence
  Oligonucleotide for detection of SNP TSC0007978
caataaactcctt

SEQ ID NO: 253923 - DNA, 13 bp, Artificial Sequence
  Oligonucleotide for detection of SNP TSC0007978
aaggagattattg

SEQ ID NO: 253924 - DNA, 13 bp, Artificial Sequence
  Oligonucleotide for detection of SNP TSC0007978
caataatctcctt

SEQ ID NO: 253925 - DNA, 13 bp, Artificial Sequence
  Oligonucleotide for detection of SNP TSC0061922
aatatggtggtat

SEQ ID NO: 253926 - DNA, 13 bp, Artificial Sequence
  Oligonucleotide for detection of SNP TSC0061922
ataccaccatatt

SEQ ID NO: 253927 - DNA, 13 bp, Artificial Sequence
  Oligonucleotide for detection of SNP TSC0061922
aatatgttggtat

SEQ ID NO: 253928 - DNA, 13 bp, Artificial Sequence
  Oligonucleotide for detection of SNP TSC0061922
ataccaacatatt

SEQ ID NO: 253929 - DNA, 13 bp, Artificial Sequence
  Oligonucleotide for detection of SNP TSC0007696
tgattttatagtg

SEQ ID NO: 253930 - DNA, 13 bp, Artificial Sequence
  Oligonucleotide for detection of SNP TSC0007696
cactataaaatca

SEQ ID NO: 253931 - DNA, 13 bp, Artificial Sequence
  Oligonucleotide for detection of SNP TSC0007696
tgatttgatagtg

SEQ ID NO: 253932 - DNA, 13 bp, Artificial Sequence
  Oligonucleotide for detection of SNP TSC0007696
cactatcaaatca

SEQ ID NO: 253933 - DNA, 13 bp, Artificial Sequence
  Oligonucleotide for detection of SNP TSC0007696
tgattttatagcg

SEQ ID NO: 253934 - DNA, 13 bp, Artificial Sequence
  Oligonucleotide for detection of SNP TSC0007696
cgctataaaatca

SEQ ID NO: 253935 - DNA, 13 bp, Artificial Sequence
  Oligonucleotide for detection of SNP TSC0007696
tgatttgatagcg

SEQ ID NO: 253936 - DNA, 13 bp, Artificial Sequence
  Oligonucleotide for detection of SNP TSC0007696
cgctatcaaatca

SEQ ID NO: 253937 - DNA, 13 bp, Artificial Sequence
  Oligonucleotide for detection of SNP TSC0007696
tgttgtgaaatta

SEQ ID NO: 253938 - DNA, 13 bp, Artificial Sequence
  Oligonucleotide for detection of SNP TSC0007696
taatttcacaaca

SEQ ID NO: 253939 - DNA, 13 bp, Artificial Sequence
  Oligonucleotide for detection of SNP TSC0007696
tgttgttaaatta

SEQ ID NO: 253940 - DNA, 13 bp, Artificial Sequence
  Oligonucleotide for detection of SNP TSC0007696
taatttaacaaca

SEQ ID NO: 253941 - DNA, 13 bp, Artificial Sequence
  Oligonucleotide for detection of SNP TSC0007696
cgttgtgaaatta

SEQ ID NO: 253942 - DNA, 13 bp, Artificial Sequence
  Oligonucleotide for detection of SNP TSC0007696
taatttcacaacg

SEQ ID NO: 253943 - DNA, 13 bp, Artificial Sequence
  Oligonucleotide for detection of SNP TSC0007696
cgttgttaaatta

SEQ ID NO: 253944 - DNA, 13 bp, Artificial Sequence
  Oligonucleotide for detection of SNP TSC0007696
taatttaacaacg

SEQ ID NO: 253945 - DNA, 13 bp, Artificial Sequence
  Oligonucleotide for detection of SNP TSC0061924
aaaatagttttat

SEQ ID NO: 253946 - DNA, 13 bp, Artificial Sequence
  Oligonucleotide for detection of SNP TSC0061924
ataaaactatttt

SEQ ID NO: 253947 - DNA, 13 bp, Artificial Sequence
  Oligonucleotide for detection of SNP TSC0061924
aaaataattttat

SEQ ID NO: 253948 - DNA, 13 bp, Artificial Sequence
  Oligonucleotide for detection of SNP TSC0061924
ataaaattatttt

SEQ ID NO: 253949 - DNA, 13 bp, Artificial Sequence
  Oligonucleotide for detection of SNP TSC0061927
tggtggatttttg

SEQ ID NO: 253950 - DNA, 13 bp, Artificial Sequence
  Oligonucleotide for detection of SNP TSC0061927
caaaaatccacca

SEQ ID NO: 253951 - DNA, 13 bp, Artificial Sequence
  Oligonucleotide for detection of SNP TSC0061927
tggtgggtttttg

SEQ ID NO: 253952 - DNA, 13 bp, Artificial Sequence
  Oligonucleotide for detection of SNP TSC0061927
caaaaacccacca

SEQ ID NO: 253953 - DNA, 13 bp, Artificial Sequence
  Oligonucleotide for detection of SNP TSC0061928
aagaagaaggtat

SEQ ID NO: 253954 - DNA, 13 bp, Artificial Sequence
  Oligonucleotide for detection of SNP TSC0061928
ataccttcttctt

SEQ ID NO: 253955 - DNA, 13 bp, Artificial Sequence
  Oligonucleotide for detection of SNP TSC0061928
aagaagtaggtat

SEQ ID NO: 253956 - DNA, 13 bp, Artificial Sequence
  Oligonucleotide for detection of SNP TSC0061928
atacctacttctt

SEQ ID NO: 253957 - DNA, 13 bp, Artificial Sequence
  Oligonucleotide for detection of SNP TSC0061930
ttaaattatagga

SEQ ID NO: 253958 - DNA, 13 bp, Artificial Sequence
  Oligonucleotide for detection of SNP TSC0061930
tcctataatttaa

SEQ ID NO: 253959 - DNA, 13 bp, Artificial Sequence
  Oligonucleotide for detection of SNP TSC0061930
ttaaatgatagga

SEQ ID NO: 253960 - DNA, 13 bp, Artificial Sequence
  Oligonucleotide for detection of SNP TSC0061930
tcctatcatttaa

SEQ ID NO: 253961 - DNA, 13 bp, Artificial Sequence
  Oligonucleotide for detection of SNP TSC0061930
ttttgtaatttag

SEQ ID NO: 253962 - DNA, 13 bp, Artificial Sequence
  Oligonucleotide for detection of SNP TSC0061930
ctaaattacaaaa

SEQ ID NO: 253963 - DNA, 13 bp, Artificial Sequence
  Oligonucleotide for detection of SNP TSC0061930
ttttgttatttag

SEQ ID NO: 253964 - DNA, 13 bp, Artificial Sequence
  Oligonucleotide for detection of SNP TSC0061930
ctaaataacaaaa

SEQ ID NO: 253965 - DNA, 13 bp, Artificial Sequence
  Oligonucleotide for detection of SNP TSC0061932
ttagttattttgt

SEQ ID NO: 253966 - DNA, 13 bp, Artificial Sequence
  Oligonucleotide for detection of SNP TSC0061932
acaaaataactaa

SEQ ID NO: 253967 - DNA, 13 bp, Artificial Sequence
  Oligonucleotide for detection of SNP TSC0061932
ttagttgttttgt

SEQ ID NO: 253968 - DNA, 13 bp, Artificial Sequence
  Oligonucleotide for detection of SNP TSC0061932
acaaaacaactaa

SEQ ID NO: 253969 - DNA, 13 bp, Artificial Sequence
  Oligonucleotide for detection of SNP TSC0061932
ttagtcgttttgt

SEQ ID NO: 253970 - DNA, 13 bp, Artificial Sequence
  Oligonucleotide for detection of SNP TSC0061932
acaaaacgactaa

SEQ ID NO: 253971 - DNA, 13 bp, Artificial Sequence
  Oligonucleotide for detection of SNP TSC0061932
ataaaatgattgg

SEQ ID NO: 253972 - DNA, 13 bp, Artificial Sequence
  Oligonucleotide for detection of SNP TSC0061932
ccaatcattttat

SEQ ID NO: 253973 - DNA, 13 bp, Artificial Sequence
  Oligonucleotide for detection of SNP TSC0061932
ataaaacgattgg

SEQ ID NO: 253974 - DNA, 13 bp, Artificial Sequence
  Oligonucleotide for detection of SNP TSC0061932
ccaatcgttttat

SEQ ID NO: 253975 - DNA, 13 bp, Artificial Sequence
  Oligonucleotide for detection of SNP TSC0061933
ttattatgtagtt

SEQ ID NO: 253976 - DNA, 13 bp, Artificial Sequence
  Oligonucleotide for detection of SNP TSC0061933
aactacataataa

SEQ ID NO: 253977 - DNA, 13 bp, Artificial Sequence
  Oligonucleotide for detection of SNP TSC0061933
ttattaggtagtt

SEQ ID NO: 253978 - DNA, 13 bp, Artificial Sequence
  Oligonucleotide for detection of SNP TSC0061933
aactacctaataa

SEQ ID NO: 253979 - DNA, 13 bp, Artificial Sequence
  Oligonucleotide for detection of SNP TSC0061933
aattgtataatga

SEQ ID NO: 253980 - DNA, 13 bp, Artificial Sequence
  Oligonucleotide for detection of SNP TSC0061933
tcattatacaatt

SEQ ID NO: 253981 - DNA, 13 bp, Artificial Sequence
  Oligonucleotide for detection of SNP TSC0061933
aattgtttaatga

SEQ ID NO: 253982 - DNA, 13 bp, Artificial Sequence
  Oligonucleotide for detection of SNP TSC0061933
tcattaaacaatt

SEQ ID NO: 253983 - DNA, 13 bp, Artificial Sequence
  Oligonucleotide for detection of SNP TSC0061935
tataatagtataa

SEQ ID NO: 253984 - DNA, 13 bp, Artificial Sequence
  Oligonucleotide for detection of SNP TSC0061935
ttatactattata

SEQ ID NO: 253985 - DNA, 13 bp, Artificial Sequence
  Oligonucleotide for detection of SNP TSC0061935
tataattgtataa

SEQ ID NO: 253986 - DNA, 13 bp, Artificial Sequence
  Oligonucleotide for detection of SNP TSC0061935
ttatacaattata

SEQ ID NO: 253987 - DNA, 13 bp, Artificial Sequence
  Oligonucleotide for detection of SNP TSC0061935
ttatattattata

SEQ ID NO: 253988 - DNA, 13 bp, Artificial Sequence
  Oligonucleotide for detection of SNP TSC0061935
tataataatataa

SEQ ID NO: 253989 - DNA, 13 bp, Artificial Sequence
  Oligonucleotide for detection of SNP TSC0061935
ttatataattata

SEQ ID NO: 253990 - DNA, 13 bp, Artificial Sequence
  Oligonucleotide for detection of SNP TSC0061935
tataattatataa

SEQ ID NO: 253991 - DNA, 13 bp, Artificial Sequence
  Oligonucleotide for detection of SNP TSC0000976
gtaaaagtattay

SEQ ID NO: 253992 - DNA, 13 bp, Artificial Sequence
  Oligonucleotide for detection of SNP TSC0000976
rtaatacttttac

SEQ ID NO: 253993 - DNA, 13 bp, Artificial Sequence
  Oligonucleotide for detection of SNP TSC0000976
gtaaaaatattay

SEQ ID NO: 253994 - DNA, 13 bp, Artificial Sequence
  Oligonucleotide for detection of SNP TSC0000976
rtaatatttttac

SEQ ID NO: 253995 - DNA, 13 bp, Artificial Sequence
  Oligonucleotide for detection of SNP TSC0061936
tttagtggaagag

SEQ ID NO: 253996 - DNA, 13 bp, Artificial Sequence
  Oligonucleotide for detection of SNP TSC0061936
ctcttccactaaa

SEQ ID NO: 253997 - DNA, 13 bp, Artificial Sequence
  Oligonucleotide for detection of SNP TSC0009162
gggataaagagty

SEQ ID NO: 253998 - DNA, 13 bp, Artificial Sequence
  Oligonucleotide for detection of SNP TSC0009162
ractctttatccc

SEQ ID NO: 253999 - DNA, 13 bp, Artificial Sequence
  Oligonucleotide for detection of SNP TSC0009162
gggatatagagty

SEQ ID NO: 254000 - DNA, 13 bp, Artificial Sequence
  Oligonucleotide for detection of SNP TSC0009162
ractctatatccc

SEQ ID NO: 254001 - DNA, 13 bp, Artificial Sequence
  Oligonucleotide for detection of SNP TSC0061937
aagtaggtgtatg

SEQ ID NO: 254002 - DNA, 13 bp, Artificial Sequence
  Oligonucleotide for detection of SNP TSC0061937
catacacctactt

SEQ ID NO: 254003 - DNA, 13 bp, Artificial Sequence
  Oligonucleotide for detection of SNP TSC0061937
aagtagatgtatg

SEQ ID NO: 254004 - DNA, 13 bp, Artificial Sequence
  Oligonucleotide for detection of SNP TSC0061937
catacatctactt

SEQ ID NO: 254005 - DNA, 13 bp, Artificial Sequence
  Oligonucleotide for detection of SNP TSC0061937
aagtaggtgtacg

SEQ ID NO: 254006 - DNA, 13 bp, Artificial Sequence
  Oligonucleotide for detection of SNP TSC0061937
cgtacacctactt

SEQ ID NO: 254007 - DNA, 13 bp, Artificial Sequence
  Oligonucleotide for detection of SNP TSC0061937
aagtagatgtacg

SEQ ID NO: 254008 - DNA, 13 bp, Artificial Sequence
  Oligonucleotide for detection of SNP TSC0061937
cgtacatctactt

SEQ ID NO: 254009 - DNA, 13 bp, Artificial Sequence
  Oligonucleotide for detection of SNP TSC0061938
ttgttttggtgtg

SEQ ID NO: 254010 - DNA, 13 bp, Artificial Sequence
  Oligonucleotide for detection of SNP TSC0061938
cacaccaaaacaa

SEQ ID NO: 254011 - DNA, 13 bp, Artificial Sequence
  Oligonucleotide for detection of SNP TSC0061938
ttgtttcggtgtg

SEQ ID NO: 254012 - DNA, 13 bp, Artificial Sequence
  Oligonucleotide for detection of SNP TSC0061938
cacaccgaaacaa

SEQ ID NO: 254013 - DNA, 13 bp, Artificial Sequence
  Oligonucleotide for detection of SNP TSC0061938
tatattgaagtag

SEQ ID NO: 254014 - DNA, 13 bp, Artificial Sequence
  Oligonucleotide for detection of SNP TSC0061938
ctacttcaatata

SEQ ID NO: 254015 - DNA, 13 bp, Artificial Sequence
  Oligonucleotide for detection of SNP TSC0061938
tatattaaagtag

SEQ ID NO: 254016 - DNA, 13 bp, Artificial Sequence
  Oligonucleotide for detection of SNP TSC0061938
ctactttaatata

SEQ ID NO: 254017 - DNA, 13 bp, Artificial Sequence
  Oligonucleotide for detection of SNP TSC0061938
tatatcgaagtag

SEQ ID NO: 254018 - DNA, 13 bp, Artificial Sequence
  Oligonucleotide for detection of SNP TSC0061938
ctacttcgatata

SEQ ID NO: 254019 - DNA, 13 bp, Artificial Sequence
  Oligonucleotide for detection of SNP TSC0007485
tgttgaggttaag

SEQ ID NO: 254020 - DNA, 13 bp, Artificial Sequence
  Oligonucleotide for detection of SNP TSC0007485
cttaacctcaaca

SEQ ID NO: 254021 - DNA, 13 bp, Artificial Sequence
  Oligonucleotide for detection of SNP TSC0007485
tgttgaagttaag

SEQ ID NO: 254022 - DNA, 13 bp, Artificial Sequence
  Oligonucleotide for detection of SNP TSC0007485
cttaacttcaaca

SEQ ID NO: 254023 - DNA, 13 bp, Artificial Sequence
  Oligonucleotide for detection of SNP TSC0007485
tgtcgaggttaag

SEQ ID NO: 254024 - DNA, 13 bp, Artificial Sequence
  Oligonucleotide for detection of SNP TSC0007485
cttaacctcgaca

SEQ ID NO: 254025 - DNA, 13 bp, Artificial Sequence
  Oligonucleotide for detection of SNP TSC0007485
tgtcgaagttaag

SEQ ID NO: 254026 - DNA, 13 bp, Artificial Sequence
  Oligonucleotide for detection of SNP TSC0007485
cttaacttcgaca

SEQ ID NO: 254027 - DNA, 13 bp, Artificial Sequence
  Oligonucleotide for detection of SNP TSC0061939
attttatagaatg

SEQ ID NO: 254028 - DNA, 13 bp, Artificial Sequence
  Oligonucleotide for detection of SNP TSC0061939
cattctataaaat

SEQ ID NO: 254029 - DNA, 13 bp, Artificial Sequence
  Oligonucleotide for detection of SNP TSC0061939
attttagagaatg

SEQ ID NO: 254030 - DNA, 13 bp, Artificial Sequence
  Oligonucleotide for detection of SNP TSC0061939
cattctctaaaat

SEQ ID NO: 254031 - DNA, 13 bp, Artificial Sequence
  Oligonucleotide for detection of SNP TSC0061939
tattttgtaggat

SEQ ID NO: 254032 - DNA, 13 bp, Artificial Sequence
  Oligonucleotide for detection of SNP TSC0061939
atcctacaaaata

SEQ ID NO: 254033 - DNA, 13 bp, Artificial Sequence
  Oligonucleotide for detection of SNP TSC0061939
tattttttaggat

SEQ ID NO: 254034 - DNA, 13 bp, Artificial Sequence
  Oligonucleotide for detection of SNP TSC0061939
atcctaaaaaata

SEQ ID NO: 254035 - DNA, 13 bp, Artificial Sequence
  Oligonucleotide for detection of SNP TSC0061940
ttggaggttggtt

SEQ ID NO: 254036 - DNA, 13 bp, Artificial Sequence
  Oligonucleotide for detection of SNP TSC0061940
aaccaacctccaa

SEQ ID NO: 254037 - DNA, 13 bp, Artificial Sequence
  Oligonucleotide for detection of SNP TSC0061941
atatatattattt

SEQ ID NO: 254038 - DNA, 13 bp, Artificial Sequence
  Oligonucleotide for detection of SNP TSC0061941
aaataatatatat

SEQ ID NO: 254039 - DNA, 13 bp, Artificial Sequence
  Oligonucleotide for detection of SNP TSC0061941
atatatgttattt

SEQ ID NO: 254040 - DNA, 13 bp, Artificial Sequence
  Oligonucleotide for detection of SNP TSC0061941
aaataacatatat

SEQ ID NO: 254041 - DNA, 13 bp, Artificial Sequence
  Oligonucleotide for detection of SNP TSC0061941
atatacgttattt

SEQ ID NO: 254042 - DNA, 13 bp, Artificial Sequence
  Oligonucleotide for detection of SNP TSC0061941
aaataacgtatat

SEQ ID NO: 254043 - DNA, 13 bp, Artificial Sequence
  Oligonucleotide for detection of SNP TSC0061941
aaatggtgtatat

SEQ ID NO: 254044 - DNA, 13 bp, Artificial Sequence
  Oligonucleotide for detection of SNP TSC0061941
atatacaccattt

SEQ ID NO: 254045 - DNA, 13 bp, Artificial Sequence
  Oligonucleotide for detection of SNP TSC0061941
aaatggcgtatat

SEQ ID NO: 254046 - DNA, 13 bp, Artificial Sequence
  Oligonucleotide for detection of SNP TSC0061941
atatacgccattt

SEQ ID NO: 254047 - DNA, 13 bp, Artificial Sequence
  Oligonucleotide for detection of SNP TSC0061942
ttatttgtatatt

SEQ ID NO: 254048 - DNA, 13 bp, Artificial Sequence
  Oligonucleotide for detection of SNP TSC0061942
aatatacaaataa

SEQ ID NO: 254049 - DNA, 13 bp, Artificial Sequence
  Oligonucleotide for detection of SNP TSC0061943
aaaattaaaagtg

SEQ ID NO: 254050 - DNA, 13 bp, Artificial Sequence
  Oligonucleotide for detection of SNP TSC0061943
cacttttaatttt

SEQ ID NO: 254051 - DNA, 13 bp, Artificial Sequence
  Oligonucleotide for detection of SNP TSC0061943
aaaatttaaagtg

SEQ ID NO: 254052 - DNA, 13 bp, Artificial Sequence
  Oligonucleotide for detection of SNP TSC0061943
cactttaaatttt

SEQ ID NO: 254053 - DNA, 13 bp, Artificial Sequence
  Oligonucleotide for detection of SNP TSC0061944
gtattatgttttg

SEQ ID NO: 254054 - DNA, 13 bp, Artificial Sequence
  Oligonucleotide for detection of SNP TSC0061944
caaaacataatac

SEQ ID NO: 254055 - DNA, 13 bp, Artificial Sequence
  Oligonucleotide for detection of SNP TSC0061944
gtattacgttttg

SEQ ID NO: 254056 - DNA, 13 bp, Artificial Sequence
  Oligonucleotide for detection of SNP TSC0061944
caaaacgtaatac

SEQ ID NO: 254057 - DNA, 13 bp, Artificial Sequence
  Oligonucleotide for detection of SNP TSC0061944
gtattatgtttcg

SEQ ID NO: 254058 - DNA, 13 bp, Artificial Sequence
  Oligonucleotide for detection of SNP TSC0061944
cgaaacataatac

SEQ ID NO: 254059 - DNA, 13 bp, Artificial Sequence
  Oligonucleotide for detection of SNP TSC0061944
gtattacgtttcg

SEQ ID NO: 254060 - DNA, 13 bp, Artificial Sequence
  Oligonucleotide for detection of SNP TSC0061944
cgaaacgtaatac

SEQ ID NO: 254061 - DNA, 13 bp, Artificial Sequence
  Oligonucleotide for detection of SNP TSC0061944
tgggatgtaatgy

SEQ ID NO: 254062 - DNA, 13 bp, Artificial Sequence
  Oligonucleotide for detection of SNP TSC0061944
rcattacatccca

SEQ ID NO: 254063 - DNA, 13 bp, Artificial Sequence
  Oligonucleotide for detection of SNP TSC0061944
tgggatataatgy

SEQ ID NO: 254064 - DNA, 13 bp, Artificial Sequence
  Oligonucleotide for detection of SNP TSC0061944
rcattatatccca

SEQ ID NO: 254065 - DNA, 13 bp, Artificial Sequence
  Oligonucleotide for detection of SNP TSC0061944
cgggatgtaatgy

SEQ ID NO: 254066 - DNA, 13 bp, Artificial Sequence
  Oligonucleotide for detection of SNP TSC0061944
rcattacatcccg

SEQ ID NO: 254067 - DNA, 13 bp, Artificial Sequence
  Oligonucleotide for detection of SNP TSC0061944
cgggatataatgy

SEQ ID NO: 254068 - DNA, 13 bp, Artificial Sequence
  Oligonucleotide for detection of SNP TSC0061944
rcattatatcccg

SEQ ID NO: 254069 - DNA, 13 bp, Artificial Sequence
  Oligonucleotide for detection of SNP TSC0061944
tgggacgtaatgy

SEQ ID NO: 254070 - DNA, 13 bp, Artificial Sequence
  Oligonucleotide for detection of SNP TSC0061944
rcattacgtccca

SEQ ID NO: 254071 - DNA, 13 bp, Artificial Sequence
  Oligonucleotide for detection of SNP TSC0061944
cgggacgtaatgy

SEQ ID NO: 254072 - DNA, 13 bp, Artificial Sequence
  Oligonucleotide for detection of SNP TSC0061944
rcattacgtcccg

SEQ ID NO: 254073 - DNA, 13 bp, Artificial Sequence
  Oligonucleotide for detection of SNP TSC0061951
ttaattagtaata

SEQ ID NO: 254074 - DNA, 13 bp, Artificial Sequence
  Oligonucleotide for detection of SNP TSC0061951
tattactaattaa

SEQ ID NO: 254075 - DNA, 13 bp, Artificial Sequence
  Oligonucleotide for detection of SNP TSC0061951
ttaatcggtaata

SEQ ID NO: 254076 - DNA, 13 bp, Artificial Sequence
  Oligonucleotide for detection of SNP TSC0061951
tattaccgattaa

SEQ ID NO: 254077 - DNA, 13 bp, Artificial Sequence
  Oligonucleotide for detection of SNP TSC0061951
tattattggttga

SEQ ID NO: 254078 - DNA, 13 bp, Artificial Sequence
  Oligonucleotide for detection of SNP TSC0061951
tcaaccaataata

SEQ ID NO: 254079 - DNA, 13 bp, Artificial Sequence
  Oligonucleotide for detection of SNP TSC0061951
tattatcggttga

SEQ ID NO: 254080 - DNA, 13 bp, Artificial Sequence
  Oligonucleotide for detection of SNP TSC0061951
tcaaccgataata

SEQ ID NO: 254081 - DNA, 13 bp, Artificial Sequence
  Oligonucleotide for detection of SNP TSC0061953
tatatatatagat

SEQ ID NO: 254082 - DNA, 13 bp, Artificial Sequence
  Oligonucleotide for detection of SNP TSC0061953
atctatatatata

SEQ ID NO: 254083 - DNA, 13 bp, Artificial Sequence
  Oligonucleotide for detection of SNP TSC0061953
tatatagatagat

SEQ ID NO: 254084 - DNA, 13 bp, Artificial Sequence
  Oligonucleotide for detection of SNP TSC0061953
atctatctatata

SEQ ID NO: 254085 - DNA, 13 bp, Artificial Sequence
  Oligonucleotide for detection of SNP TSC0061954
tataaaggataat

SEQ ID NO: 254086 - DNA, 13 bp, Artificial Sequence
  Oligonucleotide for detection of SNP TSC0061954
attatcctttata

SEQ ID NO: 254087 - DNA, 13 bp, Artificial Sequence
  Oligonucleotide for detection of SNP TSC0061954
tataaaagataat

SEQ ID NO: 254088 - DNA, 13 bp, Artificial Sequence
  Oligonucleotide for detection of SNP TSC0061954
attatcttttata

SEQ ID NO: 254089 - DNA, 13 bp, Artificial Sequence
  Oligonucleotide for detection of SNP TSC0061955
tttttgtatgata

SEQ ID NO: 254090 - DNA, 13 bp, Artificial Sequence
  Oligonucleotide for detection of SNP TSC0061955
tatcatacaaaaa

SEQ ID NO: 254091 - DNA, 13 bp, Artificial Sequence
  Oligonucleotide for detection of SNP TSC0061955
tttttggatgata

SEQ ID NO: 254092 - DNA, 13 bp, Artificial Sequence
  Oligonucleotide for detection of SNP TSC0061955
tatcatccaaaaa

SEQ ID NO: 254093 - DNA, 13 bp, Artificial Sequence
  Oligonucleotide for detection of SNP TSC0061955
tttttgtacgata

SEQ ID NO: 254094 - DNA, 13 bp, Artificial Sequence
  Oligonucleotide for detection of SNP TSC0061955
tatcgtacaaaaa

SEQ ID NO: 254095 - DNA, 13 bp, Artificial Sequence
  Oligonucleotide for detection of SNP TSC0061955
tttttggacgata

SEQ ID NO: 254096 - DNA, 13 bp, Artificial Sequence
  Oligonucleotide for detection of SNP TSC0061955
tatcgtccaaaaa

SEQ ID NO: 254097 - DNA, 13 bp, Artificial Sequence
  Oligonucleotide for detection of SNP TSC0061955
tgttgtataaaaa

SEQ ID NO: 254098 - DNA, 13 bp, Artificial Sequence
  Oligonucleotide for detection of SNP TSC0061955
tttttatacaaca

SEQ ID NO: 254099 - DNA, 13 bp, Artificial Sequence
  Oligonucleotide for detection of SNP TSC0061955
tgttgtttaaaaa

SEQ ID NO: 254100 - DNA, 13 bp, Artificial Sequence
  Oligonucleotide for detection of SNP TSC0061955
tttttaaacaaca

SEQ ID NO: 254101 - DNA, 13 bp, Artificial Sequence
  Oligonucleotide for detection of SNP TSC0061955
tgtcgtataaaaa

SEQ ID NO: 254102 - DNA, 13 bp, Artificial Sequence
  Oligonucleotide for detection of SNP TSC0061955
tttttatacgaca

SEQ ID NO: 254103 - DNA, 13 bp, Artificial Sequence
  Oligonucleotide for detection of SNP TSC0061955
tgtcgtttaaaaa

SEQ ID NO: 254104 - DNA, 13 bp, Artificial Sequence
  Oligonucleotide for detection of SNP TSC0061955
tttttaaacgaca

SEQ ID NO: 254105 - DNA, 13 bp, Artificial Sequence
  Oligonucleotide for detection of SNP TSC0061956
aattatgataaaa

SEQ ID NO: 254106 - DNA, 13 bp, Artificial Sequence
  Oligonucleotide for detection of SNP TSC0061956
ttttatcataatt

SEQ ID NO: 254107 - DNA, 13 bp, Artificial Sequence
  Oligonucleotide for detection of SNP TSC0061956
ttttgttataatt

SEQ ID NO: 254108 - DNA, 13 bp, Artificial Sequence
  Oligonucleotide for detection of SNP TSC0061956
aattataacaaaa

SEQ ID NO: 254109 - DNA, 13 bp, Artificial Sequence
  Oligonucleotide for detection of SNP TSC0061957
taaaatattttgt

SEQ ID NO: 254110 - DNA, 13 bp, Artificial Sequence
  Oligonucleotide for detection of SNP TSC0061957
acaaaatatttta

SEQ ID NO: 254111 - DNA, 13 bp, Artificial Sequence
  Oligonucleotide for detection of SNP TSC0061957
taaaatgttttgt

SEQ ID NO: 254112 - DNA, 13 bp, Artificial Sequence
  Oligonucleotide for detection of SNP TSC0061957
acaaaacatttta

SEQ ID NO: 254113 - DNA, 13 bp, Artificial Sequence
  Oligonucleotide for detection of SNP TSC0061957
taaaacgttttgt

SEQ ID NO: 254114 - DNA, 13 bp, Artificial Sequence
  Oligonucleotide for detection of SNP TSC0061957
acaaaacgtttta

SEQ ID NO: 254115 - DNA, 13 bp, Artificial Sequence
  Oligonucleotide for detection of SNP TSC0061957
ataaaatgtttta

SEQ ID NO: 254116 - DNA, 13 bp, Artificial Sequence
  Oligonucleotide for detection of SNP TSC0061957
taaaacattttat

SEQ ID NO: 254117 - DNA, 13 bp, Artificial Sequence
  Oligonucleotide for detection of SNP TSC0061957
ataaaacgtttta

SEQ ID NO: 254118 - DNA, 13 bp, Artificial Sequence
  Oligonucleotide for detection of SNP TSC0061957
taaaacgttttat

SEQ ID NO: 254119 - DNA, 13 bp, Artificial Sequence
  Oligonucleotide for detection of SNP TSC0061958
attaatgaataag

SEQ ID NO: 254120 - DNA, 13 bp, Artificial Sequence
  Oligonucleotide for detection of SNP TSC0061958
cttattcattaat

SEQ ID NO: 254121 - DNA, 13 bp, Artificial Sequence
  Oligonucleotide for detection of SNP TSC0061958
attaataaataag

SEQ ID NO: 254122 - DNA, 13 bp, Artificial Sequence
  Oligonucleotide for detection of SNP TSC0061958
cttatttattaat

SEQ ID NO: 254123 - DNA, 13 bp, Artificial Sequence
  Oligonucleotide for detection of SNP TSC0000458
agggtgggaatta

SEQ ID NO: 254124 - DNA, 13 bp, Artificial Sequence
  Oligonucleotide for detection of SNP TSC0000458
taattcccaccct

SEQ ID NO: 254125 - DNA, 13 bp, Artificial Sequence
  Oligonucleotide for detection of SNP TSC0000458
agggtgagaatta

SEQ ID NO: 254126 - DNA, 13 bp, Artificial Sequence
  Oligonucleotide for detection of SNP TSC0000458
taattctcaccct

SEQ ID NO: 254127 - DNA, 13 bp, Artificial Sequence
  Oligonucleotide for detection of SNP TSC0061961
gggaggggaaagg

SEQ ID NO: 254128 - DNA, 13 bp, Artificial Sequence
  Oligonucleotide for detection of SNP TSC0061961
cctttcccctccc

SEQ ID NO: 254129 - DNA, 13 bp, Artificial Sequence
  Oligonucleotide for detection of SNP TSC0061961
gggaggagaaagg

SEQ ID NO: 254130 - DNA, 13 bp, Artificial Sequence
  Oligonucleotide for detection of SNP TSC0061961
cctttctcctccc

SEQ ID NO: 254131 - DNA, 13 bp, Artificial Sequence
  Oligonucleotide for detection of SNP TSC0061962
atgttggtgaata

SEQ ID NO: 254132 - DNA, 13 bp, Artificial Sequence
  Oligonucleotide for detection of SNP TSC0061962
tattcaccaacat

SEQ ID NO: 254133 - DNA, 13 bp, Artificial Sequence
  Oligonucleotide for detection of SNP TSC0061962
atgttgatgaata

SEQ ID NO: 254134 - DNA, 13 bp, Artificial Sequence
  Oligonucleotide for detection of SNP TSC0061962
tattcatcaacat

SEQ ID NO: 254135 - DNA, 13 bp, Artificial Sequence
  Oligonucleotide for detection of SNP TSC0061963
tgatatagagtty

SEQ ID NO: 254136 - DNA, 13 bp, Artificial Sequence
  Oligonucleotide for detection of SNP TSC0061963
raactctatatca

SEQ ID NO: 254137 - DNA, 13 bp, Artificial Sequence
  Oligonucleotide for detection of SNP TSC0061963
tgatatggagtty

SEQ ID NO: 254138 - DNA, 13 bp, Artificial Sequence
  Oligonucleotide for detection of SNP TSC0061963
raactccatatca

SEQ ID NO: 254139 - DNA, 13 bp, Artificial Sequence
  Oligonucleotide for detection of SNP TSC0061963
tgatacggagtty

SEQ ID NO: 254140 - DNA, 13 bp, Artificial Sequence
  Oligonucleotide for detection of SNP TSC0061963
raactccgtatca

SEQ ID NO: 254141 - DNA, 13 bp, Artificial Sequence
  Oligonucleotide for detection of SNP TSC0061963
ggattttgtgtta

SEQ ID NO: 254142 - DNA, 13 bp, Artificial Sequence
  Oligonucleotide for detection of SNP TSC0061963
taacacaaaatcc

SEQ ID NO: 254143 - DNA, 13 bp, Artificial Sequence
  Oligonucleotide for detection of SNP TSC0061963
ggatttcgtgtta

SEQ ID NO: 254144 - DNA, 13 bp, Artificial Sequence
  Oligonucleotide for detection of SNP TSC0061963
taacacgaaatcc

SEQ ID NO: 254145 - DNA, 13 bp, Artificial Sequence
  Oligonucleotide for detection of SNP TSC0061971
tttggtttgttta

SEQ ID NO: 254146 - DNA, 13 bp, Artificial Sequence
  Oligonucleotide for detection of SNP TSC0061971
taaacaaaccaaa

SEQ ID NO: 254147 - DNA, 13 bp, Artificial Sequence
  Oligonucleotide for detection of SNP TSC0061971
tttggtgtgttta

SEQ ID NO: 254148 - DNA, 13 bp, Artificial Sequence
  Oligonucleotide for detection of SNP TSC0061971
taaacacaccaaa

SEQ ID NO: 254149 - DNA, 13 bp, Artificial Sequence
  Oligonucleotide for detection of SNP TSC0061971
tttggcgtgttta

SEQ ID NO: 254150 - DNA, 13 bp, Artificial Sequence
  Oligonucleotide for detection of SNP TSC0061971
taaacacgccaaa

SEQ ID NO: 254151 - DNA, 13 bp, Artificial Sequence
  Oligonucleotide for detection of SNP TSC0061971
tagataagttagg

SEQ ID NO: 254152 - DNA, 13 bp, Artificial Sequence
  Oligonucleotide for detection of SNP TSC0061971
cctaacttatcta

SEQ ID NO: 254153 - DNA, 13 bp, Artificial Sequence
  Oligonucleotide for detection of SNP TSC0061971
tagatatgttagg

SEQ ID NO: 254154 - DNA, 13 bp, Artificial Sequence
  Oligonucleotide for detection of SNP TSC0061971
cctaacatatcta

SEQ ID NO: 254155 - DNA, 13 bp, Artificial Sequence
  Oligonucleotide for detection of SNP TSC0061971
tagatacgttagg

SEQ ID NO: 254156 - DNA, 13 bp, Artificial Sequence
  Oligonucleotide for detection of SNP TSC0061971
cctaacgtatcta

SEQ ID NO: 254157 - DNA, 13 bp, Artificial Sequence
  Oligonucleotide for detection of SNP TSC0005195
aggtgaaaggatg

SEQ ID NO: 254158 - DNA, 13 bp, Artificial Sequence
  Oligonucleotide for detection of SNP TSC0005195
catcctttcacct

SEQ ID NO: 254159 - DNA, 13 bp, Artificial Sequence
  Oligonucleotide for detection of SNP TSC0005195
aggtgagaggatg

SEQ ID NO: 254160 - DNA, 13 bp, Artificial Sequence
  Oligonucleotide for detection of SNP TSC0005195
catcctctcacct

SEQ ID NO: 254161 - DNA, 13 bp, Artificial Sequence
  Oligonucleotide for detection of SNP TSC0061972
taagtttgaaaaa

SEQ ID NO: 254162 - DNA, 13 bp, Artificial Sequence
  Oligonucleotide for detection of SNP TSC0061972
tttttcaaactta

SEQ ID NO: 254163 - DNA, 13 bp, Artificial Sequence
  Oligonucleotide for detection of SNP TSC0061972
taagttcgaaaaa

SEQ ID NO: 254164 - DNA, 13 bp, Artificial Sequence
  Oligonucleotide for detection of SNP TSC0061972
tttttcgaactta

SEQ ID NO: 254165 - DNA, 13 bp, Artificial Sequence
  Oligonucleotide for detection of SNP TSC0061973
atatataagggat

SEQ ID NO: 254166 - DNA, 13 bp, Artificial Sequence
  Oligonucleotide for detection of SNP TSC0061973
atcccttatatat

SEQ ID NO: 254167 - DNA, 13 bp, Artificial Sequence
  Oligonucleotide for detection of SNP TSC0061973
atatatgagggat

SEQ ID NO: 254168 - DNA, 13 bp, Artificial Sequence
  Oligonucleotide for detection of SNP TSC0061973
atccctcatatat

SEQ ID NO: 254169 - DNA, 13 bp, Artificial Sequence
  Oligonucleotide for detection of SNP TSC0061974
ataatggttaata

SEQ ID NO: 254170 - DNA, 13 bp, Artificial Sequence
  Oligonucleotide for detection of SNP TSC0061974
tattaaccattat

SEQ ID NO: 254171 - DNA, 13 bp, Artificial Sequence
  Oligonucleotide for detection of SNP TSC0061974
ataatgattaata

SEQ ID NO: 254172 - DNA, 13 bp, Artificial Sequence
  Oligonucleotide for detection of SNP TSC0061974
tattaatcattat

SEQ ID NO: 254173 - DNA, 13 bp, Artificial Sequence
  Oligonucleotide for detection of SNP TSC0061975
tatttagtattta

SEQ ID NO: 254174 - DNA, 13 bp, Artificial Sequence
  Oligonucleotide for detection of SNP TSC0061975
taaatactaaata

SEQ ID NO: 254175 - DNA, 13 bp, Artificial Sequence
  Oligonucleotide for detection of SNP TSC0061975
tatttaatattta

SEQ ID NO: 254176 - DNA, 13 bp, Artificial Sequence
  Oligonucleotide for detection of SNP TSC0061975
taaatattaaata

SEQ ID NO: 254177 - DNA, 13 bp, Artificial Sequence
  Oligonucleotide for detection of SNP TSC0061976
ggatagagaaata

SEQ ID NO: 254178 - DNA, 13 bp, Artificial Sequence
  Oligonucleotide for detection of SNP TSC0061976
tatttctctatcc

SEQ ID NO: 254179 - DNA, 13 bp, Artificial Sequence
  Oligonucleotide for detection of SNP TSC0061976
ggatagggaaata

SEQ ID NO: 254180 - DNA, 13 bp, Artificial Sequence
  Oligonucleotide for detection of SNP TSC0061976
tatttccctatcc

SEQ ID NO: 254181 - DNA, 13 bp, Artificial Sequence
  Oligonucleotide for detection of SNP TSC0005783
tgtattttgaagy

SEQ ID NO: 254182 - DNA, 13 bp, Artificial Sequence
  Oligonucleotide for detection of SNP TSC0005783
rcttcaaaataca

SEQ ID NO: 254183 - DNA, 13 bp, Artificial Sequence
  Oligonucleotide for detection of SNP TSC0005783
tgtattgtgaagy

SEQ ID NO: 254184 - DNA, 13 bp, Artificial Sequence
  Oligonucleotide for detection of SNP TSC0005783
rcttcacaataca

SEQ ID NO: 254185 - DNA, 13 bp, Artificial Sequence
  Oligonucleotide for detection of SNP TSC0005783
gttttagagtata

SEQ ID NO: 254186 - DNA, 13 bp, Artificial Sequence
  Oligonucleotide for detection of SNP TSC0005783
tatactctaaaac

SEQ ID NO: 254187 - DNA, 13 bp, Artificial Sequence
  Oligonucleotide for detection of SNP TSC0005783
gttttatagtata

SEQ ID NO: 254188 - DNA, 13 bp, Artificial Sequence
  Oligonucleotide for detection of SNP TSC0005783
tatactataaaac

SEQ ID NO: 254189 - DNA, 13 bp, Artificial Sequence
  Oligonucleotide for detection of SNP TSC0061977
tgataattttttg

SEQ ID NO: 254190 - DNA, 13 bp, Artificial Sequence
  Oligonucleotide for detection of SNP TSC0061977
caaaaaattatca

SEQ ID NO: 254191 - DNA, 13 bp, Artificial Sequence
  Oligonucleotide for detection of SNP TSC0061977
tgataagtttttg

SEQ ID NO: 254192 - DNA, 13 bp, Artificial Sequence
  Oligonucleotide for detection of SNP TSC0061977
caaaaacttatca

SEQ ID NO: 254193 - DNA, 13 bp, Artificial Sequence
  Oligonucleotide for detection of SNP TSC0061977
tagaaagttatta

SEQ ID NO: 254194 - DNA, 13 bp, Artificial Sequence
  Oligonucleotide for detection of SNP TSC0061977
taataactttcta

SEQ ID NO: 254195 - DNA, 13 bp, Artificial Sequence
  Oligonucleotide for detection of SNP TSC0061977
tagaaatttatta

SEQ ID NO: 254196 - DNA, 13 bp, Artificial Sequence
  Oligonucleotide for detection of SNP TSC0061977
taataaatttcta

SEQ ID NO: 254197 - DNA, 13 bp, Artificial Sequence
  Oligonucleotide for detection of SNP TSC0061978
ttatttattagat

SEQ ID NO: 254198 - DNA, 13 bp, Artificial Sequence
  Oligonucleotide for detection of SNP TSC0061978
atctaataaataa

SEQ ID NO: 254199 - DNA, 13 bp, Artificial Sequence
  Oligonucleotide for detection of SNP TSC0061978
ttattttttagat

SEQ ID NO: 254200 - DNA, 13 bp, Artificial Sequence
  Oligonucleotide for detection of SNP TSC0061978
atctaaaaaataa

SEQ ID NO: 254201 - DNA, 13 bp, Artificial Sequence
  Oligonucleotide for detection of SNP TSC0061978
atttagtagatga

SEQ ID NO: 254202 - DNA, 13 bp, Artificial Sequence
  Oligonucleotide for detection of SNP TSC0061978
tcatctactaaat

SEQ ID NO: 254203 - DNA, 13 bp, Artificial Sequence
  Oligonucleotide for detection of SNP TSC0061978
atttaggagatga

SEQ ID NO: 254204 - DNA, 13 bp, Artificial Sequence
  Oligonucleotide for detection of SNP TSC0061978
tcatctcctaaat

SEQ ID NO: 254205 - DNA, 13 bp, Artificial Sequence
  Oligonucleotide for detection of SNP TSC0010246
agagtttttggta

SEQ ID NO: 254206 - DNA, 13 bp, Artificial Sequence
  Oligonucleotide for detection of SNP TSC0010246
taccaaaaactct

SEQ ID NO: 254207 - DNA, 13 bp, Artificial Sequence
  Oligonucleotide for detection of SNP TSC0010246
agagttgttggta

SEQ ID NO: 254208 - DNA, 13 bp, Artificial Sequence
  Oligonucleotide for detection of SNP TSC0010246
taccaacaactct

SEQ ID NO: 254209 - DNA, 13 bp, Artificial Sequence
  Oligonucleotide for detection of SNP TSC0010246
tgttagtagtttt

SEQ ID NO: 254210 - DNA, 13 bp, Artificial Sequence
  Oligonucleotide for detection of SNP TSC0010246
aaaactactaaca

SEQ ID NO: 254211 - DNA, 13 bp, Artificial Sequence
  Oligonucleotide for detection of SNP TSC0010247
tttgttgagtgty

SEQ ID NO: 254212 - DNA, 13 bp, Artificial Sequence
  Oligonucleotide for detection of SNP TSC0010247
racactcaacaaa

SEQ ID NO: 254213 - DNA, 13 bp, Artificial Sequence
  Oligonucleotide for detection of SNP TSC0010247
tttgttaagtgty

SEQ ID NO: 254214 - DNA, 13 bp, Artificial Sequence
  Oligonucleotide for detection of SNP TSC0010247
racacttaacaaa

SEQ ID NO: 254215 - DNA, 13 bp, Artificial Sequence
  Oligonucleotide for detection of SNP TSC0010247
ttcgttgagtgty

SEQ ID NO: 254216 - DNA, 13 bp, Artificial Sequence
  Oligonucleotide for detection of SNP TSC0010247
racactcaacgaa

SEQ ID NO: 254217 - DNA, 13 bp, Artificial Sequence
  Oligonucleotide for detection of SNP TSC0010247
ttcgttaagtgty

SEQ ID NO: 254218 - DNA, 13 bp, Artificial Sequence
  Oligonucleotide for detection of SNP TSC0010247
racacttaacgaa

SEQ ID NO: 254219 - DNA, 13 bp, Artificial Sequence
  Oligonucleotide for detection of SNP TSC0010586
agatatagtttat

SEQ ID NO: 254220 - DNA, 13 bp, Artificial Sequence
  Oligonucleotide for detection of SNP TSC0010586
ataaactatatct

SEQ ID NO: 254221 - DNA, 13 bp, Artificial Sequence
  Oligonucleotide for detection of SNP TSC0010586
agatatggtttat

SEQ ID NO: 254222 - DNA, 13 bp, Artificial Sequence
  Oligonucleotide for detection of SNP TSC0010586
ataaaccatatct

SEQ ID NO: 254223 - DNA, 13 bp, Artificial Sequence
  Oligonucleotide for detection of SNP TSC0061980
taggtttgataty

SEQ ID NO: 254224 - DNA, 13 bp, Artificial Sequence
  Oligonucleotide for detection of SNP TSC0061980
ratatcaaaccta

SEQ ID NO: 254225 - DNA, 13 bp, Artificial Sequence
  Oligonucleotide for detection of SNP TSC0061980
taggttcgataty

SEQ ID NO: 254226 - DNA, 13 bp, Artificial Sequence
  Oligonucleotide for detection of SNP TSC0061980
ratatcgaaccta

SEQ ID NO: 254227 - DNA, 13 bp, Artificial Sequence
  Oligonucleotide for detection of SNP TSC0061981
ttgttcgtattty

SEQ ID NO: 254228 - DNA, 13 bp, Artificial Sequence
  Oligonucleotide for detection of SNP TSC0061981
raaatacgaacaa

SEQ ID NO: 254229 - DNA, 13 bp, Artificial Sequence
  Oligonucleotide for detection of SNP TSC0061981
ggggtatgagtag

SEQ ID NO: 254230 - DNA, 13 bp, Artificial Sequence
  Oligonucleotide for detection of SNP TSC0061981
ctactcatacccc

SEQ ID NO: 254231 - DNA, 13 bp, Artificial Sequence
  Oligonucleotide for detection of SNP TSC0061981
ggggtacgagtag

SEQ ID NO: 254232 - DNA, 13 bp, Artificial Sequence
  Oligonucleotide for detection of SNP TSC0061981
ctactcgtacccc

SEQ ID NO: 254233 - DNA, 13 bp, Artificial Sequence
  Oligonucleotide for detection of SNP TSC0061982
gaatggttagaga

SEQ ID NO: 254234 - DNA, 13 bp, Artificial Sequence
  Oligonucleotide for detection of SNP TSC0061982
tctctaaccattc

SEQ ID NO: 254235 - DNA, 13 bp, Artificial Sequence
  Oligonucleotide for detection of SNP TSC0061982
gaatgggtagaga

SEQ ID NO: 254236 - DNA, 13 bp, Artificial Sequence
  Oligonucleotide for detection of SNP TSC0061982
tctctacccattc

SEQ ID NO: 254237 - DNA, 13 bp, Artificial Sequence
  Oligonucleotide for detection of SNP TSC0061983
gtgttgatgttaa

SEQ ID NO: 254238 - DNA, 13 bp, Artificial Sequence
  Oligonucleotide for detection of SNP TSC0061983
ttaacatcaacac

SEQ ID NO: 254239 - DNA, 13 bp, Artificial Sequence
  Oligonucleotide for detection of SNP TSC0061983
gtgttgttgttaa

SEQ ID NO: 254240 - DNA, 13 bp, Artificial Sequence
  Oligonucleotide for detection of SNP TSC0061983
ttaacaacaacac

SEQ ID NO: 254241 - DNA, 13 bp, Artificial Sequence
  Oligonucleotide for detection of SNP TSC0061983
ttaatattaatay

SEQ ID NO: 254242 - DNA, 13 bp, Artificial Sequence
  Oligonucleotide for detection of SNP TSC0061983
rtattaatattaa

SEQ ID NO: 254243 - DNA, 13 bp, Artificial Sequence
  Oligonucleotide for detection of SNP TSC0061983
ttaatagtaatay

SEQ ID NO: 254244 - DNA, 13 bp, Artificial Sequence
  Oligonucleotide for detection of SNP TSC0061983
rtattactattaa

SEQ ID NO: 254245 - DNA, 13 bp, Artificial Sequence
  Oligonucleotide for detection of SNP TSC0061984
agtaaaagaaaga

SEQ ID NO: 254246 - DNA, 13 bp, Artificial Sequence
  Oligonucleotide for detection of SNP TSC0061984
tctttcttttact

SEQ ID NO: 254247 - DNA, 13 bp, Artificial Sequence
  Oligonucleotide for detection of SNP TSC0061984
agtaaatgaaaga

SEQ ID NO: 254248 - DNA, 13 bp, Artificial Sequence
  Oligonucleotide for detection of SNP TSC0061984
tctttcatttact

SEQ ID NO: 254249 - DNA, 13 bp, Artificial Sequence
  Oligonucleotide for detection of SNP TSC0061985
tgtttggatatty

SEQ ID NO: 254250 - DNA, 13 bp, Artificial Sequence
  Oligonucleotide for detection of SNP TSC0061985
raatatccaaaca

SEQ ID NO: 254251 - DNA, 13 bp, Artificial Sequence
  Oligonucleotide for detection of SNP TSC0061985
tgtttgaatatty

SEQ ID NO: 254252 - DNA, 13 bp, Artificial Sequence
  Oligonucleotide for detection of SNP TSC0061985
raatattcaaaca

SEQ ID NO: 254253 - DNA, 13 bp, Artificial Sequence
  Oligonucleotide for detection of SNP TSC0061985
tgttcggatatty

SEQ ID NO: 254254 - DNA, 13 bp, Artificial Sequence
  Oligonucleotide for detection of SNP TSC0061985
raatatccgaaca

SEQ ID NO: 254255 - DNA, 13 bp, Artificial Sequence
  Oligonucleotide for detection of SNP TSC0061985
tgttcgaatatty

SEQ ID NO: 254256 - DNA, 13 bp, Artificial Sequence
  Oligonucleotide for detection of SNP TSC0061985
raatattcgaaca

SEQ ID NO: 254257 - DNA, 13 bp, Artificial Sequence
  Oligonucleotide for detection of SNP TSC0061986
tagagaggtagga

SEQ ID NO: 254258 - DNA, 13 bp, Artificial Sequence
  Oligonucleotide for detection of SNP TSC0061986
tcctacctctcta

SEQ ID NO: 254259 - DNA, 13 bp, Artificial Sequence
  Oligonucleotide for detection of SNP TSC0061986
tagagaagtagga

SEQ ID NO: 254260 - DNA, 13 bp, Artificial Sequence
  Oligonucleotide for detection of SNP TSC0061986
tcctacttctcta

SEQ ID NO: 254261 - DNA, 13 bp, Artificial Sequence
  Oligonucleotide for detection of SNP TSC0061990
ggttataaattaa

SEQ ID NO: 254262 - DNA, 13 bp, Artificial Sequence
  Oligonucleotide for detection of SNP TSC0061990
ttaatttataacc

SEQ ID NO: 254263 - DNA, 13 bp, Artificial Sequence
  Oligonucleotide for detection of SNP TSC0061990
ggttatgaattaa

SEQ ID NO: 254264 - DNA, 13 bp, Artificial Sequence
  Oligonucleotide for detection of SNP TSC0061990
ttaattcataacc

SEQ ID NO: 254265 - DNA, 13 bp, Artificial Sequence
  Oligonucleotide for detection of SNP TSC0061990
ggttacgaattaa

SEQ ID NO: 254266 - DNA, 13 bp, Artificial Sequence
  Oligonucleotide for detection of SNP TSC0061990
ttaattcgtaacc

SEQ ID NO: 254267 - DNA, 13 bp, Artificial Sequence
  Oligonucleotide for detection of SNP TSC0061990
ttgatttgtagty

SEQ ID NO: 254268 - DNA, 13 bp, Artificial Sequence
  Oligonucleotide for detection of SNP TSC0061990
ractacaaatcaa

SEQ ID NO: 254269 - DNA, 13 bp, Artificial Sequence
  Oligonucleotide for detection of SNP TSC0061990
ttgattcgtagty

SEQ ID NO: 254270 - DNA, 13 bp, Artificial Sequence
  Oligonucleotide for detection of SNP TSC0061990
ractacgaatcaa

SEQ ID NO: 254271 - DNA, 13 bp, Artificial Sequence
  Oligonucleotide for detection of SNP TSC0004604
tattttttatttt

SEQ ID NO: 254272 - DNA, 13 bp, Artificial Sequence
  Oligonucleotide for detection of SNP TSC0004604
aaaataaaaaata

SEQ ID NO: 254273 - DNA, 13 bp, Artificial Sequence
  Oligonucleotide for detection of SNP TSC0004604
aggatgaaaagtg

SEQ ID NO: 254274 - DNA, 13 bp, Artificial Sequence
  Oligonucleotide for detection of SNP TSC0004604
cacttttcatcct

SEQ ID NO: 254275 - DNA, 13 bp, Artificial Sequence
  Oligonucleotide for detection of SNP TSC0004604
aggatgtaaagtg

SEQ ID NO: 254276 - DNA, 13 bp, Artificial Sequence
  Oligonucleotide for detection of SNP TSC0004604
cactttacatcct

SEQ ID NO: 254277 - DNA, 13 bp, Artificial Sequence
  Oligonucleotide for detection of SNP TSC0061993
tatgttgttttgt

SEQ ID NO: 254278 - DNA, 13 bp, Artificial Sequence
  Oligonucleotide for detection of SNP TSC0061993
acaaaacaacata

SEQ ID NO: 254279 - DNA, 13 bp, Artificial Sequence
  Oligonucleotide for detection of SNP TSC0061993
tatgttattttgt

SEQ ID NO: 254280 - DNA, 13 bp, Artificial Sequence
  Oligonucleotide for detection of SNP TSC0061993
acaaaataacata

SEQ ID NO: 254281 - DNA, 13 bp, Artificial Sequence
  Oligonucleotide for detection of SNP TSC0061994
tatgaatagtaaa

SEQ ID NO: 254282 - DNA, 13 bp, Artificial Sequence
  Oligonucleotide for detection of SNP TSC0061994
tttactattcata

SEQ ID NO: 254283 - DNA, 13 bp, Artificial Sequence
  Oligonucleotide for detection of SNP TSC0061994
tatgaagagtaaa

SEQ ID NO: 254284 - DNA, 13 bp, Artificial Sequence
  Oligonucleotide for detection of SNP TSC0061994
tttactcttcata

SEQ ID NO: 254285 - DNA, 13 bp, Artificial Sequence
  Oligonucleotide for detection of SNP TSC0061994
tttgttttttatg

SEQ ID NO: 254286 - DNA, 13 bp, Artificial Sequence
  Oligonucleotide for detection of SNP TSC0061994
cataaaaaacaaa

SEQ ID NO: 254287 - DNA, 13 bp, Artificial Sequence
  Oligonucleotide for detection of SNP TSC0010096
ttagttggttaga

SEQ ID NO: 254288 - DNA, 13 bp, Artificial Sequence
  Oligonucleotide for detection of SNP TSC0010096
tctaaccaactaa

SEQ ID NO: 254289 - DNA, 13 bp, Artificial Sequence
  Oligonucleotide for detection of SNP TSC0010096
ttagttagttaga

SEQ ID NO: 254290 - DNA, 13 bp, Artificial Sequence
  Oligonucleotide for detection of SNP TSC0010096
tctaactaactaa

SEQ ID NO: 254291 - DNA, 13 bp, Artificial Sequence
  Oligonucleotide for detection of SNP TSC0061995
gtttttgttaata

SEQ ID NO: 254292 - DNA, 13 bp, Artificial Sequence
  Oligonucleotide for detection of SNP TSC0061995
tattaacaaaaac

SEQ ID NO: 254293 - DNA, 13 bp, Artificial Sequence
  Oligonucleotide for detection of SNP TSC0061995
gtttttattaata

SEQ ID NO: 254294 - DNA, 13 bp, Artificial Sequence
  Oligonucleotide for detection of SNP TSC0061995
tattaataaaaac

SEQ ID NO: 254295 - DNA, 13 bp, Artificial Sequence
  Oligonucleotide for detection of SNP TSC0061996
aaaatagataaaa

SEQ ID NO: 254296 - DNA, 13 bp, Artificial Sequence
  Oligonucleotide for detection of SNP TSC0061996
ttttatctatttt

SEQ ID NO: 254297 - DNA, 13 bp, Artificial Sequence
  Oligonucleotide for detection of SNP TSC0061997
gtagatgtataat

SEQ ID NO: 254298 - DNA, 13 bp, Artificial Sequence
  Oligonucleotide for detection of SNP TSC0061997
attatacatctac

SEQ ID NO: 254299 - DNA, 13 bp, Artificial Sequence
  Oligonucleotide for detection of SNP TSC0061998
tttggtttagttt

SEQ ID NO: 254300 - DNA, 13 bp, Artificial Sequence
  Oligonucleotide for detection of SNP TSC0061998
aaactaaaccaaa

SEQ ID NO: 254301 - DNA, 13 bp, Artificial Sequence
  Oligonucleotide for detection of SNP TSC0061998
tttggtgtagttt

SEQ ID NO: 254302 - DNA, 13 bp, Artificial Sequence
  Oligonucleotide for detection of SNP TSC0061998
aaactacaccaaa

SEQ ID NO: 254303 - DNA, 13 bp, Artificial Sequence
  Oligonucleotide for detection of SNP TSC0061998
aggttagattagg

SEQ ID NO: 254304 - DNA, 13 bp, Artificial Sequence
  Oligonucleotide for detection of SNP TSC0061998
cctaatctaacct

SEQ ID NO: 254305 - DNA, 13 bp, Artificial Sequence
  Oligonucleotide for detection of SNP TSC0061998
aggttatattagg

SEQ ID NO: 254306 - DNA, 13 bp, Artificial Sequence
  Oligonucleotide for detection of SNP TSC0061998
cctaatataacct

SEQ ID NO: 254307 - DNA, 13 bp, Artificial Sequence
  Oligonucleotide for detection of SNP TSC0010872
agtaattatatta

SEQ ID NO: 254308 - DNA, 13 bp, Artificial Sequence
  Oligonucleotide for detection of SNP TSC0010872
taatataattact

SEQ ID NO: 254309 - DNA, 13 bp, Artificial Sequence
  Oligonucleotide for detection of SNP TSC0010872
agtaatgatatta

SEQ ID NO: 254310 - DNA, 13 bp, Artificial Sequence
  Oligonucleotide for detection of SNP TSC0010872
taatatcattact

SEQ ID NO: 254311 - DNA, 13 bp, Artificial Sequence
  Oligonucleotide for detection of SNP TSC0010872
agtaacgatatta

SEQ ID NO: 254312 - DNA, 13 bp, Artificial Sequence
  Oligonucleotide for detection of SNP TSC0010872
taatatcgttact

SEQ ID NO: 254313 - DNA, 13 bp, Artificial Sequence
  Oligonucleotide for detection of SNP TSC0010872
tgatatggttatt

SEQ ID NO: 254314 - DNA, 13 bp, Artificial Sequence
  Oligonucleotide for detection of SNP TSC0010872
aataaccatatca

SEQ ID NO: 254315 - DNA, 13 bp, Artificial Sequence
  Oligonucleotide for detection of SNP TSC0010872
tgatatcgttatt

SEQ ID NO: 254316 - DNA, 13 bp, Artificial Sequence
  Oligonucleotide for detection of SNP TSC0010872
aataacgatatca

SEQ ID NO: 254317 - DNA, 13 bp, Artificial Sequence
  Oligonucleotide for detection of SNP TSC0001640
ggagggtttattg

SEQ ID NO: 254318 - DNA, 13 bp, Artificial Sequence
  Oligonucleotide for detection of SNP TSC0001640
caataaaccctcc

SEQ ID NO: 254319 - DNA, 13 bp, Artificial Sequence
  Oligonucleotide for detection of SNP TSC0001640
ggaggggttattg

SEQ ID NO: 254320 - DNA, 13 bp, Artificial Sequence
  Oligonucleotide for detection of SNP TSC0001640
caataacccctcc

SEQ ID NO: 254321 - DNA, 13 bp, Artificial Sequence
  Oligonucleotide for detection of SNP TSC0007299
aggtttaattagy

SEQ ID NO: 254322 - DNA, 13 bp, Artificial Sequence
  Oligonucleotide for detection of SNP TSC0007299
rctaattaaacct

SEQ ID NO: 254323 - DNA, 13 bp, Artificial Sequence
  Oligonucleotide for detection of SNP TSC0007299
aggttttattagy

SEQ ID NO: 254324 - DNA, 13 bp, Artificial Sequence
  Oligonucleotide for detection of SNP TSC0007299
rctaataaaacct

SEQ ID NO: 254325 - DNA, 13 bp, Artificial Sequence
  Oligonucleotide for detection of SNP TSC0007299
gttgatggaattt

SEQ ID NO: 254326 - DNA, 13 bp, Artificial Sequence
  Oligonucleotide for detection of SNP TSC0007299
aaattccatcaac

SEQ ID NO: 254327 - DNA, 13 bp, Artificial Sequence
  Oligonucleotide for detection of SNP TSC0010179
taaatagatgtat

SEQ ID NO: 254328 - DNA, 13 bp, Artificial Sequence
  Oligonucleotide for detection of SNP TSC0010179
atacatctattta

SEQ ID NO: 254329 - DNA, 13 bp, Artificial Sequence
  Oligonucleotide for detection of SNP TSC0010179
taaataaatgtat

SEQ ID NO: 254330 - DNA, 13 bp, Artificial Sequence
  Oligonucleotide for detection of SNP TSC0010179
atacatttattta

SEQ ID NO: 254331 - DNA, 13 bp, Artificial Sequence
  Oligonucleotide for detection of SNP TSC0062008
tttttggtaattt

SEQ ID NO: 254332 - DNA, 13 bp, Artificial Sequence
  Oligonucleotide for detection of SNP TSC0062008
aaattaccaaaaa

SEQ ID NO: 254333 - DNA, 13 bp, Artificial Sequence
  Oligonucleotide for detection of SNP TSC0062009
ttggtaatttaty

SEQ ID NO: 254334 - DNA, 13 bp, Artificial Sequence
  Oligonucleotide for detection of SNP TSC0062009
rataaattaccaa

SEQ ID NO: 254335 - DNA, 13 bp, Artificial Sequence
  Oligonucleotide for detection of SNP TSC0062009
ttggtagtttaty

SEQ ID NO: 254336 - DNA, 13 bp, Artificial Sequence
  Oligonucleotide for detection of SNP TSC0062009
rataaactaccaa

SEQ ID NO: 254337 - DNA, 13 bp, Artificial Sequence
  Oligonucleotide for detection of SNP TSC0062010
ttgggaaggtaag

SEQ ID NO: 254338 - DNA, 13 bp, Artificial Sequence
  Oligonucleotide for detection of SNP TSC0062010
cttaccttcccaa

SEQ ID NO: 254339 - DNA, 13 bp, Artificial Sequence
  Oligonucleotide for detection of SNP TSC0062010
ttgggagggtaag

SEQ ID NO: 254340 - DNA, 13 bp, Artificial Sequence
  Oligonucleotide for detection of SNP TSC0062010
cttaccctcccaa

SEQ ID NO: 254341 - DNA, 13 bp, Artificial Sequence
  Oligonucleotide for detection of SNP TSC0062011
tgagttagtagay

SEQ ID NO: 254342 - DNA, 13 bp, Artificial Sequence
  Oligonucleotide for detection of SNP TSC0062011
rtctactaactca

SEQ ID NO: 254343 - DNA, 13 bp, Artificial Sequence
  Oligonucleotide for detection of SNP TSC0062011
tgagtttgtagay

SEQ ID NO: 254344 - DNA, 13 bp, Artificial Sequence
  Oligonucleotide for detection of SNP TSC0062011
rtctacaaactca

SEQ ID NO: 254345 - DNA, 13 bp, Artificial Sequence
  Oligonucleotide for detection of SNP TSC0062011
gtttattaattta

SEQ ID NO: 254346 - DNA, 13 bp, Artificial Sequence
  Oligonucleotide for detection of SNP TSC0062011
taaattaataaac

SEQ ID NO: 254347 - DNA, 13 bp, Artificial Sequence
  Oligonucleotide for detection of SNP TSC0062011
gtttataaattta

SEQ ID NO: 254348 - DNA, 13 bp, Artificial Sequence
  Oligonucleotide for detection of SNP TSC0062011
taaatttataaac

SEQ ID NO: 254349 - DNA, 13 bp, Artificial Sequence
  Oligonucleotide for detection of SNP TSC0062012
tgtttgagttagg

SEQ ID NO: 254350 - DNA, 13 bp, Artificial Sequence
  Oligonucleotide for detection of SNP TSC0062012
cctaactcaaaca

SEQ ID NO: 254351 - DNA, 13 bp, Artificial Sequence
  Oligonucleotide for detection of SNP TSC0062013
taatagatggtty

SEQ ID NO: 254352 - DNA, 13 bp, Artificial Sequence
  Oligonucleotide for detection of SNP TSC0062013
raaccatctatta

SEQ ID NO: 254353 - DNA, 13 bp, Artificial Sequence
  Oligonucleotide for detection of SNP TSC0062013
taataggtggtty

SEQ ID NO: 254354 - DNA, 13 bp, Artificial Sequence
  Oligonucleotide for detection of SNP TSC0062013
raaccacctatta

SEQ ID NO: 254355 - DNA, 13 bp, Artificial Sequence
  Oligonucleotide for detection of SNP TSC0062014
gtttttgatttaa

SEQ ID NO: 254356 - DNA, 13 bp, Artificial Sequence
  Oligonucleotide for detection of SNP TSC0062014
ttaaatcaaaaac

SEQ ID NO: 254357 - DNA, 13 bp, Artificial Sequence
  Oligonucleotide for detection of SNP TSC0062014
gtttttaatttaa

SEQ ID NO: 254358 - DNA, 13 bp, Artificial Sequence
  Oligonucleotide for detection of SNP TSC0062014
ttaaattaaaaac

SEQ ID NO: 254359 - DNA, 13 bp, Artificial Sequence
  Oligonucleotide for detection of SNP TSC0062015
taaggttgtttty

SEQ ID NO: 254360 - DNA, 13 bp, Artificial Sequence
  Oligonucleotide for detection of SNP TSC0062015
raaaacaacctta

SEQ ID NO: 254361 - DNA, 13 bp, Artificial Sequence
  Oligonucleotide for detection of SNP TSC0062015
taaggtggtttty

SEQ ID NO: 254362 - DNA, 13 bp, Artificial Sequence
  Oligonucleotide for detection of SNP TSC0062015
raaaaccacctta

SEQ ID NO: 254363 - DNA, 13 bp, Artificial Sequence
  Oligonucleotide for detection of SNP TSC0062016
gattttggattty

SEQ ID NO: 254364 - DNA, 13 bp, Artificial Sequence
  Oligonucleotide for detection of SNP TSC0062016
raaatccaaaatc

SEQ ID NO: 254365 - DNA, 13 bp, Artificial Sequence
  Oligonucleotide for detection of SNP TSC0062016
gattttagattty

SEQ ID NO: 254366 - DNA, 13 bp, Artificial Sequence
  Oligonucleotide for detection of SNP TSC0062016
raaatctaaaatc

SEQ ID NO: 254367 - DNA, 13 bp, Artificial Sequence
  Oligonucleotide for detection of SNP TSC0062017
taggtataaggga

SEQ ID NO: 254368 - DNA, 13 bp, Artificial Sequence
  Oligonucleotide for detection of SNP TSC0062017
tcccttataccta

SEQ ID NO: 254369 - DNA, 13 bp, Artificial Sequence
  Oligonucleotide for detection of SNP TSC0062017
taggtagaaggga

SEQ ID NO: 254370 - DNA, 13 bp, Artificial Sequence
  Oligonucleotide for detection of SNP TSC0062017
tcccttctaccta

SEQ ID NO: 254371 - DNA, 13 bp, Artificial Sequence
  Oligonucleotide for detection of SNP TSC0062018
taatgttggtata

SEQ ID NO: 254372 - DNA, 13 bp, Artificial Sequence
  Oligonucleotide for detection of SNP TSC0062018
tataccaacatta

SEQ ID NO: 254373 - DNA, 13 bp, Artificial Sequence
  Oligonucleotide for detection of SNP TSC0062018
taatgtgggtata

SEQ ID NO: 254374 - DNA, 13 bp, Artificial Sequence
  Oligonucleotide for detection of SNP TSC0062018
tatacccacatta

SEQ ID NO: 254375 - DNA, 13 bp, Artificial Sequence
  Oligonucleotide for detection of SNP TSC0062018
taatgtcggtata

SEQ ID NO: 254376 - DNA, 13 bp, Artificial Sequence
  Oligonucleotide for detection of SNP TSC0062018
tataccgacatta

SEQ ID NO: 254377 - DNA, 13 bp, Artificial Sequence
  Oligonucleotide for detection of SNP TSC0062018
tgtattgatattg

SEQ ID NO: 254378 - DNA, 13 bp, Artificial Sequence
  Oligonucleotide for detection of SNP TSC0062018
caatatcaataca

SEQ ID NO: 254379 - DNA, 13 bp, Artificial Sequence
  Oligonucleotide for detection of SNP TSC0062018
tgtatttatattg

SEQ ID NO: 254380 - DNA, 13 bp, Artificial Sequence
  Oligonucleotide for detection of SNP TSC0062018
caatataaataca

SEQ ID NO: 254381 - DNA, 13 bp, Artificial Sequence
  Oligonucleotide for detection of SNP TSC0062018
tgtatcgatattg

SEQ ID NO: 254382 - DNA, 13 bp, Artificial Sequence
  Oligonucleotide for detection of SNP TSC0062018
caatatcgataca

SEQ ID NO: 254383 - DNA, 13 bp, Artificial Sequence
  Oligonucleotide for detection of SNP TSC0062019
tgtgtattttttt

SEQ ID NO: 254384 - DNA, 13 bp, Artificial Sequence
  Oligonucleotide for detection of SNP TSC0062019
aaaaaaatacaca

SEQ ID NO: 254385 - DNA, 13 bp, Artificial Sequence
  Oligonucleotide for detection of SNP TSC0062019
tgcgtaatttttt

SEQ ID NO: 254386 - DNA, 13 bp, Artificial Sequence
  Oligonucleotide for detection of SNP TSC0062019
aaaaaattacgca

SEQ ID NO: 254387 - DNA, 13 bp, Artificial Sequence
  Oligonucleotide for detection of SNP TSC0062019
tgcgtattttttt

SEQ ID NO: 254388 - DNA, 13 bp, Artificial Sequence
  Oligonucleotide for detection of SNP TSC0062019
aaaaaaatacgca

SEQ ID NO: 254389 - DNA, 13 bp, Artificial Sequence
  Oligonucleotide for detection of SNP TSC0062019
aaggaattgtgta

SEQ ID NO: 254390 - DNA, 13 bp, Artificial Sequence
  Oligonucleotide for detection of SNP TSC0062019
tacacaattcctt

SEQ ID NO: 254391 - DNA, 13 bp, Artificial Sequence
  Oligonucleotide for detection of SNP TSC0062019
aaggaagtgtgta

SEQ ID NO: 254392 - DNA, 13 bp, Artificial Sequence
  Oligonucleotide for detection of SNP TSC0062019
tacacacttcctt

SEQ ID NO: 254393 - DNA, 13 bp, Artificial Sequence
  Oligonucleotide for detection of SNP TSC0062019
aaggaattgcgta

SEQ ID NO: 254394 - DNA, 13 bp, Artificial Sequence
  Oligonucleotide for detection of SNP TSC0062019
tacgcaattcctt

SEQ ID NO: 254395 - DNA, 13 bp, Artificial Sequence
  Oligonucleotide for detection of SNP TSC0062019
aaggaagtgcgta

SEQ ID NO: 254396 - DNA, 13 bp, Artificial Sequence
  Oligonucleotide for detection of SNP TSC0062019
tacgcacttcctt

SEQ ID NO: 254397 - DNA, 13 bp, Artificial Sequence
  Oligonucleotide for detection of SNP TSC0008297
tttgaagtaatgg

SEQ ID NO: 254398 - DNA, 13 bp, Artificial Sequence
  Oligonucleotide for detection of SNP TSC0008297
ccattacttcaaa

SEQ ID NO: 254399 - DNA, 13 bp, Artificial Sequence
  Oligonucleotide for detection of SNP TSC0008297
tttgaaataatgg

SEQ ID NO: 254400 - DNA, 13 bp, Artificial Sequence
  Oligonucleotide for detection of SNP TSC0008297
ccattatttcaaa

SEQ ID NO: 254401 - DNA, 13 bp, Artificial Sequence
  Oligonucleotide for detection of SNP TSC0008298
tatgtgatgttgg

SEQ ID NO: 254402 - DNA, 13 bp, Artificial Sequence
  Oligonucleotide for detection of SNP TSC0008298
ccaacatcacata

SEQ ID NO: 254403 - DNA, 13 bp, Artificial Sequence
  Oligonucleotide for detection of SNP TSC0008298
tatgtggtgttgg

SEQ ID NO: 254404 - DNA, 13 bp, Artificial Sequence
  Oligonucleotide for detection of SNP TSC0008298
ccaacaccacata

SEQ ID NO: 254405 - DNA, 13 bp, Artificial Sequence
  Oligonucleotide for detection of SNP TSC0008299
attgttaagtgga

SEQ ID NO: 254406 - DNA, 13 bp, Artificial Sequence
  Oligonucleotide for detection of SNP TSC0008299
tccacttaacaat

SEQ ID NO: 254407 - DNA, 13 bp, Artificial Sequence
  Oligonucleotide for detection of SNP TSC0008299
attgtttagtgga

SEQ ID NO: 254408 - DNA, 13 bp, Artificial Sequence
  Oligonucleotide for detection of SNP TSC0008299
tccactaaacaat

SEQ ID NO: 254409 - DNA, 13 bp, Artificial Sequence
  Oligonucleotide for detection of SNP TSC0008299
tttatttggtagt

SEQ ID NO: 254410 - DNA, 13 bp, Artificial Sequence
  Oligonucleotide for detection of SNP TSC0008299
actaccaaataaa

SEQ ID NO: 254411 - DNA, 13 bp, Artificial Sequence
  Oligonucleotide for detection of SNP TSC0008299
tttattaggtagt

SEQ ID NO: 254412 - DNA, 13 bp, Artificial Sequence
  Oligonucleotide for detection of SNP TSC0008299
actacctaataaa

SEQ ID NO: 254413 - DNA, 13 bp, Artificial Sequence
  Oligonucleotide for detection of SNP TSC0008940
agtagtatgaaat

SEQ ID NO: 254414 - DNA, 13 bp, Artificial Sequence
  Oligonucleotide for detection of SNP TSC0008940
atttcatactact

SEQ ID NO: 254415 - DNA, 13 bp, Artificial Sequence
  Oligonucleotide for detection of SNP TSC0008940
agtagtttgaaat

SEQ ID NO: 254416 - DNA, 13 bp, Artificial Sequence
  Oligonucleotide for detection of SNP TSC0008940
atttcaaactact

SEQ ID NO: 254417 - DNA, 13 bp, Artificial Sequence
  Oligonucleotide for detection of SNP TSC0008940
attttatattgtt

SEQ ID NO: 254418 - DNA, 13 bp, Artificial Sequence
  Oligonucleotide for detection of SNP TSC0008940
aacaatataaaat

SEQ ID NO: 254419 - DNA, 13 bp, Artificial Sequence
  Oligonucleotide for detection of SNP TSC0008940
attttagattgtt

SEQ ID NO: 254420 - DNA, 13 bp, Artificial Sequence
  Oligonucleotide for detection of SNP TSC0008940
aacaatctaaaat

SEQ ID NO: 254421 - DNA, 13 bp, Artificial Sequence
  Oligonucleotide for detection of SNP TSC0062022
agtgagttttgat

SEQ ID NO: 254422 - DNA, 13 bp, Artificial Sequence
  Oligonucleotide for detection of SNP TSC0062022
atcaaaactcact

SEQ ID NO: 254423 - DNA, 13 bp, Artificial Sequence
  Oligonucleotide for detection of SNP TSC0062022
agtgaggtttgat

SEQ ID NO: 254424 - DNA, 13 bp, Artificial Sequence
  Oligonucleotide for detection of SNP TSC0062022
atcaaacctcact

SEQ ID NO: 254425 - DNA, 13 bp, Artificial Sequence
  Oligonucleotide for detection of SNP TSC0006716
attttaaaaatag

SEQ ID NO: 254426 - DNA, 13 bp, Artificial Sequence
  Oligonucleotide for detection of SNP TSC0006716
ctatttttaaaat

SEQ ID NO: 254427 - DNA, 13 bp, Artificial Sequence
  Oligonucleotide for detection of SNP TSC0006716
attttagaaatag

SEQ ID NO: 254428 - DNA, 13 bp, Artificial Sequence
  Oligonucleotide for detection of SNP TSC0006716
ctatttctaaaat

SEQ ID NO: 254429 - DNA, 13 bp, Artificial Sequence
  Oligonucleotide for detection of SNP TSC0007571
tttattatttggy

SEQ ID NO: 254430 - DNA, 13 bp, Artificial Sequence
  Oligonucleotide for detection of SNP TSC0007571
rccaaataataaa

SEQ ID NO: 254431 - DNA, 13 bp, Artificial Sequence
  Oligonucleotide for detection of SNP TSC0007571
tttattgtttggy

SEQ ID NO: 254432 - DNA, 13 bp, Artificial Sequence
  Oligonucleotide for detection of SNP TSC0007571
rccaaacaataaa

SEQ ID NO: 254433 - DNA, 13 bp, Artificial Sequence
  Oligonucleotide for detection of SNP TSC0008595
aggttgattttay

SEQ ID NO: 254434 - DNA, 13 bp, Artificial Sequence
  Oligonucleotide for detection of SNP TSC0008595
rtaaaatcaacct

SEQ ID NO: 254435 - DNA, 13 bp, Artificial Sequence
  Oligonucleotide for detection of SNP TSC0008595
aggttggttttay

SEQ ID NO: 254436 - DNA, 13 bp, Artificial Sequence
  Oligonucleotide for detection of SNP TSC0008595
rtaaaaccaacct

SEQ ID NO: 254437 - DNA, 13 bp, Artificial Sequence
  Oligonucleotide for detection of SNP TSC0062024
tggaaatgttata

SEQ ID NO: 254438 - DNA, 13 bp, Artificial Sequence
  Oligonucleotide for detection of SNP TSC0062024
tataacatttcca

SEQ ID NO: 254439 - DNA, 13 bp, Artificial Sequence
  Oligonucleotide for detection of SNP TSC0062024
tggaaacgttata

SEQ ID NO: 254440 - DNA, 13 bp, Artificial Sequence
  Oligonucleotide for detection of SNP TSC0062024
tataacgtttcca

SEQ ID NO: 254441 - DNA, 13 bp, Artificial Sequence
  Oligonucleotide for detection of SNP TSC0062024
tatgacgttttta

SEQ ID NO: 254442 - DNA, 13 bp, Artificial Sequence
  Oligonucleotide for detection of SNP TSC0062024
taaaaacgtcata

SEQ ID NO: 254443 - DNA, 13 bp, Artificial Sequence
  Oligonucleotide for detection of SNP TSC0062025
tggttaattgaay

SEQ ID NO: 254444 - DNA, 13 bp, Artificial Sequence
  Oligonucleotide for detection of SNP TSC0062025
rttcaattaacca

SEQ ID NO: 254445 - DNA, 13 bp, Artificial Sequence
  Oligonucleotide for detection of SNP TSC0062025
tggttagttgaay

SEQ ID NO: 254446 - DNA, 13 bp, Artificial Sequence
  Oligonucleotide for detection of SNP TSC0062025
rttcaactaacca

SEQ ID NO: 254447 - DNA, 13 bp, Artificial Sequence
  Oligonucleotide for detection of SNP TSC0062026
gttttttttatgy

SEQ ID NO: 254448 - DNA, 13 bp, Artificial Sequence
  Oligonucleotide for detection of SNP TSC0062026
rcataaaaaaaac

SEQ ID NO: 254449 - DNA, 13 bp, Artificial Sequence
  Oligonucleotide for detection of SNP TSC0062026
gtatggaggaaay

SEQ ID NO: 254450 - DNA, 13 bp, Artificial Sequence
  Oligonucleotide for detection of SNP TSC0062026
rtttcctccatac

SEQ ID NO: 254451 - DNA, 13 bp, Artificial Sequence
  Oligonucleotide for detection of SNP TSC0062026
gtatggtggaaay

SEQ ID NO: 254452 - DNA, 13 bp, Artificial Sequence
  Oligonucleotide for detection of SNP TSC0062026
rtttccaccatac

SEQ ID NO: 254453 - DNA, 13 bp, Artificial Sequence
  Oligonucleotide for detection of SNP TSC0062026
gtatggcggaaay

SEQ ID NO: 254454 - DNA, 13 bp, Artificial Sequence
  Oligonucleotide for detection of SNP TSC0062026
rtttccgccatac

SEQ ID NO: 254455 - DNA, 13 bp, Artificial Sequence
  Oligonucleotide for detection of SNP TSC0062028
attgtggtttttg

SEQ ID NO: 254456 - DNA, 13 bp, Artificial Sequence
  Oligonucleotide for detection of SNP TSC0062028
caaaaaccacaat

SEQ ID NO: 254457 - DNA, 13 bp, Artificial Sequence
  Oligonucleotide for detection of SNP TSC0062029
aatttattaattt

SEQ ID NO: 254458 - DNA, 13 bp, Artificial Sequence
  Oligonucleotide for detection of SNP TSC0062029
aaattaataaatt

SEQ ID NO: 254459 - DNA, 13 bp, Artificial Sequence
  Oligonucleotide for detection of SNP TSC0062029
aatttagtaattt

SEQ ID NO: 254460 - DNA, 13 bp, Artificial Sequence
  Oligonucleotide for detection of SNP TSC0062029
aaattactaaatt

SEQ ID NO: 254461 - DNA, 13 bp, Artificial Sequence
  Oligonucleotide for detection of SNP TSC0062029
aagttaatgaatt

SEQ ID NO: 254462 - DNA, 13 bp, Artificial Sequence
  Oligonucleotide for detection of SNP TSC0062029
aattcattaactt

SEQ ID NO: 254463 - DNA, 13 bp, Artificial Sequence
  Oligonucleotide for detection of SNP TSC0062029
aagttattgaatt

SEQ ID NO: 254464 - DNA, 13 bp, Artificial Sequence
  Oligonucleotide for detection of SNP TSC0062029
aattcaataactt

SEQ ID NO: 254465 - DNA, 13 bp, Artificial Sequence
  Oligonucleotide for detection of SNP TSC0062032
gtggaaaataata

SEQ ID NO: 254466 - DNA, 13 bp, Artificial Sequence
  Oligonucleotide for detection of SNP TSC0062032
tattattttccac

SEQ ID NO: 254467 - DNA, 13 bp, Artificial Sequence
  Oligonucleotide for detection of SNP TSC0062032
gtggaagataata

SEQ ID NO: 254468 - DNA, 13 bp, Artificial Sequence
  Oligonucleotide for detection of SNP TSC0062032
tattatcttccac

SEQ ID NO: 254469 - DNA, 13 bp, Artificial Sequence
  Oligonucleotide for detection of SNP TSC0062033
cggttgtttgtag

SEQ ID NO: 254470 - DNA, 13 bp, Artificial Sequence
  Oligonucleotide for detection of SNP TSC0062033
ctacaaacaaccg

SEQ ID NO: 254471 - DNA, 13 bp, Artificial Sequence
  Oligonucleotide for detection of SNP TSC0062033
cggttggttgtag

SEQ ID NO: 254472 - DNA, 13 bp, Artificial Sequence
  Oligonucleotide for detection of SNP TSC0062033
ctacaaccaaccg

SEQ ID NO: 254473 - DNA, 13 bp, Artificial Sequence
  Oligonucleotide for detection of SNP TSC0062033
ttataagtagttg

SEQ ID NO: 254474 - DNA, 13 bp, Artificial Sequence
  Oligonucleotide for detection of SNP TSC0062033
caactacttataa

SEQ ID NO: 254475 - DNA, 13 bp, Artificial Sequence
  Oligonucleotide for detection of SNP TSC0062033
ttataattagttg

SEQ ID NO: 254476 - DNA, 13 bp, Artificial Sequence
  Oligonucleotide for detection of SNP TSC0062033
caactaattataa

SEQ ID NO: 254477 - DNA, 13 bp, Artificial Sequence
  Oligonucleotide for detection of SNP TSC0062033
ttataagtagtcg

SEQ ID NO: 254478 - DNA, 13 bp, Artificial Sequence
  Oligonucleotide for detection of SNP TSC0062033
cgactacttataa

SEQ ID NO: 254479 - DNA, 13 bp, Artificial Sequence
  Oligonucleotide for detection of SNP TSC0062033
ttataattagtcg

SEQ ID NO: 254480 - DNA, 13 bp, Artificial Sequence
  Oligonucleotide for detection of SNP TSC0062033
cgactaattataa

SEQ ID NO: 254481 - DNA, 13 bp, Artificial Sequence
  Oligonucleotide for detection of SNP TSC0062034
gtttgggaatgta

SEQ ID NO: 254482 - DNA, 13 bp, Artificial Sequence
  Oligonucleotide for detection of SNP TSC0062034
tacattcccaaac

SEQ ID NO: 254483 - DNA, 13 bp, Artificial Sequence
  Oligonucleotide for detection of SNP TSC0062034
gtttggaaatgta

SEQ ID NO: 254484 - DNA, 13 bp, Artificial Sequence
  Oligonucleotide for detection of SNP TSC0062034
tacatttccaaac

SEQ ID NO: 254485 - DNA, 13 bp, Artificial Sequence
  Oligonucleotide for detection of SNP TSC0062036
gttattagagtgg

SEQ ID NO: 254486 - DNA, 13 bp, Artificial Sequence
  Oligonucleotide for detection of SNP TSC0062036
ccactctaataac

SEQ ID NO: 254487 - DNA, 13 bp, Artificial Sequence
  Oligonucleotide for detection of SNP TSC0062036
gttattggagtgg

SEQ ID NO: 254488 - DNA, 13 bp, Artificial Sequence
  Oligonucleotide for detection of SNP TSC0062036
ccactccaataac

SEQ ID NO: 254489 - DNA, 13 bp, Artificial Sequence
  Oligonucleotide for detection of SNP TSC0062036
gttatcggagtgg

SEQ ID NO: 254490 - DNA, 13 bp, Artificial Sequence
  Oligonucleotide for detection of SNP TSC0062036
ccactccgataac

SEQ ID NO: 254491 - DNA, 13 bp, Artificial Sequence
  Oligonucleotide for detection of SNP TSC0062036
ttatttcggtggy

SEQ ID NO: 254492 - DNA, 13 bp, Artificial Sequence
  Oligonucleotide for detection of SNP TSC0062036
rccaccgaaataa

SEQ ID NO: 254493 - DNA, 13 bp, Artificial Sequence
  Oligonucleotide for detection of SNP TSC0062037
tttgttgtttata

SEQ ID NO: 254494 - DNA, 13 bp, Artificial Sequence
  Oligonucleotide for detection of SNP TSC0062037
tataaacaacaaa

SEQ ID NO: 254495 - DNA, 13 bp, Artificial Sequence
  Oligonucleotide for detection of SNP TSC0062042
ttttttcggttga

SEQ ID NO: 254496 - DNA, 13 bp, Artificial Sequence
  Oligonucleotide for detection of SNP TSC0062042
tcaaccgaaaaaa

SEQ ID NO: 254497 - DNA, 13 bp, Artificial Sequence
  Oligonucleotide for detection of SNP TSC0062042
ttagttgaaaaag

SEQ ID NO: 254498 - DNA, 13 bp, Artificial Sequence
  Oligonucleotide for detection of SNP TSC0062042
ctttttcaactaa

SEQ ID NO: 254499 - DNA, 13 bp, Artificial Sequence
  Oligonucleotide for detection of SNP TSC0062042
ttagttaaaaaag

SEQ ID NO: 254500 - DNA, 13 bp, Artificial Sequence
  Oligonucleotide for detection of SNP TSC0062042
cttttttaactaa

SEQ ID NO: 254501 - DNA, 13 bp, Artificial Sequence
  Oligonucleotide for detection of SNP TSC0062042
ttagtcgaaaaag

SEQ ID NO: 254502 - DNA, 13 bp, Artificial Sequence
  Oligonucleotide for detection of SNP TSC0062042
ctttttcgactaa

SEQ ID NO: 254503 - DNA, 13 bp, Artificial Sequence
  Oligonucleotide for detection of SNP TSC0006108
tttttaatgaagt

SEQ ID NO: 254504 - DNA, 13 bp, Artificial Sequence
  Oligonucleotide for detection of SNP TSC0006108
acttcattaaaaa

SEQ ID NO: 254505 - DNA, 13 bp, Artificial Sequence
  Oligonucleotide for detection of SNP TSC0006108
tttttattgaagt

SEQ ID NO: 254506 - DNA, 13 bp, Artificial Sequence
  Oligonucleotide for detection of SNP TSC0006108
acttcaataaaaa

SEQ ID NO: 254507 - DNA, 13 bp, Artificial Sequence
  Oligonucleotide for detection of SNP TSC0006108
attttattgaaga

SEQ ID NO: 254508 - DNA, 13 bp, Artificial Sequence
  Oligonucleotide for detection of SNP TSC0006108
tcttcaataaaat

SEQ ID NO: 254509 - DNA, 13 bp, Artificial Sequence
  Oligonucleotide for detection of SNP TSC0006108
attttagtgaaga

SEQ ID NO: 254510 - DNA, 13 bp, Artificial Sequence
  Oligonucleotide for detection of SNP TSC0006108
tcttcactaaaat

SEQ ID NO: 254511 - DNA, 13 bp, Artificial Sequence
  Oligonucleotide for detection of SNP TSC0062045
tttattataattg

SEQ ID NO: 254512 - DNA, 13 bp, Artificial Sequence
  Oligonucleotide for detection of SNP TSC0062045
caattataataaa

SEQ ID NO: 254513 - DNA, 13 bp, Artificial Sequence
  Oligonucleotide for detection of SNP TSC0062045
tttattgtaattg

SEQ ID NO: 254514 - DNA, 13 bp, Artificial Sequence
  Oligonucleotide for detection of SNP TSC0062045
caattacaataaa

SEQ ID NO: 254515 - DNA, 13 bp, Artificial Sequence
  Oligonucleotide for detection of SNP TSC0062049
atttattgtttgt

SEQ ID NO: 254516 - DNA, 13 bp, Artificial Sequence
  Oligonucleotide for detection of SNP TSC0062049
acaaacaataaat

SEQ ID NO: 254517 - DNA, 13 bp, Artificial Sequence
  Oligonucleotide for detection of SNP TSC0062049
atttatggtttgt

SEQ ID NO: 254518 - DNA, 13 bp, Artificial Sequence
  Oligonucleotide for detection of SNP TSC0062049
acaaaccataaat

SEQ ID NO: 254519 - DNA, 13 bp, Artificial Sequence
  Oligonucleotide for detection of SNP TSC0062049
atttacggtttgt

SEQ ID NO: 254520 - DNA, 13 bp, Artificial Sequence
  Oligonucleotide for detection of SNP TSC0062049
acaaaccgtaaat

SEQ ID NO: 254521 - DNA, 13 bp, Artificial Sequence
  Oligonucleotide for detection of SNP TSC0062049
atagatagtggat

SEQ ID NO: 254522 - DNA, 13 bp, Artificial Sequence
  Oligonucleotide for detection of SNP TSC0062049
atccactatctat

SEQ ID NO: 254523 - DNA, 13 bp, Artificial Sequence
  Oligonucleotide for detection of SNP TSC0062049
atagattgtggat

SEQ ID NO: 254524 - DNA, 13 bp, Artificial Sequence
  Oligonucleotide for detection of SNP TSC0062049
atccacaatctat

SEQ ID NO: 254525 - DNA, 13 bp, Artificial Sequence
  Oligonucleotide for detection of SNP TSC0062049
atagatcgtggat

SEQ ID NO: 254526 - DNA, 13 bp, Artificial Sequence
  Oligonucleotide for detection of SNP TSC0062049
atccacgatctat

SEQ ID NO: 254527 - DNA, 13 bp, Artificial Sequence
  Oligonucleotide for detection of SNP TSC0062051
aatatatgtattt

SEQ ID NO: 254528 - DNA, 13 bp, Artificial Sequence
  Oligonucleotide for detection of SNP TSC0062051
aaatacatatatt

SEQ ID NO: 254529 - DNA, 13 bp, Artificial Sequence
  Oligonucleotide for detection of SNP TSC0062051
aatatacgtattt

SEQ ID NO: 254530 - DNA, 13 bp, Artificial Sequence
  Oligonucleotide for detection of SNP TSC0062051
aaatacgtatatt

SEQ ID NO: 254531 - DNA, 13 bp, Artificial Sequence
  Oligonucleotide for detection of SNP TSC0062052
gataatgttataa

SEQ ID NO: 254532 - DNA, 13 bp, Artificial Sequence
  Oligonucleotide for detection of SNP TSC0062052
ttataacattatc

SEQ ID NO: 254533 - DNA, 13 bp, Artificial Sequence
  Oligonucleotide for detection of SNP TSC0062052
gataatattataa

SEQ ID NO: 254534 - DNA, 13 bp, Artificial Sequence
  Oligonucleotide for detection of SNP TSC0062052
ttataatattatc

SEQ ID NO: 254535 - DNA, 13 bp, Artificial Sequence
  Oligonucleotide for detection of SNP TSC0062053
ttagtggggataa

SEQ ID NO: 254536 - DNA, 13 bp, Artificial Sequence
  Oligonucleotide for detection of SNP TSC0062053
ttatccccactaa

SEQ ID NO: 254537 - DNA, 13 bp, Artificial Sequence
  Oligonucleotide for detection of SNP TSC0062053
ttagtgaggataa

SEQ ID NO: 254538 - DNA, 13 bp, Artificial Sequence
  Oligonucleotide for detection of SNP TSC0062053
ttatcctcactaa

SEQ ID NO: 254539 - DNA, 13 bp, Artificial Sequence
  Oligonucleotide for detection of SNP TSC0062054
tatatataaaatg

SEQ ID NO: 254540 - DNA, 13 bp, Artificial Sequence
  Oligonucleotide for detection of SNP TSC0062054
cattttatatata

SEQ ID NO: 254541 - DNA, 13 bp, Artificial Sequence
  Oligonucleotide for detection of SNP TSC0062058
tgtttagttatga

SEQ ID NO: 254542 - DNA, 13 bp, Artificial Sequence
  Oligonucleotide for detection of SNP TSC0062058
tcataactaaaca

SEQ ID NO: 254543 - DNA, 13 bp, Artificial Sequence
  Oligonucleotide for detection of SNP TSC0062058
tgtttaattatga

SEQ ID NO: 254544 - DNA, 13 bp, Artificial Sequence
  Oligonucleotide for detection of SNP TSC0062058
tcataattaaaca

SEQ ID NO: 254545 - DNA, 13 bp, Artificial Sequence
  Oligonucleotide for detection of SNP TSC0062059
ttttataagattt

SEQ ID NO: 254546 - DNA, 13 bp, Artificial Sequence
  Oligonucleotide for detection of SNP TSC0062059
aaatcttataaaa

SEQ ID NO: 254547 - DNA, 13 bp, Artificial Sequence
  Oligonucleotide for detection of SNP TSC0062059
ttttatgagattt

SEQ ID NO: 254548 - DNA, 13 bp, Artificial Sequence
  Oligonucleotide for detection of SNP TSC0062059
aaatctcataaaa

SEQ ID NO: 254549 - DNA, 13 bp, Artificial Sequence
  Oligonucleotide for detection of SNP TSC0062059
ttttacgagattt

SEQ ID NO: 254550 - DNA, 13 bp, Artificial Sequence
  Oligonucleotide for detection of SNP TSC0062059
aaatctcgtaaaa

SEQ ID NO: 254551 - DNA, 13 bp, Artificial Sequence
  Oligonucleotide for detection of SNP TSC0062059
aggttttgtaaag

SEQ ID NO: 254552 - DNA, 13 bp, Artificial Sequence
  Oligonucleotide for detection of SNP TSC0062059
ctttacaaaacct

SEQ ID NO: 254553 - DNA, 13 bp, Artificial Sequence
  Oligonucleotide for detection of SNP TSC0062059
aggtttcgtaaag

SEQ ID NO: 254554 - DNA, 13 bp, Artificial Sequence
  Oligonucleotide for detection of SNP TSC0062059
ctttacgaaacct

SEQ ID NO: 254555 - DNA, 13 bp, Artificial Sequence
  Oligonucleotide for detection of SNP TSC0062060
ataggtaattttt

SEQ ID NO: 254556 - DNA, 13 bp, Artificial Sequence
  Oligonucleotide for detection of SNP TSC0062060
aaaaattacctat

SEQ ID NO: 254557 - DNA, 13 bp, Artificial Sequence
  Oligonucleotide for detection of SNP TSC0062060
ataggttattttt

SEQ ID NO: 254558 - DNA, 13 bp, Artificial Sequence
  Oligonucleotide for detection of SNP TSC0062060
aaaaataacctat

SEQ ID NO: 254559 - DNA, 13 bp, Artificial Sequence
  Oligonucleotide for detection of SNP TSC0062060
agaaattgtttat

SEQ ID NO: 254560 - DNA, 13 bp, Artificial Sequence
  Oligonucleotide for detection of SNP TSC0062060
ataaacaatttct

SEQ ID NO: 254561 - DNA, 13 bp, Artificial Sequence
  Oligonucleotide for detection of SNP TSC0062060
agaaatagtttat

SEQ ID NO: 254562 - DNA, 13 bp, Artificial Sequence
  Oligonucleotide for detection of SNP TSC0062060
ataaactatttct

SEQ ID NO: 254563 - DNA, 13 bp, Artificial Sequence
  Oligonucleotide for detection of SNP TSC0007530
gatgagggtaaag

SEQ ID NO: 254564 - DNA, 13 bp, Artificial Sequence
  Oligonucleotide for detection of SNP TSC0007530
ctttaccctcatc

SEQ ID NO: 254565 - DNA, 13 bp, Artificial Sequence
  Oligonucleotide for detection of SNP TSC0007530
gatgagagtaaag

SEQ ID NO: 254566 - DNA, 13 bp, Artificial Sequence
  Oligonucleotide for detection of SNP TSC0007530
ctttactctcatc

SEQ ID NO: 254567 - DNA, 13 bp, Artificial Sequence
  Oligonucleotide for detection of SNP TSC0062063
ttgtagggggaay

SEQ ID NO: 254568 - DNA, 13 bp, Artificial Sequence
  Oligonucleotide for detection of SNP TSC0062063
rttccccctacaa

SEQ ID NO: 254569 - DNA, 13 bp, Artificial Sequence
  Oligonucleotide for detection of SNP TSC0062063
ttgtagagggaay

SEQ ID NO: 254570 - DNA, 13 bp, Artificial Sequence
  Oligonucleotide for detection of SNP TSC0062063
rttccctctacaa

SEQ ID NO: 254571 - DNA, 13 bp, Artificial Sequence
  Oligonucleotide for detection of SNP TSC0062064
tatataataaagg

SEQ ID NO: 254572 - DNA, 13 bp, Artificial Sequence
  Oligonucleotide for detection of SNP TSC0062064
cctttattatata

SEQ ID NO: 254573 - DNA, 13 bp, Artificial Sequence
  Oligonucleotide for detection of SNP TSC0062064
tatatagtaaagg

SEQ ID NO: 254574 - DNA, 13 bp, Artificial Sequence
  Oligonucleotide for detection of SNP TSC0062064
cctttactatata

SEQ ID NO: 254575 - DNA, 13 bp, Artificial Sequence
  Oligonucleotide for detection of SNP TSC0062065
agttaatgatttt

SEQ ID NO: 254576 - DNA, 13 bp, Artificial Sequence
  Oligonucleotide for detection of SNP TSC0062065
aaaatcattaact

SEQ ID NO: 254577 - DNA, 13 bp, Artificial Sequence
  Oligonucleotide for detection of SNP TSC0062065
agttaacgatttt

SEQ ID NO: 254578 - DNA, 13 bp, Artificial Sequence
  Oligonucleotide for detection of SNP TSC0062065
aaaatcgttaact

SEQ ID NO: 254579 - DNA, 13 bp, Artificial Sequence
  Oligonucleotide for detection of SNP TSC0062065
aggattgttaatt

SEQ ID NO: 254580 - DNA, 13 bp, Artificial Sequence
  Oligonucleotide for detection of SNP TSC0062065
aattaacaatcct

SEQ ID NO: 254581 - DNA, 13 bp, Artificial Sequence
  Oligonucleotide for detection of SNP TSC0062065
aggattattaatt

SEQ ID NO: 254582 - DNA, 13 bp, Artificial Sequence
  Oligonucleotide for detection of SNP TSC0062065
aattaataatcct

SEQ ID NO: 254583 - DNA, 13 bp, Artificial Sequence
  Oligonucleotide for detection of SNP TSC0062065
aggatcgttaatt

SEQ ID NO: 254584 - DNA, 13 bp, Artificial Sequence
  Oligonucleotide for detection of SNP TSC0062065
aattaacgatcct

SEQ ID NO: 254585 - DNA, 13 bp, Artificial Sequence
  Oligonucleotide for detection of SNP TSC0062066
tgattttgagatg

SEQ ID NO: 254586 - DNA, 13 bp, Artificial Sequence
  Oligonucleotide for detection of SNP TSC0062066
catctcaaaatca

SEQ ID NO: 254587 - DNA, 13 bp, Artificial Sequence
  Oligonucleotide for detection of SNP TSC0062066
cgattttgagatg

SEQ ID NO: 254588 - DNA, 13 bp, Artificial Sequence
  Oligonucleotide for detection of SNP TSC0062066
catctcaaaatcg

SEQ ID NO: 254589 - DNA, 13 bp, Artificial Sequence
  Oligonucleotide for detection of SNP TSC0062066
tgatttcgagatg

SEQ ID NO: 254590 - DNA, 13 bp, Artificial Sequence
  Oligonucleotide for detection of SNP TSC0062066
catctcgaaatca

SEQ ID NO: 254591 - DNA, 13 bp, Artificial Sequence
  Oligonucleotide for detection of SNP TSC0062066
cgatttcgagatg

SEQ ID NO: 254592 - DNA, 13 bp, Artificial Sequence
  Oligonucleotide for detection of SNP TSC0062066
catctcgaaatcg

SEQ ID NO: 254593 - DNA, 13 bp, Artificial Sequence
  Oligonucleotide for detection of SNP TSC0062066
tattttgggattg

SEQ ID NO: 254594 - DNA, 13 bp, Artificial Sequence
  Oligonucleotide for detection of SNP TSC0062066
caatcccaaaata

SEQ ID NO: 254595 - DNA, 13 bp, Artificial Sequence
  Oligonucleotide for detection of SNP TSC0062066
tattttaggattg

SEQ ID NO: 254596 - DNA, 13 bp, Artificial Sequence
  Oligonucleotide for detection of SNP TSC0062066
caatcctaaaata

SEQ ID NO: 254597 - DNA, 13 bp, Artificial Sequence
  Oligonucleotide for detection of SNP TSC0062066
tatttcgggattg

SEQ ID NO: 254598 - DNA, 13 bp, Artificial Sequence
  Oligonucleotide for detection of SNP TSC0062066
caatcccgaaata

SEQ ID NO: 254599 - DNA, 13 bp, Artificial Sequence
  Oligonucleotide for detection of SNP TSC0062066
tattttaggatcg

SEQ ID NO: 254600 - DNA, 13 bp, Artificial Sequence
  Oligonucleotide for detection of SNP TSC0062066
cgatcctaaaata

SEQ ID NO: 254601 - DNA, 13 bp, Artificial Sequence
  Oligonucleotide for detection of SNP TSC0062066
tattttgggatcg

SEQ ID NO: 254602 - DNA, 13 bp, Artificial Sequence
  Oligonucleotide for detection of SNP TSC0062066
cgatcccaaaata

SEQ ID NO: 254603 - DNA, 13 bp, Artificial Sequence
  Oligonucleotide for detection of SNP TSC0062066
tatttcgggatcg

SEQ ID NO: 254604 - DNA, 13 bp, Artificial Sequence
  Oligonucleotide for detection of SNP TSC0062066
cgatcccgaaata

SEQ ID NO: 254605 - DNA, 13 bp, Artificial Sequence
  Oligonucleotide for detection of SNP TSC0062067
gtaattattgttg

SEQ ID NO: 254606 - DNA, 13 bp, Artificial Sequence
  Oligonucleotide for detection of SNP TSC0062067
caacaataattac

SEQ ID NO: 254607 - DNA, 13 bp, Artificial Sequence
  Oligonucleotide for detection of SNP TSC0062067
gtaattgttgttg

SEQ ID NO: 254608 - DNA, 13 bp, Artificial Sequence
  Oligonucleotide for detection of SNP TSC0062067
caacaacaattac

SEQ ID NO: 254609 - DNA, 13 bp, Artificial Sequence
  Oligonucleotide for detection of SNP TSC0062067
gtaatcgttgttg

SEQ ID NO: 254610 - DNA, 13 bp, Artificial Sequence
  Oligonucleotide for detection of SNP TSC0062067
caacaacgattac

SEQ ID NO: 254611 - DNA, 13 bp, Artificial Sequence
  Oligonucleotide for detection of SNP TSC0062067
taataatgattay

SEQ ID NO: 254612 - DNA, 13 bp, Artificial Sequence
  Oligonucleotide for detection of SNP TSC0062067
rtaatcattatta

SEQ ID NO: 254613 - DNA, 13 bp, Artificial Sequence
  Oligonucleotide for detection of SNP TSC0062067
taataacgattay

SEQ ID NO: 254614 - DNA, 13 bp, Artificial Sequence
  Oligonucleotide for detection of SNP TSC0062067
rtaatcgttatta

SEQ ID NO: 254615 - DNA, 13 bp, Artificial Sequence
  Oligonucleotide for detection of SNP TSC0062070
tgtttggtaattt

SEQ ID NO: 254616 - DNA, 13 bp, Artificial Sequence
  Oligonucleotide for detection of SNP TSC0062070
aaattaccaaaca

SEQ ID NO: 254617 - DNA, 13 bp, Artificial Sequence
  Oligonucleotide for detection of SNP TSC0062070
tgtttgataattt

SEQ ID NO: 254618 - DNA, 13 bp, Artificial Sequence
  Oligonucleotide for detection of SNP TSC0062070
aaattatcaaaca

SEQ ID NO: 254619 - DNA, 13 bp, Artificial Sequence
  Oligonucleotide for detection of SNP TSC0062071
agatatattataa

SEQ ID NO: 254620 - DNA, 13 bp, Artificial Sequence
  Oligonucleotide for detection of SNP TSC0062071
ttataatatatct

SEQ ID NO: 254621 - DNA, 13 bp, Artificial Sequence
  Oligonucleotide for detection of SNP TSC0062071
agatattttataa

SEQ ID NO: 254622 - DNA, 13 bp, Artificial Sequence
  Oligonucleotide for detection of SNP TSC0062071
ttataaaatatct

SEQ ID NO: 254623 - DNA, 13 bp, Artificial Sequence
  Oligonucleotide for detection of SNP TSC0062071
agatatgttataa

SEQ ID NO: 254624 - DNA, 13 bp, Artificial Sequence
  Oligonucleotide for detection of SNP TSC0062071
ttataacatatct

SEQ ID NO: 254625 - DNA, 13 bp, Artificial Sequence
  Oligonucleotide for detection of SNP TSC0062071
agatacgttataa

SEQ ID NO: 254626 - DNA, 13 bp, Artificial Sequence
  Oligonucleotide for detection of SNP TSC0062071
ttataacgtatct

SEQ ID NO: 254627 - DNA, 13 bp, Artificial Sequence
  Oligonucleotide for detection of SNP TSC0062071
ttataatgtattt

SEQ ID NO: 254628 - DNA, 13 bp, Artificial Sequence
  Oligonucleotide for detection of SNP TSC0062071
aaatacattataa

SEQ ID NO: 254629 - DNA, 13 bp, Artificial Sequence
  Oligonucleotide for detection of SNP TSC0062071
ttataaagtattt

SEQ ID NO: 254630 - DNA, 13 bp, Artificial Sequence
  Oligonucleotide for detection of SNP TSC0062071
aaatactttataa

SEQ ID NO: 254631 - DNA, 13 bp, Artificial Sequence
  Oligonucleotide for detection of SNP TSC0062071
ttataacgtattt

SEQ ID NO: 254632 - DNA, 13 bp, Artificial Sequence
  Oligonucleotide for detection of SNP TSC0062071
aaatacgttataa

SEQ ID NO: 254633 - DNA, 13 bp, Artificial Sequence
  Oligonucleotide for detection of SNP TSC0062072
attttaaattgta

SEQ ID NO: 254634 - DNA, 13 bp, Artificial Sequence
  Oligonucleotide for detection of SNP TSC0062072
tacaatttaaaat

SEQ ID NO: 254635 - DNA, 13 bp, Artificial Sequence
  Oligonucleotide for detection of SNP TSC0062072
attttagattgta

SEQ ID NO: 254636 - DNA, 13 bp, Artificial Sequence
  Oligonucleotide for detection of SNP TSC0062072
tacaatctaaaat

SEQ ID NO: 254637 - DNA, 13 bp, Artificial Sequence
  Oligonucleotide for detection of SNP TSC0008822
gtgtgaatattta

SEQ ID NO: 254638 - DNA, 13 bp, Artificial Sequence
  Oligonucleotide for detection of SNP TSC0008822
taaatattcacac

SEQ ID NO: 254639 - DNA, 13 bp, Artificial Sequence
  Oligonucleotide for detection of SNP TSC0008822
gtgtgagtattta

SEQ ID NO: 254640 - DNA, 13 bp, Artificial Sequence
  Oligonucleotide for detection of SNP TSC0008822
taaatactcacac

SEQ ID NO: 254641 - DNA, 13 bp, Artificial Sequence
  Oligonucleotide for detection of SNP TSC0008823
tgtattattatay

SEQ ID NO: 254642 - DNA, 13 bp, Artificial Sequence
  Oligonucleotide for detection of SNP TSC0008823
rtataataataca

SEQ ID NO: 254643 - DNA, 13 bp, Artificial Sequence
  Oligonucleotide for detection of SNP TSC0008823
tgtattgttatay

SEQ ID NO: 254644 - DNA, 13 bp, Artificial Sequence
  Oligonucleotide for detection of SNP TSC0008823
rtataacaataca

SEQ ID NO: 254645 - DNA, 13 bp, Artificial Sequence
  Oligonucleotide for detection of SNP TSC0008823
cgtattattatay

SEQ ID NO: 254646 - DNA, 13 bp, Artificial Sequence
  Oligonucleotide for detection of SNP TSC0008823
rtataataatacg

SEQ ID NO: 254647 - DNA, 13 bp, Artificial Sequence
  Oligonucleotide for detection of SNP TSC0008823
cgtattgttatay

SEQ ID NO: 254648 - DNA, 13 bp, Artificial Sequence
  Oligonucleotide for detection of SNP TSC0008823
rtataacaatacg

SEQ ID NO: 254649 - DNA, 13 bp, Artificial Sequence
  Oligonucleotide for detection of SNP TSC0008823
tgtatcgttatay

SEQ ID NO: 254650 - DNA, 13 bp, Artificial Sequence
  Oligonucleotide for detection of SNP TSC0008823
rtataacgataca

SEQ ID NO: 254651 - DNA, 13 bp, Artificial Sequence
  Oligonucleotide for detection of SNP TSC0008823
cgtatcgttatay

SEQ ID NO: 254652 - DNA, 13 bp, Artificial Sequence
  Oligonucleotide for detection of SNP TSC0008823
rtataacgatacg

SEQ ID NO: 254653 - DNA, 13 bp, Artificial Sequence
  Oligonucleotide for detection of SNP TSC0008823
gtgtggcggtgtg

SEQ ID NO: 254654 - DNA, 13 bp, Artificial Sequence
  Oligonucleotide for detection of SNP TSC0008823
cacaccgccacac

SEQ ID NO: 254655 - DNA, 13 bp, Artificial Sequence
  Oligonucleotide for detection of SNP TSC0008823
gtgtggcggtgcg

SEQ ID NO: 254656 - DNA, 13 bp, Artificial Sequence
  Oligonucleotide for detection of SNP TSC0008823
cgcaccgccacac

SEQ ID NO: 254657 - DNA, 13 bp, Artificial Sequence
  Oligonucleotide for detection of SNP TSC0062073
aagttttgtttay

SEQ ID NO: 254658 - DNA, 13 bp, Artificial Sequence
  Oligonucleotide for detection of SNP TSC0062073
rtaaacaaaactt

SEQ ID NO: 254659 - DNA, 13 bp, Artificial Sequence
  Oligonucleotide for detection of SNP TSC0062073
aagtttcgtttay

SEQ ID NO: 254660 - DNA, 13 bp, Artificial Sequence
  Oligonucleotide for detection of SNP TSC0062073
rtaaacgaaactt

SEQ ID NO: 254661 - DNA, 13 bp, Artificial Sequence
  Oligonucleotide for detection of SNP TSC0062073
gtgggtgggattt

SEQ ID NO: 254662 - DNA, 13 bp, Artificial Sequence
  Oligonucleotide for detection of SNP TSC0062073
aaatcccacccac

SEQ ID NO: 254663 - DNA, 13 bp, Artificial Sequence
  Oligonucleotide for detection of SNP TSC0062073
gtgggtaggattt

SEQ ID NO: 254664 - DNA, 13 bp, Artificial Sequence
  Oligonucleotide for detection of SNP TSC0062073
aaatcctacccac

SEQ ID NO: 254665 - DNA, 13 bp, Artificial Sequence
  Oligonucleotide for detection of SNP TSC0062073
gtgggcgggattt

SEQ ID NO: 254666 - DNA, 13 bp, Artificial Sequence
  Oligonucleotide for detection of SNP TSC0062073
aaatcccgcccac

SEQ ID NO: 254667 - DNA, 13 bp, Artificial Sequence
  Oligonucleotide for detection of SNP TSC0062076
tttaatgtataty

SEQ ID NO: 254668 - DNA, 13 bp, Artificial Sequence
  Oligonucleotide for detection of SNP TSC0062076
ratatacattaaa

SEQ ID NO: 254669 - DNA, 13 bp, Artificial Sequence
  Oligonucleotide for detection of SNP TSC0062076
tttaatatataty

SEQ ID NO: 254670 - DNA, 13 bp, Artificial Sequence
  Oligonucleotide for detection of SNP TSC0062076
ratatatattaaa

SEQ ID NO: 254671 - DNA, 13 bp, Artificial Sequence
  Oligonucleotide for detection of SNP TSC0062079
agaggtatttaay

SEQ ID NO: 254672 - DNA, 13 bp, Artificial Sequence
  Oligonucleotide for detection of SNP TSC0062079
rttaaatacctct

SEQ ID NO: 254673 - DNA, 13 bp, Artificial Sequence
  Oligonucleotide for detection of SNP TSC0062079
agaggtttttaay

SEQ ID NO: 254674 - DNA, 13 bp, Artificial Sequence
  Oligonucleotide for detection of SNP TSC0062079
rttaaaaacctct

SEQ ID NO: 254675 - DNA, 13 bp, Artificial Sequence
  Oligonucleotide for detection of SNP TSC0062079
gttaagtgttttt

SEQ ID NO: 254676 - DNA, 13 bp, Artificial Sequence
  Oligonucleotide for detection of SNP TSC0062079
aaaaacacttaac

SEQ ID NO: 254677 - DNA, 13 bp, Artificial Sequence
  Oligonucleotide for detection of SNP TSC0062079
gttaagggttttt

SEQ ID NO: 254678 - DNA, 13 bp, Artificial Sequence
  Oligonucleotide for detection of SNP TSC0062079
aaaaacccttaac

SEQ ID NO: 254679 - DNA, 13 bp, Artificial Sequence
  Oligonucleotide for detection of SNP TSC0062080
ttttaagaataat

SEQ ID NO: 254680 - DNA, 13 bp, Artificial Sequence
  Oligonucleotide for detection of SNP TSC0062080
attattcttaaaa

SEQ ID NO: 254681 - DNA, 13 bp, Artificial Sequence
  Oligonucleotide for detection of SNP TSC0062081
tttggatgtagta

SEQ ID NO: 254682 - DNA, 13 bp, Artificial Sequence
  Oligonucleotide for detection of SNP TSC0062081
tactacatccaaa

SEQ ID NO: 254683 - DNA, 13 bp, Artificial Sequence
  Oligonucleotide for detection of SNP TSC0062081
tttggacgtagta

SEQ ID NO: 254684 - DNA, 13 bp, Artificial Sequence
  Oligonucleotide for detection of SNP TSC0062081
tactacgtccaaa

SEQ ID NO: 254685 - DNA, 13 bp, Artificial Sequence
  Oligonucleotide for detection of SNP TSC0062081
tgttatgtttaga

SEQ ID NO: 254686 - DNA, 13 bp, Artificial Sequence
  Oligonucleotide for detection of SNP TSC0062081
tctaaacataaca

SEQ ID NO: 254687 - DNA, 13 bp, Artificial Sequence
  Oligonucleotide for detection of SNP TSC0062081
tgttatatttaga

SEQ ID NO: 254688 - DNA, 13 bp, Artificial Sequence
  Oligonucleotide for detection of SNP TSC0062081
tctaaatataaca

SEQ ID NO: 254689 - DNA, 13 bp, Artificial Sequence
  Oligonucleotide for detection of SNP TSC0062081
tgttacgtttaga

SEQ ID NO: 254690 - DNA, 13 bp, Artificial Sequence
  Oligonucleotide for detection of SNP TSC0062081
tctaaacgtaaca

SEQ ID NO: 254691 - DNA, 13 bp, Artificial Sequence
  Oligonucleotide for detection of SNP TSC0009574
gttttatgggtag

SEQ ID NO: 254692 - DNA, 13 bp, Artificial Sequence
  Oligonucleotide for detection of SNP TSC0009574
ctacccataaaac

SEQ ID NO: 254693 - DNA, 13 bp, Artificial Sequence
  Oligonucleotide for detection of SNP TSC0009574
gttttacgggtag

SEQ ID NO: 254694 - DNA, 13 bp, Artificial Sequence
  Oligonucleotide for detection of SNP TSC0009574
ctacccgtaaaac

SEQ ID NO: 254695 - DNA, 13 bp, Artificial Sequence
  Oligonucleotide for detection of SNP TSC0009574
ttatttgtgaagy

SEQ ID NO: 254696 - DNA, 13 bp, Artificial Sequence
  Oligonucleotide for detection of SNP TSC0009574
rcttcacaaataa

SEQ ID NO: 254697 - DNA, 13 bp, Artificial Sequence
  Oligonucleotide for detection of SNP TSC0009574
ttatttatgaagy

SEQ ID NO: 254698 - DNA, 13 bp, Artificial Sequence
  Oligonucleotide for detection of SNP TSC0009574
rcttcataaataa

SEQ ID NO: 254699 - DNA, 13 bp, Artificial Sequence
  Oligonucleotide for detection of SNP TSC0009574
ttattcgtgaagy

SEQ ID NO: 254700 - DNA, 13 bp, Artificial Sequence
  Oligonucleotide for detection of SNP TSC0009574
rcttcacgaataa

SEQ ID NO: 254701 - DNA, 13 bp, Artificial Sequence
  Oligonucleotide for detection of SNP TSC0062083
attagataagggy

SEQ ID NO: 254702 - DNA, 13 bp, Artificial Sequence
  Oligonucleotide for detection of SNP TSC0062083
rcccttatctaat

SEQ ID NO: 254703 - DNA, 13 bp, Artificial Sequence
  Oligonucleotide for detection of SNP TSC0062083
attagagaagggy

SEQ ID NO: 254704 - DNA, 13 bp, Artificial Sequence
  Oligonucleotide for detection of SNP TSC0062083
rcccttctctaat

SEQ ID NO: 254705 - DNA, 13 bp, Artificial Sequence
  Oligonucleotide for detection of SNP TSC0062083
gtttttgtttgat

SEQ ID NO: 254706 - DNA, 13 bp, Artificial Sequence
  Oligonucleotide for detection of SNP TSC0062083
atcaaacaaaaac

SEQ ID NO: 254707 - DNA, 13 bp, Artificial Sequence
  Oligonucleotide for detection of SNP TSC0062083
gtttttttttgat

SEQ ID NO: 254708 - DNA, 13 bp, Artificial Sequence
  Oligonucleotide for detection of SNP TSC0062083
atcaaaaaaaaac

SEQ ID NO: 254709 - DNA, 13 bp, Artificial Sequence
  Oligonucleotide for detection of SNP TSC0062084
gtagggatggtta

SEQ ID NO: 254710 - DNA, 13 bp, Artificial Sequence
  Oligonucleotide for detection of SNP TSC0062084
taaccatccctac

SEQ ID NO: 254711 - DNA, 13 bp, Artificial Sequence
  Oligonucleotide for detection of SNP TSC0062086
atgaagagataga

SEQ ID NO: 254712 - DNA, 13 bp, Artificial Sequence
  Oligonucleotide for detection of SNP TSC0062086
tctatctcttcat

SEQ ID NO: 254713 - DNA, 13 bp, Artificial Sequence
  Oligonucleotide for detection of SNP TSC0062086
atgaagtgataga

SEQ ID NO: 254714 - DNA, 13 bp, Artificial Sequence
  Oligonucleotide for detection of SNP TSC0062086
tctatcacttcat

SEQ ID NO: 254715 - DNA, 13 bp, Artificial Sequence
  Oligonucleotide for detection of SNP TSC0062086
atgaagcgataga

SEQ ID NO: 254716 - DNA, 13 bp, Artificial Sequence
  Oligonucleotide for detection of SNP TSC0062086
tctatcgcttcat

SEQ ID NO: 254717 - DNA, 13 bp, Artificial Sequence
  Oligonucleotide for detection of SNP TSC0062087
attattgggtaag

SEQ ID NO: 254718 - DNA, 13 bp, Artificial Sequence
  Oligonucleotide for detection of SNP TSC0062087
cttacccaataat

SEQ ID NO: 254719 - DNA, 13 bp, Artificial Sequence
  Oligonucleotide for detection of SNP TSC0062087
attattaggtaag

SEQ ID NO: 254720 - DNA, 13 bp, Artificial Sequence
  Oligonucleotide for detection of SNP TSC0062087
cttacctaataat

SEQ ID NO: 254721 - DNA, 13 bp, Artificial Sequence
  Oligonucleotide for detection of SNP TSC0062087
attatcgggtaag

SEQ ID NO: 254722 - DNA, 13 bp, Artificial Sequence
  Oligonucleotide for detection of SNP TSC0062087
cttacccgataat

SEQ ID NO: 254723 - DNA, 13 bp, Artificial Sequence
  Oligonucleotide for detection of SNP TSC0062088
tttagtatttgta

SEQ ID NO: 254724 - DNA, 13 bp, Artificial Sequence
  Oligonucleotide for detection of SNP TSC0062088
tacaaatactaaa

SEQ ID NO: 254725 - DNA, 13 bp, Artificial Sequence
  Oligonucleotide for detection of SNP TSC0062088
tttagtttttgta

SEQ ID NO: 254726 - DNA, 13 bp, Artificial Sequence
  Oligonucleotide for detection of SNP TSC0062088
tacaaaaactaaa

SEQ ID NO: 254727 - DNA, 13 bp, Artificial Sequence
  Oligonucleotide for detection of SNP TSC0062088
tgtagatgttagg

SEQ ID NO: 254728 - DNA, 13 bp, Artificial Sequence
  Oligonucleotide for detection of SNP TSC0062088
cctaacatctaca

SEQ ID NO: 254729 - DNA, 13 bp, Artificial Sequence
  Oligonucleotide for detection of SNP TSC0062088
tgtagaggttagg

SEQ ID NO: 254730 - DNA, 13 bp, Artificial Sequence
  Oligonucleotide for detection of SNP TSC0062088
cctaacctctaca

SEQ ID NO: 254731 - DNA, 13 bp, Artificial Sequence
  Oligonucleotide for detection of SNP TSC0062089
atagagagtatty

SEQ ID NO: 254732 - DNA, 13 bp, Artificial Sequence
  Oligonucleotide for detection of SNP TSC0062089
raatactctctat

SEQ ID NO: 254733 - DNA, 13 bp, Artificial Sequence
  Oligonucleotide for detection of SNP TSC0062089
atagagtgtatty

SEQ ID NO: 254734 - DNA, 13 bp, Artificial Sequence
  Oligonucleotide for detection of SNP TSC0062089
raatacactctat

SEQ ID NO: 254735 - DNA, 13 bp, Artificial Sequence
  Oligonucleotide for detection of SNP TSC0062089
gagtattttttgt

SEQ ID NO: 254736 - DNA, 13 bp, Artificial Sequence
  Oligonucleotide for detection of SNP TSC0062089
acaaaaaatactc

SEQ ID NO: 254737 - DNA, 13 bp, Artificial Sequence
  Oligonucleotide for detection of SNP TSC0062089
gagtatattttgt

SEQ ID NO: 254738 - DNA, 13 bp, Artificial Sequence
  Oligonucleotide for detection of SNP TSC0062089
acaaaatatactc

SEQ ID NO: 254739 - DNA, 13 bp, Artificial Sequence
  Oligonucleotide for detection of SNP TSC0062095
gtattcgtttata

SEQ ID NO: 254740 - DNA, 13 bp, Artificial Sequence
  Oligonucleotide for detection of SNP TSC0062095
tataaacgaatac

SEQ ID NO: 254741 - DNA, 13 bp, Artificial Sequence
  Oligonucleotide for detection of SNP TSC0062095
tataggagaatay

SEQ ID NO: 254742 - DNA, 13 bp, Artificial Sequence
  Oligonucleotide for detection of SNP TSC0062095
rtattctcctata

SEQ ID NO: 254743 - DNA, 13 bp, Artificial Sequence
  Oligonucleotide for detection of SNP TSC0062095
tataggtgaatay

SEQ ID NO: 254744 - DNA, 13 bp, Artificial Sequence
  Oligonucleotide for detection of SNP TSC0062095
rtattcacctata

SEQ ID NO: 254745 - DNA, 13 bp, Artificial Sequence
  Oligonucleotide for detection of SNP TSC0062095
tataggcgaatay

SEQ ID NO: 254746 - DNA, 13 bp, Artificial Sequence
  Oligonucleotide for detection of SNP TSC0062095
rtattcgcctata

SEQ ID NO: 254747 - DNA, 13 bp, Artificial Sequence
  Oligonucleotide for detection of SNP TSC0062096
aatttaagtagaa

SEQ ID NO: 254748 - DNA, 13 bp, Artificial Sequence
  Oligonucleotide for detection of SNP TSC0062096
ttctacttaaatt

SEQ ID NO: 254749 - DNA, 13 bp, Artificial Sequence
  Oligonucleotide for detection of SNP TSC0062097
agggtgaaatggt

SEQ ID NO: 254750 - DNA, 13 bp, Artificial Sequence
  Oligonucleotide for detection of SNP TSC0062097
accatttcaccct

SEQ ID NO: 254751 - DNA, 13 bp, Artificial Sequence
  Oligonucleotide for detection of SNP TSC0062097
agggtggaatggt

SEQ ID NO: 254752 - DNA, 13 bp, Artificial Sequence
  Oligonucleotide for detection of SNP TSC0062097
accattccaccct

SEQ ID NO: 254753 - DNA, 13 bp, Artificial Sequence
  Oligonucleotide for detection of SNP TSC0062097
agggtgaaacggt

SEQ ID NO: 254754 - DNA, 13 bp, Artificial Sequence
  Oligonucleotide for detection of SNP TSC0062097
accgtttcaccct

SEQ ID NO: 254755 - DNA, 13 bp, Artificial Sequence
  Oligonucleotide for detection of SNP TSC0062097
agggtggaacggt

SEQ ID NO: 254756 - DNA, 13 bp, Artificial Sequence
  Oligonucleotide for detection of SNP TSC0062097
accgttccaccct

SEQ ID NO: 254757 - DNA, 13 bp, Artificial Sequence
  Oligonucleotide for detection of SNP TSC0062098
tttatattattaa

SEQ ID NO: 254758 - DNA, 13 bp, Artificial Sequence
  Oligonucleotide for detection of SNP TSC0062098
ttaataatataaa

SEQ ID NO: 254759 - DNA, 13 bp, Artificial Sequence
  Oligonucleotide for detection of SNP TSC0062098
tttatagtattaa

SEQ ID NO: 254760 - DNA, 13 bp, Artificial Sequence
  Oligonucleotide for detection of SNP TSC0062098
ttaatactataaa

SEQ ID NO: 254761 - DNA, 13 bp, Artificial Sequence
  Oligonucleotide for detection of SNP TSC0062098
ttgatagtataaa

SEQ ID NO: 254762 - DNA, 13 bp, Artificial Sequence
  Oligonucleotide for detection of SNP TSC0062098
tttatactatcaa

SEQ ID NO: 254763 - DNA, 13 bp, Artificial Sequence
  Oligonucleotide for detection of SNP TSC0062098
ttgatattataaa

SEQ ID NO: 254764 - DNA, 13 bp, Artificial Sequence
  Oligonucleotide for detection of SNP TSC0062098
tttataatatcaa

SEQ ID NO: 254765 - DNA, 13 bp, Artificial Sequence
  Oligonucleotide for detection of SNP TSC0062101
attttagatgtat

SEQ ID NO: 254766 - DNA, 13 bp, Artificial Sequence
  Oligonucleotide for detection of SNP TSC0062101
atacatctaaaat

SEQ ID NO: 254767 - DNA, 13 bp, Artificial Sequence
  Oligonucleotide for detection of SNP TSC0062101
atgtatataaaat

SEQ ID NO: 254768 - DNA, 13 bp, Artificial Sequence
  Oligonucleotide for detection of SNP TSC0062101
attttatatacat

SEQ ID NO: 254769 - DNA, 13 bp, Artificial Sequence
  Oligonucleotide for detection of SNP TSC0062101
atgtatttaaaat

SEQ ID NO: 254770 - DNA, 13 bp, Artificial Sequence
  Oligonucleotide for detection of SNP TSC0062101
attttaaatacat

SEQ ID NO: 254771 - DNA, 13 bp, Artificial Sequence
  Oligonucleotide for detection of SNP TSC0062103
ttttaaggtttta

SEQ ID NO: 254772 - DNA, 13 bp, Artificial Sequence
  Oligonucleotide for detection of SNP TSC0062103
taaaaccttaaaa

SEQ ID NO: 254773 - DNA, 13 bp, Artificial Sequence
  Oligonucleotide for detection of SNP TSC0062104
taaatagttgata

SEQ ID NO: 254774 - DNA, 13 bp, Artificial Sequence
  Oligonucleotide for detection of SNP TSC0062104
tatcaactattta

SEQ ID NO: 254775 - DNA, 13 bp, Artificial Sequence
  Oligonucleotide for detection of SNP TSC0062104
taaataattgata

SEQ ID NO: 254776 - DNA, 13 bp, Artificial Sequence
  Oligonucleotide for detection of SNP TSC0062104
tatcaattattta

SEQ ID NO: 254777 - DNA, 13 bp, Artificial Sequence
  Oligonucleotide for detection of SNP TSC0062105
aaataagtaagaa

SEQ ID NO: 254778 - DNA, 13 bp, Artificial Sequence
  Oligonucleotide for detection of SNP TSC0062105
ttcttacttattt

SEQ ID NO: 254779 - DNA, 13 bp, Artificial Sequence
  Oligonucleotide for detection of SNP TSC0062105
aaataaataagaa

SEQ ID NO: 254780 - DNA, 13 bp, Artificial Sequence
  Oligonucleotide for detection of SNP TSC0062105
ttcttatttattt

SEQ ID NO: 254781 - DNA, 13 bp, Artificial Sequence
  Oligonucleotide for detection of SNP TSC0062106
ttatattgggatt

SEQ ID NO: 254782 - DNA, 13 bp, Artificial Sequence
  Oligonucleotide for detection of SNP TSC0062106
aatcccaatataa

SEQ ID NO: 254783 - DNA, 13 bp, Artificial Sequence
  Oligonucleotide for detection of SNP TSC0062106
ttatatcgggatt

SEQ ID NO: 254784 - DNA, 13 bp, Artificial Sequence
  Oligonucleotide for detection of SNP TSC0062106
aatcccgatataa

SEQ ID NO: 254785 - DNA, 13 bp, Artificial Sequence
  Oligonucleotide for detection of SNP TSC0062106
aattttgatgtga

SEQ ID NO: 254786 - DNA, 13 bp, Artificial Sequence
  Oligonucleotide for detection of SNP TSC0062106
tcacatcaaaatt

SEQ ID NO: 254787 - DNA, 13 bp, Artificial Sequence
  Oligonucleotide for detection of SNP TSC0062106
aattttaatgtga

SEQ ID NO: 254788 - DNA, 13 bp, Artificial Sequence
  Oligonucleotide for detection of SNP TSC0062106
tcacattaaaatt

SEQ ID NO: 254789 - DNA, 13 bp, Artificial Sequence
  Oligonucleotide for detection of SNP TSC0062106
aatttcgatgtga

SEQ ID NO: 254790 - DNA, 13 bp, Artificial Sequence
  Oligonucleotide for detection of SNP TSC0062106
tcacatcgaaatt

SEQ ID NO: 254791 - DNA, 13 bp, Artificial Sequence
  Oligonucleotide for detection of SNP TSC0062107
attataaaagtgt

SEQ ID NO: 254792 - DNA, 13 bp, Artificial Sequence
  Oligonucleotide for detection of SNP TSC0062107
acacttttataat

SEQ ID NO: 254793 - DNA, 13 bp, Artificial Sequence
  Oligonucleotide for detection of SNP TSC0062107
attatagaagtgt

SEQ ID NO: 254794 - DNA, 13 bp, Artificial Sequence
  Oligonucleotide for detection of SNP TSC0062107
acacttctataat

SEQ ID NO: 254795 - DNA, 13 bp, Artificial Sequence
  Oligonucleotide for detection of SNP TSC0062109
atatttatttgat

SEQ ID NO: 254796 - DNA, 13 bp, Artificial Sequence
  Oligonucleotide for detection of SNP TSC0062109
atcaaataaatat

SEQ ID NO: 254797 - DNA, 13 bp, Artificial Sequence
  Oligonucleotide for detection of SNP TSC0062109
atatttttttgat

SEQ ID NO: 254798 - DNA, 13 bp, Artificial Sequence
  Oligonucleotide for detection of SNP TSC0062109
atcaaaaaaatat

SEQ ID NO: 254799 - DNA, 13 bp, Artificial Sequence
  Oligonucleotide for detection of SNP TSC0062109
attaggaggatgt

SEQ ID NO: 254800 - DNA, 13 bp, Artificial Sequence
  Oligonucleotide for detection of SNP TSC0062109
acatcctcctaat

SEQ ID NO: 254801 - DNA, 13 bp, Artificial Sequence
  Oligonucleotide for detection of SNP TSC0062110
tttgatatttgaa

SEQ ID NO: 254802 - DNA, 13 bp, Artificial Sequence
  Oligonucleotide for detection of SNP TSC0062110
ttcaaatatcaaa

SEQ ID NO: 254803 - DNA, 13 bp, Artificial Sequence
  Oligonucleotide for detection of SNP TSC0062110
tttgatgtttgaa

SEQ ID NO: 254804 - DNA, 13 bp, Artificial Sequence
  Oligonucleotide for detection of SNP TSC0062110
ttcaaacatcaaa

SEQ ID NO: 254805 - DNA, 13 bp, Artificial Sequence
  Oligonucleotide for detection of SNP TSC0062110
tttgacgtttgaa

SEQ ID NO: 254806 - DNA, 13 bp, Artificial Sequence
  Oligonucleotide for detection of SNP TSC0062110
ttcaaacgtcaaa

SEQ ID NO: 254807 - DNA, 13 bp, Artificial Sequence
  Oligonucleotide for detection of SNP TSC0062110
tttagatgttaaa

SEQ ID NO: 254808 - DNA, 13 bp, Artificial Sequence
  Oligonucleotide for detection of SNP TSC0062110
tttaacatctaaa

SEQ ID NO: 254809 - DNA, 13 bp, Artificial Sequence
  Oligonucleotide for detection of SNP TSC0062110
tttagacgttaaa

SEQ ID NO: 254810 - DNA, 13 bp, Artificial Sequence
  Oligonucleotide for detection of SNP TSC0062110
tttaacgtctaaa

SEQ ID NO: 254811 - DNA, 13 bp, Artificial Sequence
  Oligonucleotide for detection of SNP TSC0062111
gaataggtatttt

SEQ ID NO: 254812 - DNA, 13 bp, Artificial Sequence
  Oligonucleotide for detection of SNP TSC0062111
aaaatacctattc

SEQ ID NO: 254813 - DNA, 13 bp, Artificial Sequence
  Oligonucleotide for detection of SNP TSC0062111
gaatagatatttt

SEQ ID NO: 254814 - DNA, 13 bp, Artificial Sequence
  Oligonucleotide for detection of SNP TSC0062111
aaaatatctattc

SEQ ID NO: 254815 - DNA, 13 bp, Artificial Sequence
  Oligonucleotide for detection of SNP TSC0001258
ttaataggtatta

SEQ ID NO: 254816 - DNA, 13 bp, Artificial Sequence
  Oligonucleotide for detection of SNP TSC0001258
taatacctattaa

SEQ ID NO: 254817 - DNA, 13 bp, Artificial Sequence
  Oligonucleotide for detection of SNP TSC0001258
ttaataagtatta

SEQ ID NO: 254818 - DNA, 13 bp, Artificial Sequence
  Oligonucleotide for detection of SNP TSC0001258
taatacttattaa

SEQ ID NO: 254819 - DNA, 13 bp, Artificial Sequence
  Oligonucleotide for detection of SNP TSC0062113
tatgttgaagggg

SEQ ID NO: 254820 - DNA, 13 bp, Artificial Sequence
  Oligonucleotide for detection of SNP TSC0062113
ccccttcaacata

SEQ ID NO: 254821 - DNA, 13 bp, Artificial Sequence
  Oligonucleotide for detection of SNP TSC0062113
tatgtttaagggg

SEQ ID NO: 254822 - DNA, 13 bp, Artificial Sequence
  Oligonucleotide for detection of SNP TSC0062113
ccccttaaacata

SEQ ID NO: 254823 - DNA, 13 bp, Artificial Sequence
  Oligonucleotide for detection of SNP TSC0062114
agggggattttta

SEQ ID NO: 254824 - DNA, 13 bp, Artificial Sequence
  Oligonucleotide for detection of SNP TSC0062114
taaaaatccccct

SEQ ID NO: 254825 - DNA, 13 bp, Artificial Sequence
  Oligonucleotide for detection of SNP TSC0062114
aggggggttttta

SEQ ID NO: 254826 - DNA, 13 bp, Artificial Sequence
  Oligonucleotide for detection of SNP TSC0062114
taaaaacccccct

SEQ ID NO: 254827 - DNA, 13 bp, Artificial Sequence
  Oligonucleotide for detection of SNP TSC0008338
atattattaagga

SEQ ID NO: 254828 - DNA, 13 bp, Artificial Sequence
  Oligonucleotide for detection of SNP TSC0008338
tccttaataatat

SEQ ID NO: 254829 - DNA, 13 bp, Artificial Sequence
  Oligonucleotide for detection of SNP TSC0008338
atattagtaagga

SEQ ID NO: 254830 - DNA, 13 bp, Artificial Sequence
  Oligonucleotide for detection of SNP TSC0008338
tccttactaatat

SEQ ID NO: 254831 - DNA, 13 bp, Artificial Sequence
  Oligonucleotide for detection of SNP TSC0008338
tttttgatggtat

SEQ ID NO: 254832 - DNA, 13 bp, Artificial Sequence
  Oligonucleotide for detection of SNP TSC0008338
ataccatcaaaaa

SEQ ID NO: 254833 - DNA, 13 bp, Artificial Sequence
  Oligonucleotide for detection of SNP TSC0008338
tttttgttggtat

SEQ ID NO: 254834 - DNA, 13 bp, Artificial Sequence
  Oligonucleotide for detection of SNP TSC0008338
ataccaacaaaaa

SEQ ID NO: 254835 - DNA, 13 bp, Artificial Sequence
  Oligonucleotide for detection of SNP TSC0007313
atgtatgttatay

SEQ ID NO: 254836 - DNA, 13 bp, Artificial Sequence
  Oligonucleotide for detection of SNP TSC0007313
rtataacatacat

SEQ ID NO: 254837 - DNA, 13 bp, Artificial Sequence
  Oligonucleotide for detection of SNP TSC0007313
atgtatattatay

SEQ ID NO: 254838 - DNA, 13 bp, Artificial Sequence
  Oligonucleotide for detection of SNP TSC0007313
rtataatatacat

SEQ ID NO: 254839 - DNA, 13 bp, Artificial Sequence
  Oligonucleotide for detection of SNP TSC0062118
ttttggtttagtt

SEQ ID NO: 254840 - DNA, 13 bp, Artificial Sequence
  Oligonucleotide for detection of SNP TSC0062118
aactaaaccaaaa

SEQ ID NO: 254841 - DNA, 13 bp, Artificial Sequence
  Oligonucleotide for detection of SNP TSC0062118
ttttgggttagtt

SEQ ID NO: 254842 - DNA, 13 bp, Artificial Sequence
  Oligonucleotide for detection of SNP TSC0062118
aactaacccaaaa

SEQ ID NO: 254843 - DNA, 13 bp, Artificial Sequence
  Oligonucleotide for detection of SNP TSC0062118
agttaagttagag

SEQ ID NO: 254844 - DNA, 13 bp, Artificial Sequence
  Oligonucleotide for detection of SNP TSC0062118
ctctaacttaact

SEQ ID NO: 254845 - DNA, 13 bp, Artificial Sequence
  Oligonucleotide for detection of SNP TSC0062118
agttaatttagag

SEQ ID NO: 254846 - DNA, 13 bp, Artificial Sequence
  Oligonucleotide for detection of SNP TSC0062118
ctctaaattaact

SEQ ID NO: 254847 - DNA, 13 bp, Artificial Sequence
  Oligonucleotide for detection of SNP TSC0062119
tgattgattataa

SEQ ID NO: 254848 - DNA, 13 bp, Artificial Sequence
  Oligonucleotide for detection of SNP TSC0062119
ttataatcaatca

SEQ ID NO: 254849 - DNA, 13 bp, Artificial Sequence
  Oligonucleotide for detection of SNP TSC0062119
tgattgtttataa

SEQ ID NO: 254850 - DNA, 13 bp, Artificial Sequence
  Oligonucleotide for detection of SNP TSC0062119
ttataaacaatca

SEQ ID NO: 254851 - DNA, 13 bp, Artificial Sequence
  Oligonucleotide for detection of SNP TSC0062119
ttataattaatta

SEQ ID NO: 254852 - DNA, 13 bp, Artificial Sequence
  Oligonucleotide for detection of SNP TSC0062119
taattaattataa

SEQ ID NO: 254853 - DNA, 13 bp, Artificial Sequence
  Oligonucleotide for detection of SNP TSC0062119
ttataaataatta

SEQ ID NO: 254854 - DNA, 13 bp, Artificial Sequence
  Oligonucleotide for detection of SNP TSC0062119
taattatttataa

SEQ ID NO: 254855 - DNA, 13 bp, Artificial Sequence
  Oligonucleotide for detection of SNP TSC0062120
gaaagaataaagg

SEQ ID NO: 254856 - DNA, 13 bp, Artificial Sequence
  Oligonucleotide for detection of SNP TSC0062120
cctttattctttc

SEQ ID NO: 254857 - DNA, 13 bp, Artificial Sequence
  Oligonucleotide for detection of SNP TSC0062120
gaaagattaaagg

SEQ ID NO: 254858 - DNA, 13 bp, Artificial Sequence
  Oligonucleotide for detection of SNP TSC0062120
cctttaatctttc

SEQ ID NO: 254859 - DNA, 13 bp, Artificial Sequence
  Oligonucleotide for detection of SNP TSC0062121
taaagatagaatg

SEQ ID NO: 254860 - DNA, 13 bp, Artificial Sequence
  Oligonucleotide for detection of SNP TSC0062121
cattctatcttta

SEQ ID NO: 254861 - DNA, 13 bp, Artificial Sequence
  Oligonucleotide for detection of SNP TSC0062121
taaagagagaatg

SEQ ID NO: 254862 - DNA, 13 bp, Artificial Sequence
  Oligonucleotide for detection of SNP TSC0062121
cattctctcttta

SEQ ID NO: 254863 - DNA, 13 bp, Artificial Sequence
  Oligonucleotide for detection of SNP TSC0062123
ttcggtattttgt

SEQ ID NO: 254864 - DNA, 13 bp, Artificial Sequence
  Oligonucleotide for detection of SNP TSC0062123
acaaaataccgaa

SEQ ID NO: 254865 - DNA, 13 bp, Artificial Sequence
  Oligonucleotide for detection of SNP TSC0062123
ttcggtgttttgt

SEQ ID NO: 254866 - DNA, 13 bp, Artificial Sequence
  Oligonucleotide for detection of SNP TSC0062123
acaaaacaccgaa

SEQ ID NO: 254867 - DNA, 13 bp, Artificial Sequence
  Oligonucleotide for detection of SNP TSC0062123
ttcggcgttttgt

SEQ ID NO: 254868 - DNA, 13 bp, Artificial Sequence
  Oligonucleotide for detection of SNP TSC0062123
acaaaacgccgaa

SEQ ID NO: 254869 - DNA, 13 bp, Artificial Sequence
  Oligonucleotide for detection of SNP TSC0062123
ataaaatgttggg

SEQ ID NO: 254870 - DNA, 13 bp, Artificial Sequence
  Oligonucleotide for detection of SNP TSC0062123
cccaacattttat

SEQ ID NO: 254871 - DNA, 13 bp, Artificial Sequence
  Oligonucleotide for detection of SNP TSC0062123
ataaaatgtcggg

SEQ ID NO: 254872 - DNA, 13 bp, Artificial Sequence
  Oligonucleotide for detection of SNP TSC0062123
cccgacattttat

SEQ ID NO: 254873 - DNA, 13 bp, Artificial Sequence
  Oligonucleotide for detection of SNP TSC0062123
ataaaacgttggg

SEQ ID NO: 254874 - DNA, 13 bp, Artificial Sequence
  Oligonucleotide for detection of SNP TSC0062123
cccaacgttttat

SEQ ID NO: 254875 - DNA, 13 bp, Artificial Sequence
  Oligonucleotide for detection of SNP TSC0062123
ataaaacgtcggg

SEQ ID NO: 254876 - DNA, 13 bp, Artificial Sequence
  Oligonucleotide for detection of SNP TSC0062123
cccgacgttttat

SEQ ID NO: 254877 - DNA, 13 bp, Artificial Sequence
  Oligonucleotide for detection of SNP TSC0062124
ataaagaaatttg

SEQ ID NO: 254878 - DNA, 13 bp, Artificial Sequence
  Oligonucleotide for detection of SNP TSC0062124
caaatttctttat

SEQ ID NO: 254879 - DNA, 13 bp, Artificial Sequence
  Oligonucleotide for detection of SNP TSC0062124
ataaaggaatttg

SEQ ID NO: 254880 - DNA, 13 bp, Artificial Sequence
  Oligonucleotide for detection of SNP TSC0062124
caaattcctttat

SEQ ID NO: 254881 - DNA, 13 bp, Artificial Sequence
  Oligonucleotide for detection of SNP TSC0062126
ggaggtaggagag

SEQ ID NO: 254882 - DNA, 13 bp, Artificial Sequence
  Oligonucleotide for detection of SNP TSC0062126
ctctcctacctcc

SEQ ID NO: 254883 - DNA, 13 bp, Artificial Sequence
  Oligonucleotide for detection of SNP TSC0062126
ggaggtgggagag

SEQ ID NO: 254884 - DNA, 13 bp, Artificial Sequence
  Oligonucleotide for detection of SNP TSC0062126
ctctcccacctcc

SEQ ID NO: 254885 - DNA, 13 bp, Artificial Sequence
  Oligonucleotide for detection of SNP TSC0062126
ggaggcgggagag

SEQ ID NO: 254886 - DNA, 13 bp, Artificial Sequence
  Oligonucleotide for detection of SNP TSC0062126
ctctcccgcctcc

SEQ ID NO: 254887 - DNA, 13 bp, Artificial Sequence
  Oligonucleotide for detection of SNP TSC0062130
agaaatttgggga

SEQ ID NO: 254888 - DNA, 13 bp, Artificial Sequence
  Oligonucleotide for detection of SNP TSC0062130
tccccaaatttct

SEQ ID NO: 254889 - DNA, 13 bp, Artificial Sequence
  Oligonucleotide for detection of SNP TSC0062130
agaaatatgggga

SEQ ID NO: 254890 - DNA, 13 bp, Artificial Sequence
  Oligonucleotide for detection of SNP TSC0062130
tccccatatttct

SEQ ID NO: 254891 - DNA, 13 bp, Artificial Sequence
  Oligonucleotide for detection of SNP TSC0006434
atggtttgttagy

SEQ ID NO: 254892 - DNA, 13 bp, Artificial Sequence
  Oligonucleotide for detection of SNP TSC0006434
rctaacaaaccat

SEQ ID NO: 254893 - DNA, 13 bp, Artificial Sequence
  Oligonucleotide for detection of SNP TSC0006434
atggttcgttagy

SEQ ID NO: 254894 - DNA, 13 bp, Artificial Sequence
  Oligonucleotide for detection of SNP TSC0006434
rctaacgaaccat

SEQ ID NO: 254895 - DNA, 13 bp, Artificial Sequence
  Oligonucleotide for detection of SNP TSC0006434
gttgatgagttat

SEQ ID NO: 254896 - DNA, 13 bp, Artificial Sequence
  Oligonucleotide for detection of SNP TSC0006434
ataactcatcaac

SEQ ID NO: 254897 - DNA, 13 bp, Artificial Sequence
  Oligonucleotide for detection of SNP TSC0006434
gttgataagttat

SEQ ID NO: 254898 - DNA, 13 bp, Artificial Sequence
  Oligonucleotide for detection of SNP TSC0006434
ataacttatcaac

SEQ ID NO: 254899 - DNA, 13 bp, Artificial Sequence
  Oligonucleotide for detection of SNP TSC0006434
gttgacgagttat

SEQ ID NO: 254900 - DNA, 13 bp, Artificial Sequence
  Oligonucleotide for detection of SNP TSC0006434
ataactcgtcaac

SEQ ID NO: 254901 - DNA, 13 bp, Artificial Sequence
  Oligonucleotide for detection of SNP TSC0062133
tatcgaatatttt

SEQ ID NO: 254902 - DNA, 13 bp, Artificial Sequence
  Oligonucleotide for detection of SNP TSC0062133
aaaatattcgata

SEQ ID NO: 254903 - DNA, 13 bp, Artificial Sequence
  Oligonucleotide for detection of SNP TSC0062133
tatcgagtatttt

SEQ ID NO: 254904 - DNA, 13 bp, Artificial Sequence
  Oligonucleotide for detection of SNP TSC0062133
aaaatactcgata

SEQ ID NO: 254905 - DNA, 13 bp, Artificial Sequence
  Oligonucleotide for detection of SNP TSC0062134
gtgatagtaatta

SEQ ID NO: 254906 - DNA, 13 bp, Artificial Sequence
  Oligonucleotide for detection of SNP TSC0062134
taattactatcac

SEQ ID NO: 254907 - DNA, 13 bp, Artificial Sequence
  Oligonucleotide for detection of SNP TSC0062134
gtgataataatta

SEQ ID NO: 254908 - DNA, 13 bp, Artificial Sequence
  Oligonucleotide for detection of SNP TSC0062134
taattattatcac

SEQ ID NO: 254909 - DNA, 13 bp, Artificial Sequence
  Oligonucleotide for detection of SNP TSC0062135
aatgagaagtaaa

SEQ ID NO: 254910 - DNA, 13 bp, Artificial Sequence
  Oligonucleotide for detection of SNP TSC0062135
tttacttctcatt

SEQ ID NO: 254911 - DNA, 13 bp, Artificial Sequence
  Oligonucleotide for detection of SNP TSC0062135
aatgaggagtaaa

SEQ ID NO: 254912 - DNA, 13 bp, Artificial Sequence
  Oligonucleotide for detection of SNP TSC0062135
tttactcctcatt

SEQ ID NO: 254913 - DNA, 13 bp, Artificial Sequence
  Oligonucleotide for detection of SNP TSC0006083
tttggtgtaggty

SEQ ID NO: 254914 - DNA, 13 bp, Artificial Sequence
  Oligonucleotide for detection of SNP TSC0006083
racctacaccaaa

SEQ ID NO: 254915 - DNA, 13 bp, Artificial Sequence
  Oligonucleotide for detection of SNP TSC0006083
tttggcgtaggty

SEQ ID NO: 254916 - DNA, 13 bp, Artificial Sequence
  Oligonucleotide for detection of SNP TSC0006083
racctacgccaaa

SEQ ID NO: 254917 - DNA, 13 bp, Artificial Sequence
  Oligonucleotide for detection of SNP TSC0006083
ggtttgtgttagg

SEQ ID NO: 254918 - DNA, 13 bp, Artificial Sequence
  Oligonucleotide for detection of SNP TSC0006083
cctaacacaaacc

SEQ ID NO: 254919 - DNA, 13 bp, Artificial Sequence
  Oligonucleotide for detection of SNP TSC0006083
ggtttgcgttagg

SEQ ID NO: 254920 - DNA, 13 bp, Artificial Sequence
  Oligonucleotide for detection of SNP TSC0006083
cctaacgcaaacc

SEQ ID NO: 254921 - DNA, 13 bp, Artificial Sequence
  Oligonucleotide for detection of SNP TSC0006084
ttagttagttggg

SEQ ID NO: 254922 - DNA, 13 bp, Artificial Sequence
  Oligonucleotide for detection of SNP TSC0006084
cccaactaactaa

SEQ ID NO: 254923 - DNA, 13 bp, Artificial Sequence
  Oligonucleotide for detection of SNP TSC0006084
ttagtttgttggg

SEQ ID NO: 254924 - DNA, 13 bp, Artificial Sequence
  Oligonucleotide for detection of SNP TSC0006084
cccaacaaactaa

SEQ ID NO: 254925 - DNA, 13 bp, Artificial Sequence
  Oligonucleotide for detection of SNP TSC0006084
ttagttcgttggg

SEQ ID NO: 254926 - DNA, 13 bp, Artificial Sequence
  Oligonucleotide for detection of SNP TSC0006084
cccaacgaactaa

SEQ ID NO: 254927 - DNA, 13 bp, Artificial Sequence
  Oligonucleotide for detection of SNP TSC0006084
tttagcggattaa

SEQ ID NO: 254928 - DNA, 13 bp, Artificial Sequence
  Oligonucleotide for detection of SNP TSC0006084
ttaatccgctaaa

SEQ ID NO: 254929 - DNA, 13 bp, Artificial Sequence
  Oligonucleotide for detection of SNP TSC0006085
ttgggagtgatgt

SEQ ID NO: 254930 - DNA, 13 bp, Artificial Sequence
  Oligonucleotide for detection of SNP TSC0006085
acatcactcccaa

SEQ ID NO: 254931 - DNA, 13 bp, Artificial Sequence
  Oligonucleotide for detection of SNP TSC0006085
ttgggaatgatgt

SEQ ID NO: 254932 - DNA, 13 bp, Artificial Sequence
  Oligonucleotide for detection of SNP TSC0006085
acatcattcccaa

SEQ ID NO: 254933 - DNA, 13 bp, Artificial Sequence
  Oligonucleotide for detection of SNP TSC0010199
ttagataaattat

SEQ ID NO: 254934 - DNA, 13 bp, Artificial Sequence
  Oligonucleotide for detection of SNP TSC0010199
ataatttatctaa

SEQ ID NO: 254935 - DNA, 13 bp, Artificial Sequence
  Oligonucleotide for detection of SNP TSC0010199
ttagattaattat

SEQ ID NO: 254936 - DNA, 13 bp, Artificial Sequence
  Oligonucleotide for detection of SNP TSC0010199
ataattaatctaa

SEQ ID NO: 254937 - DNA, 13 bp, Artificial Sequence
  Oligonucleotide for detection of SNP TSC0010199
ataatttgtttag

SEQ ID NO: 254938 - DNA, 13 bp, Artificial Sequence
  Oligonucleotide for detection of SNP TSC0010199
ctaaacaaattat

SEQ ID NO: 254939 - DNA, 13 bp, Artificial Sequence
  Oligonucleotide for detection of SNP TSC0010199
ataattggtttag

SEQ ID NO: 254940 - DNA, 13 bp, Artificial Sequence
  Oligonucleotide for detection of SNP TSC0010199
ctaaaccaattat

SEQ ID NO: 254941 - DNA, 13 bp, Artificial Sequence
  Oligonucleotide for detection of SNP TSC0010200
agataaaatttta

SEQ ID NO: 254942 - DNA, 13 bp, Artificial Sequence
  Oligonucleotide for detection of SNP TSC0010200
taaaattttatct

SEQ ID NO: 254943 - DNA, 13 bp, Artificial Sequence
  Oligonucleotide for detection of SNP TSC0010200
agataatatttta

SEQ ID NO: 254944 - DNA, 13 bp, Artificial Sequence
  Oligonucleotide for detection of SNP TSC0010200
taaaatattatct

SEQ ID NO: 254945 - DNA, 13 bp, Artificial Sequence
  Oligonucleotide for detection of SNP TSC0010201
tttgatatatgty

SEQ ID NO: 254946 - DNA, 13 bp, Artificial Sequence
  Oligonucleotide for detection of SNP TSC0010201
racatatatcaaa

SEQ ID NO: 254947 - DNA, 13 bp, Artificial Sequence
  Oligonucleotide for detection of SNP TSC0010201
tttgatgtatgty

SEQ ID NO: 254948 - DNA, 13 bp, Artificial Sequence
  Oligonucleotide for detection of SNP TSC0010201
racatacatcaaa

SEQ ID NO: 254949 - DNA, 13 bp, Artificial Sequence
  Oligonucleotide for detection of SNP TSC0062136
tatttatgaaaay

SEQ ID NO: 254950 - DNA, 13 bp, Artificial Sequence
  Oligonucleotide for detection of SNP TSC0062136
rttttcataaata

SEQ ID NO: 254951 - DNA, 13 bp, Artificial Sequence
  Oligonucleotide for detection of SNP TSC0062136
tatttaggaaaay

SEQ ID NO: 254952 - DNA, 13 bp, Artificial Sequence
  Oligonucleotide for detection of SNP TSC0062136
rttttcctaaata

SEQ ID NO: 254953 - DNA, 13 bp, Artificial Sequence
  Oligonucleotide for detection of SNP TSC0062136
gtttttatgaata

SEQ ID NO: 254954 - DNA, 13 bp, Artificial Sequence
  Oligonucleotide for detection of SNP TSC0062136
tattcataaaaac

SEQ ID NO: 254955 - DNA, 13 bp, Artificial Sequence
  Oligonucleotide for detection of SNP TSC0062136
gtttttttgaata

SEQ ID NO: 254956 - DNA, 13 bp, Artificial Sequence
  Oligonucleotide for detection of SNP TSC0062136
tattcaaaaaaac

SEQ ID NO: 254957 - DNA, 13 bp, Artificial Sequence
  Oligonucleotide for detection of SNP TSC0006649
ggttgggtgagat

SEQ ID NO: 254958 - DNA, 13 bp, Artificial Sequence
  Oligonucleotide for detection of SNP TSC0006649
atctcacccaacc

SEQ ID NO: 254959 - DNA, 13 bp, Artificial Sequence
  Oligonucleotide for detection of SNP TSC0006649
ggttggatgagat

SEQ ID NO: 254960 - DNA, 13 bp, Artificial Sequence
  Oligonucleotide for detection of SNP TSC0006649
atctcatccaacc

SEQ ID NO: 254961 - DNA, 13 bp, Artificial Sequence
  Oligonucleotide for detection of SNP TSC0062138
aggaataggtttt

SEQ ID NO: 254962 - DNA, 13 bp, Artificial Sequence
  Oligonucleotide for detection of SNP TSC0062138
aaaacctattcct

SEQ ID NO: 254963 - DNA, 13 bp, Artificial Sequence
  Oligonucleotide for detection of SNP TSC0062138
aggaatgggtttt

SEQ ID NO: 254964 - DNA, 13 bp, Artificial Sequence
  Oligonucleotide for detection of SNP TSC0062138
aaaacccattcct

SEQ ID NO: 254965 - DNA, 13 bp, Artificial Sequence
  Oligonucleotide for detection of SNP TSC0062138
aggaacgggtttt

SEQ ID NO: 254966 - DNA, 13 bp, Artificial Sequence
  Oligonucleotide for detection of SNP TSC0062138
aaaacccgttcct

SEQ ID NO: 254967 - DNA, 13 bp, Artificial Sequence
  Oligonucleotide for detection of SNP TSC0062138
aggatttgttttt

SEQ ID NO: 254968 - DNA, 13 bp, Artificial Sequence
  Oligonucleotide for detection of SNP TSC0062138
aaaaacaaatcct

SEQ ID NO: 254969 - DNA, 13 bp, Artificial Sequence
  Oligonucleotide for detection of SNP TSC0062138
aggattcgttttt

SEQ ID NO: 254970 - DNA, 13 bp, Artificial Sequence
  Oligonucleotide for detection of SNP TSC0062138
aaaaacgaatcct

SEQ ID NO: 254971 - DNA, 13 bp, Artificial Sequence
  Oligonucleotide for detection of SNP TSC0062140
aaatgtaattgay

SEQ ID NO: 254972 - DNA, 13 bp, Artificial Sequence
  Oligonucleotide for detection of SNP TSC0062140
rtcaattacattt

SEQ ID NO: 254973 - DNA, 13 bp, Artificial Sequence
  Oligonucleotide for detection of SNP TSC0062140
aaatgtgattgay

SEQ ID NO: 254974 - DNA, 13 bp, Artificial Sequence
  Oligonucleotide for detection of SNP TSC0062140
rtcaatcacattt

SEQ ID NO: 254975 - DNA, 13 bp, Artificial Sequence
  Oligonucleotide for detection of SNP TSC0062140
aaatgcgattgay

SEQ ID NO: 254976 - DNA, 13 bp, Artificial Sequence
  Oligonucleotide for detection of SNP TSC0062140
rtcaatcgcattt

SEQ ID NO: 254977 - DNA, 13 bp, Artificial Sequence
  Oligonucleotide for detection of SNP TSC0062140
gttaattgtattt

SEQ ID NO: 254978 - DNA, 13 bp, Artificial Sequence
  Oligonucleotide for detection of SNP TSC0062140
aaatacaattaac

SEQ ID NO: 254979 - DNA, 13 bp, Artificial Sequence
  Oligonucleotide for detection of SNP TSC0062140
gttaatcgtattt

SEQ ID NO: 254980 - DNA, 13 bp, Artificial Sequence
  Oligonucleotide for detection of SNP TSC0062140
aaatacgattaac

SEQ ID NO: 254981 - DNA, 13 bp, Artificial Sequence
  Oligonucleotide for detection of SNP TSC0062143
aataagaagatat

SEQ ID NO: 254982 - DNA, 13 bp, Artificial Sequence
  Oligonucleotide for detection of SNP TSC0062143
atatcttcttatt

SEQ ID NO: 254983 - DNA, 13 bp, Artificial Sequence
  Oligonucleotide for detection of SNP TSC0062143
aataaggagatat

SEQ ID NO: 254984 - DNA, 13 bp, Artificial Sequence
  Oligonucleotide for detection of SNP TSC0062143
atatctccttatt

SEQ ID NO: 254985 - DNA, 13 bp, Artificial Sequence
  Oligonucleotide for detection of SNP TSC0062148
gtgaaagaaattg

SEQ ID NO: 254986 - DNA, 13 bp, Artificial Sequence
  Oligonucleotide for detection of SNP TSC0062148
caatttctttcac

SEQ ID NO: 254987 - DNA, 13 bp, Artificial Sequence
  Oligonucleotide for detection of SNP TSC0062148
gtgaaaaaaattg

SEQ ID NO: 254988 - DNA, 13 bp, Artificial Sequence
  Oligonucleotide for detection of SNP TSC0062148
caatttttttcac

SEQ ID NO: 254989 - DNA, 13 bp, Artificial Sequence
  Oligonucleotide for detection of SNP TSC0007081
tgttgtaaggatg

SEQ ID NO: 254990 - DNA, 13 bp, Artificial Sequence
  Oligonucleotide for detection of SNP TSC0007081
catccttacaaca

SEQ ID NO: 254991 - DNA, 13 bp, Artificial Sequence
  Oligonucleotide for detection of SNP TSC0007081
tgttgttaggatg

SEQ ID NO: 254992 - DNA, 13 bp, Artificial Sequence
  Oligonucleotide for detection of SNP TSC0007081
catcctaacaaca

SEQ ID NO: 254993 - DNA, 13 bp, Artificial Sequence
  Oligonucleotide for detection of SNP TSC0007081
tatttttatagta

SEQ ID NO: 254994 - DNA, 13 bp, Artificial Sequence
  Oligonucleotide for detection of SNP TSC0007081
tactataaaaata

SEQ ID NO: 254995 - DNA, 13 bp, Artificial Sequence
  Oligonucleotide for detection of SNP TSC0062149
agaattgttgggy

SEQ ID NO: 254996 - DNA, 13 bp, Artificial Sequence
  Oligonucleotide for detection of SNP TSC0062149
rcccaacaattct

SEQ ID NO: 254997 - DNA, 13 bp, Artificial Sequence
  Oligonucleotide for detection of SNP TSC0062149
agaattattgggy

SEQ ID NO: 254998 - DNA, 13 bp, Artificial Sequence
  Oligonucleotide for detection of SNP TSC0062149
rcccaataattct

SEQ ID NO: 254999 - DNA, 13 bp, Artificial Sequence
  Oligonucleotide for detection of SNP TSC0062150
gataatattgaag

SEQ ID NO: 255000 - DNA, 13 bp, Artificial Sequence
  Oligonucleotide for detection of SNP TSC0062150
cttcaatattatc

SEQ ID NO: 255001 - DNA, 13 bp, Artificial Sequence
  Oligonucleotide for detection of SNP TSC0062150
gataattttgaag

SEQ ID NO: 255002 - DNA, 13 bp, Artificial Sequence
  Oligonucleotide for detection of SNP TSC0062150
cttcaaaattatc

SEQ ID NO: 255003 - DNA, 13 bp, Artificial Sequence
  Oligonucleotide for detection of SNP TSC0062150
ttttagggttgty

SEQ ID NO: 255004 - DNA, 13 bp, Artificial Sequence
  Oligonucleotide for detection of SNP TSC0062150
racaaccctaaaa

SEQ ID NO: 255005 - DNA, 13 bp, Artificial Sequence
  Oligonucleotide for detection of SNP TSC0062151
aaagtgatgggat

SEQ ID NO: 255006 - DNA, 13 bp, Artificial Sequence
  Oligonucleotide for detection of SNP TSC0062151
atcccatcacttt

SEQ ID NO: 255007 - DNA, 13 bp, Artificial Sequence
  Oligonucleotide for detection of SNP TSC0062151
aaagtgttgggat

SEQ ID NO: 255008 - DNA, 13 bp, Artificial Sequence
  Oligonucleotide for detection of SNP TSC0062151
atcccaacacttt

SEQ ID NO: 255009 - DNA, 13 bp, Artificial Sequence
  Oligonucleotide for detection of SNP TSC0062152
taaattttattag

SEQ ID NO: 255010 - DNA, 13 bp, Artificial Sequence
  Oligonucleotide for detection of SNP TSC0062152
ctaataaaattta

SEQ ID NO: 255011 - DNA, 13 bp, Artificial Sequence
  Oligonucleotide for detection of SNP TSC0062152
taaattgtattag

SEQ ID NO: 255012 - DNA, 13 bp, Artificial Sequence
  Oligonucleotide for detection of SNP TSC0062152
ctaatacaattta

SEQ ID NO: 255013 - DNA, 13 bp, Artificial Sequence
  Oligonucleotide for detection of SNP TSC0062152
taaatcgtattag

SEQ ID NO: 255014 - DNA, 13 bp, Artificial Sequence
  Oligonucleotide for detection of SNP TSC0062152
ctaatacgattta

SEQ ID NO: 255015 - DNA, 13 bp, Artificial Sequence
  Oligonucleotide for detection of SNP TSC0062152
ttaataggattta

SEQ ID NO: 255016 - DNA, 13 bp, Artificial Sequence
  Oligonucleotide for detection of SNP TSC0062152
taaatcctattaa

SEQ ID NO: 255017 - DNA, 13 bp, Artificial Sequence
  Oligonucleotide for detection of SNP TSC0062153
tgttattaattgt

SEQ ID NO: 255018 - DNA, 13 bp, Artificial Sequence
  Oligonucleotide for detection of SNP TSC0062153
acaattaataaca

SEQ ID NO: 255019 - DNA, 13 bp, Artificial Sequence
  Oligonucleotide for detection of SNP TSC0062153
tgttatgaattgt

SEQ ID NO: 255020 - DNA, 13 bp, Artificial Sequence
  Oligonucleotide for detection of SNP TSC0062153
acaattcataaca

SEQ ID NO: 255021 - DNA, 13 bp, Artificial Sequence
  Oligonucleotide for detection of SNP TSC0062153
atagttgatggta

SEQ ID NO: 255022 - DNA, 13 bp, Artificial Sequence
  Oligonucleotide for detection of SNP TSC0062153
taccatcaactat

SEQ ID NO: 255023 - DNA, 13 bp, Artificial Sequence
  Oligonucleotide for detection of SNP TSC0062153
atagtttatggta

SEQ ID NO: 255024 - DNA, 13 bp, Artificial Sequence
  Oligonucleotide for detection of SNP TSC0062153
taccataaactat

SEQ ID NO: 255025 - DNA, 13 bp, Artificial Sequence
  Oligonucleotide for detection of SNP TSC0062154
taatatataagta

SEQ ID NO: 255026 - DNA, 13 bp, Artificial Sequence
  Oligonucleotide for detection of SNP TSC0062154
tacttatatatta

SEQ ID NO: 255027 - DNA, 13 bp, Artificial Sequence
  Oligonucleotide for detection of SNP TSC0062154
taatatgtaagta

SEQ ID NO: 255028 - DNA, 13 bp, Artificial Sequence
  Oligonucleotide for detection of SNP TSC0062154
tacttacatatta

SEQ ID NO: 255029 - DNA, 13 bp, Artificial Sequence
  Oligonucleotide for detection of SNP TSC0062155
atgatgataatay

SEQ ID NO: 255030 - DNA, 13 bp, Artificial Sequence
  Oligonucleotide for detection of SNP TSC0062155
rtattatcatcat

SEQ ID NO: 255031 - DNA, 13 bp, Artificial Sequence
  Oligonucleotide for detection of SNP TSC0062155
atgatggtaatay

SEQ ID NO: 255032 - DNA, 13 bp, Artificial Sequence
  Oligonucleotide for detection of SNP TSC0062155
rtattaccatcat

SEQ ID NO: 255033 - DNA, 13 bp, Artificial Sequence
  Oligonucleotide for detection of SNP TSC0062155
atgacgataatay

SEQ ID NO: 255034 - DNA, 13 bp, Artificial Sequence
  Oligonucleotide for detection of SNP TSC0062155
rtattatcgtcat

SEQ ID NO: 255035 - DNA, 13 bp, Artificial Sequence
  Oligonucleotide for detection of SNP TSC0062155
atgacggtaatay

SEQ ID NO: 255036 - DNA, 13 bp, Artificial Sequence
  Oligonucleotide for detection of SNP TSC0062155
rtattaccgtcat

SEQ ID NO: 255037 - DNA, 13 bp, Artificial Sequence
  Oligonucleotide for detection of SNP TSC0062156
aatggaatttaaa

SEQ ID NO: 255038 - DNA, 13 bp, Artificial Sequence
  Oligonucleotide for detection of SNP TSC0062156
tttaaattccatt

SEQ ID NO: 255039 - DNA, 13 bp, Artificial Sequence
  Oligonucleotide for detection of SNP TSC0062156
aatggagtttaaa

SEQ ID NO: 255040 - DNA, 13 bp, Artificial Sequence
  Oligonucleotide for detection of SNP TSC0062156
tttaaactccatt

SEQ ID NO: 255041 - DNA, 13 bp, Artificial Sequence
  Oligonucleotide for detection of SNP TSC0062157
tatataaggtgay

SEQ ID NO: 255042 - DNA, 13 bp, Artificial Sequence
  Oligonucleotide for detection of SNP TSC0062157
rtcaccttatata

SEQ ID NO: 255043 - DNA, 13 bp, Artificial Sequence
  Oligonucleotide for detection of SNP TSC0062157
tatatagggtgay

SEQ ID NO: 255044 - DNA, 13 bp, Artificial Sequence
  Oligonucleotide for detection of SNP TSC0062157
rtcaccctatata

SEQ ID NO: 255045 - DNA, 13 bp, Artificial Sequence
  Oligonucleotide for detection of SNP TSC0062158
tattttatggtgt

SEQ ID NO: 255046 - DNA, 13 bp, Artificial Sequence
  Oligonucleotide for detection of SNP TSC0062158
acaccataaaata

SEQ ID NO: 255047 - DNA, 13 bp, Artificial Sequence
  Oligonucleotide for detection of SNP TSC0062158
tattttgtggtgt

SEQ ID NO: 255048 - DNA, 13 bp, Artificial Sequence
  Oligonucleotide for detection of SNP TSC0062158
acaccacaaaata

SEQ ID NO: 255049 - DNA, 13 bp, Artificial Sequence
  Oligonucleotide for detection of SNP TSC0062158
tatttcgtggtgt

SEQ ID NO: 255050 - DNA, 13 bp, Artificial Sequence
  Oligonucleotide for detection of SNP TSC0062158
acaccacgaaata

SEQ ID NO: 255051 - DNA, 13 bp, Artificial Sequence
  Oligonucleotide for detection of SNP TSC0062158
atattatggaatg

SEQ ID NO: 255052 - DNA, 13 bp, Artificial Sequence
  Oligonucleotide for detection of SNP TSC0062158
cattccataatat

SEQ ID NO: 255053 - DNA, 13 bp, Artificial Sequence
  Oligonucleotide for detection of SNP TSC0062158
atattacggaatg

SEQ ID NO: 255054 - DNA, 13 bp, Artificial Sequence
  Oligonucleotide for detection of SNP TSC0062158
cattccgtaatat

SEQ ID NO: 255055 - DNA, 13 bp, Artificial Sequence
  Oligonucleotide for detection of SNP TSC0062159
tggggatggtagg

SEQ ID NO: 255056 - DNA, 13 bp, Artificial Sequence
  Oligonucleotide for detection of SNP TSC0062159
cctaccatcccca

SEQ ID NO: 255057 - DNA, 13 bp, Artificial Sequence
  Oligonucleotide for detection of SNP TSC0062159
tggggacggtagg

SEQ ID NO: 255058 - DNA, 13 bp, Artificial Sequence
  Oligonucleotide for detection of SNP TSC0062159
cctaccgtcccca

SEQ ID NO: 255059 - DNA, 13 bp, Artificial Sequence
  Oligonucleotide for detection of SNP TSC0008829
aatatatgtataa

SEQ ID NO: 255060 - DNA, 13 bp, Artificial Sequence
  Oligonucleotide for detection of SNP TSC0008829
ttatacatatatt

SEQ ID NO: 255061 - DNA, 13 bp, Artificial Sequence
  Oligonucleotide for detection of SNP TSC0008829
aatataggtataa

SEQ ID NO: 255062 - DNA, 13 bp, Artificial Sequence
  Oligonucleotide for detection of SNP TSC0008829
ttatacctatatt

SEQ ID NO: 255063 - DNA, 13 bp, Artificial Sequence
  Oligonucleotide for detection of SNP TSC0062161
gaagtaaaaatay

SEQ ID NO: 255064 - DNA, 13 bp, Artificial Sequence
  Oligonucleotide for detection of SNP TSC0062161
rtatttttacttc

SEQ ID NO: 255065 - DNA, 13 bp, Artificial Sequence
  Oligonucleotide for detection of SNP TSC0062161
gaagtagaaatay

SEQ ID NO: 255066 - DNA, 13 bp, Artificial Sequence
  Oligonucleotide for detection of SNP TSC0062161
rtatttctacttc

SEQ ID NO: 255067 - DNA, 13 bp, Artificial Sequence
  Oligonucleotide for detection of SNP TSC0062162
tataagtgtgtat

SEQ ID NO: 255068 - DNA, 13 bp, Artificial Sequence
  Oligonucleotide for detection of SNP TSC0062162
atacacacttata

SEQ ID NO: 255069 - DNA, 13 bp, Artificial Sequence
  Oligonucleotide for detection of SNP TSC0062162
tataagcgtgtat

SEQ ID NO: 255070 - DNA, 13 bp, Artificial Sequence
  Oligonucleotide for detection of SNP TSC0062162
atacacgcttata

SEQ ID NO: 255071 - DNA, 13 bp, Artificial Sequence
  Oligonucleotide for detection of SNP TSC0062162
atatatgtttgtg

SEQ ID NO: 255072 - DNA, 13 bp, Artificial Sequence
  Oligonucleotide for detection of SNP TSC0062162
cacaaacatatat

SEQ ID NO: 255073 - DNA, 13 bp, Artificial Sequence
  Oligonucleotide for detection of SNP TSC0062162
atatatatttgtg

SEQ ID NO: 255074 - DNA, 13 bp, Artificial Sequence
  Oligonucleotide for detection of SNP TSC0062162
cacaaatatatat

SEQ ID NO: 255075 - DNA, 13 bp, Artificial Sequence
  Oligonucleotide for detection of SNP TSC0062162
atatacgtttgtg

SEQ ID NO: 255076 - DNA, 13 bp, Artificial Sequence
  Oligonucleotide for detection of SNP TSC0062162
cacaaacgtatat

SEQ ID NO: 255077 - DNA, 13 bp, Artificial Sequence
  Oligonucleotide for detection of SNP TSC0062163
taaggtaagggga

SEQ ID NO: 255078 - DNA, 13 bp, Artificial Sequence
  Oligonucleotide for detection of SNP TSC0062163
tccccttacctta

SEQ ID NO: 255079 - DNA, 13 bp, Artificial Sequence
  Oligonucleotide for detection of SNP TSC0062163
taaggtgagggga

SEQ ID NO: 255080 - DNA, 13 bp, Artificial Sequence
  Oligonucleotide for detection of SNP TSC0062163
tcccctcacctta

SEQ ID NO: 255081 - DNA, 13 bp, Artificial Sequence
  Oligonucleotide for detection of SNP TSC0062164
aggtataatattt

SEQ ID NO: 255082 - DNA, 13 bp, Artificial Sequence
  Oligonucleotide for detection of SNP TSC0062164
aaatattatacct

SEQ ID NO: 255083 - DNA, 13 bp, Artificial Sequence
  Oligonucleotide for detection of SNP TSC0062164
aggtatgatattt

SEQ ID NO: 255084 - DNA, 13 bp, Artificial Sequence
  Oligonucleotide for detection of SNP TSC0062164
aaatatcatacct

SEQ ID NO: 255085 - DNA, 13 bp, Artificial Sequence
  Oligonucleotide for detection of SNP TSC0062166
aaaaatatgattt

SEQ ID NO: 255086 - DNA, 13 bp, Artificial Sequence
  Oligonucleotide for detection of SNP TSC0062166
aaatcatattttt

SEQ ID NO: 255087 - DNA, 13 bp, Artificial Sequence
  Oligonucleotide for detection of SNP TSC0062166
aaaaatgtgattt

SEQ ID NO: 255088 - DNA, 13 bp, Artificial Sequence
  Oligonucleotide for detection of SNP TSC0062166
aaatcacattttt

SEQ ID NO: 255089 - DNA, 13 bp, Artificial Sequence
  Oligonucleotide for detection of SNP TSC0062166
aaaaacgtgattt

SEQ ID NO: 255090 - DNA, 13 bp, Artificial Sequence
  Oligonucleotide for detection of SNP TSC0062166
aaatcacgttttt

SEQ ID NO: 255091 - DNA, 13 bp, Artificial Sequence
  Oligonucleotide for detection of SNP TSC0062166
agattatgttttt

SEQ ID NO: 255092 - DNA, 13 bp, Artificial Sequence
  Oligonucleotide for detection of SNP TSC0062166
aaaaacataatct

SEQ ID NO: 255093 - DNA, 13 bp, Artificial Sequence
  Oligonucleotide for detection of SNP TSC0062166
agattacgttttt

SEQ ID NO: 255094 - DNA, 13 bp, Artificial Sequence
  Oligonucleotide for detection of SNP TSC0062166
aaaaacgtaatct

SEQ ID NO: 255095 - DNA, 13 bp, Artificial Sequence
  Oligonucleotide for detection of SNP TSC0006612
tttagtagagaay

SEQ ID NO: 255096 - DNA, 13 bp, Artificial Sequence
  Oligonucleotide for detection of SNP TSC0006612
rttctctactaaa

SEQ ID NO: 255097 - DNA, 13 bp, Artificial Sequence
  Oligonucleotide for detection of SNP TSC0006612
tttagtggagaay

SEQ ID NO: 255098 - DNA, 13 bp, Artificial Sequence
  Oligonucleotide for detection of SNP TSC0006612
rttctccactaaa

SEQ ID NO: 255099 - DNA, 13 bp, Artificial Sequence
  Oligonucleotide for detection of SNP TSC0006612
tttagcggagaay

SEQ ID NO: 255100 - DNA, 13 bp, Artificial Sequence
  Oligonucleotide for detection of SNP TSC0006612
rttctccgctaaa

SEQ ID NO: 255101 - DNA, 13 bp, Artificial Sequence
  Oligonucleotide for detection of SNP TSC0006612
gttttttgttgaa

SEQ ID NO: 255102 - DNA, 13 bp, Artificial Sequence
  Oligonucleotide for detection of SNP TSC0006612
ttcaacaaaaaac

SEQ ID NO: 255103 - DNA, 13 bp, Artificial Sequence
  Oligonucleotide for detection of SNP TSC0006612
gtttttcgttgaa

SEQ ID NO: 255104 - DNA, 13 bp, Artificial Sequence
  Oligonucleotide for detection of SNP TSC0006612
ttcaacgaaaaac

SEQ ID NO: 255105 - DNA, 13 bp, Artificial Sequence
  Oligonucleotide for detection of SNP TSC0008791
gggttggggggtg

SEQ ID NO: 255106 - DNA, 13 bp, Artificial Sequence
  Oligonucleotide for detection of SNP TSC0008791
caccccccaaccc

SEQ ID NO: 255107 - DNA, 13 bp, Artificial Sequence
  Oligonucleotide for detection of SNP TSC0008791
gggttgaggggtg

SEQ ID NO: 255108 - DNA, 13 bp, Artificial Sequence
  Oligonucleotide for detection of SNP TSC0008791
cacccctcaaccc

SEQ ID NO: 255109 - DNA, 13 bp, Artificial Sequence
  Oligonucleotide for detection of SNP TSC0062168
gtttattaggtgy

SEQ ID NO: 255110 - DNA, 13 bp, Artificial Sequence
  Oligonucleotide for detection of SNP TSC0062168
rcacctaataaac

SEQ ID NO: 255111 - DNA, 13 bp, Artificial Sequence
  Oligonucleotide for detection of SNP TSC0062168
gtttatgaggtgy

SEQ ID NO: 255112 - DNA, 13 bp, Artificial Sequence
  Oligonucleotide for detection of SNP TSC0062168
rcacctcataaac

SEQ ID NO: 255113 - DNA, 13 bp, Artificial Sequence
  Oligonucleotide for detection of SNP TSC0062168
gtttattaggcgy

SEQ ID NO: 255114 - DNA, 13 bp, Artificial Sequence
  Oligonucleotide for detection of SNP TSC0062168
rcgcctaataaac

SEQ ID NO: 255115 - DNA, 13 bp, Artificial Sequence
  Oligonucleotide for detection of SNP TSC0062168
gtttacgaggtgy

SEQ ID NO: 255116 - DNA, 13 bp, Artificial Sequence
  Oligonucleotide for detection of SNP TSC0062168
rcacctcgtaaac

SEQ ID NO: 255117 - DNA, 13 bp, Artificial Sequence
  Oligonucleotide for detection of SNP TSC0062168
gtttatgaggcgy

SEQ ID NO: 255118 - DNA, 13 bp, Artificial Sequence
  Oligonucleotide for detection of SNP TSC0062168
rcgcctcataaac

SEQ ID NO: 255119 - DNA, 13 bp, Artificial Sequence
  Oligonucleotide for detection of SNP TSC0062168
gtttacgaggcgy

SEQ ID NO: 255120 - DNA, 13 bp, Artificial Sequence
  Oligonucleotide for detection of SNP TSC0062168
rcgcctcgtaaac

SEQ ID NO: 255121 - DNA, 13 bp, Artificial Sequence
  Oligonucleotide for detection of SNP TSC0062168
gtgtttggtaaay

SEQ ID NO: 255122 - DNA, 13 bp, Artificial Sequence
  Oligonucleotide for detection of SNP TSC0062168
rtttaccaaacac

SEQ ID NO: 255123 - DNA, 13 bp, Artificial Sequence
  Oligonucleotide for detection of SNP TSC0062168
gtgttttgtaaay

SEQ ID NO: 255124 - DNA, 13 bp, Artificial Sequence
  Oligonucleotide for detection of SNP TSC0062168
rtttacaaaacac

SEQ ID NO: 255125 - DNA, 13 bp, Artificial Sequence
  Oligonucleotide for detection of SNP TSC0062168
gcgtttggtaaay

SEQ ID NO: 255126 - DNA, 13 bp, Artificial Sequence
  Oligonucleotide for detection of SNP TSC0062168
rtttaccaaacgc

SEQ ID NO: 255127 - DNA, 13 bp, Artificial Sequence
  Oligonucleotide for detection of SNP TSC0062168
gcgttttgtaaay

SEQ ID NO: 255128 - DNA, 13 bp, Artificial Sequence
  Oligonucleotide for detection of SNP TSC0062168
rtttacaaaacgc

SEQ ID NO: 255129 - DNA, 13 bp, Artificial Sequence
  Oligonucleotide for detection of SNP TSC0062168
gtgtttcgtaaay

SEQ ID NO: 255130 - DNA, 13 bp, Artificial Sequence
  Oligonucleotide for detection of SNP TSC0062168
rtttacgaaacac

SEQ ID NO: 255131 - DNA, 13 bp, Artificial Sequence
  Oligonucleotide for detection of SNP TSC0062168
gcgtttcgtaaay

SEQ ID NO: 255132 - DNA, 13 bp, Artificial Sequence
  Oligonucleotide for detection of SNP TSC0062168
rtttacgaaacgc

SEQ ID NO: 255133 - DNA, 13 bp, Artificial Sequence
  Oligonucleotide for detection of SNP TSC0062169
ttagagtgaggaa

SEQ ID NO: 255134 - DNA, 13 bp, Artificial Sequence
  Oligonucleotide for detection of SNP TSC0062169
ttcctcactctaa

SEQ ID NO: 255135 - DNA, 13 bp, Artificial Sequence
  Oligonucleotide for detection of SNP TSC0062169
ttagagagaggaa

SEQ ID NO: 255136 - DNA, 13 bp, Artificial Sequence
  Oligonucleotide for detection of SNP TSC0062169
ttcctctctctaa

SEQ ID NO: 255137 - DNA, 13 bp, Artificial Sequence
  Oligonucleotide for detection of SNP TSC0062170
atttaggttatta

SEQ ID NO: 255138 - DNA, 13 bp, Artificial Sequence
  Oligonucleotide for detection of SNP TSC0062170
taataacctaaat

SEQ ID NO: 255139 - DNA, 13 bp, Artificial Sequence
  Oligonucleotide for detection of SNP TSC0062170
atttagattatta

SEQ ID NO: 255140 - DNA, 13 bp, Artificial Sequence
  Oligonucleotide for detection of SNP TSC0062170
taataatctaaat

SEQ ID NO: 255141 - DNA, 13 bp, Artificial Sequence
  Oligonucleotide for detection of SNP TSC0062171
gtattttgtagat

SEQ ID NO: 255142 - DNA, 13 bp, Artificial Sequence
  Oligonucleotide for detection of SNP TSC0062171
atctacaaaatac

SEQ ID NO: 255143 - DNA, 13 bp, Artificial Sequence
  Oligonucleotide for detection of SNP TSC0062171
gtatttcgtagat

SEQ ID NO: 255144 - DNA, 13 bp, Artificial Sequence
  Oligonucleotide for detection of SNP TSC0062171
atctacgaaatac

SEQ ID NO: 255145 - DNA, 13 bp, Artificial Sequence
  Oligonucleotide for detection of SNP TSC0062171
atttatggaatay

SEQ ID NO: 255146 - DNA, 13 bp, Artificial Sequence
  Oligonucleotide for detection of SNP TSC0062171
rtattccataaat

SEQ ID NO: 255147 - DNA, 13 bp, Artificial Sequence
  Oligonucleotide for detection of SNP TSC0062171
atttatagaatay

SEQ ID NO: 255148 - DNA, 13 bp, Artificial Sequence
  Oligonucleotide for detection of SNP TSC0062171
rtattctataaat

SEQ ID NO: 255149 - DNA, 13 bp, Artificial Sequence
  Oligonucleotide for detection of SNP TSC0062171
atttacggaatay

SEQ ID NO: 255150 - DNA, 13 bp, Artificial Sequence
  Oligonucleotide for detection of SNP TSC0062171
rtattccgtaaat

SEQ ID NO: 255151 - DNA, 13 bp, Artificial Sequence
  Oligonucleotide for detection of SNP TSC0062172
aatttatgaatag

SEQ ID NO: 255152 - DNA, 13 bp, Artificial Sequence
  Oligonucleotide for detection of SNP TSC0062172
ctattcataaatt

SEQ ID NO: 255153 - DNA, 13 bp, Artificial Sequence
  Oligonucleotide for detection of SNP TSC0062172
aatttacgaatag

SEQ ID NO: 255154 - DNA, 13 bp, Artificial Sequence
  Oligonucleotide for detection of SNP TSC0062172
ctattcgtaaatt

SEQ ID NO: 255155 - DNA, 13 bp, Artificial Sequence
  Oligonucleotide for detection of SNP TSC0062172
ttgtttgtaaatt

SEQ ID NO: 255156 - DNA, 13 bp, Artificial Sequence
  Oligonucleotide for detection of SNP TSC0062172
aatttacaaacaa

SEQ ID NO: 255157 - DNA, 13 bp, Artificial Sequence
  Oligonucleotide for detection of SNP TSC0062172
ttgtttataaatt

SEQ ID NO: 255158 - DNA, 13 bp, Artificial Sequence
  Oligonucleotide for detection of SNP TSC0062172
aatttataaacaa

SEQ ID NO: 255159 - DNA, 13 bp, Artificial Sequence
  Oligonucleotide for detection of SNP TSC0062172
ttgttcgtaaatt

SEQ ID NO: 255160 - DNA, 13 bp, Artificial Sequence
  Oligonucleotide for detection of SNP TSC0062172
aatttacgaacaa

SEQ ID NO: 255161 - DNA, 13 bp, Artificial Sequence
  Oligonucleotide for detection of SNP TSC0062173
tgggaaaaaatgy

SEQ ID NO: 255162 - DNA, 13 bp, Artificial Sequence
  Oligonucleotide for detection of SNP TSC0062173
rcattttttccca

SEQ ID NO: 255163 - DNA, 13 bp, Artificial Sequence
  Oligonucleotide for detection of SNP TSC0062173
tgggaagaaatgy

SEQ ID NO: 255164 - DNA, 13 bp, Artificial Sequence
  Oligonucleotide for detection of SNP TSC0062173
rcatttcttccca

SEQ ID NO: 255165 - DNA, 13 bp, Artificial Sequence
  Oligonucleotide for detection of SNP TSC0062174
atgaaggagaaaa

SEQ ID NO: 255166 - DNA, 13 bp, Artificial Sequence
  Oligonucleotide for detection of SNP TSC0062174
ttttctccttcat

SEQ ID NO: 255167 - DNA, 13 bp, Artificial Sequence
  Oligonucleotide for detection of SNP TSC0062174
atgaagtagaaaa

SEQ ID NO: 255168 - DNA, 13 bp, Artificial Sequence
  Oligonucleotide for detection of SNP TSC0062174
ttttctacttcat

SEQ ID NO: 255169 - DNA, 13 bp, Artificial Sequence
  Oligonucleotide for detection of SNP TSC0062175
attttattttcga

SEQ ID NO: 255170 - DNA, 13 bp, Artificial Sequence
  Oligonucleotide for detection of SNP TSC0062175
tcgaaaataaaat

SEQ ID NO: 255171 - DNA, 13 bp, Artificial Sequence
  Oligonucleotide for detection of SNP TSC0062175
attttagtttcga

SEQ ID NO: 255172 - DNA, 13 bp, Artificial Sequence
  Oligonucleotide for detection of SNP TSC0062175
tcgaaactaaaat

SEQ ID NO: 255173 - DNA, 13 bp, Artificial Sequence
  Oligonucleotide for detection of SNP TSC0062175
ttgaggataaagt

SEQ ID NO: 255174 - DNA, 13 bp, Artificial Sequence
  Oligonucleotide for detection of SNP TSC0062175
actttatcctcaa

SEQ ID NO: 255175 - DNA, 13 bp, Artificial Sequence
  Oligonucleotide for detection of SNP TSC0062175
ttgaggttaaagt

SEQ ID NO: 255176 - DNA, 13 bp, Artificial Sequence
  Oligonucleotide for detection of SNP TSC0062175
actttaacctcaa

SEQ ID NO: 255177 - DNA, 13 bp, Artificial Sequence
  Oligonucleotide for detection of SNP TSC0062175
tcgaggataaagt

SEQ ID NO: 255178 - DNA, 13 bp, Artificial Sequence
  Oligonucleotide for detection of SNP TSC0062175
actttatcctcga

SEQ ID NO: 255179 - DNA, 13 bp, Artificial Sequence
  Oligonucleotide for detection of SNP TSC0062175
tcgaggttaaagt

SEQ ID NO: 255180 - DNA, 13 bp, Artificial Sequence
  Oligonucleotide for detection of SNP TSC0062175
actttaacctcga

SEQ ID NO: 255181 - DNA, 13 bp, Artificial Sequence
  Oligonucleotide for detection of SNP TSC0062185
tattttttgttag

SEQ ID NO: 255182 - DNA, 13 bp, Artificial Sequence
  Oligonucleotide for detection of SNP TSC0062185
ctaacaaaaaata

SEQ ID NO: 255183 - DNA, 13 bp, Artificial Sequence
  Oligonucleotide for detection of SNP TSC0062185
ttggtatgagatg

SEQ ID NO: 255184 - DNA, 13 bp, Artificial Sequence
  Oligonucleotide for detection of SNP TSC0062185
catctcataccaa

SEQ ID NO: 255185 - DNA, 13 bp, Artificial Sequence
  Oligonucleotide for detection of SNP TSC0062185
ttggtaagagatg

SEQ ID NO: 255186 - DNA, 13 bp, Artificial Sequence
  Oligonucleotide for detection of SNP TSC0062185
catctcttaccaa

SEQ ID NO: 255187 - DNA, 13 bp, Artificial Sequence
  Oligonucleotide for detection of SNP TSC0062189
ataaagaaataaa

SEQ ID NO: 255188 - DNA, 13 bp, Artificial Sequence
  Oligonucleotide for detection of SNP TSC0062189
tttatttctttat

SEQ ID NO: 255189 - DNA, 13 bp, Artificial Sequence
  Oligonucleotide for detection of SNP TSC0062189
ataaaggaataaa

SEQ ID NO: 255190 - DNA, 13 bp, Artificial Sequence
  Oligonucleotide for detection of SNP TSC0062189
tttattcctttat

SEQ ID NO: 255191 - DNA, 13 bp, Artificial Sequence
  Oligonucleotide for detection of SNP TSC0062191
aaaaataattgaa

SEQ ID NO: 255192 - DNA, 13 bp, Artificial Sequence
  Oligonucleotide for detection of SNP TSC0062191
ttcaattattttt

SEQ ID NO: 255193 - DNA, 13 bp, Artificial Sequence
  Oligonucleotide for detection of SNP TSC0062191
aaaaatgattgaa

SEQ ID NO: 255194 - DNA, 13 bp, Artificial Sequence
  Oligonucleotide for detection of SNP TSC0062191
ttcaatcattttt

SEQ ID NO: 255195 - DNA, 13 bp, Artificial Sequence
  Oligonucleotide for detection of SNP TSC0062192
tttataagtgata

SEQ ID NO: 255196 - DNA, 13 bp, Artificial Sequence
  Oligonucleotide for detection of SNP TSC0062192
tatcacttataaa

SEQ ID NO: 255197 - DNA, 13 bp, Artificial Sequence
  Oligonucleotide for detection of SNP TSC0062192
tttataggtgata

SEQ ID NO: 255198 - DNA, 13 bp, Artificial Sequence
  Oligonucleotide for detection of SNP TSC0062192
tatcacctataaa

SEQ ID NO: 255199 - DNA, 13 bp, Artificial Sequence
  Oligonucleotide for detection of SNP TSC0062193
attaaatggattt

SEQ ID NO: 255200 - DNA, 13 bp, Artificial Sequence
  Oligonucleotide for detection of SNP TSC0062193
aaatccatttaat

SEQ ID NO: 255201 - DNA, 13 bp, Artificial Sequence
  Oligonucleotide for detection of SNP TSC0062193
attaaacggattt

SEQ ID NO: 255202 - DNA, 13 bp, Artificial Sequence
  Oligonucleotide for detection of SNP TSC0062193
aaatccgtttaat

SEQ ID NO: 255203 - DNA, 13 bp, Artificial Sequence
  Oligonucleotide for detection of SNP TSC0062193
aagtttgtttggt

SEQ ID NO: 255204 - DNA, 13 bp, Artificial Sequence
  Oligonucleotide for detection of SNP TSC0062193
accaaacaaactt

SEQ ID NO: 255205 - DNA, 13 bp, Artificial Sequence
  Oligonucleotide for detection of SNP TSC0062193
aagtttatttggt

SEQ ID NO: 255206 - DNA, 13 bp, Artificial Sequence
  Oligonucleotide for detection of SNP TSC0062193
accaaataaactt

SEQ ID NO: 255207 - DNA, 13 bp, Artificial Sequence
  Oligonucleotide for detection of SNP TSC0062193
aagttcgtttggt

SEQ ID NO: 255208 - DNA, 13 bp, Artificial Sequence
  Oligonucleotide for detection of SNP TSC0062193
accaaacgaactt

SEQ ID NO: 255209 - DNA, 13 bp, Artificial Sequence
  Oligonucleotide for detection of SNP TSC0062195
aaagtagtttaaa

SEQ ID NO: 255210 - DNA, 13 bp, Artificial Sequence
  Oligonucleotide for detection of SNP TSC0062195
tttaaactacttt

SEQ ID NO: 255211 - DNA, 13 bp, Artificial Sequence
  Oligonucleotide for detection of SNP TSC0062195
aaagtaatttaaa

SEQ ID NO: 255212 - DNA, 13 bp, Artificial Sequence
  Oligonucleotide for detection of SNP TSC0062195
tttaaattacttt

SEQ ID NO: 255213 - DNA, 13 bp, Artificial Sequence
  Oligonucleotide for detection of SNP TSC0062198
ttttggtgtagat

SEQ ID NO: 255214 - DNA, 13 bp, Artificial Sequence
  Oligonucleotide for detection of SNP TSC0062198
atctacaccaaaa

SEQ ID NO: 255215 - DNA, 13 bp, Artificial Sequence
  Oligonucleotide for detection of SNP TSC0062198
ttttggcgtagat

SEQ ID NO: 255216 - DNA, 13 bp, Artificial Sequence
  Oligonucleotide for detection of SNP TSC0062198
atctacgccaaaa

SEQ ID NO: 255217 - DNA, 13 bp, Artificial Sequence
  Oligonucleotide for detection of SNP TSC0062198
atttacgttaaaa

SEQ ID NO: 255218 - DNA, 13 bp, Artificial Sequence
  Oligonucleotide for detection of SNP TSC0062198
ttttaacgtaaat

SEQ ID NO: 255219 - DNA, 13 bp, Artificial Sequence
  Oligonucleotide for detection of SNP TSC0062199
tgatttatattta

SEQ ID NO: 255220 - DNA, 13 bp, Artificial Sequence
  Oligonucleotide for detection of SNP TSC0062199
taaatataaatca

SEQ ID NO: 255221 - DNA, 13 bp, Artificial Sequence
  Oligonucleotide for detection of SNP TSC0062199
tgatttttattta

SEQ ID NO: 255222 - DNA, 13 bp, Artificial Sequence
  Oligonucleotide for detection of SNP TSC0062199
taaataaaaatca

SEQ ID NO: 255223 - DNA, 13 bp, Artificial Sequence
  Oligonucleotide for detection of SNP TSC0062199
tgggtatagatta

SEQ ID NO: 255224 - DNA, 13 bp, Artificial Sequence
  Oligonucleotide for detection of SNP TSC0062199
taatctataccca

SEQ ID NO: 255225 - DNA, 13 bp, Artificial Sequence
  Oligonucleotide for detection of SNP TSC0062199
tgggtagagatta

SEQ ID NO: 255226 - DNA, 13 bp, Artificial Sequence
  Oligonucleotide for detection of SNP TSC0062199
taatctctaccca

SEQ ID NO: 255227 - DNA, 13 bp, Artificial Sequence
  Oligonucleotide for detection of SNP TSC0062200
ttttgtatgtaay

SEQ ID NO: 255228 - DNA, 13 bp, Artificial Sequence
  Oligonucleotide for detection of SNP TSC0062200
rttacatacaaaa

SEQ ID NO: 255229 - DNA, 13 bp, Artificial Sequence
  Oligonucleotide for detection of SNP TSC0062200
ttttgtttgtaay

SEQ ID NO: 255230 - DNA, 13 bp, Artificial Sequence
  Oligonucleotide for detection of SNP TSC0062200
rttacaaacaaaa

SEQ ID NO: 255231 - DNA, 13 bp, Artificial Sequence
  Oligonucleotide for detection of SNP TSC0062200
gttatatataaga

SEQ ID NO: 255232 - DNA, 13 bp, Artificial Sequence
  Oligonucleotide for detection of SNP TSC0062200
tcttatatataac

SEQ ID NO: 255233 - DNA, 13 bp, Artificial Sequence
  Oligonucleotide for detection of SNP TSC0062200
gttatagataaga

SEQ ID NO: 255234 - DNA, 13 bp, Artificial Sequence
  Oligonucleotide for detection of SNP TSC0062200
tcttatctataac

SEQ ID NO: 255235 - DNA, 13 bp, Artificial Sequence
  Oligonucleotide for detection of SNP TSC0062201
ttagttagttatt

SEQ ID NO: 255236 - DNA, 13 bp, Artificial Sequence
  Oligonucleotide for detection of SNP TSC0062201
aataactaactaa

SEQ ID NO: 255237 - DNA, 13 bp, Artificial Sequence
  Oligonucleotide for detection of SNP TSC0062201
ttagttggttatt

SEQ ID NO: 255238 - DNA, 13 bp, Artificial Sequence
  Oligonucleotide for detection of SNP TSC0062201
aataaccaactaa

SEQ ID NO: 255239 - DNA, 13 bp, Artificial Sequence
  Oligonucleotide for detection of SNP TSC0062207
tgatttagtaatt

SEQ ID NO: 255240 - DNA, 13 bp, Artificial Sequence
  Oligonucleotide for detection of SNP TSC0062207
aattactaaatca

SEQ ID NO: 255241 - DNA, 13 bp, Artificial Sequence
  Oligonucleotide for detection of SNP TSC0062207
tgattttgtaatt

SEQ ID NO: 255242 - DNA, 13 bp, Artificial Sequence
  Oligonucleotide for detection of SNP TSC0062207
aattacaaaatca

SEQ ID NO: 255243 - DNA, 13 bp, Artificial Sequence
  Oligonucleotide for detection of SNP TSC0062207
tgatttcgtaatt

SEQ ID NO: 255244 - DNA, 13 bp, Artificial Sequence
  Oligonucleotide for detection of SNP TSC0062207
aattacgaaatca

SEQ ID NO: 255245 - DNA, 13 bp, Artificial Sequence
  Oligonucleotide for detection of SNP TSC0062207
aattgttgagtta

SEQ ID NO: 255246 - DNA, 13 bp, Artificial Sequence
  Oligonucleotide for detection of SNP TSC0062207
taactcaacaatt

SEQ ID NO: 255247 - DNA, 13 bp, Artificial Sequence
  Oligonucleotide for detection of SNP TSC0062207
aattgtggagtta

SEQ ID NO: 255248 - DNA, 13 bp, Artificial Sequence
  Oligonucleotide for detection of SNP TSC0062207
taactccacaatt

SEQ ID NO: 255249 - DNA, 13 bp, Artificial Sequence
  Oligonucleotide for detection of SNP TSC0062207
aattgcggagtta

SEQ ID NO: 255250 - DNA, 13 bp, Artificial Sequence
  Oligonucleotide for detection of SNP TSC0062207
taactccgcaatt

SEQ ID NO: 255251 - DNA, 13 bp, Artificial Sequence
  Oligonucleotide for detection of SNP TSC0010490
gtttgttgaggtt

SEQ ID NO: 255252 - DNA, 13 bp, Artificial Sequence
  Oligonucleotide for detection of SNP TSC0010490
aacctcaacaaac

SEQ ID NO: 255253 - DNA, 13 bp, Artificial Sequence
  Oligonucleotide for detection of SNP TSC0010490
gtttgtcgaggtt

SEQ ID NO: 255254 - DNA, 13 bp, Artificial Sequence
  Oligonucleotide for detection of SNP TSC0010490
aacctcgacaaac

SEQ ID NO: 255255 - DNA, 13 bp, Artificial Sequence
  Oligonucleotide for detection of SNP TSC0010490
agttttgataaay

SEQ ID NO: 255256 - DNA, 13 bp, Artificial Sequence
  Oligonucleotide for detection of SNP TSC0010490
rtttatcaaaact

SEQ ID NO: 255257 - DNA, 13 bp, Artificial Sequence
  Oligonucleotide for detection of SNP TSC0010490
agttttaataaay

SEQ ID NO: 255258 - DNA, 13 bp, Artificial Sequence
  Oligonucleotide for detection of SNP TSC0010490
rtttattaaaact

SEQ ID NO: 255259 - DNA, 13 bp, Artificial Sequence
  Oligonucleotide for detection of SNP TSC0010490
agtttcgataaay

SEQ ID NO: 255260 - DNA, 13 bp, Artificial Sequence
  Oligonucleotide for detection of SNP TSC0010490
rtttatcgaaact

SEQ ID NO: 255261 - DNA, 13 bp, Artificial Sequence
  Oligonucleotide for detection of SNP TSC0062211
gttatttggttay

SEQ ID NO: 255262 - DNA, 13 bp, Artificial Sequence
  Oligonucleotide for detection of SNP TSC0062211
rtaaccaaataac

SEQ ID NO: 255263 - DNA, 13 bp, Artificial Sequence
  Oligonucleotide for detection of SNP TSC0062211
gttattcggttay

SEQ ID NO: 255264 - DNA, 13 bp, Artificial Sequence
  Oligonucleotide for detection of SNP TSC0062211
rtaaccgaataac

SEQ ID NO: 255265 - DNA, 13 bp, Artificial Sequence
  Oligonucleotide for detection of SNP TSC0062211
gtaattgaatggy

SEQ ID NO: 255266 - DNA, 13 bp, Artificial Sequence
  Oligonucleotide for detection of SNP TSC0062211
rccattcaattac

SEQ ID NO: 255267 - DNA, 13 bp, Artificial Sequence
  Oligonucleotide for detection of SNP TSC0062211
gtaattaaatggy

SEQ ID NO: 255268 - DNA, 13 bp, Artificial Sequence
  Oligonucleotide for detection of SNP TSC0062211
rccatttaattac

SEQ ID NO: 255269 - DNA, 13 bp, Artificial Sequence
  Oligonucleotide for detection of SNP TSC0062211
gtaatcgaatggy

SEQ ID NO: 255270 - DNA, 13 bp, Artificial Sequence
  Oligonucleotide for detection of SNP TSC0062211
rccattcgattac

SEQ ID NO: 255271 - DNA, 13 bp, Artificial Sequence
  Oligonucleotide for detection of SNP TSC0006687
tttataatataga

SEQ ID NO: 255272 - DNA, 13 bp, Artificial Sequence
  Oligonucleotide for detection of SNP TSC0006687
tctatattataaa

SEQ ID NO: 255273 - DNA, 13 bp, Artificial Sequence
  Oligonucleotide for detection of SNP TSC0006687
tttatagtataga

SEQ ID NO: 255274 - DNA, 13 bp, Artificial Sequence
  Oligonucleotide for detection of SNP TSC0006687
tctatactataaa

SEQ ID NO: 255275 - DNA, 13 bp, Artificial Sequence
  Oligonucleotide for detection of SNP TSC0062216
agagttatggtay

SEQ ID NO: 255276 - DNA, 13 bp, Artificial Sequence
  Oligonucleotide for detection of SNP TSC0062216
rtaccataactct

SEQ ID NO: 255277 - DNA, 13 bp, Artificial Sequence
  Oligonucleotide for detection of SNP TSC0062216
agagttgtggtay

SEQ ID NO: 255278 - DNA, 13 bp, Artificial Sequence
  Oligonucleotide for detection of SNP TSC0062216
rtaccacaactct

SEQ ID NO: 255279 - DNA, 13 bp, Artificial Sequence
  Oligonucleotide for detection of SNP TSC0062216
agagttacggtay

SEQ ID NO: 255280 - DNA, 13 bp, Artificial Sequence
  Oligonucleotide for detection of SNP TSC0062216
rtaccgtaactct

SEQ ID NO: 255281 - DNA, 13 bp, Artificial Sequence
  Oligonucleotide for detection of SNP TSC0062216
agagtcgtggtay

SEQ ID NO: 255282 - DNA, 13 bp, Artificial Sequence
  Oligonucleotide for detection of SNP TSC0062216
rtaccacgactct

SEQ ID NO: 255283 - DNA, 13 bp, Artificial Sequence
  Oligonucleotide for detection of SNP TSC0062216
agagttgcggtay

SEQ ID NO: 255284 - DNA, 13 bp, Artificial Sequence
  Oligonucleotide for detection of SNP TSC0062216
rtaccgcaactct

SEQ ID NO: 255285 - DNA, 13 bp, Artificial Sequence
  Oligonucleotide for detection of SNP TSC0062216
agagtcgcggtay

SEQ ID NO: 255286 - DNA, 13 bp, Artificial Sequence
  Oligonucleotide for detection of SNP TSC0062216
rtaccgcgactct

SEQ ID NO: 255287 - DNA, 13 bp, Artificial Sequence
  Oligonucleotide for detection of SNP TSC0062216
gtgttgtggtttt

SEQ ID NO: 255288 - DNA, 13 bp, Artificial Sequence
  Oligonucleotide for detection of SNP TSC0062216
aaaaccacaacac

SEQ ID NO: 255289 - DNA, 13 bp, Artificial Sequence
  Oligonucleotide for detection of SNP TSC0062216
gtgtcgtggtttt

SEQ ID NO: 255290 - DNA, 13 bp, Artificial Sequence
  Oligonucleotide for detection of SNP TSC0062216
aaaaccacgacac

SEQ ID NO: 255291 - DNA, 13 bp, Artificial Sequence
  Oligonucleotide for detection of SNP TSC0062216
gtgttgcggtttt

SEQ ID NO: 255292 - DNA, 13 bp, Artificial Sequence
  Oligonucleotide for detection of SNP TSC0062216
aaaaccgcaacac

SEQ ID NO: 255293 - DNA, 13 bp, Artificial Sequence
  Oligonucleotide for detection of SNP TSC0062216
gtgtcgcggtttt

SEQ ID NO: 255294 - DNA, 13 bp, Artificial Sequence
  Oligonucleotide for detection of SNP TSC0062216
aaaaccgcgacac

SEQ ID NO: 255295 - DNA, 13 bp, Artificial Sequence
  Oligonucleotide for detection of SNP TSC0062217
aggtgggaaatta

SEQ ID NO: 255296 - DNA, 13 bp, Artificial Sequence
  Oligonucleotide for detection of SNP TSC0062217
taatttcccacct

SEQ ID NO: 255297 - DNA, 13 bp, Artificial Sequence
  Oligonucleotide for detection of SNP TSC0062217
aggtggaaaatta

SEQ ID NO: 255298 - DNA, 13 bp, Artificial Sequence
  Oligonucleotide for detection of SNP TSC0062217
taattttccacct

SEQ ID NO: 255299 - DNA, 13 bp, Artificial Sequence
  Oligonucleotide for detection of SNP TSC0062218
agaaatgatttta

SEQ ID NO: 255300 - DNA, 13 bp, Artificial Sequence
  Oligonucleotide for detection of SNP TSC0062218
taaaatcatttct

SEQ ID NO: 255301 - DNA, 13 bp, Artificial Sequence
  Oligonucleotide for detection of SNP TSC0062219
aaatttagtgtaa

SEQ ID NO: 255302 - DNA, 13 bp, Artificial Sequence
  Oligonucleotide for detection of SNP TSC0062219
ttacactaaattt

SEQ ID NO: 255303 - DNA, 13 bp, Artificial Sequence
  Oligonucleotide for detection of SNP TSC0062219
aaatttggtgtaa

SEQ ID NO: 255304 - DNA, 13 bp, Artificial Sequence
  Oligonucleotide for detection of SNP TSC0062219
ttacaccaaattt

SEQ ID NO: 255305 - DNA, 13 bp, Artificial Sequence
  Oligonucleotide for detection of SNP TSC0062219
aaattcggtgtaa

SEQ ID NO: 255306 - DNA, 13 bp, Artificial Sequence
  Oligonucleotide for detection of SNP TSC0062219
ttacaccgaattt

SEQ ID NO: 255307 - DNA, 13 bp, Artificial Sequence
  Oligonucleotide for detection of SNP TSC0062219
ttgtattggattt

SEQ ID NO: 255308 - DNA, 13 bp, Artificial Sequence
  Oligonucleotide for detection of SNP TSC0062219
aaatccaatacaa

SEQ ID NO: 255309 - DNA, 13 bp, Artificial Sequence
  Oligonucleotide for detection of SNP TSC0062219
ttgtatcggattt

SEQ ID NO: 255310 - DNA, 13 bp, Artificial Sequence
  Oligonucleotide for detection of SNP TSC0062219
aaatccgatacaa

SEQ ID NO: 255311 - DNA, 13 bp, Artificial Sequence
  Oligonucleotide for detection of SNP TSC0062220
agtgatagtagay

SEQ ID NO: 255312 - DNA, 13 bp, Artificial Sequence
  Oligonucleotide for detection of SNP TSC0062220
rtctactatcact

SEQ ID NO: 255313 - DNA, 13 bp, Artificial Sequence
  Oligonucleotide for detection of SNP TSC0062220
agtgatggtagay

SEQ ID NO: 255314 - DNA, 13 bp, Artificial Sequence
  Oligonucleotide for detection of SNP TSC0062220
rtctaccatcact

SEQ ID NO: 255315 - DNA, 13 bp, Artificial Sequence
  Oligonucleotide for detection of SNP TSC0062220
agtgacggtagay

SEQ ID NO: 255316 - DNA, 13 bp, Artificial Sequence
  Oligonucleotide for detection of SNP TSC0062220
rtctaccgtcact

SEQ ID NO: 255317 - DNA, 13 bp, Artificial Sequence
  Oligonucleotide for detection of SNP TSC0062220
gtttgttgttatt

SEQ ID NO: 255318 - DNA, 13 bp, Artificial Sequence
  Oligonucleotide for detection of SNP TSC0062220
aataacaacaaac

SEQ ID NO: 255319 - DNA, 13 bp, Artificial Sequence
  Oligonucleotide for detection of SNP TSC0062220
gtttgtcgttatt

SEQ ID NO: 255320 - DNA, 13 bp, Artificial Sequence
  Oligonucleotide for detection of SNP TSC0062220
aataacgacaaac

SEQ ID NO: 255321 - DNA, 13 bp, Artificial Sequence
  Oligonucleotide for detection of SNP TSC0062227
atttatggaagtt

SEQ ID NO: 255322 - DNA, 13 bp, Artificial Sequence
  Oligonucleotide for detection of SNP TSC0062227
aacttccataaat

SEQ ID NO: 255323 - DNA, 13 bp, Artificial Sequence
  Oligonucleotide for detection of SNP TSC0062227
atttacggaagtt

SEQ ID NO: 255324 - DNA, 13 bp, Artificial Sequence
  Oligonucleotide for detection of SNP TSC0062227
aacttccgtaaat

SEQ ID NO: 255325 - DNA, 13 bp, Artificial Sequence
  Oligonucleotide for detection of SNP TSC0062228
ttatgtaaatatg

SEQ ID NO: 255326 - DNA, 13 bp, Artificial Sequence
  Oligonucleotide for detection of SNP TSC0062228
catatttacataa

SEQ ID NO: 255327 - DNA, 13 bp, Artificial Sequence
  Oligonucleotide for detection of SNP TSC0062228
ttatgtgaatatg

SEQ ID NO: 255328 - DNA, 13 bp, Artificial Sequence
  Oligonucleotide for detection of SNP TSC0062228
catattcacataa

SEQ ID NO: 255329 - DNA, 13 bp, Artificial Sequence
  Oligonucleotide for detection of SNP TSC0062230
ttttaggttttgy

SEQ ID NO: 255330 - DNA, 13 bp, Artificial Sequence
  Oligonucleotide for detection of SNP TSC0062230
rcaaaacctaaaa

SEQ ID NO: 255331 - DNA, 13 bp, Artificial Sequence
  Oligonucleotide for detection of SNP TSC0062230
ttttagattttgy

SEQ ID NO: 255332 - DNA, 13 bp, Artificial Sequence
  Oligonucleotide for detection of SNP TSC0062230
rcaaaatctaaaa

SEQ ID NO: 255333 - DNA, 13 bp, Artificial Sequence
  Oligonucleotide for detection of SNP TSC0062232
taataattataat

SEQ ID NO: 255334 - DNA, 13 bp, Artificial Sequence
  Oligonucleotide for detection of SNP TSC0062232
attataattatta

SEQ ID NO: 255335 - DNA, 13 bp, Artificial Sequence
  Oligonucleotide for detection of SNP TSC0062232
taataagtataat

SEQ ID NO: 255336 - DNA, 13 bp, Artificial Sequence
  Oligonucleotide for detection of SNP TSC0062232
attatacttatta

SEQ ID NO: 255337 - DNA, 13 bp, Artificial Sequence
  Oligonucleotide for detection of SNP TSC0062232
attgtagttgtta

SEQ ID NO: 255338 - DNA, 13 bp, Artificial Sequence
  Oligonucleotide for detection of SNP TSC0062232
taacaactacaat

SEQ ID NO: 255339 - DNA, 13 bp, Artificial Sequence
  Oligonucleotide for detection of SNP TSC0062232
attgtatttgtta

SEQ ID NO: 255340 - DNA, 13 bp, Artificial Sequence
  Oligonucleotide for detection of SNP TSC0062232
taacaaatacaat

SEQ ID NO: 255341 - DNA, 13 bp, Artificial Sequence
  Oligonucleotide for detection of SNP TSC0062233
ttatagatttatt

SEQ ID NO: 255342 - DNA, 13 bp, Artificial Sequence
  Oligonucleotide for detection of SNP TSC0062233
aataaatctataa

SEQ ID NO: 255343 - DNA, 13 bp, Artificial Sequence
  Oligonucleotide for detection of SNP TSC0062233
ttataggtttatt

SEQ ID NO: 255344 - DNA, 13 bp, Artificial Sequence
  Oligonucleotide for detection of SNP TSC0062233
aataaacctataa

SEQ ID NO: 255345 - DNA, 13 bp, Artificial Sequence
  Oligonucleotide for detection of SNP TSC0062236
gttttataagtag

SEQ ID NO: 255346 - DNA, 13 bp, Artificial Sequence
  Oligonucleotide for detection of SNP TSC0062236
ctacttataaaac

SEQ ID NO: 255347 - DNA, 13 bp, Artificial Sequence
  Oligonucleotide for detection of SNP TSC0062236
gttttagaagtag

SEQ ID NO: 255348 - DNA, 13 bp, Artificial Sequence
  Oligonucleotide for detection of SNP TSC0062236
ctacttctaaaac

SEQ ID NO: 255349 - DNA, 13 bp, Artificial Sequence
  Oligonucleotide for detection of SNP TSC0062236
ttgtttatgaagy

SEQ ID NO: 255350 - DNA, 13 bp, Artificial Sequence
  Oligonucleotide for detection of SNP TSC0062236
rcttcataaacaa

SEQ ID NO: 255351 - DNA, 13 bp, Artificial Sequence
  Oligonucleotide for detection of SNP TSC0062236
ttgtttttgaagy

SEQ ID NO: 255352 - DNA, 13 bp, Artificial Sequence
  Oligonucleotide for detection of SNP TSC0062236
rcttcaaaaacaa

SEQ ID NO: 255353 - DNA, 13 bp, Artificial Sequence
  Oligonucleotide for detection of SNP TSC0062237
agttgagtttagt

SEQ ID NO: 255354 - DNA, 13 bp, Artificial Sequence
  Oligonucleotide for detection of SNP TSC0062237
actaaactcaact

SEQ ID NO: 255355 - DNA, 13 bp, Artificial Sequence
  Oligonucleotide for detection of SNP TSC0062237
agttgaatttagt

SEQ ID NO: 255356 - DNA, 13 bp, Artificial Sequence
  Oligonucleotide for detection of SNP TSC0062237
actaaattcaact

SEQ ID NO: 255357 - DNA, 13 bp, Artificial Sequence
  Oligonucleotide for detection of SNP TSC0062238
gaattatggggaa

SEQ ID NO: 255358 - DNA, 13 bp, Artificial Sequence
  Oligonucleotide for detection of SNP TSC0062238
ttccccataattc

SEQ ID NO: 255359 - DNA, 13 bp, Artificial Sequence
  Oligonucleotide for detection of SNP TSC0062238
gaattacggggaa

SEQ ID NO: 255360 - DNA, 13 bp, Artificial Sequence
  Oligonucleotide for detection of SNP TSC0062238
ttccccgtaattc

SEQ ID NO: 255361 - DNA, 13 bp, Artificial Sequence
  Oligonucleotide for detection of SNP TSC0062239
ttttgagagagty

SEQ ID NO: 255362 - DNA, 13 bp, Artificial Sequence
  Oligonucleotide for detection of SNP TSC0062239
ractctctcaaaa

SEQ ID NO: 255363 - DNA, 13 bp, Artificial Sequence
  Oligonucleotide for detection of SNP TSC0062239
ttttgaaagagty

SEQ ID NO: 255364 - DNA, 13 bp, Artificial Sequence
  Oligonucleotide for detection of SNP TSC0062239
ractctttcaaaa

SEQ ID NO: 255365 - DNA, 13 bp, Artificial Sequence
  Oligonucleotide for detection of SNP TSC0062240
agagaggtttggg

SEQ ID NO: 255366 - DNA, 13 bp, Artificial Sequence
  Oligonucleotide for detection of SNP TSC0062240
cccaaacctctct

SEQ ID NO: 255367 - DNA, 13 bp, Artificial Sequence
  Oligonucleotide for detection of SNP TSC0062240
agagagttttggg

SEQ ID NO: 255368 - DNA, 13 bp, Artificial Sequence
  Oligonucleotide for detection of SNP TSC0062240
cccaaaactctct

SEQ ID NO: 255369 - DNA, 13 bp, Artificial Sequence
  Oligonucleotide for detection of SNP TSC0062241
agtggtagtggtt

SEQ ID NO: 255370 - DNA, 13 bp, Artificial Sequence
  Oligonucleotide for detection of SNP TSC0062241
aaccactaccact

SEQ ID NO: 255371 - DNA, 13 bp, Artificial Sequence
  Oligonucleotide for detection of SNP TSC0062241
agtggtggtggtt

SEQ ID NO: 255372 - DNA, 13 bp, Artificial Sequence
  Oligonucleotide for detection of SNP TSC0062241
aaccaccaccact

SEQ ID NO: 255373 - DNA, 13 bp, Artificial Sequence
  Oligonucleotide for detection of SNP TSC0062241
agtggcggtggtt

SEQ ID NO: 255374 - DNA, 13 bp, Artificial Sequence
  Oligonucleotide for detection of SNP TSC0062241
aaccaccgccact

SEQ ID NO: 255375 - DNA, 13 bp, Artificial Sequence
  Oligonucleotide for detection of SNP TSC0062244
gatggtaagttat

SEQ ID NO: 255376 - DNA, 13 bp, Artificial Sequence
  Oligonucleotide for detection of SNP TSC0062244
ataacttaccatc

SEQ ID NO: 255377 - DNA, 13 bp, Artificial Sequence
  Oligonucleotide for detection of SNP TSC0062244
gatggtgagttat

SEQ ID NO: 255378 - DNA, 13 bp, Artificial Sequence
  Oligonucleotide for detection of SNP TSC0062244
ataactcaccatc

SEQ ID NO: 255379 - DNA, 13 bp, Artificial Sequence
  Oligonucleotide for detection of SNP TSC0062244
gatggcgagttat

SEQ ID NO: 255380 - DNA, 13 bp, Artificial Sequence
  Oligonucleotide for detection of SNP TSC0062244
ataactcgccatc

SEQ ID NO: 255381 - DNA, 13 bp, Artificial Sequence
  Oligonucleotide for detection of SNP TSC0062244
atgatttgttaty

SEQ ID NO: 255382 - DNA, 13 bp, Artificial Sequence
  Oligonucleotide for detection of SNP TSC0062244
rataacaaatcat

SEQ ID NO: 255383 - DNA, 13 bp, Artificial Sequence
  Oligonucleotide for detection of SNP TSC0062244
atgattcgttaty

SEQ ID NO: 255384 - DNA, 13 bp, Artificial Sequence
  Oligonucleotide for detection of SNP TSC0062244
rataacgaatcat

SEQ ID NO: 255385 - DNA, 13 bp, Artificial Sequence
  Oligonucleotide for detection of SNP TSC0062245
ttggtagttatty

SEQ ID NO: 255386 - DNA, 13 bp, Artificial Sequence
  Oligonucleotide for detection of SNP TSC0062245
raataactaccaa

SEQ ID NO: 255387 - DNA, 13 bp, Artificial Sequence
  Oligonucleotide for detection of SNP TSC0062245
ttggtaattatty

SEQ ID NO: 255388 - DNA, 13 bp, Artificial Sequence
  Oligonucleotide for detection of SNP TSC0062245
raataattaccaa

SEQ ID NO: 255389 - DNA, 13 bp, Artificial Sequence
  Oligonucleotide for detection of SNP TSC0062245
tcggtagttatty

SEQ ID NO: 255390 - DNA, 13 bp, Artificial Sequence
  Oligonucleotide for detection of SNP TSC0062245
raataactaccga

SEQ ID NO: 255391 - DNA, 13 bp, Artificial Sequence
  Oligonucleotide for detection of SNP TSC0062245
tcggtaattatty

SEQ ID NO: 255392 - DNA, 13 bp, Artificial Sequence
  Oligonucleotide for detection of SNP TSC0062245
raataattaccga

SEQ ID NO: 255393 - DNA, 13 bp, Artificial Sequence
  Oligonucleotide for detection of SNP TSC0062246
aatatatgttggg

SEQ ID NO: 255394 - DNA, 13 bp, Artificial Sequence
  Oligonucleotide for detection of SNP TSC0062246
cccaacatatatt

SEQ ID NO: 255395 - DNA, 13 bp, Artificial Sequence
  Oligonucleotide for detection of SNP TSC0062246
aatataggttggg

SEQ ID NO: 255396 - DNA, 13 bp, Artificial Sequence
  Oligonucleotide for detection of SNP TSC0062246
cccaacctatatt

SEQ ID NO: 255397 - DNA, 13 bp, Artificial Sequence
  Oligonucleotide for detection of SNP TSC0062246
tttaatttgtatt

SEQ ID NO: 255398 - DNA, 13 bp, Artificial Sequence
  Oligonucleotide for detection of SNP TSC0062246
aatacaaattaaa

SEQ ID NO: 255399 - DNA, 13 bp, Artificial Sequence
  Oligonucleotide for detection of SNP TSC0008153
gtaaatttgagtg

SEQ ID NO: 255400 - DNA, 13 bp, Artificial Sequence
  Oligonucleotide for detection of SNP TSC0008153
cactcaaatttac

SEQ ID NO: 255401 - DNA, 13 bp, Artificial Sequence
  Oligonucleotide for detection of SNP TSC0008153
gtaaatgtgagtg

SEQ ID NO: 255402 - DNA, 13 bp, Artificial Sequence
  Oligonucleotide for detection of SNP TSC0008153
cactcacatttac

SEQ ID NO: 255403 - DNA, 13 bp, Artificial Sequence
  Oligonucleotide for detection of SNP TSC0008153
tatttagatttay

SEQ ID NO: 255404 - DNA, 13 bp, Artificial Sequence
  Oligonucleotide for detection of SNP TSC0008153
rtaaatctaaata

SEQ ID NO: 255405 - DNA, 13 bp, Artificial Sequence
  Oligonucleotide for detection of SNP TSC0008153
tatttatatttay

SEQ ID NO: 255406 - DNA, 13 bp, Artificial Sequence
  Oligonucleotide for detection of SNP TSC0008153
rtaaatataaata

SEQ ID NO: 255407 - DNA, 13 bp, Artificial Sequence
  Oligonucleotide for detection of SNP TSC0062248
gaatgggttattg

SEQ ID NO: 255408 - DNA, 13 bp, Artificial Sequence
  Oligonucleotide for detection of SNP TSC0062248
caataacccattc

SEQ ID NO: 255409 - DNA, 13 bp, Artificial Sequence
  Oligonucleotide for detection of SNP TSC0062248
gaatggattattg

SEQ ID NO: 255410 - DNA, 13 bp, Artificial Sequence
  Oligonucleotide for detection of SNP TSC0062248
caataatccattc

SEQ ID NO: 255411 - DNA, 13 bp, Artificial Sequence
  Oligonucleotide for detection of SNP TSC0062248
gaacgggttattg

SEQ ID NO: 255412 - DNA, 13 bp, Artificial Sequence
  Oligonucleotide for detection of SNP TSC0062248
caataacccgttc

SEQ ID NO: 255413 - DNA, 13 bp, Artificial Sequence
  Oligonucleotide for detection of SNP TSC0062248
gaacggattattg

SEQ ID NO: 255414 - DNA, 13 bp, Artificial Sequence
  Oligonucleotide for detection of SNP TSC0062248
caataatccgttc

SEQ ID NO: 255415 - DNA, 13 bp, Artificial Sequence
  Oligonucleotide for detection of SNP TSC0062251
ttatatgaattgt

SEQ ID NO: 255416 - DNA, 13 bp, Artificial Sequence
  Oligonucleotide for detection of SNP TSC0062251
acaattcatataa

SEQ ID NO: 255417 - DNA, 13 bp, Artificial Sequence
  Oligonucleotide for detection of SNP TSC0062251
ttatataaattgt

SEQ ID NO: 255418 - DNA, 13 bp, Artificial Sequence
  Oligonucleotide for detection of SNP TSC0062251
acaatttatataa

SEQ ID NO: 255419 - DNA, 13 bp, Artificial Sequence
  Oligonucleotide for detection of SNP TSC0062252
aaaaaattataga

SEQ ID NO: 255420 - DNA, 13 bp, Artificial Sequence
  Oligonucleotide for detection of SNP TSC0062252
tctataatttttt

SEQ ID NO: 255421 - DNA, 13 bp, Artificial Sequence
  Oligonucleotide for detection of SNP TSC0006720
gattttagtatat

SEQ ID NO: 255422 - DNA, 13 bp, Artificial Sequence
  Oligonucleotide for detection of SNP TSC0006720
atatactaaaatc

SEQ ID NO: 255423 - DNA, 13 bp, Artificial Sequence
  Oligonucleotide for detection of SNP TSC0006720
gattttggtatat

SEQ ID NO: 255424 - DNA, 13 bp, Artificial Sequence
  Oligonucleotide for detection of SNP TSC0006720
atataccaaaatc

SEQ ID NO: 255425 - DNA, 13 bp, Artificial Sequence
  Oligonucleotide for detection of SNP TSC0062253
tatttttgtggta

SEQ ID NO: 255426 - DNA, 13 bp, Artificial Sequence
  Oligonucleotide for detection of SNP TSC0062253
taccacaaaaata

SEQ ID NO: 255427 - DNA, 13 bp, Artificial Sequence
  Oligonucleotide for detection of SNP TSC0062253
tattttcgtggta

SEQ ID NO: 255428 - DNA, 13 bp, Artificial Sequence
  Oligonucleotide for detection of SNP TSC0062253
taccacgaaaata

SEQ ID NO: 255429 - DNA, 13 bp, Artificial Sequence
  Oligonucleotide for detection of SNP TSC0062253
tgttatgaaggtg

SEQ ID NO: 255430 - DNA, 13 bp, Artificial Sequence
  Oligonucleotide for detection of SNP TSC0062253
caccttcataaca

SEQ ID NO: 255431 - DNA, 13 bp, Artificial Sequence
  Oligonucleotide for detection of SNP TSC0062253
tgttattaaggtg

SEQ ID NO: 255432 - DNA, 13 bp, Artificial Sequence
  Oligonucleotide for detection of SNP TSC0062253
caccttaataaca

SEQ ID NO: 255433 - DNA, 13 bp, Artificial Sequence
  Oligonucleotide for detection of SNP TSC0062253
tgttacgaaggtg

SEQ ID NO: 255434 - DNA, 13 bp, Artificial Sequence
  Oligonucleotide for detection of SNP TSC0062253
caccttcgtaaca

SEQ ID NO: 255435 - DNA, 13 bp, Artificial Sequence
  Oligonucleotide for detection of SNP TSC0062254
aaggggaaagtty

SEQ ID NO: 255436 - DNA, 13 bp, Artificial Sequence
  Oligonucleotide for detection of SNP TSC0062254
raactttcccctt

SEQ ID NO: 255437 - DNA, 13 bp, Artificial Sequence
  Oligonucleotide for detection of SNP TSC0062254
aaggggtaagtty

SEQ ID NO: 255438 - DNA, 13 bp, Artificial Sequence
  Oligonucleotide for detection of SNP TSC0062254
raacttacccctt

SEQ ID NO: 255439 - DNA, 13 bp, Artificial Sequence
  Oligonucleotide for detection of SNP TSC0062255
taggttgtgtgta

SEQ ID NO: 255440 - DNA, 13 bp, Artificial Sequence
  Oligonucleotide for detection of SNP TSC0062255
tacacacaaccta

SEQ ID NO: 255441 - DNA, 13 bp, Artificial Sequence
  Oligonucleotide for detection of SNP TSC0062255
taggttatgtgta

SEQ ID NO: 255442 - DNA, 13 bp, Artificial Sequence
  Oligonucleotide for detection of SNP TSC0062255
tacacataaccta

SEQ ID NO: 255443 - DNA, 13 bp, Artificial Sequence
  Oligonucleotide for detection of SNP TSC0062256
agatttgatatat

SEQ ID NO: 255444 - DNA, 13 bp, Artificial Sequence
  Oligonucleotide for detection of SNP TSC0062256
atatatcaaatct

SEQ ID NO: 255445 - DNA, 13 bp, Artificial Sequence
  Oligonucleotide for detection of SNP TSC0062256
agatttaatatat

SEQ ID NO: 255446 - DNA, 13 bp, Artificial Sequence
  Oligonucleotide for detection of SNP TSC0062256
atatattaaatct

SEQ ID NO: 255447 - DNA, 13 bp, Artificial Sequence
  Oligonucleotide for detection of SNP TSC0062257
gtgtatatgtagt

SEQ ID NO: 255448 - DNA, 13 bp, Artificial Sequence
  Oligonucleotide for detection of SNP TSC0062257
actacatatacac

SEQ ID NO: 255449 - DNA, 13 bp, Artificial Sequence
  Oligonucleotide for detection of SNP TSC0062257
gtgtatttgtagt

SEQ ID NO: 255450 - DNA, 13 bp, Artificial Sequence
  Oligonucleotide for detection of SNP TSC0062257
actacaaatacac

SEQ ID NO: 255451 - DNA, 13 bp, Artificial Sequence
  Oligonucleotide for detection of SNP TSC0062257
attatatgtgtay

SEQ ID NO: 255452 - DNA, 13 bp, Artificial Sequence
  Oligonucleotide for detection of SNP TSC0062257
rtacacatataat

SEQ ID NO: 255453 - DNA, 13 bp, Artificial Sequence
  Oligonucleotide for detection of SNP TSC0007555
gatataaatatat

SEQ ID NO: 255454 - DNA, 13 bp, Artificial Sequence
  Oligonucleotide for detection of SNP TSC0007555
atatatttatatc

SEQ ID NO: 255455 - DNA, 13 bp, Artificial Sequence
  Oligonucleotide for detection of SNP TSC0007555
gatatatatatat

SEQ ID NO: 255456 - DNA, 13 bp, Artificial Sequence
  Oligonucleotide for detection of SNP TSC0007555
atatatatatatc

SEQ ID NO: 255457 - DNA, 13 bp, Artificial Sequence
  Oligonucleotide for detection of SNP TSC0062260
attagatggtagt

SEQ ID NO: 255458 - DNA, 13 bp, Artificial Sequence
  Oligonucleotide for detection of SNP TSC0062260
actaccatctaat

SEQ ID NO: 255459 - DNA, 13 bp, Artificial Sequence
  Oligonucleotide for detection of SNP TSC0062260
attagagggtagt

SEQ ID NO: 255460 - DNA, 13 bp, Artificial Sequence
  Oligonucleotide for detection of SNP TSC0062260
actaccctctaat

SEQ ID NO: 255461 - DNA, 13 bp, Artificial Sequence
  Oligonucleotide for detection of SNP TSC0062260
attgttatttggt

SEQ ID NO: 255462 - DNA, 13 bp, Artificial Sequence
  Oligonucleotide for detection of SNP TSC0062260
accaaataacaat

SEQ ID NO: 255463 - DNA, 13 bp, Artificial Sequence
  Oligonucleotide for detection of SNP TSC0062260
attgttttttggt

SEQ ID NO: 255464 - DNA, 13 bp, Artificial Sequence
  Oligonucleotide for detection of SNP TSC0062260
accaaaaaacaat

SEQ ID NO: 255465 - DNA, 13 bp, Artificial Sequence
  Oligonucleotide for detection of SNP TSC0062261
gtattaatatgtt

SEQ ID NO: 255466 - DNA, 13 bp, Artificial Sequence
  Oligonucleotide for detection of SNP TSC0062261
aacatattaatac

SEQ ID NO: 255467 - DNA, 13 bp, Artificial Sequence
  Oligonucleotide for detection of SNP TSC0062261
gtattattatgtt

SEQ ID NO: 255468 - DNA, 13 bp, Artificial Sequence
  Oligonucleotide for detection of SNP TSC0062261
aacataataatac

SEQ ID NO: 255469 - DNA, 13 bp, Artificial Sequence
  Oligonucleotide for detection of SNP TSC0062261
aatatattgatgy

SEQ ID NO: 255470 - DNA, 13 bp, Artificial Sequence
  Oligonucleotide for detection of SNP TSC0062261
rcatcaatatatt

SEQ ID NO: 255471 - DNA, 13 bp, Artificial Sequence
  Oligonucleotide for detection of SNP TSC0062261
aatataatgatgy

SEQ ID NO: 255472 - DNA, 13 bp, Artificial Sequence
  Oligonucleotide for detection of SNP TSC0062261
rcatcattatatt

SEQ ID NO: 255473 - DNA, 13 bp, Artificial Sequence
  Oligonucleotide for detection of SNP TSC0007840
taagatagtagay

SEQ ID NO: 255474 - DNA, 13 bp, Artificial Sequence
  Oligonucleotide for detection of SNP TSC0007840
rtctactatctta

SEQ ID NO: 255475 - DNA, 13 bp, Artificial Sequence
  Oligonucleotide for detection of SNP TSC0007840
taagattgtagay

SEQ ID NO: 255476 - DNA, 13 bp, Artificial Sequence
  Oligonucleotide for detection of SNP TSC0007840
rtctacaatctta

SEQ ID NO: 255477 - DNA, 13 bp, Artificial Sequence
  Oligonucleotide for detection of SNP TSC0007840
taagatggtagay

SEQ ID NO: 255478 - DNA, 13 bp, Artificial Sequence
  Oligonucleotide for detection of SNP TSC0007840
rtctaccatctta

SEQ ID NO: 255479 - DNA, 13 bp, Artificial Sequence
  Oligonucleotide for detection of SNP TSC0007840
taagatcgtagay

SEQ ID NO: 255480 - DNA, 13 bp, Artificial Sequence
  Oligonucleotide for detection of SNP TSC0007840
rtctacgatctta

SEQ ID NO: 255481 - DNA, 13 bp, Artificial Sequence
  Oligonucleotide for detection of SNP TSC0007840
gtttgtgattttg

SEQ ID NO: 255482 - DNA, 13 bp, Artificial Sequence
  Oligonucleotide for detection of SNP TSC0007840
caaaatcacaaac

SEQ ID NO: 255483 - DNA, 13 bp, Artificial Sequence
  Oligonucleotide for detection of SNP TSC0007840
gtttgcgattttg

SEQ ID NO: 255484 - DNA, 13 bp, Artificial Sequence
  Oligonucleotide for detection of SNP TSC0007840
caaaatcgcaaac

SEQ ID NO: 255485 - DNA, 13 bp, Artificial Sequence
  Oligonucleotide for detection of SNP TSC0007841
gaaaagaggatgg

SEQ ID NO: 255486 - DNA, 13 bp, Artificial Sequence
  Oligonucleotide for detection of SNP TSC0007841
ccatcctcttttc

SEQ ID NO: 255487 - DNA, 13 bp, Artificial Sequence
  Oligonucleotide for detection of SNP TSC0007841
gaaaaggggatgg

SEQ ID NO: 255488 - DNA, 13 bp, Artificial Sequence
  Oligonucleotide for detection of SNP TSC0007841
ccatccccttttc

SEQ ID NO: 255489 - DNA, 13 bp, Artificial Sequence
  Oligonucleotide for detection of SNP TSC0062265
tttatatggtgaa

SEQ ID NO: 255490 - DNA, 13 bp, Artificial Sequence
  Oligonucleotide for detection of SNP TSC0062265
ttcaccatataaa

SEQ ID NO: 255491 - DNA, 13 bp, Artificial Sequence
  Oligonucleotide for detection of SNP TSC0062265
tttatacggtgaa

SEQ ID NO: 255492 - DNA, 13 bp, Artificial Sequence
  Oligonucleotide for detection of SNP TSC0062265
ttcaccgtataaa

SEQ ID NO: 255493 - DNA, 13 bp, Artificial Sequence
  Oligonucleotide for detection of SNP TSC0007083
aaatggaattttg

SEQ ID NO: 255494 - DNA, 13 bp, Artificial Sequence
  Oligonucleotide for detection of SNP TSC0007083
caaaattccattt

SEQ ID NO: 255495 - DNA, 13 bp, Artificial Sequence
  Oligonucleotide for detection of SNP TSC0007083
aaatggtattttg

SEQ ID NO: 255496 - DNA, 13 bp, Artificial Sequence
  Oligonucleotide for detection of SNP TSC0007083
caaaataccattt

SEQ ID NO: 255497 - DNA, 13 bp, Artificial Sequence
  Oligonucleotide for detection of SNP TSC0062266
attttgcgaagtt

SEQ ID NO: 255498 - DNA, 13 bp, Artificial Sequence
  Oligonucleotide for detection of SNP TSC0062266
aacttcgcaaaat

SEQ ID NO: 255499 - DNA, 13 bp, Artificial Sequence
  Oligonucleotide for detection of SNP TSC0062266
agttttgtaagat

SEQ ID NO: 255500 - DNA, 13 bp, Artificial Sequence
  Oligonucleotide for detection of SNP TSC0062266
atcttacaaaact

SEQ ID NO: 255501 - DNA, 13 bp, Artificial Sequence
  Oligonucleotide for detection of SNP TSC0062266
agttttttaagat

SEQ ID NO: 255502 - DNA, 13 bp, Artificial Sequence
  Oligonucleotide for detection of SNP TSC0062266
atcttaaaaaact

SEQ ID NO: 255503 - DNA, 13 bp, Artificial Sequence
  Oligonucleotide for detection of SNP TSC0062266
agtttcgtaagat

SEQ ID NO: 255504 - DNA, 13 bp, Artificial Sequence
  Oligonucleotide for detection of SNP TSC0062266
atcttacgaaact

SEQ ID NO: 255505 - DNA, 13 bp, Artificial Sequence
  Oligonucleotide for detection of SNP TSC0062269
tttaagatttaty

SEQ ID NO: 255506 - DNA, 13 bp, Artificial Sequence
  Oligonucleotide for detection of SNP TSC0062269
rataaatcttaaa

SEQ ID NO: 255507 - DNA, 13 bp, Artificial Sequence
  Oligonucleotide for detection of SNP TSC0062271
gtttagataattt

SEQ ID NO: 255508 - DNA, 13 bp, Artificial Sequence
  Oligonucleotide for detection of SNP TSC0062271
aaattatctaaac

SEQ ID NO: 255509 - DNA, 13 bp, Artificial Sequence
  Oligonucleotide for detection of SNP TSC0062277
tagatggagtaga

SEQ ID NO: 255510 - DNA, 13 bp, Artificial Sequence
  Oligonucleotide for detection of SNP TSC0062277
tctactccatcta

SEQ ID NO: 255511 - DNA, 13 bp, Artificial Sequence
  Oligonucleotide for detection of SNP TSC0062277
tagatgaagtaga

SEQ ID NO: 255512 - DNA, 13 bp, Artificial Sequence
  Oligonucleotide for detection of SNP TSC0062277
tctacttcatcta

SEQ ID NO: 255513 - DNA, 13 bp, Artificial Sequence
  Oligonucleotide for detection of SNP TSC0006712
tgttttaggggtt

SEQ ID NO: 255514 - DNA, 13 bp, Artificial Sequence
  Oligonucleotide for detection of SNP TSC0006712
aacccctaaaaca

SEQ ID NO: 255515 - DNA, 13 bp, Artificial Sequence
  Oligonucleotide for detection of SNP TSC0006712
tgttttgggggtt

SEQ ID NO: 255516 - DNA, 13 bp, Artificial Sequence
  Oligonucleotide for detection of SNP TSC0006712
aacccccaaaaca

SEQ ID NO: 255517 - DNA, 13 bp, Artificial Sequence
  Oligonucleotide for detection of SNP TSC0006712
tgtttcgggggtt

SEQ ID NO: 255518 - DNA, 13 bp, Artificial Sequence
  Oligonucleotide for detection of SNP TSC0006712
aacccccgaaaca

SEQ ID NO: 255519 - DNA, 13 bp, Artificial Sequence
  Oligonucleotide for detection of SNP TSC0006712
aatttttgaaata

SEQ ID NO: 255520 - DNA, 13 bp, Artificial Sequence
  Oligonucleotide for detection of SNP TSC0006712
tatttcaaaaatt

SEQ ID NO: 255521 - DNA, 13 bp, Artificial Sequence
  Oligonucleotide for detection of SNP TSC0062278
gattttgttaagt

SEQ ID NO: 255522 - DNA, 13 bp, Artificial Sequence
  Oligonucleotide for detection of SNP TSC0062278
acttaacaaaatc

SEQ ID NO: 255523 - DNA, 13 bp, Artificial Sequence
  Oligonucleotide for detection of SNP TSC0062278
gatttcgttaagt

SEQ ID NO: 255524 - DNA, 13 bp, Artificial Sequence
  Oligonucleotide for detection of SNP TSC0062278
acttaacgaaatc

SEQ ID NO: 255525 - DNA, 13 bp, Artificial Sequence
  Oligonucleotide for detection of SNP TSC0062278
atttgatggaaty

SEQ ID NO: 255526 - DNA, 13 bp, Artificial Sequence
  Oligonucleotide for detection of SNP TSC0062278
rattccatcaaat

SEQ ID NO: 255527 - DNA, 13 bp, Artificial Sequence
  Oligonucleotide for detection of SNP TSC0062278
atttgacggaaty

SEQ ID NO: 255528 - DNA, 13 bp, Artificial Sequence
  Oligonucleotide for detection of SNP TSC0062278
rattccgtcaaat

SEQ ID NO: 255529 - DNA, 13 bp, Artificial Sequence
  Oligonucleotide for detection of SNP TSC0062284
tttgagagtttaa

SEQ ID NO: 255530 - DNA, 13 bp, Artificial Sequence
  Oligonucleotide for detection of SNP TSC0062284
ttaaactctcaaa

SEQ ID NO: 255531 - DNA, 13 bp, Artificial Sequence
  Oligonucleotide for detection of SNP TSC0062284
tttgagggtttaa

SEQ ID NO: 255532 - DNA, 13 bp, Artificial Sequence
  Oligonucleotide for detection of SNP TSC0062284
ttaaaccctcaaa

SEQ ID NO: 255533 - DNA, 13 bp, Artificial Sequence
  Oligonucleotide for detection of SNP TSC0062287
atattattaattt

SEQ ID NO: 255534 - DNA, 13 bp, Artificial Sequence
  Oligonucleotide for detection of SNP TSC0062287
aaattaataatat

SEQ ID NO: 255535 - DNA, 13 bp, Artificial Sequence
  Oligonucleotide for detection of SNP TSC0062287
atattagtaattt

SEQ ID NO: 255536 - DNA, 13 bp, Artificial Sequence
  Oligonucleotide for detection of SNP TSC0062287
aaattactaatat

SEQ ID NO: 255537 - DNA, 13 bp, Artificial Sequence
  Oligonucleotide for detection of SNP TSC0062287
aggttaatagtat

SEQ ID NO: 255538 - DNA, 13 bp, Artificial Sequence
  Oligonucleotide for detection of SNP TSC0062287
atactattaacct

SEQ ID NO: 255539 - DNA, 13 bp, Artificial Sequence
  Oligonucleotide for detection of SNP TSC0062287
aggttattagtat

SEQ ID NO: 255540 - DNA, 13 bp, Artificial Sequence
  Oligonucleotide for detection of SNP TSC0062287
atactaataacct

SEQ ID NO: 255541 - DNA, 13 bp, Artificial Sequence
  Oligonucleotide for detection of SNP TSC0000899
tttgagttattty

SEQ ID NO: 255542 - DNA, 13 bp, Artificial Sequence
  Oligonucleotide for detection of SNP TSC0000899
raaataactcaaa

SEQ ID NO: 255543 - DNA, 13 bp, Artificial Sequence
  Oligonucleotide for detection of SNP TSC0000899
tttgaggtattty

SEQ ID NO: 255544 - DNA, 13 bp, Artificial Sequence
  Oligonucleotide for detection of SNP TSC0000899
raaatacctcaaa

SEQ ID NO: 255545 - DNA, 13 bp, Artificial Sequence
  Oligonucleotide for detection of SNP TSC0062290
tttgtggtattta

SEQ ID NO: 255546 - DNA, 13 bp, Artificial Sequence
  Oligonucleotide for detection of SNP TSC0062290
taaataccacaaa

SEQ ID NO: 255547 - DNA, 13 bp, Artificial Sequence
  Oligonucleotide for detection of SNP TSC0062290
tttgtgatattta

SEQ ID NO: 255548 - DNA, 13 bp, Artificial Sequence
  Oligonucleotide for detection of SNP TSC0062290
taaatatcacaaa

SEQ ID NO: 255549 - DNA, 13 bp, Artificial Sequence
  Oligonucleotide for detection of SNP TSC0010010
tgagatatgtttt

SEQ ID NO: 255550 - DNA, 13 bp, Artificial Sequence
  Oligonucleotide for detection of SNP TSC0010010
aaaacatatctca

SEQ ID NO: 255551 - DNA, 13 bp, Artificial Sequence
  Oligonucleotide for detection of SNP TSC0010010
tgagatttgtttt

SEQ ID NO: 255552 - DNA, 13 bp, Artificial Sequence
  Oligonucleotide for detection of SNP TSC0010010
aaaacaaatctca

SEQ ID NO: 255553 - DNA, 13 bp, Artificial Sequence
  Oligonucleotide for detection of SNP TSC0010010
aaggtatgtttta

SEQ ID NO: 255554 - DNA, 13 bp, Artificial Sequence
  Oligonucleotide for detection of SNP TSC0010010
taaaacatacctt

SEQ ID NO: 255555 - DNA, 13 bp, Artificial Sequence
  Oligonucleotide for detection of SNP TSC0010010
aaggtaggtttta

SEQ ID NO: 255556 - DNA, 13 bp, Artificial Sequence
  Oligonucleotide for detection of SNP TSC0010010
taaaacctacctt

SEQ ID NO: 255557 - DNA, 13 bp, Artificial Sequence
  Oligonucleotide for detection of SNP TSC0010010
aaggtaagtttta

SEQ ID NO: 255558 - DNA, 13 bp, Artificial Sequence
  Oligonucleotide for detection of SNP TSC0010010
taaaacttacctt

SEQ ID NO: 255559 - DNA, 13 bp, Artificial Sequence
  Oligonucleotide for detection of SNP TSC0010011
ttaataaggttay

SEQ ID NO: 255560 - DNA, 13 bp, Artificial Sequence
  Oligonucleotide for detection of SNP TSC0010011
rtaaccttattaa

SEQ ID NO: 255561 - DNA, 13 bp, Artificial Sequence
  Oligonucleotide for detection of SNP TSC0010011
ttaatatggttay

SEQ ID NO: 255562 - DNA, 13 bp, Artificial Sequence
  Oligonucleotide for detection of SNP TSC0010011
rtaaccatattaa

SEQ ID NO: 255563 - DNA, 13 bp, Artificial Sequence
  Oligonucleotide for detection of SNP TSC0010011
ttaatagggttay

SEQ ID NO: 255564 - DNA, 13 bp, Artificial Sequence
  Oligonucleotide for detection of SNP TSC0010011
rtaaccctattaa

SEQ ID NO: 255565 - DNA, 13 bp, Artificial Sequence
  Oligonucleotide for detection of SNP TSC0010011
gtaattttattag

SEQ ID NO: 255566 - DNA, 13 bp, Artificial Sequence
  Oligonucleotide for detection of SNP TSC0010011
ctaataaaattac

SEQ ID NO: 255567 - DNA, 13 bp, Artificial Sequence
  Oligonucleotide for detection of SNP TSC0010011
gtaattatattag

SEQ ID NO: 255568 - DNA, 13 bp, Artificial Sequence
  Oligonucleotide for detection of SNP TSC0010011
ctaatataattac

SEQ ID NO: 255569 - DNA, 13 bp, Artificial Sequence
  Oligonucleotide for detection of SNP TSC0062291
gtgagaattgttt

SEQ ID NO: 255570 - DNA, 13 bp, Artificial Sequence
  Oligonucleotide for detection of SNP TSC0062291
aaacaattctcac

SEQ ID NO: 255571 - DNA, 13 bp, Artificial Sequence
  Oligonucleotide for detection of SNP TSC0062291
gtgagatttgttt

SEQ ID NO: 255572 - DNA, 13 bp, Artificial Sequence
  Oligonucleotide for detection of SNP TSC0062291
aaacaaatctcac

SEQ ID NO: 255573 - DNA, 13 bp, Artificial Sequence
  Oligonucleotide for detection of SNP TSC0062291
gtgagagttgttt

SEQ ID NO: 255574 - DNA, 13 bp, Artificial Sequence
  Oligonucleotide for detection of SNP TSC0062291
aaacaactctcac

SEQ ID NO: 255575 - DNA, 13 bp, Artificial Sequence
  Oligonucleotide for detection of SNP TSC0062291
aggtaagttttay

SEQ ID NO: 255576 - DNA, 13 bp, Artificial Sequence
  Oligonucleotide for detection of SNP TSC0062291
rtaaaacttacct

SEQ ID NO: 255577 - DNA, 13 bp, Artificial Sequence
  Oligonucleotide for detection of SNP TSC0000923
gttaagatagtgt

SEQ ID NO: 255578 - DNA, 13 bp, Artificial Sequence
  Oligonucleotide for detection of SNP TSC0000923
acactatcttaac

SEQ ID NO: 255579 - DNA, 13 bp, Artificial Sequence
  Oligonucleotide for detection of SNP TSC0000923
gttaaggtagtgt

SEQ ID NO: 255580 - DNA, 13 bp, Artificial Sequence
  Oligonucleotide for detection of SNP TSC0000923
acactaccttaac

SEQ ID NO: 255581 - DNA, 13 bp, Artificial Sequence
  Oligonucleotide for detection of SNP TSC0000144
tgtagtagtgaty

SEQ ID NO: 255582 - DNA, 13 bp, Artificial Sequence
  Oligonucleotide for detection of SNP TSC0000144
ratcactactaca

SEQ ID NO: 255583 - DNA, 13 bp, Artificial Sequence
  Oligonucleotide for detection of SNP TSC0000144
tgtagtggtgaty

SEQ ID NO: 255584 - DNA, 13 bp, Artificial Sequence
  Oligonucleotide for detection of SNP TSC0000144
ratcaccactaca

SEQ ID NO: 255585 - DNA, 13 bp, Artificial Sequence
  Oligonucleotide for detection of SNP TSC0000145
agttggattatag

SEQ ID NO: 255586 - DNA, 13 bp, Artificial Sequence
  Oligonucleotide for detection of SNP TSC0000145
ctataatccaact

SEQ ID NO: 255587 - DNA, 13 bp, Artificial Sequence
  Oligonucleotide for detection of SNP TSC0000145
agttgggttatag

SEQ ID NO: 255588 - DNA, 13 bp, Artificial Sequence
  Oligonucleotide for detection of SNP TSC0000145
ctataacccaact

SEQ ID NO: 255589 - DNA, 13 bp, Artificial Sequence
  Oligonucleotide for detection of SNP TSC0062292
tgaggttggagtg

SEQ ID NO: 255590 - DNA, 13 bp, Artificial Sequence
  Oligonucleotide for detection of SNP TSC0062292
cactccaacctca

SEQ ID NO: 255591 - DNA, 13 bp, Artificial Sequence
  Oligonucleotide for detection of SNP TSC0062292
tgaggtcggagtg

SEQ ID NO: 255592 - DNA, 13 bp, Artificial Sequence
  Oligonucleotide for detection of SNP TSC0062292
cactccgacctca

SEQ ID NO: 255593 - DNA, 13 bp, Artificial Sequence
  Oligonucleotide for detection of SNP TSC0062293
aatttgagtgaty

SEQ ID NO: 255594 - DNA, 13 bp, Artificial Sequence
  Oligonucleotide for detection of SNP TSC0062293
ratcactcaaatt

SEQ ID NO: 255595 - DNA, 13 bp, Artificial Sequence
  Oligonucleotide for detection of SNP TSC0062293
aatttgtgtgaty

SEQ ID NO: 255596 - DNA, 13 bp, Artificial Sequence
  Oligonucleotide for detection of SNP TSC0062293
ratcacacaaatt

SEQ ID NO: 255597 - DNA, 13 bp, Artificial Sequence
  Oligonucleotide for detection of SNP TSC0062293
ggttatttaaatt

SEQ ID NO: 255598 - DNA, 13 bp, Artificial Sequence
  Oligonucleotide for detection of SNP TSC0062293
aatttaaataacc

SEQ ID NO: 255599 - DNA, 13 bp, Artificial Sequence
  Oligonucleotide for detection of SNP TSC0062293
ggttatataaatt

SEQ ID NO: 255600 - DNA, 13 bp, Artificial Sequence
  Oligonucleotide for detection of SNP TSC0062293
aatttatataacc

SEQ ID NO: 255601 - DNA, 13 bp, Artificial Sequence
  Oligonucleotide for detection of SNP TSC0062294
gaggtttgagtgt

SEQ ID NO: 255602 - DNA, 13 bp, Artificial Sequence
  Oligonucleotide for detection of SNP TSC0062294
acactcaaacctc

SEQ ID NO: 255603 - DNA, 13 bp, Artificial Sequence
  Oligonucleotide for detection of SNP TSC0062294
gaggttggagtgt

SEQ ID NO: 255604 - DNA, 13 bp, Artificial Sequence
  Oligonucleotide for detection of SNP TSC0062294
acactccaacctc

SEQ ID NO: 255605 - DNA, 13 bp, Artificial Sequence
  Oligonucleotide for detection of SNP TSC0062294
gaggttcgagtgt

SEQ ID NO: 255606 - DNA, 13 bp, Artificial Sequence
  Oligonucleotide for detection of SNP TSC0062294
acactcgaacctc

SEQ ID NO: 255607 - DNA, 13 bp, Artificial Sequence
  Oligonucleotide for detection of SNP TSC0062294
atatttgagttty

SEQ ID NO: 255608 - DNA, 13 bp, Artificial Sequence
  Oligonucleotide for detection of SNP TSC0062294
raaactcaaatat

SEQ ID NO: 255609 - DNA, 13 bp, Artificial Sequence
  Oligonucleotide for detection of SNP TSC0062294
atattttagttty

SEQ ID NO: 255610 - DNA, 13 bp, Artificial Sequence
  Oligonucleotide for detection of SNP TSC0062294
raaactaaaatat

SEQ ID NO: 255611 - DNA, 13 bp, Artificial Sequence
  Oligonucleotide for detection of SNP TSC0062294
atattcgagttty

SEQ ID NO: 255612 - DNA, 13 bp, Artificial Sequence
  Oligonucleotide for detection of SNP TSC0062294
raaactcgaatat

SEQ ID NO: 255613 - DNA, 13 bp, Artificial Sequence
  Oligonucleotide for detection of SNP TSC0062295
tgtgtgtgtgttt

SEQ ID NO: 255614 - DNA, 13 bp, Artificial Sequence
  Oligonucleotide for detection of SNP TSC0062295
aaacacacacaca

SEQ ID NO: 255615 - DNA, 13 bp, Artificial Sequence
  Oligonucleotide for detection of SNP TSC0062295
tgtgtgcgtgttt

SEQ ID NO: 255616 - DNA, 13 bp, Artificial Sequence
  Oligonucleotide for detection of SNP TSC0062295
aaacacgcacaca

SEQ ID NO: 255617 - DNA, 13 bp, Artificial Sequence
  Oligonucleotide for detection of SNP TSC0062295
aaatacgtatata

SEQ ID NO: 255618 - DNA, 13 bp, Artificial Sequence
  Oligonucleotide for detection of SNP TSC0062295
tatatacgtattt

SEQ ID NO: 255619 - DNA, 13 bp, Artificial Sequence
  Oligonucleotide for detection of SNP TSC0062296
agtgatatttgat

SEQ ID NO: 255620 - DNA, 13 bp, Artificial Sequence
  Oligonucleotide for detection of SNP TSC0062296
atcaaatatcact

SEQ ID NO: 255621 - DNA, 13 bp, Artificial Sequence
  Oligonucleotide for detection of SNP TSC0062296
agtgatgtttgat

SEQ ID NO: 255622 - DNA, 13 bp, Artificial Sequence
  Oligonucleotide for detection of SNP TSC0062296
atcaaacatcact

SEQ ID NO: 255623 - DNA, 13 bp, Artificial Sequence
  Oligonucleotide for detection of SNP TSC0062296
agtgacgtttgat

SEQ ID NO: 255624 - DNA, 13 bp, Artificial Sequence
  Oligonucleotide for detection of SNP TSC0062296
atcaaacgtcact

SEQ ID NO: 255625 - DNA, 13 bp, Artificial Sequence
  Oligonucleotide for detection of SNP TSC0062296
attaagtgttatt

SEQ ID NO: 255626 - DNA, 13 bp, Artificial Sequence
  Oligonucleotide for detection of SNP TSC0062296
aataacacttaat

SEQ ID NO: 255627 - DNA, 13 bp, Artificial Sequence
  Oligonucleotide for detection of SNP TSC0062296
attaagcgttatt

SEQ ID NO: 255628 - DNA, 13 bp, Artificial Sequence
  Oligonucleotide for detection of SNP TSC0062296
aataacgcttaat

SEQ ID NO: 255629 - DNA, 13 bp, Artificial Sequence
  Oligonucleotide for detection of SNP TSC0062298
taggtaatgaatt

SEQ ID NO: 255630 - DNA, 13 bp, Artificial Sequence
  Oligonucleotide for detection of SNP TSC0062298
aattcattaccta

SEQ ID NO: 255631 - DNA, 13 bp, Artificial Sequence
  Oligonucleotide for detection of SNP TSC0062298
taggtagtgaatt

SEQ ID NO: 255632 - DNA, 13 bp, Artificial Sequence
  Oligonucleotide for detection of SNP TSC0062298
aattcactaccta

SEQ ID NO: 255633 - DNA, 13 bp, Artificial Sequence
  Oligonucleotide for detection of SNP TSC0062299
agggttgaggtag

SEQ ID NO: 255634 - DNA, 13 bp, Artificial Sequence
  Oligonucleotide for detection of SNP TSC0062299
ctacctcaaccct

SEQ ID NO: 255635 - DNA, 13 bp, Artificial Sequence
  Oligonucleotide for detection of SNP TSC0062299
agggttaaggtag

SEQ ID NO: 255636 - DNA, 13 bp, Artificial Sequence
  Oligonucleotide for detection of SNP TSC0062299
ctaccttaaccct

SEQ ID NO: 255637 - DNA, 13 bp, Artificial Sequence
  Oligonucleotide for detection of SNP TSC0062299
agggtcgaggtag

SEQ ID NO: 255638 - DNA, 13 bp, Artificial Sequence
  Oligonucleotide for detection of SNP TSC0062299
ctacctcgaccct

SEQ ID NO: 255639 - DNA, 13 bp, Artificial Sequence
  Oligonucleotide for detection of SNP TSC0062300
tgtgagaatttag

SEQ ID NO: 255640 - DNA, 13 bp, Artificial Sequence
  Oligonucleotide for detection of SNP TSC0062300
ctaaattctcaca

SEQ ID NO: 255641 - DNA, 13 bp, Artificial Sequence
  Oligonucleotide for detection of SNP TSC0062300
tgtgagtatttag

SEQ ID NO: 255642 - DNA, 13 bp, Artificial Sequence
  Oligonucleotide for detection of SNP TSC0062300
ctaaatactcaca

SEQ ID NO: 255643 - DNA, 13 bp, Artificial Sequence
  Oligonucleotide for detection of SNP TSC0062300
ttgagtttttata

SEQ ID NO: 255644 - DNA, 13 bp, Artificial Sequence
  Oligonucleotide for detection of SNP TSC0062300
tataaaaactcaa

SEQ ID NO: 255645 - DNA, 13 bp, Artificial Sequence
  Oligonucleotide for detection of SNP TSC0062301
atgattatataty

SEQ ID NO: 255646 - DNA, 13 bp, Artificial Sequence
  Oligonucleotide for detection of SNP TSC0062301
ratatataatcat

SEQ ID NO: 255647 - DNA, 13 bp, Artificial Sequence
  Oligonucleotide for detection of SNP TSC0062301
atgattgtataty

SEQ ID NO: 255648 - DNA, 13 bp, Artificial Sequence
  Oligonucleotide for detection of SNP TSC0062301
ratatacaatcat

SEQ ID NO: 255649 - DNA, 13 bp, Artificial Sequence
  Oligonucleotide for detection of SNP TSC0062301
atgatcgtataty

SEQ ID NO: 255650 - DNA, 13 bp, Artificial Sequence
  Oligonucleotide for detection of SNP TSC0062301
ratatacgatcat

SEQ ID NO: 255651 - DNA, 13 bp, Artificial Sequence
  Oligonucleotide for detection of SNP TSC0062301
ggtgtgtgattat

SEQ ID NO: 255652 - DNA, 13 bp, Artificial Sequence
  Oligonucleotide for detection of SNP TSC0062301
ataatcacacacc

SEQ ID NO: 255653 - DNA, 13 bp, Artificial Sequence
  Oligonucleotide for detection of SNP TSC0062301
ggtgtgcgattat

SEQ ID NO: 255654 - DNA, 13 bp, Artificial Sequence
  Oligonucleotide for detection of SNP TSC0062301
ataatcgcacacc

SEQ ID NO: 255655 - DNA, 13 bp, Artificial Sequence
  Oligonucleotide for detection of SNP TSC0004546
gaaatgtttattt

SEQ ID NO: 255656 - DNA, 13 bp, Artificial Sequence
  Oligonucleotide for detection of SNP TSC0004546
aaataaacatttc

SEQ ID NO: 255657 - DNA, 13 bp, Artificial Sequence
  Oligonucleotide for detection of SNP TSC0004546
gaaatggttattt

SEQ ID NO: 255658 - DNA, 13 bp, Artificial Sequence
  Oligonucleotide for detection of SNP TSC0004546
aaataaccatttc

SEQ ID NO: 255659 - DNA, 13 bp, Artificial Sequence
  Oligonucleotide for detection of SNP TSC0004546
agatgaatattty

SEQ ID NO: 255660 - DNA, 13 bp, Artificial Sequence
  Oligonucleotide for detection of SNP TSC0004546
raaatattcatct

SEQ ID NO: 255661 - DNA, 13 bp, Artificial Sequence
  Oligonucleotide for detection of SNP TSC0004546
agatgattattty

SEQ ID NO: 255662 - DNA, 13 bp, Artificial Sequence
  Oligonucleotide for detection of SNP TSC0004546
raaataatcatct

SEQ ID NO: 255663 - DNA, 13 bp, Artificial Sequence
  Oligonucleotide for detection of SNP TSC0010447
atgaggagattaa

SEQ ID NO: 255664 - DNA, 13 bp, Artificial Sequence
  Oligonucleotide for detection of SNP TSC0010447
ttaatctcctcat

SEQ ID NO: 255665 - DNA, 13 bp, Artificial Sequence
  Oligonucleotide for detection of SNP TSC0010447
atgaggtgattaa

SEQ ID NO: 255666 - DNA, 13 bp, Artificial Sequence
  Oligonucleotide for detection of SNP TSC0010447
ttaatcacctcat

SEQ ID NO: 255667 - DNA, 13 bp, Artificial Sequence
  Oligonucleotide for detection of SNP TSC0010447
acgaggagattaa

SEQ ID NO: 255668 - DNA, 13 bp, Artificial Sequence
  Oligonucleotide for detection of SNP TSC0010447
ttaatctcctcgt

SEQ ID NO: 255669 - DNA, 13 bp, Artificial Sequence
  Oligonucleotide for detection of SNP TSC0010447
acgaggtgattaa

SEQ ID NO: 255670 - DNA, 13 bp, Artificial Sequence
  Oligonucleotide for detection of SNP TSC0010447
ttaatcacctcgt

SEQ ID NO: 255671 - DNA, 13 bp, Artificial Sequence
  Oligonucleotide for detection of SNP TSC0010447
atgaggcgattaa

SEQ ID NO: 255672 - DNA, 13 bp, Artificial Sequence
  Oligonucleotide for detection of SNP TSC0010447
ttaatcgcctcat

SEQ ID NO: 255673 - DNA, 13 bp, Artificial Sequence
  Oligonucleotide for detection of SNP TSC0010447
acgaggcgattaa

SEQ ID NO: 255674 - DNA, 13 bp, Artificial Sequence
  Oligonucleotide for detection of SNP TSC0010447
ttaatcgcctcgt

SEQ ID NO: 255675 - DNA, 13 bp, Artificial Sequence
  Oligonucleotide for detection of SNP TSC0010447
ttgatttttttgt

SEQ ID NO: 255676 - DNA, 13 bp, Artificial Sequence
  Oligonucleotide for detection of SNP TSC0010447
acaaaaaaatcaa

SEQ ID NO: 255677 - DNA, 13 bp, Artificial Sequence
  Oligonucleotide for detection of SNP TSC0010447
ttgattttttcgt

SEQ ID NO: 255678 - DNA, 13 bp, Artificial Sequence
  Oligonucleotide for detection of SNP TSC0010447
acgaaaaaatcaa

SEQ ID NO: 255679 - DNA, 13 bp, Artificial Sequence
  Oligonucleotide for detection of SNP TSC0010447
ttgatcgttttgt

SEQ ID NO: 255680 - DNA, 13 bp, Artificial Sequence
  Oligonucleotide for detection of SNP TSC0010447
acaaaacgatcaa

SEQ ID NO: 255681 - DNA, 13 bp, Artificial Sequence
  Oligonucleotide for detection of SNP TSC0010447
ttgattgtttcgt

SEQ ID NO: 255682 - DNA, 13 bp, Artificial Sequence
  Oligonucleotide for detection of SNP TSC0010447
acgaaacaatcaa

SEQ ID NO: 255683 - DNA, 13 bp, Artificial Sequence
  Oligonucleotide for detection of SNP TSC0010447
ttgatcgtttcgt

SEQ ID NO: 255684 - DNA, 13 bp, Artificial Sequence
  Oligonucleotide for detection of SNP TSC0010447
acgaaacgatcaa

SEQ ID NO: 255685 - DNA, 13 bp, Artificial Sequence
  Oligonucleotide for detection of SNP TSC0062311
attgaaatgatat

SEQ ID NO: 255686 - DNA, 13 bp, Artificial Sequence
  Oligonucleotide for detection of SNP TSC0062311
atatcatttcaat

SEQ ID NO: 255687 - DNA, 13 bp, Artificial Sequence
  Oligonucleotide for detection of SNP TSC0062311
attgaattgatat

SEQ ID NO: 255688 - DNA, 13 bp, Artificial Sequence
  Oligonucleotide for detection of SNP TSC0062311
atatcaattcaat

SEQ ID NO: 255689 - DNA, 13 bp, Artificial Sequence
  Oligonucleotide for detection of SNP TSC0062311
atgttattttaat

SEQ ID NO: 255690 - DNA, 13 bp, Artificial Sequence
  Oligonucleotide for detection of SNP TSC0062311
attaaaataacat

SEQ ID NO: 255691 - DNA, 13 bp, Artificial Sequence
  Oligonucleotide for detection of SNP TSC0062311
atgttaatttaat

SEQ ID NO: 255692 - DNA, 13 bp, Artificial Sequence
  Oligonucleotide for detection of SNP TSC0062311
attaaattaacat

SEQ ID NO: 255693 - DNA, 13 bp, Artificial Sequence
  Oligonucleotide for detection of SNP TSC0062312
ggtaatgaaaaga

SEQ ID NO: 255694 - DNA, 13 bp, Artificial Sequence
  Oligonucleotide for detection of SNP TSC0062312
tcttttcattacc

SEQ ID NO: 255695 - DNA, 13 bp, Artificial Sequence
  Oligonucleotide for detection of SNP TSC0062312
ggtaataaaaaga

SEQ ID NO: 255696 - DNA, 13 bp, Artificial Sequence
  Oligonucleotide for detection of SNP TSC0062312
tctttttattacc

SEQ ID NO: 255697 - DNA, 13 bp, Artificial Sequence
  Oligonucleotide for detection of SNP TSC0062313
taaaatattagta

SEQ ID NO: 255698 - DNA, 13 bp, Artificial Sequence
  Oligonucleotide for detection of SNP TSC0062313
tactaatatttta

SEQ ID NO: 255699 - DNA, 13 bp, Artificial Sequence
  Oligonucleotide for detection of SNP TSC0062313
taaaattttagta

SEQ ID NO: 255700 - DNA, 13 bp, Artificial Sequence
  Oligonucleotide for detection of SNP TSC0062313
tactaaaatttta

SEQ ID NO: 255701 - DNA, 13 bp, Artificial Sequence
  Oligonucleotide for detection of SNP TSC0062313
tgttgatgtttta

SEQ ID NO: 255702 - DNA, 13 bp, Artificial Sequence
  Oligonucleotide for detection of SNP TSC0062313
taaaacatcaaca

SEQ ID NO: 255703 - DNA, 13 bp, Artificial Sequence
  Oligonucleotide for detection of SNP TSC0062313
tgttgaagtttta

SEQ ID NO: 255704 - DNA, 13 bp, Artificial Sequence
  Oligonucleotide for detection of SNP TSC0062313
taaaacttcaaca

SEQ ID NO: 255705 - DNA, 13 bp, Artificial Sequence
  Oligonucleotide for detection of SNP TSC0004619
taaaatattatta

SEQ ID NO: 255706 - DNA, 13 bp, Artificial Sequence
  Oligonucleotide for detection of SNP TSC0004619
taataatatttta

SEQ ID NO: 255707 - DNA, 13 bp, Artificial Sequence
  Oligonucleotide for detection of SNP TSC0004619
taaaatgttatta

SEQ ID NO: 255708 - DNA, 13 bp, Artificial Sequence
  Oligonucleotide for detection of SNP TSC0004619
taataacatttta

SEQ ID NO: 255709 - DNA, 13 bp, Artificial Sequence
  Oligonucleotide for detection of SNP TSC0062314
tgtgtttaaaaga

SEQ ID NO: 255710 - DNA, 13 bp, Artificial Sequence
  Oligonucleotide for detection of SNP TSC0062314
tcttttaaacaca

SEQ ID NO: 255711 - DNA, 13 bp, Artificial Sequence
  Oligonucleotide for detection of SNP TSC0062314
tgtgttaaaaaga

SEQ ID NO: 255712 - DNA, 13 bp, Artificial Sequence
  Oligonucleotide for detection of SNP TSC0062314
tctttttaacaca

SEQ ID NO: 255713 - DNA, 13 bp, Artificial Sequence
  Oligonucleotide for detection of SNP TSC0062317
tttatggtatata

SEQ ID NO: 255714 - DNA, 13 bp, Artificial Sequence
  Oligonucleotide for detection of SNP TSC0062317
tatataccataaa

SEQ ID NO: 255715 - DNA, 13 bp, Artificial Sequence
  Oligonucleotide for detection of SNP TSC0062317
tttatgatatata

SEQ ID NO: 255716 - DNA, 13 bp, Artificial Sequence
  Oligonucleotide for detection of SNP TSC0062317
tatatatcataaa

SEQ ID NO: 255717 - DNA, 13 bp, Artificial Sequence
  Oligonucleotide for detection of SNP TSC0062318
tagaggtttaagt

SEQ ID NO: 255718 - DNA, 13 bp, Artificial Sequence
  Oligonucleotide for detection of SNP TSC0062318
acttaaacctcta

SEQ ID NO: 255719 - DNA, 13 bp, Artificial Sequence
  Oligonucleotide for detection of SNP TSC0062318
tagagggttaagt

SEQ ID NO: 255720 - DNA, 13 bp, Artificial Sequence
  Oligonucleotide for detection of SNP TSC0062318
acttaaccctcta

SEQ ID NO: 255721 - DNA, 13 bp, Artificial Sequence
  Oligonucleotide for detection of SNP TSC0062318
atttgggtttttg

SEQ ID NO: 255722 - DNA, 13 bp, Artificial Sequence
  Oligonucleotide for detection of SNP TSC0062318
caaaaacccaaat

SEQ ID NO: 255723 - DNA, 13 bp, Artificial Sequence
  Oligonucleotide for detection of SNP TSC0062318
atttggttttttg

SEQ ID NO: 255724 - DNA, 13 bp, Artificial Sequence
  Oligonucleotide for detection of SNP TSC0062318
caaaaaaccaaat

SEQ ID NO: 255725 - DNA, 13 bp, Artificial Sequence
  Oligonucleotide for detection of SNP TSC0062319
ttttttttgtaaa

SEQ ID NO: 255726 - DNA, 13 bp, Artificial Sequence
  Oligonucleotide for detection of SNP TSC0062319
tttacaaaaaaaa

SEQ ID NO: 255727 - DNA, 13 bp, Artificial Sequence
  Oligonucleotide for detection of SNP TSC0062319
tttatagggaaaa

SEQ ID NO: 255728 - DNA, 13 bp, Artificial Sequence
  Oligonucleotide for detection of SNP TSC0062319
ttttccctataaa

SEQ ID NO: 255729 - DNA, 13 bp, Artificial Sequence
  Oligonucleotide for detection of SNP TSC0062319
tttatatggaaaa

SEQ ID NO: 255730 - DNA, 13 bp, Artificial Sequence
  Oligonucleotide for detection of SNP TSC0062319
ttttccatataaa

SEQ ID NO: 255731 - DNA, 13 bp, Artificial Sequence
  Oligonucleotide for detection of SNP TSC0062319
tttatacggaaaa

SEQ ID NO: 255732 - DNA, 13 bp, Artificial Sequence
  Oligonucleotide for detection of SNP TSC0062319
ttttccgtataaa

SEQ ID NO: 255733 - DNA, 13 bp, Artificial Sequence
  Oligonucleotide for detection of SNP TSC0062323
taatatatagtaa

SEQ ID NO: 255734 - DNA, 13 bp, Artificial Sequence
  Oligonucleotide for detection of SNP TSC0062323
ttactatatatta

SEQ ID NO: 255735 - DNA, 13 bp, Artificial Sequence
  Oligonucleotide for detection of SNP TSC0062323
taatatgtagtaa

SEQ ID NO: 255736 - DNA, 13 bp, Artificial Sequence
  Oligonucleotide for detection of SNP TSC0062323
ttactacatatta

SEQ ID NO: 255737 - DNA, 13 bp, Artificial Sequence
  Oligonucleotide for detection of SNP TSC0062323
taatacgtagtaa

SEQ ID NO: 255738 - DNA, 13 bp, Artificial Sequence
  Oligonucleotide for detection of SNP TSC0062323
ttactacgtatta

SEQ ID NO: 255739 - DNA, 13 bp, Artificial Sequence
  Oligonucleotide for detection of SNP TSC0062323
ttattatgtgtta

SEQ ID NO: 255740 - DNA, 13 bp, Artificial Sequence
  Oligonucleotide for detection of SNP TSC0062323
taacacataataa

SEQ ID NO: 255741 - DNA, 13 bp, Artificial Sequence
  Oligonucleotide for detection of SNP TSC0062323
ttattacgtgtta

SEQ ID NO: 255742 - DNA, 13 bp, Artificial Sequence
  Oligonucleotide for detection of SNP TSC0062323
taacacgtaataa

SEQ ID NO: 255743 - DNA, 13 bp, Artificial Sequence
  Oligonucleotide for detection of SNP TSC0062326
ttttgggttagat

SEQ ID NO: 255744 - DNA, 13 bp, Artificial Sequence
  Oligonucleotide for detection of SNP TSC0062326
atctaacccaaaa

SEQ ID NO: 255745 - DNA, 13 bp, Artificial Sequence
  Oligonucleotide for detection of SNP TSC0062326
ttttggattagat

SEQ ID NO: 255746 - DNA, 13 bp, Artificial Sequence
  Oligonucleotide for detection of SNP TSC0062326
atctaatccaaaa

SEQ ID NO: 255747 - DNA, 13 bp, Artificial Sequence
  Oligonucleotide for detection of SNP TSC0006235
ttatttaagttta

SEQ ID NO: 255748 - DNA, 13 bp, Artificial Sequence
  Oligonucleotide for detection of SNP TSC0006235
taaacttaaataa

SEQ ID NO: 255749 - DNA, 13 bp, Artificial Sequence
  Oligonucleotide for detection of SNP TSC0006235
ttatttgagttta

SEQ ID NO: 255750 - DNA, 13 bp, Artificial Sequence
  Oligonucleotide for detection of SNP TSC0006235
taaactcaaataa

SEQ ID NO: 255751 - DNA, 13 bp, Artificial Sequence
  Oligonucleotide for detection of SNP TSC0006235
ttattcgagttta

SEQ ID NO: 255752 - DNA, 13 bp, Artificial Sequence
  Oligonucleotide for detection of SNP TSC0006235
taaactcgaataa

SEQ ID NO: 255753 - DNA, 13 bp, Artificial Sequence
  Oligonucleotide for detection of SNP TSC0006235
tggatttgaatgg

SEQ ID NO: 255754 - DNA, 13 bp, Artificial Sequence
  Oligonucleotide for detection of SNP TSC0006235
ccattcaaatcca

SEQ ID NO: 255755 - DNA, 13 bp, Artificial Sequence
  Oligonucleotide for detection of SNP TSC0006235
tggattcgaatgg

SEQ ID NO: 255756 - DNA, 13 bp, Artificial Sequence
  Oligonucleotide for detection of SNP TSC0006235
ccattcgaatcca

SEQ ID NO: 255757 - DNA, 13 bp, Artificial Sequence
  Oligonucleotide for detection of SNP TSC0062329
gtatgagaattay

SEQ ID NO: 255758 - DNA, 13 bp, Artificial Sequence
  Oligonucleotide for detection of SNP TSC0062329
rtaattctcatac

SEQ ID NO: 255759 - DNA, 13 bp, Artificial Sequence
  Oligonucleotide for detection of SNP TSC0062329
gtatgaaaattay

SEQ ID NO: 255760 - DNA, 13 bp, Artificial Sequence
  Oligonucleotide for detection of SNP TSC0062329
rtaattttcatac

SEQ ID NO: 255761 - DNA, 13 bp, Artificial Sequence
  Oligonucleotide for detection of SNP TSC0062329
gtacgagaattay

SEQ ID NO: 255762 - DNA, 13 bp, Artificial Sequence
  Oligonucleotide for detection of SNP TSC0062329
rtaattctcgtac

SEQ ID NO: 255763 - DNA, 13 bp, Artificial Sequence
  Oligonucleotide for detection of SNP TSC0062329
gtacgaaaattay

SEQ ID NO: 255764 - DNA, 13 bp, Artificial Sequence
  Oligonucleotide for detection of SNP TSC0062329
rtaattttcgtac

SEQ ID NO: 255765 - DNA, 13 bp, Artificial Sequence
  Oligonucleotide for detection of SNP TSC0062330
tatagtattgatt

SEQ ID NO: 255766 - DNA, 13 bp, Artificial Sequence
  Oligonucleotide for detection of SNP TSC0062330
aatcaatactata

SEQ ID NO: 255767 - DNA, 13 bp, Artificial Sequence
  Oligonucleotide for detection of SNP TSC0062330
tatagttttgatt

SEQ ID NO: 255768 - DNA, 13 bp, Artificial Sequence
  Oligonucleotide for detection of SNP TSC0062330
aatcaaaactata

SEQ ID NO: 255769 - DNA, 13 bp, Artificial Sequence
  Oligonucleotide for detection of SNP TSC0062330
agttagtgttgta

SEQ ID NO: 255770 - DNA, 13 bp, Artificial Sequence
  Oligonucleotide for detection of SNP TSC0062330
tacaacactaact

SEQ ID NO: 255771 - DNA, 13 bp, Artificial Sequence
  Oligonucleotide for detection of SNP TSC0062330
agttagggttgta

SEQ ID NO: 255772 - DNA, 13 bp, Artificial Sequence
  Oligonucleotide for detection of SNP TSC0062330
tacaaccctaact

SEQ ID NO: 255773 - DNA, 13 bp, Artificial Sequence
  Oligonucleotide for detection of SNP TSC0062331
atatggattaaaa

SEQ ID NO: 255774 - DNA, 13 bp, Artificial Sequence
  Oligonucleotide for detection of SNP TSC0062331
ttttaatccatat

SEQ ID NO: 255775 - DNA, 13 bp, Artificial Sequence
  Oligonucleotide for detection of SNP TSC0062331
atatggtttaaaa

SEQ ID NO: 255776 - DNA, 13 bp, Artificial Sequence
  Oligonucleotide for detection of SNP TSC0062331
ttttaaaccatat

SEQ ID NO: 255777 - DNA, 13 bp, Artificial Sequence
  Oligonucleotide for detection of SNP TSC0062331
ttttgatttatgt

SEQ ID NO: 255778 - DNA, 13 bp, Artificial Sequence
  Oligonucleotide for detection of SNP TSC0062331
acataaatcaaaa

SEQ ID NO: 255779 - DNA, 13 bp, Artificial Sequence
  Oligonucleotide for detection of SNP TSC0062331
ttttgaattatgt

SEQ ID NO: 255780 - DNA, 13 bp, Artificial Sequence
  Oligonucleotide for detection of SNP TSC0062331
acataattcaaaa

SEQ ID NO: 255781 - DNA, 13 bp, Artificial Sequence
  Oligonucleotide for detection of SNP TSC0062332
agttaaagtataa

SEQ ID NO: 255782 - DNA, 13 bp, Artificial Sequence
  Oligonucleotide for detection of SNP TSC0062332
ttatactttaact

SEQ ID NO: 255783 - DNA, 13 bp, Artificial Sequence
  Oligonucleotide for detection of SNP TSC0062332
agttaatgtataa

SEQ ID NO: 255784 - DNA, 13 bp, Artificial Sequence
  Oligonucleotide for detection of SNP TSC0062332
ttatacattaact

SEQ ID NO: 255785 - DNA, 13 bp, Artificial Sequence
  Oligonucleotide for detection of SNP TSC0062332
ttatattttaatt

SEQ ID NO: 255786 - DNA, 13 bp, Artificial Sequence
  Oligonucleotide for detection of SNP TSC0062332
aattaaaatataa

SEQ ID NO: 255787 - DNA, 13 bp, Artificial Sequence
  Oligonucleotide for detection of SNP TSC0062332
ttatatattaatt

SEQ ID NO: 255788 - DNA, 13 bp, Artificial Sequence
  Oligonucleotide for detection of SNP TSC0062332
aattaatatataa

SEQ ID NO: 255789 - DNA, 13 bp, Artificial Sequence
  Oligonucleotide for detection of SNP TSC0062333
gagagtaattgay

SEQ ID NO: 255790 - DNA, 13 bp, Artificial Sequence
  Oligonucleotide for detection of SNP TSC0062333
rtcaattactctc

SEQ ID NO: 255791 - DNA, 13 bp, Artificial Sequence
  Oligonucleotide for detection of SNP TSC0062333
gagagttattgay

SEQ ID NO: 255792 - DNA, 13 bp, Artificial Sequence
  Oligonucleotide for detection of SNP TSC0062333
rtcaataactctc

SEQ ID NO: 255793 - DNA, 13 bp, Artificial Sequence
  Oligonucleotide for detection of SNP TSC0062333
gttagtggtttty

SEQ ID NO: 255794 - DNA, 13 bp, Artificial Sequence
  Oligonucleotide for detection of SNP TSC0062333
raaaaccactaac

SEQ ID NO: 255795 - DNA, 13 bp, Artificial Sequence
  Oligonucleotide for detection of SNP TSC0008187
aagagataattay

SEQ ID NO: 255796 - DNA, 13 bp, Artificial Sequence
  Oligonucleotide for detection of SNP TSC0008187
rtaattatctctt

SEQ ID NO: 255797 - DNA, 13 bp, Artificial Sequence
  Oligonucleotide for detection of SNP TSC0008187
aagagagaattay

SEQ ID NO: 255798 - DNA, 13 bp, Artificial Sequence
  Oligonucleotide for detection of SNP TSC0008187
rtaattctctctt

SEQ ID NO: 255799 - DNA, 13 bp, Artificial Sequence
  Oligonucleotide for detection of SNP TSC0008187
gtgattttttttt

SEQ ID NO: 255800 - DNA, 13 bp, Artificial Sequence
  Oligonucleotide for detection of SNP TSC0008187
aaaaaaaaatcac

SEQ ID NO: 255801 - DNA, 13 bp, Artificial Sequence
  Oligonucleotide for detection of SNP TSC0062334
ttgattatgtttt

SEQ ID NO: 255802 - DNA, 13 bp, Artificial Sequence
  Oligonucleotide for detection of SNP TSC0062334
aaaacataatcaa

SEQ ID NO: 255803 - DNA, 13 bp, Artificial Sequence
  Oligonucleotide for detection of SNP TSC0062334
ttgattgtgtttt

SEQ ID NO: 255804 - DNA, 13 bp, Artificial Sequence
  Oligonucleotide for detection of SNP TSC0062334
aaaacacaatcaa

SEQ ID NO: 255805 - DNA, 13 bp, Artificial Sequence
  Oligonucleotide for detection of SNP TSC0062340
ttttttgatgttt

SEQ ID NO: 255806 - DNA, 13 bp, Artificial Sequence
  Oligonucleotide for detection of SNP TSC0062340
aaacatcaaaaaa

SEQ ID NO: 255807 - DNA, 13 bp, Artificial Sequence
  Oligonucleotide for detection of SNP TSC0009115
taagttatgttga

SEQ ID NO: 255808 - DNA, 13 bp, Artificial Sequence
  Oligonucleotide for detection of SNP TSC0009115
tcaacataactta

SEQ ID NO: 255809 - DNA, 13 bp, Artificial Sequence
  Oligonucleotide for detection of SNP TSC0009115
taagttgtgttga

SEQ ID NO: 255810 - DNA, 13 bp, Artificial Sequence
  Oligonucleotide for detection of SNP TSC0009115
tcaacacaactta

SEQ ID NO: 255811 - DNA, 13 bp, Artificial Sequence
  Oligonucleotide for detection of SNP TSC0062341
tgatatatattat

SEQ ID NO: 255812 - DNA, 13 bp, Artificial Sequence
  Oligonucleotide for detection of SNP TSC0062341
ataatatatatca

SEQ ID NO: 255813 - DNA, 13 bp, Artificial Sequence
  Oligonucleotide for detection of SNP TSC0062341
tgatatgtattat

SEQ ID NO: 255814 - DNA, 13 bp, Artificial Sequence
  Oligonucleotide for detection of SNP TSC0062341
ataatacatatca

SEQ ID NO: 255815 - DNA, 13 bp, Artificial Sequence
  Oligonucleotide for detection of SNP TSC0008513
aggggaaggtaga

SEQ ID NO: 255816 - DNA, 13 bp, Artificial Sequence
  Oligonucleotide for detection of SNP TSC0008513
tctaccttcccct

SEQ ID NO: 255817 - DNA, 13 bp, Artificial Sequence
  Oligonucleotide for detection of SNP TSC0008513
aggggagggtaga

SEQ ID NO: 255818 - DNA, 13 bp, Artificial Sequence
  Oligonucleotide for detection of SNP TSC0008513
tctaccctcccct

SEQ ID NO: 255819 - DNA, 13 bp, Artificial Sequence
  Oligonucleotide for detection of SNP TSC0062342
atagagtgagaga

SEQ ID NO: 255820 - DNA, 13 bp, Artificial Sequence
  Oligonucleotide for detection of SNP TSC0062342
tctctcactctat

SEQ ID NO: 255821 - DNA, 13 bp, Artificial Sequence
  Oligonucleotide for detection of SNP TSC0062342
atagagagagaga

SEQ ID NO: 255822 - DNA, 13 bp, Artificial Sequence
  Oligonucleotide for detection of SNP TSC0062342
tctctctctctat

SEQ ID NO: 255823 - DNA, 13 bp, Artificial Sequence
  Oligonucleotide for detection of SNP TSC0062343
gtatgtatgtgty

SEQ ID NO: 255824 - DNA, 13 bp, Artificial Sequence
  Oligonucleotide for detection of SNP TSC0062343
racacatacatac

SEQ ID NO: 255825 - DNA, 13 bp, Artificial Sequence
  Oligonucleotide for detection of SNP TSC0062343
gtatgtttgtgty

SEQ ID NO: 255826 - DNA, 13 bp, Artificial Sequence
  Oligonucleotide for detection of SNP TSC0062343
racacaaacatac

SEQ ID NO: 255827 - DNA, 13 bp, Artificial Sequence
  Oligonucleotide for detection of SNP TSC0062343
ggtatatatatgy

SEQ ID NO: 255828 - DNA, 13 bp, Artificial Sequence
  Oligonucleotide for detection of SNP TSC0062343
rcatatatatacc

SEQ ID NO: 255829 - DNA, 13 bp, Artificial Sequence
  Oligonucleotide for detection of SNP TSC0062343
ggtatagatatgy

SEQ ID NO: 255830 - DNA, 13 bp, Artificial Sequence
  Oligonucleotide for detection of SNP TSC0062343
rcatatctatacc

SEQ ID NO: 255831 - DNA, 13 bp, Artificial Sequence
  Oligonucleotide for detection of SNP TSC0062347
tttgtaattgtay

SEQ ID NO: 255832 - DNA, 13 bp, Artificial Sequence
  Oligonucleotide for detection of SNP TSC0062347
rtacaattacaaa

SEQ ID NO: 255833 - DNA, 13 bp, Artificial Sequence
  Oligonucleotide for detection of SNP TSC0062347
ttcgtaattgtay

SEQ ID NO: 255834 - DNA, 13 bp, Artificial Sequence
  Oligonucleotide for detection of SNP TSC0062347
rtacaattacgaa

SEQ ID NO: 255835 - DNA, 13 bp, Artificial Sequence
  Oligonucleotide for detection of SNP TSC0062347
ttcgtatttgtay

SEQ ID NO: 255836 - DNA, 13 bp, Artificial Sequence
  Oligonucleotide for detection of SNP TSC0062347
rtacaaatacgaa

SEQ ID NO: 255837 - DNA, 13 bp, Artificial Sequence
  Oligonucleotide for detection of SNP TSC0062347
gtgtagttgtgaa

SEQ ID NO: 255838 - DNA, 13 bp, Artificial Sequence
  Oligonucleotide for detection of SNP TSC0062347
ttcacaactacac

SEQ ID NO: 255839 - DNA, 13 bp, Artificial Sequence
  Oligonucleotide for detection of SNP TSC0062347
gtgtagatgtgaa

SEQ ID NO: 255840 - DNA, 13 bp, Artificial Sequence
  Oligonucleotide for detection of SNP TSC0062347
ttcacatctacac

SEQ ID NO: 255841 - DNA, 13 bp, Artificial Sequence
  Oligonucleotide for detection of SNP TSC0062347
gtgtagttgcgaa

SEQ ID NO: 255842 - DNA, 13 bp, Artificial Sequence
  Oligonucleotide for detection of SNP TSC0062347
ttcgcaactacac

SEQ ID NO: 255843 - DNA, 13 bp, Artificial Sequence
  Oligonucleotide for detection of SNP TSC0062347
gtgtagatgcgaa

SEQ ID NO: 255844 - DNA, 13 bp, Artificial Sequence
  Oligonucleotide for detection of SNP TSC0062347
ttcgcatctacac

SEQ ID NO: 255845 - DNA, 13 bp, Artificial Sequence
  Oligonucleotide for detection of SNP TSC0007465
aagagatgtagga

SEQ ID NO: 255846 - DNA, 13 bp, Artificial Sequence
  Oligonucleotide for detection of SNP TSC0007465
tcctacatctctt

SEQ ID NO: 255847 - DNA, 13 bp, Artificial Sequence
  Oligonucleotide for detection of SNP TSC0007465
aagagacgtagga

SEQ ID NO: 255848 - DNA, 13 bp, Artificial Sequence
  Oligonucleotide for detection of SNP TSC0007465
tcctacgtctctt

SEQ ID NO: 255849 - DNA, 13 bp, Artificial Sequence
  Oligonucleotide for detection of SNP TSC0062349
attgtcgtaattt

SEQ ID NO: 255850 - DNA, 13 bp, Artificial Sequence
  Oligonucleotide for detection of SNP TSC0062349
aaattacgacaat

SEQ ID NO: 255851 - DNA, 13 bp, Artificial Sequence
  Oligonucleotide for detection of SNP TSC0062350
tgggggaaattty

SEQ ID NO: 255852 - DNA, 13 bp, Artificial Sequence
  Oligonucleotide for detection of SNP TSC0062350
raaatttccccca

SEQ ID NO: 255853 - DNA, 13 bp, Artificial Sequence
  Oligonucleotide for detection of SNP TSC0062350
tgggggtaattty

SEQ ID NO: 255854 - DNA, 13 bp, Artificial Sequence
  Oligonucleotide for detection of SNP TSC0062350
raaattaccccca

SEQ ID NO: 255855 - DNA, 13 bp, Artificial Sequence
  Oligonucleotide for detection of SNP TSC0062350
gaaatttttttta

SEQ ID NO: 255856 - DNA, 13 bp, Artificial Sequence
  Oligonucleotide for detection of SNP TSC0062350
taaaaaaaatttc

SEQ ID NO: 255857 - DNA, 13 bp, Artificial Sequence
  Oligonucleotide for detection of SNP TSC0062350
gaaattattttta

SEQ ID NO: 255858 - DNA, 13 bp, Artificial Sequence
  Oligonucleotide for detection of SNP TSC0062350
taaaaataatttc

SEQ ID NO: 255859 - DNA, 13 bp, Artificial Sequence
  Oligonucleotide for detection of SNP TSC0062351
gagtttatagaat

SEQ ID NO: 255860 - DNA, 13 bp, Artificial Sequence
  Oligonucleotide for detection of SNP TSC0062351
attctataaactc

SEQ ID NO: 255861 - DNA, 13 bp, Artificial Sequence
  Oligonucleotide for detection of SNP TSC0062351
gagtttgtagaat

SEQ ID NO: 255862 - DNA, 13 bp, Artificial Sequence
  Oligonucleotide for detection of SNP TSC0062351
attctacaaactc

SEQ ID NO: 255863 - DNA, 13 bp, Artificial Sequence
  Oligonucleotide for detection of SNP TSC0009194
ttaaagttatttt

SEQ ID NO: 255864 - DNA, 13 bp, Artificial Sequence
  Oligonucleotide for detection of SNP TSC0009194
aaaataactttaa

SEQ ID NO: 255865 - DNA, 13 bp, Artificial Sequence
  Oligonucleotide for detection of SNP TSC0009194
agaatggttttga

SEQ ID NO: 255866 - DNA, 13 bp, Artificial Sequence
  Oligonucleotide for detection of SNP TSC0009194
tcaaaaccattct

SEQ ID NO: 255867 - DNA, 13 bp, Artificial Sequence
  Oligonucleotide for detection of SNP TSC0009194
agaatgtttttga

SEQ ID NO: 255868 - DNA, 13 bp, Artificial Sequence
  Oligonucleotide for detection of SNP TSC0009194
tcaaaaacattct

SEQ ID NO: 255869 - DNA, 13 bp, Artificial Sequence
  Oligonucleotide for detection of SNP TSC0006979
attttggtagatg

SEQ ID NO: 255870 - DNA, 13 bp, Artificial Sequence
  Oligonucleotide for detection of SNP TSC0006979
catctaccaaaat

SEQ ID NO: 255871 - DNA, 13 bp, Artificial Sequence
  Oligonucleotide for detection of SNP TSC0062352
aaaatgtagttag

SEQ ID NO: 255872 - DNA, 13 bp, Artificial Sequence
  Oligonucleotide for detection of SNP TSC0062352
ctaactacatttt

SEQ ID NO: 255873 - DNA, 13 bp, Artificial Sequence
  Oligonucleotide for detection of SNP TSC0062352
aaaatggagttag

SEQ ID NO: 255874 - DNA, 13 bp, Artificial Sequence
  Oligonucleotide for detection of SNP TSC0062352
ctaactccatttt

SEQ ID NO: 255875 - DNA, 13 bp, Artificial Sequence
  Oligonucleotide for detection of SNP TSC0062353
agttggtgaaaga

SEQ ID NO: 255876 - DNA, 13 bp, Artificial Sequence
  Oligonucleotide for detection of SNP TSC0062353
tctttcaccaact

SEQ ID NO: 255877 - DNA, 13 bp, Artificial Sequence
  Oligonucleotide for detection of SNP TSC0062353
agttggggaaaga

SEQ ID NO: 255878 - DNA, 13 bp, Artificial Sequence
  Oligonucleotide for detection of SNP TSC0062353
tctttccccaact

SEQ ID NO: 255879 - DNA, 13 bp, Artificial Sequence
  Oligonucleotide for detection of SNP TSC0062354
gatttgtgttgtt

SEQ ID NO: 255880 - DNA, 13 bp, Artificial Sequence
  Oligonucleotide for detection of SNP TSC0062354
aacaacacaaatc

SEQ ID NO: 255881 - DNA, 13 bp, Artificial Sequence
  Oligonucleotide for detection of SNP TSC0062354
gatttgcgttgtt

SEQ ID NO: 255882 - DNA, 13 bp, Artificial Sequence
  Oligonucleotide for detection of SNP TSC0062354
aacaacgcaaatc

SEQ ID NO: 255883 - DNA, 13 bp, Artificial Sequence
  Oligonucleotide for detection of SNP TSC0062354
aatagtgtaggty

SEQ ID NO: 255884 - DNA, 13 bp, Artificial Sequence
  Oligonucleotide for detection of SNP TSC0062354
racctacactatt

SEQ ID NO: 255885 - DNA, 13 bp, Artificial Sequence
  Oligonucleotide for detection of SNP TSC0062354
aatagtataggty

SEQ ID NO: 255886 - DNA, 13 bp, Artificial Sequence
  Oligonucleotide for detection of SNP TSC0062354
racctatactatt

SEQ ID NO: 255887 - DNA, 13 bp, Artificial Sequence
  Oligonucleotide for detection of SNP TSC0062354
aatagcgtaggty

SEQ ID NO: 255888 - DNA, 13 bp, Artificial Sequence
  Oligonucleotide for detection of SNP TSC0062354
racctacgctatt

SEQ ID NO: 255889 - DNA, 13 bp, Artificial Sequence
  Oligonucleotide for detection of SNP TSC0009064
agatttcggtggg

SEQ ID NO: 255890 - DNA, 13 bp, Artificial Sequence
  Oligonucleotide for detection of SNP TSC0009064
cccaccgaaatct

SEQ ID NO: 255891 - DNA, 13 bp, Artificial Sequence
  Oligonucleotide for detection of SNP TSC0009065
gataatgtggttt

SEQ ID NO: 255892 - DNA, 13 bp, Artificial Sequence
  Oligonucleotide for detection of SNP TSC0009065
aaaccacattatc

SEQ ID NO: 255893 - DNA, 13 bp, Artificial Sequence
  Oligonucleotide for detection of SNP TSC0009065
gataatatggttt

SEQ ID NO: 255894 - DNA, 13 bp, Artificial Sequence
  Oligonucleotide for detection of SNP TSC0009065
aaaccatattatc

SEQ ID NO: 255895 - DNA, 13 bp, Artificial Sequence
  Oligonucleotide for detection of SNP TSC0006711
ttattttggattg

SEQ ID NO: 255896 - DNA, 13 bp, Artificial Sequence
  Oligonucleotide for detection of SNP TSC0006711
caatccaaaataa

SEQ ID NO: 255897 - DNA, 13 bp, Artificial Sequence
  Oligonucleotide for detection of SNP TSC0006711
ttatttcggattg

SEQ ID NO: 255898 - DNA, 13 bp, Artificial Sequence
  Oligonucleotide for detection of SNP TSC0006711
caatccgaaataa

SEQ ID NO: 255899 - DNA, 13 bp, Artificial Sequence
  Oligonucleotide for detection of SNP TSC0006711
taattcgagatga

SEQ ID NO: 255900 - DNA, 13 bp, Artificial Sequence
  Oligonucleotide for detection of SNP TSC0006711
tcatctcgaatta

SEQ ID NO: 255901 - DNA, 13 bp, Artificial Sequence
  Oligonucleotide for detection of SNP TSC0062355
gtggttttagttg

SEQ ID NO: 255902 - DNA, 13 bp, Artificial Sequence
  Oligonucleotide for detection of SNP TSC0062355
caactaaaaccac

SEQ ID NO: 255903 - DNA, 13 bp, Artificial Sequence
  Oligonucleotide for detection of SNP TSC0062355
gtggttgtagttg

SEQ ID NO: 255904 - DNA, 13 bp, Artificial Sequence
  Oligonucleotide for detection of SNP TSC0062355
caactacaaccac

SEQ ID NO: 255905 - DNA, 13 bp, Artificial Sequence
  Oligonucleotide for detection of SNP TSC0062355
tagttgaaattay

SEQ ID NO: 255906 - DNA, 13 bp, Artificial Sequence
  Oligonucleotide for detection of SNP TSC0062355
rtaatttcaacta

SEQ ID NO: 255907 - DNA, 13 bp, Artificial Sequence
  Oligonucleotide for detection of SNP TSC0062355
tagttgtaattay

SEQ ID NO: 255908 - DNA, 13 bp, Artificial Sequence
  Oligonucleotide for detection of SNP TSC0062355
rtaattacaacta

SEQ ID NO: 255909 - DNA, 13 bp, Artificial Sequence
  Oligonucleotide for detection of SNP TSC0062356
ttgtagttggaty

SEQ ID NO: 255910 - DNA, 13 bp, Artificial Sequence
  Oligonucleotide for detection of SNP TSC0062356
ratccaactacaa

SEQ ID NO: 255911 - DNA, 13 bp, Artificial Sequence
  Oligonucleotide for detection of SNP TSC0062356
ttgtaggtggaty

SEQ ID NO: 255912 - DNA, 13 bp, Artificial Sequence
  Oligonucleotide for detection of SNP TSC0062356
ratccacctacaa

SEQ ID NO: 255913 - DNA, 13 bp, Artificial Sequence
  Oligonucleotide for detection of SNP TSC0062356
ggtttagttgtaa

SEQ ID NO: 255914 - DNA, 13 bp, Artificial Sequence
  Oligonucleotide for detection of SNP TSC0062356
ttacaactaaacc

SEQ ID NO: 255915 - DNA, 13 bp, Artificial Sequence
  Oligonucleotide for detection of SNP TSC0062356
ggtttatttgtaa

SEQ ID NO: 255916 - DNA, 13 bp, Artificial Sequence
  Oligonucleotide for detection of SNP TSC0062356
ttacaaataaacc

SEQ ID NO: 255917 - DNA, 13 bp, Artificial Sequence
  Oligonucleotide for detection of SNP TSC0062360
tatagtaagaagg

SEQ ID NO: 255918 - DNA, 13 bp, Artificial Sequence
  Oligonucleotide for detection of SNP TSC0062360
ccttcttactata

SEQ ID NO: 255919 - DNA, 13 bp, Artificial Sequence
  Oligonucleotide for detection of SNP TSC0062360
tatagtgagaagg

SEQ ID NO: 255920 - DNA, 13 bp, Artificial Sequence
  Oligonucleotide for detection of SNP TSC0062360
ccttctcactata

SEQ ID NO: 255921 - DNA, 13 bp, Artificial Sequence
  Oligonucleotide for detection of SNP TSC0062360
tatagcgagaagg

SEQ ID NO: 255922 - DNA, 13 bp, Artificial Sequence
  Oligonucleotide for detection of SNP TSC0062360
ccttctcgctata

SEQ ID NO: 255923 - DNA, 13 bp, Artificial Sequence
  Oligonucleotide for detection of SNP TSC0062361
ttggtaaggttty

SEQ ID NO: 255924 - DNA, 13 bp, Artificial Sequence
  Oligonucleotide for detection of SNP TSC0062361
raaaccttaccaa

SEQ ID NO: 255925 - DNA, 13 bp, Artificial Sequence
  Oligonucleotide for detection of SNP TSC0062361
ttggtagggttty

SEQ ID NO: 255926 - DNA, 13 bp, Artificial Sequence
  Oligonucleotide for detection of SNP TSC0062361
raaaccctaccaa

SEQ ID NO: 255927 - DNA, 13 bp, Artificial Sequence
  Oligonucleotide for detection of SNP TSC0062362
tagatgagaaagg

SEQ ID NO: 255928 - DNA, 13 bp, Artificial Sequence
  Oligonucleotide for detection of SNP TSC0062362
cctttctcatcta

SEQ ID NO: 255929 - DNA, 13 bp, Artificial Sequence
  Oligonucleotide for detection of SNP TSC0062362
tagatgggaaagg

SEQ ID NO: 255930 - DNA, 13 bp, Artificial Sequence
  Oligonucleotide for detection of SNP TSC0062362
cctttcccatcta

SEQ ID NO: 255931 - DNA, 13 bp, Artificial Sequence
  Oligonucleotide for detection of SNP TSC0062363
tgtgagtgttaat

SEQ ID NO: 255932 - DNA, 13 bp, Artificial Sequence
  Oligonucleotide for detection of SNP TSC0062363
attaacactcaca

SEQ ID NO: 255933 - DNA, 13 bp, Artificial Sequence
  Oligonucleotide for detection of SNP TSC0062363
tgtgagggttaat

SEQ ID NO: 255934 - DNA, 13 bp, Artificial Sequence
  Oligonucleotide for detection of SNP TSC0062363
attaaccctcaca

SEQ ID NO: 255935 - DNA, 13 bp, Artificial Sequence
  Oligonucleotide for detection of SNP TSC0062363
attaatatttata

SEQ ID NO: 255936 - DNA, 13 bp, Artificial Sequence
  Oligonucleotide for detection of SNP TSC0062363
tataaatattaat

SEQ ID NO: 255937 - DNA, 13 bp, Artificial Sequence
  Oligonucleotide for detection of SNP TSC0062363
attaatttttata

SEQ ID NO: 255938 - DNA, 13 bp, Artificial Sequence
  Oligonucleotide for detection of SNP TSC0062363
tataaaaattaat

SEQ ID NO: 255939 - DNA, 13 bp, Artificial Sequence
  Oligonucleotide for detection of SNP TSC0009355
aaggtgagtggat

SEQ ID NO: 255940 - DNA, 13 bp, Artificial Sequence
  Oligonucleotide for detection of SNP TSC0009355
atccactcacctt

SEQ ID NO: 255941 - DNA, 13 bp, Artificial Sequence
  Oligonucleotide for detection of SNP TSC0009355
aaggtgggtggat

SEQ ID NO: 255942 - DNA, 13 bp, Artificial Sequence
  Oligonucleotide for detection of SNP TSC0009355
atccacccacctt

SEQ ID NO: 255943 - DNA, 13 bp, Artificial Sequence
  Oligonucleotide for detection of SNP TSC0009355
aaggcgagtggat

SEQ ID NO: 255944 - DNA, 13 bp, Artificial Sequence
  Oligonucleotide for detection of SNP TSC0009355
atccactcgcctt

SEQ ID NO: 255945 - DNA, 13 bp, Artificial Sequence
  Oligonucleotide for detection of SNP TSC0009355
aaggcgggtggat

SEQ ID NO: 255946 - DNA, 13 bp, Artificial Sequence
  Oligonucleotide for detection of SNP TSC0009355
atccacccgcctt

SEQ ID NO: 255947 - DNA, 13 bp, Artificial Sequence
  Oligonucleotide for detection of SNP TSC0062369
tggaattgatata

SEQ ID NO: 255948 - DNA, 13 bp, Artificial Sequence
  Oligonucleotide for detection of SNP TSC0062369
tatatcaattcca

SEQ ID NO: 255949 - DNA, 13 bp, Artificial Sequence
  Oligonucleotide for detection of SNP TSC0062369
tggaatcgatata

SEQ ID NO: 255950 - DNA, 13 bp, Artificial Sequence
  Oligonucleotide for detection of SNP TSC0062369
tatatcgattcca

SEQ ID NO: 255951 - DNA, 13 bp, Artificial Sequence
  Oligonucleotide for detection of SNP TSC0062370
attaaattgtatt

SEQ ID NO: 255952 - DNA, 13 bp, Artificial Sequence
  Oligonucleotide for detection of SNP TSC0062370
aatacaatttaat

SEQ ID NO: 255953 - DNA, 13 bp, Artificial Sequence
  Oligonucleotide for detection of SNP TSC0062370
attaaagtgtatt

SEQ ID NO: 255954 - DNA, 13 bp, Artificial Sequence
  Oligonucleotide for detection of SNP TSC0062370
aatacactttaat

SEQ ID NO: 255955 - DNA, 13 bp, Artificial Sequence
  Oligonucleotide for detection of SNP TSC0062370
aatataatttaat

SEQ ID NO: 255956 - DNA, 13 bp, Artificial Sequence
  Oligonucleotide for detection of SNP TSC0062370
attaaattatatt

SEQ ID NO: 255957 - DNA, 13 bp, Artificial Sequence
  Oligonucleotide for detection of SNP TSC0007193
atatggtgtaaag

SEQ ID NO: 255958 - DNA, 13 bp, Artificial Sequence
  Oligonucleotide for detection of SNP TSC0007193
ctttacaccatat

SEQ ID NO: 255959 - DNA, 13 bp, Artificial Sequence
  Oligonucleotide for detection of SNP TSC0007193
atatggggtaaag

SEQ ID NO: 255960 - DNA, 13 bp, Artificial Sequence
  Oligonucleotide for detection of SNP TSC0007193
ctttaccccatat

SEQ ID NO: 255961 - DNA, 13 bp, Artificial Sequence
  Oligonucleotide for detection of SNP TSC0007193
atatggcgtaaag

SEQ ID NO: 255962 - DNA, 13 bp, Artificial Sequence
  Oligonucleotide for detection of SNP TSC0007193
ctttacgccatat

SEQ ID NO: 255963 - DNA, 13 bp, Artificial Sequence
  Oligonucleotide for detection of SNP TSC0007193
ttttatattatat

SEQ ID NO: 255964 - DNA, 13 bp, Artificial Sequence
  Oligonucleotide for detection of SNP TSC0007193
atataatataaaa

SEQ ID NO: 255965 - DNA, 13 bp, Artificial Sequence
  Oligonucleotide for detection of SNP TSC0007193
ttttacgttatat

SEQ ID NO: 255966 - DNA, 13 bp, Artificial Sequence
  Oligonucleotide for detection of SNP TSC0007193
atataacgtaaaa

SEQ ID NO: 255967 - DNA, 13 bp, Artificial Sequence
  Oligonucleotide for detection of SNP TSC0006560
attttgaagtgaa

SEQ ID NO: 255968 - DNA, 13 bp, Artificial Sequence
  Oligonucleotide for detection of SNP TSC0006560
ttcacttcaaaat

SEQ ID NO: 255969 - DNA, 13 bp, Artificial Sequence
  Oligonucleotide for detection of SNP TSC0006560
attttggagtgaa

SEQ ID NO: 255970 - DNA, 13 bp, Artificial Sequence
  Oligonucleotide for detection of SNP TSC0006560
ttcactccaaaat

SEQ ID NO: 255971 - DNA, 13 bp, Artificial Sequence
  Oligonucleotide for detection of SNP TSC0006560
atttcgaagtgaa

SEQ ID NO: 255972 - DNA, 13 bp, Artificial Sequence
  Oligonucleotide for detection of SNP TSC0006560
ttcacttcgaaat

SEQ ID NO: 255973 - DNA, 13 bp, Artificial Sequence
  Oligonucleotide for detection of SNP TSC0006560
atttcggagtgaa

SEQ ID NO: 255974 - DNA, 13 bp, Artificial Sequence
  Oligonucleotide for detection of SNP TSC0006560
ttcactccgaaat

SEQ ID NO: 255975 - DNA, 13 bp, Artificial Sequence
  Oligonucleotide for detection of SNP TSC0062372
tataatatgtggy

SEQ ID NO: 255976 - DNA, 13 bp, Artificial Sequence
  Oligonucleotide for detection of SNP TSC0062372
rccacatattata

SEQ ID NO: 255977 - DNA, 13 bp, Artificial Sequence
  Oligonucleotide for detection of SNP TSC0062372
tataatgtgtggy

SEQ ID NO: 255978 - DNA, 13 bp, Artificial Sequence
  Oligonucleotide for detection of SNP TSC0062372
rccacacattata

SEQ ID NO: 255979 - DNA, 13 bp, Artificial Sequence
  Oligonucleotide for detection of SNP TSC0062373
tgagtaatagaag

SEQ ID NO: 255980 - DNA, 13 bp, Artificial Sequence
  Oligonucleotide for detection of SNP TSC0062373
cttctattactca

SEQ ID NO: 255981 - DNA, 13 bp, Artificial Sequence
  Oligonucleotide for detection of SNP TSC0062373
tgagtattagaag

SEQ ID NO: 255982 - DNA, 13 bp, Artificial Sequence
  Oligonucleotide for detection of SNP TSC0062373
cttctaatactca

SEQ ID NO: 255983 - DNA, 13 bp, Artificial Sequence
  Oligonucleotide for detection of SNP TSC0062373
tttttggtattta

SEQ ID NO: 255984 - DNA, 13 bp, Artificial Sequence
  Oligonucleotide for detection of SNP TSC0062373
taaataccaaaaa

SEQ ID NO: 255985 - DNA, 13 bp, Artificial Sequence
  Oligonucleotide for detection of SNP TSC0007210
tataaagaagaaa

SEQ ID NO: 255986 - DNA, 13 bp, Artificial Sequence
  Oligonucleotide for detection of SNP TSC0007210
tttcttctttata

SEQ ID NO: 255987 - DNA, 13 bp, Artificial Sequence
  Oligonucleotide for detection of SNP TSC0007210
tataaaaaagaaa

SEQ ID NO: 255988 - DNA, 13 bp, Artificial Sequence
  Oligonucleotide for detection of SNP TSC0007210
tttcttttttata

SEQ ID NO: 255989 - DNA, 13 bp, Artificial Sequence
  Oligonucleotide for detection of SNP TSC0062374
taaaatatagtat

SEQ ID NO: 255990 - DNA, 13 bp, Artificial Sequence
  Oligonucleotide for detection of SNP TSC0062374
atactatatttta

SEQ ID NO: 255991 - DNA, 13 bp, Artificial Sequence
  Oligonucleotide for detection of SNP TSC0062374
taaaatgtagtat

SEQ ID NO: 255992 - DNA, 13 bp, Artificial Sequence
  Oligonucleotide for detection of SNP TSC0062374
atactacatttta

SEQ ID NO: 255993 - DNA, 13 bp, Artificial Sequence
  Oligonucleotide for detection of SNP TSC0062375
tttaattgatata

SEQ ID NO: 255994 - DNA, 13 bp, Artificial Sequence
  Oligonucleotide for detection of SNP TSC0062375
tatatcaattaaa

SEQ ID NO: 255995 - DNA, 13 bp, Artificial Sequence
  Oligonucleotide for detection of SNP TSC0062375
tttaatggatata

SEQ ID NO: 255996 - DNA, 13 bp, Artificial Sequence
  Oligonucleotide for detection of SNP TSC0062375
tatatccattaaa

SEQ ID NO: 255997 - DNA, 13 bp, Artificial Sequence
  Oligonucleotide for detection of SNP TSC0062375
tatgttaattgaa

SEQ ID NO: 255998 - DNA, 13 bp, Artificial Sequence
  Oligonucleotide for detection of SNP TSC0062375
ttcaattaacata

SEQ ID NO: 255999 - DNA, 13 bp, Artificial Sequence
  Oligonucleotide for detection of SNP TSC0062375
tatgtttattgaa

SEQ ID NO: 256000 - DNA, 13 bp, Artificial Sequence
  Oligonucleotide for detection of SNP TSC0062375
ttcaataaacata

SEQ ID NO: 256001 - DNA, 13 bp, Artificial Sequence
  Oligonucleotide for detection of SNP TSC0006427
ttttaagatttgt

SEQ ID NO: 256002 - DNA, 13 bp, Artificial Sequence
  Oligonucleotide for detection of SNP TSC0006427
acaaatcttaaaa

SEQ ID NO: 256003 - DNA, 13 bp, Artificial Sequence
  Oligonucleotide for detection of SNP TSC0006427
ttttaaaatttgt

SEQ ID NO: 256004 - DNA, 13 bp, Artificial Sequence
  Oligonucleotide for detection of SNP TSC0006427
acaaattttaaaa

SEQ ID NO: 256005 - DNA, 13 bp, Artificial Sequence
  Oligonucleotide for detection of SNP TSC0006428
ttgtaggttaaag

SEQ ID NO: 256006 - DNA, 13 bp, Artificial Sequence
  Oligonucleotide for detection of SNP TSC0006428
ctttaacctacaa

SEQ ID NO: 256007 - DNA, 13 bp, Artificial Sequence
  Oligonucleotide for detection of SNP TSC0006428
ttgtagattaaag

SEQ ID NO: 256008 - DNA, 13 bp, Artificial Sequence
  Oligonucleotide for detection of SNP TSC0006428
ctttaatctacaa

SEQ ID NO: 256009 - DNA, 13 bp, Artificial Sequence
  Oligonucleotide for detection of SNP TSC0006428
tcgtaggttaaag

SEQ ID NO: 256010 - DNA, 13 bp, Artificial Sequence
  Oligonucleotide for detection of SNP TSC0006428
ctttaacctacga

SEQ ID NO: 256011 - DNA, 13 bp, Artificial Sequence
  Oligonucleotide for detection of SNP TSC0006428
tcgtagattaaag

SEQ ID NO: 256012 - DNA, 13 bp, Artificial Sequence
  Oligonucleotide for detection of SNP TSC0006428
ctttaatctacga

SEQ ID NO: 256013 - DNA, 13 bp, Artificial Sequence
  Oligonucleotide for detection of SNP TSC0062377
tatgttgtatata

SEQ ID NO: 256014 - DNA, 13 bp, Artificial Sequence
  Oligonucleotide for detection of SNP TSC0062377
tatatacaacata

SEQ ID NO: 256015 - DNA, 13 bp, Artificial Sequence
  Oligonucleotide for detection of SNP TSC0062377
tatgtcgtatata

SEQ ID NO: 256016 - DNA, 13 bp, Artificial Sequence
  Oligonucleotide for detection of SNP TSC0062377
tatatacgacata

SEQ ID NO: 256017 - DNA, 13 bp, Artificial Sequence
  Oligonucleotide for detection of SNP TSC0062378
attggtatattgt

SEQ ID NO: 256018 - DNA, 13 bp, Artificial Sequence
  Oligonucleotide for detection of SNP TSC0062378
acaatataccaat

SEQ ID NO: 256019 - DNA, 13 bp, Artificial Sequence
  Oligonucleotide for detection of SNP TSC0062378
attggtgtattgt

SEQ ID NO: 256020 - DNA, 13 bp, Artificial Sequence
  Oligonucleotide for detection of SNP TSC0062378
acaatacaccaat

SEQ ID NO: 256021 - DNA, 13 bp, Artificial Sequence
  Oligonucleotide for detection of SNP TSC0062385
agttgtgtagttt

SEQ ID NO: 256022 - DNA, 13 bp, Artificial Sequence
  Oligonucleotide for detection of SNP TSC0062385
aaactacacaact

SEQ ID NO: 256023 - DNA, 13 bp, Artificial Sequence
  Oligonucleotide for detection of SNP TSC0062385
agttgtatagttt

SEQ ID NO: 256024 - DNA, 13 bp, Artificial Sequence
  Oligonucleotide for detection of SNP TSC0062385
aaactatacaact

SEQ ID NO: 256025 - DNA, 13 bp, Artificial Sequence
  Oligonucleotide for detection of SNP TSC0062385
agttgcgtagttt

SEQ ID NO: 256026 - DNA, 13 bp, Artificial Sequence
  Oligonucleotide for detection of SNP TSC0062385
aaactacgcaact

SEQ ID NO: 256027 - DNA, 13 bp, Artificial Sequence
  Oligonucleotide for detection of SNP TSC0062387
atttagtgttttg

SEQ ID NO: 256028 - DNA, 13 bp, Artificial Sequence
  Oligonucleotide for detection of SNP TSC0062387
caaaacactaaat

SEQ ID NO: 256029 - DNA, 13 bp, Artificial Sequence
  Oligonucleotide for detection of SNP TSC0062387
atttagcgttttg

SEQ ID NO: 256030 - DNA, 13 bp, Artificial Sequence
  Oligonucleotide for detection of SNP TSC0062387
caaaacgctaaat

SEQ ID NO: 256031 - DNA, 13 bp, Artificial Sequence
  Oligonucleotide for detection of SNP TSC0062387
tagaatgttaaat

SEQ ID NO: 256032 - DNA, 13 bp, Artificial Sequence
  Oligonucleotide for detection of SNP TSC0062387
atttaacattcta

SEQ ID NO: 256033 - DNA, 13 bp, Artificial Sequence
  Oligonucleotide for detection of SNP TSC0062387
tagaatattaaat

SEQ ID NO: 256034 - DNA, 13 bp, Artificial Sequence
  Oligonucleotide for detection of SNP TSC0062387
atttaatattcta

SEQ ID NO: 256035 - DNA, 13 bp, Artificial Sequence
  Oligonucleotide for detection of SNP TSC0062387
tagaacgttaaat

SEQ ID NO: 256036 - DNA, 13 bp, Artificial Sequence
  Oligonucleotide for detection of SNP TSC0062387
atttaacgttcta

SEQ ID NO: 256037 - DNA, 13 bp, Artificial Sequence
  Oligonucleotide for detection of SNP TSC0062388
aaaattgaattta

SEQ ID NO: 256038 - DNA, 13 bp, Artificial Sequence
  Oligonucleotide for detection of SNP TSC0062388
taaattcaatttt

SEQ ID NO: 256039 - DNA, 13 bp, Artificial Sequence
  Oligonucleotide for detection of SNP TSC0062389
atgtttgtttgta

SEQ ID NO: 256040 - DNA, 13 bp, Artificial Sequence
  Oligonucleotide for detection of SNP TSC0062389
tacaaacaaacat

SEQ ID NO: 256041 - DNA, 13 bp, Artificial Sequence
  Oligonucleotide for detection of SNP TSC0062389
atgtttatttgta

SEQ ID NO: 256042 - DNA, 13 bp, Artificial Sequence
  Oligonucleotide for detection of SNP TSC0062389
tacaaataaacat

SEQ ID NO: 256043 - DNA, 13 bp, Artificial Sequence
  Oligonucleotide for detection of SNP TSC0062390
tgtttggaggttt

SEQ ID NO: 256044 - DNA, 13 bp, Artificial Sequence
  Oligonucleotide for detection of SNP TSC0062390
aaacctccaaaca

SEQ ID NO: 256045 - DNA, 13 bp, Artificial Sequence
  Oligonucleotide for detection of SNP TSC0062390
tgtttgaaggttt

SEQ ID NO: 256046 - DNA, 13 bp, Artificial Sequence
  Oligonucleotide for detection of SNP TSC0062390
aaaccttcaaaca

SEQ ID NO: 256047 - DNA, 13 bp, Artificial Sequence
  Oligonucleotide for detection of SNP TSC0062391
ttaaataatgtat

SEQ ID NO: 256048 - DNA, 13 bp, Artificial Sequence
  Oligonucleotide for detection of SNP TSC0062391
atacattatttaa

SEQ ID NO: 256049 - DNA, 13 bp, Artificial Sequence
  Oligonucleotide for detection of SNP TSC0062391
ttaaatgatgtat

SEQ ID NO: 256050 - DNA, 13 bp, Artificial Sequence
  Oligonucleotide for detection of SNP TSC0062391
atacatcatttaa

SEQ ID NO: 256051 - DNA, 13 bp, Artificial Sequence
  Oligonucleotide for detection of SNP TSC0062391
ttaaataacgtat

SEQ ID NO: 256052 - DNA, 13 bp, Artificial Sequence
  Oligonucleotide for detection of SNP TSC0062391
atacgttatttaa

SEQ ID NO: 256053 - DNA, 13 bp, Artificial Sequence
  Oligonucleotide for detection of SNP TSC0062391
ttaaacgatgtat

SEQ ID NO: 256054 - DNA, 13 bp, Artificial Sequence
  Oligonucleotide for detection of SNP TSC0062391
atacatcgtttaa

SEQ ID NO: 256055 - DNA, 13 bp, Artificial Sequence
  Oligonucleotide for detection of SNP TSC0062391
ttaaatgacgtat

SEQ ID NO: 256056 - DNA, 13 bp, Artificial Sequence
  Oligonucleotide for detection of SNP TSC0062391
atacgtcatttaa

SEQ ID NO: 256057 - DNA, 13 bp, Artificial Sequence
  Oligonucleotide for detection of SNP TSC0062391
ttaaacgacgtat

SEQ ID NO: 256058 - DNA, 13 bp, Artificial Sequence
  Oligonucleotide for detection of SNP TSC0062391
atacgtcgtttaa

SEQ ID NO: 256059 - DNA, 13 bp, Artificial Sequence
  Oligonucleotide for detection of SNP TSC0062391
atgcgttgtttaa

SEQ ID NO: 256060 - DNA, 13 bp, Artificial Sequence
  Oligonucleotide for detection of SNP TSC0062391
ttaaacaacgcat

SEQ ID NO: 256061 - DNA, 13 bp, Artificial Sequence
  Oligonucleotide for detection of SNP TSC0062391
atgtgtcgtttaa

SEQ ID NO: 256062 - DNA, 13 bp, Artificial Sequence
  Oligonucleotide for detection of SNP TSC0062391
ttaaacgacacat

SEQ ID NO: 256063 - DNA, 13 bp, Artificial Sequence
  Oligonucleotide for detection of SNP TSC0062391
atgcgtcgtttaa

SEQ ID NO: 256064 - DNA, 13 bp, Artificial Sequence
  Oligonucleotide for detection of SNP TSC0062391
ttaaacgacgcat

SEQ ID NO: 256065 - DNA, 13 bp, Artificial Sequence
  Oligonucleotide for detection of SNP TSC0062393
atttgtaatatgt

SEQ ID NO: 256066 - DNA, 13 bp, Artificial Sequence
  Oligonucleotide for detection of SNP TSC0062393
acatattacaaat

SEQ ID NO: 256067 - DNA, 13 bp, Artificial Sequence
  Oligonucleotide for detection of SNP TSC0062393
atttgttatatgt

SEQ ID NO: 256068 - DNA, 13 bp, Artificial Sequence
  Oligonucleotide for detection of SNP TSC0062393
acatataacaaat

SEQ ID NO: 256069 - DNA, 13 bp, Artificial Sequence
  Oligonucleotide for detection of SNP TSC0062393
atatattataaat

SEQ ID NO: 256070 - DNA, 13 bp, Artificial Sequence
  Oligonucleotide for detection of SNP TSC0062393
atttataatatat

SEQ ID NO: 256071 - DNA, 13 bp, Artificial Sequence
  Oligonucleotide for detection of SNP TSC0062393
atatataataaat

SEQ ID NO: 256072 - DNA, 13 bp, Artificial Sequence
  Oligonucleotide for detection of SNP TSC0062393
atttattatatat

SEQ ID NO: 256073 - DNA, 13 bp, Artificial Sequence
  Oligonucleotide for detection of SNP TSC0062396
atttttattggtt

SEQ ID NO: 256074 - DNA, 13 bp, Artificial Sequence
  Oligonucleotide for detection of SNP TSC0062396
aaccaataaaaat

SEQ ID NO: 256075 - DNA, 13 bp, Artificial Sequence
  Oligonucleotide for detection of SNP TSC0062396
attttttttggtt

SEQ ID NO: 256076 - DNA, 13 bp, Artificial Sequence
  Oligonucleotide for detection of SNP TSC0062396
aaccaaaaaaaat

SEQ ID NO: 256077 - DNA, 13 bp, Artificial Sequence
  Oligonucleotide for detection of SNP TSC0062396
aattagtaggagt

SEQ ID NO: 256078 - DNA, 13 bp, Artificial Sequence
  Oligonucleotide for detection of SNP TSC0062396
actcctactaatt

SEQ ID NO: 256079 - DNA, 13 bp, Artificial Sequence
  Oligonucleotide for detection of SNP TSC0062396
aattaggaggagt

SEQ ID NO: 256080 - DNA, 13 bp, Artificial Sequence
  Oligonucleotide for detection of SNP TSC0062396
actcctcctaatt

SEQ ID NO: 256081 - DNA, 13 bp, Artificial Sequence
  Oligonucleotide for detection of SNP TSC0062398
atatttcgttaat

SEQ ID NO: 256082 - DNA, 13 bp, Artificial Sequence
  Oligonucleotide for detection of SNP TSC0062398
attaacgaaatat

SEQ ID NO: 256083 - DNA, 13 bp, Artificial Sequence
  Oligonucleotide for detection of SNP TSC0062398
attagtgaggtgt

SEQ ID NO: 256084 - DNA, 13 bp, Artificial Sequence
  Oligonucleotide for detection of SNP TSC0062398
acacctcactaat

SEQ ID NO: 256085 - DNA, 13 bp, Artificial Sequence
  Oligonucleotide for detection of SNP TSC0062398
attagttaggtgt

SEQ ID NO: 256086 - DNA, 13 bp, Artificial Sequence
  Oligonucleotide for detection of SNP TSC0062398
acacctaactaat

SEQ ID NO: 256087 - DNA, 13 bp, Artificial Sequence
  Oligonucleotide for detection of SNP TSC0062398
attagcgaggtgt

SEQ ID NO: 256088 - DNA, 13 bp, Artificial Sequence
  Oligonucleotide for detection of SNP TSC0062398
acacctcgctaat

SEQ ID NO: 256089 - DNA, 13 bp, Artificial Sequence
  Oligonucleotide for detection of SNP TSC0062400
atgaatgtagttt

SEQ ID NO: 256090 - DNA, 13 bp, Artificial Sequence
  Oligonucleotide for detection of SNP TSC0062400
aaactacattcat

SEQ ID NO: 256091 - DNA, 13 bp, Artificial Sequence
  Oligonucleotide for detection of SNP TSC0062400
atgaatatagttt

SEQ ID NO: 256092 - DNA, 13 bp, Artificial Sequence
  Oligonucleotide for detection of SNP TSC0062400
aaactatattcat

SEQ ID NO: 256093 - DNA, 13 bp, Artificial Sequence
  Oligonucleotide for detection of SNP TSC0062400
acgaatgtagttt

SEQ ID NO: 256094 - DNA, 13 bp, Artificial Sequence
  Oligonucleotide for detection of SNP TSC0062400
aaactacattcgt

SEQ ID NO: 256095 - DNA, 13 bp, Artificial Sequence
  Oligonucleotide for detection of SNP TSC0062400
acgaatatagttt

SEQ ID NO: 256096 - DNA, 13 bp, Artificial Sequence
  Oligonucleotide for detection of SNP TSC0062400
aaactatattcgt

SEQ ID NO: 256097 - DNA, 13 bp, Artificial Sequence
  Oligonucleotide for detection of SNP TSC0062401
aaaaaaggttgga

SEQ ID NO: 256098 - DNA, 13 bp, Artificial Sequence
  Oligonucleotide for detection of SNP TSC0062401
tccaacctttttt

SEQ ID NO: 256099 - DNA, 13 bp, Artificial Sequence
  Oligonucleotide for detection of SNP TSC0062401
aaaaaaagttgga

SEQ ID NO: 256100 - DNA, 13 bp, Artificial Sequence
  Oligonucleotide for detection of SNP TSC0062401
tccaacttttttt

SEQ ID NO: 256101 - DNA, 13 bp, Artificial Sequence
  Oligonucleotide for detection of SNP TSC0062402
tttaaagaaggty

SEQ ID NO: 256102 - DNA, 13 bp, Artificial Sequence
  Oligonucleotide for detection of SNP TSC0062402
raccttctttaaa

SEQ ID NO: 256103 - DNA, 13 bp, Artificial Sequence
  Oligonucleotide for detection of SNP TSC0062402
tttaaaaaaggty

SEQ ID NO: 256104 - DNA, 13 bp, Artificial Sequence
  Oligonucleotide for detection of SNP TSC0062402
raccttttttaaa

SEQ ID NO: 256105 - DNA, 13 bp, Artificial Sequence
  Oligonucleotide for detection of SNP TSC0062403
ttttggaagaaat

SEQ ID NO: 256106 - DNA, 13 bp, Artificial Sequence
  Oligonucleotide for detection of SNP TSC0062403
atttcttccaaaa

SEQ ID NO: 256107 - DNA, 13 bp, Artificial Sequence
  Oligonucleotide for detection of SNP TSC0062403
ttttgggagaaat

SEQ ID NO: 256108 - DNA, 13 bp, Artificial Sequence
  Oligonucleotide for detection of SNP TSC0062403
atttctcccaaaa

SEQ ID NO: 256109 - DNA, 13 bp, Artificial Sequence
  Oligonucleotide for detection of SNP TSC0062404
agggaatggggty

SEQ ID NO: 256110 - DNA, 13 bp, Artificial Sequence
  Oligonucleotide for detection of SNP TSC0062404
raccccattccct

SEQ ID NO: 256111 - DNA, 13 bp, Artificial Sequence
  Oligonucleotide for detection of SNP TSC0062404
agggaacggggty

SEQ ID NO: 256112 - DNA, 13 bp, Artificial Sequence
  Oligonucleotide for detection of SNP TSC0062404
raccccgttccct

SEQ ID NO: 256113 - DNA, 13 bp, Artificial Sequence
  Oligonucleotide for detection of SNP TSC0062404
gatttcgtttttt

SEQ ID NO: 256114 - DNA, 13 bp, Artificial Sequence
  Oligonucleotide for detection of SNP TSC0062404
aaaaaacgaaatc

SEQ ID NO: 256115 - DNA, 13 bp, Artificial Sequence
  Oligonucleotide for detection of SNP TSC0001678
tgaagtatattty

SEQ ID NO: 256116 - DNA, 13 bp, Artificial Sequence
  Oligonucleotide for detection of SNP TSC0001678
raaatatacttca

SEQ ID NO: 256117 - DNA, 13 bp, Artificial Sequence
  Oligonucleotide for detection of SNP TSC0001678
tgaagtgtattty

SEQ ID NO: 256118 - DNA, 13 bp, Artificial Sequence
  Oligonucleotide for detection of SNP TSC0001678
raaatacacttca

SEQ ID NO: 256119 - DNA, 13 bp, Artificial Sequence
  Oligonucleotide for detection of SNP TSC0001678
tgaagcgtattty

SEQ ID NO: 256120 - DNA, 13 bp, Artificial Sequence
  Oligonucleotide for detection of SNP TSC0001678
raaatacgcttca

SEQ ID NO: 256121 - DNA, 13 bp, Artificial Sequence
  Oligonucleotide for detection of SNP TSC0001678
gaagtgtgtttta

SEQ ID NO: 256122 - DNA, 13 bp, Artificial Sequence
  Oligonucleotide for detection of SNP TSC0001678
taaaacacacttc

SEQ ID NO: 256123 - DNA, 13 bp, Artificial Sequence
  Oligonucleotide for detection of SNP TSC0001678
gaagtgcgtttta

SEQ ID NO: 256124 - DNA, 13 bp, Artificial Sequence
  Oligonucleotide for detection of SNP TSC0001678
taaaacgcacttc

SEQ ID NO: 256125 - DNA, 13 bp, Artificial Sequence
  Oligonucleotide for detection of SNP TSC0009908
ataaaatgatggg

SEQ ID NO: 256126 - DNA, 13 bp, Artificial Sequence
  Oligonucleotide for detection of SNP TSC0009908
cccatcattttat

SEQ ID NO: 256127 - DNA, 13 bp, Artificial Sequence
  Oligonucleotide for detection of SNP TSC0009908
ataaaacgatggg

SEQ ID NO: 256128 - DNA, 13 bp, Artificial Sequence
  Oligonucleotide for detection of SNP TSC0009908
cccatcgttttat

SEQ ID NO: 256129 - DNA, 13 bp, Artificial Sequence
  Oligonucleotide for detection of SNP TSC0062405
attttaagtgaga

SEQ ID NO: 256130 - DNA, 13 bp, Artificial Sequence
  Oligonucleotide for detection of SNP TSC0062405
tctcacttaaaat

SEQ ID NO: 256131 - DNA, 13 bp, Artificial Sequence
  Oligonucleotide for detection of SNP TSC0062405
attttaggtgaga

SEQ ID NO: 256132 - DNA, 13 bp, Artificial Sequence
  Oligonucleotide for detection of SNP TSC0062405
tctcacctaaaat

SEQ ID NO: 256133 - DNA, 13 bp, Artificial Sequence
  Oligonucleotide for detection of SNP TSC0062406
gggggagaaggta

SEQ ID NO: 256134 - DNA, 13 bp, Artificial Sequence
  Oligonucleotide for detection of SNP TSC0062406
taccttctccccc

SEQ ID NO: 256135 - DNA, 13 bp, Artificial Sequence
  Oligonucleotide for detection of SNP TSC0062406
gggggataaggta

SEQ ID NO: 256136 - DNA, 13 bp, Artificial Sequence
  Oligonucleotide for detection of SNP TSC0062406
taccttatccccc

SEQ ID NO: 256137 - DNA, 13 bp, Artificial Sequence
  Oligonucleotide for detection of SNP TSC0062407
gtttttaattttg

SEQ ID NO: 256138 - DNA, 13 bp, Artificial Sequence
  Oligonucleotide for detection of SNP TSC0062407
caaaattaaaaac

SEQ ID NO: 256139 - DNA, 13 bp, Artificial Sequence
  Oligonucleotide for detection of SNP TSC0062412
ttttgaggaggay

SEQ ID NO: 256140 - DNA, 13 bp, Artificial Sequence
  Oligonucleotide for detection of SNP TSC0062412
rtcctcctcaaaa

SEQ ID NO: 256141 - DNA, 13 bp, Artificial Sequence
  Oligonucleotide for detection of SNP TSC0062412
ttttgaagaggay

SEQ ID NO: 256142 - DNA, 13 bp, Artificial Sequence
  Oligonucleotide for detection of SNP TSC0062412
rtcctcttcaaaa

SEQ ID NO: 256143 - DNA, 13 bp, Artificial Sequence
  Oligonucleotide for detection of SNP TSC0062413
attgtggttttgy

SEQ ID NO: 256144 - DNA, 13 bp, Artificial Sequence
  Oligonucleotide for detection of SNP TSC0062413
rcaaaaccacaat

SEQ ID NO: 256145 - DNA, 13 bp, Artificial Sequence
  Oligonucleotide for detection of SNP TSC0062413
attgtgattttgy

SEQ ID NO: 256146 - DNA, 13 bp, Artificial Sequence
  Oligonucleotide for detection of SNP TSC0062413
rcaaaatcacaat

SEQ ID NO: 256147 - DNA, 13 bp, Artificial Sequence
  Oligonucleotide for detection of SNP TSC0062413
attgtggtttcgy

SEQ ID NO: 256148 - DNA, 13 bp, Artificial Sequence
  Oligonucleotide for detection of SNP TSC0062413
rcgaaaccacaat

SEQ ID NO: 256149 - DNA, 13 bp, Artificial Sequence
  Oligonucleotide for detection of SNP TSC0062413
attgtgatttcgy

SEQ ID NO: 256150 - DNA, 13 bp, Artificial Sequence
  Oligonucleotide for detection of SNP TSC0062413
rcgaaatcacaat

SEQ ID NO: 256151 - DNA, 13 bp, Artificial Sequence
  Oligonucleotide for detection of SNP TSC0000347
gatataatagtta

SEQ ID NO: 256152 - DNA, 13 bp, Artificial Sequence
  Oligonucleotide for detection of SNP TSC0000347
taactattatatc

SEQ ID NO: 256153 - DNA, 13 bp, Artificial Sequence
  Oligonucleotide for detection of SNP TSC0000347
gatatagtagtta

SEQ ID NO: 256154 - DNA, 13 bp, Artificial Sequence
  Oligonucleotide for detection of SNP TSC0000347
taactactatatc

SEQ ID NO: 256155 - DNA, 13 bp, Artificial Sequence
  Oligonucleotide for detection of SNP TSC0062416
gattttagataat

SEQ ID NO: 256156 - DNA, 13 bp, Artificial Sequence
  Oligonucleotide for detection of SNP TSC0062416
attatctaaaatc

SEQ ID NO: 256157 - DNA, 13 bp, Artificial Sequence
  Oligonucleotide for detection of SNP TSC0062416
gattttggataat

SEQ ID NO: 256158 - DNA, 13 bp, Artificial Sequence
  Oligonucleotide for detection of SNP TSC0062416
attatccaaaatc

SEQ ID NO: 256159 - DNA, 13 bp, Artificial Sequence
  Oligonucleotide for detection of SNP TSC0062416
gatttcggataat

SEQ ID NO: 256160 - DNA, 13 bp, Artificial Sequence
  Oligonucleotide for detection of SNP TSC0062416
attatccgaaatc

SEQ ID NO: 256161 - DNA, 13 bp, Artificial Sequence
  Oligonucleotide for detection of SNP TSC0062416
attgtttgggaty

SEQ ID NO: 256162 - DNA, 13 bp, Artificial Sequence
  Oligonucleotide for detection of SNP TSC0062416
ratcccaaacaat

SEQ ID NO: 256163 - DNA, 13 bp, Artificial Sequence
  Oligonucleotide for detection of SNP TSC0062416
attgttcgggaty

SEQ ID NO: 256164 - DNA, 13 bp, Artificial Sequence
  Oligonucleotide for detection of SNP TSC0062416
ratcccgaacaat

SEQ ID NO: 256165 - DNA, 13 bp, Artificial Sequence
  Oligonucleotide for detection of SNP TSC0062417
tgttttaagatgg

SEQ ID NO: 256166 - DNA, 13 bp, Artificial Sequence
  Oligonucleotide for detection of SNP TSC0062417
ccatcttaaaaca

SEQ ID NO: 256167 - DNA, 13 bp, Artificial Sequence
  Oligonucleotide for detection of SNP TSC0062417
tgttttgagatgg

SEQ ID NO: 256168 - DNA, 13 bp, Artificial Sequence
  Oligonucleotide for detection of SNP TSC0062417
ccatctcaaaaca

SEQ ID NO: 256169 - DNA, 13 bp, Artificial Sequence
  Oligonucleotide for detection of SNP TSC0062417
tgtttcgagatgg

SEQ ID NO: 256170 - DNA, 13 bp, Artificial Sequence
  Oligonucleotide for detection of SNP TSC0062417
ccatctcgaaaca

SEQ ID NO: 256171 - DNA, 13 bp, Artificial Sequence
  Oligonucleotide for detection of SNP TSC0062417
ttattttgaaata

SEQ ID NO: 256172 - DNA, 13 bp, Artificial Sequence
  Oligonucleotide for detection of SNP TSC0062417
tatttcaaaataa

SEQ ID NO: 256173 - DNA, 13 bp, Artificial Sequence
  Oligonucleotide for detection of SNP TSC0062418
gtggaaataaata

SEQ ID NO: 256174 - DNA, 13 bp, Artificial Sequence
  Oligonucleotide for detection of SNP TSC0062418
tatttatttccac

SEQ ID NO: 256175 - DNA, 13 bp, Artificial Sequence
  Oligonucleotide for detection of SNP TSC0062418
gtggaagtaaata

SEQ ID NO: 256176 - DNA, 13 bp, Artificial Sequence
  Oligonucleotide for detection of SNP TSC0062418
tatttacttccac

SEQ ID NO: 256177 - DNA, 13 bp, Artificial Sequence
  Oligonucleotide for detection of SNP TSC0062422
tttttttgagaaa

SEQ ID NO: 256178 - DNA, 13 bp, Artificial Sequence
  Oligonucleotide for detection of SNP TSC0062422
tttctcaaaaaaa

SEQ ID NO: 256179 - DNA, 13 bp, Artificial Sequence
  Oligonucleotide for detection of SNP TSC0062422
ttttttcgagaaa

SEQ ID NO: 256180 - DNA, 13 bp, Artificial Sequence
  Oligonucleotide for detection of SNP TSC0062422
tttctcgaaaaaa

SEQ ID NO: 256181 - DNA, 13 bp, Artificial Sequence
  Oligonucleotide for detection of SNP TSC0062422
ttttttggagaag

SEQ ID NO: 256182 - DNA, 13 bp, Artificial Sequence
  Oligonucleotide for detection of SNP TSC0062422
cttctccaaaaaa

SEQ ID NO: 256183 - DNA, 13 bp, Artificial Sequence
  Oligonucleotide for detection of SNP TSC0062422
ttttttagagaag

SEQ ID NO: 256184 - DNA, 13 bp, Artificial Sequence
  Oligonucleotide for detection of SNP TSC0062422
cttctctaaaaaa

SEQ ID NO: 256185 - DNA, 13 bp, Artificial Sequence
  Oligonucleotide for detection of SNP TSC0062422
tttttcggagaag

SEQ ID NO: 256186 - DNA, 13 bp, Artificial Sequence
  Oligonucleotide for detection of SNP TSC0062422
cttctccgaaaaa

SEQ ID NO: 256187 - DNA, 13 bp, Artificial Sequence
  Oligonucleotide for detection of SNP TSC0001200
tagtagatgatag

SEQ ID NO: 256188 - DNA, 13 bp, Artificial Sequence
  Oligonucleotide for detection of SNP TSC0001200
ctatcatctacta

SEQ ID NO: 256189 - DNA, 13 bp, Artificial Sequence
  Oligonucleotide for detection of SNP TSC0001200
tagtagttgatag

SEQ ID NO: 256190 - DNA, 13 bp, Artificial Sequence
  Oligonucleotide for detection of SNP TSC0001200
ctatcaactacta

SEQ ID NO: 256191 - DNA, 13 bp, Artificial Sequence
  Oligonucleotide for detection of SNP TSC0010142
gaatttttttaat

SEQ ID NO: 256192 - DNA, 13 bp, Artificial Sequence
  Oligonucleotide for detection of SNP TSC0010142
attaaaaaaattc

SEQ ID NO: 256193 - DNA, 13 bp, Artificial Sequence
  Oligonucleotide for detection of SNP TSC0010142
gaatttgtttaat

SEQ ID NO: 256194 - DNA, 13 bp, Artificial Sequence
  Oligonucleotide for detection of SNP TSC0010142
attaaacaaattc

SEQ ID NO: 256195 - DNA, 13 bp, Artificial Sequence
  Oligonucleotide for detection of SNP TSC0010142
attaaagagatty

SEQ ID NO: 256196 - DNA, 13 bp, Artificial Sequence
  Oligonucleotide for detection of SNP TSC0010142
raatctctttaat

SEQ ID NO: 256197 - DNA, 13 bp, Artificial Sequence
  Oligonucleotide for detection of SNP TSC0010142
attaaatagatty

SEQ ID NO: 256198 - DNA, 13 bp, Artificial Sequence
  Oligonucleotide for detection of SNP TSC0010142
raatctatttaat

SEQ ID NO: 256199 - DNA, 13 bp, Artificial Sequence
  Oligonucleotide for detection of SNP TSC0062423
gagtaagaataay

SEQ ID NO: 256200 - DNA, 13 bp, Artificial Sequence
  Oligonucleotide for detection of SNP TSC0062423
rttattcttactc

SEQ ID NO: 256201 - DNA, 13 bp, Artificial Sequence
  Oligonucleotide for detection of SNP TSC0062423
gagtaaaaataay

SEQ ID NO: 256202 - DNA, 13 bp, Artificial Sequence
  Oligonucleotide for detection of SNP TSC0062423
rttatttttactc

SEQ ID NO: 256203 - DNA, 13 bp, Artificial Sequence
  Oligonucleotide for detection of SNP TSC0008958
gtttggagttttg

SEQ ID NO: 256204 - DNA, 13 bp, Artificial Sequence
  Oligonucleotide for detection of SNP TSC0008958
caaaactccaaac

SEQ ID NO: 256205 - DNA, 13 bp, Artificial Sequence
  Oligonucleotide for detection of SNP TSC0008958
gtttggggttttg

SEQ ID NO: 256206 - DNA, 13 bp, Artificial Sequence
  Oligonucleotide for detection of SNP TSC0008958
caaaaccccaaac

SEQ ID NO: 256207 - DNA, 13 bp, Artificial Sequence
  Oligonucleotide for detection of SNP TSC0001669
tatggttgtggga

SEQ ID NO: 256208 - DNA, 13 bp, Artificial Sequence
  Oligonucleotide for detection of SNP TSC0001669
tcccacaaccata

SEQ ID NO: 256209 - DNA, 13 bp, Artificial Sequence
  Oligonucleotide for detection of SNP TSC0001669
tatggtcgtggga

SEQ ID NO: 256210 - DNA, 13 bp, Artificial Sequence
  Oligonucleotide for detection of SNP TSC0001669
tcccacgaccata

SEQ ID NO: 256211 - DNA, 13 bp, Artificial Sequence
  Oligonucleotide for detection of SNP TSC0001669
ttttacggttata

SEQ ID NO: 256212 - DNA, 13 bp, Artificial Sequence
  Oligonucleotide for detection of SNP TSC0001669
tataaccgtaaaa

SEQ ID NO: 256213 - DNA, 13 bp, Artificial Sequence
  Oligonucleotide for detection of SNP TSC0001121
ggagatggggagt

SEQ ID NO: 256214 - DNA, 13 bp, Artificial Sequence
  Oligonucleotide for detection of SNP TSC0001121
actccccatctcc

SEQ ID NO: 256215 - DNA, 13 bp, Artificial Sequence
  Oligonucleotide for detection of SNP TSC0001121
ggagatagggagt

SEQ ID NO: 256216 - DNA, 13 bp, Artificial Sequence
  Oligonucleotide for detection of SNP TSC0001121
actccctatctcc

SEQ ID NO: 256217 - DNA, 13 bp, Artificial Sequence
  Oligonucleotide for detection of SNP TSC0001321
tttttgggtaaaa

SEQ ID NO: 256218 - DNA, 13 bp, Artificial Sequence
  Oligonucleotide for detection of SNP TSC0001321
ttttacccaaaaa

SEQ ID NO: 256219 - DNA, 13 bp, Artificial Sequence
  Oligonucleotide for detection of SNP TSC0001321
tttttgagtaaaa

SEQ ID NO: 256220 - DNA, 13 bp, Artificial Sequence
  Oligonucleotide for detection of SNP TSC0001321
ttttactcaaaaa

SEQ ID NO: 256221 - DNA, 13 bp, Artificial Sequence
  Oligonucleotide for detection of SNP TSC0001322
atagaatgattaa

SEQ ID NO: 256222 - DNA, 13 bp, Artificial Sequence
  Oligonucleotide for detection of SNP TSC0001322
ttaatcattctat

SEQ ID NO: 256223 - DNA, 13 bp, Artificial Sequence
  Oligonucleotide for detection of SNP TSC0001322
atagaacgattaa

SEQ ID NO: 256224 - DNA, 13 bp, Artificial Sequence
  Oligonucleotide for detection of SNP TSC0001322
ttaatcgttctat

SEQ ID NO: 256225 - DNA, 13 bp, Artificial Sequence
  Oligonucleotide for detection of SNP TSC0001323
ttgtgaattataa

SEQ ID NO: 256226 - DNA, 13 bp, Artificial Sequence
  Oligonucleotide for detection of SNP TSC0001323
ttataattcacaa

SEQ ID NO: 256227 - DNA, 13 bp, Artificial Sequence
  Oligonucleotide for detection of SNP TSC0001323
ttgtgagttataa

SEQ ID NO: 256228 - DNA, 13 bp, Artificial Sequence
  Oligonucleotide for detection of SNP TSC0001323
ttataactcacaa

SEQ ID NO: 256229 - DNA, 13 bp, Artificial Sequence
  Oligonucleotide for detection of SNP TSC0001324
gagtttaaattty

SEQ ID NO: 256230 - DNA, 13 bp, Artificial Sequence
  Oligonucleotide for detection of SNP TSC0001324
raaatttaaactc

SEQ ID NO: 256231 - DNA, 13 bp, Artificial Sequence
  Oligonucleotide for detection of SNP TSC0001324
gagttttaattty

SEQ ID NO: 256232 - DNA, 13 bp, Artificial Sequence
  Oligonucleotide for detection of SNP TSC0001324
raaattaaaactc

SEQ ID NO: 256233 - DNA, 13 bp, Artificial Sequence
  Oligonucleotide for detection of SNP TSC0001324
gaaatttgaatty

SEQ ID NO: 256234 - DNA, 13 bp, Artificial Sequence
  Oligonucleotide for detection of SNP TSC0001324
raattcaaatttc

SEQ ID NO: 256235 - DNA, 13 bp, Artificial Sequence
  Oligonucleotide for detection of SNP TSC0001324
gaaattggaatty

SEQ ID NO: 256236 - DNA, 13 bp, Artificial Sequence
  Oligonucleotide for detection of SNP TSC0001324
raattccaatttc

SEQ ID NO: 256237 - DNA, 13 bp, Artificial Sequence
  Oligonucleotide for detection of SNP TSC0001398
gattagattggag

SEQ ID NO: 256238 - DNA, 13 bp, Artificial Sequence
  Oligonucleotide for detection of SNP TSC0001398
ctccaatctaatc

SEQ ID NO: 256239 - DNA, 13 bp, Artificial Sequence
  Oligonucleotide for detection of SNP TSC0001398
gattaggttggag

SEQ ID NO: 256240 - DNA, 13 bp, Artificial Sequence
  Oligonucleotide for detection of SNP TSC0001398
ctccaacctaatc

SEQ ID NO: 256241 - DNA, 13 bp, Artificial Sequence
  Oligonucleotide for detection of SNP TSC0001399
ttatttttagttt

SEQ ID NO: 256242 - DNA, 13 bp, Artificial Sequence
  Oligonucleotide for detection of SNP TSC0001399
aaactaaaaataa

SEQ ID NO: 256243 - DNA, 13 bp, Artificial Sequence
  Oligonucleotide for detection of SNP TSC0001399
aagttagaaatga

SEQ ID NO: 256244 - DNA, 13 bp, Artificial Sequence
  Oligonucleotide for detection of SNP TSC0001399
tcatttctaactt

SEQ ID NO: 256245 - DNA, 13 bp, Artificial Sequence
  Oligonucleotide for detection of SNP TSC0001399
aagttataaatga

SEQ ID NO: 256246 - DNA, 13 bp, Artificial Sequence
  Oligonucleotide for detection of SNP TSC0001399
tcatttataactt

SEQ ID NO: 256247 - DNA, 13 bp, Artificial Sequence
  Oligonucleotide for detection of SNP TSC0062429
ttttaggataatt

SEQ ID NO: 256248 - DNA, 13 bp, Artificial Sequence
  Oligonucleotide for detection of SNP TSC0062429
aattatcctaaaa

SEQ ID NO: 256249 - DNA, 13 bp, Artificial Sequence
  Oligonucleotide for detection of SNP TSC0062429
ttttagaataatt

SEQ ID NO: 256250 - DNA, 13 bp, Artificial Sequence
  Oligonucleotide for detection of SNP TSC0062429
aattattctaaaa

SEQ ID NO: 256251 - DNA, 13 bp, Artificial Sequence
  Oligonucleotide for detection of SNP TSC0062431
gttataaatgttt

SEQ ID NO: 256252 - DNA, 13 bp, Artificial Sequence
  Oligonucleotide for detection of SNP TSC0062431
aaacatttataac

SEQ ID NO: 256253 - DNA, 13 bp, Artificial Sequence
  Oligonucleotide for detection of SNP TSC0062433
tttattttgaagt

SEQ ID NO: 256254 - DNA, 13 bp, Artificial Sequence
  Oligonucleotide for detection of SNP TSC0062433
acttcaaaataaa

SEQ ID NO: 256255 - DNA, 13 bp, Artificial Sequence
  Oligonucleotide for detection of SNP TSC0062433
tttattgtgaagt

SEQ ID NO: 256256 - DNA, 13 bp, Artificial Sequence
  Oligonucleotide for detection of SNP TSC0062433
acttcacaataaa

SEQ ID NO: 256257 - DNA, 13 bp, Artificial Sequence
  Oligonucleotide for detection of SNP TSC0062433
tttatcgtgaagt

SEQ ID NO: 256258 - DNA, 13 bp, Artificial Sequence
  Oligonucleotide for detection of SNP TSC0062433
acttcacgataaa

SEQ ID NO: 256259 - DNA, 13 bp, Artificial Sequence
  Oligonucleotide for detection of SNP TSC0062433
attttaagatgag

SEQ ID NO: 256260 - DNA, 13 bp, Artificial Sequence
  Oligonucleotide for detection of SNP TSC0062433
ctcatcttaaaat

SEQ ID NO: 256261 - DNA, 13 bp, Artificial Sequence
  Oligonucleotide for detection of SNP TSC0062433
attttatgatgag

SEQ ID NO: 256262 - DNA, 13 bp, Artificial Sequence
  Oligonucleotide for detection of SNP TSC0062433
ctcatcataaaat

SEQ ID NO: 256263 - DNA, 13 bp, Artificial Sequence
  Oligonucleotide for detection of SNP TSC0062433
attttacgatgag

SEQ ID NO: 256264 - DNA, 13 bp, Artificial Sequence
  Oligonucleotide for detection of SNP TSC0062433
ctcatcgtaaaat

SEQ ID NO: 256265 - DNA, 13 bp, Artificial Sequence
  Oligonucleotide for detection of SNP TSC0062434
ggtatgattataa

SEQ ID NO: 256266 - DNA, 13 bp, Artificial Sequence
  Oligonucleotide for detection of SNP TSC0062434
ttataatcatacc

SEQ ID NO: 256267 - DNA, 13 bp, Artificial Sequence
  Oligonucleotide for detection of SNP TSC0062434
ggtatgtttataa

SEQ ID NO: 256268 - DNA, 13 bp, Artificial Sequence
  Oligonucleotide for detection of SNP TSC0062434
ttataaacatacc

SEQ ID NO: 256269 - DNA, 13 bp, Artificial Sequence
  Oligonucleotide for detection of SNP TSC0062434
ttatagttatgty

SEQ ID NO: 256270 - DNA, 13 bp, Artificial Sequence
  Oligonucleotide for detection of SNP TSC0062434
racataactataa

SEQ ID NO: 256271 - DNA, 13 bp, Artificial Sequence
  Oligonucleotide for detection of SNP TSC0062434
ttatagatatgty

SEQ ID NO: 256272 - DNA, 13 bp, Artificial Sequence
  Oligonucleotide for detection of SNP TSC0062434
racatatctataa

SEQ ID NO: 256273 - DNA, 13 bp, Artificial Sequence
  Oligonucleotide for detection of SNP TSC0000283
aaaataaagaatt

SEQ ID NO: 256274 - DNA, 13 bp, Artificial Sequence
  Oligonucleotide for detection of SNP TSC0000283
aattctttatttt

SEQ ID NO: 256275 - DNA, 13 bp, Artificial Sequence
  Oligonucleotide for detection of SNP TSC0000283
aaaatagagaatt

SEQ ID NO: 256276 - DNA, 13 bp, Artificial Sequence
  Oligonucleotide for detection of SNP TSC0000283
aattctctatttt

SEQ ID NO: 256277 - DNA, 13 bp, Artificial Sequence
  Oligonucleotide for detection of SNP TSC0062436
gaataaggaggat

SEQ ID NO: 256278 - DNA, 13 bp, Artificial Sequence
  Oligonucleotide for detection of SNP TSC0062436
atcctccttattc

SEQ ID NO: 256279 - DNA, 13 bp, Artificial Sequence
  Oligonucleotide for detection of SNP TSC0062436
gaataaagaggat

SEQ ID NO: 256280 - DNA, 13 bp, Artificial Sequence
  Oligonucleotide for detection of SNP TSC0062436
atcctctttattc

SEQ ID NO: 256281 - DNA, 13 bp, Artificial Sequence
  Oligonucleotide for detection of SNP TSC0062437
tgggatttgtggg

SEQ ID NO: 256282 - DNA, 13 bp, Artificial Sequence
  Oligonucleotide for detection of SNP TSC0062437
cccacaaatccca

SEQ ID NO: 256283 - DNA, 13 bp, Artificial Sequence
  Oligonucleotide for detection of SNP TSC0062437
tgggatgtgtggg

SEQ ID NO: 256284 - DNA, 13 bp, Artificial Sequence
  Oligonucleotide for detection of SNP TSC0062437
cccacacatccca

SEQ ID NO: 256285 - DNA, 13 bp, Artificial Sequence
  Oligonucleotide for detection of SNP TSC0062437
tgggacgtgtggg

SEQ ID NO: 256286 - DNA, 13 bp, Artificial Sequence
  Oligonucleotide for detection of SNP TSC0062437
cccacacgtccca

SEQ ID NO: 256287 - DNA, 13 bp, Artificial Sequence
  Oligonucleotide for detection of SNP TSC0062440
ggttattgtgagy

SEQ ID NO: 256288 - DNA, 13 bp, Artificial Sequence
  Oligonucleotide for detection of SNP TSC0062440
rctcacaataacc

SEQ ID NO: 256289 - DNA, 13 bp, Artificial Sequence
  Oligonucleotide for detection of SNP TSC0062440
ggttatcgtgagy

SEQ ID NO: 256290 - DNA, 13 bp, Artificial Sequence
  Oligonucleotide for detection of SNP TSC0062440
rctcacgataacc

SEQ ID NO: 256291 - DNA, 13 bp, Artificial Sequence
  Oligonucleotide for detection of SNP TSC0062440
gtttatggtagty

SEQ ID NO: 256292 - DNA, 13 bp, Artificial Sequence
  Oligonucleotide for detection of SNP TSC0062440
ractaccataaac

SEQ ID NO: 256293 - DNA, 13 bp, Artificial Sequence
  Oligonucleotide for detection of SNP TSC0062440
gtttatagtagty

SEQ ID NO: 256294 - DNA, 13 bp, Artificial Sequence
  Oligonucleotide for detection of SNP TSC0062440
ractactataaac

SEQ ID NO: 256295 - DNA, 13 bp, Artificial Sequence
  Oligonucleotide for detection of SNP TSC0062440
gtttacggtagty

SEQ ID NO: 256296 - DNA, 13 bp, Artificial Sequence
  Oligonucleotide for detection of SNP TSC0062440
ractaccgtaaac

SEQ ID NO: 256297 - DNA, 13 bp, Artificial Sequence
  Oligonucleotide for detection of SNP TSC0062441
atatggtggtaag

SEQ ID NO: 256298 - DNA, 13 bp, Artificial Sequence
  Oligonucleotide for detection of SNP TSC0062441
cttaccaccatat

SEQ ID NO: 256299 - DNA, 13 bp, Artificial Sequence
  Oligonucleotide for detection of SNP TSC0062441
atatggcggtaag

SEQ ID NO: 256300 - DNA, 13 bp, Artificial Sequence
  Oligonucleotide for detection of SNP TSC0062441
cttaccgccatat

SEQ ID NO: 256301 - DNA, 13 bp, Artificial Sequence
  Oligonucleotide for detection of SNP TSC0062442
gtgatgtggttty

SEQ ID NO: 256302 - DNA, 13 bp, Artificial Sequence
  Oligonucleotide for detection of SNP TSC0062442
raaaccacatcac

SEQ ID NO: 256303 - DNA, 13 bp, Artificial Sequence
  Oligonucleotide for detection of SNP TSC0062442
gtgatggggttty

SEQ ID NO: 256304 - DNA, 13 bp, Artificial Sequence
  Oligonucleotide for detection of SNP TSC0062442
raaaccccatcac

SEQ ID NO: 256305 - DNA, 13 bp, Artificial Sequence
  Oligonucleotide for detection of SNP TSC0062442
gtgatgcggttty

SEQ ID NO: 256306 - DNA, 13 bp, Artificial Sequence
  Oligonucleotide for detection of SNP TSC0062442
raaaccgcatcac

SEQ ID NO: 256307 - DNA, 13 bp, Artificial Sequence
  Oligonucleotide for detection of SNP TSC0062442
gaaattgtattay

SEQ ID NO: 256308 - DNA, 13 bp, Artificial Sequence
  Oligonucleotide for detection of SNP TSC0062442
rtaatacaatttc

SEQ ID NO: 256309 - DNA, 13 bp, Artificial Sequence
  Oligonucleotide for detection of SNP TSC0062442
gaaattttattay

SEQ ID NO: 256310 - DNA, 13 bp, Artificial Sequence
  Oligonucleotide for detection of SNP TSC0062442
rtaataaaatttc

SEQ ID NO: 256311 - DNA, 13 bp, Artificial Sequence
  Oligonucleotide for detection of SNP TSC0062442
gaaatcgtattay

SEQ ID NO: 256312 - DNA, 13 bp, Artificial Sequence
  Oligonucleotide for detection of SNP TSC0062442
rtaatacgatttc

SEQ ID NO: 256313 - DNA, 13 bp, Artificial Sequence
  Oligonucleotide for detection of SNP TSC0062443
tgtaaaatgttag

SEQ ID NO: 256314 - DNA, 13 bp, Artificial Sequence
  Oligonucleotide for detection of SNP TSC0062443
ctaacattttaca

SEQ ID NO: 256315 - DNA, 13 bp, Artificial Sequence
  Oligonucleotide for detection of SNP TSC0062443
tgtaaagtgttag

SEQ ID NO: 256316 - DNA, 13 bp, Artificial Sequence
  Oligonucleotide for detection of SNP TSC0062443
ctaacactttaca

SEQ ID NO: 256317 - DNA, 13 bp, Artificial Sequence
  Oligonucleotide for detection of SNP TSC0062443
cgtaaaatgttag

SEQ ID NO: 256318 - DNA, 13 bp, Artificial Sequence
  Oligonucleotide for detection of SNP TSC0062443
ctaacattttacg

SEQ ID NO: 256319 - DNA, 13 bp, Artificial Sequence
  Oligonucleotide for detection of SNP TSC0062443
cgtaaagtgttag

SEQ ID NO: 256320 - DNA, 13 bp, Artificial Sequence
  Oligonucleotide for detection of SNP TSC0062443
ctaacactttacg

SEQ ID NO: 256321 - DNA, 13 bp, Artificial Sequence
  Oligonucleotide for detection of SNP TSC0062444
ttgtgtgtttgtg

SEQ ID NO: 256322 - DNA, 13 bp, Artificial Sequence
  Oligonucleotide for detection of SNP TSC0062444
cacaaacacacaa

SEQ ID NO: 256323 - DNA, 13 bp, Artificial Sequence
  Oligonucleotide for detection of SNP TSC0062444
ttgcgtttttgtg

SEQ ID NO: 256324 - DNA, 13 bp, Artificial Sequence
  Oligonucleotide for detection of SNP TSC0062444
cacaaaaacgcaa

SEQ ID NO: 256325 - DNA, 13 bp, Artificial Sequence
  Oligonucleotide for detection of SNP TSC0062444
ttgcgtgtttgtg

SEQ ID NO: 256326 - DNA, 13 bp, Artificial Sequence
  Oligonucleotide for detection of SNP TSC0062444
cacaaacacgcaa

SEQ ID NO: 256327 - DNA, 13 bp, Artificial Sequence
  Oligonucleotide for detection of SNP TSC0062444
ttgtgcgtttgtg

SEQ ID NO: 256328 - DNA, 13 bp, Artificial Sequence
  Oligonucleotide for detection of SNP TSC0062444
cacaaacgcacaa

SEQ ID NO: 256329 - DNA, 13 bp, Artificial Sequence
  Oligonucleotide for detection of SNP TSC0062444
ttgcgcgtttgtg

SEQ ID NO: 256330 - DNA, 13 bp, Artificial Sequence
  Oligonucleotide for detection of SNP TSC0062444
cacaaacgcgcaa

SEQ ID NO: 256331 - DNA, 13 bp, Artificial Sequence
  Oligonucleotide for detection of SNP TSC0062444
tataaaagtgtaa

SEQ ID NO: 256332 - DNA, 13 bp, Artificial Sequence
  Oligonucleotide for detection of SNP TSC0062444
ttacacttttata

SEQ ID NO: 256333 - DNA, 13 bp, Artificial Sequence
  Oligonucleotide for detection of SNP TSC0062444
tataaaagcgtaa

SEQ ID NO: 256334 - DNA, 13 bp, Artificial Sequence
  Oligonucleotide for detection of SNP TSC0062444
ttacgcttttata

SEQ ID NO: 256335 - DNA, 13 bp, Artificial Sequence
  Oligonucleotide for detection of SNP TSC0062444
tataaatgcgtaa

SEQ ID NO: 256336 - DNA, 13 bp, Artificial Sequence
  Oligonucleotide for detection of SNP TSC0062444
ttacgcatttata

SEQ ID NO: 256337 - DNA, 13 bp, Artificial Sequence
  Oligonucleotide for detection of SNP TSC0062444
tataaacgcgtaa

SEQ ID NO: 256338 - DNA, 13 bp, Artificial Sequence
  Oligonucleotide for detection of SNP TSC0062444
ttacgcgtttata

SEQ ID NO: 256339 - DNA, 13 bp, Artificial Sequence
  Oligonucleotide for detection of SNP TSC0062445
tgatgtgtattta

SEQ ID NO: 256340 - DNA, 13 bp, Artificial Sequence
  Oligonucleotide for detection of SNP TSC0062445
taaatacacatca

SEQ ID NO: 256341 - DNA, 13 bp, Artificial Sequence
  Oligonucleotide for detection of SNP TSC0062445
tgatgtatattta

SEQ ID NO: 256342 - DNA, 13 bp, Artificial Sequence
  Oligonucleotide for detection of SNP TSC0062445
taaatatacatca

SEQ ID NO: 256343 - DNA, 13 bp, Artificial Sequence
  Oligonucleotide for detection of SNP TSC0062446
tagtattgatata

SEQ ID NO: 256344 - DNA, 13 bp, Artificial Sequence
  Oligonucleotide for detection of SNP TSC0062446
tatatcaatacta

SEQ ID NO: 256345 - DNA, 13 bp, Artificial Sequence
  Oligonucleotide for detection of SNP TSC0062446
tagtatagatata

SEQ ID NO: 256346 - DNA, 13 bp, Artificial Sequence
  Oligonucleotide for detection of SNP TSC0062446
tatatctatacta

SEQ ID NO: 256347 - DNA, 13 bp, Artificial Sequence
  Oligonucleotide for detection of SNP TSC0062447
ttttagtattatt

SEQ ID NO: 256348 - DNA, 13 bp, Artificial Sequence
  Oligonucleotide for detection of SNP TSC0062447
aataatactaaaa

SEQ ID NO: 256349 - DNA, 13 bp, Artificial Sequence
  Oligonucleotide for detection of SNP TSC0062447
aatggttttggga

SEQ ID NO: 256350 - DNA, 13 bp, Artificial Sequence
  Oligonucleotide for detection of SNP TSC0062447
tcccaaaaccatt

SEQ ID NO: 256351 - DNA, 13 bp, Artificial Sequence
  Oligonucleotide for detection of SNP TSC0062447
aatggtgttggga

SEQ ID NO: 256352 - DNA, 13 bp, Artificial Sequence
  Oligonucleotide for detection of SNP TSC0062447
tcccaacaccatt

SEQ ID NO: 256353 - DNA, 13 bp, Artificial Sequence
  Oligonucleotide for detection of SNP TSC0062449
tataagtgttttt

SEQ ID NO: 256354 - DNA, 13 bp, Artificial Sequence
  Oligonucleotide for detection of SNP TSC0062449
aaaaacacttata

SEQ ID NO: 256355 - DNA, 13 bp, Artificial Sequence
  Oligonucleotide for detection of SNP TSC0062449
tataagggttttt

SEQ ID NO: 256356 - DNA, 13 bp, Artificial Sequence
  Oligonucleotide for detection of SNP TSC0062449
aaaaacccttata

SEQ ID NO: 256357 - DNA, 13 bp, Artificial Sequence
  Oligonucleotide for detection of SNP TSC0062449
tataagcgttttt

SEQ ID NO: 256358 - DNA, 13 bp, Artificial Sequence
  Oligonucleotide for detection of SNP TSC0062449
aaaaacgcttata

SEQ ID NO: 256359 - DNA, 13 bp, Artificial Sequence
  Oligonucleotide for detection of SNP TSC0062449
aaggatgtttgtg

SEQ ID NO: 256360 - DNA, 13 bp, Artificial Sequence
  Oligonucleotide for detection of SNP TSC0062449
cacaaacatcctt

SEQ ID NO: 256361 - DNA, 13 bp, Artificial Sequence
  Oligonucleotide for detection of SNP TSC0062449
aaggatttttgtg

SEQ ID NO: 256362 - DNA, 13 bp, Artificial Sequence
  Oligonucleotide for detection of SNP TSC0062449
cacaaaaatcctt

SEQ ID NO: 256363 - DNA, 13 bp, Artificial Sequence
  Oligonucleotide for detection of SNP TSC0062449
aaggacgtttgtg

SEQ ID NO: 256364 - DNA, 13 bp, Artificial Sequence
  Oligonucleotide for detection of SNP TSC0062449
cacaaacgtcctt

SEQ ID NO: 256365 - DNA, 13 bp, Artificial Sequence
  Oligonucleotide for detection of SNP TSC0062454
aagtttattttay

SEQ ID NO: 256366 - DNA, 13 bp, Artificial Sequence
  Oligonucleotide for detection of SNP TSC0062454
rtaaaataaactt

SEQ ID NO: 256367 - DNA, 13 bp, Artificial Sequence
  Oligonucleotide for detection of SNP TSC0062454
aagttttttttay

SEQ ID NO: 256368 - DNA, 13 bp, Artificial Sequence
  Oligonucleotide for detection of SNP TSC0062454
rtaaaaaaaactt

SEQ ID NO: 256369 - DNA, 13 bp, Artificial Sequence
  Oligonucleotide for detection of SNP TSC0062454
gtagaataaattt

SEQ ID NO: 256370 - DNA, 13 bp, Artificial Sequence
  Oligonucleotide for detection of SNP TSC0062454
aaatttattctac

SEQ ID NO: 256371 - DNA, 13 bp, Artificial Sequence
  Oligonucleotide for detection of SNP TSC0062454
gtagaaaaaattt

SEQ ID NO: 256372 - DNA, 13 bp, Artificial Sequence
  Oligonucleotide for detection of SNP TSC0062454
aaattttttctac

SEQ ID NO: 256373 - DNA, 13 bp, Artificial Sequence
  Oligonucleotide for detection of SNP TSC0062455
ggttaaataaata

SEQ ID NO: 256374 - DNA, 13 bp, Artificial Sequence
  Oligonucleotide for detection of SNP TSC0062455
tatttatttaacc

SEQ ID NO: 256375 - DNA, 13 bp, Artificial Sequence
  Oligonucleotide for detection of SNP TSC0062455
ggttaagtaaata

SEQ ID NO: 256376 - DNA, 13 bp, Artificial Sequence
  Oligonucleotide for detection of SNP TSC0062455
tatttacttaacc

SEQ ID NO: 256377 - DNA, 13 bp, Artificial Sequence
  Oligonucleotide for detection of SNP TSC0062456
gaatgtgttaaga

SEQ ID NO: 256378 - DNA, 13 bp, Artificial Sequence
  Oligonucleotide for detection of SNP TSC0062456
tcttaacacattc

SEQ ID NO: 256379 - DNA, 13 bp, Artificial Sequence
  Oligonucleotide for detection of SNP TSC0062456
gaatgtattaaga

SEQ ID NO: 256380 - DNA, 13 bp, Artificial Sequence
  Oligonucleotide for detection of SNP TSC0062456
tcttaatacattc

SEQ ID NO: 256381 - DNA, 13 bp, Artificial Sequence
  Oligonucleotide for detection of SNP TSC0062457
attttattattag

SEQ ID NO: 256382 - DNA, 13 bp, Artificial Sequence
  Oligonucleotide for detection of SNP TSC0062457
ctaataataaaat

SEQ ID NO: 256383 - DNA, 13 bp, Artificial Sequence
  Oligonucleotide for detection of SNP TSC0062457
attttagtattag

SEQ ID NO: 256384 - DNA, 13 bp, Artificial Sequence
  Oligonucleotide for detection of SNP TSC0062457
ctaatactaaaat

SEQ ID NO: 256385 - DNA, 13 bp, Artificial Sequence
  Oligonucleotide for detection of SNP TSC0062457
ttgatgatagggt

SEQ ID NO: 256386 - DNA, 13 bp, Artificial Sequence
  Oligonucleotide for detection of SNP TSC0062457
accctatcatcaa

SEQ ID NO: 256387 - DNA, 13 bp, Artificial Sequence
  Oligonucleotide for detection of SNP TSC0062457
ttgatgttagggt

SEQ ID NO: 256388 - DNA, 13 bp, Artificial Sequence
  Oligonucleotide for detection of SNP TSC0062457
accctaacatcaa

SEQ ID NO: 256389 - DNA, 13 bp, Artificial Sequence
  Oligonucleotide for detection of SNP TSC0062458
ggtttttggtgtg

SEQ ID NO: 256390 - DNA, 13 bp, Artificial Sequence
  Oligonucleotide for detection of SNP TSC0062458
cacaccaaaaacc

SEQ ID NO: 256391 - DNA, 13 bp, Artificial Sequence
  Oligonucleotide for detection of SNP TSC0062458
ggttttcggtgtg

SEQ ID NO: 256392 - DNA, 13 bp, Artificial Sequence
  Oligonucleotide for detection of SNP TSC0062458
cacaccgaaaacc

SEQ ID NO: 256393 - DNA, 13 bp, Artificial Sequence
  Oligonucleotide for detection of SNP TSC0062458
tatattgaagaty

SEQ ID NO: 256394 - DNA, 13 bp, Artificial Sequence
  Oligonucleotide for detection of SNP TSC0062458
ratcttcaatata

SEQ ID NO: 256395 - DNA, 13 bp, Artificial Sequence
  Oligonucleotide for detection of SNP TSC0062458
tatattaaagaty

SEQ ID NO: 256396 - DNA, 13 bp, Artificial Sequence
  Oligonucleotide for detection of SNP TSC0062458
ratctttaatata

SEQ ID NO: 256397 - DNA, 13 bp, Artificial Sequence
  Oligonucleotide for detection of SNP TSC0062458
tatatcgaagaty

SEQ ID NO: 256398 - DNA, 13 bp, Artificial Sequence
  Oligonucleotide for detection of SNP TSC0062458
ratcttcgatata

SEQ ID NO: 256399 - DNA, 13 bp, Artificial Sequence
  Oligonucleotide for detection of SNP TSC0062459
atatatttgtgtt

SEQ ID NO: 256400 - DNA, 13 bp, Artificial Sequence
  Oligonucleotide for detection of SNP TSC0062459
aacacaaatatat

SEQ ID NO: 256401 - DNA, 13 bp, Artificial Sequence
  Oligonucleotide for detection of SNP TSC0062459
agtatatatatat

SEQ ID NO: 256402 - DNA, 13 bp, Artificial Sequence
  Oligonucleotide for detection of SNP TSC0062459
atatatatatact

SEQ ID NO: 256403 - DNA, 13 bp, Artificial Sequence
  Oligonucleotide for detection of SNP TSC0062459
agtataaatatat

SEQ ID NO: 256404 - DNA, 13 bp, Artificial Sequence
  Oligonucleotide for detection of SNP TSC0062459
atatatttatact

SEQ ID NO: 256405 - DNA, 13 bp, Artificial Sequence
  Oligonucleotide for detection of SNP TSC0062460
tatttattaattt

SEQ ID NO: 256406 - DNA, 13 bp, Artificial Sequence
  Oligonucleotide for detection of SNP TSC0062460
aaattaataaata

SEQ ID NO: 256407 - DNA, 13 bp, Artificial Sequence
  Oligonucleotide for detection of SNP TSC0062460
aaattgataaata

SEQ ID NO: 256408 - DNA, 13 bp, Artificial Sequence
  Oligonucleotide for detection of SNP TSC0062460
tatttatcaattt

SEQ ID NO: 256409 - DNA, 13 bp, Artificial Sequence
  Oligonucleotide for detection of SNP TSC0062460
aaattgttaaata

SEQ ID NO: 256410 - DNA, 13 bp, Artificial Sequence
  Oligonucleotide for detection of SNP TSC0062460
tatttaacaattt

SEQ ID NO: 256411 - DNA, 13 bp, Artificial Sequence
  Oligonucleotide for detection of SNP TSC0062461
agaaaaataaaat

SEQ ID NO: 256412 - DNA, 13 bp, Artificial Sequence
  Oligonucleotide for detection of SNP TSC0062461
attttatttttct

SEQ ID NO: 256413 - DNA, 13 bp, Artificial Sequence
  Oligonucleotide for detection of SNP TSC0062461
agaaaagtaaaat

SEQ ID NO: 256414 - DNA, 13 bp, Artificial Sequence
  Oligonucleotide for detection of SNP TSC0062461
attttacttttct

SEQ ID NO: 256415 - DNA, 13 bp, Artificial Sequence
  Oligonucleotide for detection of SNP TSC0062462
aataaaaatttgt

SEQ ID NO: 256416 - DNA, 13 bp, Artificial Sequence
  Oligonucleotide for detection of SNP TSC0062462
acaaatttttatt

SEQ ID NO: 256417 - DNA, 13 bp, Artificial Sequence
  Oligonucleotide for detection of SNP TSC0062462
aataaagatttgt

SEQ ID NO: 256418 - DNA, 13 bp, Artificial Sequence
  Oligonucleotide for detection of SNP TSC0062462
acaaatctttatt

SEQ ID NO: 256419 - DNA, 13 bp, Artificial Sequence
  Oligonucleotide for detection of SNP TSC0062463
tataagatattta

SEQ ID NO: 256420 - DNA, 13 bp, Artificial Sequence
  Oligonucleotide for detection of SNP TSC0062463
taaatatcttata

SEQ ID NO: 256421 - DNA, 13 bp, Artificial Sequence
  Oligonucleotide for detection of SNP TSC0062463
tataaggtattta

SEQ ID NO: 256422 - DNA, 13 bp, Artificial Sequence
  Oligonucleotide for detection of SNP TSC0062463
taaataccttata

SEQ ID NO: 256423 - DNA, 13 bp, Artificial Sequence
  Oligonucleotide for detection of SNP TSC0062464
ttgtagaaatata

SEQ ID NO: 256424 - DNA, 13 bp, Artificial Sequence
  Oligonucleotide for detection of SNP TSC0062464
tatatttctacaa

SEQ ID NO: 256425 - DNA, 13 bp, Artificial Sequence
  Oligonucleotide for detection of SNP TSC0062464
ttgtaggaatata

SEQ ID NO: 256426 - DNA, 13 bp, Artificial Sequence
  Oligonucleotide for detection of SNP TSC0062464
tatattcctacaa

SEQ ID NO: 256427 - DNA, 13 bp, Artificial Sequence
  Oligonucleotide for detection of SNP TSC0006568
aggaggttgagga

SEQ ID NO: 256428 - DNA, 13 bp, Artificial Sequence
  Oligonucleotide for detection of SNP TSC0006568
tcctcaacctcct

SEQ ID NO: 256429 - DNA, 13 bp, Artificial Sequence
  Oligonucleotide for detection of SNP TSC0006568
aggaggatgagga

SEQ ID NO: 256430 - DNA, 13 bp, Artificial Sequence
  Oligonucleotide for detection of SNP TSC0006568
tcctcatcctcct

SEQ ID NO: 256431 - DNA, 13 bp, Artificial Sequence
  Oligonucleotide for detection of SNP TSC0007183
aggtttgtgtgtt

SEQ ID NO: 256432 - DNA, 13 bp, Artificial Sequence
  Oligonucleotide for detection of SNP TSC0007183
aacacacaaacct

SEQ ID NO: 256433 - DNA, 13 bp, Artificial Sequence
  Oligonucleotide for detection of SNP TSC0007183
aggtttatgtgtt

SEQ ID NO: 256434 - DNA, 13 bp, Artificial Sequence
  Oligonucleotide for detection of SNP TSC0007183
aacacataaacct

SEQ ID NO: 256435 - DNA, 13 bp, Artificial Sequence
  Oligonucleotide for detection of SNP TSC0062465
tttttaaagtagt

SEQ ID NO: 256436 - DNA, 13 bp, Artificial Sequence
  Oligonucleotide for detection of SNP TSC0062465
actactttaaaaa

SEQ ID NO: 256437 - DNA, 13 bp, Artificial Sequence
  Oligonucleotide for detection of SNP TSC0062465
attgttttaaagg

SEQ ID NO: 256438 - DNA, 13 bp, Artificial Sequence
  Oligonucleotide for detection of SNP TSC0062465
cctttaaaacaat

SEQ ID NO: 256439 - DNA, 13 bp, Artificial Sequence
  Oligonucleotide for detection of SNP TSC0062466
ttatttgatgggg

SEQ ID NO: 256440 - DNA, 13 bp, Artificial Sequence
  Oligonucleotide for detection of SNP TSC0062466
ccccatcaaataa

SEQ ID NO: 256441 - DNA, 13 bp, Artificial Sequence
  Oligonucleotide for detection of SNP TSC0062466
ttatttaatgggg

SEQ ID NO: 256442 - DNA, 13 bp, Artificial Sequence
  Oligonucleotide for detection of SNP TSC0062466
ccccattaaataa

SEQ ID NO: 256443 - DNA, 13 bp, Artificial Sequence
  Oligonucleotide for detection of SNP TSC0062467
gttgtaggtttat

SEQ ID NO: 256444 - DNA, 13 bp, Artificial Sequence
  Oligonucleotide for detection of SNP TSC0062467
ataaacctacaac

SEQ ID NO: 256445 - DNA, 13 bp, Artificial Sequence
  Oligonucleotide for detection of SNP TSC0062467
gttgtaagtttat

SEQ ID NO: 256446 - DNA, 13 bp, Artificial Sequence
  Oligonucleotide for detection of SNP TSC0062467
ataaacttacaac

SEQ ID NO: 256447 - DNA, 13 bp, Artificial Sequence
  Oligonucleotide for detection of SNP TSC0062468
tttaaggttttty

SEQ ID NO: 256448 - DNA, 13 bp, Artificial Sequence
  Oligonucleotide for detection of SNP TSC0062468
raaaaaccttaaa

SEQ ID NO: 256449 - DNA, 13 bp, Artificial Sequence
  Oligonucleotide for detection of SNP TSC0062468
gaaaggatttagg

SEQ ID NO: 256450 - DNA, 13 bp, Artificial Sequence
  Oligonucleotide for detection of SNP TSC0062468
cctaaatcctttc

SEQ ID NO: 256451 - DNA, 13 bp, Artificial Sequence
  Oligonucleotide for detection of SNP TSC0062468
gaaaggttttagg

SEQ ID NO: 256452 - DNA, 13 bp, Artificial Sequence
  Oligonucleotide for detection of SNP TSC0062468
cctaaaacctttc

SEQ ID NO: 256453 - DNA, 13 bp, Artificial Sequence
  Oligonucleotide for detection of SNP TSC0062469
tatttagttaaat

SEQ ID NO: 256454 - DNA, 13 bp, Artificial Sequence
  Oligonucleotide for detection of SNP TSC0062469
atttaactaaata

SEQ ID NO: 256455 - DNA, 13 bp, Artificial Sequence
  Oligonucleotide for detection of SNP TSC0062469
tatttaattaaat

SEQ ID NO: 256456 - DNA, 13 bp, Artificial Sequence
  Oligonucleotide for detection of SNP TSC0062469
atttaattaaata

SEQ ID NO: 256457 - DNA, 13 bp, Artificial Sequence
  Oligonucleotide for detection of SNP TSC0062470
agttagaaagtta

SEQ ID NO: 256458 - DNA, 13 bp, Artificial Sequence
  Oligonucleotide for detection of SNP TSC0062470
taactttctaact

SEQ ID NO: 256459 - DNA, 13 bp, Artificial Sequence
  Oligonucleotide for detection of SNP TSC0062470
agttaggaagtta

SEQ ID NO: 256460 - DNA, 13 bp, Artificial Sequence
  Oligonucleotide for detection of SNP TSC0062470
taacttcctaact

SEQ ID NO: 256461 - DNA, 13 bp, Artificial Sequence
  Oligonucleotide for detection of SNP TSC0005961
gtttgaataggag

SEQ ID NO: 256462 - DNA, 13 bp, Artificial Sequence
  Oligonucleotide for detection of SNP TSC0005961
ctcctattcaaac

SEQ ID NO: 256463 - DNA, 13 bp, Artificial Sequence
  Oligonucleotide for detection of SNP TSC0005961
gtttgagtaggag

SEQ ID NO: 256464 - DNA, 13 bp, Artificial Sequence
  Oligonucleotide for detection of SNP TSC0005961
ctcctactcaaac

SEQ ID NO: 256465 - DNA, 13 bp, Artificial Sequence
  Oligonucleotide for detection of SNP TSC0062471
tttatgagtaggt

SEQ ID NO: 256466 - DNA, 13 bp, Artificial Sequence
  Oligonucleotide for detection of SNP TSC0062471
acctactcataaa

SEQ ID NO: 256467 - DNA, 13 bp, Artificial Sequence
  Oligonucleotide for detection of SNP TSC0062471
tttatgggtaggt

SEQ ID NO: 256468 - DNA, 13 bp, Artificial Sequence
  Oligonucleotide for detection of SNP TSC0062471
acctacccataaa

SEQ ID NO: 256469 - DNA, 13 bp, Artificial Sequence
  Oligonucleotide for detection of SNP TSC0062471
tttacgagtaggt

SEQ ID NO: 256470 - DNA, 13 bp, Artificial Sequence
  Oligonucleotide for detection of SNP TSC0062471
acctactcgtaaa

SEQ ID NO: 256471 - DNA, 13 bp, Artificial Sequence
  Oligonucleotide for detection of SNP TSC0062471
tttacgggtaggt

SEQ ID NO: 256472 - DNA, 13 bp, Artificial Sequence
  Oligonucleotide for detection of SNP TSC0062471
acctacccgtaaa

SEQ ID NO: 256473 - DNA, 13 bp, Artificial Sequence
  Oligonucleotide for detection of SNP TSC0062476
gattaaagataag

SEQ ID NO: 256474 - DNA, 13 bp, Artificial Sequence
  Oligonucleotide for detection of SNP TSC0062476
cttatctttaatc

SEQ ID NO: 256475 - DNA, 13 bp, Artificial Sequence
  Oligonucleotide for detection of SNP TSC0062476
gattaatgataag

SEQ ID NO: 256476 - DNA, 13 bp, Artificial Sequence
  Oligonucleotide for detection of SNP TSC0062476
cttatcattaatc

SEQ ID NO: 256477 - DNA, 13 bp, Artificial Sequence
  Oligonucleotide for detection of SNP TSC0062479
ataaagatgtgtt

SEQ ID NO: 256478 - DNA, 13 bp, Artificial Sequence
  Oligonucleotide for detection of SNP TSC0062479
aacacatctttat

SEQ ID NO: 256479 - DNA, 13 bp, Artificial Sequence
  Oligonucleotide for detection of SNP TSC0062479
ataaaggtgtgtt

SEQ ID NO: 256480 - DNA, 13 bp, Artificial Sequence
  Oligonucleotide for detection of SNP TSC0062479
aacacacctttat

SEQ ID NO: 256481 - DNA, 13 bp, Artificial Sequence
  Oligonucleotide for detection of SNP TSC0062480
ggagagtaagtay

SEQ ID NO: 256482 - DNA, 13 bp, Artificial Sequence
  Oligonucleotide for detection of SNP TSC0062480
rtacttactctcc

SEQ ID NO: 256483 - DNA, 13 bp, Artificial Sequence
  Oligonucleotide for detection of SNP TSC0062480
ggagaggaagtay

SEQ ID NO: 256484 - DNA, 13 bp, Artificial Sequence
  Oligonucleotide for detection of SNP TSC0062480
rtacttcctctcc

SEQ ID NO: 256485 - DNA, 13 bp, Artificial Sequence
  Oligonucleotide for detection of SNP TSC0007457
ggggtatgttagy

SEQ ID NO: 256486 - DNA, 13 bp, Artificial Sequence
  Oligonucleotide for detection of SNP TSC0007457
rctaacatacccc

SEQ ID NO: 256487 - DNA, 13 bp, Artificial Sequence
  Oligonucleotide for detection of SNP TSC0007457
ggggtacgttagy

SEQ ID NO: 256488 - DNA, 13 bp, Artificial Sequence
  Oligonucleotide for detection of SNP TSC0007457
rctaacgtacccc

SEQ ID NO: 256489 - DNA, 13 bp, Artificial Sequence
  Oligonucleotide for detection of SNP TSC0000273
ataggagaattgt

SEQ ID NO: 256490 - DNA, 13 bp, Artificial Sequence
  Oligonucleotide for detection of SNP TSC0000273
acaattctcctat

SEQ ID NO: 256491 - DNA, 13 bp, Artificial Sequence
  Oligonucleotide for detection of SNP TSC0000273
ataggaaaattgt

SEQ ID NO: 256492 - DNA, 13 bp, Artificial Sequence
  Oligonucleotide for detection of SNP TSC0000273
acaattttcctat

SEQ ID NO: 256493 - DNA, 13 bp, Artificial Sequence
  Oligonucleotide for detection of SNP TSC0062481
aataagggattgt

SEQ ID NO: 256494 - DNA, 13 bp, Artificial Sequence
  Oligonucleotide for detection of SNP TSC0062481
acaatcccttatt

SEQ ID NO: 256495 - DNA, 13 bp, Artificial Sequence
  Oligonucleotide for detection of SNP TSC0062481
aataagtgattgt

SEQ ID NO: 256496 - DNA, 13 bp, Artificial Sequence
  Oligonucleotide for detection of SNP TSC0062481
acaatcacttatt

SEQ ID NO: 256497 - DNA, 13 bp, Artificial Sequence
  Oligonucleotide for detection of SNP TSC0062481
aataagcgattgt

SEQ ID NO: 256498 - DNA, 13 bp, Artificial Sequence
  Oligonucleotide for detection of SNP TSC0062481
acaatcgcttatt

SEQ ID NO: 256499 - DNA, 13 bp, Artificial Sequence
  Oligonucleotide for detection of SNP TSC0004786
attattataatty

SEQ ID NO: 256500 - DNA, 13 bp, Artificial Sequence
  Oligonucleotide for detection of SNP TSC0004786
raattataataat

SEQ ID NO: 256501 - DNA, 13 bp, Artificial Sequence
  Oligonucleotide for detection of SNP TSC0004786
attattgtaatty

SEQ ID NO: 256502 - DNA, 13 bp, Artificial Sequence
  Oligonucleotide for detection of SNP TSC0004786
raattacaataat

SEQ ID NO: 256503 - DNA, 13 bp, Artificial Sequence
  Oligonucleotide for detection of SNP TSC0004786
attatcgtaatty

SEQ ID NO: 256504 - DNA, 13 bp, Artificial Sequence
  Oligonucleotide for detection of SNP TSC0004786
raattacgataat

SEQ ID NO: 256505 - DNA, 13 bp, Artificial Sequence
  Oligonucleotide for detection of SNP TSC0004786
gagttatggtggt

SEQ ID NO: 256506 - DNA, 13 bp, Artificial Sequence
  Oligonucleotide for detection of SNP TSC0004786
accaccataactc

SEQ ID NO: 256507 - DNA, 13 bp, Artificial Sequence
  Oligonucleotide for detection of SNP TSC0004786
gagttacggtggt

SEQ ID NO: 256508 - DNA, 13 bp, Artificial Sequence
  Oligonucleotide for detection of SNP TSC0004786
accaccgtaactc

SEQ ID NO: 256509 - DNA, 13 bp, Artificial Sequence
  Oligonucleotide for detection of SNP TSC0000698
aatagtaagaatg

SEQ ID NO: 256510 - DNA, 13 bp, Artificial Sequence
  Oligonucleotide for detection of SNP TSC0000698
cattcttactatt

SEQ ID NO: 256511 - DNA, 13 bp, Artificial Sequence
  Oligonucleotide for detection of SNP TSC0000698
aatagtgagaatg

SEQ ID NO: 256512 - DNA, 13 bp, Artificial Sequence
  Oligonucleotide for detection of SNP TSC0000698
cattctcactatt

SEQ ID NO: 256513 - DNA, 13 bp, Artificial Sequence
  Oligonucleotide for detection of SNP TSC0000698
aatagcgagaatg

SEQ ID NO: 256514 - DNA, 13 bp, Artificial Sequence
  Oligonucleotide for detection of SNP TSC0000698
cattctcgctatt

SEQ ID NO: 256515 - DNA, 13 bp, Artificial Sequence
  Oligonucleotide for detection of SNP TSC0000698
tatttttgttgtt

SEQ ID NO: 256516 - DNA, 13 bp, Artificial Sequence
  Oligonucleotide for detection of SNP TSC0000698
aacaacaaaaata

SEQ ID NO: 256517 - DNA, 13 bp, Artificial Sequence
  Oligonucleotide for detection of SNP TSC0000698
tattttcgttgtt

SEQ ID NO: 256518 - DNA, 13 bp, Artificial Sequence
  Oligonucleotide for detection of SNP TSC0000698
aacaacgaaaata

SEQ ID NO: 256519 - DNA, 13 bp, Artificial Sequence
  Oligonucleotide for detection of SNP TSC0007285
gatgatggaaaty

SEQ ID NO: 256520 - DNA, 13 bp, Artificial Sequence
  Oligonucleotide for detection of SNP TSC0007285
ratttccatcatc

SEQ ID NO: 256521 - DNA, 13 bp, Artificial Sequence
  Oligonucleotide for detection of SNP TSC0007285
gatgatagaaaty

SEQ ID NO: 256522 - DNA, 13 bp, Artificial Sequence
  Oligonucleotide for detection of SNP TSC0007285
ratttctatcatc

SEQ ID NO: 256523 - DNA, 13 bp, Artificial Sequence
  Oligonucleotide for detection of SNP TSC0007286
agttataatataa

SEQ ID NO: 256524 - DNA, 13 bp, Artificial Sequence
  Oligonucleotide for detection of SNP TSC0007286
ttatattataact

SEQ ID NO: 256525 - DNA, 13 bp, Artificial Sequence
  Oligonucleotide for detection of SNP TSC0007286
agttatgatataa

SEQ ID NO: 256526 - DNA, 13 bp, Artificial Sequence
  Oligonucleotide for detection of SNP TSC0007286
ttatatcataact

SEQ ID NO: 256527 - DNA, 13 bp, Artificial Sequence
  Oligonucleotide for detection of SNP TSC0007286
agttacgatataa

SEQ ID NO: 256528 - DNA, 13 bp, Artificial Sequence
  Oligonucleotide for detection of SNP TSC0007286
ttatatcgtaact

SEQ ID NO: 256529 - DNA, 13 bp, Artificial Sequence
  Oligonucleotide for detection of SNP TSC0007286
ttgtgttgtagtt

SEQ ID NO: 256530 - DNA, 13 bp, Artificial Sequence
  Oligonucleotide for detection of SNP TSC0007286
aactacaacacaa

SEQ ID NO: 256531 - DNA, 13 bp, Artificial Sequence
  Oligonucleotide for detection of SNP TSC0007286
ttgtgtcgtagtt

SEQ ID NO: 256532 - DNA, 13 bp, Artificial Sequence
  Oligonucleotide for detection of SNP TSC0007286
aactacgacacaa

SEQ ID NO: 256533 - DNA, 13 bp, Artificial Sequence
  Oligonucleotide for detection of SNP TSC0062482
ggggaagtttgga

SEQ ID NO: 256534 - DNA, 13 bp, Artificial Sequence
  Oligonucleotide for detection of SNP TSC0062482
tccaaacttcccc

SEQ ID NO: 256535 - DNA, 13 bp, Artificial Sequence
  Oligonucleotide for detection of SNP TSC0062482
ggggaaatttgga

SEQ ID NO: 256536 - DNA, 13 bp, Artificial Sequence
  Oligonucleotide for detection of SNP TSC0062482
tccaaatttcccc

SEQ ID NO: 256537 - DNA, 13 bp, Artificial Sequence
  Oligonucleotide for detection of SNP TSC0062484
tataattaaataa

SEQ ID NO: 256538 - DNA, 13 bp, Artificial Sequence
  Oligonucleotide for detection of SNP TSC0062484
ttatttaattata

SEQ ID NO: 256539 - DNA, 13 bp, Artificial Sequence
  Oligonucleotide for detection of SNP TSC0062484
tataatgaaataa

SEQ ID NO: 256540 - DNA, 13 bp, Artificial Sequence
  Oligonucleotide for detection of SNP TSC0062484
ttatttcattata

SEQ ID NO: 256541 - DNA, 13 bp, Artificial Sequence
  Oligonucleotide for detection of SNP TSC0006767
ataattggagtgt

SEQ ID NO: 256542 - DNA, 13 bp, Artificial Sequence
  Oligonucleotide for detection of SNP TSC0006767
acactccaattat

SEQ ID NO: 256543 - DNA, 13 bp, Artificial Sequence
  Oligonucleotide for detection of SNP TSC0006767
ataattagagtgt

SEQ ID NO: 256544 - DNA, 13 bp, Artificial Sequence
  Oligonucleotide for detection of SNP TSC0006767
acactctaattat

SEQ ID NO: 256545 - DNA, 13 bp, Artificial Sequence
  Oligonucleotide for detection of SNP TSC0062487
taatttgttatag

SEQ ID NO: 256546 - DNA, 13 bp, Artificial Sequence
  Oligonucleotide for detection of SNP TSC0062487
ctataacaaatta

SEQ ID NO: 256547 - DNA, 13 bp, Artificial Sequence
  Oligonucleotide for detection of SNP TSC0062487
taatttattatag

SEQ ID NO: 256548 - DNA, 13 bp, Artificial Sequence
  Oligonucleotide for detection of SNP TSC0062487
ctataataaatta

SEQ ID NO: 256549 - DNA, 13 bp, Artificial Sequence
  Oligonucleotide for detection of SNP TSC0062488
tatatttgtgttg

SEQ ID NO: 256550 - DNA, 13 bp, Artificial Sequence
  Oligonucleotide for detection of SNP TSC0062488
caacacaaatata

SEQ ID NO: 256551 - DNA, 13 bp, Artificial Sequence
  Oligonucleotide for detection of SNP TSC0062488
tatattcgtgttg

SEQ ID NO: 256552 - DNA, 13 bp, Artificial Sequence
  Oligonucleotide for detection of SNP TSC0062488
caacacgaatata

SEQ ID NO: 256553 - DNA, 13 bp, Artificial Sequence
  Oligonucleotide for detection of SNP TSC0062488
tatatttgtgtcg

SEQ ID NO: 256554 - DNA, 13 bp, Artificial Sequence
  Oligonucleotide for detection of SNP TSC0062488
cgacacaaatata

SEQ ID NO: 256555 - DNA, 13 bp, Artificial Sequence
  Oligonucleotide for detection of SNP TSC0062488
tatattcgtgtcg

SEQ ID NO: 256556 - DNA, 13 bp, Artificial Sequence
  Oligonucleotide for detection of SNP TSC0062488
cgacacgaatata

SEQ ID NO: 256557 - DNA, 13 bp, Artificial Sequence
  Oligonucleotide for detection of SNP TSC0062488
tggtatgaatatg

SEQ ID NO: 256558 - DNA, 13 bp, Artificial Sequence
  Oligonucleotide for detection of SNP TSC0062488
catattcatacca

SEQ ID NO: 256559 - DNA, 13 bp, Artificial Sequence
  Oligonucleotide for detection of SNP TSC0062488
tggtataaatatg

SEQ ID NO: 256560 - DNA, 13 bp, Artificial Sequence
  Oligonucleotide for detection of SNP TSC0062488
catatttatacca

SEQ ID NO: 256561 - DNA, 13 bp, Artificial Sequence
  Oligonucleotide for detection of SNP TSC0062488
cggtatgaatatg

SEQ ID NO: 256562 - DNA, 13 bp, Artificial Sequence
  Oligonucleotide for detection of SNP TSC0062488
catattcataccg

SEQ ID NO: 256563 - DNA, 13 bp, Artificial Sequence
  Oligonucleotide for detection of SNP TSC0062488
cggtataaatatg

SEQ ID NO: 256564 - DNA, 13 bp, Artificial Sequence
  Oligonucleotide for detection of SNP TSC0062488
catatttataccg

SEQ ID NO: 256565 - DNA, 13 bp, Artificial Sequence
  Oligonucleotide for detection of SNP TSC0062488
tggtacgaatatg

SEQ ID NO: 256566 - DNA, 13 bp, Artificial Sequence
  Oligonucleotide for detection of SNP TSC0062488
catattcgtacca

SEQ ID NO: 256567 - DNA, 13 bp, Artificial Sequence
  Oligonucleotide for detection of SNP TSC0062488
cggtacgaatatg

SEQ ID NO: 256568 - DNA, 13 bp, Artificial Sequence
  Oligonucleotide for detection of SNP TSC0062488
catattcgtaccg

SEQ ID NO: 256569 - DNA, 13 bp, Artificial Sequence
  Oligonucleotide for detection of SNP TSC0008562
aagagatggttty

SEQ ID NO: 256570 - DNA, 13 bp, Artificial Sequence
  Oligonucleotide for detection of SNP TSC0008562
raaaccatctctt

SEQ ID NO: 256571 - DNA, 13 bp, Artificial Sequence
  Oligonucleotide for detection of SNP TSC0008562
aagagacggttty

SEQ ID NO: 256572 - DNA, 13 bp, Artificial Sequence
  Oligonucleotide for detection of SNP TSC0008562
raaaccgtctctt

SEQ ID NO: 256573 - DNA, 13 bp, Artificial Sequence
  Oligonucleotide for detection of SNP TSC0062489
taaaatataggty

SEQ ID NO: 256574 - DNA, 13 bp, Artificial Sequence
  Oligonucleotide for detection of SNP TSC0062489
racctatatttta

SEQ ID NO: 256575 - DNA, 13 bp, Artificial Sequence
  Oligonucleotide for detection of SNP TSC0062489
taaaatgtaggty

SEQ ID NO: 256576 - DNA, 13 bp, Artificial Sequence
  Oligonucleotide for detection of SNP TSC0062489
racctacatttta

SEQ ID NO: 256577 - DNA, 13 bp, Artificial Sequence
  Oligonucleotide for detection of SNP TSC0062490
tgagaatgatata

SEQ ID NO: 256578 - DNA, 13 bp, Artificial Sequence
  Oligonucleotide for detection of SNP TSC0062490
tatatcattctca

SEQ ID NO: 256579 - DNA, 13 bp, Artificial Sequence
  Oligonucleotide for detection of SNP TSC0062490
tgagaacgatata

SEQ ID NO: 256580 - DNA, 13 bp, Artificial Sequence
  Oligonucleotide for detection of SNP TSC0062490
tatatcgttctca

SEQ ID NO: 256581 - DNA, 13 bp, Artificial Sequence
  Oligonucleotide for detection of SNP TSC0062491
tatttaagatagt

SEQ ID NO: 256582 - DNA, 13 bp, Artificial Sequence
  Oligonucleotide for detection of SNP TSC0062491
actatcttaaata

SEQ ID NO: 256583 - DNA, 13 bp, Artificial Sequence
  Oligonucleotide for detection of SNP TSC0062491
tatttaggatagt

SEQ ID NO: 256584 - DNA, 13 bp, Artificial Sequence
  Oligonucleotide for detection of SNP TSC0062491
actatcctaaata

SEQ ID NO: 256585 - DNA, 13 bp, Artificial Sequence
  Oligonucleotide for detection of SNP TSC0007422
ataggtagtaaaa

SEQ ID NO: 256586 - DNA, 13 bp, Artificial Sequence
  Oligonucleotide for detection of SNP TSC0007422
ttttactacctat

SEQ ID NO: 256587 - DNA, 13 bp, Artificial Sequence
  Oligonucleotide for detection of SNP TSC0007422
ataggtggtaaaa

SEQ ID NO: 256588 - DNA, 13 bp, Artificial Sequence
  Oligonucleotide for detection of SNP TSC0007422
ttttaccacctat

SEQ ID NO: 256589 - DNA, 13 bp, Artificial Sequence
  Oligonucleotide for detection of SNP TSC0007422
ataggcggtaaaa

SEQ ID NO: 256590 - DNA, 13 bp, Artificial Sequence
  Oligonucleotide for detection of SNP TSC0007422
ttttaccgcctat

SEQ ID NO: 256591 - DNA, 13 bp, Artificial Sequence
  Oligonucleotide for detection of SNP TSC0007422
ttttattgtttgt

SEQ ID NO: 256592 - DNA, 13 bp, Artificial Sequence
  Oligonucleotide for detection of SNP TSC0007422
acaaacaataaaa

SEQ ID NO: 256593 - DNA, 13 bp, Artificial Sequence
  Oligonucleotide for detection of SNP TSC0007422
ttttatcgtttgt

SEQ ID NO: 256594 - DNA, 13 bp, Artificial Sequence
  Oligonucleotide for detection of SNP TSC0007422
acaaacgataaaa

SEQ ID NO: 256595 - DNA, 13 bp, Artificial Sequence
  Oligonucleotide for detection of SNP TSC0062495
agtatagtggtat

SEQ ID NO: 256596 - DNA, 13 bp, Artificial Sequence
  Oligonucleotide for detection of SNP TSC0062495
ataccactatact

SEQ ID NO: 256597 - DNA, 13 bp, Artificial Sequence
  Oligonucleotide for detection of SNP TSC0062495
agtataatggtat

SEQ ID NO: 256598 - DNA, 13 bp, Artificial Sequence
  Oligonucleotide for detection of SNP TSC0062495
ataccattatact

SEQ ID NO: 256599 - DNA, 13 bp, Artificial Sequence
  Oligonucleotide for detection of SNP TSC0062496
tgaataatgaaaa

SEQ ID NO: 256600 - DNA, 13 bp, Artificial Sequence
  Oligonucleotide for detection of SNP TSC0062496
ttttcattattca

SEQ ID NO: 256601 - DNA, 13 bp, Artificial Sequence
  Oligonucleotide for detection of SNP TSC0062496
tgaatagtgaaaa

SEQ ID NO: 256602 - DNA, 13 bp, Artificial Sequence
  Oligonucleotide for detection of SNP TSC0062496
ttttcactattca

SEQ ID NO: 256603 - DNA, 13 bp, Artificial Sequence
  Oligonucleotide for detection of SNP TSC0009817
ttaatttgtttta

SEQ ID NO: 256604 - DNA, 13 bp, Artificial Sequence
  Oligonucleotide for detection of SNP TSC0009817
taaaacaaattaa

SEQ ID NO: 256605 - DNA, 13 bp, Artificial Sequence
  Oligonucleotide for detection of SNP TSC0009817
ttaattggtttta

SEQ ID NO: 256606 - DNA, 13 bp, Artificial Sequence
  Oligonucleotide for detection of SNP TSC0009817
taaaaccaattaa

SEQ ID NO: 256607 - DNA, 13 bp, Artificial Sequence
  Oligonucleotide for detection of SNP TSC0009817
tagaataagttaa

SEQ ID NO: 256608 - DNA, 13 bp, Artificial Sequence
  Oligonucleotide for detection of SNP TSC0009817
ttaacttattcta

SEQ ID NO: 256609 - DNA, 13 bp, Artificial Sequence
  Oligonucleotide for detection of SNP TSC0009817
tagaattagttaa

SEQ ID NO: 256610 - DNA, 13 bp, Artificial Sequence
  Oligonucleotide for detection of SNP TSC0009817
ttaactaattcta

SEQ ID NO: 256611 - DNA, 13 bp, Artificial Sequence
  Oligonucleotide for detection of SNP TSC0062501
tttgataatataa

SEQ ID NO: 256612 - DNA, 13 bp, Artificial Sequence
  Oligonucleotide for detection of SNP TSC0062501
ttatattatcaaa

SEQ ID NO: 256613 - DNA, 13 bp, Artificial Sequence
  Oligonucleotide for detection of SNP TSC0062501
tttgattatataa

SEQ ID NO: 256614 - DNA, 13 bp, Artificial Sequence
  Oligonucleotide for detection of SNP TSC0062501
ttatataatcaaa

SEQ ID NO: 256615 - DNA, 13 bp, Artificial Sequence
  Oligonucleotide for detection of SNP TSC0062501
ttcgataatataa

SEQ ID NO: 256616 - DNA, 13 bp, Artificial Sequence
  Oligonucleotide for detection of SNP TSC0062501
ttatattatcgaa

SEQ ID NO: 256617 - DNA, 13 bp, Artificial Sequence
  Oligonucleotide for detection of SNP TSC0062501
ttcgattatataa

SEQ ID NO: 256618 - DNA, 13 bp, Artificial Sequence
  Oligonucleotide for detection of SNP TSC0062501
ttatataatcgaa

SEQ ID NO: 256619 - DNA, 13 bp, Artificial Sequence
  Oligonucleotide for detection of SNP TSC0062501
ttatattgttgga

SEQ ID NO: 256620 - DNA, 13 bp, Artificial Sequence
  Oligonucleotide for detection of SNP TSC0062501
tccaacaatataa

SEQ ID NO: 256621 - DNA, 13 bp, Artificial Sequence
  Oligonucleotide for detection of SNP TSC0062501
ttatatagttgga

SEQ ID NO: 256622 - DNA, 13 bp, Artificial Sequence
  Oligonucleotide for detection of SNP TSC0062501
tccaactatataa

SEQ ID NO: 256623 - DNA, 13 bp, Artificial Sequence
  Oligonucleotide for detection of SNP TSC0062501
ttatattgtcgga

SEQ ID NO: 256624 - DNA, 13 bp, Artificial Sequence
  Oligonucleotide for detection of SNP TSC0062501
tccgacaatataa

SEQ ID NO: 256625 - DNA, 13 bp, Artificial Sequence
  Oligonucleotide for detection of SNP TSC0062501
ttatatagtcgga

SEQ ID NO: 256626 - DNA, 13 bp, Artificial Sequence
  Oligonucleotide for detection of SNP TSC0062501
tccgactatataa

SEQ ID NO: 256627 - DNA, 13 bp, Artificial Sequence
  Oligonucleotide for detection of SNP TSC0062502
gttattaagggtt

SEQ ID NO: 256628 - DNA, 13 bp, Artificial Sequence
  Oligonucleotide for detection of SNP TSC0062502
aacccttaataac

SEQ ID NO: 256629 - DNA, 13 bp, Artificial Sequence
  Oligonucleotide for detection of SNP TSC0062502
gttattgagggtt

SEQ ID NO: 256630 - DNA, 13 bp, Artificial Sequence
  Oligonucleotide for detection of SNP TSC0062502
aaccctcaataac

SEQ ID NO: 256631 - DNA, 13 bp, Artificial Sequence
  Oligonucleotide for detection of SNP TSC0062502
gttatcgagggtt

SEQ ID NO: 256632 - DNA, 13 bp, Artificial Sequence
  Oligonucleotide for detection of SNP TSC0062502
aaccctcgataac

SEQ ID NO: 256633 - DNA, 13 bp, Artificial Sequence
  Oligonucleotide for detection of SNP TSC0062502
agtttttgatgay

SEQ ID NO: 256634 - DNA, 13 bp, Artificial Sequence
  Oligonucleotide for detection of SNP TSC0062502
rtcatcaaaaact

SEQ ID NO: 256635 - DNA, 13 bp, Artificial Sequence
  Oligonucleotide for detection of SNP TSC0062502
agttttcgatgay

SEQ ID NO: 256636 - DNA, 13 bp, Artificial Sequence
  Oligonucleotide for detection of SNP TSC0062502
rtcatcgaaaact

SEQ ID NO: 256637 - DNA, 13 bp, Artificial Sequence
  Oligonucleotide for detection of SNP TSC0062505
gtttgagagaatt

SEQ ID NO: 256638 - DNA, 13 bp, Artificial Sequence
  Oligonucleotide for detection of SNP TSC0062505
aattctctcaaac

SEQ ID NO: 256639 - DNA, 13 bp, Artificial Sequence
  Oligonucleotide for detection of SNP TSC0062505
gtttgaaagaatt

SEQ ID NO: 256640 - DNA, 13 bp, Artificial Sequence
  Oligonucleotide for detection of SNP TSC0062505
aattctttcaaac

SEQ ID NO: 256641 - DNA, 13 bp, Artificial Sequence
  Oligonucleotide for detection of SNP TSC0062506
tgatattatatga

SEQ ID NO: 256642 - DNA, 13 bp, Artificial Sequence
  Oligonucleotide for detection of SNP TSC0062506
tcatataatatca

SEQ ID NO: 256643 - DNA, 13 bp, Artificial Sequence
  Oligonucleotide for detection of SNP TSC0062506
tgatatgatatga

SEQ ID NO: 256644 - DNA, 13 bp, Artificial Sequence
  Oligonucleotide for detection of SNP TSC0062506
tcatatcatatca

SEQ ID NO: 256645 - DNA, 13 bp, Artificial Sequence
  Oligonucleotide for detection of SNP TSC0062506
ttatatgatatta

SEQ ID NO: 256646 - DNA, 13 bp, Artificial Sequence
  Oligonucleotide for detection of SNP TSC0062506
taatatcatataa

SEQ ID NO: 256647 - DNA, 13 bp, Artificial Sequence
  Oligonucleotide for detection of SNP TSC0062506
ttatattatatta

SEQ ID NO: 256648 - DNA, 13 bp, Artificial Sequence
  Oligonucleotide for detection of SNP TSC0062506
taatataatataa

SEQ ID NO: 256649 - DNA, 13 bp, Artificial Sequence
  Oligonucleotide for detection of SNP TSC0062507
gattttaggggga

SEQ ID NO: 256650 - DNA, 13 bp, Artificial Sequence
  Oligonucleotide for detection of SNP TSC0062507
tccccctaaaatc

SEQ ID NO: 256651 - DNA, 13 bp, Artificial Sequence
  Oligonucleotide for detection of SNP TSC0062507
gattttgggggga

SEQ ID NO: 256652 - DNA, 13 bp, Artificial Sequence
  Oligonucleotide for detection of SNP TSC0062507
tccccccaaaatc

SEQ ID NO: 256653 - DNA, 13 bp, Artificial Sequence
  Oligonucleotide for detection of SNP TSC0062507
gatttcgggggga

SEQ ID NO: 256654 - DNA, 13 bp, Artificial Sequence
  Oligonucleotide for detection of SNP TSC0062507
tccccccgaaatc

SEQ ID NO: 256655 - DNA, 13 bp, Artificial Sequence
  Oligonucleotide for detection of SNP TSC0062508
tagttaaaaggtg

SEQ ID NO: 256656 - DNA, 13 bp, Artificial Sequence
  Oligonucleotide for detection of SNP TSC0062508
caccttttaacta

SEQ ID NO: 256657 - DNA, 13 bp, Artificial Sequence
  Oligonucleotide for detection of SNP TSC0062508
tagttataaggtg

SEQ ID NO: 256658 - DNA, 13 bp, Artificial Sequence
  Oligonucleotide for detection of SNP TSC0062508
caccttataacta

SEQ ID NO: 256659 - DNA, 13 bp, Artificial Sequence
  Oligonucleotide for detection of SNP TSC0062509
ggtgtgtgggagg

SEQ ID NO: 256660 - DNA, 13 bp, Artificial Sequence
  Oligonucleotide for detection of SNP TSC0062509
cctcccacacacc

SEQ ID NO: 256661 - DNA, 13 bp, Artificial Sequence
  Oligonucleotide for detection of SNP TSC0062509
ggtgtgggggagg

SEQ ID NO: 256662 - DNA, 13 bp, Artificial Sequence
  Oligonucleotide for detection of SNP TSC0062509
cctcccccacacc

SEQ ID NO: 256663 - DNA, 13 bp, Artificial Sequence
  Oligonucleotide for detection of SNP TSC0062510
gttttattagtta

SEQ ID NO: 256664 - DNA, 13 bp, Artificial Sequence
  Oligonucleotide for detection of SNP TSC0062510
taactaataaaac

SEQ ID NO: 256665 - DNA, 13 bp, Artificial Sequence
  Oligonucleotide for detection of SNP TSC0062510
taattgatgagay

SEQ ID NO: 256666 - DNA, 13 bp, Artificial Sequence
  Oligonucleotide for detection of SNP TSC0062510
rtctcatcaatta

SEQ ID NO: 256667 - DNA, 13 bp, Artificial Sequence
  Oligonucleotide for detection of SNP TSC0062510
taattgttgagay

SEQ ID NO: 256668 - DNA, 13 bp, Artificial Sequence
  Oligonucleotide for detection of SNP TSC0062510
rtctcaacaatta

SEQ ID NO: 256669 - DNA, 13 bp, Artificial Sequence
  Oligonucleotide for detection of SNP TSC0006243
ttaatttgtaatt

SEQ ID NO: 256670 - DNA, 13 bp, Artificial Sequence
  Oligonucleotide for detection of SNP TSC0006243
aattacaaattaa

SEQ ID NO: 256671 - DNA, 13 bp, Artificial Sequence
  Oligonucleotide for detection of SNP TSC0006243
ttaattcgtaatt

SEQ ID NO: 256672 - DNA, 13 bp, Artificial Sequence
  Oligonucleotide for detection of SNP TSC0006243
aattacgaattaa

SEQ ID NO: 256673 - DNA, 13 bp, Artificial Sequence
  Oligonucleotide for detection of SNP TSC0006243
aattatgaattgg

SEQ ID NO: 256674 - DNA, 13 bp, Artificial Sequence
  Oligonucleotide for detection of SNP TSC0006243
ccaattcataatt

SEQ ID NO: 256675 - DNA, 13 bp, Artificial Sequence
  Oligonucleotide for detection of SNP TSC0006243
aattataaattgg

SEQ ID NO: 256676 - DNA, 13 bp, Artificial Sequence
  Oligonucleotide for detection of SNP TSC0006243
ccaatttataatt

SEQ ID NO: 256677 - DNA, 13 bp, Artificial Sequence
  Oligonucleotide for detection of SNP TSC0006243
aattacgaattgg

SEQ ID NO: 256678 - DNA, 13 bp, Artificial Sequence
  Oligonucleotide for detection of SNP TSC0006243
ccaattcgtaatt

SEQ ID NO: 256679 - DNA, 13 bp, Artificial Sequence
  Oligonucleotide for detection of SNP TSC0062512
tttatgtttgagt

SEQ ID NO: 256680 - DNA, 13 bp, Artificial Sequence
  Oligonucleotide for detection of SNP TSC0062512
actcaaacataaa

SEQ ID NO: 256681 - DNA, 13 bp, Artificial Sequence
  Oligonucleotide for detection of SNP TSC0062512
tttatggttgagt

SEQ ID NO: 256682 - DNA, 13 bp, Artificial Sequence
  Oligonucleotide for detection of SNP TSC0062512
actcaaccataaa

SEQ ID NO: 256683 - DNA, 13 bp, Artificial Sequence
  Oligonucleotide for detection of SNP TSC0062512
tttatgttcgagt

SEQ ID NO: 256684 - DNA, 13 bp, Artificial Sequence
  Oligonucleotide for detection of SNP TSC0062512
actcgaacataaa

SEQ ID NO: 256685 - DNA, 13 bp, Artificial Sequence
  Oligonucleotide for detection of SNP TSC0062512
tttatggtcgagt

SEQ ID NO: 256686 - DNA, 13 bp, Artificial Sequence
  Oligonucleotide for detection of SNP TSC0062512
actcgaccataaa

SEQ ID NO: 256687 - DNA, 13 bp, Artificial Sequence
  Oligonucleotide for detection of SNP TSC0062512
atttggatataaa

SEQ ID NO: 256688 - DNA, 13 bp, Artificial Sequence
  Oligonucleotide for detection of SNP TSC0062512
tttatatccaaat

SEQ ID NO: 256689 - DNA, 13 bp, Artificial Sequence
  Oligonucleotide for detection of SNP TSC0062512
atttggttataaa

SEQ ID NO: 256690 - DNA, 13 bp, Artificial Sequence
  Oligonucleotide for detection of SNP TSC0062512
tttataaccaaat

SEQ ID NO: 256691 - DNA, 13 bp, Artificial Sequence
  Oligonucleotide for detection of SNP TSC0062512
attcggatataaa

SEQ ID NO: 256692 - DNA, 13 bp, Artificial Sequence
  Oligonucleotide for detection of SNP TSC0062512
tttatatccgaat

SEQ ID NO: 256693 - DNA, 13 bp, Artificial Sequence
  Oligonucleotide for detection of SNP TSC0062512
attcggttataaa

SEQ ID NO: 256694 - DNA, 13 bp, Artificial Sequence
  Oligonucleotide for detection of SNP TSC0062512
tttataaccgaat

SEQ ID NO: 256695 - DNA, 13 bp, Artificial Sequence
  Oligonucleotide for detection of SNP TSC0062513
agagtatgtgtta

SEQ ID NO: 256696 - DNA, 13 bp, Artificial Sequence
  Oligonucleotide for detection of SNP TSC0062513
taacacatactct

SEQ ID NO: 256697 - DNA, 13 bp, Artificial Sequence
  Oligonucleotide for detection of SNP TSC0062513
agagtacgtgtta

SEQ ID NO: 256698 - DNA, 13 bp, Artificial Sequence
  Oligonucleotide for detection of SNP TSC0062513
taacacgtactct

SEQ ID NO: 256699 - DNA, 13 bp, Artificial Sequence
  Oligonucleotide for detection of SNP TSC0062513
tggtatgtatttt

SEQ ID NO: 256700 - DNA, 13 bp, Artificial Sequence
  Oligonucleotide for detection of SNP TSC0062513
aaaatacatacca

SEQ ID NO: 256701 - DNA, 13 bp, Artificial Sequence
  Oligonucleotide for detection of SNP TSC0062513
tggtatatatttt

SEQ ID NO: 256702 - DNA, 13 bp, Artificial Sequence
  Oligonucleotide for detection of SNP TSC0062513
aaaatatatacca

SEQ ID NO: 256703 - DNA, 13 bp, Artificial Sequence
  Oligonucleotide for detection of SNP TSC0062513
tggtacgtatttt

SEQ ID NO: 256704 - DNA, 13 bp, Artificial Sequence
  Oligonucleotide for detection of SNP TSC0062513
aaaatacgtacca

SEQ ID NO: 256705 - DNA, 13 bp, Artificial Sequence
  Oligonucleotide for detection of SNP TSC0006902
tgtgttgtggata

SEQ ID NO: 256706 - DNA, 13 bp, Artificial Sequence
  Oligonucleotide for detection of SNP TSC0006902
tatccacaacaca

SEQ ID NO: 256707 - DNA, 13 bp, Artificial Sequence
  Oligonucleotide for detection of SNP TSC0006902
tgtgttatggata

SEQ ID NO: 256708 - DNA, 13 bp, Artificial Sequence
  Oligonucleotide for detection of SNP TSC0006902
tatccataacaca

SEQ ID NO: 256709 - DNA, 13 bp, Artificial Sequence
  Oligonucleotide for detection of SNP TSC0006902
tgcgttgtggata

SEQ ID NO: 256710 - DNA, 13 bp, Artificial Sequence
  Oligonucleotide for detection of SNP TSC0006902
tatccacaacgca

SEQ ID NO: 256711 - DNA, 13 bp, Artificial Sequence
  Oligonucleotide for detection of SNP TSC0006902
tgcgttatggata

SEQ ID NO: 256712 - DNA, 13 bp, Artificial Sequence
  Oligonucleotide for detection of SNP TSC0006902
tatccataacgca

SEQ ID NO: 256713 - DNA, 13 bp, Artificial Sequence
  Oligonucleotide for detection of SNP TSC0008188
tggttttaaagty

SEQ ID NO: 256714 - DNA, 13 bp, Artificial Sequence
  Oligonucleotide for detection of SNP TSC0008188
ractttaaaacca

SEQ ID NO: 256715 - DNA, 13 bp, Artificial Sequence
  Oligonucleotide for detection of SNP TSC0008188
tggtttgaaagty

SEQ ID NO: 256716 - DNA, 13 bp, Artificial Sequence
  Oligonucleotide for detection of SNP TSC0008188
ractttcaaacca

SEQ ID NO: 256717 - DNA, 13 bp, Artificial Sequence
  Oligonucleotide for detection of SNP TSC0008188
gattttgaagtta

SEQ ID NO: 256718 - DNA, 13 bp, Artificial Sequence
  Oligonucleotide for detection of SNP TSC0008188
taacttcaaaatc

SEQ ID NO: 256719 - DNA, 13 bp, Artificial Sequence
  Oligonucleotide for detection of SNP TSC0008188
gatttttaagtta

SEQ ID NO: 256720 - DNA, 13 bp, Artificial Sequence
  Oligonucleotide for detection of SNP TSC0008188
taacttaaaaatc

SEQ ID NO: 256721 - DNA, 13 bp, Artificial Sequence
  Oligonucleotide for detection of SNP TSC0062517
gggaagggtgaay

SEQ ID NO: 256722 - DNA, 13 bp, Artificial Sequence
  Oligonucleotide for detection of SNP TSC0062517
rttcacccttccc

SEQ ID NO: 256723 - DNA, 13 bp, Artificial Sequence
  Oligonucleotide for detection of SNP TSC0062517
gggaagagtgaay

SEQ ID NO: 256724 - DNA, 13 bp, Artificial Sequence
  Oligonucleotide for detection of SNP TSC0062517
rttcactcttccc

SEQ ID NO: 256725 - DNA, 13 bp, Artificial Sequence
  Oligonucleotide for detection of SNP TSC0009166
gaggtatagttgy

SEQ ID NO: 256726 - DNA, 13 bp, Artificial Sequence
  Oligonucleotide for detection of SNP TSC0009166
rcaactatacctc

SEQ ID NO: 256727 - DNA, 13 bp, Artificial Sequence
  Oligonucleotide for detection of SNP TSC0009166
gaggtagagttgy

SEQ ID NO: 256728 - DNA, 13 bp, Artificial Sequence
  Oligonucleotide for detection of SNP TSC0009166
rcaactctacctc

SEQ ID NO: 256729 - DNA, 13 bp, Artificial Sequence
  Oligonucleotide for detection of SNP TSC0009166
gaggtatagtcgy

SEQ ID NO: 256730 - DNA, 13 bp, Artificial Sequence
  Oligonucleotide for detection of SNP TSC0009166
rcgactatacctc

SEQ ID NO: 256731 - DNA, 13 bp, Artificial Sequence
  Oligonucleotide for detection of SNP TSC0009166
gaggtagagtcgy

SEQ ID NO: 256732 - DNA, 13 bp, Artificial Sequence
  Oligonucleotide for detection of SNP TSC0009166
rcgactctacctc

SEQ ID NO: 256733 - DNA, 13 bp, Artificial Sequence
  Oligonucleotide for detection of SNP TSC0009166
gtgattgtattty

SEQ ID NO: 256734 - DNA, 13 bp, Artificial Sequence
  Oligonucleotide for detection of SNP TSC0009166
raaatacaatcac

SEQ ID NO: 256735 - DNA, 13 bp, Artificial Sequence
  Oligonucleotide for detection of SNP TSC0009166
gtgattttattty

SEQ ID NO: 256736 - DNA, 13 bp, Artificial Sequence
  Oligonucleotide for detection of SNP TSC0009166
raaataaaatcac

SEQ ID NO: 256737 - DNA, 13 bp, Artificial Sequence
  Oligonucleotide for detection of SNP TSC0009166
gcgattgtattty

SEQ ID NO: 256738 - DNA, 13 bp, Artificial Sequence
  Oligonucleotide for detection of SNP TSC0009166
raaatacaatcgc

SEQ ID NO: 256739 - DNA, 13 bp, Artificial Sequence
  Oligonucleotide for detection of SNP TSC0009166
gcgattttattty

SEQ ID NO: 256740 - DNA, 13 bp, Artificial Sequence
  Oligonucleotide for detection of SNP TSC0009166
raaataaaatcgc

SEQ ID NO: 256741 - DNA, 13 bp, Artificial Sequence
  Oligonucleotide for detection of SNP TSC0009844
attttttggatay

SEQ ID NO: 256742 - DNA, 13 bp, Artificial Sequence
  Oligonucleotide for detection of SNP TSC0009844
rtatccaaaaaat

SEQ ID NO: 256743 - DNA, 13 bp, Artificial Sequence
  Oligonucleotide for detection of SNP TSC0009844
atttttcggatay

SEQ ID NO: 256744 - DNA, 13 bp, Artificial Sequence
  Oligonucleotide for detection of SNP TSC0009844
rtatccgaaaaat

SEQ ID NO: 256745 - DNA, 13 bp, Artificial Sequence
  Oligonucleotide for detection of SNP TSC0009844
gtgtttgggaggt

SEQ ID NO: 256746 - DNA, 13 bp, Artificial Sequence
  Oligonucleotide for detection of SNP TSC0009844
acctcccaaacac

SEQ ID NO: 256747 - DNA, 13 bp, Artificial Sequence
  Oligonucleotide for detection of SNP TSC0009844
gtgtttaggaggt

SEQ ID NO: 256748 - DNA, 13 bp, Artificial Sequence
  Oligonucleotide for detection of SNP TSC0009844
acctcctaaacac

SEQ ID NO: 256749 - DNA, 13 bp, Artificial Sequence
  Oligonucleotide for detection of SNP TSC0009844
gtgttcgggaggt

SEQ ID NO: 256750 - DNA, 13 bp, Artificial Sequence
  Oligonucleotide for detection of SNP TSC0009844
acctcccgaacac

SEQ ID NO: 256751 - DNA, 13 bp, Artificial Sequence
  Oligonucleotide for detection of SNP TSC0006790
taaatgtgtggaa

SEQ ID NO: 256752 - DNA, 13 bp, Artificial Sequence
  Oligonucleotide for detection of SNP TSC0006790
ttccacacattta

SEQ ID NO: 256753 - DNA, 13 bp, Artificial Sequence
  Oligonucleotide for detection of SNP TSC0006790
taaatgggtggaa

SEQ ID NO: 256754 - DNA, 13 bp, Artificial Sequence
  Oligonucleotide for detection of SNP TSC0006790
ttccacccattta

SEQ ID NO: 256755 - DNA, 13 bp, Artificial Sequence
  Oligonucleotide for detection of SNP TSC0062519
tgaagggataaag

SEQ ID NO: 256756 - DNA, 13 bp, Artificial Sequence
  Oligonucleotide for detection of SNP TSC0062519
ctttatcccttca

SEQ ID NO: 256757 - DNA, 13 bp, Artificial Sequence
  Oligonucleotide for detection of SNP TSC0062519
tgaaggtataaag

SEQ ID NO: 256758 - DNA, 13 bp, Artificial Sequence
  Oligonucleotide for detection of SNP TSC0062519
ctttataccttca

SEQ ID NO: 256759 - DNA, 13 bp, Artificial Sequence
  Oligonucleotide for detection of SNP TSC0062520
gaatggggaagaa

SEQ ID NO: 256760 - DNA, 13 bp, Artificial Sequence
  Oligonucleotide for detection of SNP TSC0062520
ttcttccccattc

SEQ ID NO: 256761 - DNA, 13 bp, Artificial Sequence
  Oligonucleotide for detection of SNP TSC0062520
gaatggtgaagaa

SEQ ID NO: 256762 - DNA, 13 bp, Artificial Sequence
  Oligonucleotide for detection of SNP TSC0062520
ttcttcaccattc

SEQ ID NO: 256763 - DNA, 13 bp, Artificial Sequence
  Oligonucleotide for detection of SNP TSC0062520
gaatggcgaagaa

SEQ ID NO: 256764 - DNA, 13 bp, Artificial Sequence
  Oligonucleotide for detection of SNP TSC0062520
ttcttcgccattc

SEQ ID NO: 256765 - DNA, 13 bp, Artificial Sequence
  Oligonucleotide for detection of SNP TSC0062521
attagtttttatt

SEQ ID NO: 256766 - DNA, 13 bp, Artificial Sequence
  Oligonucleotide for detection of SNP TSC0062521
aataaaaactaat

SEQ ID NO: 256767 - DNA, 13 bp, Artificial Sequence
  Oligonucleotide for detection of SNP TSC0062521
attagtgtttatt

SEQ ID NO: 256768 - DNA, 13 bp, Artificial Sequence
  Oligonucleotide for detection of SNP TSC0062521
aataaacactaat

SEQ ID NO: 256769 - DNA, 13 bp, Artificial Sequence
  Oligonucleotide for detection of SNP TSC0062521
aataaatattaat

SEQ ID NO: 256770 - DNA, 13 bp, Artificial Sequence
  Oligonucleotide for detection of SNP TSC0062521
attaatatttatt

SEQ ID NO: 256771 - DNA, 13 bp, Artificial Sequence
  Oligonucleotide for detection of SNP TSC0062523
aagaaaagaggtt

SEQ ID NO: 256772 - DNA, 13 bp, Artificial Sequence
  Oligonucleotide for detection of SNP TSC0062523
aacctcttttctt

SEQ ID NO: 256773 - DNA, 13 bp, Artificial Sequence
  Oligonucleotide for detection of SNP TSC0062523
aagaaaggaggtt

SEQ ID NO: 256774 - DNA, 13 bp, Artificial Sequence
  Oligonucleotide for detection of SNP TSC0062523
aacctcctttctt

SEQ ID NO: 256775 - DNA, 13 bp, Artificial Sequence
  Oligonucleotide for detection of SNP TSC0062524
ggttttattgtta

SEQ ID NO: 256776 - DNA, 13 bp, Artificial Sequence
  Oligonucleotide for detection of SNP TSC0062524
taacaataaaacc

SEQ ID NO: 256777 - DNA, 13 bp, Artificial Sequence
  Oligonucleotide for detection of SNP TSC0062524
ggttttgttgtta

SEQ ID NO: 256778 - DNA, 13 bp, Artificial Sequence
  Oligonucleotide for detection of SNP TSC0062524
taacaacaaaacc

SEQ ID NO: 256779 - DNA, 13 bp, Artificial Sequence
  Oligonucleotide for detection of SNP TSC0062524
ggttttatcgtta

SEQ ID NO: 256780 - DNA, 13 bp, Artificial Sequence
  Oligonucleotide for detection of SNP TSC0062524
taacgataaaacc

SEQ ID NO: 256781 - DNA, 13 bp, Artificial Sequence
  Oligonucleotide for detection of SNP TSC0062524
ggttttgtcgtta

SEQ ID NO: 256782 - DNA, 13 bp, Artificial Sequence
  Oligonucleotide for detection of SNP TSC0062524
taacgacaaaacc

SEQ ID NO: 256783 - DNA, 13 bp, Artificial Sequence
  Oligonucleotide for detection of SNP TSC0062525
agatgatgagttg

SEQ ID NO: 256784 - DNA, 13 bp, Artificial Sequence
  Oligonucleotide for detection of SNP TSC0062525
caactcatcatct

SEQ ID NO: 256785 - DNA, 13 bp, Artificial Sequence
  Oligonucleotide for detection of SNP TSC0062525
agatgacgagttg

SEQ ID NO: 256786 - DNA, 13 bp, Artificial Sequence
  Oligonucleotide for detection of SNP TSC0062525
caactcgtcatct

SEQ ID NO: 256787 - DNA, 13 bp, Artificial Sequence
  Oligonucleotide for detection of SNP TSC0062526
tggaaggagtgaa

SEQ ID NO: 256788 - DNA, 13 bp, Artificial Sequence
  Oligonucleotide for detection of SNP TSC0062526
ttcactccttcca

SEQ ID NO: 256789 - DNA, 13 bp, Artificial Sequence
  Oligonucleotide for detection of SNP TSC0062526
tggaagaagtgaa

SEQ ID NO: 256790 - DNA, 13 bp, Artificial Sequence
  Oligonucleotide for detection of SNP TSC0062526
ttcacttcttcca

SEQ ID NO: 256791 - DNA, 13 bp, Artificial Sequence
  Oligonucleotide for detection of SNP TSC0062527
ggtttatataaty

SEQ ID NO: 256792 - DNA, 13 bp, Artificial Sequence
  Oligonucleotide for detection of SNP TSC0062527
rattatataaacc

SEQ ID NO: 256793 - DNA, 13 bp, Artificial Sequence
  Oligonucleotide for detection of SNP TSC0062527
ggtttagataaty

SEQ ID NO: 256794 - DNA, 13 bp, Artificial Sequence
  Oligonucleotide for detection of SNP TSC0062527
rattatctaaacc

SEQ ID NO: 256795 - DNA, 13 bp, Artificial Sequence
  Oligonucleotide for detection of SNP TSC0062527
ggttgtgtaagty

SEQ ID NO: 256796 - DNA, 13 bp, Artificial Sequence
  Oligonucleotide for detection of SNP TSC0062527
racttacacaacc

SEQ ID NO: 256797 - DNA, 13 bp, Artificial Sequence
  Oligonucleotide for detection of SNP TSC0062527
ggttgtttaagty

SEQ ID NO: 256798 - DNA, 13 bp, Artificial Sequence
  Oligonucleotide for detection of SNP TSC0062527
racttaaacaacc

SEQ ID NO: 256799 - DNA, 13 bp, Artificial Sequence
  Oligonucleotide for detection of SNP TSC0008827
taatttttagaty

SEQ ID NO: 256800 - DNA, 13 bp, Artificial Sequence
  Oligonucleotide for detection of SNP TSC0008827
ratctaaaaatta

SEQ ID NO: 256801 - DNA, 13 bp, Artificial Sequence
  Oligonucleotide for detection of SNP TSC0008827
taatttgtagaty

SEQ ID NO: 256802 - DNA, 13 bp, Artificial Sequence
  Oligonucleotide for detection of SNP TSC0008827
ratctacaaatta

SEQ ID NO: 256803 - DNA, 13 bp, Artificial Sequence
  Oligonucleotide for detection of SNP TSC0010506
gggatattaaaat

SEQ ID NO: 256804 - DNA, 13 bp, Artificial Sequence
  Oligonucleotide for detection of SNP TSC0010506
attttaatatccc

SEQ ID NO: 256805 - DNA, 13 bp, Artificial Sequence
  Oligonucleotide for detection of SNP TSC0010506
gggatagtaaaat

SEQ ID NO: 256806 - DNA, 13 bp, Artificial Sequence
  Oligonucleotide for detection of SNP TSC0010506
attttactatccc

SEQ ID NO: 256807 - DNA, 13 bp, Artificial Sequence
  Oligonucleotide for detection of SNP TSC0010506
attttagtgttty

SEQ ID NO: 256808 - DNA, 13 bp, Artificial Sequence
  Oligonucleotide for detection of SNP TSC0010506
raaacactaaaat

SEQ ID NO: 256809 - DNA, 13 bp, Artificial Sequence
  Oligonucleotide for detection of SNP TSC0010506
attttattgttty

SEQ ID NO: 256810 - DNA, 13 bp, Artificial Sequence
  Oligonucleotide for detection of SNP TSC0010506
raaacaataaaat

SEQ ID NO: 256811 - DNA, 13 bp, Artificial Sequence
  Oligonucleotide for detection of SNP TSC0062529
taaaatagattag

SEQ ID NO: 256812 - DNA, 13 bp, Artificial Sequence
  Oligonucleotide for detection of SNP TSC0062529
ctaatctatttta

SEQ ID NO: 256813 - DNA, 13 bp, Artificial Sequence
  Oligonucleotide for detection of SNP TSC0062529
taaaatggattag

SEQ ID NO: 256814 - DNA, 13 bp, Artificial Sequence
  Oligonucleotide for detection of SNP TSC0062529
ctaatccatttta

SEQ ID NO: 256815 - DNA, 13 bp, Artificial Sequence
  Oligonucleotide for detection of SNP TSC0062529
taaaacggattag

SEQ ID NO: 256816 - DNA, 13 bp, Artificial Sequence
  Oligonucleotide for detection of SNP TSC0062529
ctaatccgtttta

SEQ ID NO: 256817 - DNA, 13 bp, Artificial Sequence
  Oligonucleotide for detection of SNP TSC0062529
ttagtttgttttg

SEQ ID NO: 256818 - DNA, 13 bp, Artificial Sequence
  Oligonucleotide for detection of SNP TSC0062529
caaaacaaactaa

SEQ ID NO: 256819 - DNA, 13 bp, Artificial Sequence
  Oligonucleotide for detection of SNP TSC0062529
ttagttcgttttg

SEQ ID NO: 256820 - DNA, 13 bp, Artificial Sequence
  Oligonucleotide for detection of SNP TSC0062529
caaaacgaactaa

SEQ ID NO: 256821 - DNA, 13 bp, Artificial Sequence
  Oligonucleotide for detection of SNP TSC0009371
tgggtggaaagat

SEQ ID NO: 256822 - DNA, 13 bp, Artificial Sequence
  Oligonucleotide for detection of SNP TSC0009371
atctttccaccca

SEQ ID NO: 256823 - DNA, 13 bp, Artificial Sequence
  Oligonucleotide for detection of SNP TSC0009371
tgggtgaaaagat

SEQ ID NO: 256824 - DNA, 13 bp, Artificial Sequence
  Oligonucleotide for detection of SNP TSC0009371
atcttttcaccca

SEQ ID NO: 256825 - DNA, 13 bp, Artificial Sequence
  Oligonucleotide for detection of SNP TSC0009372
aaaaaagaatttt

SEQ ID NO: 256826 - DNA, 13 bp, Artificial Sequence
  Oligonucleotide for detection of SNP TSC0009372
aaaattctttttt

SEQ ID NO: 256827 - DNA, 13 bp, Artificial Sequence
  Oligonucleotide for detection of SNP TSC0062532
tgagatagtgtta

SEQ ID NO: 256828 - DNA, 13 bp, Artificial Sequence
  Oligonucleotide for detection of SNP TSC0062532
taacactatctca

SEQ ID NO: 256829 - DNA, 13 bp, Artificial Sequence
  Oligonucleotide for detection of SNP TSC0062532
tgagatggtgtta

SEQ ID NO: 256830 - DNA, 13 bp, Artificial Sequence
  Oligonucleotide for detection of SNP TSC0062532
taacaccatctca

SEQ ID NO: 256831 - DNA, 13 bp, Artificial Sequence
  Oligonucleotide for detection of SNP TSC0062532
tgagatagcgtta

SEQ ID NO: 256832 - DNA, 13 bp, Artificial Sequence
  Oligonucleotide for detection of SNP TSC0062532
taacgctatctca

SEQ ID NO: 256833 - DNA, 13 bp, Artificial Sequence
  Oligonucleotide for detection of SNP TSC0062532
tgagacggtgtta

SEQ ID NO: 256834 - DNA, 13 bp, Artificial Sequence
  Oligonucleotide for detection of SNP TSC0062532
taacaccgtctca

SEQ ID NO: 256835 - DNA, 13 bp, Artificial Sequence
  Oligonucleotide for detection of SNP TSC0062532
tgagatggcgtta

SEQ ID NO: 256836 - DNA, 13 bp, Artificial Sequence
  Oligonucleotide for detection of SNP TSC0062532
taacgccatctca

SEQ ID NO: 256837 - DNA, 13 bp, Artificial Sequence
  Oligonucleotide for detection of SNP TSC0062532
tgagacggcgtta

SEQ ID NO: 256838 - DNA, 13 bp, Artificial Sequence
  Oligonucleotide for detection of SNP TSC0062532
taacgccgtctca

SEQ ID NO: 256839 - DNA, 13 bp, Artificial Sequence
  Oligonucleotide for detection of SNP TSC0062532
taatgttgtttta

SEQ ID NO: 256840 - DNA, 13 bp, Artificial Sequence
  Oligonucleotide for detection of SNP TSC0062532
taaaacaacatta

SEQ ID NO: 256841 - DNA, 13 bp, Artificial Sequence
  Oligonucleotide for detection of SNP TSC0062532
taacgttgtttta

SEQ ID NO: 256842 - DNA, 13 bp, Artificial Sequence
  Oligonucleotide for detection of SNP TSC0062532
taaaacaacgtta

SEQ ID NO: 256843 - DNA, 13 bp, Artificial Sequence
  Oligonucleotide for detection of SNP TSC0062532
taatgtcgtttta

SEQ ID NO: 256844 - DNA, 13 bp, Artificial Sequence
  Oligonucleotide for detection of SNP TSC0062532
taaaacgacatta

SEQ ID NO: 256845 - DNA, 13 bp, Artificial Sequence
  Oligonucleotide for detection of SNP TSC0062532
taacgtcgtttta

SEQ ID NO: 256846 - DNA, 13 bp, Artificial Sequence
  Oligonucleotide for detection of SNP TSC0062532
taaaacgacgtta

SEQ ID NO: 256847 - DNA, 13 bp, Artificial Sequence
  Oligonucleotide for detection of SNP TSC0062533
atattaggggtat

SEQ ID NO: 256848 - DNA, 13 bp, Artificial Sequence
  Oligonucleotide for detection of SNP TSC0062533
atacccctaatat

SEQ ID NO: 256849 - DNA, 13 bp, Artificial Sequence
  Oligonucleotide for detection of SNP TSC0062533
atattaagggtat

SEQ ID NO: 256850 - DNA, 13 bp, Artificial Sequence
  Oligonucleotide for detection of SNP TSC0062533
atacccttaatat

SEQ ID NO: 256851 - DNA, 13 bp, Artificial Sequence
  Oligonucleotide for detection of SNP TSC0062535
tattttttaataa

SEQ ID NO: 256852 - DNA, 13 bp, Artificial Sequence
  Oligonucleotide for detection of SNP TSC0062535
ttattaaaaaata

SEQ ID NO: 256853 - DNA, 13 bp, Artificial Sequence
  Oligonucleotide for detection of SNP TSC0062535
ttattataaaatg

SEQ ID NO: 256854 - DNA, 13 bp, Artificial Sequence
  Oligonucleotide for detection of SNP TSC0062535
cattttataataa

SEQ ID NO: 256855 - DNA, 13 bp, Artificial Sequence
  Oligonucleotide for detection of SNP TSC0062535
ttattagaaaatg

SEQ ID NO: 256856 - DNA, 13 bp, Artificial Sequence
  Oligonucleotide for detection of SNP TSC0062535
cattttctaataa

SEQ ID NO: 256857 - DNA, 13 bp, Artificial Sequence
  Oligonucleotide for detection of SNP TSC0010452
aagtttagtaggg

SEQ ID NO: 256858 - DNA, 13 bp, Artificial Sequence
  Oligonucleotide for detection of SNP TSC0010452
ccctactaaactt

SEQ ID NO: 256859 - DNA, 13 bp, Artificial Sequence
  Oligonucleotide for detection of SNP TSC0010452
aagtttggtaggg

SEQ ID NO: 256860 - DNA, 13 bp, Artificial Sequence
  Oligonucleotide for detection of SNP TSC0010452
ccctaccaaactt

SEQ ID NO: 256861 - DNA, 13 bp, Artificial Sequence
  Oligonucleotide for detection of SNP TSC0062537
agaaatttggaaa

SEQ ID NO: 256862 - DNA, 13 bp, Artificial Sequence
  Oligonucleotide for detection of SNP TSC0062537
tttccaaatttct

SEQ ID NO: 256863 - DNA, 13 bp, Artificial Sequence
  Oligonucleotide for detection of SNP TSC0062537
agaaatgtggaaa

SEQ ID NO: 256864 - DNA, 13 bp, Artificial Sequence
  Oligonucleotide for detection of SNP TSC0062537
tttccacatttct

SEQ ID NO: 256865 - DNA, 13 bp, Artificial Sequence
  Oligonucleotide for detection of SNP TSC0062538
aatattgatgttt

SEQ ID NO: 256866 - DNA, 13 bp, Artificial Sequence
  Oligonucleotide for detection of SNP TSC0062538
aaacatcaatatt

SEQ ID NO: 256867 - DNA, 13 bp, Artificial Sequence
  Oligonucleotide for detection of SNP TSC0062538
aatattaatgttt

SEQ ID NO: 256868 - DNA, 13 bp, Artificial Sequence
  Oligonucleotide for detection of SNP TSC0062538
aaacattaatatt

SEQ ID NO: 256869 - DNA, 13 bp, Artificial Sequence
  Oligonucleotide for detection of SNP TSC0062540
taaagaatttgaa

SEQ ID NO: 256870 - DNA, 13 bp, Artificial Sequence
  Oligonucleotide for detection of SNP TSC0062540
ttcaaattcttta

SEQ ID NO: 256871 - DNA, 13 bp, Artificial Sequence
  Oligonucleotide for detection of SNP TSC0062540
taaagagtttgaa

SEQ ID NO: 256872 - DNA, 13 bp, Artificial Sequence
  Oligonucleotide for detection of SNP TSC0062540
ttcaaactcttta

SEQ ID NO: 256873 - DNA, 13 bp, Artificial Sequence
  Oligonucleotide for detection of SNP TSC0062542
gtaagtgaaataa

SEQ ID NO: 256874 - DNA, 13 bp, Artificial Sequence
  Oligonucleotide for detection of SNP TSC0062542
ttatttcacttac

SEQ ID NO: 256875 - DNA, 13 bp, Artificial Sequence
  Oligonucleotide for detection of SNP TSC0062542
gtaagtaaaataa

SEQ ID NO: 256876 - DNA, 13 bp, Artificial Sequence
  Oligonucleotide for detection of SNP TSC0062542
ttattttacttac

SEQ ID NO: 256877 - DNA, 13 bp, Artificial Sequence
  Oligonucleotide for detection of SNP TSC0006316
aaataatgaattt

SEQ ID NO: 256878 - DNA, 13 bp, Artificial Sequence
  Oligonucleotide for detection of SNP TSC0006316
aaattcattattt

SEQ ID NO: 256879 - DNA, 13 bp, Artificial Sequence
  Oligonucleotide for detection of SNP TSC0001485
tgttttagtggtg

SEQ ID NO: 256880 - DNA, 13 bp, Artificial Sequence
  Oligonucleotide for detection of SNP TSC0001485
caccactaaaaca

SEQ ID NO: 256881 - DNA, 13 bp, Artificial Sequence
  Oligonucleotide for detection of SNP TSC0001485
tattattagaata

SEQ ID NO: 256882 - DNA, 13 bp, Artificial Sequence
  Oligonucleotide for detection of SNP TSC0001485
tattctaataata

SEQ ID NO: 256883 - DNA, 13 bp, Artificial Sequence
  Oligonucleotide for detection of SNP TSC0001485
tattatgagaata

SEQ ID NO: 256884 - DNA, 13 bp, Artificial Sequence
  Oligonucleotide for detection of SNP TSC0001485
tattctcataata

SEQ ID NO: 256885 - DNA, 13 bp, Artificial Sequence
  Oligonucleotide for detection of SNP TSC0001485
tattacgagaata

SEQ ID NO: 256886 - DNA, 13 bp, Artificial Sequence
  Oligonucleotide for detection of SNP TSC0001485
tattctcgtaata

SEQ ID NO: 256887 - DNA, 13 bp, Artificial Sequence
  Oligonucleotide for detection of SNP TSC0062546
tgggatattggta

SEQ ID NO: 256888 - DNA, 13 bp, Artificial Sequence
  Oligonucleotide for detection of SNP TSC0062546
taccaatatccca

SEQ ID NO: 256889 - DNA, 13 bp, Artificial Sequence
  Oligonucleotide for detection of SNP TSC0062546
tgggatgttggta

SEQ ID NO: 256890 - DNA, 13 bp, Artificial Sequence
  Oligonucleotide for detection of SNP TSC0062546
taccaacatccca

SEQ ID NO: 256891 - DNA, 13 bp, Artificial Sequence
  Oligonucleotide for detection of SNP TSC0062546
tgggacgttggta

SEQ ID NO: 256892 - DNA, 13 bp, Artificial Sequence
  Oligonucleotide for detection of SNP TSC0062546
taccaacgtccca

SEQ ID NO: 256893 - DNA, 13 bp, Artificial Sequence
  Oligonucleotide for detection of SNP TSC0000656
tagaaatgattta

SEQ ID NO: 256894 - DNA, 13 bp, Artificial Sequence
  Oligonucleotide for detection of SNP TSC0000656
taaatcatttcta

SEQ ID NO: 256895 - DNA, 13 bp, Artificial Sequence
  Oligonucleotide for detection of SNP TSC0000656
tagaaacgattta

SEQ ID NO: 256896 - DNA, 13 bp, Artificial Sequence
  Oligonucleotide for detection of SNP TSC0000656
taaatcgtttcta

SEQ ID NO: 256897 - DNA, 13 bp, Artificial Sequence
  Oligonucleotide for detection of SNP TSC0062547
gagtaggtttttt

SEQ ID NO: 256898 - DNA, 13 bp, Artificial Sequence
  Oligonucleotide for detection of SNP TSC0062547
aaaaaacctactc

SEQ ID NO: 256899 - DNA, 13 bp, Artificial Sequence
  Oligonucleotide for detection of SNP TSC0062547
gagtagatttttt

SEQ ID NO: 256900 - DNA, 13 bp, Artificial Sequence
  Oligonucleotide for detection of SNP TSC0062547
aaaaaatctactc

SEQ ID NO: 256901 - DNA, 13 bp, Artificial Sequence
  Oligonucleotide for detection of SNP TSC0062548
gtttaattgtttg

SEQ ID NO: 256902 - DNA, 13 bp, Artificial Sequence
  Oligonucleotide for detection of SNP TSC0062548
caaacaattaaac

SEQ ID NO: 256903 - DNA, 13 bp, Artificial Sequence
  Oligonucleotide for detection of SNP TSC0062548
gtttaagtgtttg

SEQ ID NO: 256904 - DNA, 13 bp, Artificial Sequence
  Oligonucleotide for detection of SNP TSC0062548
caaacacttaaac

SEQ ID NO: 256905 - DNA, 13 bp, Artificial Sequence
  Oligonucleotide for detection of SNP TSC0062548
taaataattgagy

SEQ ID NO: 256906 - DNA, 13 bp, Artificial Sequence
  Oligonucleotide for detection of SNP TSC0062548
rctcaattattta

SEQ ID NO: 256907 - DNA, 13 bp, Artificial Sequence
  Oligonucleotide for detection of SNP TSC0062548
taaatatttgagy

SEQ ID NO: 256908 - DNA, 13 bp, Artificial Sequence
  Oligonucleotide for detection of SNP TSC0062548
rctcaaatattta

SEQ ID NO: 256909 - DNA, 13 bp, Artificial Sequence
  Oligonucleotide for detection of SNP TSC0062549
aggtgtatgatat

SEQ ID NO: 256910 - DNA, 13 bp, Artificial Sequence
  Oligonucleotide for detection of SNP TSC0062549
atatcatacacct

SEQ ID NO: 256911 - DNA, 13 bp, Artificial Sequence
  Oligonucleotide for detection of SNP TSC0062549
aggtgtgtgatat

SEQ ID NO: 256912 - DNA, 13 bp, Artificial Sequence
  Oligonucleotide for detection of SNP TSC0062549
atatcacacacct

SEQ ID NO: 256913 - DNA, 13 bp, Artificial Sequence
  Oligonucleotide for detection of SNP TSC0062550
agtagttttaaag

SEQ ID NO: 256914 - DNA, 13 bp, Artificial Sequence
  Oligonucleotide for detection of SNP TSC0062550
ctttaaaactact

SEQ ID NO: 256915 - DNA, 13 bp, Artificial Sequence
  Oligonucleotide for detection of SNP TSC0062550
agtagtgttaaag

SEQ ID NO: 256916 - DNA, 13 bp, Artificial Sequence
  Oligonucleotide for detection of SNP TSC0062550
ctttaacactact

SEQ ID NO: 256917 - DNA, 13 bp, Artificial Sequence
  Oligonucleotide for detection of SNP TSC0062550
ttttaagattgtt

SEQ ID NO: 256918 - DNA, 13 bp, Artificial Sequence
  Oligonucleotide for detection of SNP TSC0062550
aacaatcttaaaa

SEQ ID NO: 256919 - DNA, 13 bp, Artificial Sequence
  Oligonucleotide for detection of SNP TSC0062550
ttttaatattgtt

SEQ ID NO: 256920 - DNA, 13 bp, Artificial Sequence
  Oligonucleotide for detection of SNP TSC0062550
aacaatattaaaa

SEQ ID NO: 256921 - DNA, 13 bp, Artificial Sequence
  Oligonucleotide for detection of SNP TSC0062551
ttgaggtgggtag

SEQ ID NO: 256922 - DNA, 13 bp, Artificial Sequence
  Oligonucleotide for detection of SNP TSC0062551
ctacccacctcaa

SEQ ID NO: 256923 - DNA, 13 bp, Artificial Sequence
  Oligonucleotide for detection of SNP TSC0062551
tcgaggtgggtag

SEQ ID NO: 256924 - DNA, 13 bp, Artificial Sequence
  Oligonucleotide for detection of SNP TSC0062551
ctacccacctcga

SEQ ID NO: 256925 - DNA, 13 bp, Artificial Sequence
  Oligonucleotide for detection of SNP TSC0062551
ttgaggcgggtag

SEQ ID NO: 256926 - DNA, 13 bp, Artificial Sequence
  Oligonucleotide for detection of SNP TSC0062551
ctacccgcctcaa

SEQ ID NO: 256927 - DNA, 13 bp, Artificial Sequence
  Oligonucleotide for detection of SNP TSC0062551
tcgaggcgggtag

SEQ ID NO: 256928 - DNA, 13 bp, Artificial Sequence
  Oligonucleotide for detection of SNP TSC0062551
ctacccgcctcga

SEQ ID NO: 256929 - DNA, 13 bp, Artificial Sequence
  Oligonucleotide for detection of SNP TSC0000775
aattgtgttatat

SEQ ID NO: 256930 - DNA, 13 bp, Artificial Sequence
  Oligonucleotide for detection of SNP TSC0000775
atataacacaatt

SEQ ID NO: 256931 - DNA, 13 bp, Artificial Sequence
  Oligonucleotide for detection of SNP TSC0000775
aattgtattatat

SEQ ID NO: 256932 - DNA, 13 bp, Artificial Sequence
  Oligonucleotide for detection of SNP TSC0000775
atataatacaatt

SEQ ID NO: 256933 - DNA, 13 bp, Artificial Sequence
  Oligonucleotide for detection of SNP TSC0062552
aattgttttggat

SEQ ID NO: 256934 - DNA, 13 bp, Artificial Sequence
  Oligonucleotide for detection of SNP TSC0062552
atccaaaacaatt

SEQ ID NO: 256935 - DNA, 13 bp, Artificial Sequence
  Oligonucleotide for detection of SNP TSC0062552
aattgtgttggat

SEQ ID NO: 256936 - DNA, 13 bp, Artificial Sequence
  Oligonucleotide for detection of SNP TSC0062552
atccaacacaatt

SEQ ID NO: 256937 - DNA, 13 bp, Artificial Sequence
  Oligonucleotide for detection of SNP TSC0062552
atttaagataatt

SEQ ID NO: 256938 - DNA, 13 bp, Artificial Sequence
  Oligonucleotide for detection of SNP TSC0062552
aattatcttaaat

SEQ ID NO: 256939 - DNA, 13 bp, Artificial Sequence
  Oligonucleotide for detection of SNP TSC0062552
atttaatataatt

SEQ ID NO: 256940 - DNA, 13 bp, Artificial Sequence
  Oligonucleotide for detection of SNP TSC0062552
aattatattaaat

SEQ ID NO: 256941 - DNA, 13 bp, Artificial Sequence
  Oligonucleotide for detection of SNP TSC0062553
gtgatagggatta

SEQ ID NO: 256942 - DNA, 13 bp, Artificial Sequence
  Oligonucleotide for detection of SNP TSC0062553
taatccctatcac

SEQ ID NO: 256943 - DNA, 13 bp, Artificial Sequence
  Oligonucleotide for detection of SNP TSC0062553
gtgataaggatta

SEQ ID NO: 256944 - DNA, 13 bp, Artificial Sequence
  Oligonucleotide for detection of SNP TSC0062553
taatccttatcac

SEQ ID NO: 256945 - DNA, 13 bp, Artificial Sequence
  Oligonucleotide for detection of SNP TSC0062554
atatttaagagaa

SEQ ID NO: 256946 - DNA, 13 bp, Artificial Sequence
  Oligonucleotide for detection of SNP TSC0062554
ttctcttaaatat

SEQ ID NO: 256947 - DNA, 13 bp, Artificial Sequence
  Oligonucleotide for detection of SNP TSC0062554
atatttgagagaa

SEQ ID NO: 256948 - DNA, 13 bp, Artificial Sequence
  Oligonucleotide for detection of SNP TSC0062554
ttctctcaaatat

SEQ ID NO: 256949 - DNA, 13 bp, Artificial Sequence
  Oligonucleotide for detection of SNP TSC0062554
atattcgagagaa

SEQ ID NO: 256950 - DNA, 13 bp, Artificial Sequence
  Oligonucleotide for detection of SNP TSC0062554
ttctctcgaatat

SEQ ID NO: 256951 - DNA, 13 bp, Artificial Sequence
  Oligonucleotide for detection of SNP TSC0000773
ttattagtaatat

SEQ ID NO: 256952 - DNA, 13 bp, Artificial Sequence
  Oligonucleotide for detection of SNP TSC0000773
atattactaataa

SEQ ID NO: 256953 - DNA, 13 bp, Artificial Sequence
  Oligonucleotide for detection of SNP TSC0007165
tgagaggagagag

SEQ ID NO: 256954 - DNA, 13 bp, Artificial Sequence
  Oligonucleotide for detection of SNP TSC0007165
ctctctcctctca

SEQ ID NO: 256955 - DNA, 13 bp, Artificial Sequence
  Oligonucleotide for detection of SNP TSC0007165
tgagagaagagag

SEQ ID NO: 256956 - DNA, 13 bp, Artificial Sequence
  Oligonucleotide for detection of SNP TSC0007165
ctctcttctctca

SEQ ID NO: 256957 - DNA, 13 bp, Artificial Sequence
  Oligonucleotide for detection of SNP TSC0008901
aaggataaattaa

SEQ ID NO: 256958 - DNA, 13 bp, Artificial Sequence
  Oligonucleotide for detection of SNP TSC0008901
ttaatttatcctt

SEQ ID NO: 256959 - DNA, 13 bp, Artificial Sequence
  Oligonucleotide for detection of SNP TSC0008901
aaggatgaattaa

SEQ ID NO: 256960 - DNA, 13 bp, Artificial Sequence
  Oligonucleotide for detection of SNP TSC0008901
ttaattcatcctt

SEQ ID NO: 256961 - DNA, 13 bp, Artificial Sequence
  Oligonucleotide for detection of SNP TSC0008902
tttgggttagaat

SEQ ID NO: 256962 - DNA, 13 bp, Artificial Sequence
  Oligonucleotide for detection of SNP TSC0008902
attctaacccaaa

SEQ ID NO: 256963 - DNA, 13 bp, Artificial Sequence
  Oligonucleotide for detection of SNP TSC0062556
tttgttgtgggag

SEQ ID NO: 256964 - DNA, 13 bp, Artificial Sequence
  Oligonucleotide for detection of SNP TSC0062556
ctcccacaacaaa

SEQ ID NO: 256965 - DNA, 13 bp, Artificial Sequence
  Oligonucleotide for detection of SNP TSC0062556
tttgttttgggag

SEQ ID NO: 256966 - DNA, 13 bp, Artificial Sequence
  Oligonucleotide for detection of SNP TSC0062556
ctcccaaaacaaa

SEQ ID NO: 256967 - DNA, 13 bp, Artificial Sequence
  Oligonucleotide for detection of SNP TSC0062556
tttgtcgtgggag

SEQ ID NO: 256968 - DNA, 13 bp, Artificial Sequence
  Oligonucleotide for detection of SNP TSC0062556
ctcccacgacaaa

SEQ ID NO: 256969 - DNA, 13 bp, Artificial Sequence
  Oligonucleotide for detection of SNP TSC0006666
tttttaattaagy

SEQ ID NO: 256970 - DNA, 13 bp, Artificial Sequence
  Oligonucleotide for detection of SNP TSC0006666
rcttaattaaaaa

SEQ ID NO: 256971 - DNA, 13 bp, Artificial Sequence
  Oligonucleotide for detection of SNP TSC0006666
tttttatttaagy

SEQ ID NO: 256972 - DNA, 13 bp, Artificial Sequence
  Oligonucleotide for detection of SNP TSC0006666
rcttaaataaaaa

SEQ ID NO: 256973 - DNA, 13 bp, Artificial Sequence
  Oligonucleotide for detection of SNP TSC0006666
gtttggttaagga

SEQ ID NO: 256974 - DNA, 13 bp, Artificial Sequence
  Oligonucleotide for detection of SNP TSC0006666
tccttaaccaaac

SEQ ID NO: 256975 - DNA, 13 bp, Artificial Sequence
  Oligonucleotide for detection of SNP TSC0006666
gtttggataagga

SEQ ID NO: 256976 - DNA, 13 bp, Artificial Sequence
  Oligonucleotide for detection of SNP TSC0006666
tccttatccaaac

SEQ ID NO: 256977 - DNA, 13 bp, Artificial Sequence
  Oligonucleotide for detection of SNP TSC0006667
ttattaaatatty

SEQ ID NO: 256978 - DNA, 13 bp, Artificial Sequence
  Oligonucleotide for detection of SNP TSC0006667
raatatttaataa

SEQ ID NO: 256979 - DNA, 13 bp, Artificial Sequence
  Oligonucleotide for detection of SNP TSC0006668
tttggtggtggat

SEQ ID NO: 256980 - DNA, 13 bp, Artificial Sequence
  Oligonucleotide for detection of SNP TSC0006668
atccaccaccaaa

SEQ ID NO: 256981 - DNA, 13 bp, Artificial Sequence
  Oligonucleotide for detection of SNP TSC0006668
tttggtagtggat

SEQ ID NO: 256982 - DNA, 13 bp, Artificial Sequence
  Oligonucleotide for detection of SNP TSC0006668
atccactaccaaa

SEQ ID NO: 256983 - DNA, 13 bp, Artificial Sequence
  Oligonucleotide for detection of SNP TSC0062559
ttttgggtaatat

SEQ ID NO: 256984 - DNA, 13 bp, Artificial Sequence
  Oligonucleotide for detection of SNP TSC0062559
atattacccaaaa

SEQ ID NO: 256985 - DNA, 13 bp, Artificial Sequence
  Oligonucleotide for detection of SNP TSC0062559
ttttggataatat

SEQ ID NO: 256986 - DNA, 13 bp, Artificial Sequence
  Oligonucleotide for detection of SNP TSC0062559
atattatccaaaa

SEQ ID NO: 256987 - DNA, 13 bp, Artificial Sequence
  Oligonucleotide for detection of SNP TSC0062560
attattgattatt

SEQ ID NO: 256988 - DNA, 13 bp, Artificial Sequence
  Oligonucleotide for detection of SNP TSC0062560
aataatcaataat

SEQ ID NO: 256989 - DNA, 13 bp, Artificial Sequence
  Oligonucleotide for detection of SNP TSC0062561
gagagttgtgttt

SEQ ID NO: 256990 - DNA, 13 bp, Artificial Sequence
  Oligonucleotide for detection of SNP TSC0062561
aaacacaactctc

SEQ ID NO: 256991 - DNA, 13 bp, Artificial Sequence
  Oligonucleotide for detection of SNP TSC0062561
gagagtcgtgttt

SEQ ID NO: 256992 - DNA, 13 bp, Artificial Sequence
  Oligonucleotide for detection of SNP TSC0062561
aaacacgactctc

SEQ ID NO: 256993 - DNA, 13 bp, Artificial Sequence
  Oligonucleotide for detection of SNP TSC0062561
aggtatggtttty

SEQ ID NO: 256994 - DNA, 13 bp, Artificial Sequence
  Oligonucleotide for detection of SNP TSC0062561
raaaaccatacct

SEQ ID NO: 256995 - DNA, 13 bp, Artificial Sequence
  Oligonucleotide for detection of SNP TSC0062561
aggtatagtttty

SEQ ID NO: 256996 - DNA, 13 bp, Artificial Sequence
  Oligonucleotide for detection of SNP TSC0062561
raaaactatacct

SEQ ID NO: 256997 - DNA, 13 bp, Artificial Sequence
  Oligonucleotide for detection of SNP TSC0062561
aggtacggtttty

SEQ ID NO: 256998 - DNA, 13 bp, Artificial Sequence
  Oligonucleotide for detection of SNP TSC0062561
raaaaccgtacct

SEQ ID NO: 256999 - DNA, 13 bp, Artificial Sequence
  Oligonucleotide for detection of SNP TSC0062562
ttgtaggtatagy

SEQ ID NO: 257000 - DNA, 13 bp, Artificial Sequence
  Oligonucleotide for detection of SNP TSC0062562
rctatacctacaa

SEQ ID NO: 257001 - DNA, 13 bp, Artificial Sequence
  Oligonucleotide for detection of SNP TSC0062562
ttgtagatatagy

SEQ ID NO: 257002 - DNA, 13 bp, Artificial Sequence
  Oligonucleotide for detection of SNP TSC0062562
rctatatctacaa

SEQ ID NO: 257003 - DNA, 13 bp, Artificial Sequence
  Oligonucleotide for detection of SNP TSC0062564
atttttattataa

SEQ ID NO: 257004 - DNA, 13 bp, Artificial Sequence
  Oligonucleotide for detection of SNP TSC0062564
ttataataaaaat

SEQ ID NO: 257005 - DNA, 13 bp, Artificial Sequence
  Oligonucleotide for detection of SNP TSC0062564
atttttgttataa

SEQ ID NO: 257006 - DNA, 13 bp, Artificial Sequence
  Oligonucleotide for detection of SNP TSC0062564
ttataacaaaaat

SEQ ID NO: 257007 - DNA, 13 bp, Artificial Sequence
  Oligonucleotide for detection of SNP TSC0062564
attttcgttataa

SEQ ID NO: 257008 - DNA, 13 bp, Artificial Sequence
  Oligonucleotide for detection of SNP TSC0062564
ttataacgaaaat

SEQ ID NO: 257009 - DNA, 13 bp, Artificial Sequence
  Oligonucleotide for detection of SNP TSC0062564
ttataatgagagt

SEQ ID NO: 257010 - DNA, 13 bp, Artificial Sequence
  Oligonucleotide for detection of SNP TSC0062564
actctcattataa

SEQ ID NO: 257011 - DNA, 13 bp, Artificial Sequence
  Oligonucleotide for detection of SNP TSC0062564
ttataacgagagt

SEQ ID NO: 257012 - DNA, 13 bp, Artificial Sequence
  Oligonucleotide for detection of SNP TSC0062564
actctcgttataa

SEQ ID NO: 257013 - DNA, 13 bp, Artificial Sequence
  Oligonucleotide for detection of SNP TSC0001107
agtattttgtttt

SEQ ID NO: 257014 - DNA, 13 bp, Artificial Sequence
  Oligonucleotide for detection of SNP TSC0001107
aaaacaaaatact

SEQ ID NO: 257015 - DNA, 13 bp, Artificial Sequence
  Oligonucleotide for detection of SNP TSC0001107
aagatatgatgtt

SEQ ID NO: 257016 - DNA, 13 bp, Artificial Sequence
  Oligonucleotide for detection of SNP TSC0001107
aacatcatatctt

SEQ ID NO: 257017 - DNA, 13 bp, Artificial Sequence
  Oligonucleotide for detection of SNP TSC0001107
aagataagatgtt

SEQ ID NO: 257018 - DNA, 13 bp, Artificial Sequence
  Oligonucleotide for detection of SNP TSC0001107
aacatcttatctt

SEQ ID NO: 257019 - DNA, 13 bp, Artificial Sequence
  Oligonucleotide for detection of SNP TSC0062565
ttatttatgggtg

SEQ ID NO: 257020 - DNA, 13 bp, Artificial Sequence
  Oligonucleotide for detection of SNP TSC0062565
cacccataaataa

SEQ ID NO: 257021 - DNA, 13 bp, Artificial Sequence
  Oligonucleotide for detection of SNP TSC0062565
ttatttgtgggtg

SEQ ID NO: 257022 - DNA, 13 bp, Artificial Sequence
  Oligonucleotide for detection of SNP TSC0062565
cacccacaaataa

SEQ ID NO: 257023 - DNA, 13 bp, Artificial Sequence
  Oligonucleotide for detection of SNP TSC0062565
ttatttatgggcg

SEQ ID NO: 257024 - DNA, 13 bp, Artificial Sequence
  Oligonucleotide for detection of SNP TSC0062565
cgcccataaataa

SEQ ID NO: 257025 - DNA, 13 bp, Artificial Sequence
  Oligonucleotide for detection of SNP TSC0062565
ttattcgtgggtg

SEQ ID NO: 257026 - DNA, 13 bp, Artificial Sequence
  Oligonucleotide for detection of SNP TSC0062565
cacccacgaataa

SEQ ID NO: 257027 - DNA, 13 bp, Artificial Sequence
  Oligonucleotide for detection of SNP TSC0062565
ttatttgtgggcg

SEQ ID NO: 257028 - DNA, 13 bp, Artificial Sequence
  Oligonucleotide for detection of SNP TSC0062565
cgcccacaaataa

SEQ ID NO: 257029 - DNA, 13 bp, Artificial Sequence
  Oligonucleotide for detection of SNP TSC0062565
ttattcgtgggcg

SEQ ID NO: 257030 - DNA, 13 bp, Artificial Sequence
  Oligonucleotide for detection of SNP TSC0062565
cgcccacgaataa

SEQ ID NO: 257031 - DNA, 13 bp, Artificial Sequence
  Oligonucleotide for detection of SNP TSC0062565
tgtttatgaatgg

SEQ ID NO: 257032 - DNA, 13 bp, Artificial Sequence
  Oligonucleotide for detection of SNP TSC0062565
ccattcataaaca

SEQ ID NO: 257033 - DNA, 13 bp, Artificial Sequence
  Oligonucleotide for detection of SNP TSC0062565
cgtttatgaatgg

SEQ ID NO: 257034 - DNA, 13 bp, Artificial Sequence
  Oligonucleotide for detection of SNP TSC0062565
ccattcataaacg

SEQ ID NO: 257035 - DNA, 13 bp, Artificial Sequence
  Oligonucleotide for detection of SNP TSC0062565
tgtttacgaatgg

SEQ ID NO: 257036 - DNA, 13 bp, Artificial Sequence
  Oligonucleotide for detection of SNP TSC0062565
ccattcgtaaaca

SEQ ID NO: 257037 - DNA, 13 bp, Artificial Sequence
  Oligonucleotide for detection of SNP TSC0062565
cgtttacgaatgg

SEQ ID NO: 257038 - DNA, 13 bp, Artificial Sequence
  Oligonucleotide for detection of SNP TSC0062565
ccattcgtaaacg

SEQ ID NO: 257039 - DNA, 13 bp, Artificial Sequence
  Oligonucleotide for detection of SNP TSC0062566
tgaggaaattgaa

SEQ ID NO: 257040 - DNA, 13 bp, Artificial Sequence
  Oligonucleotide for detection of SNP TSC0062566
ttcaatttcctca

SEQ ID NO: 257041 - DNA, 13 bp, Artificial Sequence
  Oligonucleotide for detection of SNP TSC0062566
tgaggatattgaa

SEQ ID NO: 257042 - DNA, 13 bp, Artificial Sequence
  Oligonucleotide for detection of SNP TSC0062566
ttcaatatcctca

SEQ ID NO: 257043 - DNA, 13 bp, Artificial Sequence
  Oligonucleotide for detection of SNP TSC0000979
taagtttataagg

SEQ ID NO: 257044 - DNA, 13 bp, Artificial Sequence
  Oligonucleotide for detection of SNP TSC0000979
ccttataaactta

SEQ ID NO: 257045 - DNA, 13 bp, Artificial Sequence
  Oligonucleotide for detection of SNP TSC0000979
taagttgataagg

SEQ ID NO: 257046 - DNA, 13 bp, Artificial Sequence
  Oligonucleotide for detection of SNP TSC0000979
ccttatcaactta

SEQ ID NO: 257047 - DNA, 13 bp, Artificial Sequence
  Oligonucleotide for detection of SNP TSC0000979
taagtcgataagg

SEQ ID NO: 257048 - DNA, 13 bp, Artificial Sequence
  Oligonucleotide for detection of SNP TSC0000979
ccttatcgactta

SEQ ID NO: 257049 - DNA, 13 bp, Artificial Sequence
  Oligonucleotide for detection of SNP TSC0000979
ttttgtaggttta

SEQ ID NO: 257050 - DNA, 13 bp, Artificial Sequence
  Oligonucleotide for detection of SNP TSC0000979
taaacctacaaaa

SEQ ID NO: 257051 - DNA, 13 bp, Artificial Sequence
  Oligonucleotide for detection of SNP TSC0000979
ttttgttggttta

SEQ ID NO: 257052 - DNA, 13 bp, Artificial Sequence
  Oligonucleotide for detection of SNP TSC0000979
taaaccaacaaaa

SEQ ID NO: 257053 - DNA, 13 bp, Artificial Sequence
  Oligonucleotide for detection of SNP TSC0000979
ttttgtcggttta

SEQ ID NO: 257054 - DNA, 13 bp, Artificial Sequence
  Oligonucleotide for detection of SNP TSC0000979
taaaccgacaaaa

SEQ ID NO: 257055 - DNA, 13 bp, Artificial Sequence
  Oligonucleotide for detection of SNP TSC0062570
gtttagttgaggy

SEQ ID NO: 257056 - DNA, 13 bp, Artificial Sequence
  Oligonucleotide for detection of SNP TSC0062570
rcctcaactaaac

SEQ ID NO: 257057 - DNA, 13 bp, Artificial Sequence
  Oligonucleotide for detection of SNP TSC0062570
gtttaggtgaggy

SEQ ID NO: 257058 - DNA, 13 bp, Artificial Sequence
  Oligonucleotide for detection of SNP TSC0062570
rcctcacctaaac

SEQ ID NO: 257059 - DNA, 13 bp, Artificial Sequence
  Oligonucleotide for detection of SNP TSC0062570
gttttaattgaay

SEQ ID NO: 257060 - DNA, 13 bp, Artificial Sequence
  Oligonucleotide for detection of SNP TSC0062570
rttcaattaaaac

SEQ ID NO: 257061 - DNA, 13 bp, Artificial Sequence
  Oligonucleotide for detection of SNP TSC0062570
gttttatttgaay

SEQ ID NO: 257062 - DNA, 13 bp, Artificial Sequence
  Oligonucleotide for detection of SNP TSC0062570
rttcaaataaaac

SEQ ID NO: 257063 - DNA, 13 bp, Artificial Sequence
  Oligonucleotide for detection of SNP TSC0010178
tgaatttaaaagy

SEQ ID NO: 257064 - DNA, 13 bp, Artificial Sequence
  Oligonucleotide for detection of SNP TSC0010178
rcttttaaattca

SEQ ID NO: 257065 - DNA, 13 bp, Artificial Sequence
  Oligonucleotide for detection of SNP TSC0062571
tttttttaatgtt

SEQ ID NO: 257066 - DNA, 13 bp, Artificial Sequence
  Oligonucleotide for detection of SNP TSC0062571
aacattaaaaaaa

SEQ ID NO: 257067 - DNA, 13 bp, Artificial Sequence
  Oligonucleotide for detection of SNP TSC0062571
ttttttaaatgtt

SEQ ID NO: 257068 - DNA, 13 bp, Artificial Sequence
  Oligonucleotide for detection of SNP TSC0062571
aacatttaaaaaa

SEQ ID NO: 257069 - DNA, 13 bp, Artificial Sequence
  Oligonucleotide for detection of SNP TSC0062573
gggtaatgaggag

SEQ ID NO: 257070 - DNA, 13 bp, Artificial Sequence
  Oligonucleotide for detection of SNP TSC0062573
ctcctcattaccc

SEQ ID NO: 257071 - DNA, 13 bp, Artificial Sequence
  Oligonucleotide for detection of SNP TSC0062573
gggtaacgaggag

SEQ ID NO: 257072 - DNA, 13 bp, Artificial Sequence
  Oligonucleotide for detection of SNP TSC0062573
ctcctcgttaccc

SEQ ID NO: 257073 - DNA, 13 bp, Artificial Sequence
  Oligonucleotide for detection of SNP TSC0062575
taaaagaatggty

SEQ ID NO: 257074 - DNA, 13 bp, Artificial Sequence
  Oligonucleotide for detection of SNP TSC0062575
raccattctttta

SEQ ID NO: 257075 - DNA, 13 bp, Artificial Sequence
  Oligonucleotide for detection of SNP TSC0062575
taaaaggatggty

SEQ ID NO: 257076 - DNA, 13 bp, Artificial Sequence
  Oligonucleotide for detection of SNP TSC0062575
raccatcctttta

SEQ ID NO: 257077 - DNA, 13 bp, Artificial Sequence
  Oligonucleotide for detection of SNP TSC0062576
tataaaagtttta

SEQ ID NO: 257078 - DNA, 13 bp, Artificial Sequence
  Oligonucleotide for detection of SNP TSC0062576
taaaacttttata

SEQ ID NO: 257079 - DNA, 13 bp, Artificial Sequence
  Oligonucleotide for detection of SNP TSC0062576
tataaatgtttta

SEQ ID NO: 257080 - DNA, 13 bp, Artificial Sequence
  Oligonucleotide for detection of SNP TSC0062576
taaaacatttata

SEQ ID NO: 257081 - DNA, 13 bp, Artificial Sequence
  Oligonucleotide for detection of SNP TSC0062576
taaaatttttata

SEQ ID NO: 257082 - DNA, 13 bp, Artificial Sequence
  Oligonucleotide for detection of SNP TSC0062576
tataaaaatttta

SEQ ID NO: 257083 - DNA, 13 bp, Artificial Sequence
  Oligonucleotide for detection of SNP TSC0062576
taaaatatttata

SEQ ID NO: 257084 - DNA, 13 bp, Artificial Sequence
  Oligonucleotide for detection of SNP TSC0062576
tataaatatttta

SEQ ID NO: 257085 - DNA, 13 bp, Artificial Sequence
  Oligonucleotide for detection of SNP TSC0062577
attgagaaaatta

SEQ ID NO: 257086 - DNA, 13 bp, Artificial Sequence
  Oligonucleotide for detection of SNP TSC0062577
taattttctcaat

SEQ ID NO: 257087 - DNA, 13 bp, Artificial Sequence
  Oligonucleotide for detection of SNP TSC0062577
attgaggaaatta

SEQ ID NO: 257088 - DNA, 13 bp, Artificial Sequence
  Oligonucleotide for detection of SNP TSC0062577
taatttcctcaat

SEQ ID NO: 257089 - DNA, 13 bp, Artificial Sequence
  Oligonucleotide for detection of SNP TSC0062579
gtttggagtatgg

SEQ ID NO: 257090 - DNA, 13 bp, Artificial Sequence
  Oligonucleotide for detection of SNP TSC0062579
ccatactccaaac

SEQ ID NO: 257091 - DNA, 13 bp, Artificial Sequence
  Oligonucleotide for detection of SNP TSC0062579
gtttggggtatgg

SEQ ID NO: 257092 - DNA, 13 bp, Artificial Sequence
  Oligonucleotide for detection of SNP TSC0062579
ccataccccaaac

SEQ ID NO: 257093 - DNA, 13 bp, Artificial Sequence
  Oligonucleotide for detection of SNP TSC0062579
gtttggagtacgg

SEQ ID NO: 257094 - DNA, 13 bp, Artificial Sequence
  Oligonucleotide for detection of SNP TSC0062579
ccgtactccaaac

SEQ ID NO: 257095 - DNA, 13 bp, Artificial Sequence
  Oligonucleotide for detection of SNP TSC0062579
gtttggggtacgg

SEQ ID NO: 257096 - DNA, 13 bp, Artificial Sequence
  Oligonucleotide for detection of SNP TSC0062579
ccgtaccccaaac

SEQ ID NO: 257097 - DNA, 13 bp, Artificial Sequence
  Oligonucleotide for detection of SNP TSC0062581
gaggatatggaay

SEQ ID NO: 257098 - DNA, 13 bp, Artificial Sequence
  Oligonucleotide for detection of SNP TSC0062581
rttccatatcctc

SEQ ID NO: 257099 - DNA, 13 bp, Artificial Sequence
  Oligonucleotide for detection of SNP TSC0062581
gaggatttggaay

SEQ ID NO: 257100 - DNA, 13 bp, Artificial Sequence
  Oligonucleotide for detection of SNP TSC0062581
rttccaaatcctc

SEQ ID NO: 257101 - DNA, 13 bp, Artificial Sequence
  Oligonucleotide for detection of SNP TSC0062582
gtggtttgtgaga

SEQ ID NO: 257102 - DNA, 13 bp, Artificial Sequence
  Oligonucleotide for detection of SNP TSC0062582
tctcacaaaccac

SEQ ID NO: 257103 - DNA, 13 bp, Artificial Sequence
  Oligonucleotide for detection of SNP TSC0062582
gcggtttgtgaga

SEQ ID NO: 257104 - DNA, 13 bp, Artificial Sequence
  Oligonucleotide for detection of SNP TSC0062582
tctcacaaaccgc

SEQ ID NO: 257105 - DNA, 13 bp, Artificial Sequence
  Oligonucleotide for detection of SNP TSC0062582
gtggttcgtgaga

SEQ ID NO: 257106 - DNA, 13 bp, Artificial Sequence
  Oligonucleotide for detection of SNP TSC0062582
tctcacgaaccac

SEQ ID NO: 257107 - DNA, 13 bp, Artificial Sequence
  Oligonucleotide for detection of SNP TSC0062582
gcggttcgtgaga

SEQ ID NO: 257108 - DNA, 13 bp, Artificial Sequence
  Oligonucleotide for detection of SNP TSC0062582
tctcacgaaccgc

SEQ ID NO: 257109 - DNA, 13 bp, Artificial Sequence
  Oligonucleotide for detection of SNP TSC0062582
ttttatgggttgy

SEQ ID NO: 257110 - DNA, 13 bp, Artificial Sequence
  Oligonucleotide for detection of SNP TSC0062582
rcaacccataaaa

SEQ ID NO: 257111 - DNA, 13 bp, Artificial Sequence
  Oligonucleotide for detection of SNP TSC0062582
ttttataggttgy

SEQ ID NO: 257112 - DNA, 13 bp, Artificial Sequence
  Oligonucleotide for detection of SNP TSC0062582
rcaacctataaaa

SEQ ID NO: 257113 - DNA, 13 bp, Artificial Sequence
  Oligonucleotide for detection of SNP TSC0062582
ttttacgggttgy

SEQ ID NO: 257114 - DNA, 13 bp, Artificial Sequence
  Oligonucleotide for detection of SNP TSC0062582
rcaacccgtaaaa

SEQ ID NO: 257115 - DNA, 13 bp, Artificial Sequence
  Oligonucleotide for detection of SNP TSC0062582
ttttataggtcgy

SEQ ID NO: 257116 - DNA, 13 bp, Artificial Sequence
  Oligonucleotide for detection of SNP TSC0062582
rcgacctataaaa

SEQ ID NO: 257117 - DNA, 13 bp, Artificial Sequence
  Oligonucleotide for detection of SNP TSC0062582
ttttatgggtcgy

SEQ ID NO: 257118 - DNA, 13 bp, Artificial Sequence
  Oligonucleotide for detection of SNP TSC0062582
rcgacccataaaa

SEQ ID NO: 257119 - DNA, 13 bp, Artificial Sequence
  Oligonucleotide for detection of SNP TSC0062582
ttttacgggtcgy

SEQ ID NO: 257120 - DNA, 13 bp, Artificial Sequence
  Oligonucleotide for detection of SNP TSC0062582
rcgacccgtaaaa

SEQ ID NO: 257121 - DNA, 13 bp, Artificial Sequence
  Oligonucleotide for detection of SNP TSC0062583
gttttttggtttt

SEQ ID NO: 257122 - DNA, 13 bp, Artificial Sequence
  Oligonucleotide for detection of SNP TSC0062583
aaaaccaaaaaac

SEQ ID NO: 257123 - DNA, 13 bp, Artificial Sequence
  Oligonucleotide for detection of SNP TSC0062583
gtttttcggtttt

SEQ ID NO: 257124 - DNA, 13 bp, Artificial Sequence
  Oligonucleotide for detection of SNP TSC0062583
aaaaccgaaaaac

SEQ ID NO: 257125 - DNA, 13 bp, Artificial Sequence
  Oligonucleotide for detection of SNP TSC0062583
agagttggagagy

SEQ ID NO: 257126 - DNA, 13 bp, Artificial Sequence
  Oligonucleotide for detection of SNP TSC0062583
rctctccaactct

SEQ ID NO: 257127 - DNA, 13 bp, Artificial Sequence
  Oligonucleotide for detection of SNP TSC0062583
agagttagagagy

SEQ ID NO: 257128 - DNA, 13 bp, Artificial Sequence
  Oligonucleotide for detection of SNP TSC0062583
rctctctaactct

SEQ ID NO: 257129 - DNA, 13 bp, Artificial Sequence
  Oligonucleotide for detection of SNP TSC0062583
agagtcggagagy

SEQ ID NO: 257130 - DNA, 13 bp, Artificial Sequence
  Oligonucleotide for detection of SNP TSC0062583
rctctccgactct

SEQ ID NO: 257131 - DNA, 13 bp, Artificial Sequence
  Oligonucleotide for detection of SNP TSC0062584
tgagaaattaatt

SEQ ID NO: 257132 - DNA, 13 bp, Artificial Sequence
  Oligonucleotide for detection of SNP TSC0062584
aattaatttctca

SEQ ID NO: 257133 - DNA, 13 bp, Artificial Sequence
  Oligonucleotide for detection of SNP TSC0062584
tgagaagttaatt

SEQ ID NO: 257134 - DNA, 13 bp, Artificial Sequence
  Oligonucleotide for detection of SNP TSC0062584
aattaacttctca

SEQ ID NO: 257135 - DNA, 13 bp, Artificial Sequence
  Oligonucleotide for detection of SNP TSC0062585
agtttgatataat

SEQ ID NO: 257136 - DNA, 13 bp, Artificial Sequence
  Oligonucleotide for detection of SNP TSC0062585
attatatcaaact

SEQ ID NO: 257137 - DNA, 13 bp, Artificial Sequence
  Oligonucleotide for detection of SNP TSC0062585
agtttggtataat

SEQ ID NO: 257138 - DNA, 13 bp, Artificial Sequence
  Oligonucleotide for detection of SNP TSC0062585
attataccaaact

SEQ ID NO: 257139 - DNA, 13 bp, Artificial Sequence
  Oligonucleotide for detection of SNP TSC0062586
ttttttttagtgg

SEQ ID NO: 257140 - DNA, 13 bp, Artificial Sequence
  Oligonucleotide for detection of SNP TSC0062586
ccactaaaaaaaa

SEQ ID NO: 257141 - DNA, 13 bp, Artificial Sequence
  Oligonucleotide for detection of SNP TSC0062586
ttttttgtagtgg

SEQ ID NO: 257142 - DNA, 13 bp, Artificial Sequence
  Oligonucleotide for detection of SNP TSC0062586
ccactacaaaaaa

SEQ ID NO: 257143 - DNA, 13 bp, Artificial Sequence
  Oligonucleotide for detection of SNP TSC0062586
ttattgaaggagg

SEQ ID NO: 257144 - DNA, 13 bp, Artificial Sequence
  Oligonucleotide for detection of SNP TSC0062586
cctccttcaataa

SEQ ID NO: 257145 - DNA, 13 bp, Artificial Sequence
  Oligonucleotide for detection of SNP TSC0062586
ttattgtaggagg

SEQ ID NO: 257146 - DNA, 13 bp, Artificial Sequence
  Oligonucleotide for detection of SNP TSC0062586
cctcctacaataa

SEQ ID NO: 257147 - DNA, 13 bp, Artificial Sequence
  Oligonucleotide for detection of SNP TSC0062590
atatgaatattay

SEQ ID NO: 257148 - DNA, 13 bp, Artificial Sequence
  Oligonucleotide for detection of SNP TSC0062590
rtaatattcatat

SEQ ID NO: 257149 - DNA, 13 bp, Artificial Sequence
  Oligonucleotide for detection of SNP TSC0062590
atatgagtattay

SEQ ID NO: 257150 - DNA, 13 bp, Artificial Sequence
  Oligonucleotide for detection of SNP TSC0062590
rtaatactcatat

SEQ ID NO: 257151 - DNA, 13 bp, Artificial Sequence
  Oligonucleotide for detection of SNP TSC0062590
atacgaatattay

SEQ ID NO: 257152 - DNA, 13 bp, Artificial Sequence
  Oligonucleotide for detection of SNP TSC0062590
rtaatattcgtat

SEQ ID NO: 257153 - DNA, 13 bp, Artificial Sequence
  Oligonucleotide for detection of SNP TSC0062590
atacgagtattay

SEQ ID NO: 257154 - DNA, 13 bp, Artificial Sequence
  Oligonucleotide for detection of SNP TSC0062590
rtaatactcgtat

SEQ ID NO: 257155 - DNA, 13 bp, Artificial Sequence
  Oligonucleotide for detection of SNP TSC0062593
tagagtatgttty

SEQ ID NO: 257156 - DNA, 13 bp, Artificial Sequence
  Oligonucleotide for detection of SNP TSC0062593
raaacatactcta

SEQ ID NO: 257157 - DNA, 13 bp, Artificial Sequence
  Oligonucleotide for detection of SNP TSC0062593
tagagtgtgttty

SEQ ID NO: 257158 - DNA, 13 bp, Artificial Sequence
  Oligonucleotide for detection of SNP TSC0062593
raaacacactcta

SEQ ID NO: 257159 - DNA, 13 bp, Artificial Sequence
  Oligonucleotide for detection of SNP TSC0062593
tagagcgtgttty

SEQ ID NO: 257160 - DNA, 13 bp, Artificial Sequence
  Oligonucleotide for detection of SNP TSC0062593
raaacacgctcta

SEQ ID NO: 257161 - DNA, 13 bp, Artificial Sequence
  Oligonucleotide for detection of SNP TSC0062593
gaaatatgttttg

SEQ ID NO: 257162 - DNA, 13 bp, Artificial Sequence
  Oligonucleotide for detection of SNP TSC0062593
caaaacatatttc

SEQ ID NO: 257163 - DNA, 13 bp, Artificial Sequence
  Oligonucleotide for detection of SNP TSC0062593
gaaatacgttttg

SEQ ID NO: 257164 - DNA, 13 bp, Artificial Sequence
  Oligonucleotide for detection of SNP TSC0062593
caaaacgtatttc

SEQ ID NO: 257165 - DNA, 13 bp, Artificial Sequence
  Oligonucleotide for detection of SNP TSC0062598
tttgaaatattay

SEQ ID NO: 257166 - DNA, 13 bp, Artificial Sequence
  Oligonucleotide for detection of SNP TSC0062598
rtaatatttcaaa

SEQ ID NO: 257167 - DNA, 13 bp, Artificial Sequence
  Oligonucleotide for detection of SNP TSC0062598
tttgaagtattay

SEQ ID NO: 257168 - DNA, 13 bp, Artificial Sequence
  Oligonucleotide for detection of SNP TSC0062598
rtaatacttcaaa

SEQ ID NO: 257169 - DNA, 13 bp, Artificial Sequence
  Oligonucleotide for detection of SNP TSC0062600
gtagttaggtaaa

SEQ ID NO: 257170 - DNA, 13 bp, Artificial Sequence
  Oligonucleotide for detection of SNP TSC0062600
tttacctaactac

SEQ ID NO: 257171 - DNA, 13 bp, Artificial Sequence
  Oligonucleotide for detection of SNP TSC0062600
gtagttgggtaaa

SEQ ID NO: 257172 - DNA, 13 bp, Artificial Sequence
  Oligonucleotide for detection of SNP TSC0062600
tttacccaactac

SEQ ID NO: 257173 - DNA, 13 bp, Artificial Sequence
  Oligonucleotide for detection of SNP TSC0062600
gtagtcgggtaaa

SEQ ID NO: 257174 - DNA, 13 bp, Artificial Sequence
  Oligonucleotide for detection of SNP TSC0062600
tttacccgactac

SEQ ID NO: 257175 - DNA, 13 bp, Artificial Sequence
  Oligonucleotide for detection of SNP TSC0005272
aggagataagaty

SEQ ID NO: 257176 - DNA, 13 bp, Artificial Sequence
  Oligonucleotide for detection of SNP TSC0005272
ratcttatctcct

SEQ ID NO: 257177 - DNA, 13 bp, Artificial Sequence
  Oligonucleotide for detection of SNP TSC0005272
aggagagaagaty

SEQ ID NO: 257178 - DNA, 13 bp, Artificial Sequence
  Oligonucleotide for detection of SNP TSC0005272
ratcttctctcct

SEQ ID NO: 257179 - DNA, 13 bp, Artificial Sequence
  Oligonucleotide for detection of SNP TSC0062605
gtgtgtatatagt

SEQ ID NO: 257180 - DNA, 13 bp, Artificial Sequence
  Oligonucleotide for detection of SNP TSC0062605
actatatacacac

SEQ ID NO: 257181 - DNA, 13 bp, Artificial Sequence
  Oligonucleotide for detection of SNP TSC0062605
gtgtgtgtatagt

SEQ ID NO: 257182 - DNA, 13 bp, Artificial Sequence
  Oligonucleotide for detection of SNP TSC0062605
actatacacacac

SEQ ID NO: 257183 - DNA, 13 bp, Artificial Sequence
  Oligonucleotide for detection of SNP TSC0062607
aaagaaggaaaga

SEQ ID NO: 257184 - DNA, 13 bp, Artificial Sequence
  Oligonucleotide for detection of SNP TSC0062607
tctttccttcttt

SEQ ID NO: 257185 - DNA, 13 bp, Artificial Sequence
  Oligonucleotide for detection of SNP TSC0008069
agttaaaagattg

SEQ ID NO: 257186 - DNA, 13 bp, Artificial Sequence
  Oligonucleotide for detection of SNP TSC0008069
caatcttttaact

SEQ ID NO: 257187 - DNA, 13 bp, Artificial Sequence
  Oligonucleotide for detection of SNP TSC0008069
agttaagagattg

SEQ ID NO: 257188 - DNA, 13 bp, Artificial Sequence
  Oligonucleotide for detection of SNP TSC0008069
caatctcttaact

SEQ ID NO: 257189 - DNA, 13 bp, Artificial Sequence
  Oligonucleotide for detection of SNP TSC0008069
agttaaaagatcg

SEQ ID NO: 257190 - DNA, 13 bp, Artificial Sequence
  Oligonucleotide for detection of SNP TSC0008069
cgatcttttaact

SEQ ID NO: 257191 - DNA, 13 bp, Artificial Sequence
  Oligonucleotide for detection of SNP TSC0008069
agttaagagatcg

SEQ ID NO: 257192 - DNA, 13 bp, Artificial Sequence
  Oligonucleotide for detection of SNP TSC0008069
cgatctcttaact

SEQ ID NO: 257193 - DNA, 13 bp, Artificial Sequence
  Oligonucleotide for detection of SNP TSC0004683
tagagtttttaag

SEQ ID NO: 257194 - DNA, 13 bp, Artificial Sequence
  Oligonucleotide for detection of SNP TSC0004683
cttaaaaactcta

SEQ ID NO: 257195 - DNA, 13 bp, Artificial Sequence
  Oligonucleotide for detection of SNP TSC0004683
tagagtgtttaag

SEQ ID NO: 257196 - DNA, 13 bp, Artificial Sequence
  Oligonucleotide for detection of SNP TSC0004683
cttaaacactcta

SEQ ID NO: 257197 - DNA, 13 bp, Artificial Sequence
  Oligonucleotide for detection of SNP TSC0004683
tttggaaatttta

SEQ ID NO: 257198 - DNA, 13 bp, Artificial Sequence
  Oligonucleotide for detection of SNP TSC0004683
taaaatttccaaa

SEQ ID NO: 257199 - DNA, 13 bp, Artificial Sequence
  Oligonucleotide for detection of SNP TSC0004683
tttggatatttta

SEQ ID NO: 257200 - DNA, 13 bp, Artificial Sequence
  Oligonucleotide for detection of SNP TSC0004683
taaaatatccaaa

SEQ ID NO: 257201 - DNA, 13 bp, Artificial Sequence
  Oligonucleotide for detection of SNP TSC0004684
attagaggaataa

SEQ ID NO: 257202 - DNA, 13 bp, Artificial Sequence
  Oligonucleotide for detection of SNP TSC0004684
ttattcctctaat

SEQ ID NO: 257203 - DNA, 13 bp, Artificial Sequence
  Oligonucleotide for detection of SNP TSC0004684
attagatgaataa

SEQ ID NO: 257204 - DNA, 13 bp, Artificial Sequence
  Oligonucleotide for detection of SNP TSC0004684
ttattcatctaat

SEQ ID NO: 257205 - DNA, 13 bp, Artificial Sequence
  Oligonucleotide for detection of SNP TSC0004684
attagacgaataa

SEQ ID NO: 257206 - DNA, 13 bp, Artificial Sequence
  Oligonucleotide for detection of SNP TSC0004684
ttattcgtctaat

SEQ ID NO: 257207 - DNA, 13 bp, Artificial Sequence
  Oligonucleotide for detection of SNP TSC0007705
ttagaaaaggagt

SEQ ID NO: 257208 - DNA, 13 bp, Artificial Sequence
  Oligonucleotide for detection of SNP TSC0007705
actccttttctaa

SEQ ID NO: 257209 - DNA, 13 bp, Artificial Sequence
  Oligonucleotide for detection of SNP TSC0007705
ttagaagaggagt

SEQ ID NO: 257210 - DNA, 13 bp, Artificial Sequence
  Oligonucleotide for detection of SNP TSC0007705
actcctcttctaa

SEQ ID NO: 257211 - DNA, 13 bp, Artificial Sequence
  Oligonucleotide for detection of SNP TSC0062611
gttgttattaatg

SEQ ID NO: 257212 - DNA, 13 bp, Artificial Sequence
  Oligonucleotide for detection of SNP TSC0062611
cattaataacaac

SEQ ID NO: 257213 - DNA, 13 bp, Artificial Sequence
  Oligonucleotide for detection of SNP TSC0062611
gttgttgttaatg

SEQ ID NO: 257214 - DNA, 13 bp, Artificial Sequence
  Oligonucleotide for detection of SNP TSC0062611
cattaacaacaac

SEQ ID NO: 257215 - DNA, 13 bp, Artificial Sequence
  Oligonucleotide for detection of SNP TSC0062612
gaaggaagaagag

SEQ ID NO: 257216 - DNA, 13 bp, Artificial Sequence
  Oligonucleotide for detection of SNP TSC0062612
ctcttcttccttc

SEQ ID NO: 257217 - DNA, 13 bp, Artificial Sequence
  Oligonucleotide for detection of SNP TSC0062612
gaaggaggaagag

SEQ ID NO: 257218 - DNA, 13 bp, Artificial Sequence
  Oligonucleotide for detection of SNP TSC0062612
ctcttcctccttc

SEQ ID NO: 257219 - DNA, 13 bp, Artificial Sequence
  Oligonucleotide for detection of SNP TSC0062613
tatggggattagg

SEQ ID NO: 257220 - DNA, 13 bp, Artificial Sequence
  Oligonucleotide for detection of SNP TSC0062613
cctaatccccata

SEQ ID NO: 257221 - DNA, 13 bp, Artificial Sequence
  Oligonucleotide for detection of SNP TSC0062613
tatgggaattagg

SEQ ID NO: 257222 - DNA, 13 bp, Artificial Sequence
  Oligonucleotide for detection of SNP TSC0062613
cctaattcccata

SEQ ID NO: 257223 - DNA, 13 bp, Artificial Sequence
  Oligonucleotide for detection of SNP TSC0062614
tagaatttaaaaa

SEQ ID NO: 257224 - DNA, 13 bp, Artificial Sequence
  Oligonucleotide for detection of SNP TSC0062614
tttttaaattcta

SEQ ID NO: 257225 - DNA, 13 bp, Artificial Sequence
  Oligonucleotide for detection of SNP TSC0062614
tagaatgtaaaaa

SEQ ID NO: 257226 - DNA, 13 bp, Artificial Sequence
  Oligonucleotide for detection of SNP TSC0062614
tttttacattcta

SEQ ID NO: 257227 - DNA, 13 bp, Artificial Sequence
  Oligonucleotide for detection of SNP TSC0062615
gagtaaataggaa

SEQ ID NO: 257228 - DNA, 13 bp, Artificial Sequence
  Oligonucleotide for detection of SNP TSC0062615
ttcctatttactc

SEQ ID NO: 257229 - DNA, 13 bp, Artificial Sequence
  Oligonucleotide for detection of SNP TSC0062615
gagtaattaggaa

SEQ ID NO: 257230 - DNA, 13 bp, Artificial Sequence
  Oligonucleotide for detection of SNP TSC0062615
ttcctaattactc

SEQ ID NO: 257231 - DNA, 13 bp, Artificial Sequence
  Oligonucleotide for detection of SNP TSC0005066
gatattatgggat

SEQ ID NO: 257232 - DNA, 13 bp, Artificial Sequence
  Oligonucleotide for detection of SNP TSC0005066
atcccataatatc

SEQ ID NO: 257233 - DNA, 13 bp, Artificial Sequence
  Oligonucleotide for detection of SNP TSC0005066
gatattgtgggat

SEQ ID NO: 257234 - DNA, 13 bp, Artificial Sequence
  Oligonucleotide for detection of SNP TSC0005066
atcccacaatatc

SEQ ID NO: 257235 - DNA, 13 bp, Artificial Sequence
  Oligonucleotide for detection of SNP TSC0062616
agaaatgttaggg

SEQ ID NO: 257236 - DNA, 13 bp, Artificial Sequence
  Oligonucleotide for detection of SNP TSC0062616
ccctaacatttct

SEQ ID NO: 257237 - DNA, 13 bp, Artificial Sequence
  Oligonucleotide for detection of SNP TSC0062616
agaaatattaggg

SEQ ID NO: 257238 - DNA, 13 bp, Artificial Sequence
  Oligonucleotide for detection of SNP TSC0062616
ccctaatatttct

SEQ ID NO: 257239 - DNA, 13 bp, Artificial Sequence
  Oligonucleotide for detection of SNP TSC0062618
tttataggagagy

SEQ ID NO: 257240 - DNA, 13 bp, Artificial Sequence
  Oligonucleotide for detection of SNP TSC0062618
rctctcctataaa

SEQ ID NO: 257241 - DNA, 13 bp, Artificial Sequence
  Oligonucleotide for detection of SNP TSC0062618
tttataagagagy

SEQ ID NO: 257242 - DNA, 13 bp, Artificial Sequence
  Oligonucleotide for detection of SNP TSC0062618
rctctcttataaa

SEQ ID NO: 257243 - DNA, 13 bp, Artificial Sequence
  Oligonucleotide for detection of SNP TSC0062619
tagtgatgtttta

SEQ ID NO: 257244 - DNA, 13 bp, Artificial Sequence
  Oligonucleotide for detection of SNP TSC0062619
taaaacatcacta

SEQ ID NO: 257245 - DNA, 13 bp, Artificial Sequence
  Oligonucleotide for detection of SNP TSC0062619
tagcgatgtttta

SEQ ID NO: 257246 - DNA, 13 bp, Artificial Sequence
  Oligonucleotide for detection of SNP TSC0062619
taaaacatcgcta

SEQ ID NO: 257247 - DNA, 13 bp, Artificial Sequence
  Oligonucleotide for detection of SNP TSC0062619
tagcgaggtttta

SEQ ID NO: 257248 - DNA, 13 bp, Artificial Sequence
  Oligonucleotide for detection of SNP TSC0062619
taaaacctcgcta

SEQ ID NO: 257249 - DNA, 13 bp, Artificial Sequence
  Oligonucleotide for detection of SNP TSC0062619
tagtgacgtttta

SEQ ID NO: 257250 - DNA, 13 bp, Artificial Sequence
  Oligonucleotide for detection of SNP TSC0062619
taaaacgtcacta

SEQ ID NO: 257251 - DNA, 13 bp, Artificial Sequence
  Oligonucleotide for detection of SNP TSC0062619
tagcgacgtttta

SEQ ID NO: 257252 - DNA, 13 bp, Artificial Sequence
  Oligonucleotide for detection of SNP TSC0062619
taaaacgtcgcta

SEQ ID NO: 257253 - DNA, 13 bp, Artificial Sequence
  Oligonucleotide for detection of SNP TSC0062619
tgggatgttgttg

SEQ ID NO: 257254 - DNA, 13 bp, Artificial Sequence
  Oligonucleotide for detection of SNP TSC0062619
caacaacatccca

SEQ ID NO: 257255 - DNA, 13 bp, Artificial Sequence
  Oligonucleotide for detection of SNP TSC0062619
tgggattttgttg

SEQ ID NO: 257256 - DNA, 13 bp, Artificial Sequence
  Oligonucleotide for detection of SNP TSC0062619
caacaaaatccca

SEQ ID NO: 257257 - DNA, 13 bp, Artificial Sequence
  Oligonucleotide for detection of SNP TSC0062619
tgggacgttgttg

SEQ ID NO: 257258 - DNA, 13 bp, Artificial Sequence
  Oligonucleotide for detection of SNP TSC0062619
caacaacgtccca

SEQ ID NO: 257259 - DNA, 13 bp, Artificial Sequence
  Oligonucleotide for detection of SNP TSC0062619
tgggatttcgttg

SEQ ID NO: 257260 - DNA, 13 bp, Artificial Sequence
  Oligonucleotide for detection of SNP TSC0062619
caacgaaatccca

SEQ ID NO: 257261 - DNA, 13 bp, Artificial Sequence
  Oligonucleotide for detection of SNP TSC0062619
tgggatgtcgttg

SEQ ID NO: 257262 - DNA, 13 bp, Artificial Sequence
  Oligonucleotide for detection of SNP TSC0062619
caacgacatccca

SEQ ID NO: 257263 - DNA, 13 bp, Artificial Sequence
  Oligonucleotide for detection of SNP TSC0062619
tgggacgtcgttg

SEQ ID NO: 257264 - DNA, 13 bp, Artificial Sequence
  Oligonucleotide for detection of SNP TSC0062619
caacgacgtccca

SEQ ID NO: 257265 - DNA, 13 bp, Artificial Sequence
  Oligonucleotide for detection of SNP TSC0062620
ataatattaaaay

SEQ ID NO: 257266 - DNA, 13 bp, Artificial Sequence
  Oligonucleotide for detection of SNP TSC0062620
rttttaatattat

SEQ ID NO: 257267 - DNA, 13 bp, Artificial Sequence
  Oligonucleotide for detection of SNP TSC0062620
ataatagtaaaay

SEQ ID NO: 257268 - DNA, 13 bp, Artificial Sequence
  Oligonucleotide for detection of SNP TSC0062620
rttttactattat

SEQ ID NO: 257269 - DNA, 13 bp, Artificial Sequence
  Oligonucleotide for detection of SNP TSC0062620
gttttgttattat

SEQ ID NO: 257270 - DNA, 13 bp, Artificial Sequence
  Oligonucleotide for detection of SNP TSC0062620
ataataacaaaac

SEQ ID NO: 257271 - DNA, 13 bp, Artificial Sequence
  Oligonucleotide for detection of SNP TSC0062622
gtgtagtgggata

SEQ ID NO: 257272 - DNA, 13 bp, Artificial Sequence
  Oligonucleotide for detection of SNP TSC0062622
tatcccactacac

SEQ ID NO: 257273 - DNA, 13 bp, Artificial Sequence
  Oligonucleotide for detection of SNP TSC0062622
gtgtagcgggata

SEQ ID NO: 257274 - DNA, 13 bp, Artificial Sequence
  Oligonucleotide for detection of SNP TSC0062622
tatcccgctacac

SEQ ID NO: 257275 - DNA, 13 bp, Artificial Sequence
  Oligonucleotide for detection of SNP TSC0062622
tgttttgttgtay

SEQ ID NO: 257276 - DNA, 13 bp, Artificial Sequence
  Oligonucleotide for detection of SNP TSC0062622
rtacaacaaaaca

SEQ ID NO: 257277 - DNA, 13 bp, Artificial Sequence
  Oligonucleotide for detection of SNP TSC0062622
tgttttattgtay

SEQ ID NO: 257278 - DNA, 13 bp, Artificial Sequence
  Oligonucleotide for detection of SNP TSC0062622
rtacaataaaaca

SEQ ID NO: 257279 - DNA, 13 bp, Artificial Sequence
  Oligonucleotide for detection of SNP TSC0062622
tgtttcgttgtay

SEQ ID NO: 257280 - DNA, 13 bp, Artificial Sequence
  Oligonucleotide for detection of SNP TSC0062622
rtacaacgaaaca

SEQ ID NO: 257281 - DNA, 13 bp, Artificial Sequence
  Oligonucleotide for detection of SNP TSC0062623
gtattagttataa

SEQ ID NO: 257282 - DNA, 13 bp, Artificial Sequence
  Oligonucleotide for detection of SNP TSC0062623
ttataactaatac

SEQ ID NO: 257283 - DNA, 13 bp, Artificial Sequence
  Oligonucleotide for detection of SNP TSC0062623
gtattaattataa

SEQ ID NO: 257284 - DNA, 13 bp, Artificial Sequence
  Oligonucleotide for detection of SNP TSC0062623
ttataattaatac

SEQ ID NO: 257285 - DNA, 13 bp, Artificial Sequence
  Oligonucleotide for detection of SNP TSC0062624
taggttatattat

SEQ ID NO: 257286 - DNA, 13 bp, Artificial Sequence
  Oligonucleotide for detection of SNP TSC0062624
ataatataaccta

SEQ ID NO: 257287 - DNA, 13 bp, Artificial Sequence
  Oligonucleotide for detection of SNP TSC0062624
taggttgtattat

SEQ ID NO: 257288 - DNA, 13 bp, Artificial Sequence
  Oligonucleotide for detection of SNP TSC0062624
ataatacaaccta

SEQ ID NO: 257289 - DNA, 13 bp, Artificial Sequence
  Oligonucleotide for detection of SNP TSC0062624
taggtcgtattat

SEQ ID NO: 257290 - DNA, 13 bp, Artificial Sequence
  Oligonucleotide for detection of SNP TSC0062624
ataatacgaccta

SEQ ID NO: 257291 - DNA, 13 bp, Artificial Sequence
  Oligonucleotide for detection of SNP TSC0062624
ataatatggtttg

SEQ ID NO: 257292 - DNA, 13 bp, Artificial Sequence
  Oligonucleotide for detection of SNP TSC0062624
caaaccatattat

SEQ ID NO: 257293 - DNA, 13 bp, Artificial Sequence
  Oligonucleotide for detection of SNP TSC0062624
ataatacggtttg

SEQ ID NO: 257294 - DNA, 13 bp, Artificial Sequence
  Oligonucleotide for detection of SNP TSC0062624
caaaccgtattat

SEQ ID NO: 257295 - DNA, 13 bp, Artificial Sequence
  Oligonucleotide for detection of SNP TSC0062625
tagtttatttgat

SEQ ID NO: 257296 - DNA, 13 bp, Artificial Sequence
  Oligonucleotide for detection of SNP TSC0062625
atcaaataaacta

SEQ ID NO: 257297 - DNA, 13 bp, Artificial Sequence
  Oligonucleotide for detection of SNP TSC0062625
tagtttgtttgat

SEQ ID NO: 257298 - DNA, 13 bp, Artificial Sequence
  Oligonucleotide for detection of SNP TSC0062625
atcaaacaaacta

SEQ ID NO: 257299 - DNA, 13 bp, Artificial Sequence
  Oligonucleotide for detection of SNP TSC0062626
aaaggtttaaggg

SEQ ID NO: 257300 - DNA, 13 bp, Artificial Sequence
  Oligonucleotide for detection of SNP TSC0062626
cccttaaaccttt

SEQ ID NO: 257301 - DNA, 13 bp, Artificial Sequence
  Oligonucleotide for detection of SNP TSC0062626
aaaggtgtaaggg

SEQ ID NO: 257302 - DNA, 13 bp, Artificial Sequence
  Oligonucleotide for detection of SNP TSC0062626
cccttacaccttt

SEQ ID NO: 257303 - DNA, 13 bp, Artificial Sequence
  Oligonucleotide for detection of SNP TSC0062626
aaaggcgtaaggg

SEQ ID NO: 257304 - DNA, 13 bp, Artificial Sequence
  Oligonucleotide for detection of SNP TSC0062626
cccttacgccttt

SEQ ID NO: 257305 - DNA, 13 bp, Artificial Sequence
  Oligonucleotide for detection of SNP TSC0007607
ttagatagtgttg

SEQ ID NO: 257306 - DNA, 13 bp, Artificial Sequence
  Oligonucleotide for detection of SNP TSC0007607
caacactatctaa

SEQ ID NO: 257307 - DNA, 13 bp, Artificial Sequence
  Oligonucleotide for detection of SNP TSC0007607
ttagatggtgttg

SEQ ID NO: 257308 - DNA, 13 bp, Artificial Sequence
  Oligonucleotide for detection of SNP TSC0007607
caacaccatctaa

SEQ ID NO: 257309 - DNA, 13 bp, Artificial Sequence
  Oligonucleotide for detection of SNP TSC0007607
ttagatagtgtcg

SEQ ID NO: 257310 - DNA, 13 bp, Artificial Sequence
  Oligonucleotide for detection of SNP TSC0007607
cgacactatctaa

SEQ ID NO: 257311 - DNA, 13 bp, Artificial Sequence
  Oligonucleotide for detection of SNP TSC0007607
ttagatggtgtcg

SEQ ID NO: 257312 - DNA, 13 bp, Artificial Sequence
  Oligonucleotide for detection of SNP TSC0007607
cgacaccatctaa

SEQ ID NO: 257313 - DNA, 13 bp, Artificial Sequence
  Oligonucleotide for detection of SNP TSC0007608
gtgggtgagtgta

SEQ ID NO: 257314 - DNA, 13 bp, Artificial Sequence
  Oligonucleotide for detection of SNP TSC0007608
tacactcacccac

SEQ ID NO: 257315 - DNA, 13 bp, Artificial Sequence
  Oligonucleotide for detection of SNP TSC0007608
gtgggtaagtgta

SEQ ID NO: 257316 - DNA, 13 bp, Artificial Sequence
  Oligonucleotide for detection of SNP TSC0007608
tacacttacccac

SEQ ID NO: 257317 - DNA, 13 bp, Artificial Sequence
  Oligonucleotide for detection of SNP TSC0062628
ttagaggtttgaa

SEQ ID NO: 257318 - DNA, 13 bp, Artificial Sequence
  Oligonucleotide for detection of SNP TSC0062628
ttcaaacctctaa

SEQ ID NO: 257319 - DNA, 13 bp, Artificial Sequence
  Oligonucleotide for detection of SNP TSC0062628
ttagagatttgaa

SEQ ID NO: 257320 - DNA, 13 bp, Artificial Sequence
  Oligonucleotide for detection of SNP TSC0062628
ttcaaatctctaa

SEQ ID NO: 257321 - DNA, 13 bp, Artificial Sequence
  Oligonucleotide for detection of SNP TSC0062629
gataaatagttaa

SEQ ID NO: 257322 - DNA, 13 bp, Artificial Sequence
  Oligonucleotide for detection of SNP TSC0062629
ttaactatttatc

SEQ ID NO: 257323 - DNA, 13 bp, Artificial Sequence
  Oligonucleotide for detection of SNP TSC0062629
gataaagagttaa

SEQ ID NO: 257324 - DNA, 13 bp, Artificial Sequence
  Oligonucleotide for detection of SNP TSC0062629
ttaactctttatc

SEQ ID NO: 257325 - DNA, 13 bp, Artificial Sequence
  Oligonucleotide for detection of SNP TSC0062629
ttggttgtttgty

SEQ ID NO: 257326 - DNA, 13 bp, Artificial Sequence
  Oligonucleotide for detection of SNP TSC0062629
racaaacaaccaa

SEQ ID NO: 257327 - DNA, 13 bp, Artificial Sequence
  Oligonucleotide for detection of SNP TSC0062629
ttggttttttgty

SEQ ID NO: 257328 - DNA, 13 bp, Artificial Sequence
  Oligonucleotide for detection of SNP TSC0062629
racaaaaaaccaa

SEQ ID NO: 257329 - DNA, 13 bp, Artificial Sequence
  Oligonucleotide for detection of SNP TSC0062630
gttaagattagaa

SEQ ID NO: 257330 - DNA, 13 bp, Artificial Sequence
  Oligonucleotide for detection of SNP TSC0062630
ttctaatcttaac

SEQ ID NO: 257331 - DNA, 13 bp, Artificial Sequence
  Oligonucleotide for detection of SNP TSC0062630
gttaaggttagaa

SEQ ID NO: 257332 - DNA, 13 bp, Artificial Sequence
  Oligonucleotide for detection of SNP TSC0062630
ttctaaccttaac

SEQ ID NO: 257333 - DNA, 13 bp, Artificial Sequence
  Oligonucleotide for detection of SNP TSC0004933
gggattattgggt

SEQ ID NO: 257334 - DNA, 13 bp, Artificial Sequence
  Oligonucleotide for detection of SNP TSC0004933
acccaataatccc

SEQ ID NO: 257335 - DNA, 13 bp, Artificial Sequence
  Oligonucleotide for detection of SNP TSC0004933
gggattgttgggt

SEQ ID NO: 257336 - DNA, 13 bp, Artificial Sequence
  Oligonucleotide for detection of SNP TSC0004933
acccaacaatccc

SEQ ID NO: 257337 - DNA, 13 bp, Artificial Sequence
  Oligonucleotide for detection of SNP TSC0062635
gagttaatgaaay

SEQ ID NO: 257338 - DNA, 13 bp, Artificial Sequence
  Oligonucleotide for detection of SNP TSC0062635
rtttcattaactc

SEQ ID NO: 257339 - DNA, 13 bp, Artificial Sequence
  Oligonucleotide for detection of SNP TSC0062635
gagttagtgaaay

SEQ ID NO: 257340 - DNA, 13 bp, Artificial Sequence
  Oligonucleotide for detection of SNP TSC0062635
rtttcactaactc

SEQ ID NO: 257341 - DNA, 13 bp, Artificial Sequence
  Oligonucleotide for detection of SNP TSC0005688
tttgtgtattatt

SEQ ID NO: 257342 - DNA, 13 bp, Artificial Sequence
  Oligonucleotide for detection of SNP TSC0005688
aataatacacaaa

SEQ ID NO: 257343 - DNA, 13 bp, Artificial Sequence
  Oligonucleotide for detection of SNP TSC0005688
tttgtggattatt

SEQ ID NO: 257344 - DNA, 13 bp, Artificial Sequence
  Oligonucleotide for detection of SNP TSC0005688
aataatccacaaa

SEQ ID NO: 257345 - DNA, 13 bp, Artificial Sequence
  Oligonucleotide for detection of SNP TSC0005688
aataatgtataga

SEQ ID NO: 257346 - DNA, 13 bp, Artificial Sequence
  Oligonucleotide for detection of SNP TSC0005688
tctatacattatt

SEQ ID NO: 257347 - DNA, 13 bp, Artificial Sequence
  Oligonucleotide for detection of SNP TSC0005688
aataatttataga

SEQ ID NO: 257348 - DNA, 13 bp, Artificial Sequence
  Oligonucleotide for detection of SNP TSC0005688
tctataaattatt

SEQ ID NO: 257349 - DNA, 13 bp, Artificial Sequence
  Oligonucleotide for detection of SNP TSC0062637
tttagaatttttg

SEQ ID NO: 257350 - DNA, 13 bp, Artificial Sequence
  Oligonucleotide for detection of SNP TSC0062637
caaaaattctaaa

SEQ ID NO: 257351 - DNA, 13 bp, Artificial Sequence
  Oligonucleotide for detection of SNP TSC0062637
tttagattttttg

SEQ ID NO: 257352 - DNA, 13 bp, Artificial Sequence
  Oligonucleotide for detection of SNP TSC0062637
caaaaaatctaaa

SEQ ID NO: 257353 - DNA, 13 bp, Artificial Sequence
  Oligonucleotide for detection of SNP TSC0062637
taggggttttgag

SEQ ID NO: 257354 - DNA, 13 bp, Artificial Sequence
  Oligonucleotide for detection of SNP TSC0062637
ctcaaaaccccta

SEQ ID NO: 257355 - DNA, 13 bp, Artificial Sequence
  Oligonucleotide for detection of SNP TSC0062637
tagggggtttgag

SEQ ID NO: 257356 - DNA, 13 bp, Artificial Sequence
  Oligonucleotide for detection of SNP TSC0062637
ctcaaacccccta

SEQ ID NO: 257357 - DNA, 13 bp, Artificial Sequence
  Oligonucleotide for detection of SNP TSC0005618
aggggaaggggtt

SEQ ID NO: 257358 - DNA, 13 bp, Artificial Sequence
  Oligonucleotide for detection of SNP TSC0005618
aaccccttcccct

SEQ ID NO: 257359 - DNA, 13 bp, Artificial Sequence
  Oligonucleotide for detection of SNP TSC0005618
aggggatggggtt

SEQ ID NO: 257360 - DNA, 13 bp, Artificial Sequence
  Oligonucleotide for detection of SNP TSC0005618
aaccccatcccct

SEQ ID NO: 257361 - DNA, 13 bp, Artificial Sequence
  Oligonucleotide for detection of SNP TSC0005618
aggggacggggtt

SEQ ID NO: 257362 - DNA, 13 bp, Artificial Sequence
  Oligonucleotide for detection of SNP TSC0005618
aaccccgtcccct

SEQ ID NO: 257363 - DNA, 13 bp, Artificial Sequence
  Oligonucleotide for detection of SNP TSC0062640
tttgagataatag

SEQ ID NO: 257364 - DNA, 13 bp, Artificial Sequence
  Oligonucleotide for detection of SNP TSC0062640
ctattatctcaaa

SEQ ID NO: 257365 - DNA, 13 bp, Artificial Sequence
  Oligonucleotide for detection of SNP TSC0062640
tttgagttaatag

SEQ ID NO: 257366 - DNA, 13 bp, Artificial Sequence
  Oligonucleotide for detection of SNP TSC0062640
ctattaactcaaa

SEQ ID NO: 257367 - DNA, 13 bp, Artificial Sequence
  Oligonucleotide for detection of SNP TSC0062640
ttattgttttaga

SEQ ID NO: 257368 - DNA, 13 bp, Artificial Sequence
  Oligonucleotide for detection of SNP TSC0062640
tctaaaacaataa

SEQ ID NO: 257369 - DNA, 13 bp, Artificial Sequence
  Oligonucleotide for detection of SNP TSC0062640
ttattgatttaga

SEQ ID NO: 257370 - DNA, 13 bp, Artificial Sequence
  Oligonucleotide for detection of SNP TSC0062640
tctaaatcaataa

SEQ ID NO: 257371 - DNA, 13 bp, Artificial Sequence
  Oligonucleotide for detection of SNP TSC0062641
aaggtgagtattg

SEQ ID NO: 257372 - DNA, 13 bp, Artificial Sequence
  Oligonucleotide for detection of SNP TSC0062641
caatactcacctt

SEQ ID NO: 257373 - DNA, 13 bp, Artificial Sequence
  Oligonucleotide for detection of SNP TSC0062641
aaggtgggtattg

SEQ ID NO: 257374 - DNA, 13 bp, Artificial Sequence
  Oligonucleotide for detection of SNP TSC0062641
caatacccacctt

SEQ ID NO: 257375 - DNA, 13 bp, Artificial Sequence
  Oligonucleotide for detection of SNP TSC0062642
aatttatgagtag

SEQ ID NO: 257376 - DNA, 13 bp, Artificial Sequence
  Oligonucleotide for detection of SNP TSC0062642
ctactcataaatt

SEQ ID NO: 257377 - DNA, 13 bp, Artificial Sequence
  Oligonucleotide for detection of SNP TSC0062642
aatttacgagtag

SEQ ID NO: 257378 - DNA, 13 bp, Artificial Sequence
  Oligonucleotide for detection of SNP TSC0062642
ctactcgtaaatt

SEQ ID NO: 257379 - DNA, 13 bp, Artificial Sequence
  Oligonucleotide for detection of SNP TSC0062642
ttatttgtaggtt

SEQ ID NO: 257380 - DNA, 13 bp, Artificial Sequence
  Oligonucleotide for detection of SNP TSC0062642
aacctacaaataa

SEQ ID NO: 257381 - DNA, 13 bp, Artificial Sequence
  Oligonucleotide for detection of SNP TSC0062642
ttatttataggtt

SEQ ID NO: 257382 - DNA, 13 bp, Artificial Sequence
  Oligonucleotide for detection of SNP TSC0062642
aacctataaataa

SEQ ID NO: 257383 - DNA, 13 bp, Artificial Sequence
  Oligonucleotide for detection of SNP TSC0062642
ttattcgtaggtt

SEQ ID NO: 257384 - DNA, 13 bp, Artificial Sequence
  Oligonucleotide for detection of SNP TSC0062642
aacctacgaataa

SEQ ID NO: 257385 - DNA, 13 bp, Artificial Sequence
  Oligonucleotide for detection of SNP TSC0062643
gttgttatattgt

SEQ ID NO: 257386 - DNA, 13 bp, Artificial Sequence
  Oligonucleotide for detection of SNP TSC0062643
acaatataacaac

SEQ ID NO: 257387 - DNA, 13 bp, Artificial Sequence
  Oligonucleotide for detection of SNP TSC0062643
gttgttgtattgt

SEQ ID NO: 257388 - DNA, 13 bp, Artificial Sequence
  Oligonucleotide for detection of SNP TSC0062643
acaatacaacaac

SEQ ID NO: 257389 - DNA, 13 bp, Artificial Sequence
  Oligonucleotide for detection of SNP TSC0062643
gttgtcgtattgt

SEQ ID NO: 257390 - DNA, 13 bp, Artificial Sequence
  Oligonucleotide for detection of SNP TSC0062643
acaatacgacaac

SEQ ID NO: 257391 - DNA, 13 bp, Artificial Sequence
  Oligonucleotide for detection of SNP TSC0062643
ataatatggtagy

SEQ ID NO: 257392 - DNA, 13 bp, Artificial Sequence
  Oligonucleotide for detection of SNP TSC0062643
rctaccatattat

SEQ ID NO: 257393 - DNA, 13 bp, Artificial Sequence
  Oligonucleotide for detection of SNP TSC0062643
ataatacggtagy

SEQ ID NO: 257394 - DNA, 13 bp, Artificial Sequence
  Oligonucleotide for detection of SNP TSC0062643
rctaccgtattat

SEQ ID NO: 257395 - DNA, 13 bp, Artificial Sequence
  Oligonucleotide for detection of SNP TSC0005531
tatttatatttta

SEQ ID NO: 257396 - DNA, 13 bp, Artificial Sequence
  Oligonucleotide for detection of SNP TSC0005531
taaaatataaata

SEQ ID NO: 257397 - DNA, 13 bp, Artificial Sequence
  Oligonucleotide for detection of SNP TSC0005531
taggatttaaata

SEQ ID NO: 257398 - DNA, 13 bp, Artificial Sequence
  Oligonucleotide for detection of SNP TSC0005531
tatttaaatccta

SEQ ID NO: 257399 - DNA, 13 bp, Artificial Sequence
  Oligonucleotide for detection of SNP TSC0005531
taggatataaata

SEQ ID NO: 257400 - DNA, 13 bp, Artificial Sequence
  Oligonucleotide for detection of SNP TSC0005531
tatttatatccta

SEQ ID NO: 257401 - DNA, 13 bp, Artificial Sequence
  Oligonucleotide for detection of SNP TSC0062644
agattagtttagg

SEQ ID NO: 257402 - DNA, 13 bp, Artificial Sequence
  Oligonucleotide for detection of SNP TSC0062644
cctaaactaatct

SEQ ID NO: 257403 - DNA, 13 bp, Artificial Sequence
  Oligonucleotide for detection of SNP TSC0062644
agattaatttagg

SEQ ID NO: 257404 - DNA, 13 bp, Artificial Sequence
  Oligonucleotide for detection of SNP TSC0062644
cctaaattaatct

SEQ ID NO: 257405 - DNA, 13 bp, Artificial Sequence
  Oligonucleotide for detection of SNP TSC0062645
agatttgttttat

SEQ ID NO: 257406 - DNA, 13 bp, Artificial Sequence
  Oligonucleotide for detection of SNP TSC0062645
ataaaacaaatct

SEQ ID NO: 257407 - DNA, 13 bp, Artificial Sequence
  Oligonucleotide for detection of SNP TSC0062646
gagttgtgttatg

SEQ ID NO: 257408 - DNA, 13 bp, Artificial Sequence
  Oligonucleotide for detection of SNP TSC0062646
cataacacaactc

SEQ ID NO: 257409 - DNA, 13 bp, Artificial Sequence
  Oligonucleotide for detection of SNP TSC0062646
gagttgcgttatg

SEQ ID NO: 257410 - DNA, 13 bp, Artificial Sequence
  Oligonucleotide for detection of SNP TSC0062646
cataacgcaactc

SEQ ID NO: 257411 - DNA, 13 bp, Artificial Sequence
  Oligonucleotide for detection of SNP TSC0062646
gagttgtgttacg

SEQ ID NO: 257412 - DNA, 13 bp, Artificial Sequence
  Oligonucleotide for detection of SNP TSC0062646
cgtaacacaactc

SEQ ID NO: 257413 - DNA, 13 bp, Artificial Sequence
  Oligonucleotide for detection of SNP TSC0062646
gagttgcgttacg

SEQ ID NO: 257414 - DNA, 13 bp, Artificial Sequence
  Oligonucleotide for detection of SNP TSC0062646
cgtaacgcaactc

SEQ ID NO: 257415 - DNA, 13 bp, Artificial Sequence
  Oligonucleotide for detection of SNP TSC0062646
tgtgatgtaatty

SEQ ID NO: 257416 - DNA, 13 bp, Artificial Sequence
  Oligonucleotide for detection of SNP TSC0062646
raattacatcaca

SEQ ID NO: 257417 - DNA, 13 bp, Artificial Sequence
  Oligonucleotide for detection of SNP TSC0062646
tgtgatataatty

SEQ ID NO: 257418 - DNA, 13 bp, Artificial Sequence
  Oligonucleotide for detection of SNP TSC0062646
raattatatcaca

SEQ ID NO: 257419 - DNA, 13 bp, Artificial Sequence
  Oligonucleotide for detection of SNP TSC0062646
cgtgatgtaatty

SEQ ID NO: 257420 - DNA, 13 bp, Artificial Sequence
  Oligonucleotide for detection of SNP TSC0062646
raattacatcacg

SEQ ID NO: 257421 - DNA, 13 bp, Artificial Sequence
  Oligonucleotide for detection of SNP TSC0062646
cgtgatataatty

SEQ ID NO: 257422 - DNA, 13 bp, Artificial Sequence
  Oligonucleotide for detection of SNP TSC0062646
raattatatcacg

SEQ ID NO: 257423 - DNA, 13 bp, Artificial Sequence
  Oligonucleotide for detection of SNP TSC0062646
tgtgacgtaatty

SEQ ID NO: 257424 - DNA, 13 bp, Artificial Sequence
  Oligonucleotide for detection of SNP TSC0062646
raattacgtcaca

SEQ ID NO: 257425 - DNA, 13 bp, Artificial Sequence
  Oligonucleotide for detection of SNP TSC0062646
cgtgacgtaatty

SEQ ID NO: 257426 - DNA, 13 bp, Artificial Sequence
  Oligonucleotide for detection of SNP TSC0062646
raattacgtcacg

SEQ ID NO: 257427 - DNA, 13 bp, Artificial Sequence
  Oligonucleotide for detection of SNP TSC0062647
gtggagatatttg

SEQ ID NO: 257428 - DNA, 13 bp, Artificial Sequence
  Oligonucleotide for detection of SNP TSC0062647
caaatatctccac

SEQ ID NO: 257429 - DNA, 13 bp, Artificial Sequence
  Oligonucleotide for detection of SNP TSC0062647
gtggagttatttg

SEQ ID NO: 257430 - DNA, 13 bp, Artificial Sequence
  Oligonucleotide for detection of SNP TSC0062647
caaataactccac

SEQ ID NO: 257431 - DNA, 13 bp, Artificial Sequence
  Oligonucleotide for detection of SNP TSC0062647
tagatgtttttay

SEQ ID NO: 257432 - DNA, 13 bp, Artificial Sequence
  Oligonucleotide for detection of SNP TSC0062647
rtaaaaacatcta

SEQ ID NO: 257433 - DNA, 13 bp, Artificial Sequence
  Oligonucleotide for detection of SNP TSC0062647
tagatggttttay

SEQ ID NO: 257434 - DNA, 13 bp, Artificial Sequence
  Oligonucleotide for detection of SNP TSC0062647
rtaaaaccatcta

SEQ ID NO: 257435 - DNA, 13 bp, Artificial Sequence
  Oligonucleotide for detection of SNP TSC0008001
ttttgttaggtta

SEQ ID NO: 257436 - DNA, 13 bp, Artificial Sequence
  Oligonucleotide for detection of SNP TSC0008001
taacctaacaaaa

SEQ ID NO: 257437 - DNA, 13 bp, Artificial Sequence
  Oligonucleotide for detection of SNP TSC0008001
ttttgtgaggtta

SEQ ID NO: 257438 - DNA, 13 bp, Artificial Sequence
  Oligonucleotide for detection of SNP TSC0008001
taacctcacaaaa

SEQ ID NO: 257439 - DNA, 13 bp, Artificial Sequence
  Oligonucleotide for detection of SNP TSC0008001
tagtttgataagg

SEQ ID NO: 257440 - DNA, 13 bp, Artificial Sequence
  Oligonucleotide for detection of SNP TSC0008001
ccttatcaaacta

SEQ ID NO: 257441 - DNA, 13 bp, Artificial Sequence
  Oligonucleotide for detection of SNP TSC0008001
tagttttataagg

SEQ ID NO: 257442 - DNA, 13 bp, Artificial Sequence
  Oligonucleotide for detection of SNP TSC0008001
ccttataaaacta

SEQ ID NO: 257443 - DNA, 13 bp, Artificial Sequence
  Oligonucleotide for detection of SNP TSC0062649
tttaaaaagtatg

SEQ ID NO: 257444 - DNA, 13 bp, Artificial Sequence
  Oligonucleotide for detection of SNP TSC0062649
catactttttaaa

SEQ ID NO: 257445 - DNA, 13 bp, Artificial Sequence
  Oligonucleotide for detection of SNP TSC0062649
tttaaagagtatg

SEQ ID NO: 257446 - DNA, 13 bp, Artificial Sequence
  Oligonucleotide for detection of SNP TSC0062649
catactctttaaa

SEQ ID NO: 257447 - DNA, 13 bp, Artificial Sequence
  Oligonucleotide for detection of SNP TSC0062650
aaagtatttttty

SEQ ID NO: 257448 - DNA, 13 bp, Artificial Sequence
  Oligonucleotide for detection of SNP TSC0062650
raaaaaatacttt

SEQ ID NO: 257449 - DNA, 13 bp, Artificial Sequence
  Oligonucleotide for detection of SNP TSC0062650
gaaaaattgtttt

SEQ ID NO: 257450 - DNA, 13 bp, Artificial Sequence
  Oligonucleotide for detection of SNP TSC0062650
aaaacaatttttc

SEQ ID NO: 257451 - DNA, 13 bp, Artificial Sequence
  Oligonucleotide for detection of SNP TSC0062650
gaaaaaatgtttt

SEQ ID NO: 257452 - DNA, 13 bp, Artificial Sequence
  Oligonucleotide for detection of SNP TSC0062650
aaaacattttttc

SEQ ID NO: 257453 - DNA, 13 bp, Artificial Sequence
  Oligonucleotide for detection of SNP TSC0062651
ttttgggaaagtg

SEQ ID NO: 257454 - DNA, 13 bp, Artificial Sequence
  Oligonucleotide for detection of SNP TSC0062651
cactttcccaaaa

SEQ ID NO: 257455 - DNA, 13 bp, Artificial Sequence
  Oligonucleotide for detection of SNP TSC0062651
ttttggaaaagtg

SEQ ID NO: 257456 - DNA, 13 bp, Artificial Sequence
  Oligonucleotide for detection of SNP TSC0062651
cacttttccaaaa

SEQ ID NO: 257457 - DNA, 13 bp, Artificial Sequence
  Oligonucleotide for detection of SNP TSC0062652
attgtgtttaaga

SEQ ID NO: 257458 - DNA, 13 bp, Artificial Sequence
  Oligonucleotide for detection of SNP TSC0062652
tcttaaacacaat

SEQ ID NO: 257459 - DNA, 13 bp, Artificial Sequence
  Oligonucleotide for detection of SNP TSC0062652
attgtggttaaga

SEQ ID NO: 257460 - DNA, 13 bp, Artificial Sequence
  Oligonucleotide for detection of SNP TSC0062652
tcttaaccacaat

SEQ ID NO: 257461 - DNA, 13 bp, Artificial Sequence
  Oligonucleotide for detection of SNP TSC0062652
ttttggatatagt

SEQ ID NO: 257462 - DNA, 13 bp, Artificial Sequence
  Oligonucleotide for detection of SNP TSC0062652
actatatccaaaa

SEQ ID NO: 257463 - DNA, 13 bp, Artificial Sequence
  Oligonucleotide for detection of SNP TSC0062652
ttttggttatagt

SEQ ID NO: 257464 - DNA, 13 bp, Artificial Sequence
  Oligonucleotide for detection of SNP TSC0062652
actataaccaaaa

SEQ ID NO: 257465 - DNA, 13 bp, Artificial Sequence
  Oligonucleotide for detection of SNP TSC0006522
ggaggtatgtggt

SEQ ID NO: 257466 - DNA, 13 bp, Artificial Sequence
  Oligonucleotide for detection of SNP TSC0006522
accacatacctcc

SEQ ID NO: 257467 - DNA, 13 bp, Artificial Sequence
  Oligonucleotide for detection of SNP TSC0006522
ggaggtttgtggt

SEQ ID NO: 257468 - DNA, 13 bp, Artificial Sequence
  Oligonucleotide for detection of SNP TSC0006522
accacaaacctcc

SEQ ID NO: 257469 - DNA, 13 bp, Artificial Sequence
  Oligonucleotide for detection of SNP TSC0006522
attatatatttty

SEQ ID NO: 257470 - DNA, 13 bp, Artificial Sequence
  Oligonucleotide for detection of SNP TSC0006522
raaaatatataat

SEQ ID NO: 257471 - DNA, 13 bp, Artificial Sequence
  Oligonucleotide for detection of SNP TSC0006523
aatggtaggggag

SEQ ID NO: 257472 - DNA, 13 bp, Artificial Sequence
  Oligonucleotide for detection of SNP TSC0006523
ctcccctaccatt

SEQ ID NO: 257473 - DNA, 13 bp, Artificial Sequence
  Oligonucleotide for detection of SNP TSC0006523
aatggtgggggag

SEQ ID NO: 257474 - DNA, 13 bp, Artificial Sequence
  Oligonucleotide for detection of SNP TSC0006523
ctcccccaccatt

SEQ ID NO: 257475 - DNA, 13 bp, Artificial Sequence
  Oligonucleotide for detection of SNP TSC0008067
ggagaagaattta

SEQ ID NO: 257476 - DNA, 13 bp, Artificial Sequence
  Oligonucleotide for detection of SNP TSC0008067
taaattcttctcc

SEQ ID NO: 257477 - DNA, 13 bp, Artificial Sequence
  Oligonucleotide for detection of SNP TSC0008067
ggagaaaaattta

SEQ ID NO: 257478 - DNA, 13 bp, Artificial Sequence
  Oligonucleotide for detection of SNP TSC0008067
taaatttttctcc

SEQ ID NO: 257479 - DNA, 13 bp, Artificial Sequence
  Oligonucleotide for detection of SNP TSC0004840
gatttaaaggaga

SEQ ID NO: 257480 - DNA, 13 bp, Artificial Sequence
  Oligonucleotide for detection of SNP TSC0004840
tctcctttaaatc

SEQ ID NO: 257481 - DNA, 13 bp, Artificial Sequence
  Oligonucleotide for detection of SNP TSC0004840
gatttataggaga

SEQ ID NO: 257482 - DNA, 13 bp, Artificial Sequence
  Oligonucleotide for detection of SNP TSC0004840
tctcctataaatc

SEQ ID NO: 257483 - DNA, 13 bp, Artificial Sequence
  Oligonucleotide for detection of SNP TSC0062656
ggagaatgattag

SEQ ID NO: 257484 - DNA, 13 bp, Artificial Sequence
  Oligonucleotide for detection of SNP TSC0062656
ctaatcattctcc

SEQ ID NO: 257485 - DNA, 13 bp, Artificial Sequence
  Oligonucleotide for detection of SNP TSC0062656
ggagaacgattag

SEQ ID NO: 257486 - DNA, 13 bp, Artificial Sequence
  Oligonucleotide for detection of SNP TSC0062656
ctaatcgttctcc

SEQ ID NO: 257487 - DNA, 13 bp, Artificial Sequence
  Oligonucleotide for detection of SNP TSC0010406
atttttgttaaay

SEQ ID NO: 257488 - DNA, 13 bp, Artificial Sequence
  Oligonucleotide for detection of SNP TSC0010406
rtttaacaaaaat

SEQ ID NO: 257489 - DNA, 13 bp, Artificial Sequence
  Oligonucleotide for detection of SNP TSC0010406
atttttattaaay

SEQ ID NO: 257490 - DNA, 13 bp, Artificial Sequence
  Oligonucleotide for detection of SNP TSC0010406
rtttaataaaaat

SEQ ID NO: 257491 - DNA, 13 bp, Artificial Sequence
  Oligonucleotide for detection of SNP TSC0006048
aggtttagaattt

SEQ ID NO: 257492 - DNA, 13 bp, Artificial Sequence
  Oligonucleotide for detection of SNP TSC0006048
aaattctaaacct

SEQ ID NO: 257493 - DNA, 13 bp, Artificial Sequence
  Oligonucleotide for detection of SNP TSC0006048
aggtttggaattt

SEQ ID NO: 257494 - DNA, 13 bp, Artificial Sequence
  Oligonucleotide for detection of SNP TSC0006048
aaattccaaacct

SEQ ID NO: 257495 - DNA, 13 bp, Artificial Sequence
  Oligonucleotide for detection of SNP TSC0062658
ttttatagaggtt

SEQ ID NO: 257496 - DNA, 13 bp, Artificial Sequence
  Oligonucleotide for detection of SNP TSC0062658
aacctctataaaa

SEQ ID NO: 257497 - DNA, 13 bp, Artificial Sequence
  Oligonucleotide for detection of SNP TSC0062658
ttttatggaggtt

SEQ ID NO: 257498 - DNA, 13 bp, Artificial Sequence
  Oligonucleotide for detection of SNP TSC0062658
aacctccataaaa

SEQ ID NO: 257499 - DNA, 13 bp, Artificial Sequence
  Oligonucleotide for detection of SNP TSC0062658
ttttacggaggtt

SEQ ID NO: 257500 - DNA, 13 bp, Artificial Sequence
  Oligonucleotide for detection of SNP TSC0062658
aacctccgtaaaa

SEQ ID NO: 257501 - DNA, 13 bp, Artificial Sequence
  Oligonucleotide for detection of SNP TSC0062658
aatttttgtgaga

SEQ ID NO: 257502 - DNA, 13 bp, Artificial Sequence
  Oligonucleotide for detection of SNP TSC0062658
tctcacaaaaatt

SEQ ID NO: 257503 - DNA, 13 bp, Artificial Sequence
  Oligonucleotide for detection of SNP TSC0062658
aattttcgtgaga

SEQ ID NO: 257504 - DNA, 13 bp, Artificial Sequence
  Oligonucleotide for detection of SNP TSC0062658
tctcacgaaaatt

SEQ ID NO: 257505 - DNA, 13 bp, Artificial Sequence
  Oligonucleotide for detection of SNP TSC0005086
ggaatttaatata

SEQ ID NO: 257506 - DNA, 13 bp, Artificial Sequence
  Oligonucleotide for detection of SNP TSC0005086
tatattaaattcc

SEQ ID NO: 257507 - DNA, 13 bp, Artificial Sequence
  Oligonucleotide for detection of SNP TSC0005086
ggaattgaatata

SEQ ID NO: 257508 - DNA, 13 bp, Artificial Sequence
  Oligonucleotide for detection of SNP TSC0005086
tatattcaattcc

SEQ ID NO: 257509 - DNA, 13 bp, Artificial Sequence
  Oligonucleotide for detection of SNP TSC0005086
tatgttgagttty

SEQ ID NO: 257510 - DNA, 13 bp, Artificial Sequence
  Oligonucleotide for detection of SNP TSC0005086
raaactcaacata

SEQ ID NO: 257511 - DNA, 13 bp, Artificial Sequence
  Oligonucleotide for detection of SNP TSC0005086
tatgtttagttty

SEQ ID NO: 257512 - DNA, 13 bp, Artificial Sequence
  Oligonucleotide for detection of SNP TSC0005086
raaactaaacata

SEQ ID NO: 257513 - DNA, 13 bp, Artificial Sequence
  Oligonucleotide for detection of SNP TSC0062661
gaatgggaagaaa

SEQ ID NO: 257514 - DNA, 13 bp, Artificial Sequence
  Oligonucleotide for detection of SNP TSC0062661
tttcttcccattc

SEQ ID NO: 257515 - DNA, 13 bp, Artificial Sequence
  Oligonucleotide for detection of SNP TSC0062661
gaatggaaagaaa

SEQ ID NO: 257516 - DNA, 13 bp, Artificial Sequence
  Oligonucleotide for detection of SNP TSC0062661
tttctttccattc

SEQ ID NO: 257517 - DNA, 13 bp, Artificial Sequence
  Oligonucleotide for detection of SNP TSC0005571
tattagaattata

SEQ ID NO: 257518 - DNA, 13 bp, Artificial Sequence
  Oligonucleotide for detection of SNP TSC0005571
tataattctaata

SEQ ID NO: 257519 - DNA, 13 bp, Artificial Sequence
  Oligonucleotide for detection of SNP TSC0005571
tattaggattata

SEQ ID NO: 257520 - DNA, 13 bp, Artificial Sequence
  Oligonucleotide for detection of SNP TSC0005571
tataatcctaata

SEQ ID NO: 257521 - DNA, 13 bp, Artificial Sequence
  Oligonucleotide for detection of SNP TSC0062663
tatttatgaattg

SEQ ID NO: 257522 - DNA, 13 bp, Artificial Sequence
  Oligonucleotide for detection of SNP TSC0062663
caattcataaata

SEQ ID NO: 257523 - DNA, 13 bp, Artificial Sequence
  Oligonucleotide for detection of SNP TSC0062663
tatttacgaattg

SEQ ID NO: 257524 - DNA, 13 bp, Artificial Sequence
  Oligonucleotide for detection of SNP TSC0062663
caattcgtaaata

SEQ ID NO: 257525 - DNA, 13 bp, Artificial Sequence
  Oligonucleotide for detection of SNP TSC0062663
taatttgtgaatg

SEQ ID NO: 257526 - DNA, 13 bp, Artificial Sequence
  Oligonucleotide for detection of SNP TSC0062663
cattcacaaatta

SEQ ID NO: 257527 - DNA, 13 bp, Artificial Sequence
  Oligonucleotide for detection of SNP TSC0062663
taatttatgaatg

SEQ ID NO: 257528 - DNA, 13 bp, Artificial Sequence
  Oligonucleotide for detection of SNP TSC0062663
cattcataaatta

SEQ ID NO: 257529 - DNA, 13 bp, Artificial Sequence
  Oligonucleotide for detection of SNP TSC0062663
taattcgtgaatg

SEQ ID NO: 257530 - DNA, 13 bp, Artificial Sequence
  Oligonucleotide for detection of SNP TSC0062663
cattcacgaatta

SEQ ID NO: 257531 - DNA, 13 bp, Artificial Sequence
  Oligonucleotide for detection of SNP TSC0062664
tttatagtttgaa

SEQ ID NO: 257532 - DNA, 13 bp, Artificial Sequence
  Oligonucleotide for detection of SNP TSC0062664
ttcaaactataaa

SEQ ID NO: 257533 - DNA, 13 bp, Artificial Sequence
  Oligonucleotide for detection of SNP TSC0008957
tatggtgtgatty

SEQ ID NO: 257534 - DNA, 13 bp, Artificial Sequence
  Oligonucleotide for detection of SNP TSC0008957
raatcacaccata

SEQ ID NO: 257535 - DNA, 13 bp, Artificial Sequence
  Oligonucleotide for detection of SNP TSC0008957
tatggtatgatty

SEQ ID NO: 257536 - DNA, 13 bp, Artificial Sequence
  Oligonucleotide for detection of SNP TSC0008957
raatcataccata

SEQ ID NO: 257537 - DNA, 13 bp, Artificial Sequence
  Oligonucleotide for detection of SNP TSC0008957
tacggtgtgatty

SEQ ID NO: 257538 - DNA, 13 bp, Artificial Sequence
  Oligonucleotide for detection of SNP TSC0008957
raatcacaccgta

SEQ ID NO: 257539 - DNA, 13 bp, Artificial Sequence
  Oligonucleotide for detection of SNP TSC0008957
tacggtatgatty

SEQ ID NO: 257540 - DNA, 13 bp, Artificial Sequence
  Oligonucleotide for detection of SNP TSC0008957
raatcataccgta

SEQ ID NO: 257541 - DNA, 13 bp, Artificial Sequence
  Oligonucleotide for detection of SNP TSC0062665
aattattaattta

SEQ ID NO: 257542 - DNA, 13 bp, Artificial Sequence
  Oligonucleotide for detection of SNP TSC0062665
taaattaataatt

SEQ ID NO: 257543 - DNA, 13 bp, Artificial Sequence
  Oligonucleotide for detection of SNP TSC0062665
aattatgaattta

SEQ ID NO: 257544 - DNA, 13 bp, Artificial Sequence
  Oligonucleotide for detection of SNP TSC0062665
taaattcataatt

SEQ ID NO: 257545 - DNA, 13 bp, Artificial Sequence
  Oligonucleotide for detection of SNP TSC0062666
gtaaatatgttty

SEQ ID NO: 257546 - DNA, 13 bp, Artificial Sequence
  Oligonucleotide for detection of SNP TSC0062666
raaacatatttac

SEQ ID NO: 257547 - DNA, 13 bp, Artificial Sequence
  Oligonucleotide for detection of SNP TSC0062666
gtaaatgtgttty

SEQ ID NO: 257548 - DNA, 13 bp, Artificial Sequence
  Oligonucleotide for detection of SNP TSC0062666
raaacacatttac

SEQ ID NO: 257549 - DNA, 13 bp, Artificial Sequence
  Oligonucleotide for detection of SNP TSC0062668
atatatgaatttg

SEQ ID NO: 257550 - DNA, 13 bp, Artificial Sequence
  Oligonucleotide for detection of SNP TSC0062668
caaattcatatat

SEQ ID NO: 257551 - DNA, 13 bp, Artificial Sequence
  Oligonucleotide for detection of SNP TSC0062668
atatataaatttg

SEQ ID NO: 257552 - DNA, 13 bp, Artificial Sequence
  Oligonucleotide for detection of SNP TSC0062668
caaatttatatat

SEQ ID NO: 257553 - DNA, 13 bp, Artificial Sequence
  Oligonucleotide for detection of SNP TSC0062669
tgttgtaaagttt

SEQ ID NO: 257554 - DNA, 13 bp, Artificial Sequence
  Oligonucleotide for detection of SNP TSC0062669
aaactttacaaca

SEQ ID NO: 257555 - DNA, 13 bp, Artificial Sequence
  Oligonucleotide for detection of SNP TSC0062669
tgttgttaagttt

SEQ ID NO: 257556 - DNA, 13 bp, Artificial Sequence
  Oligonucleotide for detection of SNP TSC0062669
aaacttaacaaca

SEQ ID NO: 257557 - DNA, 13 bp, Artificial Sequence
  Oligonucleotide for detection of SNP TSC0062669
tgtcgtaaagttt

SEQ ID NO: 257558 - DNA, 13 bp, Artificial Sequence
  Oligonucleotide for detection of SNP TSC0062669
aaactttacgaca

SEQ ID NO: 257559 - DNA, 13 bp, Artificial Sequence
  Oligonucleotide for detection of SNP TSC0062669
tgtcgttaagttt

SEQ ID NO: 257560 - DNA, 13 bp, Artificial Sequence
  Oligonucleotide for detection of SNP TSC0062669
aaacttaacgaca

SEQ ID NO: 257561 - DNA, 13 bp, Artificial Sequence
  Oligonucleotide for detection of SNP TSC0062669
aggttttgtggta

SEQ ID NO: 257562 - DNA, 13 bp, Artificial Sequence
  Oligonucleotide for detection of SNP TSC0062669
taccacaaaacct

SEQ ID NO: 257563 - DNA, 13 bp, Artificial Sequence
  Oligonucleotide for detection of SNP TSC0062669
aggtttagtggta

SEQ ID NO: 257564 - DNA, 13 bp, Artificial Sequence
  Oligonucleotide for detection of SNP TSC0062669
taccactaaacct

SEQ ID NO: 257565 - DNA, 13 bp, Artificial Sequence
  Oligonucleotide for detection of SNP TSC0062669
aggttttgcggta

SEQ ID NO: 257566 - DNA, 13 bp, Artificial Sequence
  Oligonucleotide for detection of SNP TSC0062669
taccgcaaaacct

SEQ ID NO: 257567 - DNA, 13 bp, Artificial Sequence
  Oligonucleotide for detection of SNP TSC0062669
aggtttagcggta

SEQ ID NO: 257568 - DNA, 13 bp, Artificial Sequence
  Oligonucleotide for detection of SNP TSC0062669
taccgctaaacct

SEQ ID NO: 257569 - DNA, 13 bp, Artificial Sequence
  Oligonucleotide for detection of SNP TSC0062670
ttattattgtttt

SEQ ID NO: 257570 - DNA, 13 bp, Artificial Sequence
  Oligonucleotide for detection of SNP TSC0062670
aaaacaataataa

SEQ ID NO: 257571 - DNA, 13 bp, Artificial Sequence
  Oligonucleotide for detection of SNP TSC0062670
aaggtattgatag

SEQ ID NO: 257572 - DNA, 13 bp, Artificial Sequence
  Oligonucleotide for detection of SNP TSC0062670
ctatcaatacctt

SEQ ID NO: 257573 - DNA, 13 bp, Artificial Sequence
  Oligonucleotide for detection of SNP TSC0062670
aaggtagtgatag

SEQ ID NO: 257574 - DNA, 13 bp, Artificial Sequence
  Oligonucleotide for detection of SNP TSC0062670
ctatcactacctt

SEQ ID NO: 257575 - DNA, 13 bp, Artificial Sequence
  Oligonucleotide for detection of SNP TSC0062671
tggatttgtttta

SEQ ID NO: 257576 - DNA, 13 bp, Artificial Sequence
  Oligonucleotide for detection of SNP TSC0062671
taaaacaaatcca

SEQ ID NO: 257577 - DNA, 13 bp, Artificial Sequence
  Oligonucleotide for detection of SNP TSC0062671
tggattggtttta

SEQ ID NO: 257578 - DNA, 13 bp, Artificial Sequence
  Oligonucleotide for detection of SNP TSC0062671
taaaaccaatcca

SEQ ID NO: 257579 - DNA, 13 bp, Artificial Sequence
  Oligonucleotide for detection of SNP TSC0062671
cggatttgtttta

SEQ ID NO: 257580 - DNA, 13 bp, Artificial Sequence
  Oligonucleotide for detection of SNP TSC0062671
taaaacaaatccg

SEQ ID NO: 257581 - DNA, 13 bp, Artificial Sequence
  Oligonucleotide for detection of SNP TSC0062671
cggattggtttta

SEQ ID NO: 257582 - DNA, 13 bp, Artificial Sequence
  Oligonucleotide for detection of SNP TSC0062671
taaaaccaatccg

SEQ ID NO: 257583 - DNA, 13 bp, Artificial Sequence
  Oligonucleotide for detection of SNP TSC0062671
taggataaatttg

SEQ ID NO: 257584 - DNA, 13 bp, Artificial Sequence
  Oligonucleotide for detection of SNP TSC0062671
caaatttatccta

SEQ ID NO: 257585 - DNA, 13 bp, Artificial Sequence
  Oligonucleotide for detection of SNP TSC0062671
taggattaatttg

SEQ ID NO: 257586 - DNA, 13 bp, Artificial Sequence
  Oligonucleotide for detection of SNP TSC0062671
caaattaatccta

SEQ ID NO: 257587 - DNA, 13 bp, Artificial Sequence
  Oligonucleotide for detection of SNP TSC0062671
taggataaattcg

SEQ ID NO: 257588 - DNA, 13 bp, Artificial Sequence
  Oligonucleotide for detection of SNP TSC0062671
cgaatttatccta

SEQ ID NO: 257589 - DNA, 13 bp, Artificial Sequence
  Oligonucleotide for detection of SNP TSC0062671
taggattaattcg

SEQ ID NO: 257590 - DNA, 13 bp, Artificial Sequence
  Oligonucleotide for detection of SNP TSC0062671
cgaattaatccta

SEQ ID NO: 257591 - DNA, 13 bp, Artificial Sequence
  Oligonucleotide for detection of SNP TSC0062672
aaatgagtaatgt

SEQ ID NO: 257592 - DNA, 13 bp, Artificial Sequence
  Oligonucleotide for detection of SNP TSC0062672
acattactcattt

SEQ ID NO: 257593 - DNA, 13 bp, Artificial Sequence
  Oligonucleotide for detection of SNP TSC0062672
aaatgaataatgt

SEQ ID NO: 257594 - DNA, 13 bp, Artificial Sequence
  Oligonucleotide for detection of SNP TSC0062672
acattattcattt

SEQ ID NO: 257595 - DNA, 13 bp, Artificial Sequence
  Oligonucleotide for detection of SNP TSC0062673
ttgaaggtttgag

SEQ ID NO: 257596 - DNA, 13 bp, Artificial Sequence
  Oligonucleotide for detection of SNP TSC0062673
ctcaaaccttcaa

SEQ ID NO: 257597 - DNA, 13 bp, Artificial Sequence
  Oligonucleotide for detection of SNP TSC0062673
ttgaagatttgag

SEQ ID NO: 257598 - DNA, 13 bp, Artificial Sequence
  Oligonucleotide for detection of SNP TSC0062673
ctcaaatcttcaa

SEQ ID NO: 257599 - DNA, 13 bp, Artificial Sequence
  Oligonucleotide for detection of SNP TSC0062674
tataaggaagaty

SEQ ID NO: 257600 - DNA, 13 bp, Artificial Sequence
  Oligonucleotide for detection of SNP TSC0062674
ratcttccttata

SEQ ID NO: 257601 - DNA, 13 bp, Artificial Sequence
  Oligonucleotide for detection of SNP TSC0062674
tataagaaagaty

SEQ ID NO: 257602 - DNA, 13 bp, Artificial Sequence
  Oligonucleotide for detection of SNP TSC0062674
ratctttcttata

SEQ ID NO: 257603 - DNA, 13 bp, Artificial Sequence
  Oligonucleotide for detection of SNP TSC0062675
aatttggtaaatg

SEQ ID NO: 257604 - DNA, 13 bp, Artificial Sequence
  Oligonucleotide for detection of SNP TSC0062675
catttaccaaatt

SEQ ID NO: 257605 - DNA, 13 bp, Artificial Sequence
  Oligonucleotide for detection of SNP TSC0062675
aatttgataaatg

SEQ ID NO: 257606 - DNA, 13 bp, Artificial Sequence
  Oligonucleotide for detection of SNP TSC0062675
catttatcaaatt

SEQ ID NO: 257607 - DNA, 13 bp, Artificial Sequence
  Oligonucleotide for detection of SNP TSC0009378
aataggaaagagy

SEQ ID NO: 257608 - DNA, 13 bp, Artificial Sequence
  Oligonucleotide for detection of SNP TSC0009378
rctctttcctatt

SEQ ID NO: 257609 - DNA, 13 bp, Artificial Sequence
  Oligonucleotide for detection of SNP TSC0009378
aatagggaagagy

SEQ ID NO: 257610 - DNA, 13 bp, Artificial Sequence
  Oligonucleotide for detection of SNP TSC0009378
rctcttccctatt

SEQ ID NO: 257611 - DNA, 13 bp, Artificial Sequence
  Oligonucleotide for detection of SNP TSC0009667
attattattagat

SEQ ID NO: 257612 - DNA, 13 bp, Artificial Sequence
  Oligonucleotide for detection of SNP TSC0009667
atctaataataat

SEQ ID NO: 257613 - DNA, 13 bp, Artificial Sequence
  Oligonucleotide for detection of SNP TSC0009667
attattgttagat

SEQ ID NO: 257614 - DNA, 13 bp, Artificial Sequence
  Oligonucleotide for detection of SNP TSC0009667
atctaacaataat

SEQ ID NO: 257615 - DNA, 13 bp, Artificial Sequence
  Oligonucleotide for detection of SNP TSC0062676
ttatggtggtagg

SEQ ID NO: 257616 - DNA, 13 bp, Artificial Sequence
  Oligonucleotide for detection of SNP TSC0062676
cctaccaccataa

SEQ ID NO: 257617 - DNA, 13 bp, Artificial Sequence
  Oligonucleotide for detection of SNP TSC0062676
ttatggcggtagg

SEQ ID NO: 257618 - DNA, 13 bp, Artificial Sequence
  Oligonucleotide for detection of SNP TSC0062676
cctaccgccataa

SEQ ID NO: 257619 - DNA, 13 bp, Artificial Sequence
  Oligonucleotide for detection of SNP TSC0062677
gggtaatgttata

SEQ ID NO: 257620 - DNA, 13 bp, Artificial Sequence
  Oligonucleotide for detection of SNP TSC0062677
tataacattaccc

SEQ ID NO: 257621 - DNA, 13 bp, Artificial Sequence
  Oligonucleotide for detection of SNP TSC0062677
gggtaacgttata

SEQ ID NO: 257622 - DNA, 13 bp, Artificial Sequence
  Oligonucleotide for detection of SNP TSC0062677
tataacgttaccc

SEQ ID NO: 257623 - DNA, 13 bp, Artificial Sequence
  Oligonucleotide for detection of SNP TSC0062677
tataatgttgtty

SEQ ID NO: 257624 - DNA, 13 bp, Artificial Sequence
  Oligonucleotide for detection of SNP TSC0062677
raacaacattata

SEQ ID NO: 257625 - DNA, 13 bp, Artificial Sequence
  Oligonucleotide for detection of SNP TSC0062677
tataatattgtty

SEQ ID NO: 257626 - DNA, 13 bp, Artificial Sequence
  Oligonucleotide for detection of SNP TSC0062677
raacaatattata

SEQ ID NO: 257627 - DNA, 13 bp, Artificial Sequence
  Oligonucleotide for detection of SNP TSC0062677
tataacgttgtty

SEQ ID NO: 257628 - DNA, 13 bp, Artificial Sequence
  Oligonucleotide for detection of SNP TSC0062677
raacaacgttata

SEQ ID NO: 257629 - DNA, 13 bp, Artificial Sequence
  Oligonucleotide for detection of SNP TSC0062678
ttgtaaattagtg

SEQ ID NO: 257630 - DNA, 13 bp, Artificial Sequence
  Oligonucleotide for detection of SNP TSC0062678
cactaatttacaa

SEQ ID NO: 257631 - DNA, 13 bp, Artificial Sequence
  Oligonucleotide for detection of SNP TSC0062678
ttgtaatttagtg

SEQ ID NO: 257632 - DNA, 13 bp, Artificial Sequence
  Oligonucleotide for detection of SNP TSC0062678
cactaaattacaa

SEQ ID NO: 257633 - DNA, 13 bp, Artificial Sequence
  Oligonucleotide for detection of SNP TSC0062678
ttgtaagttagtg

SEQ ID NO: 257634 - DNA, 13 bp, Artificial Sequence
  Oligonucleotide for detection of SNP TSC0062678
cactaacttacaa

SEQ ID NO: 257635 - DNA, 13 bp, Artificial Sequence
  Oligonucleotide for detection of SNP TSC0062678
tattgatttgtag

SEQ ID NO: 257636 - DNA, 13 bp, Artificial Sequence
  Oligonucleotide for detection of SNP TSC0062678
ctacaaatcaata

SEQ ID NO: 257637 - DNA, 13 bp, Artificial Sequence
  Oligonucleotide for detection of SNP TSC0062678
tattgagttgtag

SEQ ID NO: 257638 - DNA, 13 bp, Artificial Sequence
  Oligonucleotide for detection of SNP TSC0062678
ctacaactcaata

SEQ ID NO: 257639 - DNA, 13 bp, Artificial Sequence
  Oligonucleotide for detection of SNP TSC0001221
aattgggtatggy

SEQ ID NO: 257640 - DNA, 13 bp, Artificial Sequence
  Oligonucleotide for detection of SNP TSC0001221
rccatacccaatt

SEQ ID NO: 257641 - DNA, 13 bp, Artificial Sequence
  Oligonucleotide for detection of SNP TSC0001221
aattggatatggy

SEQ ID NO: 257642 - DNA, 13 bp, Artificial Sequence
  Oligonucleotide for detection of SNP TSC0001221
rccatatccaatt

SEQ ID NO: 257643 - DNA, 13 bp, Artificial Sequence
  Oligonucleotide for detection of SNP TSC0001221
aatcgggtatggy

SEQ ID NO: 257644 - DNA, 13 bp, Artificial Sequence
  Oligonucleotide for detection of SNP TSC0001221
rccatacccgatt

SEQ ID NO: 257645 - DNA, 13 bp, Artificial Sequence
  Oligonucleotide for detection of SNP TSC0001221
aatcggatatggy

SEQ ID NO: 257646 - DNA, 13 bp, Artificial Sequence
  Oligonucleotide for detection of SNP TSC0001221
rccatatccgatt

SEQ ID NO: 257647 - DNA, 13 bp, Artificial Sequence
  Oligonucleotide for detection of SNP TSC0006350
atatttagttata

SEQ ID NO: 257648 - DNA, 13 bp, Artificial Sequence
  Oligonucleotide for detection of SNP TSC0006350
tataactaaatat

SEQ ID NO: 257649 - DNA, 13 bp, Artificial Sequence
  Oligonucleotide for detection of SNP TSC0006350
atatttggttata

SEQ ID NO: 257650 - DNA, 13 bp, Artificial Sequence
  Oligonucleotide for detection of SNP TSC0006350
tataaccaaatat

SEQ ID NO: 257651 - DNA, 13 bp, Artificial Sequence
  Oligonucleotide for detection of SNP TSC0062680
aaatgatgtttta

SEQ ID NO: 257652 - DNA, 13 bp, Artificial Sequence
  Oligonucleotide for detection of SNP TSC0062680
taaaacatcattt

SEQ ID NO: 257653 - DNA, 13 bp, Artificial Sequence
  Oligonucleotide for detection of SNP TSC0062680
aaatgacgtttta

SEQ ID NO: 257654 - DNA, 13 bp, Artificial Sequence
  Oligonucleotide for detection of SNP TSC0062680
taaaacgtcattt

SEQ ID NO: 257655 - DNA, 13 bp, Artificial Sequence
  Oligonucleotide for detection of SNP TSC0062680
tggaatgttattt

SEQ ID NO: 257656 - DNA, 13 bp, Artificial Sequence
  Oligonucleotide for detection of SNP TSC0062680
aaataacattcca

SEQ ID NO: 257657 - DNA, 13 bp, Artificial Sequence
  Oligonucleotide for detection of SNP TSC0062680
tggaatattattt

SEQ ID NO: 257658 - DNA, 13 bp, Artificial Sequence
  Oligonucleotide for detection of SNP TSC0062680
aaataatattcca

SEQ ID NO: 257659 - DNA, 13 bp, Artificial Sequence
  Oligonucleotide for detection of SNP TSC0062680
tggaacgttattt

SEQ ID NO: 257660 - DNA, 13 bp, Artificial Sequence
  Oligonucleotide for detection of SNP TSC0062680
aaataacgttcca

SEQ ID NO: 257661 - DNA, 13 bp, Artificial Sequence
  Oligonucleotide for detection of SNP TSC0062682
agtaagtggggag

SEQ ID NO: 257662 - DNA, 13 bp, Artificial Sequence
  Oligonucleotide for detection of SNP TSC0062682
ctccccacttact

SEQ ID NO: 257663 - DNA, 13 bp, Artificial Sequence
  Oligonucleotide for detection of SNP TSC0062682
agtaaggggggag

SEQ ID NO: 257664 - DNA, 13 bp, Artificial Sequence
  Oligonucleotide for detection of SNP TSC0062682
ctccccccttact

SEQ ID NO: 257665 - DNA, 13 bp, Artificial Sequence
  Oligonucleotide for detection of SNP TSC0062682
agtaagcggggag

SEQ ID NO: 257666 - DNA, 13 bp, Artificial Sequence
  Oligonucleotide for detection of SNP TSC0062682
ctccccgcttact

SEQ ID NO: 257667 - DNA, 13 bp, Artificial Sequence
  Oligonucleotide for detection of SNP TSC0062683
ttttatttggtag

SEQ ID NO: 257668 - DNA, 13 bp, Artificial Sequence
  Oligonucleotide for detection of SNP TSC0062683
ctaccaaataaaa

SEQ ID NO: 257669 - DNA, 13 bp, Artificial Sequence
  Oligonucleotide for detection of SNP TSC0062683
ttgttatgtgaga

SEQ ID NO: 257670 - DNA, 13 bp, Artificial Sequence
  Oligonucleotide for detection of SNP TSC0062683
tctcacataacaa

SEQ ID NO: 257671 - DNA, 13 bp, Artificial Sequence
  Oligonucleotide for detection of SNP TSC0062683
ttgttaagtgaga

SEQ ID NO: 257672 - DNA, 13 bp, Artificial Sequence
  Oligonucleotide for detection of SNP TSC0062683
tctcacttaacaa

SEQ ID NO: 257673 - DNA, 13 bp, Artificial Sequence
  Oligonucleotide for detection of SNP TSC0062684
taaattgatttat

SEQ ID NO: 257674 - DNA, 13 bp, Artificial Sequence
  Oligonucleotide for detection of SNP TSC0062684
ataaatcaattta

SEQ ID NO: 257675 - DNA, 13 bp, Artificial Sequence
  Oligonucleotide for detection of SNP TSC0062686
tatatagtttatt

SEQ ID NO: 257676 - DNA, 13 bp, Artificial Sequence
  Oligonucleotide for detection of SNP TSC0062686
aataaactatata

SEQ ID NO: 257677 - DNA, 13 bp, Artificial Sequence
  Oligonucleotide for detection of SNP TSC0062686
aatgaggtatatg

SEQ ID NO: 257678 - DNA, 13 bp, Artificial Sequence
  Oligonucleotide for detection of SNP TSC0062686
catatacctcatt

SEQ ID NO: 257679 - DNA, 13 bp, Artificial Sequence
  Oligonucleotide for detection of SNP TSC0062686
aatgagttatatg

SEQ ID NO: 257680 - DNA, 13 bp, Artificial Sequence
  Oligonucleotide for detection of SNP TSC0062686
catataactcatt

SEQ ID NO: 257681 - DNA, 13 bp, Artificial Sequence
  Oligonucleotide for detection of SNP TSC0062687
gttttagttggaa

SEQ ID NO: 257682 - DNA, 13 bp, Artificial Sequence
  Oligonucleotide for detection of SNP TSC0062687
ttccaactaaaac

SEQ ID NO: 257683 - DNA, 13 bp, Artificial Sequence
  Oligonucleotide for detection of SNP TSC0062687
gttttaattggaa

SEQ ID NO: 257684 - DNA, 13 bp, Artificial Sequence
  Oligonucleotide for detection of SNP TSC0062687
ttccaattaaaac

SEQ ID NO: 257685 - DNA, 13 bp, Artificial Sequence
  Oligonucleotide for detection of SNP TSC0062689
gatagtttattgg

SEQ ID NO: 257686 - DNA, 13 bp, Artificial Sequence
  Oligonucleotide for detection of SNP TSC0062689
ccaataaactatc

SEQ ID NO: 257687 - DNA, 13 bp, Artificial Sequence
  Oligonucleotide for detection of SNP TSC0062689
gatagtgtattgg

SEQ ID NO: 257688 - DNA, 13 bp, Artificial Sequence
  Oligonucleotide for detection of SNP TSC0062689
ccaatacactatc

SEQ ID NO: 257689 - DNA, 13 bp, Artificial Sequence
  Oligonucleotide for detection of SNP TSC0062689
gatagcgtattgg

SEQ ID NO: 257690 - DNA, 13 bp, Artificial Sequence
  Oligonucleotide for detection of SNP TSC0062689
ccaatacgctatc

SEQ ID NO: 257691 - DNA, 13 bp, Artificial Sequence
  Oligonucleotide for detection of SNP TSC0062689
ttagtgagttgty

SEQ ID NO: 257692 - DNA, 13 bp, Artificial Sequence
  Oligonucleotide for detection of SNP TSC0062689
racaactcactaa

SEQ ID NO: 257693 - DNA, 13 bp, Artificial Sequence
  Oligonucleotide for detection of SNP TSC0062689
ttagtgtgttgty

SEQ ID NO: 257694 - DNA, 13 bp, Artificial Sequence
  Oligonucleotide for detection of SNP TSC0062689
racaacacactaa

SEQ ID NO: 257695 - DNA, 13 bp, Artificial Sequence
  Oligonucleotide for detection of SNP TSC0062689
ttagtgcgttgty

SEQ ID NO: 257696 - DNA, 13 bp, Artificial Sequence
  Oligonucleotide for detection of SNP TSC0062689
racaacgcactaa

SEQ ID NO: 257697 - DNA, 13 bp, Artificial Sequence
  Oligonucleotide for detection of SNP TSC0062690
aagatatgaaaat

SEQ ID NO: 257698 - DNA, 13 bp, Artificial Sequence
  Oligonucleotide for detection of SNP TSC0062690
attttcatatctt

SEQ ID NO: 257699 - DNA, 13 bp, Artificial Sequence
  Oligonucleotide for detection of SNP TSC0006032
gttttatagatty

SEQ ID NO: 257700 - DNA, 13 bp, Artificial Sequence
  Oligonucleotide for detection of SNP TSC0006032
raatctataaaac

SEQ ID NO: 257701 - DNA, 13 bp, Artificial Sequence
  Oligonucleotide for detection of SNP TSC0006032
gttttagagatty

SEQ ID NO: 257702 - DNA, 13 bp, Artificial Sequence
  Oligonucleotide for detection of SNP TSC0006032
raatctctaaaac

SEQ ID NO: 257703 - DNA, 13 bp, Artificial Sequence
  Oligonucleotide for detection of SNP TSC0006032
gaatttatgggay

SEQ ID NO: 257704 - DNA, 13 bp, Artificial Sequence
  Oligonucleotide for detection of SNP TSC0006032
rtcccataaattc

SEQ ID NO: 257705 - DNA, 13 bp, Artificial Sequence
  Oligonucleotide for detection of SNP TSC0006032
gaatttttgggay

SEQ ID NO: 257706 - DNA, 13 bp, Artificial Sequence
  Oligonucleotide for detection of SNP TSC0006032
rtcccaaaaattc

SEQ ID NO: 257707 - DNA, 13 bp, Artificial Sequence
  Oligonucleotide for detection of SNP TSC0062692
gggtgttgaagty

SEQ ID NO: 257708 - DNA, 13 bp, Artificial Sequence
  Oligonucleotide for detection of SNP TSC0062692
racttcaacaccc

SEQ ID NO: 257709 - DNA, 13 bp, Artificial Sequence
  Oligonucleotide for detection of SNP TSC0062692
gggtgtcgaagty

SEQ ID NO: 257710 - DNA, 13 bp, Artificial Sequence
  Oligonucleotide for detection of SNP TSC0062692
racttcgacaccc

SEQ ID NO: 257711 - DNA, 13 bp, Artificial Sequence
  Oligonucleotide for detection of SNP TSC0062692
gattttgatatty

SEQ ID NO: 257712 - DNA, 13 bp, Artificial Sequence
  Oligonucleotide for detection of SNP TSC0062692
raatatcaaaatc

SEQ ID NO: 257713 - DNA, 13 bp, Artificial Sequence
  Oligonucleotide for detection of SNP TSC0062692
gattttaatatty

SEQ ID NO: 257714 - DNA, 13 bp, Artificial Sequence
  Oligonucleotide for detection of SNP TSC0062692
raatattaaaatc

SEQ ID NO: 257715 - DNA, 13 bp, Artificial Sequence
  Oligonucleotide for detection of SNP TSC0062692
gatttcgatatty

SEQ ID NO: 257716 - DNA, 13 bp, Artificial Sequence
  Oligonucleotide for detection of SNP TSC0062692
raatatcgaaatc

SEQ ID NO: 257717 - DNA, 13 bp, Artificial Sequence
  Oligonucleotide for detection of SNP TSC0062696
gtttgaaattggt

SEQ ID NO: 257718 - DNA, 13 bp, Artificial Sequence
  Oligonucleotide for detection of SNP TSC0062696
accaatttcaaac

SEQ ID NO: 257719 - DNA, 13 bp, Artificial Sequence
  Oligonucleotide for detection of SNP TSC0062696
gtttgatattggt

SEQ ID NO: 257720 - DNA, 13 bp, Artificial Sequence
  Oligonucleotide for detection of SNP TSC0062696
accaatatcaaac

SEQ ID NO: 257721 - DNA, 13 bp, Artificial Sequence
  Oligonucleotide for detection of SNP TSC0062696
attagttttagay

SEQ ID NO: 257722 - DNA, 13 bp, Artificial Sequence
  Oligonucleotide for detection of SNP TSC0062696
rtctaaaactaat

SEQ ID NO: 257723 - DNA, 13 bp, Artificial Sequence
  Oligonucleotide for detection of SNP TSC0062696
attagtattagay

SEQ ID NO: 257724 - DNA, 13 bp, Artificial Sequence
  Oligonucleotide for detection of SNP TSC0062696
rtctaatactaat

SEQ ID NO: 257725 - DNA, 13 bp, Artificial Sequence
  Oligonucleotide for detection of SNP TSC0062697
aatttgagtagay

SEQ ID NO: 257726 - DNA, 13 bp, Artificial Sequence
  Oligonucleotide for detection of SNP TSC0062697
rtctactcaaatt

SEQ ID NO: 257727 - DNA, 13 bp, Artificial Sequence
  Oligonucleotide for detection of SNP TSC0062697
aatttgggtagay

SEQ ID NO: 257728 - DNA, 13 bp, Artificial Sequence
  Oligonucleotide for detection of SNP TSC0062697
rtctacccaaatt

SEQ ID NO: 257729 - DNA, 13 bp, Artificial Sequence
  Oligonucleotide for detection of SNP TSC0062700
aatataatagttg

SEQ ID NO: 257730 - DNA, 13 bp, Artificial Sequence
  Oligonucleotide for detection of SNP TSC0062700
caactattatatt

SEQ ID NO: 257731 - DNA, 13 bp, Artificial Sequence
  Oligonucleotide for detection of SNP TSC0062700
aatatagtagttg

SEQ ID NO: 257732 - DNA, 13 bp, Artificial Sequence
  Oligonucleotide for detection of SNP TSC0062700
caactactatatt

SEQ ID NO: 257733 - DNA, 13 bp, Artificial Sequence
  Oligonucleotide for detection of SNP TSC0062700
aatataatagtcg

SEQ ID NO: 257734 - DNA, 13 bp, Artificial Sequence
  Oligonucleotide for detection of SNP TSC0062700
cgactattatatt

SEQ ID NO: 257735 - DNA, 13 bp, Artificial Sequence
  Oligonucleotide for detection of SNP TSC0062700
aatatagtagtcg

SEQ ID NO: 257736 - DNA, 13 bp, Artificial Sequence
  Oligonucleotide for detection of SNP TSC0062700
cgactactatatt

SEQ ID NO: 257737 - DNA, 13 bp, Artificial Sequence
  Oligonucleotide for detection of SNP TSC0001032
ttaaatgttagta

SEQ ID NO: 257738 - DNA, 13 bp, Artificial Sequence
  Oligonucleotide for detection of SNP TSC0001032
tactaacatttaa

SEQ ID NO: 257739 - DNA, 13 bp, Artificial Sequence
  Oligonucleotide for detection of SNP TSC0001032
ttaaatattagta

SEQ ID NO: 257740 - DNA, 13 bp, Artificial Sequence
  Oligonucleotide for detection of SNP TSC0001032
tactaatatttaa

SEQ ID NO: 257741 - DNA, 13 bp, Artificial Sequence
  Oligonucleotide for detection of SNP TSC0009732
aatatgttttgty

SEQ ID NO: 257742 - DNA, 13 bp, Artificial Sequence
  Oligonucleotide for detection of SNP TSC0009732
racaaaacatatt

SEQ ID NO: 257743 - DNA, 13 bp, Artificial Sequence
  Oligonucleotide for detection of SNP TSC0009732
aatatggtttgty

SEQ ID NO: 257744 - DNA, 13 bp, Artificial Sequence
  Oligonucleotide for detection of SNP TSC0009732
racaaaccatatt

SEQ ID NO: 257745 - DNA, 13 bp, Artificial Sequence
  Oligonucleotide for detection of SNP TSC0009732
gatagggtatgtt

SEQ ID NO: 257746 - DNA, 13 bp, Artificial Sequence
  Oligonucleotide for detection of SNP TSC0009732
aacataccctatc

SEQ ID NO: 257747 - DNA, 13 bp, Artificial Sequence
  Oligonucleotide for detection of SNP TSC0009732
gataggttatgtt

SEQ ID NO: 257748 - DNA, 13 bp, Artificial Sequence
  Oligonucleotide for detection of SNP TSC0009732
aacataacctatc

SEQ ID NO: 257749 - DNA, 13 bp, Artificial Sequence
  Oligonucleotide for detection of SNP TSC0009871
tattaaggtagaa

SEQ ID NO: 257750 - DNA, 13 bp, Artificial Sequence
  Oligonucleotide for detection of SNP TSC0009871
ttctaccttaata

SEQ ID NO: 257751 - DNA, 13 bp, Artificial Sequence
  Oligonucleotide for detection of SNP TSC0009871
tattaaagtagaa

SEQ ID NO: 257752 - DNA, 13 bp, Artificial Sequence
  Oligonucleotide for detection of SNP TSC0009871
ttctactttaata

SEQ ID NO: 257753 - DNA, 13 bp, Artificial Sequence
  Oligonucleotide for detection of SNP TSC0062701
aaagttaagttty

SEQ ID NO: 257754 - DNA, 13 bp, Artificial Sequence
  Oligonucleotide for detection of SNP TSC0062701
raaacttaacttt

SEQ ID NO: 257755 - DNA, 13 bp, Artificial Sequence
  Oligonucleotide for detection of SNP TSC0062701
aaagttgagttty

SEQ ID NO: 257756 - DNA, 13 bp, Artificial Sequence
  Oligonucleotide for detection of SNP TSC0062701
raaactcaacttt

SEQ ID NO: 257757 - DNA, 13 bp, Artificial Sequence
  Oligonucleotide for detection of SNP TSC0062701
aaagtcgagttty

SEQ ID NO: 257758 - DNA, 13 bp, Artificial Sequence
  Oligonucleotide for detection of SNP TSC0062701
raaactcgacttt

SEQ ID NO: 257759 - DNA, 13 bp, Artificial Sequence
  Oligonucleotide for detection of SNP TSC0062701
gaagtttggtttt

SEQ ID NO: 257760 - DNA, 13 bp, Artificial Sequence
  Oligonucleotide for detection of SNP TSC0062701
aaaaccaaacttc

SEQ ID NO: 257761 - DNA, 13 bp, Artificial Sequence
  Oligonucleotide for detection of SNP TSC0062701
gaagttcggtttt

SEQ ID NO: 257762 - DNA, 13 bp, Artificial Sequence
  Oligonucleotide for detection of SNP TSC0062701
aaaaccgaacttc

SEQ ID NO: 257763 - DNA, 13 bp, Artificial Sequence
  Oligonucleotide for detection of SNP TSC0062702
ttgaaagtgtgay

SEQ ID NO: 257764 - DNA, 13 bp, Artificial Sequence
  Oligonucleotide for detection of SNP TSC0062702
rtcacactttcaa

SEQ ID NO: 257765 - DNA, 13 bp, Artificial Sequence
  Oligonucleotide for detection of SNP TSC0062702
ttgaaaatgtgay

SEQ ID NO: 257766 - DNA, 13 bp, Artificial Sequence
  Oligonucleotide for detection of SNP TSC0062702
rtcacattttcaa

SEQ ID NO: 257767 - DNA, 13 bp, Artificial Sequence
  Oligonucleotide for detection of SNP TSC0062704
ttgggttgaagtg

SEQ ID NO: 257768 - DNA, 13 bp, Artificial Sequence
  Oligonucleotide for detection of SNP TSC0062704
cacttcaacccaa

SEQ ID NO: 257769 - DNA, 13 bp, Artificial Sequence
  Oligonucleotide for detection of SNP TSC0062704
ttgggtcgaagtg

SEQ ID NO: 257770 - DNA, 13 bp, Artificial Sequence
  Oligonucleotide for detection of SNP TSC0062704
cacttcgacccaa

SEQ ID NO: 257771 - DNA, 13 bp, Artificial Sequence
  Oligonucleotide for detection of SNP TSC0062705
aggatttgttttg

SEQ ID NO: 257772 - DNA, 13 bp, Artificial Sequence
  Oligonucleotide for detection of SNP TSC0062705
caaaacaaatcct

SEQ ID NO: 257773 - DNA, 13 bp, Artificial Sequence
  Oligonucleotide for detection of SNP TSC0062705
aggattggttttg

SEQ ID NO: 257774 - DNA, 13 bp, Artificial Sequence
  Oligonucleotide for detection of SNP TSC0062705
caaaaccaatcct

SEQ ID NO: 257775 - DNA, 13 bp, Artificial Sequence
  Oligonucleotide for detection of SNP TSC0062705
taggataagtttt

SEQ ID NO: 257776 - DNA, 13 bp, Artificial Sequence
  Oligonucleotide for detection of SNP TSC0062705
aaaacttatccta

SEQ ID NO: 257777 - DNA, 13 bp, Artificial Sequence
  Oligonucleotide for detection of SNP TSC0062705
taggattagtttt

SEQ ID NO: 257778 - DNA, 13 bp, Artificial Sequence
  Oligonucleotide for detection of SNP TSC0062705
aaaactaatccta

SEQ ID NO: 257779 - DNA, 13 bp, Artificial Sequence
  Oligonucleotide for detection of SNP TSC0062706
aaaaaggataaag

SEQ ID NO: 257780 - DNA, 13 bp, Artificial Sequence
  Oligonucleotide for detection of SNP TSC0062706
ctttatccttttt

SEQ ID NO: 257781 - DNA, 13 bp, Artificial Sequence
  Oligonucleotide for detection of SNP TSC0006698
agatgataagtaa

SEQ ID NO: 257782 - DNA, 13 bp, Artificial Sequence
  Oligonucleotide for detection of SNP TSC0006698
ttacttatcatct

SEQ ID NO: 257783 - DNA, 13 bp, Artificial Sequence
  Oligonucleotide for detection of SNP TSC0006698
agatgagaagtaa

SEQ ID NO: 257784 - DNA, 13 bp, Artificial Sequence
  Oligonucleotide for detection of SNP TSC0006698
ttacttctcatct

SEQ ID NO: 257785 - DNA, 13 bp, Artificial Sequence
  Oligonucleotide for detection of SNP TSC0006699
aatagtaagtttg

SEQ ID NO: 257786 - DNA, 13 bp, Artificial Sequence
  Oligonucleotide for detection of SNP TSC0006699
caaacttactatt

SEQ ID NO: 257787 - DNA, 13 bp, Artificial Sequence
  Oligonucleotide for detection of SNP TSC0006699
aatagtgagtttg

SEQ ID NO: 257788 - DNA, 13 bp, Artificial Sequence
  Oligonucleotide for detection of SNP TSC0006699
caaactcactatt

SEQ ID NO: 257789 - DNA, 13 bp, Artificial Sequence
  Oligonucleotide for detection of SNP TSC0006699
aatagcgagtttg

SEQ ID NO: 257790 - DNA, 13 bp, Artificial Sequence
  Oligonucleotide for detection of SNP TSC0006699
caaactcgctatt

SEQ ID NO: 257791 - DNA, 13 bp, Artificial Sequence
  Oligonucleotide for detection of SNP TSC0006699
taaatttgttgtt

SEQ ID NO: 257792 - DNA, 13 bp, Artificial Sequence
  Oligonucleotide for detection of SNP TSC0006699
aacaacaaattta

SEQ ID NO: 257793 - DNA, 13 bp, Artificial Sequence
  Oligonucleotide for detection of SNP TSC0006699
taaattcgttgtt

SEQ ID NO: 257794 - DNA, 13 bp, Artificial Sequence
  Oligonucleotide for detection of SNP TSC0006699
aacaacgaattta

SEQ ID NO: 257795 - DNA, 13 bp, Artificial Sequence
  Oligonucleotide for detection of SNP TSC0062708
gttttgatgttgy

SEQ ID NO: 257796 - DNA, 13 bp, Artificial Sequence
  Oligonucleotide for detection of SNP TSC0062708
rcaacatcaaaac

SEQ ID NO: 257797 - DNA, 13 bp, Artificial Sequence
  Oligonucleotide for detection of SNP TSC0062708
gttttgttgttgy

SEQ ID NO: 257798 - DNA, 13 bp, Artificial Sequence
  Oligonucleotide for detection of SNP TSC0062708
rcaacaacaaaac

SEQ ID NO: 257799 - DNA, 13 bp, Artificial Sequence
  Oligonucleotide for detection of SNP TSC0062708
gtagtattaaaay

SEQ ID NO: 257800 - DNA, 13 bp, Artificial Sequence
  Oligonucleotide for detection of SNP TSC0062708
rttttaatactac

SEQ ID NO: 257801 - DNA, 13 bp, Artificial Sequence
  Oligonucleotide for detection of SNP TSC0062708
gtagtaataaaay

SEQ ID NO: 257802 - DNA, 13 bp, Artificial Sequence
  Oligonucleotide for detection of SNP TSC0062708
rttttattactac

SEQ ID NO: 257803 - DNA, 13 bp, Artificial Sequence
  Oligonucleotide for detection of SNP TSC0062709
gggttggagattt

SEQ ID NO: 257804 - DNA, 13 bp, Artificial Sequence
  Oligonucleotide for detection of SNP TSC0062709
aaatctccaaccc

SEQ ID NO: 257805 - DNA, 13 bp, Artificial Sequence
  Oligonucleotide for detection of SNP TSC0062709
gggttgaagattt

SEQ ID NO: 257806 - DNA, 13 bp, Artificial Sequence
  Oligonucleotide for detection of SNP TSC0062709
aaatcttcaaccc

SEQ ID NO: 257807 - DNA, 13 bp, Artificial Sequence
  Oligonucleotide for detection of SNP TSC0062710
gtggatattttty

SEQ ID NO: 257808 - DNA, 13 bp, Artificial Sequence
  Oligonucleotide for detection of SNP TSC0062710
raaaaatatccac

SEQ ID NO: 257809 - DNA, 13 bp, Artificial Sequence
  Oligonucleotide for detection of SNP TSC0062710
gtggatgttttty

SEQ ID NO: 257810 - DNA, 13 bp, Artificial Sequence
  Oligonucleotide for detection of SNP TSC0062710
raaaaacatccac

SEQ ID NO: 257811 - DNA, 13 bp, Artificial Sequence
  Oligonucleotide for detection of SNP TSC0062710
gcggatattttty

SEQ ID NO: 257812 - DNA, 13 bp, Artificial Sequence
  Oligonucleotide for detection of SNP TSC0062710
raaaaatatccgc

SEQ ID NO: 257813 - DNA, 13 bp, Artificial Sequence
  Oligonucleotide for detection of SNP TSC0062710
gcggatgttttty

SEQ ID NO: 257814 - DNA, 13 bp, Artificial Sequence
  Oligonucleotide for detection of SNP TSC0062710
raaaaacatccgc

SEQ ID NO: 257815 - DNA, 13 bp, Artificial Sequence
  Oligonucleotide for detection of SNP TSC0062710
gtggacgttttty

SEQ ID NO: 257816 - DNA, 13 bp, Artificial Sequence
  Oligonucleotide for detection of SNP TSC0062710
raaaaacgtccac

SEQ ID NO: 257817 - DNA, 13 bp, Artificial Sequence
  Oligonucleotide for detection of SNP TSC0062710
gcggacgttttty

SEQ ID NO: 257818 - DNA, 13 bp, Artificial Sequence
  Oligonucleotide for detection of SNP TSC0062710
raaaaacgtccgc

SEQ ID NO: 257819 - DNA, 13 bp, Artificial Sequence
  Oligonucleotide for detection of SNP TSC0062710
ggggagtgtttgy

SEQ ID NO: 257820 - DNA, 13 bp, Artificial Sequence
  Oligonucleotide for detection of SNP TSC0062710
rcaaacactcccc

SEQ ID NO: 257821 - DNA, 13 bp, Artificial Sequence
  Oligonucleotide for detection of SNP TSC0062710
ggggagtgttcgy

SEQ ID NO: 257822 - DNA, 13 bp, Artificial Sequence
  Oligonucleotide for detection of SNP TSC0062710
rcgaacactcccc

SEQ ID NO: 257823 - DNA, 13 bp, Artificial Sequence
  Oligonucleotide for detection of SNP TSC0062710
ggggagcgtttgy

SEQ ID NO: 257824 - DNA, 13 bp, Artificial Sequence
  Oligonucleotide for detection of SNP TSC0062710
rcaaacgctcccc

SEQ ID NO: 257825 - DNA, 13 bp, Artificial Sequence
  Oligonucleotide for detection of SNP TSC0062710
ggggagcgttcgy

SEQ ID NO: 257826 - DNA, 13 bp, Artificial Sequence
  Oligonucleotide for detection of SNP TSC0062710
rcgaacgctcccc

SEQ ID NO: 257827 - DNA, 13 bp, Artificial Sequence
  Oligonucleotide for detection of SNP TSC0007587
tggatgattgttg

SEQ ID NO: 257828 - DNA, 13 bp, Artificial Sequence
  Oligonucleotide for detection of SNP TSC0007587
caacaatcatcca

SEQ ID NO: 257829 - DNA, 13 bp, Artificial Sequence
  Oligonucleotide for detection of SNP TSC0007587
tggatggttgttg

SEQ ID NO: 257830 - DNA, 13 bp, Artificial Sequence
  Oligonucleotide for detection of SNP TSC0007587
caacaaccatcca

SEQ ID NO: 257831 - DNA, 13 bp, Artificial Sequence
  Oligonucleotide for detection of SNP TSC0062714
gtaagtatagaga

SEQ ID NO: 257832 - DNA, 13 bp, Artificial Sequence
  Oligonucleotide for detection of SNP TSC0062714
tctctatacttac

SEQ ID NO: 257833 - DNA, 13 bp, Artificial Sequence
  Oligonucleotide for detection of SNP TSC0062714
gtaagtttagaga

SEQ ID NO: 257834 - DNA, 13 bp, Artificial Sequence
  Oligonucleotide for detection of SNP TSC0062714
tctctaaacttac

SEQ ID NO: 257835 - DNA, 13 bp, Artificial Sequence
  Oligonucleotide for detection of SNP TSC0062716
gtttttatagtta

SEQ ID NO: 257836 - DNA, 13 bp, Artificial Sequence
  Oligonucleotide for detection of SNP TSC0062716
taactataaaaac

SEQ ID NO: 257837 - DNA, 13 bp, Artificial Sequence
  Oligonucleotide for detection of SNP TSC0062716
tggttgtggaagy

SEQ ID NO: 257838 - DNA, 13 bp, Artificial Sequence
  Oligonucleotide for detection of SNP TSC0062716
rcttccacaacca

SEQ ID NO: 257839 - DNA, 13 bp, Artificial Sequence
  Oligonucleotide for detection of SNP TSC0062716
tggttggggaagy

SEQ ID NO: 257840 - DNA, 13 bp, Artificial Sequence
  Oligonucleotide for detection of SNP TSC0062716
rcttccccaacca

SEQ ID NO: 257841 - DNA, 13 bp, Artificial Sequence
  Oligonucleotide for detection of SNP TSC0062717
aatttgtggttga

SEQ ID NO: 257842 - DNA, 13 bp, Artificial Sequence
  Oligonucleotide for detection of SNP TSC0062717
tcaaccacaaatt

SEQ ID NO: 257843 - DNA, 13 bp, Artificial Sequence
  Oligonucleotide for detection of SNP TSC0062717
aatttggggttga

SEQ ID NO: 257844 - DNA, 13 bp, Artificial Sequence
  Oligonucleotide for detection of SNP TSC0062717
tcaaccccaaatt

SEQ ID NO: 257845 - DNA, 13 bp, Artificial Sequence
  Oligonucleotide for detection of SNP TSC0062717
aatttgcggttga

SEQ ID NO: 257846 - DNA, 13 bp, Artificial Sequence
  Oligonucleotide for detection of SNP TSC0062717
tcaaccgcaaatt

SEQ ID NO: 257847 - DNA, 13 bp, Artificial Sequence
  Oligonucleotide for detection of SNP TSC0062717
ttagttgtaagtt

SEQ ID NO: 257848 - DNA, 13 bp, Artificial Sequence
  Oligonucleotide for detection of SNP TSC0062717
aacttacaactaa

SEQ ID NO: 257849 - DNA, 13 bp, Artificial Sequence
  Oligonucleotide for detection of SNP TSC0062717
ttagttttaagtt

SEQ ID NO: 257850 - DNA, 13 bp, Artificial Sequence
  Oligonucleotide for detection of SNP TSC0062717
aacttaaaactaa

SEQ ID NO: 257851 - DNA, 13 bp, Artificial Sequence
  Oligonucleotide for detection of SNP TSC0062717
ttagtcgtaagtt

SEQ ID NO: 257852 - DNA, 13 bp, Artificial Sequence
  Oligonucleotide for detection of SNP TSC0062717
aacttacgactaa

SEQ ID NO: 257853 - DNA, 13 bp, Artificial Sequence
  Oligonucleotide for detection of SNP TSC0062718
ttaagatgatttg

SEQ ID NO: 257854 - DNA, 13 bp, Artificial Sequence
  Oligonucleotide for detection of SNP TSC0062718
caaatcatcttaa

SEQ ID NO: 257855 - DNA, 13 bp, Artificial Sequence
  Oligonucleotide for detection of SNP TSC0062718
ttaagaggatttg

SEQ ID NO: 257856 - DNA, 13 bp, Artificial Sequence
  Oligonucleotide for detection of SNP TSC0062718
caaatcctcttaa

SEQ ID NO: 257857 - DNA, 13 bp, Artificial Sequence
  Oligonucleotide for detection of SNP TSC0062718
taaattattttaa

SEQ ID NO: 257858 - DNA, 13 bp, Artificial Sequence
  Oligonucleotide for detection of SNP TSC0062718
ttaaaataattta

SEQ ID NO: 257859 - DNA, 13 bp, Artificial Sequence
  Oligonucleotide for detection of SNP TSC0062718
taaatttttttaa

SEQ ID NO: 257860 - DNA, 13 bp, Artificial Sequence
  Oligonucleotide for detection of SNP TSC0062718
ttaaaaaaattta

SEQ ID NO: 257861 - DNA, 13 bp, Artificial Sequence
  Oligonucleotide for detection of SNP TSC0062719
tgaattatatatt

SEQ ID NO: 257862 - DNA, 13 bp, Artificial Sequence
  Oligonucleotide for detection of SNP TSC0062719
aatatataattca

SEQ ID NO: 257863 - DNA, 13 bp, Artificial Sequence
  Oligonucleotide for detection of SNP TSC0062719
cgaattatatatt

SEQ ID NO: 257864 - DNA, 13 bp, Artificial Sequence
  Oligonucleotide for detection of SNP TSC0062719
aatatataattcg

SEQ ID NO: 257865 - DNA, 13 bp, Artificial Sequence
  Oligonucleotide for detection of SNP TSC0062719
cgaattgtatatt

SEQ ID NO: 257866 - DNA, 13 bp, Artificial Sequence
  Oligonucleotide for detection of SNP TSC0062719
aatatacaattcg

SEQ ID NO: 257867 - DNA, 13 bp, Artificial Sequence
  Oligonucleotide for detection of SNP TSC0062722
gagttttaagata

SEQ ID NO: 257868 - DNA, 13 bp, Artificial Sequence
  Oligonucleotide for detection of SNP TSC0062722
tatcttaaaactc

SEQ ID NO: 257869 - DNA, 13 bp, Artificial Sequence
  Oligonucleotide for detection of SNP TSC0062722
gagtttgaagata

SEQ ID NO: 257870 - DNA, 13 bp, Artificial Sequence
  Oligonucleotide for detection of SNP TSC0062722
tatcttcaaactc

SEQ ID NO: 257871 - DNA, 13 bp, Artificial Sequence
  Oligonucleotide for detection of SNP TSC0062722
gagttcgaagata

SEQ ID NO: 257872 - DNA, 13 bp, Artificial Sequence
  Oligonucleotide for detection of SNP TSC0062722
tatcttcgaactc

SEQ ID NO: 257873 - DNA, 13 bp, Artificial Sequence
  Oligonucleotide for detection of SNP TSC0062722
tgttttagagtty

SEQ ID NO: 257874 - DNA, 13 bp, Artificial Sequence
  Oligonucleotide for detection of SNP TSC0062722
raactctaaaaca

SEQ ID NO: 257875 - DNA, 13 bp, Artificial Sequence
  Oligonucleotide for detection of SNP TSC0062722
tgtttttgagtty

SEQ ID NO: 257876 - DNA, 13 bp, Artificial Sequence
  Oligonucleotide for detection of SNP TSC0062722
raactcaaaaaca

SEQ ID NO: 257877 - DNA, 13 bp, Artificial Sequence
  Oligonucleotide for detection of SNP TSC0062722
tgttttcgagtty

SEQ ID NO: 257878 - DNA, 13 bp, Artificial Sequence
  Oligonucleotide for detection of SNP TSC0062722
raactcgaaaaca

SEQ ID NO: 257879 - DNA, 13 bp, Artificial Sequence
  Oligonucleotide for detection of SNP TSC0062723
tatttagaatttt

SEQ ID NO: 257880 - DNA, 13 bp, Artificial Sequence
  Oligonucleotide for detection of SNP TSC0062723
aaaattctaaata

SEQ ID NO: 257881 - DNA, 13 bp, Artificial Sequence
  Oligonucleotide for detection of SNP TSC0062724
gtgttatgttgtt

SEQ ID NO: 257882 - DNA, 13 bp, Artificial Sequence
  Oligonucleotide for detection of SNP TSC0062724
aacaacataacac

SEQ ID NO: 257883 - DNA, 13 bp, Artificial Sequence
  Oligonucleotide for detection of SNP TSC0062724
gtgttacgttgtt

SEQ ID NO: 257884 - DNA, 13 bp, Artificial Sequence
  Oligonucleotide for detection of SNP TSC0062724
aacaacgtaacac

SEQ ID NO: 257885 - DNA, 13 bp, Artificial Sequence
  Oligonucleotide for detection of SNP TSC0062724
aatagtgtggtay

SEQ ID NO: 257886 - DNA, 13 bp, Artificial Sequence
  Oligonucleotide for detection of SNP TSC0062724
rtaccacactatt

SEQ ID NO: 257887 - DNA, 13 bp, Artificial Sequence
  Oligonucleotide for detection of SNP TSC0062724
aatagtatggtay

SEQ ID NO: 257888 - DNA, 13 bp, Artificial Sequence
  Oligonucleotide for detection of SNP TSC0062724
rtaccatactatt

SEQ ID NO: 257889 - DNA, 13 bp, Artificial Sequence
  Oligonucleotide for detection of SNP TSC0062724
aatagcgtggtay

SEQ ID NO: 257890 - DNA, 13 bp, Artificial Sequence
  Oligonucleotide for detection of SNP TSC0062724
rtaccacgctatt

SEQ ID NO: 257891 - DNA, 13 bp, Artificial Sequence
  Oligonucleotide for detection of SNP TSC0007418
atgtttagtttaa

SEQ ID NO: 257892 - DNA, 13 bp, Artificial Sequence
  Oligonucleotide for detection of SNP TSC0007418
ttaaactaaacat

SEQ ID NO: 257893 - DNA, 13 bp, Artificial Sequence
  Oligonucleotide for detection of SNP TSC0007418
atgtttggtttaa

SEQ ID NO: 257894 - DNA, 13 bp, Artificial Sequence
  Oligonucleotide for detection of SNP TSC0007418
ttaaaccaaacat

SEQ ID NO: 257895 - DNA, 13 bp, Artificial Sequence
  Oligonucleotide for detection of SNP TSC0007418
atgttcggtttaa

SEQ ID NO: 257896 - DNA, 13 bp, Artificial Sequence
  Oligonucleotide for detection of SNP TSC0007418
ttaaaccgaacat

SEQ ID NO: 257897 - DNA, 13 bp, Artificial Sequence
  Oligonucleotide for detection of SNP TSC0007418
ttaggttggatat

SEQ ID NO: 257898 - DNA, 13 bp, Artificial Sequence
  Oligonucleotide for detection of SNP TSC0007418
atatccaacctaa

SEQ ID NO: 257899 - DNA, 13 bp, Artificial Sequence
  Oligonucleotide for detection of SNP TSC0007418
ttaggtcggatat

SEQ ID NO: 257900 - DNA, 13 bp, Artificial Sequence
  Oligonucleotide for detection of SNP TSC0007418
atatccgacctaa

SEQ ID NO: 257901 - DNA, 13 bp, Artificial Sequence
  Oligonucleotide for detection of SNP TSC0006299
tttttaggtatag

SEQ ID NO: 257902 - DNA, 13 bp, Artificial Sequence
  Oligonucleotide for detection of SNP TSC0006299
ctatacctaaaaa

SEQ ID NO: 257903 - DNA, 13 bp, Artificial Sequence
  Oligonucleotide for detection of SNP TSC0006299
tttttaagtatag

SEQ ID NO: 257904 - DNA, 13 bp, Artificial Sequence
  Oligonucleotide for detection of SNP TSC0006299
ctatacttaaaaa

SEQ ID NO: 257905 - DNA, 13 bp, Artificial Sequence
  Oligonucleotide for detection of SNP TSC0006300
atagttatatgga

SEQ ID NO: 257906 - DNA, 13 bp, Artificial Sequence
  Oligonucleotide for detection of SNP TSC0006300
tccatataactat

SEQ ID NO: 257907 - DNA, 13 bp, Artificial Sequence
  Oligonucleotide for detection of SNP TSC0006300
atagttgtatgga

SEQ ID NO: 257908 - DNA, 13 bp, Artificial Sequence
  Oligonucleotide for detection of SNP TSC0006300
tccatacaactat

SEQ ID NO: 257909 - DNA, 13 bp, Artificial Sequence
  Oligonucleotide for detection of SNP TSC0006300
atagtcgtatgga

SEQ ID NO: 257910 - DNA, 13 bp, Artificial Sequence
  Oligonucleotide for detection of SNP TSC0006300
tccatacgactat

SEQ ID NO: 257911 - DNA, 13 bp, Artificial Sequence
  Oligonucleotide for detection of SNP TSC0006300
tttatatggttat

SEQ ID NO: 257912 - DNA, 13 bp, Artificial Sequence
  Oligonucleotide for detection of SNP TSC0006300
ataaccatataaa

SEQ ID NO: 257913 - DNA, 13 bp, Artificial Sequence
  Oligonucleotide for detection of SNP TSC0006300
tttatacggttat

SEQ ID NO: 257914 - DNA, 13 bp, Artificial Sequence
  Oligonucleotide for detection of SNP TSC0006300
ataaccgtataaa

SEQ ID NO: 257915 - DNA, 13 bp, Artificial Sequence
  Oligonucleotide for detection of SNP TSC0008287
aatttattagtay

SEQ ID NO: 257916 - DNA, 13 bp, Artificial Sequence
  Oligonucleotide for detection of SNP TSC0008287
rtactaataaatt

SEQ ID NO: 257917 - DNA, 13 bp, Artificial Sequence
  Oligonucleotide for detection of SNP TSC0008287
aatttagtagtay

SEQ ID NO: 257918 - DNA, 13 bp, Artificial Sequence
  Oligonucleotide for detection of SNP TSC0008287
rtactactaaatt

SEQ ID NO: 257919 - DNA, 13 bp, Artificial Sequence
  Oligonucleotide for detection of SNP TSC0008287
gtgttggtggatt

SEQ ID NO: 257920 - DNA, 13 bp, Artificial Sequence
  Oligonucleotide for detection of SNP TSC0008287
aatccaccaacac

SEQ ID NO: 257921 - DNA, 13 bp, Artificial Sequence
  Oligonucleotide for detection of SNP TSC0008287
gtgttgttggatt

SEQ ID NO: 257922 - DNA, 13 bp, Artificial Sequence
  Oligonucleotide for detection of SNP TSC0008287
aatccaacaacac

SEQ ID NO: 257923 - DNA, 13 bp, Artificial Sequence
  Oligonucleotide for detection of SNP TSC0006794
gttataaatgtty

SEQ ID NO: 257924 - DNA, 13 bp, Artificial Sequence
  Oligonucleotide for detection of SNP TSC0006794
raacatttataac

SEQ ID NO: 257925 - DNA, 13 bp, Artificial Sequence
  Oligonucleotide for detection of SNP TSC0006794
gttatagatgtty

SEQ ID NO: 257926 - DNA, 13 bp, Artificial Sequence
  Oligonucleotide for detection of SNP TSC0006794
raacatctataac

SEQ ID NO: 257927 - DNA, 13 bp, Artificial Sequence
  Oligonucleotide for detection of SNP TSC0062733
tgtttgttttaga

SEQ ID NO: 257928 - DNA, 13 bp, Artificial Sequence
  Oligonucleotide for detection of SNP TSC0062733
tctaaaacaaaca

SEQ ID NO: 257929 - DNA, 13 bp, Artificial Sequence
  Oligonucleotide for detection of SNP TSC0062733
tgtttggtttaga

SEQ ID NO: 257930 - DNA, 13 bp, Artificial Sequence
  Oligonucleotide for detection of SNP TSC0062733
tctaaaccaaaca

SEQ ID NO: 257931 - DNA, 13 bp, Artificial Sequence
  Oligonucleotide for detection of SNP TSC0062733
tttgagataaata

SEQ ID NO: 257932 - DNA, 13 bp, Artificial Sequence
  Oligonucleotide for detection of SNP TSC0062733
tatttatctcaaa

SEQ ID NO: 257933 - DNA, 13 bp, Artificial Sequence
  Oligonucleotide for detection of SNP TSC0062733
tttgagttaaata

SEQ ID NO: 257934 - DNA, 13 bp, Artificial Sequence
  Oligonucleotide for detection of SNP TSC0062733
tatttaactcaaa

SEQ ID NO: 257935 - DNA, 13 bp, Artificial Sequence
  Oligonucleotide for detection of SNP TSC0062737
ggaggttatgtaa

SEQ ID NO: 257936 - DNA, 13 bp, Artificial Sequence
  Oligonucleotide for detection of SNP TSC0062737
ttacataacctcc

SEQ ID NO: 257937 - DNA, 13 bp, Artificial Sequence
  Oligonucleotide for detection of SNP TSC0062737
ggaggtgatgtaa

SEQ ID NO: 257938 - DNA, 13 bp, Artificial Sequence
  Oligonucleotide for detection of SNP TSC0062737
ttacatcacctcc

SEQ ID NO: 257939 - DNA, 13 bp, Artificial Sequence
  Oligonucleotide for detection of SNP TSC0062737
ggaggcgatgtaa

SEQ ID NO: 257940 - DNA, 13 bp, Artificial Sequence
  Oligonucleotide for detection of SNP TSC0062737
ttacatcgcctcc

SEQ ID NO: 257941 - DNA, 13 bp, Artificial Sequence
  Oligonucleotide for detection of SNP TSC0062737
ttgtatggtttty

SEQ ID NO: 257942 - DNA, 13 bp, Artificial Sequence
  Oligonucleotide for detection of SNP TSC0062737
raaaaccatacaa

SEQ ID NO: 257943 - DNA, 13 bp, Artificial Sequence
  Oligonucleotide for detection of SNP TSC0062738
aaaatattttttt

SEQ ID NO: 257944 - DNA, 13 bp, Artificial Sequence
  Oligonucleotide for detection of SNP TSC0062738
aaaaaaatatttt

SEQ ID NO: 257945 - DNA, 13 bp, Artificial Sequence
  Oligonucleotide for detection of SNP TSC0062738
aaaatagtttttt

SEQ ID NO: 257946 - DNA, 13 bp, Artificial Sequence
  Oligonucleotide for detection of SNP TSC0062738
aaaaaactatttt

SEQ ID NO: 257947 - DNA, 13 bp, Artificial Sequence
  Oligonucleotide for detection of SNP TSC0062738
aggagagtatttt

SEQ ID NO: 257948 - DNA, 13 bp, Artificial Sequence
  Oligonucleotide for detection of SNP TSC0062738
aaaatactctcct

SEQ ID NO: 257949 - DNA, 13 bp, Artificial Sequence
  Oligonucleotide for detection of SNP TSC0062738
aggagattatttt

SEQ ID NO: 257950 - DNA, 13 bp, Artificial Sequence
  Oligonucleotide for detection of SNP TSC0062738
aaaataatctcct

SEQ ID NO: 257951 - DNA, 13 bp, Artificial Sequence
  Oligonucleotide for detection of SNP TSC0062739
attgttcgaattt

SEQ ID NO: 257952 - DNA, 13 bp, Artificial Sequence
  Oligonucleotide for detection of SNP TSC0062739
aaattcgaacaat

SEQ ID NO: 257953 - DNA, 13 bp, Artificial Sequence
  Oligonucleotide for detection of SNP TSC0062739
atcgttcgaattt

SEQ ID NO: 257954 - DNA, 13 bp, Artificial Sequence
  Oligonucleotide for detection of SNP TSC0062739
aaattcgaacgat

SEQ ID NO: 257955 - DNA, 13 bp, Artificial Sequence
  Oligonucleotide for detection of SNP TSC0062739
aggtttgagcgat

SEQ ID NO: 257956 - DNA, 13 bp, Artificial Sequence
  Oligonucleotide for detection of SNP TSC0062739
atcgctcaaacct

SEQ ID NO: 257957 - DNA, 13 bp, Artificial Sequence
  Oligonucleotide for detection of SNP TSC0062739
aggttcgagcgat

SEQ ID NO: 257958 - DNA, 13 bp, Artificial Sequence
  Oligonucleotide for detection of SNP TSC0062739
atcgctcgaacct

SEQ ID NO: 257959 - DNA, 13 bp, Artificial Sequence
  Oligonucleotide for detection of SNP TSC0062743
ttttaggttatta

SEQ ID NO: 257960 - DNA, 13 bp, Artificial Sequence
  Oligonucleotide for detection of SNP TSC0062743
taataacctaaaa

SEQ ID NO: 257961 - DNA, 13 bp, Artificial Sequence
  Oligonucleotide for detection of SNP TSC0062743
ttttagattatta

SEQ ID NO: 257962 - DNA, 13 bp, Artificial Sequence
  Oligonucleotide for detection of SNP TSC0062743
taataatctaaaa

SEQ ID NO: 257963 - DNA, 13 bp, Artificial Sequence
  Oligonucleotide for detection of SNP TSC0006891
gtagtgttgaatt

SEQ ID NO: 257964 - DNA, 13 bp, Artificial Sequence
  Oligonucleotide for detection of SNP TSC0006891
aattcaacactac

SEQ ID NO: 257965 - DNA, 13 bp, Artificial Sequence
  Oligonucleotide for detection of SNP TSC0006891
gtagtggtgaatt

SEQ ID NO: 257966 - DNA, 13 bp, Artificial Sequence
  Oligonucleotide for detection of SNP TSC0006891
aattcaccactac

SEQ ID NO: 257967 - DNA, 13 bp, Artificial Sequence
  Oligonucleotide for detection of SNP TSC0006891
agtttagtattay

SEQ ID NO: 257968 - DNA, 13 bp, Artificial Sequence
  Oligonucleotide for detection of SNP TSC0006891
rtaatactaaact

SEQ ID NO: 257969 - DNA, 13 bp, Artificial Sequence
  Oligonucleotide for detection of SNP TSC0006891
agtttattattay

SEQ ID NO: 257970 - DNA, 13 bp, Artificial Sequence
  Oligonucleotide for detection of SNP TSC0006891
rtaataataaact

SEQ ID NO: 257971 - DNA, 13 bp, Artificial Sequence
  Oligonucleotide for detection of SNP TSC0008111
attttttgtgtay

SEQ ID NO: 257972 - DNA, 13 bp, Artificial Sequence
  Oligonucleotide for detection of SNP TSC0008111
rtacacaaaaaat

SEQ ID NO: 257973 - DNA, 13 bp, Artificial Sequence
  Oligonucleotide for detection of SNP TSC0008111
atttttcgtgtay

SEQ ID NO: 257974 - DNA, 13 bp, Artificial Sequence
  Oligonucleotide for detection of SNP TSC0008111
rtacacgaaaaat

SEQ ID NO: 257975 - DNA, 13 bp, Artificial Sequence
  Oligonucleotide for detection of SNP TSC0008111
gtgtatgaagaat

SEQ ID NO: 257976 - DNA, 13 bp, Artificial Sequence
  Oligonucleotide for detection of SNP TSC0008111
attcttcatacac

SEQ ID NO: 257977 - DNA, 13 bp, Artificial Sequence
  Oligonucleotide for detection of SNP TSC0008111
gtgtataaagaat

SEQ ID NO: 257978 - DNA, 13 bp, Artificial Sequence
  Oligonucleotide for detection of SNP TSC0008111
attctttatacac

SEQ ID NO: 257979 - DNA, 13 bp, Artificial Sequence
  Oligonucleotide for detection of SNP TSC0008111
gtgtacgaagaat

SEQ ID NO: 257980 - DNA, 13 bp, Artificial Sequence
  Oligonucleotide for detection of SNP TSC0008111
attcttcgtacac

SEQ ID NO: 257981 - DNA, 13 bp, Artificial Sequence
  Oligonucleotide for detection of SNP TSC0006114
agagaaaagaggg

SEQ ID NO: 257982 - DNA, 13 bp, Artificial Sequence
  Oligonucleotide for detection of SNP TSC0006114
ccctcttttctct

SEQ ID NO: 257983 - DNA, 13 bp, Artificial Sequence
  Oligonucleotide for detection of SNP TSC0006114
agagaagagaggg

SEQ ID NO: 257984 - DNA, 13 bp, Artificial Sequence
  Oligonucleotide for detection of SNP TSC0006114
ccctctcttctct

SEQ ID NO: 257985 - DNA, 13 bp, Artificial Sequence
  Oligonucleotide for detection of SNP TSC0062744
tggttggttttty

SEQ ID NO: 257986 - DNA, 13 bp, Artificial Sequence
  Oligonucleotide for detection of SNP TSC0062744
raaaaaccaacca

SEQ ID NO: 257987 - DNA, 13 bp, Artificial Sequence
  Oligonucleotide for detection of SNP TSC0062744
cggttgattttty

SEQ ID NO: 257988 - DNA, 13 bp, Artificial Sequence
  Oligonucleotide for detection of SNP TSC0062744
raaaaatcaaccg

SEQ ID NO: 257989 - DNA, 13 bp, Artificial Sequence
  Oligonucleotide for detection of SNP TSC0062744
cggttggttttty

SEQ ID NO: 257990 - DNA, 13 bp, Artificial Sequence
  Oligonucleotide for detection of SNP TSC0062744
raaaaaccaaccg

SEQ ID NO: 257991 - DNA, 13 bp, Artificial Sequence
  Oligonucleotide for detection of SNP TSC0062745
agatggatttttg

SEQ ID NO: 257992 - DNA, 13 bp, Artificial Sequence
  Oligonucleotide for detection of SNP TSC0062745
caaaaatccatct

SEQ ID NO: 257993 - DNA, 13 bp, Artificial Sequence
  Oligonucleotide for detection of SNP TSC0062745
agatggttttttg

SEQ ID NO: 257994 - DNA, 13 bp, Artificial Sequence
  Oligonucleotide for detection of SNP TSC0062745
caaaaaaccatct

SEQ ID NO: 257995 - DNA, 13 bp, Artificial Sequence
  Oligonucleotide for detection of SNP TSC0062745
taagaatttattt

SEQ ID NO: 257996 - DNA, 13 bp, Artificial Sequence
  Oligonucleotide for detection of SNP TSC0062745
aaataaattctta

SEQ ID NO: 257997 - DNA, 13 bp, Artificial Sequence
  Oligonucleotide for detection of SNP TSC0062745
taagaagttattt

SEQ ID NO: 257998 - DNA, 13 bp, Artificial Sequence
  Oligonucleotide for detection of SNP TSC0062745
aaataacttctta

SEQ ID NO: 257999 - DNA, 13 bp, Artificial Sequence
  Oligonucleotide for detection of SNP TSC0062746
aatgtggtggtat

SEQ ID NO: 258000 - DNA, 13 bp, Artificial Sequence
  Oligonucleotide for detection of SNP TSC0062746
ataccaccacatt

SEQ ID NO: 258001 - DNA, 13 bp, Artificial Sequence
  Oligonucleotide for detection of SNP TSC0062746
aatgtgttggtat

SEQ ID NO: 258002 - DNA, 13 bp, Artificial Sequence
  Oligonucleotide for detection of SNP TSC0062746
ataccaacacatt

SEQ ID NO: 258003 - DNA, 13 bp, Artificial Sequence
  Oligonucleotide for detection of SNP TSC0007374
gtgtgtattaggy

SEQ ID NO: 258004 - DNA, 13 bp, Artificial Sequence
  Oligonucleotide for detection of SNP TSC0007374
rcctaatacacac

SEQ ID NO: 258005 - DNA, 13 bp, Artificial Sequence
  Oligonucleotide for detection of SNP TSC0007374
gtgtgtgttaggy

SEQ ID NO: 258006 - DNA, 13 bp, Artificial Sequence
  Oligonucleotide for detection of SNP TSC0007374
rcctaacacacac

SEQ ID NO: 258007 - DNA, 13 bp, Artificial Sequence
  Oligonucleotide for detection of SNP TSC0007374
gtgtgcgttaggy

SEQ ID NO: 258008 - DNA, 13 bp, Artificial Sequence
  Oligonucleotide for detection of SNP TSC0007374
rcctaacgcacac

SEQ ID NO: 258009 - DNA, 13 bp, Artificial Sequence
  Oligonucleotide for detection of SNP TSC0007374
gtttgatgtatay

SEQ ID NO: 258010 - DNA, 13 bp, Artificial Sequence
  Oligonucleotide for detection of SNP TSC0007374
rtatacatcaaac

SEQ ID NO: 258011 - DNA, 13 bp, Artificial Sequence
  Oligonucleotide for detection of SNP TSC0007374
gtttgacgtatay

SEQ ID NO: 258012 - DNA, 13 bp, Artificial Sequence
  Oligonucleotide for detection of SNP TSC0007374
rtatacgtcaaac

SEQ ID NO: 258013 - DNA, 13 bp, Artificial Sequence
  Oligonucleotide for detection of SNP TSC0007375
ttagtatgtggta

SEQ ID NO: 258014 - DNA, 13 bp, Artificial Sequence
  Oligonucleotide for detection of SNP TSC0007375
taccacatactaa

SEQ ID NO: 258015 - DNA, 13 bp, Artificial Sequence
  Oligonucleotide for detection of SNP TSC0007375
ttagtacgtggta

SEQ ID NO: 258016 - DNA, 13 bp, Artificial Sequence
  Oligonucleotide for detection of SNP TSC0007375
taccacgtactaa

SEQ ID NO: 258017 - DNA, 13 bp, Artificial Sequence
  Oligonucleotide for detection of SNP TSC0062747
ttttcgatgtggg

SEQ ID NO: 258018 - DNA, 13 bp, Artificial Sequence
  Oligonucleotide for detection of SNP TSC0062747
cccacatcgaaaa

SEQ ID NO: 258019 - DNA, 13 bp, Artificial Sequence
  Oligonucleotide for detection of SNP TSC0062747
ttttcgttgtggg

SEQ ID NO: 258020 - DNA, 13 bp, Artificial Sequence
  Oligonucleotide for detection of SNP TSC0062747
cccacaacgaaaa

SEQ ID NO: 258021 - DNA, 13 bp, Artificial Sequence
  Oligonucleotide for detection of SNP TSC0062747
tttttgacgtggg

SEQ ID NO: 258022 - DNA, 13 bp, Artificial Sequence
  Oligonucleotide for detection of SNP TSC0062747
cccacgtcaaaaa

SEQ ID NO: 258023 - DNA, 13 bp, Artificial Sequence
  Oligonucleotide for detection of SNP TSC0062747
tttttgtcgtggg

SEQ ID NO: 258024 - DNA, 13 bp, Artificial Sequence
  Oligonucleotide for detection of SNP TSC0062747
cccacgacaaaaa

SEQ ID NO: 258025 - DNA, 13 bp, Artificial Sequence
  Oligonucleotide for detection of SNP TSC0062747
ttttcgacgtggg

SEQ ID NO: 258026 - DNA, 13 bp, Artificial Sequence
  Oligonucleotide for detection of SNP TSC0062747
cccacgtcgaaaa

SEQ ID NO: 258027 - DNA, 13 bp, Artificial Sequence
  Oligonucleotide for detection of SNP TSC0062747
ttttcgtcgtggg

SEQ ID NO: 258028 - DNA, 13 bp, Artificial Sequence
  Oligonucleotide for detection of SNP TSC0062747
cccacgacgaaaa

SEQ ID NO: 258029 - DNA, 13 bp, Artificial Sequence
  Oligonucleotide for detection of SNP TSC0062747
tttatgttgaggg

SEQ ID NO: 258030 - DNA, 13 bp, Artificial Sequence
  Oligonucleotide for detection of SNP TSC0062747
ccctcaacataaa

SEQ ID NO: 258031 - DNA, 13 bp, Artificial Sequence
  Oligonucleotide for detection of SNP TSC0062747
tttatgatgaggg

SEQ ID NO: 258032 - DNA, 13 bp, Artificial Sequence
  Oligonucleotide for detection of SNP TSC0062747
ccctcatcataaa

SEQ ID NO: 258033 - DNA, 13 bp, Artificial Sequence
  Oligonucleotide for detection of SNP TSC0062747
tttacgttgaggg

SEQ ID NO: 258034 - DNA, 13 bp, Artificial Sequence
  Oligonucleotide for detection of SNP TSC0062747
ccctcaacgtaaa

SEQ ID NO: 258035 - DNA, 13 bp, Artificial Sequence
  Oligonucleotide for detection of SNP TSC0062747
tttacgatgaggg

SEQ ID NO: 258036 - DNA, 13 bp, Artificial Sequence
  Oligonucleotide for detection of SNP TSC0062747
ccctcatcgtaaa

SEQ ID NO: 258037 - DNA, 13 bp, Artificial Sequence
  Oligonucleotide for detection of SNP TSC0062747
tttatgtcgaggg

SEQ ID NO: 258038 - DNA, 13 bp, Artificial Sequence
  Oligonucleotide for detection of SNP TSC0062747
ccctcgacataaa

SEQ ID NO: 258039 - DNA, 13 bp, Artificial Sequence
  Oligonucleotide for detection of SNP TSC0062747
tttatgacgaggg

SEQ ID NO: 258040 - DNA, 13 bp, Artificial Sequence
  Oligonucleotide for detection of SNP TSC0062747
ccctcgtcataaa

SEQ ID NO: 258041 - DNA, 13 bp, Artificial Sequence
  Oligonucleotide for detection of SNP TSC0062747
tttacgtcgaggg

SEQ ID NO: 258042 - DNA, 13 bp, Artificial Sequence
  Oligonucleotide for detection of SNP TSC0062747
ccctcgacgtaaa

SEQ ID NO: 258043 - DNA, 13 bp, Artificial Sequence
  Oligonucleotide for detection of SNP TSC0062747
tttacgacgaggg

SEQ ID NO: 258044 - DNA, 13 bp, Artificial Sequence
  Oligonucleotide for detection of SNP TSC0062747
ccctcgtcgtaaa

SEQ ID NO: 258045 - DNA, 13 bp, Artificial Sequence
  Oligonucleotide for detection of SNP TSC0008704
gatgaggtttgga

SEQ ID NO: 258046 - DNA, 13 bp, Artificial Sequence
  Oligonucleotide for detection of SNP TSC0008704
tccaaacctcatc

SEQ ID NO: 258047 - DNA, 13 bp, Artificial Sequence
  Oligonucleotide for detection of SNP TSC0008704
gatgagatttgga

SEQ ID NO: 258048 - DNA, 13 bp, Artificial Sequence
  Oligonucleotide for detection of SNP TSC0008704
tccaaatctcatc

SEQ ID NO: 258049 - DNA, 13 bp, Artificial Sequence
  Oligonucleotide for detection of SNP TSC0062749
ataaaaatttgta

SEQ ID NO: 258050 - DNA, 13 bp, Artificial Sequence
  Oligonucleotide for detection of SNP TSC0062749
tacaaatttttat

SEQ ID NO: 258051 - DNA, 13 bp, Artificial Sequence
  Oligonucleotide for detection of SNP TSC0062749
ataaaagtttgta

SEQ ID NO: 258052 - DNA, 13 bp, Artificial Sequence
  Oligonucleotide for detection of SNP TSC0062749
tacaaacttttat

SEQ ID NO: 258053 - DNA, 13 bp, Artificial Sequence
  Oligonucleotide for detection of SNP TSC0062750
tttttgattaatt

SEQ ID NO: 258054 - DNA, 13 bp, Artificial Sequence
  Oligonucleotide for detection of SNP TSC0062750
aattaatcaaaaa

SEQ ID NO: 258055 - DNA, 13 bp, Artificial Sequence
  Oligonucleotide for detection of SNP TSC0062750
tttttgtttaatt

SEQ ID NO: 258056 - DNA, 13 bp, Artificial Sequence
  Oligonucleotide for detection of SNP TSC0062750
aattaaacaaaaa

SEQ ID NO: 258057 - DNA, 13 bp, Artificial Sequence
  Oligonucleotide for detection of SNP TSC0062750
ttttcgattaatt

SEQ ID NO: 258058 - DNA, 13 bp, Artificial Sequence
  Oligonucleotide for detection of SNP TSC0062750
aattaatcgaaaa

SEQ ID NO: 258059 - DNA, 13 bp, Artificial Sequence
  Oligonucleotide for detection of SNP TSC0062750
ttttcgtttaatt

SEQ ID NO: 258060 - DNA, 13 bp, Artificial Sequence
  Oligonucleotide for detection of SNP TSC0062750
aattaaacgaaaa

SEQ ID NO: 258061 - DNA, 13 bp, Artificial Sequence
  Oligonucleotide for detection of SNP TSC0062750
agttagttgaagg

SEQ ID NO: 258062 - DNA, 13 bp, Artificial Sequence
  Oligonucleotide for detection of SNP TSC0062750
ccttcaactaact

SEQ ID NO: 258063 - DNA, 13 bp, Artificial Sequence
  Oligonucleotide for detection of SNP TSC0062750
agttaggtgaagg

SEQ ID NO: 258064 - DNA, 13 bp, Artificial Sequence
  Oligonucleotide for detection of SNP TSC0062750
ccttcacctaact

SEQ ID NO: 258065 - DNA, 13 bp, Artificial Sequence
  Oligonucleotide for detection of SNP TSC0062750
agttagtcgaagg

SEQ ID NO: 258066 - DNA, 13 bp, Artificial Sequence
  Oligonucleotide for detection of SNP TSC0062750
ccttcgactaact

SEQ ID NO: 258067 - DNA, 13 bp, Artificial Sequence
  Oligonucleotide for detection of SNP TSC0062750
agttaggcgaagg

SEQ ID NO: 258068 - DNA, 13 bp, Artificial Sequence
  Oligonucleotide for detection of SNP TSC0062750
ccttcgcctaact

SEQ ID NO: 258069 - DNA, 13 bp, Artificial Sequence
  Oligonucleotide for detection of SNP TSC0005286
aggataaatggga

SEQ ID NO: 258070 - DNA, 13 bp, Artificial Sequence
  Oligonucleotide for detection of SNP TSC0005286
tcccatttatcct

SEQ ID NO: 258071 - DNA, 13 bp, Artificial Sequence
  Oligonucleotide for detection of SNP TSC0005286
aggatatatggga

SEQ ID NO: 258072 - DNA, 13 bp, Artificial Sequence
  Oligonucleotide for detection of SNP TSC0005286
tcccatatatcct

SEQ ID NO: 258073 - DNA, 13 bp, Artificial Sequence
  Oligonucleotide for detection of SNP TSC0062751
taggggatataga

SEQ ID NO: 258074 - DNA, 13 bp, Artificial Sequence
  Oligonucleotide for detection of SNP TSC0062751
tctatatccccta

SEQ ID NO: 258075 - DNA, 13 bp, Artificial Sequence
  Oligonucleotide for detection of SNP TSC0062751
taggggttataga

SEQ ID NO: 258076 - DNA, 13 bp, Artificial Sequence
  Oligonucleotide for detection of SNP TSC0062751
tctataaccccta

SEQ ID NO: 258077 - DNA, 13 bp, Artificial Sequence
  Oligonucleotide for detection of SNP TSC0062752
aagaggtgaataa

SEQ ID NO: 258078 - DNA, 13 bp, Artificial Sequence
  Oligonucleotide for detection of SNP TSC0062752
ttattcacctctt

SEQ ID NO: 258079 - DNA, 13 bp, Artificial Sequence
  Oligonucleotide for detection of SNP TSC0062752
aagaggggaataa

SEQ ID NO: 258080 - DNA, 13 bp, Artificial Sequence
  Oligonucleotide for detection of SNP TSC0062752
ttattcccctctt

SEQ ID NO: 258081 - DNA, 13 bp, Artificial Sequence
  Oligonucleotide for detection of SNP TSC0062753
gtgagattggtaa

SEQ ID NO: 258082 - DNA, 13 bp, Artificial Sequence
  Oligonucleotide for detection of SNP TSC0062753
ttaccaatctcac

SEQ ID NO: 258083 - DNA, 13 bp, Artificial Sequence
  Oligonucleotide for detection of SNP TSC0062753
gtgagagtggtaa

SEQ ID NO: 258084 - DNA, 13 bp, Artificial Sequence
  Oligonucleotide for detection of SNP TSC0062753
ttaccactctcac

SEQ ID NO: 258085 - DNA, 13 bp, Artificial Sequence
  Oligonucleotide for detection of SNP TSC0062753
ttattatttttay

SEQ ID NO: 258086 - DNA, 13 bp, Artificial Sequence
  Oligonucleotide for detection of SNP TSC0062753
rtaaaaataataa

SEQ ID NO: 258087 - DNA, 13 bp, Artificial Sequence
  Oligonucleotide for detection of SNP TSC0062754
gtattaatattaa

SEQ ID NO: 258088 - DNA, 13 bp, Artificial Sequence
  Oligonucleotide for detection of SNP TSC0062754
ttaatattaatac

SEQ ID NO: 258089 - DNA, 13 bp, Artificial Sequence
  Oligonucleotide for detection of SNP TSC0062754
gtattagtattaa

SEQ ID NO: 258090 - DNA, 13 bp, Artificial Sequence
  Oligonucleotide for detection of SNP TSC0062754
ttaatactaatac

SEQ ID NO: 258091 - DNA, 13 bp, Artificial Sequence
  Oligonucleotide for detection of SNP TSC0062758
tatgggtgttaga

SEQ ID NO: 258092 - DNA, 13 bp, Artificial Sequence
  Oligonucleotide for detection of SNP TSC0062758
tctaacacccata

SEQ ID NO: 258093 - DNA, 13 bp, Artificial Sequence
  Oligonucleotide for detection of SNP TSC0062758
tatgggggttaga

SEQ ID NO: 258094 - DNA, 13 bp, Artificial Sequence
  Oligonucleotide for detection of SNP TSC0062758
tctaacccccata

SEQ ID NO: 258095 - DNA, 13 bp, Artificial Sequence
  Oligonucleotide for detection of SNP TSC0062758
tacgggtgttaga

SEQ ID NO: 258096 - DNA, 13 bp, Artificial Sequence
  Oligonucleotide for detection of SNP TSC0062758
tctaacacccgta

SEQ ID NO: 258097 - DNA, 13 bp, Artificial Sequence
  Oligonucleotide for detection of SNP TSC0062758
tacgggggttaga

SEQ ID NO: 258098 - DNA, 13 bp, Artificial Sequence
  Oligonucleotide for detection of SNP TSC0062758
tctaacccccgta

SEQ ID NO: 258099 - DNA, 13 bp, Artificial Sequence
  Oligonucleotide for detection of SNP TSC0062758
tatgggcgttaga

SEQ ID NO: 258100 - DNA, 13 bp, Artificial Sequence
  Oligonucleotide for detection of SNP TSC0062758
tctaacgcccata

SEQ ID NO: 258101 - DNA, 13 bp, Artificial Sequence
  Oligonucleotide for detection of SNP TSC0062758
tacgggcgttaga

SEQ ID NO: 258102 - DNA, 13 bp, Artificial Sequence
  Oligonucleotide for detection of SNP TSC0062758
tctaacgcccgta

SEQ ID NO: 258103 - DNA, 13 bp, Artificial Sequence
  Oligonucleotide for detection of SNP TSC0062758
tttaatttttgtg

SEQ ID NO: 258104 - DNA, 13 bp, Artificial Sequence
  Oligonucleotide for detection of SNP TSC0062758
cacaaaaattaaa

SEQ ID NO: 258105 - DNA, 13 bp, Artificial Sequence
  Oligonucleotide for detection of SNP TSC0062758
tttaacgtttgtg

SEQ ID NO: 258106 - DNA, 13 bp, Artificial Sequence
  Oligonucleotide for detection of SNP TSC0062758
cacaaacgttaaa

SEQ ID NO: 258107 - DNA, 13 bp, Artificial Sequence
  Oligonucleotide for detection of SNP TSC0062758
tttaattttcgtg

SEQ ID NO: 258108 - DNA, 13 bp, Artificial Sequence
  Oligonucleotide for detection of SNP TSC0062758
cacgaaaattaaa

SEQ ID NO: 258109 - DNA, 13 bp, Artificial Sequence
  Oligonucleotide for detection of SNP TSC0062758
tttaatgttcgtg

SEQ ID NO: 258110 - DNA, 13 bp, Artificial Sequence
  Oligonucleotide for detection of SNP TSC0062758
cacgaacattaaa

SEQ ID NO: 258111 - DNA, 13 bp, Artificial Sequence
  Oligonucleotide for detection of SNP TSC0062758
tttaacgttcgtg

SEQ ID NO: 258112 - DNA, 13 bp, Artificial Sequence
  Oligonucleotide for detection of SNP TSC0062758
cacgaacgttaaa

SEQ ID NO: 258113 - DNA, 13 bp, Artificial Sequence
  Oligonucleotide for detection of SNP TSC0062759
tttggatgaatta

SEQ ID NO: 258114 - DNA, 13 bp, Artificial Sequence
  Oligonucleotide for detection of SNP TSC0062759
taattcatccaaa

SEQ ID NO: 258115 - DNA, 13 bp, Artificial Sequence
  Oligonucleotide for detection of SNP TSC0062759
tttggaggaatta

SEQ ID NO: 258116 - DNA, 13 bp, Artificial Sequence
  Oligonucleotide for detection of SNP TSC0062759
taattcctccaaa

SEQ ID NO: 258117 - DNA, 13 bp, Artificial Sequence
  Oligonucleotide for detection of SNP TSC0062759
tggtttatttaaa

SEQ ID NO: 258118 - DNA, 13 bp, Artificial Sequence
  Oligonucleotide for detection of SNP TSC0062759
tttaaataaacca

SEQ ID NO: 258119 - DNA, 13 bp, Artificial Sequence
  Oligonucleotide for detection of SNP TSC0062759
tggtttttttaaa

SEQ ID NO: 258120 - DNA, 13 bp, Artificial Sequence
  Oligonucleotide for detection of SNP TSC0062759
tttaaaaaaacca

SEQ ID NO: 258121 - DNA, 13 bp, Artificial Sequence
  Oligonucleotide for detection of SNP TSC0062761
atattaataattg

SEQ ID NO: 258122 - DNA, 13 bp, Artificial Sequence
  Oligonucleotide for detection of SNP TSC0062761
caattattaatat

SEQ ID NO: 258123 - DNA, 13 bp, Artificial Sequence
  Oligonucleotide for detection of SNP TSC0062761
atattattaattg

SEQ ID NO: 258124 - DNA, 13 bp, Artificial Sequence
  Oligonucleotide for detection of SNP TSC0062761
caattaataatat

SEQ ID NO: 258125 - DNA, 13 bp, Artificial Sequence
  Oligonucleotide for detection of SNP TSC0062761
tagttattaatat

SEQ ID NO: 258126 - DNA, 13 bp, Artificial Sequence
  Oligonucleotide for detection of SNP TSC0062761
atattaataacta

SEQ ID NO: 258127 - DNA, 13 bp, Artificial Sequence
  Oligonucleotide for detection of SNP TSC0062761
tagttagtaatat

SEQ ID NO: 258128 - DNA, 13 bp, Artificial Sequence
  Oligonucleotide for detection of SNP TSC0062761
atattactaacta

SEQ ID NO: 258129 - DNA, 13 bp, Artificial Sequence
  Oligonucleotide for detection of SNP TSC0062762
ggtttagataata

SEQ ID NO: 258130 - DNA, 13 bp, Artificial Sequence
  Oligonucleotide for detection of SNP TSC0062762
tattatctaaacc

SEQ ID NO: 258131 - DNA, 13 bp, Artificial Sequence
  Oligonucleotide for detection of SNP TSC0062762
ggtttaaataata

SEQ ID NO: 258132 - DNA, 13 bp, Artificial Sequence
  Oligonucleotide for detection of SNP TSC0062762
tattatttaaacc

SEQ ID NO: 258133 - DNA, 13 bp, Artificial Sequence
  Oligonucleotide for detection of SNP TSC0062763
gtagtttagggta

SEQ ID NO: 258134 - DNA, 13 bp, Artificial Sequence
  Oligonucleotide for detection of SNP TSC0062763
taccctaaactac

SEQ ID NO: 258135 - DNA, 13 bp, Artificial Sequence
  Oligonucleotide for detection of SNP TSC0062763
gtagttgagggta

SEQ ID NO: 258136 - DNA, 13 bp, Artificial Sequence
  Oligonucleotide for detection of SNP TSC0062763
taccctcaactac

SEQ ID NO: 258137 - DNA, 13 bp, Artificial Sequence
  Oligonucleotide for detection of SNP TSC0062763
tgttttgaattgy

SEQ ID NO: 258138 - DNA, 13 bp, Artificial Sequence
  Oligonucleotide for detection of SNP TSC0062763
rcaattcaaaaca

SEQ ID NO: 258139 - DNA, 13 bp, Artificial Sequence
  Oligonucleotide for detection of SNP TSC0062763
tgtttttaattgy

SEQ ID NO: 258140 - DNA, 13 bp, Artificial Sequence
  Oligonucleotide for detection of SNP TSC0062763
rcaattaaaaaca

SEQ ID NO: 258141 - DNA, 13 bp, Artificial Sequence
  Oligonucleotide for detection of SNP TSC0062764
gatttaaaattat

SEQ ID NO: 258142 - DNA, 13 bp, Artificial Sequence
  Oligonucleotide for detection of SNP TSC0062764
ataattttaaatc

SEQ ID NO: 258143 - DNA, 13 bp, Artificial Sequence
  Oligonucleotide for detection of SNP TSC0062764
gatttataattat

SEQ ID NO: 258144 - DNA, 13 bp, Artificial Sequence
  Oligonucleotide for detection of SNP TSC0062764
ataattataaatc

SEQ ID NO: 258145 - DNA, 13 bp, Artificial Sequence
  Oligonucleotide for detection of SNP TSC0062764
atgattttaagty

SEQ ID NO: 258146 - DNA, 13 bp, Artificial Sequence
  Oligonucleotide for detection of SNP TSC0062764
racttaaaatcat

SEQ ID NO: 258147 - DNA, 13 bp, Artificial Sequence
  Oligonucleotide for detection of SNP TSC0062764
atgattgtaagty

SEQ ID NO: 258148 - DNA, 13 bp, Artificial Sequence
  Oligonucleotide for detection of SNP TSC0062764
racttacaatcat

SEQ ID NO: 258149 - DNA, 13 bp, Artificial Sequence
  Oligonucleotide for detection of SNP TSC0062765
ttgtttatgaata

SEQ ID NO: 258150 - DNA, 13 bp, Artificial Sequence
  Oligonucleotide for detection of SNP TSC0062765
tattcataaacaa

SEQ ID NO: 258151 - DNA, 13 bp, Artificial Sequence
  Oligonucleotide for detection of SNP TSC0062765
tatttataaatag

SEQ ID NO: 258152 - DNA, 13 bp, Artificial Sequence
  Oligonucleotide for detection of SNP TSC0062765
ctatttataaata

SEQ ID NO: 258153 - DNA, 13 bp, Artificial Sequence
  Oligonucleotide for detection of SNP TSC0062765
tatttagaaatag

SEQ ID NO: 258154 - DNA, 13 bp, Artificial Sequence
  Oligonucleotide for detection of SNP TSC0062765
ctatttctaaata

SEQ ID NO: 258155 - DNA, 13 bp, Artificial Sequence
  Oligonucleotide for detection of SNP TSC0062766
ttaaatttattaa

SEQ ID NO: 258156 - DNA, 13 bp, Artificial Sequence
  Oligonucleotide for detection of SNP TSC0062766
ttaataaatttaa

SEQ ID NO: 258157 - DNA, 13 bp, Artificial Sequence
  Oligonucleotide for detection of SNP TSC0062766
ttggtaagtttaa

SEQ ID NO: 258158 - DNA, 13 bp, Artificial Sequence
  Oligonucleotide for detection of SNP TSC0062766
ttaaacttaccaa

SEQ ID NO: 258159 - DNA, 13 bp, Artificial Sequence
  Oligonucleotide for detection of SNP TSC0062766
ttggtatgtttaa

SEQ ID NO: 258160 - DNA, 13 bp, Artificial Sequence
  Oligonucleotide for detection of SNP TSC0062766
ttaaacataccaa

SEQ ID NO: 258161 - DNA, 13 bp, Artificial Sequence
  Oligonucleotide for detection of SNP TSC0062766
ttggtacgtttaa

SEQ ID NO: 258162 - DNA, 13 bp, Artificial Sequence
  Oligonucleotide for detection of SNP TSC0062766
ttaaacgtaccaa

SEQ ID NO: 258163 - DNA, 13 bp, Artificial Sequence
  Oligonucleotide for detection of SNP TSC0062770
taattagtattta

SEQ ID NO: 258164 - DNA, 13 bp, Artificial Sequence
  Oligonucleotide for detection of SNP TSC0062770
taaatactaatta

SEQ ID NO: 258165 - DNA, 13 bp, Artificial Sequence
  Oligonucleotide for detection of SNP TSC0062771
ttatatatatatt

SEQ ID NO: 258166 - DNA, 13 bp, Artificial Sequence
  Oligonucleotide for detection of SNP TSC0062771
aatatatatataa

SEQ ID NO: 258167 - DNA, 13 bp, Artificial Sequence
  Oligonucleotide for detection of SNP TSC0062771
ttatacgtatatt

SEQ ID NO: 258168 - DNA, 13 bp, Artificial Sequence
  Oligonucleotide for detection of SNP TSC0062771
aatatacgtataa

SEQ ID NO: 258169 - DNA, 13 bp, Artificial Sequence
  Oligonucleotide for detection of SNP TSC0062772
tgaaaggatttty

SEQ ID NO: 258170 - DNA, 13 bp, Artificial Sequence
  Oligonucleotide for detection of SNP TSC0062772
raaaatcctttca

SEQ ID NO: 258171 - DNA, 13 bp, Artificial Sequence
  Oligonucleotide for detection of SNP TSC0062772
tgaaagaatttty

SEQ ID NO: 258172 - DNA, 13 bp, Artificial Sequence
  Oligonucleotide for detection of SNP TSC0062772
raaaattctttca

SEQ ID NO: 258173 - DNA, 13 bp, Artificial Sequence
  Oligonucleotide for detection of SNP TSC0062773
tagtatagtttga

SEQ ID NO: 258174 - DNA, 13 bp, Artificial Sequence
  Oligonucleotide for detection of SNP TSC0062773
tcaaactatacta

SEQ ID NO: 258175 - DNA, 13 bp, Artificial Sequence
  Oligonucleotide for detection of SNP TSC0062773
tagtatggtttga

SEQ ID NO: 258176 - DNA, 13 bp, Artificial Sequence
  Oligonucleotide for detection of SNP TSC0062773
tcaaaccatacta

SEQ ID NO: 258177 - DNA, 13 bp, Artificial Sequence
  Oligonucleotide for detection of SNP TSC0062774
tttagtagaagtt

SEQ ID NO: 258178 - DNA, 13 bp, Artificial Sequence
  Oligonucleotide for detection of SNP TSC0062774
aacttctactaaa

SEQ ID NO: 258179 - DNA, 13 bp, Artificial Sequence
  Oligonucleotide for detection of SNP TSC0062774
tttagtggaagtt

SEQ ID NO: 258180 - DNA, 13 bp, Artificial Sequence
  Oligonucleotide for detection of SNP TSC0062774
aacttccactaaa

SEQ ID NO: 258181 - DNA, 13 bp, Artificial Sequence
  Oligonucleotide for detection of SNP TSC0062776
tagggatgtgata

SEQ ID NO: 258182 - DNA, 13 bp, Artificial Sequence
  Oligonucleotide for detection of SNP TSC0062776
tatcacatcccta

SEQ ID NO: 258183 - DNA, 13 bp, Artificial Sequence
  Oligonucleotide for detection of SNP TSC0062776
tagggaggtgata

SEQ ID NO: 258184 - DNA, 13 bp, Artificial Sequence
  Oligonucleotide for detection of SNP TSC0062776
tatcacctcccta

SEQ ID NO: 258185 - DNA, 13 bp, Artificial Sequence
  Oligonucleotide for detection of SNP TSC0006028
tattttgggttgy

SEQ ID NO: 258186 - DNA, 13 bp, Artificial Sequence
  Oligonucleotide for detection of SNP TSC0006028
rcaacccaaaata

SEQ ID NO: 258187 - DNA, 13 bp, Artificial Sequence
  Oligonucleotide for detection of SNP TSC0006028
tattttaggttgy

SEQ ID NO: 258188 - DNA, 13 bp, Artificial Sequence
  Oligonucleotide for detection of SNP TSC0006028
rcaacctaaaata

SEQ ID NO: 258189 - DNA, 13 bp, Artificial Sequence
  Oligonucleotide for detection of SNP TSC0005028
ggtggtatataty

SEQ ID NO: 258190 - DNA, 13 bp, Artificial Sequence
  Oligonucleotide for detection of SNP TSC0005028
ratatataccacc

SEQ ID NO: 258191 - DNA, 13 bp, Artificial Sequence
  Oligonucleotide for detection of SNP TSC0005028
ggtggtgtataty

SEQ ID NO: 258192 - DNA, 13 bp, Artificial Sequence
  Oligonucleotide for detection of SNP TSC0005028
ratatacaccacc

SEQ ID NO: 258193 - DNA, 13 bp, Artificial Sequence
  Oligonucleotide for detection of SNP TSC0005028
ggtggcgtataty

SEQ ID NO: 258194 - DNA, 13 bp, Artificial Sequence
  Oligonucleotide for detection of SNP TSC0005028
ratatacgccacc

SEQ ID NO: 258195 - DNA, 13 bp, Artificial Sequence
  Oligonucleotide for detection of SNP TSC0010518
atatagtgaaggy

SEQ ID NO: 258196 - DNA, 13 bp, Artificial Sequence
  Oligonucleotide for detection of SNP TSC0010518
rccttcactatat

SEQ ID NO: 258197 - DNA, 13 bp, Artificial Sequence
  Oligonucleotide for detection of SNP TSC0010518
atatagagaaggy

SEQ ID NO: 258198 - DNA, 13 bp, Artificial Sequence
  Oligonucleotide for detection of SNP TSC0010518
rccttctctatat

SEQ ID NO: 258199 - DNA, 13 bp, Artificial Sequence
  Oligonucleotide for detection of SNP TSC0062778
gaattaagaagtg

SEQ ID NO: 258200 - DNA, 13 bp, Artificial Sequence
  Oligonucleotide for detection of SNP TSC0062778
cacttcttaattc

SEQ ID NO: 258201 - DNA, 13 bp, Artificial Sequence
  Oligonucleotide for detection of SNP TSC0062778
gaattaggaagtg

SEQ ID NO: 258202 - DNA, 13 bp, Artificial Sequence
  Oligonucleotide for detection of SNP TSC0062778
cacttcctaattc

SEQ ID NO: 258203 - DNA, 13 bp, Artificial Sequence
  Oligonucleotide for detection of SNP TSC0062786
ttttataaagtat

SEQ ID NO: 258204 - DNA, 13 bp, Artificial Sequence
  Oligonucleotide for detection of SNP TSC0062786
atactttataaaa

SEQ ID NO: 258205 - DNA, 13 bp, Artificial Sequence
  Oligonucleotide for detection of SNP TSC0062786
ttttattaagtat

SEQ ID NO: 258206 - DNA, 13 bp, Artificial Sequence
  Oligonucleotide for detection of SNP TSC0062786
atacttaataaaa

SEQ ID NO: 258207 - DNA, 13 bp, Artificial Sequence
  Oligonucleotide for detection of SNP TSC0062786
atattttgtgaga

SEQ ID NO: 258208 - DNA, 13 bp, Artificial Sequence
  Oligonucleotide for detection of SNP TSC0062786
tctcacaaaatat

SEQ ID NO: 258209 - DNA, 13 bp, Artificial Sequence
  Oligonucleotide for detection of SNP TSC0062786
atatttagtgaga

SEQ ID NO: 258210 - DNA, 13 bp, Artificial Sequence
  Oligonucleotide for detection of SNP TSC0062786
tctcactaaatat

SEQ ID NO: 258211 - DNA, 13 bp, Artificial Sequence
  Oligonucleotide for detection of SNP TSC0062788
ttttagaatttaa

SEQ ID NO: 258212 - DNA, 13 bp, Artificial Sequence
  Oligonucleotide for detection of SNP TSC0062788
ttaaattctaaaa

SEQ ID NO: 258213 - DNA, 13 bp, Artificial Sequence
  Oligonucleotide for detection of SNP TSC0062788
ttttaggatttaa

SEQ ID NO: 258214 - DNA, 13 bp, Artificial Sequence
  Oligonucleotide for detection of SNP TSC0062788
ttaaatcctaaaa

SEQ ID NO: 258215 - DNA, 13 bp, Artificial Sequence
  Oligonucleotide for detection of SNP TSC0062790
gagagtattttty

SEQ ID NO: 258216 - DNA, 13 bp, Artificial Sequence
  Oligonucleotide for detection of SNP TSC0062790
raaaaatactctc

SEQ ID NO: 258217 - DNA, 13 bp, Artificial Sequence
  Oligonucleotide for detection of SNP TSC0062790
gagagtgttttty

SEQ ID NO: 258218 - DNA, 13 bp, Artificial Sequence
  Oligonucleotide for detection of SNP TSC0062790
raaaaacactctc

SEQ ID NO: 258219 - DNA, 13 bp, Artificial Sequence
  Oligonucleotide for detection of SNP TSC0062791
tgttttagatatt

SEQ ID NO: 258220 - DNA, 13 bp, Artificial Sequence
  Oligonucleotide for detection of SNP TSC0062791
aatatctaaaaca

SEQ ID NO: 258221 - DNA, 13 bp, Artificial Sequence
  Oligonucleotide for detection of SNP TSC0062791
tgttttggatatt

SEQ ID NO: 258222 - DNA, 13 bp, Artificial Sequence
  Oligonucleotide for detection of SNP TSC0062791
aatatccaaaaca

SEQ ID NO: 258223 - DNA, 13 bp, Artificial Sequence
  Oligonucleotide for detection of SNP TSC0062791
tgtttcggatatt

SEQ ID NO: 258224 - DNA, 13 bp, Artificial Sequence
  Oligonucleotide for detection of SNP TSC0062791
aatatccgaaaca

SEQ ID NO: 258225 - DNA, 13 bp, Artificial Sequence
  Oligonucleotide for detection of SNP TSC0062791
agtgtttggaata

SEQ ID NO: 258226 - DNA, 13 bp, Artificial Sequence
  Oligonucleotide for detection of SNP TSC0062791
tattccaaacact

SEQ ID NO: 258227 - DNA, 13 bp, Artificial Sequence
  Oligonucleotide for detection of SNP TSC0062791
agtgttcggaata

SEQ ID NO: 258228 - DNA, 13 bp, Artificial Sequence
  Oligonucleotide for detection of SNP TSC0062791
tattccgaacact

SEQ ID NO: 258229 - DNA, 13 bp, Artificial Sequence
  Oligonucleotide for detection of SNP TSC0062794
tgttggattataa

SEQ ID NO: 258230 - DNA, 13 bp, Artificial Sequence
  Oligonucleotide for detection of SNP TSC0062794
ttataatccaaca

SEQ ID NO: 258231 - DNA, 13 bp, Artificial Sequence
  Oligonucleotide for detection of SNP TSC0062795
aatattaattaag

SEQ ID NO: 258232 - DNA, 13 bp, Artificial Sequence
  Oligonucleotide for detection of SNP TSC0062795
cttaattaatatt

SEQ ID NO: 258233 - DNA, 13 bp, Artificial Sequence
  Oligonucleotide for detection of SNP TSC0062795
aatatttattaag

SEQ ID NO: 258234 - DNA, 13 bp, Artificial Sequence
  Oligonucleotide for detection of SNP TSC0062795
cttaataaatatt

SEQ ID NO: 258235 - DNA, 13 bp, Artificial Sequence
  Oligonucleotide for detection of SNP TSC0062795
tttagttaatatt

SEQ ID NO: 258236 - DNA, 13 bp, Artificial Sequence
  Oligonucleotide for detection of SNP TSC0062795
aatattaactaaa

SEQ ID NO: 258237 - DNA, 13 bp, Artificial Sequence
  Oligonucleotide for detection of SNP TSC0062795
tttagtaaatatt

SEQ ID NO: 258238 - DNA, 13 bp, Artificial Sequence
  Oligonucleotide for detection of SNP TSC0062795
aatatttactaaa

SEQ ID NO: 258239 - DNA, 13 bp, Artificial Sequence
  Oligonucleotide for detection of SNP TSC0062796
tattaagtagtaa

SEQ ID NO: 258240 - DNA, 13 bp, Artificial Sequence
  Oligonucleotide for detection of SNP TSC0062796
ttactacttaata

SEQ ID NO: 258241 - DNA, 13 bp, Artificial Sequence
  Oligonucleotide for detection of SNP TSC0062796
tattaaatagtaa

SEQ ID NO: 258242 - DNA, 13 bp, Artificial Sequence
  Oligonucleotide for detection of SNP TSC0062796
ttactatttaata

SEQ ID NO: 258243 - DNA, 13 bp, Artificial Sequence
  Oligonucleotide for detection of SNP TSC0000668
aataggtaagaaa

SEQ ID NO: 258244 - DNA, 13 bp, Artificial Sequence
  Oligonucleotide for detection of SNP TSC0000668
tttcttacctatt

SEQ ID NO: 258245 - DNA, 13 bp, Artificial Sequence
  Oligonucleotide for detection of SNP TSC0000668
aatagggaagaaa

SEQ ID NO: 258246 - DNA, 13 bp, Artificial Sequence
  Oligonucleotide for detection of SNP TSC0000668
tttcttccctatt

SEQ ID NO: 258247 - DNA, 13 bp, Artificial Sequence
  Oligonucleotide for detection of SNP TSC0062797
gtttggagtttat

SEQ ID NO: 258248 - DNA, 13 bp, Artificial Sequence
  Oligonucleotide for detection of SNP TSC0062797
ataaactccaaac

SEQ ID NO: 258249 - DNA, 13 bp, Artificial Sequence
  Oligonucleotide for detection of SNP TSC0062797
gtttggggtttat

SEQ ID NO: 258250 - DNA, 13 bp, Artificial Sequence
  Oligonucleotide for detection of SNP TSC0062797
ataaaccccaaac

SEQ ID NO: 258251 - DNA, 13 bp, Artificial Sequence
  Oligonucleotide for detection of SNP TSC0062798
ttagtaattttta

SEQ ID NO: 258252 - DNA, 13 bp, Artificial Sequence
  Oligonucleotide for detection of SNP TSC0062798
taaaaattactaa

SEQ ID NO: 258253 - DNA, 13 bp, Artificial Sequence
  Oligonucleotide for detection of SNP TSC0062798
tgggggttattga

SEQ ID NO: 258254 - DNA, 13 bp, Artificial Sequence
  Oligonucleotide for detection of SNP TSC0062798
tcaataaccccca

SEQ ID NO: 258255 - DNA, 13 bp, Artificial Sequence
  Oligonucleotide for detection of SNP TSC0062798
tggggggtattga

SEQ ID NO: 258256 - DNA, 13 bp, Artificial Sequence
  Oligonucleotide for detection of SNP TSC0062798
tcaatacccccca

SEQ ID NO: 258257 - DNA, 13 bp, Artificial Sequence
  Oligonucleotide for detection of SNP TSC0007924
tagtgtatgttty

SEQ ID NO: 258258 - DNA, 13 bp, Artificial Sequence
  Oligonucleotide for detection of SNP TSC0007924
raaacatacacta

SEQ ID NO: 258259 - DNA, 13 bp, Artificial Sequence
  Oligonucleotide for detection of SNP TSC0007924
tagtgtgtgttty

SEQ ID NO: 258260 - DNA, 13 bp, Artificial Sequence
  Oligonucleotide for detection of SNP TSC0007924
raaacacacacta

SEQ ID NO: 258261 - DNA, 13 bp, Artificial Sequence
  Oligonucleotide for detection of SNP TSC0007924
tagtgtacgttty

SEQ ID NO: 258262 - DNA, 13 bp, Artificial Sequence
  Oligonucleotide for detection of SNP TSC0007924
raaacgtacacta

SEQ ID NO: 258263 - DNA, 13 bp, Artificial Sequence
  Oligonucleotide for detection of SNP TSC0007924
tagtgtgcgttty

SEQ ID NO: 258264 - DNA, 13 bp, Artificial Sequence
  Oligonucleotide for detection of SNP TSC0007924
raaacgcacacta

SEQ ID NO: 258265 - DNA, 13 bp, Artificial Sequence
  Oligonucleotide for detection of SNP TSC0001443
ttgggagttttta

SEQ ID NO: 258266 - DNA, 13 bp, Artificial Sequence
  Oligonucleotide for detection of SNP TSC0001443
taaaaactcccaa

SEQ ID NO: 258267 - DNA, 13 bp, Artificial Sequence
  Oligonucleotide for detection of SNP TSC0001443
ttgggaattttta

SEQ ID NO: 258268 - DNA, 13 bp, Artificial Sequence
  Oligonucleotide for detection of SNP TSC0001443
taaaaattcccaa

SEQ ID NO: 258269 - DNA, 13 bp, Artificial Sequence
  Oligonucleotide for detection of SNP TSC0010782
ttttgtataaatt

SEQ ID NO: 258270 - DNA, 13 bp, Artificial Sequence
  Oligonucleotide for detection of SNP TSC0010782
aatttatacaaaa

SEQ ID NO: 258271 - DNA, 13 bp, Artificial Sequence
  Oligonucleotide for detection of SNP TSC0010782
ttttgtttaaatt

SEQ ID NO: 258272 - DNA, 13 bp, Artificial Sequence
  Oligonucleotide for detection of SNP TSC0010782
aatttaaacaaaa

SEQ ID NO: 258273 - DNA, 13 bp, Artificial Sequence
  Oligonucleotide for detection of SNP TSC0010782
aatttgtatagaa

SEQ ID NO: 258274 - DNA, 13 bp, Artificial Sequence
  Oligonucleotide for detection of SNP TSC0010782
ttctatacaaatt

SEQ ID NO: 258275 - DNA, 13 bp, Artificial Sequence
  Oligonucleotide for detection of SNP TSC0010782
aatttggatagaa

SEQ ID NO: 258276 - DNA, 13 bp, Artificial Sequence
  Oligonucleotide for detection of SNP TSC0010782
ttctatccaaatt

SEQ ID NO: 258277 - DNA, 13 bp, Artificial Sequence
  Oligonucleotide for detection of SNP TSC0062802
gttaagtgtatta

SEQ ID NO: 258278 - DNA, 13 bp, Artificial Sequence
  Oligonucleotide for detection of SNP TSC0062802
taatacacttaac

SEQ ID NO: 258279 - DNA, 13 bp, Artificial Sequence
  Oligonucleotide for detection of SNP TSC0062802
gttaagcgtatta

SEQ ID NO: 258280 - DNA, 13 bp, Artificial Sequence
  Oligonucleotide for detection of SNP TSC0062802
taatacgcttaac

SEQ ID NO: 258281 - DNA, 13 bp, Artificial Sequence
  Oligonucleotide for detection of SNP TSC0062802
taatatgtttaay

SEQ ID NO: 258282 - DNA, 13 bp, Artificial Sequence
  Oligonucleotide for detection of SNP TSC0062802
rttaaacatatta

SEQ ID NO: 258283 - DNA, 13 bp, Artificial Sequence
  Oligonucleotide for detection of SNP TSC0062802
taatatatttaay

SEQ ID NO: 258284 - DNA, 13 bp, Artificial Sequence
  Oligonucleotide for detection of SNP TSC0062802
rttaaatatatta

SEQ ID NO: 258285 - DNA, 13 bp, Artificial Sequence
  Oligonucleotide for detection of SNP TSC0062802
taatacgtttaay

SEQ ID NO: 258286 - DNA, 13 bp, Artificial Sequence
  Oligonucleotide for detection of SNP TSC0062802
rttaaacgtatta

SEQ ID NO: 258287 - DNA, 13 bp, Artificial Sequence
  Oligonucleotide for detection of SNP TSC0000929
ttttagagaagty

SEQ ID NO: 258288 - DNA, 13 bp, Artificial Sequence
  Oligonucleotide for detection of SNP TSC0000929
racttctctaaaa

SEQ ID NO: 258289 - DNA, 13 bp, Artificial Sequence
  Oligonucleotide for detection of SNP TSC0000929
ttttagggaagty

SEQ ID NO: 258290 - DNA, 13 bp, Artificial Sequence
  Oligonucleotide for detection of SNP TSC0000929
racttccctaaaa

SEQ ID NO: 258291 - DNA, 13 bp, Artificial Sequence
  Oligonucleotide for detection of SNP TSC0062804
gaatgtatgtttt

SEQ ID NO: 258292 - DNA, 13 bp, Artificial Sequence
  Oligonucleotide for detection of SNP TSC0062804
aaaacatacattc

SEQ ID NO: 258293 - DNA, 13 bp, Artificial Sequence
  Oligonucleotide for detection of SNP TSC0062804
gaatgtgtgtttt

SEQ ID NO: 258294 - DNA, 13 bp, Artificial Sequence
  Oligonucleotide for detection of SNP TSC0062804
aaaacacacattc

SEQ ID NO: 258295 - DNA, 13 bp, Artificial Sequence
  Oligonucleotide for detection of SNP TSC0000395
ataaatggtggay

SEQ ID NO: 258296 - DNA, 13 bp, Artificial Sequence
  Oligonucleotide for detection of SNP TSC0000395
rtccaccatttat

SEQ ID NO: 258297 - DNA, 13 bp, Artificial Sequence
  Oligonucleotide for detection of SNP TSC0000395
ataaatagtggay

SEQ ID NO: 258298 - DNA, 13 bp, Artificial Sequence
  Oligonucleotide for detection of SNP TSC0000395
rtccactatttat

SEQ ID NO: 258299 - DNA, 13 bp, Artificial Sequence
  Oligonucleotide for detection of SNP TSC0062805
ttaagtggttgtt

SEQ ID NO: 258300 - DNA, 13 bp, Artificial Sequence
  Oligonucleotide for detection of SNP TSC0062805
aacaaccacttaa

SEQ ID NO: 258301 - DNA, 13 bp, Artificial Sequence
  Oligonucleotide for detection of SNP TSC0062805
ttaagtagttgtt

SEQ ID NO: 258302 - DNA, 13 bp, Artificial Sequence
  Oligonucleotide for detection of SNP TSC0062805
aacaactacttaa

SEQ ID NO: 258303 - DNA, 13 bp, Artificial Sequence
  Oligonucleotide for detection of SNP TSC0062806
atagaatgttgga

SEQ ID NO: 258304 - DNA, 13 bp, Artificial Sequence
  Oligonucleotide for detection of SNP TSC0062806
tccaacattctat

SEQ ID NO: 258305 - DNA, 13 bp, Artificial Sequence
  Oligonucleotide for detection of SNP TSC0062806
atagaaggttgga

SEQ ID NO: 258306 - DNA, 13 bp, Artificial Sequence
  Oligonucleotide for detection of SNP TSC0062806
tccaaccttctat

SEQ ID NO: 258307 - DNA, 13 bp, Artificial Sequence
  Oligonucleotide for detection of SNP TSC0062809
ttgtagtaagaaa

SEQ ID NO: 258308 - DNA, 13 bp, Artificial Sequence
  Oligonucleotide for detection of SNP TSC0062809
tttcttactacaa

SEQ ID NO: 258309 - DNA, 13 bp, Artificial Sequence
  Oligonucleotide for detection of SNP TSC0062809
ttgtaggaagaaa

SEQ ID NO: 258310 - DNA, 13 bp, Artificial Sequence
  Oligonucleotide for detection of SNP TSC0062809
tttcttcctacaa

SEQ ID NO: 258311 - DNA, 13 bp, Artificial Sequence
  Oligonucleotide for detection of SNP TSC0062815
tattttcggggta

SEQ ID NO: 258312 - DNA, 13 bp, Artificial Sequence
  Oligonucleotide for detection of SNP TSC0062815
taccccgaaaata

SEQ ID NO: 258313 - DNA, 13 bp, Artificial Sequence
  Oligonucleotide for detection of SNP TSC0062815
tattttgaaaatg

SEQ ID NO: 258314 - DNA, 13 bp, Artificial Sequence
  Oligonucleotide for detection of SNP TSC0062815
cattttcaaaata

SEQ ID NO: 258315 - DNA, 13 bp, Artificial Sequence
  Oligonucleotide for detection of SNP TSC0062815
tattttaaaaatg

SEQ ID NO: 258316 - DNA, 13 bp, Artificial Sequence
  Oligonucleotide for detection of SNP TSC0062815
catttttaaaata

SEQ ID NO: 258317 - DNA, 13 bp, Artificial Sequence
  Oligonucleotide for detection of SNP TSC0062815
tatttcgaaaatg

SEQ ID NO: 258318 - DNA, 13 bp, Artificial Sequence
  Oligonucleotide for detection of SNP TSC0062815
cattttcgaaata

SEQ ID NO: 258319 - DNA, 13 bp, Artificial Sequence
  Oligonucleotide for detection of SNP TSC0062816
gtagggatgaggg

SEQ ID NO: 258320 - DNA, 13 bp, Artificial Sequence
  Oligonucleotide for detection of SNP TSC0062816
ccctcatccctac

SEQ ID NO: 258321 - DNA, 13 bp, Artificial Sequence
  Oligonucleotide for detection of SNP TSC0062816
gtagggttgaggg

SEQ ID NO: 258322 - DNA, 13 bp, Artificial Sequence
  Oligonucleotide for detection of SNP TSC0062816
ccctcaaccctac

SEQ ID NO: 258323 - DNA, 13 bp, Artificial Sequence
  Oligonucleotide for detection of SNP TSC0062817
taagttagtttga

SEQ ID NO: 258324 - DNA, 13 bp, Artificial Sequence
  Oligonucleotide for detection of SNP TSC0062817
tcaaactaactta

SEQ ID NO: 258325 - DNA, 13 bp, Artificial Sequence
  Oligonucleotide for detection of SNP TSC0062817
taagttggtttga

SEQ ID NO: 258326 - DNA, 13 bp, Artificial Sequence
  Oligonucleotide for detection of SNP TSC0062817
tcaaaccaactta

SEQ ID NO: 258327 - DNA, 13 bp, Artificial Sequence
  Oligonucleotide for detection of SNP TSC0000368
aaggaattttaag

SEQ ID NO: 258328 - DNA, 13 bp, Artificial Sequence
  Oligonucleotide for detection of SNP TSC0000368
cttaaaattcctt

SEQ ID NO: 258329 - DNA, 13 bp, Artificial Sequence
  Oligonucleotide for detection of SNP TSC0010166
tgtaaaatagatt

SEQ ID NO: 258330 - DNA, 13 bp, Artificial Sequence
  Oligonucleotide for detection of SNP TSC0010166
aatctattttaca

SEQ ID NO: 258331 - DNA, 13 bp, Artificial Sequence
  Oligonucleotide for detection of SNP TSC0010166
tgtaaagtagatt

SEQ ID NO: 258332 - DNA, 13 bp, Artificial Sequence
  Oligonucleotide for detection of SNP TSC0010166
aatctactttaca

SEQ ID NO: 258333 - DNA, 13 bp, Artificial Sequence
  Oligonucleotide for detection of SNP TSC0010167
agtttatggttag

SEQ ID NO: 258334 - DNA, 13 bp, Artificial Sequence
  Oligonucleotide for detection of SNP TSC0010167
ctaaccataaact

SEQ ID NO: 258335 - DNA, 13 bp, Artificial Sequence
  Oligonucleotide for detection of SNP TSC0010167
agtttagggttag

SEQ ID NO: 258336 - DNA, 13 bp, Artificial Sequence
  Oligonucleotide for detection of SNP TSC0010167
ctaaccctaaact

SEQ ID NO: 258337 - DNA, 13 bp, Artificial Sequence
  Oligonucleotide for detection of SNP TSC0010167
agtttacggttag

SEQ ID NO: 258338 - DNA, 13 bp, Artificial Sequence
  Oligonucleotide for detection of SNP TSC0010167
ctaaccgtaaact

SEQ ID NO: 258339 - DNA, 13 bp, Artificial Sequence
  Oligonucleotide for detection of SNP TSC0010167
ttaattgtaaatt

SEQ ID NO: 258340 - DNA, 13 bp, Artificial Sequence
  Oligonucleotide for detection of SNP TSC0010167
aatttacaattaa

SEQ ID NO: 258341 - DNA, 13 bp, Artificial Sequence
  Oligonucleotide for detection of SNP TSC0062823
tattgtaagttaa

SEQ ID NO: 258342 - DNA, 13 bp, Artificial Sequence
  Oligonucleotide for detection of SNP TSC0062823
ttaacttacaata

SEQ ID NO: 258343 - DNA, 13 bp, Artificial Sequence
  Oligonucleotide for detection of SNP TSC0062823
tattgtgagttaa

SEQ ID NO: 258344 - DNA, 13 bp, Artificial Sequence
  Oligonucleotide for detection of SNP TSC0062823
ttaactcacaata

SEQ ID NO: 258345 - DNA, 13 bp, Artificial Sequence
  Oligonucleotide for detection of SNP TSC0062823
tattgcgagttaa

SEQ ID NO: 258346 - DNA, 13 bp, Artificial Sequence
  Oligonucleotide for detection of SNP TSC0062823
ttaactcgcaata

SEQ ID NO: 258347 - DNA, 13 bp, Artificial Sequence
  Oligonucleotide for detection of SNP TSC0062823
ttaattcgtaata

SEQ ID NO: 258348 - DNA, 13 bp, Artificial Sequence
  Oligonucleotide for detection of SNP TSC0062823
tattacgaattaa

SEQ ID NO: 258349 - DNA, 13 bp, Artificial Sequence
  Oligonucleotide for detection of SNP TSC0062824
tgtaatgattatt

SEQ ID NO: 258350 - DNA, 13 bp, Artificial Sequence
  Oligonucleotide for detection of SNP TSC0062824
aataatcattaca

SEQ ID NO: 258351 - DNA, 13 bp, Artificial Sequence
  Oligonucleotide for detection of SNP TSC0001601
ttttaagagagag

SEQ ID NO: 258352 - DNA, 13 bp, Artificial Sequence
  Oligonucleotide for detection of SNP TSC0001601
ctctctcttaaaa

SEQ ID NO: 258353 - DNA, 13 bp, Artificial Sequence
  Oligonucleotide for detection of SNP TSC0001601
ttttaaaagagag

SEQ ID NO: 258354 - DNA, 13 bp, Artificial Sequence
  Oligonucleotide for detection of SNP TSC0001601
ctctcttttaaaa

SEQ ID NO: 258355 - DNA, 13 bp, Artificial Sequence
  Oligonucleotide for detection of SNP TSC0062825
gtgtagtgagtay

SEQ ID NO: 258356 - DNA, 13 bp, Artificial Sequence
  Oligonucleotide for detection of SNP TSC0062825
rtactcactacac

SEQ ID NO: 258357 - DNA, 13 bp, Artificial Sequence
  Oligonucleotide for detection of SNP TSC0062825
gtgtagcgagtay

SEQ ID NO: 258358 - DNA, 13 bp, Artificial Sequence
  Oligonucleotide for detection of SNP TSC0062825
rtactcgctacac

SEQ ID NO: 258359 - DNA, 13 bp, Artificial Sequence
  Oligonucleotide for detection of SNP TSC0062825
gtgtttgttgtay

SEQ ID NO: 258360 - DNA, 13 bp, Artificial Sequence
  Oligonucleotide for detection of SNP TSC0062825
rtacaacaaacac

SEQ ID NO: 258361 - DNA, 13 bp, Artificial Sequence
  Oligonucleotide for detection of SNP TSC0062825
gtgtttattgtay

SEQ ID NO: 258362 - DNA, 13 bp, Artificial Sequence
  Oligonucleotide for detection of SNP TSC0062825
rtacaataaacac

SEQ ID NO: 258363 - DNA, 13 bp, Artificial Sequence
  Oligonucleotide for detection of SNP TSC0062825
gtgttcgttgtay

SEQ ID NO: 258364 - DNA, 13 bp, Artificial Sequence
  Oligonucleotide for detection of SNP TSC0062825
rtacaacgaacac

SEQ ID NO: 258365 - DNA, 13 bp, Artificial Sequence
  Oligonucleotide for detection of SNP TSC0010844
taatatatggtat

SEQ ID NO: 258366 - DNA, 13 bp, Artificial Sequence
  Oligonucleotide for detection of SNP TSC0010844
ataccatatatta

SEQ ID NO: 258367 - DNA, 13 bp, Artificial Sequence
  Oligonucleotide for detection of SNP TSC0010844
taatatgtggtat

SEQ ID NO: 258368 - DNA, 13 bp, Artificial Sequence
  Oligonucleotide for detection of SNP TSC0010844
ataccacatatta

SEQ ID NO: 258369 - DNA, 13 bp, Artificial Sequence
  Oligonucleotide for detection of SNP TSC0010844
taatacgtggtat

SEQ ID NO: 258370 - DNA, 13 bp, Artificial Sequence
  Oligonucleotide for detection of SNP TSC0010844
ataccacgtatta

SEQ ID NO: 258371 - DNA, 13 bp, Artificial Sequence
  Oligonucleotide for detection of SNP TSC0010844
atgttatgtatta

SEQ ID NO: 258372 - DNA, 13 bp, Artificial Sequence
  Oligonucleotide for detection of SNP TSC0010844
taatacataacat

SEQ ID NO: 258373 - DNA, 13 bp, Artificial Sequence
  Oligonucleotide for detection of SNP TSC0010844
atgttacgtatta

SEQ ID NO: 258374 - DNA, 13 bp, Artificial Sequence
  Oligonucleotide for detection of SNP TSC0010844
taatacgtaacat

SEQ ID NO: 258375 - DNA, 13 bp, Artificial Sequence
  Oligonucleotide for detection of SNP TSC0010845
gatagttgaggtt

SEQ ID NO: 258376 - DNA, 13 bp, Artificial Sequence
  Oligonucleotide for detection of SNP TSC0010845
aacctcaactatc

SEQ ID NO: 258377 - DNA, 13 bp, Artificial Sequence
  Oligonucleotide for detection of SNP TSC0010845
gatagtcgaggtt

SEQ ID NO: 258378 - DNA, 13 bp, Artificial Sequence
  Oligonucleotide for detection of SNP TSC0010845
aacctcgactatc

SEQ ID NO: 258379 - DNA, 13 bp, Artificial Sequence
  Oligonucleotide for detection of SNP TSC0010845
agttttggttaty

SEQ ID NO: 258380 - DNA, 13 bp, Artificial Sequence
  Oligonucleotide for detection of SNP TSC0010845
rataaccaaaact

SEQ ID NO: 258381 - DNA, 13 bp, Artificial Sequence
  Oligonucleotide for detection of SNP TSC0010845
agttttagttaty

SEQ ID NO: 258382 - DNA, 13 bp, Artificial Sequence
  Oligonucleotide for detection of SNP TSC0010845
rataactaaaact

SEQ ID NO: 258383 - DNA, 13 bp, Artificial Sequence
  Oligonucleotide for detection of SNP TSC0010845
agtttcggttaty

SEQ ID NO: 258384 - DNA, 13 bp, Artificial Sequence
  Oligonucleotide for detection of SNP TSC0010845
rataaccgaaact

SEQ ID NO: 258385 - DNA, 13 bp, Artificial Sequence
  Oligonucleotide for detection of SNP TSC0062828
ggggtaaattaaa

SEQ ID NO: 258386 - DNA, 13 bp, Artificial Sequence
  Oligonucleotide for detection of SNP TSC0062828
tttaatttacccc

SEQ ID NO: 258387 - DNA, 13 bp, Artificial Sequence
  Oligonucleotide for detection of SNP TSC0062828
ggggtagattaaa

SEQ ID NO: 258388 - DNA, 13 bp, Artificial Sequence
  Oligonucleotide for detection of SNP TSC0062828
tttaatctacccc

SEQ ID NO: 258389 - DNA, 13 bp, Artificial Sequence
  Oligonucleotide for detection of SNP TSC0062829
tattatttaaatg

SEQ ID NO: 258390 - DNA, 13 bp, Artificial Sequence
  Oligonucleotide for detection of SNP TSC0062829
catttaaataata

SEQ ID NO: 258391 - DNA, 13 bp, Artificial Sequence
  Oligonucleotide for detection of SNP TSC0062829
tattatgtaaatg

SEQ ID NO: 258392 - DNA, 13 bp, Artificial Sequence
  Oligonucleotide for detection of SNP TSC0062829
catttacataata

SEQ ID NO: 258393 - DNA, 13 bp, Artificial Sequence
  Oligonucleotide for detection of SNP TSC0062829
tatttgaatggta

SEQ ID NO: 258394 - DNA, 13 bp, Artificial Sequence
  Oligonucleotide for detection of SNP TSC0062829
taccattcaaata

SEQ ID NO: 258395 - DNA, 13 bp, Artificial Sequence
  Oligonucleotide for detection of SNP TSC0062829
tatttgtatggta

SEQ ID NO: 258396 - DNA, 13 bp, Artificial Sequence
  Oligonucleotide for detection of SNP TSC0062829
taccatacaaata

SEQ ID NO: 258397 - DNA, 13 bp, Artificial Sequence
  Oligonucleotide for detection of SNP TSC0062833
ttgttttgatgtt

SEQ ID NO: 258398 - DNA, 13 bp, Artificial Sequence
  Oligonucleotide for detection of SNP TSC0062833
aacatcaaaacaa

SEQ ID NO: 258399 - DNA, 13 bp, Artificial Sequence
  Oligonucleotide for detection of SNP TSC0062833
ttgtttcgatgtt

SEQ ID NO: 258400 - DNA, 13 bp, Artificial Sequence
  Oligonucleotide for detection of SNP TSC0062833
aacatcgaaacaa

SEQ ID NO: 258401 - DNA, 13 bp, Artificial Sequence
  Oligonucleotide for detection of SNP TSC0062833
agtattgaaataa

SEQ ID NO: 258402 - DNA, 13 bp, Artificial Sequence
  Oligonucleotide for detection of SNP TSC0062833
ttatttcaatact

SEQ ID NO: 258403 - DNA, 13 bp, Artificial Sequence
  Oligonucleotide for detection of SNP TSC0062833
agtattaaaataa

SEQ ID NO: 258404 - DNA, 13 bp, Artificial Sequence
  Oligonucleotide for detection of SNP TSC0062833
ttattttaatact

SEQ ID NO: 258405 - DNA, 13 bp, Artificial Sequence
  Oligonucleotide for detection of SNP TSC0062833
agtatcgaaataa

SEQ ID NO: 258406 - DNA, 13 bp, Artificial Sequence
  Oligonucleotide for detection of SNP TSC0062833
ttatttcgatact

SEQ ID NO: 258407 - DNA, 13 bp, Artificial Sequence
  Oligonucleotide for detection of SNP TSC0062835
aaatttgttttty

SEQ ID NO: 258408 - DNA, 13 bp, Artificial Sequence
  Oligonucleotide for detection of SNP TSC0062835
raaaaacaaattt

SEQ ID NO: 258409 - DNA, 13 bp, Artificial Sequence
  Oligonucleotide for detection of SNP TSC0062835
aaatttattttty

SEQ ID NO: 258410 - DNA, 13 bp, Artificial Sequence
  Oligonucleotide for detection of SNP TSC0062835
raaaaataaattt

SEQ ID NO: 258411 - DNA, 13 bp, Artificial Sequence
  Oligonucleotide for detection of SNP TSC0005926
aattatgaggaty

SEQ ID NO: 258412 - DNA, 13 bp, Artificial Sequence
  Oligonucleotide for detection of SNP TSC0005926
ratcctcataatt

SEQ ID NO: 258413 - DNA, 13 bp, Artificial Sequence
  Oligonucleotide for detection of SNP TSC0005926
aattataaggaty

SEQ ID NO: 258414 - DNA, 13 bp, Artificial Sequence
  Oligonucleotide for detection of SNP TSC0005926
ratccttataatt

SEQ ID NO: 258415 - DNA, 13 bp, Artificial Sequence
  Oligonucleotide for detection of SNP TSC0062836
tataaaatttaay

SEQ ID NO: 258416 - DNA, 13 bp, Artificial Sequence
  Oligonucleotide for detection of SNP TSC0062836
rttaaattttata

SEQ ID NO: 258417 - DNA, 13 bp, Artificial Sequence
  Oligonucleotide for detection of SNP TSC0062836
tataaagtttaay

SEQ ID NO: 258418 - DNA, 13 bp, Artificial Sequence
  Oligonucleotide for detection of SNP TSC0062836
rttaaactttata

SEQ ID NO: 258419 - DNA, 13 bp, Artificial Sequence
  Oligonucleotide for detection of SNP TSC0062838
agaatagtttggg

SEQ ID NO: 258420 - DNA, 13 bp, Artificial Sequence
  Oligonucleotide for detection of SNP TSC0062838
cccaaactattct

SEQ ID NO: 258421 - DNA, 13 bp, Artificial Sequence
  Oligonucleotide for detection of SNP TSC0062838
agaataatttggg

SEQ ID NO: 258422 - DNA, 13 bp, Artificial Sequence
  Oligonucleotide for detection of SNP TSC0062838
cccaaattattct

SEQ ID NO: 258423 - DNA, 13 bp, Artificial Sequence
  Oligonucleotide for detection of SNP TSC0062839
ttattttgagata

SEQ ID NO: 258424 - DNA, 13 bp, Artificial Sequence
  Oligonucleotide for detection of SNP TSC0062839
tatctcaaaataa

SEQ ID NO: 258425 - DNA, 13 bp, Artificial Sequence
  Oligonucleotide for detection of SNP TSC0062839
ttatttggagata

SEQ ID NO: 258426 - DNA, 13 bp, Artificial Sequence
  Oligonucleotide for detection of SNP TSC0062839
tatctccaaataa

SEQ ID NO: 258427 - DNA, 13 bp, Artificial Sequence
  Oligonucleotide for detection of SNP TSC0062839
ttattcggagata

SEQ ID NO: 258428 - DNA, 13 bp, Artificial Sequence
  Oligonucleotide for detection of SNP TSC0062839
tatctccgaataa

SEQ ID NO: 258429 - DNA, 13 bp, Artificial Sequence
  Oligonucleotide for detection of SNP TSC0062839
tgtttttgaatag

SEQ ID NO: 258430 - DNA, 13 bp, Artificial Sequence
  Oligonucleotide for detection of SNP TSC0062839
ctattcaaaaaca

SEQ ID NO: 258431 - DNA, 13 bp, Artificial Sequence
  Oligonucleotide for detection of SNP TSC0062839
tgttttcgaatag

SEQ ID NO: 258432 - DNA, 13 bp, Artificial Sequence
  Oligonucleotide for detection of SNP TSC0062839
ctattcgaaaaca

SEQ ID NO: 258433 - DNA, 13 bp, Artificial Sequence
  Oligonucleotide for detection of SNP TSC0062840
tgagtaattttta

SEQ ID NO: 258434 - DNA, 13 bp, Artificial Sequence
  Oligonucleotide for detection of SNP TSC0062840
taaaaattactca

SEQ ID NO: 258435 - DNA, 13 bp, Artificial Sequence
  Oligonucleotide for detection of SNP TSC0062840
tgagtagttttta

SEQ ID NO: 258436 - DNA, 13 bp, Artificial Sequence
  Oligonucleotide for detection of SNP TSC0062840
taaaaactactca

SEQ ID NO: 258437 - DNA, 13 bp, Artificial Sequence
  Oligonucleotide for detection of SNP TSC0062841
taaaaatggaaat

SEQ ID NO: 258438 - DNA, 13 bp, Artificial Sequence
  Oligonucleotide for detection of SNP TSC0062841
atttccattttta

SEQ ID NO: 258439 - DNA, 13 bp, Artificial Sequence
  Oligonucleotide for detection of SNP TSC0062841
taaaaacggaaat

SEQ ID NO: 258440 - DNA, 13 bp, Artificial Sequence
  Oligonucleotide for detection of SNP TSC0062841
atttccgttttta

SEQ ID NO: 258441 - DNA, 13 bp, Artificial Sequence
  Oligonucleotide for detection of SNP TSC0062842
gatttaatttata

SEQ ID NO: 258442 - DNA, 13 bp, Artificial Sequence
  Oligonucleotide for detection of SNP TSC0062842
tataaattaaatc

SEQ ID NO: 258443 - DNA, 13 bp, Artificial Sequence
  Oligonucleotide for detection of SNP TSC0062842
gatttagtttata

SEQ ID NO: 258444 - DNA, 13 bp, Artificial Sequence
  Oligonucleotide for detection of SNP TSC0062842
tataaactaaatc

SEQ ID NO: 258445 - DNA, 13 bp, Artificial Sequence
  Oligonucleotide for detection of SNP TSC0062844
tttaagaaatgag

SEQ ID NO: 258446 - DNA, 13 bp, Artificial Sequence
  Oligonucleotide for detection of SNP TSC0062844
ctcatttcttaaa

SEQ ID NO: 258447 - DNA, 13 bp, Artificial Sequence
  Oligonucleotide for detection of SNP TSC0062844
tttaaggaatgag

SEQ ID NO: 258448 - DNA, 13 bp, Artificial Sequence
  Oligonucleotide for detection of SNP TSC0062844
ctcattccttaaa

SEQ ID NO: 258449 - DNA, 13 bp, Artificial Sequence
  Oligonucleotide for detection of SNP TSC0062845
ataaaagttaaag

SEQ ID NO: 258450 - DNA, 13 bp, Artificial Sequence
  Oligonucleotide for detection of SNP TSC0062845
ctttaacttttat

SEQ ID NO: 258451 - DNA, 13 bp, Artificial Sequence
  Oligonucleotide for detection of SNP TSC0062845
ataaaaattaaag

SEQ ID NO: 258452 - DNA, 13 bp, Artificial Sequence
  Oligonucleotide for detection of SNP TSC0062845
ctttaatttttat

SEQ ID NO: 258453 - DNA, 13 bp, Artificial Sequence
  Oligonucleotide for detection of SNP TSC0062846
gtcggttgtttta

SEQ ID NO: 258454 - DNA, 13 bp, Artificial Sequence
  Oligonucleotide for detection of SNP TSC0062846
taaaacaaccgac

SEQ ID NO: 258455 - DNA, 13 bp, Artificial Sequence
  Oligonucleotide for detection of SNP TSC0062846
gtcggtcgtttta

SEQ ID NO: 258456 - DNA, 13 bp, Artificial Sequence
  Oligonucleotide for detection of SNP TSC0062846
taaaacgaccgac

SEQ ID NO: 258457 - DNA, 13 bp, Artificial Sequence
  Oligonucleotide for detection of SNP TSC0062846
taaggtggttgay

SEQ ID NO: 258458 - DNA, 13 bp, Artificial Sequence
  Oligonucleotide for detection of SNP TSC0062846
rtcaaccacctta

SEQ ID NO: 258459 - DNA, 13 bp, Artificial Sequence
  Oligonucleotide for detection of SNP TSC0062846
taaggtagttgay

SEQ ID NO: 258460 - DNA, 13 bp, Artificial Sequence
  Oligonucleotide for detection of SNP TSC0062846
rtcaactacctta

SEQ ID NO: 258461 - DNA, 13 bp, Artificial Sequence
  Oligonucleotide for detection of SNP TSC0062846
taaggcggttgay

SEQ ID NO: 258462 - DNA, 13 bp, Artificial Sequence
  Oligonucleotide for detection of SNP TSC0062846
rtcaaccgcctta

SEQ ID NO: 258463 - DNA, 13 bp, Artificial Sequence
  Oligonucleotide for detection of SNP TSC0062846
taaggtagtcgay

SEQ ID NO: 258464 - DNA, 13 bp, Artificial Sequence
  Oligonucleotide for detection of SNP TSC0062846
rtcgactacctta

SEQ ID NO: 258465 - DNA, 13 bp, Artificial Sequence
  Oligonucleotide for detection of SNP TSC0062846
taaggtggtcgay

SEQ ID NO: 258466 - DNA, 13 bp, Artificial Sequence
  Oligonucleotide for detection of SNP TSC0062846
rtcgaccacctta

SEQ ID NO: 258467 - DNA, 13 bp, Artificial Sequence
  Oligonucleotide for detection of SNP TSC0062846
taaggcggtcgay

SEQ ID NO: 258468 - DNA, 13 bp, Artificial Sequence
  Oligonucleotide for detection of SNP TSC0062846
rtcgaccgcctta

SEQ ID NO: 258469 - DNA, 13 bp, Artificial Sequence
  Oligonucleotide for detection of SNP TSC0062848
aagtatgtaatty

SEQ ID NO: 258470 - DNA, 13 bp, Artificial Sequence
  Oligonucleotide for detection of SNP TSC0062848
raattacatactt

SEQ ID NO: 258471 - DNA, 13 bp, Artificial Sequence
  Oligonucleotide for detection of SNP TSC0062848
aagtatataatty

SEQ ID NO: 258472 - DNA, 13 bp, Artificial Sequence
  Oligonucleotide for detection of SNP TSC0062848
raattatatactt

SEQ ID NO: 258473 - DNA, 13 bp, Artificial Sequence
  Oligonucleotide for detection of SNP TSC0062849
gtattaaaattty

SEQ ID NO: 258474 - DNA, 13 bp, Artificial Sequence
  Oligonucleotide for detection of SNP TSC0062849
raaattttaatac

SEQ ID NO: 258475 - DNA, 13 bp, Artificial Sequence
  Oligonucleotide for detection of SNP TSC0062849
gtattagaattty

SEQ ID NO: 258476 - DNA, 13 bp, Artificial Sequence
  Oligonucleotide for detection of SNP TSC0062849
raaattctaatac

SEQ ID NO: 258477 - DNA, 13 bp, Artificial Sequence
  Oligonucleotide for detection of SNP TSC0062850
gaaaatgttttaa

SEQ ID NO: 258478 - DNA, 13 bp, Artificial Sequence
  Oligonucleotide for detection of SNP TSC0062850
ttaaaacattttc

SEQ ID NO: 258479 - DNA, 13 bp, Artificial Sequence
  Oligonucleotide for detection of SNP TSC0062851
gttataagtgtat

SEQ ID NO: 258480 - DNA, 13 bp, Artificial Sequence
  Oligonucleotide for detection of SNP TSC0062851
atacacttataac

SEQ ID NO: 258481 - DNA, 13 bp, Artificial Sequence
  Oligonucleotide for detection of SNP TSC0062851
gttatatgtgtat

SEQ ID NO: 258482 - DNA, 13 bp, Artificial Sequence
  Oligonucleotide for detection of SNP TSC0062851
atacacatataac

SEQ ID NO: 258483 - DNA, 13 bp, Artificial Sequence
  Oligonucleotide for detection of SNP TSC0062851
atgtatatgtaay

SEQ ID NO: 258484 - DNA, 13 bp, Artificial Sequence
  Oligonucleotide for detection of SNP TSC0062851
rttacatatacat

SEQ ID NO: 258485 - DNA, 13 bp, Artificial Sequence
  Oligonucleotide for detection of SNP TSC0062852
gtttatttatgtt

SEQ ID NO: 258486 - DNA, 13 bp, Artificial Sequence
  Oligonucleotide for detection of SNP TSC0062852
aacataaataaac

SEQ ID NO: 258487 - DNA, 13 bp, Artificial Sequence
  Oligonucleotide for detection of SNP TSC0062852
agtataaataggy

SEQ ID NO: 258488 - DNA, 13 bp, Artificial Sequence
  Oligonucleotide for detection of SNP TSC0062852
rcctatttatact

SEQ ID NO: 258489 - DNA, 13 bp, Artificial Sequence
  Oligonucleotide for detection of SNP TSC0062852
agtatatataggy

SEQ ID NO: 258490 - DNA, 13 bp, Artificial Sequence
  Oligonucleotide for detection of SNP TSC0062852
rcctatatatact

SEQ ID NO: 258491 - DNA, 13 bp, Artificial Sequence
  Oligonucleotide for detection of SNP TSC0005201
aatatggttaggg

SEQ ID NO: 258492 - DNA, 13 bp, Artificial Sequence
  Oligonucleotide for detection of SNP TSC0005201
ccctaaccatatt

SEQ ID NO: 258493 - DNA, 13 bp, Artificial Sequence
  Oligonucleotide for detection of SNP TSC0005201
aatatgattaggg

SEQ ID NO: 258494 - DNA, 13 bp, Artificial Sequence
  Oligonucleotide for detection of SNP TSC0005201
ccctaatcatatt

SEQ ID NO: 258495 - DNA, 13 bp, Artificial Sequence
  Oligonucleotide for detection of SNP TSC0062853
ttttagggaatay

SEQ ID NO: 258496 - DNA, 13 bp, Artificial Sequence
  Oligonucleotide for detection of SNP TSC0062853
rtattccctaaaa

SEQ ID NO: 258497 - DNA, 13 bp, Artificial Sequence
  Oligonucleotide for detection of SNP TSC0062853
ttttagagaatay

SEQ ID NO: 258498 - DNA, 13 bp, Artificial Sequence
  Oligonucleotide for detection of SNP TSC0062853
rtattctctaaaa

SEQ ID NO: 258499 - DNA, 13 bp, Artificial Sequence
  Oligonucleotide for detection of SNP TSC0062854
gttagtagggtty

SEQ ID NO: 258500 - DNA, 13 bp, Artificial Sequence
  Oligonucleotide for detection of SNP TSC0062854
raaccctactaac

SEQ ID NO: 258501 - DNA, 13 bp, Artificial Sequence
  Oligonucleotide for detection of SNP TSC0062854
gttagtggggtty

SEQ ID NO: 258502 - DNA, 13 bp, Artificial Sequence
  Oligonucleotide for detection of SNP TSC0062854
raaccccactaac

SEQ ID NO: 258503 - DNA, 13 bp, Artificial Sequence
  Oligonucleotide for detection of SNP TSC0062854
gttagcggggtty

SEQ ID NO: 258504 - DNA, 13 bp, Artificial Sequence
  Oligonucleotide for detection of SNP TSC0062854
raaccccgctaac

SEQ ID NO: 258505 - DNA, 13 bp, Artificial Sequence
  Oligonucleotide for detection of SNP TSC0062854
gagttttgttgay

SEQ ID NO: 258506 - DNA, 13 bp, Artificial Sequence
  Oligonucleotide for detection of SNP TSC0062854
rtcaacaaaactc

SEQ ID NO: 258507 - DNA, 13 bp, Artificial Sequence
  Oligonucleotide for detection of SNP TSC0062854
gagtttcgttgay

SEQ ID NO: 258508 - DNA, 13 bp, Artificial Sequence
  Oligonucleotide for detection of SNP TSC0062854
rtcaacgaaactc

SEQ ID NO: 258509 - DNA, 13 bp, Artificial Sequence
  Oligonucleotide for detection of SNP TSC0062855
tgggttgagggty

SEQ ID NO: 258510 - DNA, 13 bp, Artificial Sequence
  Oligonucleotide for detection of SNP TSC0062855
raccctcaaccca

SEQ ID NO: 258511 - DNA, 13 bp, Artificial Sequence
  Oligonucleotide for detection of SNP TSC0062855
tgggttaagggty

SEQ ID NO: 258512 - DNA, 13 bp, Artificial Sequence
  Oligonucleotide for detection of SNP TSC0062855
racccttaaccca

SEQ ID NO: 258513 - DNA, 13 bp, Artificial Sequence
  Oligonucleotide for detection of SNP TSC0062855
tgggtcgagggty

SEQ ID NO: 258514 - DNA, 13 bp, Artificial Sequence
  Oligonucleotide for detection of SNP TSC0062855
raccctcgaccca

SEQ ID NO: 258515 - DNA, 13 bp, Artificial Sequence
  Oligonucleotide for detection of SNP TSC0062856
ttgatattgttag

SEQ ID NO: 258516 - DNA, 13 bp, Artificial Sequence
  Oligonucleotide for detection of SNP TSC0062856
ctaacaatatcaa

SEQ ID NO: 258517 - DNA, 13 bp, Artificial Sequence
  Oligonucleotide for detection of SNP TSC0062856
ttgatagtgttag

SEQ ID NO: 258518 - DNA, 13 bp, Artificial Sequence
  Oligonucleotide for detection of SNP TSC0062856
ctaacactatcaa

SEQ ID NO: 258519 - DNA, 13 bp, Artificial Sequence
  Oligonucleotide for detection of SNP TSC0062856
ttgatatcgttag

SEQ ID NO: 258520 - DNA, 13 bp, Artificial Sequence
  Oligonucleotide for detection of SNP TSC0062856
ctaacgatatcaa

SEQ ID NO: 258521 - DNA, 13 bp, Artificial Sequence
  Oligonucleotide for detection of SNP TSC0062856
ttgatagcgttag

SEQ ID NO: 258522 - DNA, 13 bp, Artificial Sequence
  Oligonucleotide for detection of SNP TSC0062856
ctaacgctatcaa

SEQ ID NO: 258523 - DNA, 13 bp, Artificial Sequence
  Oligonucleotide for detection of SNP TSC0062856
ttagtggtgttag

SEQ ID NO: 258524 - DNA, 13 bp, Artificial Sequence
  Oligonucleotide for detection of SNP TSC0062856
ctaacaccactaa

SEQ ID NO: 258525 - DNA, 13 bp, Artificial Sequence
  Oligonucleotide for detection of SNP TSC0062856
ttagtgttgttag

SEQ ID NO: 258526 - DNA, 13 bp, Artificial Sequence
  Oligonucleotide for detection of SNP TSC0062856
ctaacaacactaa

SEQ ID NO: 258527 - DNA, 13 bp, Artificial Sequence
  Oligonucleotide for detection of SNP TSC0062856
ttagcggtgttag

SEQ ID NO: 258528 - DNA, 13 bp, Artificial Sequence
  Oligonucleotide for detection of SNP TSC0062856
ctaacaccgctaa

SEQ ID NO: 258529 - DNA, 13 bp, Artificial Sequence
  Oligonucleotide for detection of SNP TSC0062856
ttagcgttgttag

SEQ ID NO: 258530 - DNA, 13 bp, Artificial Sequence
  Oligonucleotide for detection of SNP TSC0062856
ctaacaacgctaa

SEQ ID NO: 258531 - DNA, 13 bp, Artificial Sequence
  Oligonucleotide for detection of SNP TSC0062860
agaattatgaaga

SEQ ID NO: 258532 - DNA, 13 bp, Artificial Sequence
  Oligonucleotide for detection of SNP TSC0062860
tcttcataattct

SEQ ID NO: 258533 - DNA, 13 bp, Artificial Sequence
  Oligonucleotide for detection of SNP TSC0062860
agaattgtgaaga

SEQ ID NO: 258534 - DNA, 13 bp, Artificial Sequence
  Oligonucleotide for detection of SNP TSC0062860
tcttcacaattct

SEQ ID NO: 258535 - DNA, 13 bp, Artificial Sequence
  Oligonucleotide for detection of SNP TSC0062863
ttgggtgatatgg

SEQ ID NO: 258536 - DNA, 13 bp, Artificial Sequence
  Oligonucleotide for detection of SNP TSC0062863
ccatatcacccaa

SEQ ID NO: 258537 - DNA, 13 bp, Artificial Sequence
  Oligonucleotide for detection of SNP TSC0062863
ttgggtaatatgg

SEQ ID NO: 258538 - DNA, 13 bp, Artificial Sequence
  Oligonucleotide for detection of SNP TSC0062863
ccatattacccaa

SEQ ID NO: 258539 - DNA, 13 bp, Artificial Sequence
  Oligonucleotide for detection of SNP TSC0062863
ttgggcgatatgg

SEQ ID NO: 258540 - DNA, 13 bp, Artificial Sequence
  Oligonucleotide for detection of SNP TSC0062863
ccatatcgcccaa

SEQ ID NO: 258541 - DNA, 13 bp, Artificial Sequence
  Oligonucleotide for detection of SNP TSC0007200
gatataaaaaggy

SEQ ID NO: 258542 - DNA, 13 bp, Artificial Sequence
  Oligonucleotide for detection of SNP TSC0007200
rcctttttatatc

SEQ ID NO: 258543 - DNA, 13 bp, Artificial Sequence
  Oligonucleotide for detection of SNP TSC0007200
gatatataaaggy

SEQ ID NO: 258544 - DNA, 13 bp, Artificial Sequence
  Oligonucleotide for detection of SNP TSC0007200
rcctttatatatc

SEQ ID NO: 258545 - DNA, 13 bp, Artificial Sequence
  Oligonucleotide for detection of SNP TSC0007200
gtttttttataty

SEQ ID NO: 258546 - DNA, 13 bp, Artificial Sequence
  Oligonucleotide for detection of SNP TSC0007200
ratataaaaaaac

SEQ ID NO: 258547 - DNA, 13 bp, Artificial Sequence
  Oligonucleotide for detection of SNP TSC0007200
gtttttgtataty

SEQ ID NO: 258548 - DNA, 13 bp, Artificial Sequence
  Oligonucleotide for detection of SNP TSC0007200
ratatacaaaaac

SEQ ID NO: 258549 - DNA, 13 bp, Artificial Sequence
  Oligonucleotide for detection of SNP TSC0007201
ataaatatggtat

SEQ ID NO: 258550 - DNA, 13 bp, Artificial Sequence
  Oligonucleotide for detection of SNP TSC0007201
ataccatatttat

SEQ ID NO: 258551 - DNA, 13 bp, Artificial Sequence
  Oligonucleotide for detection of SNP TSC0007201
ataaatgtggtat

SEQ ID NO: 258552 - DNA, 13 bp, Artificial Sequence
  Oligonucleotide for detection of SNP TSC0007201
ataccacatttat

SEQ ID NO: 258553 - DNA, 13 bp, Artificial Sequence
  Oligonucleotide for detection of SNP TSC0007201
ataaacgtggtat

SEQ ID NO: 258554 - DNA, 13 bp, Artificial Sequence
  Oligonucleotide for detection of SNP TSC0007201
ataccacgtttat

SEQ ID NO: 258555 - DNA, 13 bp, Artificial Sequence
  Oligonucleotide for detection of SNP TSC0062866
tttattttttagg

SEQ ID NO: 258556 - DNA, 13 bp, Artificial Sequence
  Oligonucleotide for detection of SNP TSC0062866
cctaaaaaataaa

SEQ ID NO: 258557 - DNA, 13 bp, Artificial Sequence
  Oligonucleotide for detection of SNP TSC0062866
tttgaataataga

SEQ ID NO: 258558 - DNA, 13 bp, Artificial Sequence
  Oligonucleotide for detection of SNP TSC0062866
tctattattcaaa

SEQ ID NO: 258559 - DNA, 13 bp, Artificial Sequence
  Oligonucleotide for detection of SNP TSC0062866
tttgaagaataga

SEQ ID NO: 258560 - DNA, 13 bp, Artificial Sequence
  Oligonucleotide for detection of SNP TSC0062866
tctattcttcaaa

SEQ ID NO: 258561 - DNA, 13 bp, Artificial Sequence
  Oligonucleotide for detection of SNP TSC0062870
tttattaatagag

SEQ ID NO: 258562 - DNA, 13 bp, Artificial Sequence
  Oligonucleotide for detection of SNP TSC0062870
ctctattaataaa

SEQ ID NO: 258563 - DNA, 13 bp, Artificial Sequence
  Oligonucleotide for detection of SNP TSC0062870
tttatttatagag

SEQ ID NO: 258564 - DNA, 13 bp, Artificial Sequence
  Oligonucleotide for detection of SNP TSC0062870
ctctataaataaa

SEQ ID NO: 258565 - DNA, 13 bp, Artificial Sequence
  Oligonucleotide for detection of SNP TSC0062870
ttttattaatgag

SEQ ID NO: 258566 - DNA, 13 bp, Artificial Sequence
  Oligonucleotide for detection of SNP TSC0062870
ctcattaataaaa

SEQ ID NO: 258567 - DNA, 13 bp, Artificial Sequence
  Oligonucleotide for detection of SNP TSC0062870
ttttataaatgag

SEQ ID NO: 258568 - DNA, 13 bp, Artificial Sequence
  Oligonucleotide for detection of SNP TSC0062870
ctcatttataaaa

SEQ ID NO: 258569 - DNA, 13 bp, Artificial Sequence
  Oligonucleotide for detection of SNP TSC0062871
taatattgtagga

SEQ ID NO: 258570 - DNA, 13 bp, Artificial Sequence
  Oligonucleotide for detection of SNP TSC0062871
tcctacaatatta

SEQ ID NO: 258571 - DNA, 13 bp, Artificial Sequence
  Oligonucleotide for detection of SNP TSC0062871
taatatggtagga

SEQ ID NO: 258572 - DNA, 13 bp, Artificial Sequence
  Oligonucleotide for detection of SNP TSC0062871
tcctaccatatta

SEQ ID NO: 258573 - DNA, 13 bp, Artificial Sequence
  Oligonucleotide for detection of SNP TSC0062871
taatacggtagga

SEQ ID NO: 258574 - DNA, 13 bp, Artificial Sequence
  Oligonucleotide for detection of SNP TSC0062871
tcctaccgtatta

SEQ ID NO: 258575 - DNA, 13 bp, Artificial Sequence
  Oligonucleotide for detection of SNP TSC0062871
ttttgtagtgttg

SEQ ID NO: 258576 - DNA, 13 bp, Artificial Sequence
  Oligonucleotide for detection of SNP TSC0062871
caacactacaaaa

SEQ ID NO: 258577 - DNA, 13 bp, Artificial Sequence
  Oligonucleotide for detection of SNP TSC0062871
ttttgttgtgttg

SEQ ID NO: 258578 - DNA, 13 bp, Artificial Sequence
  Oligonucleotide for detection of SNP TSC0062871
caacacaacaaaa

SEQ ID NO: 258579 - DNA, 13 bp, Artificial Sequence
  Oligonucleotide for detection of SNP TSC0062871
ttttgtcgtgttg

SEQ ID NO: 258580 - DNA, 13 bp, Artificial Sequence
  Oligonucleotide for detection of SNP TSC0062871
caacacgacaaaa

SEQ ID NO: 258581 - DNA, 13 bp, Artificial Sequence
  Oligonucleotide for detection of SNP TSC0062872
agaatgattttga

SEQ ID NO: 258582 - DNA, 13 bp, Artificial Sequence
  Oligonucleotide for detection of SNP TSC0062872
tcaaaatcattct

SEQ ID NO: 258583 - DNA, 13 bp, Artificial Sequence
  Oligonucleotide for detection of SNP TSC0062872
ttagagttatttt

SEQ ID NO: 258584 - DNA, 13 bp, Artificial Sequence
  Oligonucleotide for detection of SNP TSC0062872
aaaataactctaa

SEQ ID NO: 258585 - DNA, 13 bp, Artificial Sequence
  Oligonucleotide for detection of SNP TSC0062873
gggatgagggaag

SEQ ID NO: 258586 - DNA, 13 bp, Artificial Sequence
  Oligonucleotide for detection of SNP TSC0062873
cttccctcatccc

SEQ ID NO: 258587 - DNA, 13 bp, Artificial Sequence
  Oligonucleotide for detection of SNP TSC0062873
gggatgggggaag

SEQ ID NO: 258588 - DNA, 13 bp, Artificial Sequence
  Oligonucleotide for detection of SNP TSC0062873
cttcccccatccc

SEQ ID NO: 258589 - DNA, 13 bp, Artificial Sequence
  Oligonucleotide for detection of SNP TSC0062874
agtttaagattga

SEQ ID NO: 258590 - DNA, 13 bp, Artificial Sequence
  Oligonucleotide for detection of SNP TSC0062874
tcaatcttaaact

SEQ ID NO: 258591 - DNA, 13 bp, Artificial Sequence
  Oligonucleotide for detection of SNP TSC0062874
agtttaggattga

SEQ ID NO: 258592 - DNA, 13 bp, Artificial Sequence
  Oligonucleotide for detection of SNP TSC0062874
tcaatcctaaact

SEQ ID NO: 258593 - DNA, 13 bp, Artificial Sequence
  Oligonucleotide for detection of SNP TSC0062875
ggttaaaaattty

SEQ ID NO: 258594 - DNA, 13 bp, Artificial Sequence
  Oligonucleotide for detection of SNP TSC0062875
raaatttttaacc

SEQ ID NO: 258595 - DNA, 13 bp, Artificial Sequence
  Oligonucleotide for detection of SNP TSC0062875
ggttaagaattty

SEQ ID NO: 258596 - DNA, 13 bp, Artificial Sequence
  Oligonucleotide for detection of SNP TSC0062875
raaattcttaacc

SEQ ID NO: 258597 - DNA, 13 bp, Artificial Sequence
  Oligonucleotide for detection of SNP TSC0062876
gttagtaagtggt

SEQ ID NO: 258598 - DNA, 13 bp, Artificial Sequence
  Oligonucleotide for detection of SNP TSC0062876
accacttactaac

SEQ ID NO: 258599 - DNA, 13 bp, Artificial Sequence
  Oligonucleotide for detection of SNP TSC0062876
gttagtgagtggt

SEQ ID NO: 258600 - DNA, 13 bp, Artificial Sequence
  Oligonucleotide for detection of SNP TSC0062876
accactcactaac

SEQ ID NO: 258601 - DNA, 13 bp, Artificial Sequence
  Oligonucleotide for detection of SNP TSC0062877
tgttggagtggtg

SEQ ID NO: 258602 - DNA, 13 bp, Artificial Sequence
  Oligonucleotide for detection of SNP TSC0062877
caccactccaaca

SEQ ID NO: 258603 - DNA, 13 bp, Artificial Sequence
  Oligonucleotide for detection of SNP TSC0062877
tgttggtgtggtg

SEQ ID NO: 258604 - DNA, 13 bp, Artificial Sequence
  Oligonucleotide for detection of SNP TSC0062877
caccacaccaaca

SEQ ID NO: 258605 - DNA, 13 bp, Artificial Sequence
  Oligonucleotide for detection of SNP TSC0062877
tgttggcgtggtg

SEQ ID NO: 258606 - DNA, 13 bp, Artificial Sequence
  Oligonucleotide for detection of SNP TSC0062877
caccacgccaaca

SEQ ID NO: 258607 - DNA, 13 bp, Artificial Sequence
  Oligonucleotide for detection of SNP TSC0062877
tattattttagta

SEQ ID NO: 258608 - DNA, 13 bp, Artificial Sequence
  Oligonucleotide for detection of SNP TSC0062877
tactaaaataata

SEQ ID NO: 258609 - DNA, 13 bp, Artificial Sequence
  Oligonucleotide for detection of SNP TSC0062877
tattatgttagta

SEQ ID NO: 258610 - DNA, 13 bp, Artificial Sequence
  Oligonucleotide for detection of SNP TSC0062877
tactaacataata

SEQ ID NO: 258611 - DNA, 13 bp, Artificial Sequence
  Oligonucleotide for detection of SNP TSC0062877
tattacgttagta

SEQ ID NO: 258612 - DNA, 13 bp, Artificial Sequence
  Oligonucleotide for detection of SNP TSC0062877
tactaacgtaata

SEQ ID NO: 258613 - DNA, 13 bp, Artificial Sequence
  Oligonucleotide for detection of SNP TSC0062878
tgaataattttty

SEQ ID NO: 258614 - DNA, 13 bp, Artificial Sequence
  Oligonucleotide for detection of SNP TSC0062878
raaaaattattca

SEQ ID NO: 258615 - DNA, 13 bp, Artificial Sequence
  Oligonucleotide for detection of SNP TSC0062878
tgaatagttttty

SEQ ID NO: 258616 - DNA, 13 bp, Artificial Sequence
  Oligonucleotide for detection of SNP TSC0062878
raaaaactattca

SEQ ID NO: 258617 - DNA, 13 bp, Artificial Sequence
  Oligonucleotide for detection of SNP TSC0062879
gatataaggttty

SEQ ID NO: 258618 - DNA, 13 bp, Artificial Sequence
  Oligonucleotide for detection of SNP TSC0062879
raaaccttatatc

SEQ ID NO: 258619 - DNA, 13 bp, Artificial Sequence
  Oligonucleotide for detection of SNP TSC0062879
gatatatggttty

SEQ ID NO: 258620 - DNA, 13 bp, Artificial Sequence
  Oligonucleotide for detection of SNP TSC0062879
raaaccatatatc

SEQ ID NO: 258621 - DNA, 13 bp, Artificial Sequence
  Oligonucleotide for detection of SNP TSC0062879
gatatacggttty

SEQ ID NO: 258622 - DNA, 13 bp, Artificial Sequence
  Oligonucleotide for detection of SNP TSC0062879
raaaccgtatatc

SEQ ID NO: 258623 - DNA, 13 bp, Artificial Sequence
  Oligonucleotide for detection of SNP TSC0062879
gaagttttgtgty

SEQ ID NO: 258624 - DNA, 13 bp, Artificial Sequence
  Oligonucleotide for detection of SNP TSC0062879
racacaaaacttc

SEQ ID NO: 258625 - DNA, 13 bp, Artificial Sequence
  Oligonucleotide for detection of SNP TSC0062879
gaagttgtgtgty

SEQ ID NO: 258626 - DNA, 13 bp, Artificial Sequence
  Oligonucleotide for detection of SNP TSC0062879
racacacaacttc

SEQ ID NO: 258627 - DNA, 13 bp, Artificial Sequence
  Oligonucleotide for detection of SNP TSC0062879
gaagtcgtgtgty

SEQ ID NO: 258628 - DNA, 13 bp, Artificial Sequence
  Oligonucleotide for detection of SNP TSC0062879
racacacgacttc

SEQ ID NO: 258629 - DNA, 13 bp, Artificial Sequence
  Oligonucleotide for detection of SNP TSC0062880
gaatttaatagaa

SEQ ID NO: 258630 - DNA, 13 bp, Artificial Sequence
  Oligonucleotide for detection of SNP TSC0062880
ttctattaaattc

SEQ ID NO: 258631 - DNA, 13 bp, Artificial Sequence
  Oligonucleotide for detection of SNP TSC0062880
gaattcgatagaa

SEQ ID NO: 258632 - DNA, 13 bp, Artificial Sequence
  Oligonucleotide for detection of SNP TSC0062880
ttctatcgaattc

SEQ ID NO: 258633 - DNA, 13 bp, Artificial Sequence
  Oligonucleotide for detection of SNP TSC0062881
tttgaggatatgg

SEQ ID NO: 258634 - DNA, 13 bp, Artificial Sequence
  Oligonucleotide for detection of SNP TSC0062881
ccatatcctcaaa

SEQ ID NO: 258635 - DNA, 13 bp, Artificial Sequence
  Oligonucleotide for detection of SNP TSC0062881
tttgagaatatgg

SEQ ID NO: 258636 - DNA, 13 bp, Artificial Sequence
  Oligonucleotide for detection of SNP TSC0062881
ccatattctcaaa

SEQ ID NO: 258637 - DNA, 13 bp, Artificial Sequence
  Oligonucleotide for detection of SNP TSC0062881
ttcgaggatatgg

SEQ ID NO: 258638 - DNA, 13 bp, Artificial Sequence
  Oligonucleotide for detection of SNP TSC0062881
ccatatcctcgaa

SEQ ID NO: 258639 - DNA, 13 bp, Artificial Sequence
  Oligonucleotide for detection of SNP TSC0062881
ttcgagaatatgg

SEQ ID NO: 258640 - DNA, 13 bp, Artificial Sequence
  Oligonucleotide for detection of SNP TSC0062881
ccatattctcgaa

SEQ ID NO: 258641 - DNA, 13 bp, Artificial Sequence
  Oligonucleotide for detection of SNP TSC0062881
tttgaggatacgg

SEQ ID NO: 258642 - DNA, 13 bp, Artificial Sequence
  Oligonucleotide for detection of SNP TSC0062881
ccgtatcctcaaa

SEQ ID NO: 258643 - DNA, 13 bp, Artificial Sequence
  Oligonucleotide for detection of SNP TSC0062881
tttgagaatacgg

SEQ ID NO: 258644 - DNA, 13 bp, Artificial Sequence
  Oligonucleotide for detection of SNP TSC0062881
ccgtattctcaaa

SEQ ID NO: 258645 - DNA, 13 bp, Artificial Sequence
  Oligonucleotide for detection of SNP TSC0062881
ttcgaggatacgg

SEQ ID NO: 258646 - DNA, 13 bp, Artificial Sequence
  Oligonucleotide for detection of SNP TSC0062881
ccgtatcctcgaa

SEQ ID NO: 258647 - DNA, 13 bp, Artificial Sequence
  Oligonucleotide for detection of SNP TSC0062881
ttcgagaatacgg

SEQ ID NO: 258648 - DNA, 13 bp, Artificial Sequence
  Oligonucleotide for detection of SNP TSC0062881
ccgtattctcgaa

SEQ ID NO: 258649 - DNA, 13 bp, Artificial Sequence
  Oligonucleotide for detection of SNP TSC0062882
ttatgttagggaa

SEQ ID NO: 258650 - DNA, 13 bp, Artificial Sequence
  Oligonucleotide for detection of SNP TSC0062882
ttccctaacataa

SEQ ID NO: 258651 - DNA, 13 bp, Artificial Sequence
  Oligonucleotide for detection of SNP TSC0062883
atataggatttta

SEQ ID NO: 258652 - DNA, 13 bp, Artificial Sequence
  Oligonucleotide for detection of SNP TSC0062883
taaaatcctatat

SEQ ID NO: 258653 - DNA, 13 bp, Artificial Sequence
  Oligonucleotide for detection of SNP TSC0062883
atatagaatttta

SEQ ID NO: 258654 - DNA, 13 bp, Artificial Sequence
  Oligonucleotide for detection of SNP TSC0062883
taaaattctatat

SEQ ID NO: 258655 - DNA, 13 bp, Artificial Sequence
  Oligonucleotide for detection of SNP TSC0062884
gtagtaatgttta

SEQ ID NO: 258656 - DNA, 13 bp, Artificial Sequence
  Oligonucleotide for detection of SNP TSC0062884
taaacattactac

SEQ ID NO: 258657 - DNA, 13 bp, Artificial Sequence
  Oligonucleotide for detection of SNP TSC0062884
gtagtagtgttta

SEQ ID NO: 258658 - DNA, 13 bp, Artificial Sequence
  Oligonucleotide for detection of SNP TSC0062884
taaacactactac

SEQ ID NO: 258659 - DNA, 13 bp, Artificial Sequence
  Oligonucleotide for detection of SNP TSC0005754
ttatatgtgaatt

SEQ ID NO: 258660 - DNA, 13 bp, Artificial Sequence
  Oligonucleotide for detection of SNP TSC0005754
aattcacatataa

SEQ ID NO: 258661 - DNA, 13 bp, Artificial Sequence
  Oligonucleotide for detection of SNP TSC0005754
ttatacgtgaatt

SEQ ID NO: 258662 - DNA, 13 bp, Artificial Sequence
  Oligonucleotide for detection of SNP TSC0005754
aattcacgtataa

SEQ ID NO: 258663 - DNA, 13 bp, Artificial Sequence
  Oligonucleotide for detection of SNP TSC0005754
aatttaagtgtgg

SEQ ID NO: 258664 - DNA, 13 bp, Artificial Sequence
  Oligonucleotide for detection of SNP TSC0005754
ccacacttaaatt

SEQ ID NO: 258665 - DNA, 13 bp, Artificial Sequence
  Oligonucleotide for detection of SNP TSC0005754
aatttatgtgtgg

SEQ ID NO: 258666 - DNA, 13 bp, Artificial Sequence
  Oligonucleotide for detection of SNP TSC0005754
ccacacataaatt

SEQ ID NO: 258667 - DNA, 13 bp, Artificial Sequence
  Oligonucleotide for detection of SNP TSC0005754
aatttacgtgtgg

SEQ ID NO: 258668 - DNA, 13 bp, Artificial Sequence
  Oligonucleotide for detection of SNP TSC0005754
ccacacgtaaatt

SEQ ID NO: 258669 - DNA, 13 bp, Artificial Sequence
  Oligonucleotide for detection of SNP TSC0005756
ggtaggtgtttgt

SEQ ID NO: 258670 - DNA, 13 bp, Artificial Sequence
  Oligonucleotide for detection of SNP TSC0005756
acaaacacctacc

SEQ ID NO: 258671 - DNA, 13 bp, Artificial Sequence
  Oligonucleotide for detection of SNP TSC0005756
ggtaggcgtttgt

SEQ ID NO: 258672 - DNA, 13 bp, Artificial Sequence
  Oligonucleotide for detection of SNP TSC0005756
acaaacgcctacc

SEQ ID NO: 258673 - DNA, 13 bp, Artificial Sequence
  Oligonucleotide for detection of SNP TSC0005756
ataagtgtttgty

SEQ ID NO: 258674 - DNA, 13 bp, Artificial Sequence
  Oligonucleotide for detection of SNP TSC0005756
racaaacacttat

SEQ ID NO: 258675 - DNA, 13 bp, Artificial Sequence
  Oligonucleotide for detection of SNP TSC0005756
ataagtatttgty

SEQ ID NO: 258676 - DNA, 13 bp, Artificial Sequence
  Oligonucleotide for detection of SNP TSC0005756
racaaatacttat

SEQ ID NO: 258677 - DNA, 13 bp, Artificial Sequence
  Oligonucleotide for detection of SNP TSC0005756
ataagcgtttgty

SEQ ID NO: 258678 - DNA, 13 bp, Artificial Sequence
  Oligonucleotide for detection of SNP TSC0005756
racaaacgcttat

SEQ ID NO: 258679 - DNA, 13 bp, Artificial Sequence
  Oligonucleotide for detection of SNP TSC0005757
cgaggtaggcgga

SEQ ID NO: 258680 - DNA, 13 bp, Artificial Sequence
  Oligonucleotide for detection of SNP TSC0005757
tccgcctacctcg

SEQ ID NO: 258681 - DNA, 13 bp, Artificial Sequence
  Oligonucleotide for detection of SNP TSC0005757
cgaggtgggcgga

SEQ ID NO: 258682 - DNA, 13 bp, Artificial Sequence
  Oligonucleotide for detection of SNP TSC0005757
tccgcccacctcg

SEQ ID NO: 258683 - DNA, 13 bp, Artificial Sequence
  Oligonucleotide for detection of SNP TSC0005757
cgaggcgggcgga

SEQ ID NO: 258684 - DNA, 13 bp, Artificial Sequence
  Oligonucleotide for detection of SNP TSC0005757
tccgcccgcctcg

SEQ ID NO: 258685 - DNA, 13 bp, Artificial Sequence
  Oligonucleotide for detection of SNP TSC0005757
ttcgtttgttttg

SEQ ID NO: 258686 - DNA, 13 bp, Artificial Sequence
  Oligonucleotide for detection of SNP TSC0005757
caaaacaaacgaa

SEQ ID NO: 258687 - DNA, 13 bp, Artificial Sequence
  Oligonucleotide for detection of SNP TSC0005757
ttcgtttgtttcg

SEQ ID NO: 258688 - DNA, 13 bp, Artificial Sequence
  Oligonucleotide for detection of SNP TSC0005757
cgaaacaaacgaa

SEQ ID NO: 258689 - DNA, 13 bp, Artificial Sequence
  Oligonucleotide for detection of SNP TSC0005757
ttcgttcgttttg

SEQ ID NO: 258690 - DNA, 13 bp, Artificial Sequence
  Oligonucleotide for detection of SNP TSC0005757
caaaacgaacgaa

SEQ ID NO: 258691 - DNA, 13 bp, Artificial Sequence
  Oligonucleotide for detection of SNP TSC0005757
ttcgttcgtttcg

SEQ ID NO: 258692 - DNA, 13 bp, Artificial Sequence
  Oligonucleotide for detection of SNP TSC0005757
cgaaacgaacgaa

SEQ ID NO: 258693 - DNA, 13 bp, Artificial Sequence
  Oligonucleotide for detection of SNP TSC0005882
agtttttggtaat

SEQ ID NO: 258694 - DNA, 13 bp, Artificial Sequence
  Oligonucleotide for detection of SNP TSC0005882
attaccaaaaact

SEQ ID NO: 258695 - DNA, 13 bp, Artificial Sequence
  Oligonucleotide for detection of SNP TSC0005882
agttttgggtaat

SEQ ID NO: 258696 - DNA, 13 bp, Artificial Sequence
  Oligonucleotide for detection of SNP TSC0005882
attacccaaaact

SEQ ID NO: 258697 - DNA, 13 bp, Artificial Sequence
  Oligonucleotide for detection of SNP TSC0005882
agtttcgggtaat

SEQ ID NO: 258698 - DNA, 13 bp, Artificial Sequence
  Oligonucleotide for detection of SNP TSC0005882
attacccgaaact

SEQ ID NO: 258699 - DNA, 13 bp, Artificial Sequence
  Oligonucleotide for detection of SNP TSC0005882
attattagagatt

SEQ ID NO: 258700 - DNA, 13 bp, Artificial Sequence
  Oligonucleotide for detection of SNP TSC0005882
aatctctaataat

SEQ ID NO: 258701 - DNA, 13 bp, Artificial Sequence
  Oligonucleotide for detection of SNP TSC0005882
attatttgagatt

SEQ ID NO: 258702 - DNA, 13 bp, Artificial Sequence
  Oligonucleotide for detection of SNP TSC0005882
aatctcaaataat

SEQ ID NO: 258703 - DNA, 13 bp, Artificial Sequence
  Oligonucleotide for detection of SNP TSC0005882
attattcgagatt

SEQ ID NO: 258704 - DNA, 13 bp, Artificial Sequence
  Oligonucleotide for detection of SNP TSC0005882
aatctcgaataat

SEQ ID NO: 258705 - DNA, 13 bp, Artificial Sequence
  Oligonucleotide for detection of SNP TSC0062887
agaattagagttt

SEQ ID NO: 258706 - DNA, 13 bp, Artificial Sequence
  Oligonucleotide for detection of SNP TSC0062887
aaactctaattct

SEQ ID NO: 258707 - DNA, 13 bp, Artificial Sequence
  Oligonucleotide for detection of SNP TSC0062887
agaattggagttt

SEQ ID NO: 258708 - DNA, 13 bp, Artificial Sequence
  Oligonucleotide for detection of SNP TSC0062887
aaactccaattct

SEQ ID NO: 258709 - DNA, 13 bp, Artificial Sequence
  Oligonucleotide for detection of SNP TSC0062887
agaatcggagttt

SEQ ID NO: 258710 - DNA, 13 bp, Artificial Sequence
  Oligonucleotide for detection of SNP TSC0062887
aaactccgattct

SEQ ID NO: 258711 - DNA, 13 bp, Artificial Sequence
  Oligonucleotide for detection of SNP TSC0062888
tttttaaaatatg

SEQ ID NO: 258712 - DNA, 13 bp, Artificial Sequence
  Oligonucleotide for detection of SNP TSC0062888
catattttaaaaa

SEQ ID NO: 258713 - DNA, 13 bp, Artificial Sequence
  Oligonucleotide for detection of SNP TSC0062889
tgatattggtgat

SEQ ID NO: 258714 - DNA, 13 bp, Artificial Sequence
  Oligonucleotide for detection of SNP TSC0062889
atcaccaatatca

SEQ ID NO: 258715 - DNA, 13 bp, Artificial Sequence
  Oligonucleotide for detection of SNP TSC0062889
tgatatcggtgat

SEQ ID NO: 258716 - DNA, 13 bp, Artificial Sequence
  Oligonucleotide for detection of SNP TSC0062889
atcaccgatatca

SEQ ID NO: 258717 - DNA, 13 bp, Artificial Sequence
  Oligonucleotide for detection of SNP TSC0062889
attattggtgtta

SEQ ID NO: 258718 - DNA, 13 bp, Artificial Sequence
  Oligonucleotide for detection of SNP TSC0062889
taacaccaataat

SEQ ID NO: 258719 - DNA, 13 bp, Artificial Sequence
  Oligonucleotide for detection of SNP TSC0062889
attattagtgtta

SEQ ID NO: 258720 - DNA, 13 bp, Artificial Sequence
  Oligonucleotide for detection of SNP TSC0062889
taacactaataat

SEQ ID NO: 258721 - DNA, 13 bp, Artificial Sequence
  Oligonucleotide for detection of SNP TSC0062889
attatcggtgtta

SEQ ID NO: 258722 - DNA, 13 bp, Artificial Sequence
  Oligonucleotide for detection of SNP TSC0062889
taacaccgataat

SEQ ID NO: 258723 - DNA, 13 bp, Artificial Sequence
  Oligonucleotide for detection of SNP TSC0062890
gataatagtgaty

SEQ ID NO: 258724 - DNA, 13 bp, Artificial Sequence
  Oligonucleotide for detection of SNP TSC0062890
ratcactattatc

SEQ ID NO: 258725 - DNA, 13 bp, Artificial Sequence
  Oligonucleotide for detection of SNP TSC0062890
gataatggtgaty

SEQ ID NO: 258726 - DNA, 13 bp, Artificial Sequence
  Oligonucleotide for detection of SNP TSC0062890
ratcaccattatc

SEQ ID NO: 258727 - DNA, 13 bp, Artificial Sequence
  Oligonucleotide for detection of SNP TSC0062890
gataacggtgaty

SEQ ID NO: 258728 - DNA, 13 bp, Artificial Sequence
  Oligonucleotide for detection of SNP TSC0062890
ratcaccgttatc

SEQ ID NO: 258729 - DNA, 13 bp, Artificial Sequence
  Oligonucleotide for detection of SNP TSC0062890
gattattgttaty

SEQ ID NO: 258730 - DNA, 13 bp, Artificial Sequence
  Oligonucleotide for detection of SNP TSC0062890
rataacaataatc

SEQ ID NO: 258731 - DNA, 13 bp, Artificial Sequence
  Oligonucleotide for detection of SNP TSC0062890
gattatcgttaty

SEQ ID NO: 258732 - DNA, 13 bp, Artificial Sequence
  Oligonucleotide for detection of SNP TSC0062890
rataacgataatc

SEQ ID NO: 258733 - DNA, 13 bp, Artificial Sequence
  Oligonucleotide for detection of SNP TSC0004863
tattatgataggy

SEQ ID NO: 258734 - DNA, 13 bp, Artificial Sequence
  Oligonucleotide for detection of SNP TSC0004863
rcctatcataata

SEQ ID NO: 258735 - DNA, 13 bp, Artificial Sequence
  Oligonucleotide for detection of SNP TSC0004863
tattataataggy

SEQ ID NO: 258736 - DNA, 13 bp, Artificial Sequence
  Oligonucleotide for detection of SNP TSC0004863
rcctattataata

SEQ ID NO: 258737 - DNA, 13 bp, Artificial Sequence
  Oligonucleotide for detection of SNP TSC0006257
ttatttaattttg

SEQ ID NO: 258738 - DNA, 13 bp, Artificial Sequence
  Oligonucleotide for detection of SNP TSC0006257
caaaattaaataa

SEQ ID NO: 258739 - DNA, 13 bp, Artificial Sequence
  Oligonucleotide for detection of SNP TSC0006257
ttatttgattttg

SEQ ID NO: 258740 - DNA, 13 bp, Artificial Sequence
  Oligonucleotide for detection of SNP TSC0006257
caaaatcaaataa

SEQ ID NO: 258741 - DNA, 13 bp, Artificial Sequence
  Oligonucleotide for detection of SNP TSC0006257
ttattcgattttg

SEQ ID NO: 258742 - DNA, 13 bp, Artificial Sequence
  Oligonucleotide for detection of SNP TSC0006257
caaaatcgaataa

SEQ ID NO: 258743 - DNA, 13 bp, Artificial Sequence
  Oligonucleotide for detection of SNP TSC0006257
tagagttgagtag

SEQ ID NO: 258744 - DNA, 13 bp, Artificial Sequence
  Oligonucleotide for detection of SNP TSC0006257
ctactcaactcta

SEQ ID NO: 258745 - DNA, 13 bp, Artificial Sequence
  Oligonucleotide for detection of SNP TSC0006257
tagagtcgagtag

SEQ ID NO: 258746 - DNA, 13 bp, Artificial Sequence
  Oligonucleotide for detection of SNP TSC0006257
ctactcgactcta

SEQ ID NO: 258747 - DNA, 13 bp, Artificial Sequence
  Oligonucleotide for detection of SNP TSC0062892
tattataaatatt

SEQ ID NO: 258748 - DNA, 13 bp, Artificial Sequence
  Oligonucleotide for detection of SNP TSC0062892
aatatttataata

SEQ ID NO: 258749 - DNA, 13 bp, Artificial Sequence
  Oligonucleotide for detection of SNP TSC0062892
tattatgaatatt

SEQ ID NO: 258750 - DNA, 13 bp, Artificial Sequence
  Oligonucleotide for detection of SNP TSC0062892
aatattcataata

SEQ ID NO: 258751 - DNA, 13 bp, Artificial Sequence
  Oligonucleotide for detection of SNP TSC0062892
tattacgaatatt

SEQ ID NO: 258752 - DNA, 13 bp, Artificial Sequence
  Oligonucleotide for detection of SNP TSC0062892
aatattcgtaata

SEQ ID NO: 258753 - DNA, 13 bp, Artificial Sequence
  Oligonucleotide for detection of SNP TSC0062892
agtgtttgtggta

SEQ ID NO: 258754 - DNA, 13 bp, Artificial Sequence
  Oligonucleotide for detection of SNP TSC0062892
taccacaaacact

SEQ ID NO: 258755 - DNA, 13 bp, Artificial Sequence
  Oligonucleotide for detection of SNP TSC0062892
agtgttcgtggta

SEQ ID NO: 258756 - DNA, 13 bp, Artificial Sequence
  Oligonucleotide for detection of SNP TSC0062892
taccacgaacact

SEQ ID NO: 258757 - DNA, 13 bp, Artificial Sequence
  Oligonucleotide for detection of SNP TSC0062893
ttgataggtttty

SEQ ID NO: 258758 - DNA, 13 bp, Artificial Sequence
  Oligonucleotide for detection of SNP TSC0062893
raaaacctatcaa

SEQ ID NO: 258759 - DNA, 13 bp, Artificial Sequence
  Oligonucleotide for detection of SNP TSC0062893
ttgataagtttty

SEQ ID NO: 258760 - DNA, 13 bp, Artificial Sequence
  Oligonucleotide for detection of SNP TSC0062893
raaaacttatcaa

SEQ ID NO: 258761 - DNA, 13 bp, Artificial Sequence
  Oligonucleotide for detection of SNP TSC0008173
tggaaggtaatta

SEQ ID NO: 258762 - DNA, 13 bp, Artificial Sequence
  Oligonucleotide for detection of SNP TSC0008173
taattaccttcca

SEQ ID NO: 258763 - DNA, 13 bp, Artificial Sequence
  Oligonucleotide for detection of SNP TSC0008173
tggaagataatta

SEQ ID NO: 258764 - DNA, 13 bp, Artificial Sequence
  Oligonucleotide for detection of SNP TSC0008173
taattatcttcca

SEQ ID NO: 258765 - DNA, 13 bp, Artificial Sequence
  Oligonucleotide for detection of SNP TSC0005762
tgaatgtgggagg

SEQ ID NO: 258766 - DNA, 13 bp, Artificial Sequence
  Oligonucleotide for detection of SNP TSC0005762
cctcccacattca

SEQ ID NO: 258767 - DNA, 13 bp, Artificial Sequence
  Oligonucleotide for detection of SNP TSC0005762
tgaatgcgggagg

SEQ ID NO: 258768 - DNA, 13 bp, Artificial Sequence
  Oligonucleotide for detection of SNP TSC0005762
cctcccgcattca

SEQ ID NO: 258769 - DNA, 13 bp, Artificial Sequence
  Oligonucleotide for detection of SNP TSC0005762
ttttttatattta

SEQ ID NO: 258770 - DNA, 13 bp, Artificial Sequence
  Oligonucleotide for detection of SNP TSC0005762
taaatataaaaaa

SEQ ID NO: 258771 - DNA, 13 bp, Artificial Sequence
  Oligonucleotide for detection of SNP TSC0062895
ttaaagattatay

SEQ ID NO: 258772 - DNA, 13 bp, Artificial Sequence
  Oligonucleotide for detection of SNP TSC0062895
rtataatctttaa

SEQ ID NO: 258773 - DNA, 13 bp, Artificial Sequence
  Oligonucleotide for detection of SNP TSC0062895
ttaaagtttatay

SEQ ID NO: 258774 - DNA, 13 bp, Artificial Sequence
  Oligonucleotide for detection of SNP TSC0062895
rtataaactttaa

SEQ ID NO: 258775 - DNA, 13 bp, Artificial Sequence
  Oligonucleotide for detection of SNP TSC0062895
gtgtgatttttga

SEQ ID NO: 258776 - DNA, 13 bp, Artificial Sequence
  Oligonucleotide for detection of SNP TSC0062895
tcaaaaatcacac

SEQ ID NO: 258777 - DNA, 13 bp, Artificial Sequence
  Oligonucleotide for detection of SNP TSC0062895
gtgtgaattttga

SEQ ID NO: 258778 - DNA, 13 bp, Artificial Sequence
  Oligonucleotide for detection of SNP TSC0062895
tcaaaattcacac

SEQ ID NO: 258779 - DNA, 13 bp, Artificial Sequence
  Oligonucleotide for detection of SNP TSC0062896
taaggtagatatg

SEQ ID NO: 258780 - DNA, 13 bp, Artificial Sequence
  Oligonucleotide for detection of SNP TSC0062896
catatctacctta

SEQ ID NO: 258781 - DNA, 13 bp, Artificial Sequence
  Oligonucleotide for detection of SNP TSC0062896
taaggtggatatg

SEQ ID NO: 258782 - DNA, 13 bp, Artificial Sequence
  Oligonucleotide for detection of SNP TSC0062896
catatccacctta

SEQ ID NO: 258783 - DNA, 13 bp, Artificial Sequence
  Oligonucleotide for detection of SNP TSC0062896
taaggcggatatg

SEQ ID NO: 258784 - DNA, 13 bp, Artificial Sequence
  Oligonucleotide for detection of SNP TSC0062896
catatccgcctta

SEQ ID NO: 258785 - DNA, 13 bp, Artificial Sequence
  Oligonucleotide for detection of SNP TSC0007044
atgtatagaaatt

SEQ ID NO: 258786 - DNA, 13 bp, Artificial Sequence
  Oligonucleotide for detection of SNP TSC0007044
aatttctatacat

SEQ ID NO: 258787 - DNA, 13 bp, Artificial Sequence
  Oligonucleotide for detection of SNP TSC0007044
atgtatggaaatt

SEQ ID NO: 258788 - DNA, 13 bp, Artificial Sequence
  Oligonucleotide for detection of SNP TSC0007044
aatttccatacat

SEQ ID NO: 258789 - DNA, 13 bp, Artificial Sequence
  Oligonucleotide for detection of SNP TSC0062898
aatttgagaaaat

SEQ ID NO: 258790 - DNA, 13 bp, Artificial Sequence
  Oligonucleotide for detection of SNP TSC0062898
attttctcaaatt

SEQ ID NO: 258791 - DNA, 13 bp, Artificial Sequence
  Oligonucleotide for detection of SNP TSC0062898
aatttgggaaaat

SEQ ID NO: 258792 - DNA, 13 bp, Artificial Sequence
  Oligonucleotide for detection of SNP TSC0062898
attttcccaaatt

SEQ ID NO: 258793 - DNA, 13 bp, Artificial Sequence
  Oligonucleotide for detection of SNP TSC0062899
tatagatttaagg

SEQ ID NO: 258794 - DNA, 13 bp, Artificial Sequence
  Oligonucleotide for detection of SNP TSC0062899
ccttaaatctata

SEQ ID NO: 258795 - DNA, 13 bp, Artificial Sequence
  Oligonucleotide for detection of SNP TSC0062899
tatagaattaagg

SEQ ID NO: 258796 - DNA, 13 bp, Artificial Sequence
  Oligonucleotide for detection of SNP TSC0062899
ccttaattctata

SEQ ID NO: 258797 - DNA, 13 bp, Artificial Sequence
  Oligonucleotide for detection of SNP TSC0062902
atttggattttgg

SEQ ID NO: 258798 - DNA, 13 bp, Artificial Sequence
  Oligonucleotide for detection of SNP TSC0062902
ccaaaatccaaat

SEQ ID NO: 258799 - DNA, 13 bp, Artificial Sequence
  Oligonucleotide for detection of SNP TSC0062902
atttggtttttgg

SEQ ID NO: 258800 - DNA, 13 bp, Artificial Sequence
  Oligonucleotide for detection of SNP TSC0062902
ccaaaaaccaaat

SEQ ID NO: 258801 - DNA, 13 bp, Artificial Sequence
  Oligonucleotide for detection of SNP TSC0062902
ttaagatttaagt

SEQ ID NO: 258802 - DNA, 13 bp, Artificial Sequence
  Oligonucleotide for detection of SNP TSC0062902
acttaaatcttaa

SEQ ID NO: 258803 - DNA, 13 bp, Artificial Sequence
  Oligonucleotide for detection of SNP TSC0062902
ttaagaattaagt

SEQ ID NO: 258804 - DNA, 13 bp, Artificial Sequence
  Oligonucleotide for detection of SNP TSC0062902
acttaattcttaa

SEQ ID NO: 258805 - DNA, 13 bp, Artificial Sequence
  Oligonucleotide for detection of SNP TSC0062903
aaagatgagttta

SEQ ID NO: 258806 - DNA, 13 bp, Artificial Sequence
  Oligonucleotide for detection of SNP TSC0062903
taaactcatcttt

SEQ ID NO: 258807 - DNA, 13 bp, Artificial Sequence
  Oligonucleotide for detection of SNP TSC0062903
aaagataagttta

SEQ ID NO: 258808 - DNA, 13 bp, Artificial Sequence
  Oligonucleotide for detection of SNP TSC0062903
taaacttatcttt

SEQ ID NO: 258809 - DNA, 13 bp, Artificial Sequence
  Oligonucleotide for detection of SNP TSC0006732
ttaaaaatatggt

SEQ ID NO: 258810 - DNA, 13 bp, Artificial Sequence
  Oligonucleotide for detection of SNP TSC0006732
accatatttttaa

SEQ ID NO: 258811 - DNA, 13 bp, Artificial Sequence
  Oligonucleotide for detection of SNP TSC0006732
ttaaaagtatggt

SEQ ID NO: 258812 - DNA, 13 bp, Artificial Sequence
  Oligonucleotide for detection of SNP TSC0006732
accatacttttaa

SEQ ID NO: 258813 - DNA, 13 bp, Artificial Sequence
  Oligonucleotide for detection of SNP TSC0010270
gttaagtgtggtg

SEQ ID NO: 258814 - DNA, 13 bp, Artificial Sequence
  Oligonucleotide for detection of SNP TSC0010270
caccacacttaac

SEQ ID NO: 258815 - DNA, 13 bp, Artificial Sequence
  Oligonucleotide for detection of SNP TSC0010270
gttaagcgtggtg

SEQ ID NO: 258816 - DNA, 13 bp, Artificial Sequence
  Oligonucleotide for detection of SNP TSC0010270
caccacgcttaac

SEQ ID NO: 258817 - DNA, 13 bp, Artificial Sequence
  Oligonucleotide for detection of SNP TSC0006271
tgaagttttaaaa

SEQ ID NO: 258818 - DNA, 13 bp, Artificial Sequence
  Oligonucleotide for detection of SNP TSC0006271
ttttaaaacttca

SEQ ID NO: 258819 - DNA, 13 bp, Artificial Sequence
  Oligonucleotide for detection of SNP TSC0006271
tgaagtgttaaaa

SEQ ID NO: 258820 - DNA, 13 bp, Artificial Sequence
  Oligonucleotide for detection of SNP TSC0006271
ttttaacacttca

SEQ ID NO: 258821 - DNA, 13 bp, Artificial Sequence
  Oligonucleotide for detection of SNP TSC0006272
taaaaatttatta

SEQ ID NO: 258822 - DNA, 13 bp, Artificial Sequence
  Oligonucleotide for detection of SNP TSC0006272
taataaattttta

SEQ ID NO: 258823 - DNA, 13 bp, Artificial Sequence
  Oligonucleotide for detection of SNP TSC0006273
atttgaattatta

SEQ ID NO: 258824 - DNA, 13 bp, Artificial Sequence
  Oligonucleotide for detection of SNP TSC0006273
taataattcaaat

SEQ ID NO: 258825 - DNA, 13 bp, Artificial Sequence
  Oligonucleotide for detection of SNP TSC0006273
atttgagttatta

SEQ ID NO: 258826 - DNA, 13 bp, Artificial Sequence
  Oligonucleotide for detection of SNP TSC0006273
taataactcaaat

SEQ ID NO: 258827 - DNA, 13 bp, Artificial Sequence
  Oligonucleotide for detection of SNP TSC0006988
gttttattacgag

SEQ ID NO: 258828 - DNA, 13 bp, Artificial Sequence
  Oligonucleotide for detection of SNP TSC0006988
ctcgtaataaaac

SEQ ID NO: 258829 - DNA, 13 bp, Artificial Sequence
  Oligonucleotide for detection of SNP TSC0006988
gttttagtacgag

SEQ ID NO: 258830 - DNA, 13 bp, Artificial Sequence
  Oligonucleotide for detection of SNP TSC0006988
ctcgtactaaaac

SEQ ID NO: 258831 - DNA, 13 bp, Artificial Sequence
  Oligonucleotide for detection of SNP TSC0006988
tttgtggtagagy

SEQ ID NO: 258832 - DNA, 13 bp, Artificial Sequence
  Oligonucleotide for detection of SNP TSC0006988
rctctaccacaaa

SEQ ID NO: 258833 - DNA, 13 bp, Artificial Sequence
  Oligonucleotide for detection of SNP TSC0006988
tttgtgttagagy

SEQ ID NO: 258834 - DNA, 13 bp, Artificial Sequence
  Oligonucleotide for detection of SNP TSC0006988
rctctaacacaaa

SEQ ID NO: 258835 - DNA, 13 bp, Artificial Sequence
  Oligonucleotide for detection of SNP TSC0006988
ttcgtggtagagy

SEQ ID NO: 258836 - DNA, 13 bp, Artificial Sequence
  Oligonucleotide for detection of SNP TSC0006988
rctctaccacgaa

SEQ ID NO: 258837 - DNA, 13 bp, Artificial Sequence
  Oligonucleotide for detection of SNP TSC0006988
ttcgtgttagagy

SEQ ID NO: 258838 - DNA, 13 bp, Artificial Sequence
  Oligonucleotide for detection of SNP TSC0006988
rctctaacacgaa

SEQ ID NO: 258839 - DNA, 13 bp, Artificial Sequence
  Oligonucleotide for detection of SNP TSC0062906
ggtaaattagagt

SEQ ID NO: 258840 - DNA, 13 bp, Artificial Sequence
  Oligonucleotide for detection of SNP TSC0062906
actctaatttacc

SEQ ID NO: 258841 - DNA, 13 bp, Artificial Sequence
  Oligonucleotide for detection of SNP TSC0062906
ggtaaagtagagt

SEQ ID NO: 258842 - DNA, 13 bp, Artificial Sequence
  Oligonucleotide for detection of SNP TSC0062906
actctactttacc

SEQ ID NO: 258843 - DNA, 13 bp, Artificial Sequence
  Oligonucleotide for detection of SNP TSC0062906
attttagtttaty

SEQ ID NO: 258844 - DNA, 13 bp, Artificial Sequence
  Oligonucleotide for detection of SNP TSC0062906
rataaactaaaat

SEQ ID NO: 258845 - DNA, 13 bp, Artificial Sequence
  Oligonucleotide for detection of SNP TSC0062906
attttattttaty

SEQ ID NO: 258846 - DNA, 13 bp, Artificial Sequence
  Oligonucleotide for detection of SNP TSC0062906
rataaaataaaat

SEQ ID NO: 258847 - DNA, 13 bp, Artificial Sequence
  Oligonucleotide for detection of SNP TSC0062907
tttaattaatttt

SEQ ID NO: 258848 - DNA, 13 bp, Artificial Sequence
  Oligonucleotide for detection of SNP TSC0062907
aaaattaattaaa

SEQ ID NO: 258849 - DNA, 13 bp, Artificial Sequence
  Oligonucleotide for detection of SNP TSC0062907
tttaatgaatttt

SEQ ID NO: 258850 - DNA, 13 bp, Artificial Sequence
  Oligonucleotide for detection of SNP TSC0062907
aaaattcattaaa

SEQ ID NO: 258851 - DNA, 13 bp, Artificial Sequence
  Oligonucleotide for detection of SNP TSC0062907
aaaattagttaag

SEQ ID NO: 258852 - DNA, 13 bp, Artificial Sequence
  Oligonucleotide for detection of SNP TSC0062907
cttaactaatttt

SEQ ID NO: 258853 - DNA, 13 bp, Artificial Sequence
  Oligonucleotide for detection of SNP TSC0062910
tagaatatttttt

SEQ ID NO: 258854 - DNA, 13 bp, Artificial Sequence
  Oligonucleotide for detection of SNP TSC0062910
aaaaaatattcta

SEQ ID NO: 258855 - DNA, 13 bp, Artificial Sequence
  Oligonucleotide for detection of SNP TSC0007199
aagagtataagga

SEQ ID NO: 258856 - DNA, 13 bp, Artificial Sequence
  Oligonucleotide for detection of SNP TSC0007199
tccttatactctt

SEQ ID NO: 258857 - DNA, 13 bp, Artificial Sequence
  Oligonucleotide for detection of SNP TSC0007199
aagagtgtaagga

SEQ ID NO: 258858 - DNA, 13 bp, Artificial Sequence
  Oligonucleotide for detection of SNP TSC0007199
tccttacactctt

SEQ ID NO: 258859 - DNA, 13 bp, Artificial Sequence
  Oligonucleotide for detection of SNP TSC0007199
aagagcgtaagga

SEQ ID NO: 258860 - DNA, 13 bp, Artificial Sequence
  Oligonucleotide for detection of SNP TSC0007199
tccttacgctctt

SEQ ID NO: 258861 - DNA, 13 bp, Artificial Sequence
  Oligonucleotide for detection of SNP TSC0062911
atatattgtaaaa

SEQ ID NO: 258862 - DNA, 13 bp, Artificial Sequence
  Oligonucleotide for detection of SNP TSC0062911
ttttacaatatat

SEQ ID NO: 258863 - DNA, 13 bp, Artificial Sequence
  Oligonucleotide for detection of SNP TSC0062911
atatatggtaaaa

SEQ ID NO: 258864 - DNA, 13 bp, Artificial Sequence
  Oligonucleotide for detection of SNP TSC0062911
ttttaccatatat

SEQ ID NO: 258865 - DNA, 13 bp, Artificial Sequence
  Oligonucleotide for detection of SNP TSC0062912
gttggtattttat

SEQ ID NO: 258866 - DNA, 13 bp, Artificial Sequence
  Oligonucleotide for detection of SNP TSC0062912
ataaaataccaac

SEQ ID NO: 258867 - DNA, 13 bp, Artificial Sequence
  Oligonucleotide for detection of SNP TSC0062912
gttggttttttat

SEQ ID NO: 258868 - DNA, 13 bp, Artificial Sequence
  Oligonucleotide for detection of SNP TSC0062912
ataaaaaaccaac

SEQ ID NO: 258869 - DNA, 13 bp, Artificial Sequence
  Oligonucleotide for detection of SNP TSC0062912
ataagatattaay

SEQ ID NO: 258870 - DNA, 13 bp, Artificial Sequence
  Oligonucleotide for detection of SNP TSC0062912
rttaatatcttat

SEQ ID NO: 258871 - DNA, 13 bp, Artificial Sequence
  Oligonucleotide for detection of SNP TSC0062912
ataagagattaay

SEQ ID NO: 258872 - DNA, 13 bp, Artificial Sequence
  Oligonucleotide for detection of SNP TSC0062912
rttaatctcttat

SEQ ID NO: 258873 - DNA, 13 bp, Artificial Sequence
  Oligonucleotide for detection of SNP TSC0006707
agtattatgttty

SEQ ID NO: 258874 - DNA, 13 bp, Artificial Sequence
  Oligonucleotide for detection of SNP TSC0006707
raaacataatact

SEQ ID NO: 258875 - DNA, 13 bp, Artificial Sequence
  Oligonucleotide for detection of SNP TSC0006707
agtatcgtgttty

SEQ ID NO: 258876 - DNA, 13 bp, Artificial Sequence
  Oligonucleotide for detection of SNP TSC0006707
raaacacgatact

SEQ ID NO: 258877 - DNA, 13 bp, Artificial Sequence
  Oligonucleotide for detection of SNP TSC0006707
gagatatggtatt

SEQ ID NO: 258878 - DNA, 13 bp, Artificial Sequence
  Oligonucleotide for detection of SNP TSC0006707
aataccatatctc

SEQ ID NO: 258879 - DNA, 13 bp, Artificial Sequence
  Oligonucleotide for detection of SNP TSC0006707
gagatacggtatt

SEQ ID NO: 258880 - DNA, 13 bp, Artificial Sequence
  Oligonucleotide for detection of SNP TSC0006707
aataccgtatctc

SEQ ID NO: 258881 - DNA, 13 bp, Artificial Sequence
  Oligonucleotide for detection of SNP TSC0062914
ttagtttggcgtg

SEQ ID NO: 258882 - DNA, 13 bp, Artificial Sequence
  Oligonucleotide for detection of SNP TSC0062914
cacgccaaactaa

SEQ ID NO: 258883 - DNA, 13 bp, Artificial Sequence
  Oligonucleotide for detection of SNP TSC0062914
tatgttaggttaa

SEQ ID NO: 258884 - DNA, 13 bp, Artificial Sequence
  Oligonucleotide for detection of SNP TSC0062914
ttaacctaacata

SEQ ID NO: 258885 - DNA, 13 bp, Artificial Sequence
  Oligonucleotide for detection of SNP TSC0062914
tacgttaggttaa

SEQ ID NO: 258886 - DNA, 13 bp, Artificial Sequence
  Oligonucleotide for detection of SNP TSC0062914
ttaacctaacgta

SEQ ID NO: 258887 - DNA, 13 bp, Artificial Sequence
  Oligonucleotide for detection of SNP TSC0062916
ggggaggttttay

SEQ ID NO: 258888 - DNA, 13 bp, Artificial Sequence
  Oligonucleotide for detection of SNP TSC0062916
rtaaaacctcccc

SEQ ID NO: 258889 - DNA, 13 bp, Artificial Sequence
  Oligonucleotide for detection of SNP TSC0062916
ggggagattttay

SEQ ID NO: 258890 - DNA, 13 bp, Artificial Sequence
  Oligonucleotide for detection of SNP TSC0062916
rtaaaatctcccc

SEQ ID NO: 258891 - DNA, 13 bp, Artificial Sequence
  Oligonucleotide for detection of SNP TSC0008610
aataaggaatatt

SEQ ID NO: 258892 - DNA, 13 bp, Artificial Sequence
  Oligonucleotide for detection of SNP TSC0008610
aatattccttatt

SEQ ID NO: 258893 - DNA, 13 bp, Artificial Sequence
  Oligonucleotide for detection of SNP TSC0008610
aataagaaatatt

SEQ ID NO: 258894 - DNA, 13 bp, Artificial Sequence
  Oligonucleotide for detection of SNP TSC0008610
aatatttcttatt

SEQ ID NO: 258895 - DNA, 13 bp, Artificial Sequence
  Oligonucleotide for detection of SNP TSC0062917
taggtaatttagt

SEQ ID NO: 258896 - DNA, 13 bp, Artificial Sequence
  Oligonucleotide for detection of SNP TSC0062917
actaaattaccta

SEQ ID NO: 258897 - DNA, 13 bp, Artificial Sequence
  Oligonucleotide for detection of SNP TSC0062917
taggtattttagt

SEQ ID NO: 258898 - DNA, 13 bp, Artificial Sequence
  Oligonucleotide for detection of SNP TSC0062917
actaaaataccta

SEQ ID NO: 258899 - DNA, 13 bp, Artificial Sequence
  Oligonucleotide for detection of SNP TSC0062917
attaaattatttg

SEQ ID NO: 258900 - DNA, 13 bp, Artificial Sequence
  Oligonucleotide for detection of SNP TSC0062917
caaataatttaat

SEQ ID NO: 258901 - DNA, 13 bp, Artificial Sequence
  Oligonucleotide for detection of SNP TSC0062918
atatagttattty

SEQ ID NO: 258902 - DNA, 13 bp, Artificial Sequence
  Oligonucleotide for detection of SNP TSC0062918
raaataactatat

SEQ ID NO: 258903 - DNA, 13 bp, Artificial Sequence
  Oligonucleotide for detection of SNP TSC0062918
ggaatagttatgt

SEQ ID NO: 258904 - DNA, 13 bp, Artificial Sequence
  Oligonucleotide for detection of SNP TSC0062918
acataactattcc

SEQ ID NO: 258905 - DNA, 13 bp, Artificial Sequence
  Oligonucleotide for detection of SNP TSC0062918
ggaatatttatgt

SEQ ID NO: 258906 - DNA, 13 bp, Artificial Sequence
  Oligonucleotide for detection of SNP TSC0062918
acataaatattcc

SEQ ID NO: 258907 - DNA, 13 bp, Artificial Sequence
  Oligonucleotide for detection of SNP TSC0000654
atatttataatag

SEQ ID NO: 258908 - DNA, 13 bp, Artificial Sequence
  Oligonucleotide for detection of SNP TSC0000654
ctattataaatat

SEQ ID NO: 258909 - DNA, 13 bp, Artificial Sequence
  Oligonucleotide for detection of SNP TSC0000654
atatttgtaatag

SEQ ID NO: 258910 - DNA, 13 bp, Artificial Sequence
  Oligonucleotide for detection of SNP TSC0000654
ctattacaaatat

SEQ ID NO: 258911 - DNA, 13 bp, Artificial Sequence
  Oligonucleotide for detection of SNP TSC0000654
atattcgtaatag

SEQ ID NO: 258912 - DNA, 13 bp, Artificial Sequence
  Oligonucleotide for detection of SNP TSC0000654
ctattacgaatat

SEQ ID NO: 258913 - DNA, 13 bp, Artificial Sequence
  Oligonucleotide for detection of SNP TSC0000654
ttgttatgaatat

SEQ ID NO: 258914 - DNA, 13 bp, Artificial Sequence
  Oligonucleotide for detection of SNP TSC0000654
atattcataacaa

SEQ ID NO: 258915 - DNA, 13 bp, Artificial Sequence
  Oligonucleotide for detection of SNP TSC0000654
ttgttacgaatat

SEQ ID NO: 258916 - DNA, 13 bp, Artificial Sequence
  Oligonucleotide for detection of SNP TSC0000654
atattcgtaacaa

SEQ ID NO: 258917 - DNA, 13 bp, Artificial Sequence
  Oligonucleotide for detection of SNP TSC0062924
gtattagttttay

SEQ ID NO: 258918 - DNA, 13 bp, Artificial Sequence
  Oligonucleotide for detection of SNP TSC0062924
rtaaaactaatac

SEQ ID NO: 258919 - DNA, 13 bp, Artificial Sequence
  Oligonucleotide for detection of SNP TSC0062924
gtattaattttay

SEQ ID NO: 258920 - DNA, 13 bp, Artificial Sequence
  Oligonucleotide for detection of SNP TSC0062924
rtaaaattaatac

SEQ ID NO: 258921 - DNA, 13 bp, Artificial Sequence
  Oligonucleotide for detection of SNP TSC0006351
atgttaatattgg

SEQ ID NO: 258922 - DNA, 13 bp, Artificial Sequence
  Oligonucleotide for detection of SNP TSC0006351
ccaatattaacat

SEQ ID NO: 258923 - DNA, 13 bp, Artificial Sequence
  Oligonucleotide for detection of SNP TSC0006351
atgttagtattgg

SEQ ID NO: 258924 - DNA, 13 bp, Artificial Sequence
  Oligonucleotide for detection of SNP TSC0006351
ccaatactaacat

SEQ ID NO: 258925 - DNA, 13 bp, Artificial Sequence
  Oligonucleotide for detection of SNP TSC0006351
atgttaatatcgg

SEQ ID NO: 258926 - DNA, 13 bp, Artificial Sequence
  Oligonucleotide for detection of SNP TSC0006351
ccgatattaacat

SEQ ID NO: 258927 - DNA, 13 bp, Artificial Sequence
  Oligonucleotide for detection of SNP TSC0006351
atgttagtatcgg

SEQ ID NO: 258928 - DNA, 13 bp, Artificial Sequence
  Oligonucleotide for detection of SNP TSC0006351
ccgatactaacat

SEQ ID NO: 258929 - DNA, 13 bp, Artificial Sequence
  Oligonucleotide for detection of SNP TSC0062929
tttttaagattay

SEQ ID NO: 258930 - DNA, 13 bp, Artificial Sequence
  Oligonucleotide for detection of SNP TSC0062929
rtaatcttaaaaa

SEQ ID NO: 258931 - DNA, 13 bp, Artificial Sequence
  Oligonucleotide for detection of SNP TSC0062929
tttttaggattay

SEQ ID NO: 258932 - DNA, 13 bp, Artificial Sequence
  Oligonucleotide for detection of SNP TSC0062929
rtaatcctaaaaa

SEQ ID NO: 258933 - DNA, 13 bp, Artificial Sequence
  Oligonucleotide for detection of SNP TSC0062930
taagtatatttat

SEQ ID NO: 258934 - DNA, 13 bp, Artificial Sequence
  Oligonucleotide for detection of SNP TSC0062930
ataaatatactta

SEQ ID NO: 258935 - DNA, 13 bp, Artificial Sequence
  Oligonucleotide for detection of SNP TSC0062930
taagtagatttat

SEQ ID NO: 258936 - DNA, 13 bp, Artificial Sequence
  Oligonucleotide for detection of SNP TSC0062930
ataaatctactta

SEQ ID NO: 258937 - DNA, 13 bp, Artificial Sequence
  Oligonucleotide for detection of SNP TSC0062930
ataagtatattta

SEQ ID NO: 258938 - DNA, 13 bp, Artificial Sequence
  Oligonucleotide for detection of SNP TSC0062930
taaatatacttat

SEQ ID NO: 258939 - DNA, 13 bp, Artificial Sequence
  Oligonucleotide for detection of SNP TSC0062930
ataagtttattta

SEQ ID NO: 258940 - DNA, 13 bp, Artificial Sequence
  Oligonucleotide for detection of SNP TSC0062930
taaataaacttat

SEQ ID NO: 258941 - DNA, 13 bp, Artificial Sequence
  Oligonucleotide for detection of SNP TSC0062931
gaggagtgaaggy

SEQ ID NO: 258942 - DNA, 13 bp, Artificial Sequence
  Oligonucleotide for detection of SNP TSC0062931
rccttcactcctc

SEQ ID NO: 258943 - DNA, 13 bp, Artificial Sequence
  Oligonucleotide for detection of SNP TSC0062931
gaggagagaaggy

SEQ ID NO: 258944 - DNA, 13 bp, Artificial Sequence
  Oligonucleotide for detection of SNP TSC0062931
rccttctctcctc

SEQ ID NO: 258945 - DNA, 13 bp, Artificial Sequence
  Oligonucleotide for detection of SNP TSC0062932
agttggatggtag

SEQ ID NO: 258946 - DNA, 13 bp, Artificial Sequence
  Oligonucleotide for detection of SNP TSC0062932
ctaccatccaact

SEQ ID NO: 258947 - DNA, 13 bp, Artificial Sequence
  Oligonucleotide for detection of SNP TSC0062932
agttgggtggtag

SEQ ID NO: 258948 - DNA, 13 bp, Artificial Sequence
  Oligonucleotide for detection of SNP TSC0062932
ctaccacccaact

SEQ ID NO: 258949 - DNA, 13 bp, Artificial Sequence
  Oligonucleotide for detection of SNP TSC0062932
agttggacggtag

SEQ ID NO: 258950 - DNA, 13 bp, Artificial Sequence
  Oligonucleotide for detection of SNP TSC0062932
ctaccgtccaact

SEQ ID NO: 258951 - DNA, 13 bp, Artificial Sequence
  Oligonucleotide for detection of SNP TSC0062932
agttgggcggtag

SEQ ID NO: 258952 - DNA, 13 bp, Artificial Sequence
  Oligonucleotide for detection of SNP TSC0062932
ctaccgcccaact

SEQ ID NO: 258953 - DNA, 13 bp, Artificial Sequence
  Oligonucleotide for detection of SNP TSC0007284
gatttttggtaaa

SEQ ID NO: 258954 - DNA, 13 bp, Artificial Sequence
  Oligonucleotide for detection of SNP TSC0007284
tttaccaaaaatc

SEQ ID NO: 258955 - DNA, 13 bp, Artificial Sequence
  Oligonucleotide for detection of SNP TSC0007284
gattttcggtaaa

SEQ ID NO: 258956 - DNA, 13 bp, Artificial Sequence
  Oligonucleotide for detection of SNP TSC0007284
tttaccgaaaatc

SEQ ID NO: 258957 - DNA, 13 bp, Artificial Sequence
  Oligonucleotide for detection of SNP TSC0007284
tttgttaaaggty

SEQ ID NO: 258958 - DNA, 13 bp, Artificial Sequence
  Oligonucleotide for detection of SNP TSC0007284
racctttaacaaa

SEQ ID NO: 258959 - DNA, 13 bp, Artificial Sequence
  Oligonucleotide for detection of SNP TSC0007284
tttgtcgaaggty

SEQ ID NO: 258960 - DNA, 13 bp, Artificial Sequence
  Oligonucleotide for detection of SNP TSC0007284
raccttcgacaaa

SEQ ID NO: 258961 - DNA, 13 bp, Artificial Sequence
  Oligonucleotide for detection of SNP TSC0062933
gataggtattgag

SEQ ID NO: 258962 - DNA, 13 bp, Artificial Sequence
  Oligonucleotide for detection of SNP TSC0062933
ctcaatacctatc

SEQ ID NO: 258963 - DNA, 13 bp, Artificial Sequence
  Oligonucleotide for detection of SNP TSC0062933
gatagggattgag

SEQ ID NO: 258964 - DNA, 13 bp, Artificial Sequence
  Oligonucleotide for detection of SNP TSC0062933
ctcaatccctatc

SEQ ID NO: 258965 - DNA, 13 bp, Artificial Sequence
  Oligonucleotide for detection of SNP TSC0062934
gtttaaatgtagy

SEQ ID NO: 258966 - DNA, 13 bp, Artificial Sequence
  Oligonucleotide for detection of SNP TSC0062934
rctacatttaaac

SEQ ID NO: 258967 - DNA, 13 bp, Artificial Sequence
  Oligonucleotide for detection of SNP TSC0062934
gtttaattgtagy

SEQ ID NO: 258968 - DNA, 13 bp, Artificial Sequence
  Oligonucleotide for detection of SNP TSC0062934
rctacaattaaac

SEQ ID NO: 258969 - DNA, 13 bp, Artificial Sequence
  Oligonucleotide for detection of SNP TSC0062934
gttatatttaagy

SEQ ID NO: 258970 - DNA, 13 bp, Artificial Sequence
  Oligonucleotide for detection of SNP TSC0062934
rcttaaatataac

SEQ ID NO: 258971 - DNA, 13 bp, Artificial Sequence
  Oligonucleotide for detection of SNP TSC0062934
gttataattaagy

SEQ ID NO: 258972 - DNA, 13 bp, Artificial Sequence
  Oligonucleotide for detection of SNP TSC0062934
rcttaattataac

SEQ ID NO: 258973 - DNA, 13 bp, Artificial Sequence
  Oligonucleotide for detection of SNP TSC0062935
ttggataatgaat

SEQ ID NO: 258974 - DNA, 13 bp, Artificial Sequence
  Oligonucleotide for detection of SNP TSC0062935
attcattatccaa

SEQ ID NO: 258975 - DNA, 13 bp, Artificial Sequence
  Oligonucleotide for detection of SNP TSC0062935
ttggatgatgaat

SEQ ID NO: 258976 - DNA, 13 bp, Artificial Sequence
  Oligonucleotide for detection of SNP TSC0062935
attcatcatccaa

SEQ ID NO: 258977 - DNA, 13 bp, Artificial Sequence
  Oligonucleotide for detection of SNP TSC0062935
ttggacgatgaat

SEQ ID NO: 258978 - DNA, 13 bp, Artificial Sequence
  Oligonucleotide for detection of SNP TSC0062935
attcatcgtccaa

SEQ ID NO: 258979 - DNA, 13 bp, Artificial Sequence
  Oligonucleotide for detection of SNP TSC0062937
ttattaggagaaa

SEQ ID NO: 258980 - DNA, 13 bp, Artificial Sequence
  Oligonucleotide for detection of SNP TSC0062937
tttctcctaataa

SEQ ID NO: 258981 - DNA, 13 bp, Artificial Sequence
  Oligonucleotide for detection of SNP TSC0007067
gtatattgatggt

SEQ ID NO: 258982 - DNA, 13 bp, Artificial Sequence
  Oligonucleotide for detection of SNP TSC0007067
accatcaatatac

SEQ ID NO: 258983 - DNA, 13 bp, Artificial Sequence
  Oligonucleotide for detection of SNP TSC0007067
gtatatcgatggt

SEQ ID NO: 258984 - DNA, 13 bp, Artificial Sequence
  Oligonucleotide for detection of SNP TSC0007067
accatcgatatac

SEQ ID NO: 258985 - DNA, 13 bp, Artificial Sequence
  Oligonucleotide for detection of SNP TSC0007067
attattgatatgy

SEQ ID NO: 258986 - DNA, 13 bp, Artificial Sequence
  Oligonucleotide for detection of SNP TSC0007067
rcatatcaataat

SEQ ID NO: 258987 - DNA, 13 bp, Artificial Sequence
  Oligonucleotide for detection of SNP TSC0007067
attattaatatgy

SEQ ID NO: 258988 - DNA, 13 bp, Artificial Sequence
  Oligonucleotide for detection of SNP TSC0007067
rcatattaataat

SEQ ID NO: 258989 - DNA, 13 bp, Artificial Sequence
  Oligonucleotide for detection of SNP TSC0007067
attatcgatatgy

SEQ ID NO: 258990 - DNA, 13 bp, Artificial Sequence
  Oligonucleotide for detection of SNP TSC0007067
rcatatcgataat

SEQ ID NO: 258991 - DNA, 13 bp, Artificial Sequence
  Oligonucleotide for detection of SNP TSC0062938
tgggatatattay

SEQ ID NO: 258992 - DNA, 13 bp, Artificial Sequence
  Oligonucleotide for detection of SNP TSC0062938
rtaatatatccca

SEQ ID NO: 258993 - DNA, 13 bp, Artificial Sequence
  Oligonucleotide for detection of SNP TSC0062938
tgggatgtattay

SEQ ID NO: 258994 - DNA, 13 bp, Artificial Sequence
  Oligonucleotide for detection of SNP TSC0062938
rtaatacatccca

SEQ ID NO: 258995 - DNA, 13 bp, Artificial Sequence
  Oligonucleotide for detection of SNP TSC0005083
tgttttaagttag

SEQ ID NO: 258996 - DNA, 13 bp, Artificial Sequence
  Oligonucleotide for detection of SNP TSC0005083
ctaacttaaaaca

SEQ ID NO: 258997 - DNA, 13 bp, Artificial Sequence
  Oligonucleotide for detection of SNP TSC0005083
tgtttttagttag

SEQ ID NO: 258998 - DNA, 13 bp, Artificial Sequence
  Oligonucleotide for detection of SNP TSC0005083
ctaactaaaaaca

SEQ ID NO: 258999 - DNA, 13 bp, Artificial Sequence
  Oligonucleotide for detection of SNP TSC0005083
ttggtttgggata

SEQ ID NO: 259000 - DNA, 13 bp, Artificial Sequence
  Oligonucleotide for detection of SNP TSC0005083
tatcccaaaccaa

SEQ ID NO: 259001 - DNA, 13 bp, Artificial Sequence
  Oligonucleotide for detection of SNP TSC0005083
ttggttggggata

SEQ ID NO: 259002 - DNA, 13 bp, Artificial Sequence
  Oligonucleotide for detection of SNP TSC0005083
tatccccaaccaa

SEQ ID NO: 259003 - DNA, 13 bp, Artificial Sequence
  Oligonucleotide for detection of SNP TSC0062939
aagggggagtaaa

SEQ ID NO: 259004 - DNA, 13 bp, Artificial Sequence
  Oligonucleotide for detection of SNP TSC0062939
tttactccccctt

SEQ ID NO: 259005 - DNA, 13 bp, Artificial Sequence
  Oligonucleotide for detection of SNP TSC0062939
aaggggaagtaaa

SEQ ID NO: 259006 - DNA, 13 bp, Artificial Sequence
  Oligonucleotide for detection of SNP TSC0062939
tttacttcccctt

SEQ ID NO: 259007 - DNA, 13 bp, Artificial Sequence
  Oligonucleotide for detection of SNP TSC0006029
tgtttaatgagga

SEQ ID NO: 259008 - DNA, 13 bp, Artificial Sequence
  Oligonucleotide for detection of SNP TSC0006029
tcctcattaaaca

SEQ ID NO: 259009 - DNA, 13 bp, Artificial Sequence
  Oligonucleotide for detection of SNP TSC0006029
tgtttagtgagga

SEQ ID NO: 259010 - DNA, 13 bp, Artificial Sequence
  Oligonucleotide for detection of SNP TSC0006029
tcctcactaaaca

SEQ ID NO: 259011 - DNA, 13 bp, Artificial Sequence
  Oligonucleotide for detection of SNP TSC0006550
tatgtttagattg

SEQ ID NO: 259012 - DNA, 13 bp, Artificial Sequence
  Oligonucleotide for detection of SNP TSC0006550
caatctaaacata

SEQ ID NO: 259013 - DNA, 13 bp, Artificial Sequence
  Oligonucleotide for detection of SNP TSC0006550
tatgttgagattg

SEQ ID NO: 259014 - DNA, 13 bp, Artificial Sequence
  Oligonucleotide for detection of SNP TSC0006550
caatctcaacata

SEQ ID NO: 259015 - DNA, 13 bp, Artificial Sequence
  Oligonucleotide for detection of SNP TSC0006550
tatgtcgagattg

SEQ ID NO: 259016 - DNA, 13 bp, Artificial Sequence
  Oligonucleotide for detection of SNP TSC0006550
caatctcgacata

SEQ ID NO: 259017 - DNA, 13 bp, Artificial Sequence
  Oligonucleotide for detection of SNP TSC0006550
taatttgggtatg

SEQ ID NO: 259018 - DNA, 13 bp, Artificial Sequence
  Oligonucleotide for detection of SNP TSC0006550
catacccaaatta

SEQ ID NO: 259019 - DNA, 13 bp, Artificial Sequence
  Oligonucleotide for detection of SNP TSC0006550
taattttggtatg

SEQ ID NO: 259020 - DNA, 13 bp, Artificial Sequence
  Oligonucleotide for detection of SNP TSC0006550
cataccaaaatta

SEQ ID NO: 259021 - DNA, 13 bp, Artificial Sequence
  Oligonucleotide for detection of SNP TSC0006550
taatttcggtatg

SEQ ID NO: 259022 - DNA, 13 bp, Artificial Sequence
  Oligonucleotide for detection of SNP TSC0006550
cataccgaaatta

SEQ ID NO: 259023 - DNA, 13 bp, Artificial Sequence
  Oligonucleotide for detection of SNP TSC0062941
tttttatatagty

SEQ ID NO: 259024 - DNA, 13 bp, Artificial Sequence
  Oligonucleotide for detection of SNP TSC0062941
ractatataaaaa

SEQ ID NO: 259025 - DNA, 13 bp, Artificial Sequence
  Oligonucleotide for detection of SNP TSC0062941
tttttagatagty

SEQ ID NO: 259026 - DNA, 13 bp, Artificial Sequence
  Oligonucleotide for detection of SNP TSC0062941
ractatctaaaaa

SEQ ID NO: 259027 - DNA, 13 bp, Artificial Sequence
  Oligonucleotide for detection of SNP TSC0062941
gattatgtggaga

SEQ ID NO: 259028 - DNA, 13 bp, Artificial Sequence
  Oligonucleotide for detection of SNP TSC0062941
tctccacataatc

SEQ ID NO: 259029 - DNA, 13 bp, Artificial Sequence
  Oligonucleotide for detection of SNP TSC0062941
gattatttggaga

SEQ ID NO: 259030 - DNA, 13 bp, Artificial Sequence
  Oligonucleotide for detection of SNP TSC0062941
tctccaaataatc

SEQ ID NO: 259031 - DNA, 13 bp, Artificial Sequence
  Oligonucleotide for detection of SNP TSC0006837
agtttgatggttt

SEQ ID NO: 259032 - DNA, 13 bp, Artificial Sequence
  Oligonucleotide for detection of SNP TSC0006837
aaaccatcaaact

SEQ ID NO: 259033 - DNA, 13 bp, Artificial Sequence
  Oligonucleotide for detection of SNP TSC0006837
agtttggtggttt

SEQ ID NO: 259034 - DNA, 13 bp, Artificial Sequence
  Oligonucleotide for detection of SNP TSC0006837
aaaccaccaaact

SEQ ID NO: 259035 - DNA, 13 bp, Artificial Sequence
  Oligonucleotide for detection of SNP TSC0062945
tattgtattagay

SEQ ID NO: 259036 - DNA, 13 bp, Artificial Sequence
  Oligonucleotide for detection of SNP TSC0062945
rtctaatacaata

SEQ ID NO: 259037 - DNA, 13 bp, Artificial Sequence
  Oligonucleotide for detection of SNP TSC0062945
tattgtgttagay

SEQ ID NO: 259038 - DNA, 13 bp, Artificial Sequence
  Oligonucleotide for detection of SNP TSC0062945
rtctaacacaata

SEQ ID NO: 259039 - DNA, 13 bp, Artificial Sequence
  Oligonucleotide for detection of SNP TSC0005918
taattagaaataa

SEQ ID NO: 259040 - DNA, 13 bp, Artificial Sequence
  Oligonucleotide for detection of SNP TSC0005918
ttatttctaatta

SEQ ID NO: 259041 - DNA, 13 bp, Artificial Sequence
  Oligonucleotide for detection of SNP TSC0005918
taattaaaaataa

SEQ ID NO: 259042 - DNA, 13 bp, Artificial Sequence
  Oligonucleotide for detection of SNP TSC0005918
ttatttttaatta

SEQ ID NO: 259043 - DNA, 13 bp, Artificial Sequence
  Oligonucleotide for detection of SNP TSC0006109
attagaaaatatt

SEQ ID NO: 259044 - DNA, 13 bp, Artificial Sequence
  Oligonucleotide for detection of SNP TSC0006109
aatattttctaat

SEQ ID NO: 259045 - DNA, 13 bp, Artificial Sequence
  Oligonucleotide for detection of SNP TSC0006109
attagagaatatt

SEQ ID NO: 259046 - DNA, 13 bp, Artificial Sequence
  Oligonucleotide for detection of SNP TSC0006109
aatattctctaat

SEQ ID NO: 259047 - DNA, 13 bp, Artificial Sequence
  Oligonucleotide for detection of SNP TSC0006874
aggatatatataa

SEQ ID NO: 259048 - DNA, 13 bp, Artificial Sequence
  Oligonucleotide for detection of SNP TSC0006874
ttatatatatcct

SEQ ID NO: 259049 - DNA, 13 bp, Artificial Sequence
  Oligonucleotide for detection of SNP TSC0006874
aggatagatataa

SEQ ID NO: 259050 - DNA, 13 bp, Artificial Sequence
  Oligonucleotide for detection of SNP TSC0006874
ttatatctatcct

SEQ ID NO: 259051 - DNA, 13 bp, Artificial Sequence
  Oligonucleotide for detection of SNP TSC0007540
tgatatattaaay

SEQ ID NO: 259052 - DNA, 13 bp, Artificial Sequence
  Oligonucleotide for detection of SNP TSC0007540
rtttaatatatca

SEQ ID NO: 259053 - DNA, 13 bp, Artificial Sequence
  Oligonucleotide for detection of SNP TSC0007540
tgatatgttaaay

SEQ ID NO: 259054 - DNA, 13 bp, Artificial Sequence
  Oligonucleotide for detection of SNP TSC0007540
rtttaacatatca

SEQ ID NO: 259055 - DNA, 13 bp, Artificial Sequence
  Oligonucleotide for detection of SNP TSC0007540
tgatacgttaaay

SEQ ID NO: 259056 - DNA, 13 bp, Artificial Sequence
  Oligonucleotide for detection of SNP TSC0007540
rtttaacgtatca

SEQ ID NO: 259057 - DNA, 13 bp, Artificial Sequence
  Oligonucleotide for detection of SNP TSC0007540
gtttaatgtgtta

SEQ ID NO: 259058 - DNA, 13 bp, Artificial Sequence
  Oligonucleotide for detection of SNP TSC0007540
taacacattaaac

SEQ ID NO: 259059 - DNA, 13 bp, Artificial Sequence
  Oligonucleotide for detection of SNP TSC0007540
gtttaacgtgtta

SEQ ID NO: 259060 - DNA, 13 bp, Artificial Sequence
  Oligonucleotide for detection of SNP TSC0007540
taacacgttaaac

SEQ ID NO: 259061 - DNA, 13 bp, Artificial Sequence
  Oligonucleotide for detection of SNP TSC0006213
aaaaaagtaatty

SEQ ID NO: 259062 - DNA, 13 bp, Artificial Sequence
  Oligonucleotide for detection of SNP TSC0006213
raattactttttt

SEQ ID NO: 259063 - DNA, 13 bp, Artificial Sequence
  Oligonucleotide for detection of SNP TSC0062949
ttatagattaagy

SEQ ID NO: 259064 - DNA, 13 bp, Artificial Sequence
  Oligonucleotide for detection of SNP TSC0062949
rcttaatctataa

SEQ ID NO: 259065 - DNA, 13 bp, Artificial Sequence
  Oligonucleotide for detection of SNP TSC0062949
ttataggttaagy

SEQ ID NO: 259066 - DNA, 13 bp, Artificial Sequence
  Oligonucleotide for detection of SNP TSC0062949
rcttaacctataa

SEQ ID NO: 259067 - DNA, 13 bp, Artificial Sequence
  Oligonucleotide for detection of SNP TSC0062950
gatttttgttgty

SEQ ID NO: 259068 - DNA, 13 bp, Artificial Sequence
  Oligonucleotide for detection of SNP TSC0062950
racaacaaaaatc

SEQ ID NO: 259069 - DNA, 13 bp, Artificial Sequence
  Oligonucleotide for detection of SNP TSC0062950
gattttcgttgty

SEQ ID NO: 259070 - DNA, 13 bp, Artificial Sequence
  Oligonucleotide for detection of SNP TSC0062950
racaacgaaaatc

SEQ ID NO: 259071 - DNA, 13 bp, Artificial Sequence
  Oligonucleotide for detection of SNP TSC0062950
gatttttgtcgty

SEQ ID NO: 259072 - DNA, 13 bp, Artificial Sequence
  Oligonucleotide for detection of SNP TSC0062950
racgacaaaaatc

SEQ ID NO: 259073 - DNA, 13 bp, Artificial Sequence
  Oligonucleotide for detection of SNP TSC0062950
gattttcgtcgty

SEQ ID NO: 259074 - DNA, 13 bp, Artificial Sequence
  Oligonucleotide for detection of SNP TSC0062950
racgacgaaaatc

SEQ ID NO: 259075 - DNA, 13 bp, Artificial Sequence
  Oligonucleotide for detection of SNP TSC0062950
gatgatgaaaaty

SEQ ID NO: 259076 - DNA, 13 bp, Artificial Sequence
  Oligonucleotide for detection of SNP TSC0062950
rattttcatcatc

SEQ ID NO: 259077 - DNA, 13 bp, Artificial Sequence
  Oligonucleotide for detection of SNP TSC0062950
gatgataaaaaty

SEQ ID NO: 259078 - DNA, 13 bp, Artificial Sequence
  Oligonucleotide for detection of SNP TSC0062950
ratttttatcatc

SEQ ID NO: 259079 - DNA, 13 bp, Artificial Sequence
  Oligonucleotide for detection of SNP TSC0062950
gacgatgaaaaty

SEQ ID NO: 259080 - DNA, 13 bp, Artificial Sequence
  Oligonucleotide for detection of SNP TSC0062950
rattttcatcgtc

SEQ ID NO: 259081 - DNA, 13 bp, Artificial Sequence
  Oligonucleotide for detection of SNP TSC0062950
gacgataaaaaty

SEQ ID NO: 259082 - DNA, 13 bp, Artificial Sequence
  Oligonucleotide for detection of SNP TSC0062950
ratttttatcgtc

SEQ ID NO: 259083 - DNA, 13 bp, Artificial Sequence
  Oligonucleotide for detection of SNP TSC0062950
gatgacgaaaaty

SEQ ID NO: 259084 - DNA, 13 bp, Artificial Sequence
  Oligonucleotide for detection of SNP TSC0062950
rattttcgtcatc

SEQ ID NO: 259085 - DNA, 13 bp, Artificial Sequence
  Oligonucleotide for detection of SNP TSC0062950
gacgacgaaaaty

SEQ ID NO: 259086 - DNA, 13 bp, Artificial Sequence
  Oligonucleotide for detection of SNP TSC0062950
rattttcgtcgtc

SEQ ID NO: 259087 - DNA, 13 bp, Artificial Sequence
  Oligonucleotide for detection of SNP TSC0062951
tataggaatgtty

SEQ ID NO: 259088 - DNA, 13 bp, Artificial Sequence
  Oligonucleotide for detection of SNP TSC0062951
raacattcctata

SEQ ID NO: 259089 - DNA, 13 bp, Artificial Sequence
  Oligonucleotide for detection of SNP TSC0062951
tataggtatgtty

SEQ ID NO: 259090 - DNA, 13 bp, Artificial Sequence
  Oligonucleotide for detection of SNP TSC0062951
raacatacctata

SEQ ID NO: 259091 - DNA, 13 bp, Artificial Sequence
  Oligonucleotide for detection of SNP TSC0062951
gggtatttttata

SEQ ID NO: 259092 - DNA, 13 bp, Artificial Sequence
  Oligonucleotide for detection of SNP TSC0062951
tataaaaataccc

SEQ ID NO: 259093 - DNA, 13 bp, Artificial Sequence
  Oligonucleotide for detection of SNP TSC0062952
agaaatgtaatag

SEQ ID NO: 259094 - DNA, 13 bp, Artificial Sequence
  Oligonucleotide for detection of SNP TSC0062952
ctattacatttct

SEQ ID NO: 259095 - DNA, 13 bp, Artificial Sequence
  Oligonucleotide for detection of SNP TSC0062952
agaaatataatag

SEQ ID NO: 259096 - DNA, 13 bp, Artificial Sequence
  Oligonucleotide for detection of SNP TSC0062952
ctattatatttct

SEQ ID NO: 259097 - DNA, 13 bp, Artificial Sequence
  Oligonucleotide for detection of SNP TSC0062952
agaaacgtaatag

SEQ ID NO: 259098 - DNA, 13 bp, Artificial Sequence
  Oligonucleotide for detection of SNP TSC0062952
ctattacgtttct

SEQ ID NO: 259099 - DNA, 13 bp, Artificial Sequence
  Oligonucleotide for detection of SNP TSC0008211
aagatttgttttg

SEQ ID NO: 259100 - DNA, 13 bp, Artificial Sequence
  Oligonucleotide for detection of SNP TSC0008211
caaaacaaatctt

SEQ ID NO: 259101 - DNA, 13 bp, Artificial Sequence
  Oligonucleotide for detection of SNP TSC0008211
aagattcgttttg

SEQ ID NO: 259102 - DNA, 13 bp, Artificial Sequence
  Oligonucleotide for detection of SNP TSC0008211
caaaacgaatctt

SEQ ID NO: 259103 - DNA, 13 bp, Artificial Sequence
  Oligonucleotide for detection of SNP TSC0008211
tagggtgggtttt

SEQ ID NO: 259104 - DNA, 13 bp, Artificial Sequence
  Oligonucleotide for detection of SNP TSC0008211
aaaacccacccta

SEQ ID NO: 259105 - DNA, 13 bp, Artificial Sequence
  Oligonucleotide for detection of SNP TSC0008211
tagggtaggtttt

SEQ ID NO: 259106 - DNA, 13 bp, Artificial Sequence
  Oligonucleotide for detection of SNP TSC0008211
aaaacctacccta

SEQ ID NO: 259107 - DNA, 13 bp, Artificial Sequence
  Oligonucleotide for detection of SNP TSC0008211
tagggcgggtttt

SEQ ID NO: 259108 - DNA, 13 bp, Artificial Sequence
  Oligonucleotide for detection of SNP TSC0008211
aaaacccgcccta

SEQ ID NO: 259109 - DNA, 13 bp, Artificial Sequence
  Oligonucleotide for detection of SNP TSC0008212
ttaattgttttty

SEQ ID NO: 259110 - DNA, 13 bp, Artificial Sequence
  Oligonucleotide for detection of SNP TSC0008212
raaaaacaattaa

SEQ ID NO: 259111 - DNA, 13 bp, Artificial Sequence
  Oligonucleotide for detection of SNP TSC0062955
ttgtgatttttgt

SEQ ID NO: 259112 - DNA, 13 bp, Artificial Sequence
  Oligonucleotide for detection of SNP TSC0062955
acaaaaatcacaa

SEQ ID NO: 259113 - DNA, 13 bp, Artificial Sequence
  Oligonucleotide for detection of SNP TSC0062955
ttgtgagttttgt

SEQ ID NO: 259114 - DNA, 13 bp, Artificial Sequence
  Oligonucleotide for detection of SNP TSC0062955
acaaaactcacaa

SEQ ID NO: 259115 - DNA, 13 bp, Artificial Sequence
  Oligonucleotide for detection of SNP TSC0062956
gattttatgtgga

SEQ ID NO: 259116 - DNA, 13 bp, Artificial Sequence
  Oligonucleotide for detection of SNP TSC0062956
tccacataaaatc

SEQ ID NO: 259117 - DNA, 13 bp, Artificial Sequence
  Oligonucleotide for detection of SNP TSC0062956
gattttttgtgga

SEQ ID NO: 259118 - DNA, 13 bp, Artificial Sequence
  Oligonucleotide for detection of SNP TSC0062956
tccacaaaaaatc

SEQ ID NO: 259119 - DNA, 13 bp, Artificial Sequence
  Oligonucleotide for detection of SNP TSC0062956
tttatataaaaty

SEQ ID NO: 259120 - DNA, 13 bp, Artificial Sequence
  Oligonucleotide for detection of SNP TSC0062956
rattttatataaa

SEQ ID NO: 259121 - DNA, 13 bp, Artificial Sequence
  Oligonucleotide for detection of SNP TSC0062956
tttatagaaaaty

SEQ ID NO: 259122 - DNA, 13 bp, Artificial Sequence
  Oligonucleotide for detection of SNP TSC0062956
rattttctataaa

SEQ ID NO: 259123 - DNA, 13 bp, Artificial Sequence
  Oligonucleotide for detection of SNP TSC0062957
taaaatttttttg

SEQ ID NO: 259124 - DNA, 13 bp, Artificial Sequence
  Oligonucleotide for detection of SNP TSC0062957
caaaaaaatttta

SEQ ID NO: 259125 - DNA, 13 bp, Artificial Sequence
  Oligonucleotide for detection of SNP TSC0062958
gatttaagttgta

SEQ ID NO: 259126 - DNA, 13 bp, Artificial Sequence
  Oligonucleotide for detection of SNP TSC0062958
tacaacttaaatc

SEQ ID NO: 259127 - DNA, 13 bp, Artificial Sequence
  Oligonucleotide for detection of SNP TSC0062958
gatttaggttgta

SEQ ID NO: 259128 - DNA, 13 bp, Artificial Sequence
  Oligonucleotide for detection of SNP TSC0062958
tacaacctaaatc

SEQ ID NO: 259129 - DNA, 13 bp, Artificial Sequence
  Oligonucleotide for detection of SNP TSC0062959
atttgtagatgag

SEQ ID NO: 259130 - DNA, 13 bp, Artificial Sequence
  Oligonucleotide for detection of SNP TSC0062959
ctcatctacaaat

SEQ ID NO: 259131 - DNA, 13 bp, Artificial Sequence
  Oligonucleotide for detection of SNP TSC0062959
atttgtggatgag

SEQ ID NO: 259132 - DNA, 13 bp, Artificial Sequence
  Oligonucleotide for detection of SNP TSC0062959
ctcatccacaaat

SEQ ID NO: 259133 - DNA, 13 bp, Artificial Sequence
  Oligonucleotide for detection of SNP TSC0062960
gggttagaatgta

SEQ ID NO: 259134 - DNA, 13 bp, Artificial Sequence
  Oligonucleotide for detection of SNP TSC0062960
tacattctaaccc

SEQ ID NO: 259135 - DNA, 13 bp, Artificial Sequence
  Oligonucleotide for detection of SNP TSC0062960
gggttaaaatgta

SEQ ID NO: 259136 - DNA, 13 bp, Artificial Sequence
  Oligonucleotide for detection of SNP TSC0062960
tacattttaaccc

SEQ ID NO: 259137 - DNA, 13 bp, Artificial Sequence
  Oligonucleotide for detection of SNP TSC0062961
atttttgtgaaay

SEQ ID NO: 259138 - DNA, 13 bp, Artificial Sequence
  Oligonucleotide for detection of SNP TSC0062961
rtttcacaaaaat

SEQ ID NO: 259139 - DNA, 13 bp, Artificial Sequence
  Oligonucleotide for detection of SNP TSC0062961
atttttatgaaay

SEQ ID NO: 259140 - DNA, 13 bp, Artificial Sequence
  Oligonucleotide for detection of SNP TSC0062961
rtttcataaaaat

SEQ ID NO: 259141 - DNA, 13 bp, Artificial Sequence
  Oligonucleotide for detection of SNP TSC0062962
gttattagttaay

SEQ ID NO: 259142 - DNA, 13 bp, Artificial Sequence
  Oligonucleotide for detection of SNP TSC0062962
rttaactaataac

SEQ ID NO: 259143 - DNA, 13 bp, Artificial Sequence
  Oligonucleotide for detection of SNP TSC0062962
gttattggttaay

SEQ ID NO: 259144 - DNA, 13 bp, Artificial Sequence
  Oligonucleotide for detection of SNP TSC0062962
rttaaccaataac

SEQ ID NO: 259145 - DNA, 13 bp, Artificial Sequence
  Oligonucleotide for detection of SNP TSC0062962
gttatcggttaay

SEQ ID NO: 259146 - DNA, 13 bp, Artificial Sequence
  Oligonucleotide for detection of SNP TSC0062962
rttaaccgataac

SEQ ID NO: 259147 - DNA, 13 bp, Artificial Sequence
  Oligonucleotide for detection of SNP TSC0062962
gttggttggtggy

SEQ ID NO: 259148 - DNA, 13 bp, Artificial Sequence
  Oligonucleotide for detection of SNP TSC0062962
rccaccaaccaac

SEQ ID NO: 259149 - DNA, 13 bp, Artificial Sequence
  Oligonucleotide for detection of SNP TSC0062962
gttggtcggtggy

SEQ ID NO: 259150 - DNA, 13 bp, Artificial Sequence
  Oligonucleotide for detection of SNP TSC0062962
rccaccgaccaac

SEQ ID NO: 259151 - DNA, 13 bp, Artificial Sequence
  Oligonucleotide for detection of SNP TSC0062963
tagatatatagat

SEQ ID NO: 259152 - DNA, 13 bp, Artificial Sequence
  Oligonucleotide for detection of SNP TSC0062963
atctatatatcta

SEQ ID NO: 259153 - DNA, 13 bp, Artificial Sequence
  Oligonucleotide for detection of SNP TSC0062963
tagatagatagat

SEQ ID NO: 259154 - DNA, 13 bp, Artificial Sequence
  Oligonucleotide for detection of SNP TSC0062963
atctatctatcta

SEQ ID NO: 259155 - DNA, 13 bp, Artificial Sequence
  Oligonucleotide for detection of SNP TSC0062964
aaattatgagata

SEQ ID NO: 259156 - DNA, 13 bp, Artificial Sequence
  Oligonucleotide for detection of SNP TSC0062964
tatctcataattt

SEQ ID NO: 259157 - DNA, 13 bp, Artificial Sequence
  Oligonucleotide for detection of SNP TSC0062964
aaattaggagata

SEQ ID NO: 259158 - DNA, 13 bp, Artificial Sequence
  Oligonucleotide for detection of SNP TSC0062964
tatctcctaattt

SEQ ID NO: 259159 - DNA, 13 bp, Artificial Sequence
  Oligonucleotide for detection of SNP TSC0062964
tattttttaattt

SEQ ID NO: 259160 - DNA, 13 bp, Artificial Sequence
  Oligonucleotide for detection of SNP TSC0062964
aaattaaaaaata

SEQ ID NO: 259161 - DNA, 13 bp, Artificial Sequence
  Oligonucleotide for detection of SNP TSC0008488
ttgtattttttty

SEQ ID NO: 259162 - DNA, 13 bp, Artificial Sequence
  Oligonucleotide for detection of SNP TSC0008488
raaaaaaatacaa

SEQ ID NO: 259163 - DNA, 13 bp, Artificial Sequence
  Oligonucleotide for detection of SNP TSC0008488
gggaggtatgtaa

SEQ ID NO: 259164 - DNA, 13 bp, Artificial Sequence
  Oligonucleotide for detection of SNP TSC0008488
ttacatacctccc

SEQ ID NO: 259165 - DNA, 13 bp, Artificial Sequence
  Oligonucleotide for detection of SNP TSC0008488
gggaggaatgtaa

SEQ ID NO: 259166 - DNA, 13 bp, Artificial Sequence
  Oligonucleotide for detection of SNP TSC0008488
ttacattcctccc

SEQ ID NO: 259167 - DNA, 13 bp, Artificial Sequence
  Oligonucleotide for detection of SNP TSC0062972
aaatgatgattga

SEQ ID NO: 259168 - DNA, 13 bp, Artificial Sequence
  Oligonucleotide for detection of SNP TSC0062972
tcaatcatcattt

SEQ ID NO: 259169 - DNA, 13 bp, Artificial Sequence
  Oligonucleotide for detection of SNP TSC0062972
aaatgaggattga

SEQ ID NO: 259170 - DNA, 13 bp, Artificial Sequence
  Oligonucleotide for detection of SNP TSC0062972
tcaatcctcattt

SEQ ID NO: 259171 - DNA, 13 bp, Artificial Sequence
  Oligonucleotide for detection of SNP TSC0062972
ttaattattattt

SEQ ID NO: 259172 - DNA, 13 bp, Artificial Sequence
  Oligonucleotide for detection of SNP TSC0062972
aaataataattaa

SEQ ID NO: 259173 - DNA, 13 bp, Artificial Sequence
  Oligonucleotide for detection of SNP TSC0062972
ttaatttttattt

SEQ ID NO: 259174 - DNA, 13 bp, Artificial Sequence
  Oligonucleotide for detection of SNP TSC0062972
aaataaaaattaa

SEQ ID NO: 259175 - DNA, 13 bp, Artificial Sequence
  Oligonucleotide for detection of SNP TSC0062973
agaagagaatggg

SEQ ID NO: 259176 - DNA, 13 bp, Artificial Sequence
  Oligonucleotide for detection of SNP TSC0062973
cccattctcttct

SEQ ID NO: 259177 - DNA, 13 bp, Artificial Sequence
  Oligonucleotide for detection of SNP TSC0062973
agaagataatggg

SEQ ID NO: 259178 - DNA, 13 bp, Artificial Sequence
  Oligonucleotide for detection of SNP TSC0062973
cccattatcttct

SEQ ID NO: 259179 - DNA, 13 bp, Artificial Sequence
  Oligonucleotide for detection of SNP TSC0062974
agtggtagataga

SEQ ID NO: 259180 - DNA, 13 bp, Artificial Sequence
  Oligonucleotide for detection of SNP TSC0062974
tctatctaccact

SEQ ID NO: 259181 - DNA, 13 bp, Artificial Sequence
  Oligonucleotide for detection of SNP TSC0062974
agtggttgataga

SEQ ID NO: 259182 - DNA, 13 bp, Artificial Sequence
  Oligonucleotide for detection of SNP TSC0062974
tctatcaaccact

SEQ ID NO: 259183 - DNA, 13 bp, Artificial Sequence
  Oligonucleotide for detection of SNP TSC0062974
tttattaattatt

SEQ ID NO: 259184 - DNA, 13 bp, Artificial Sequence
  Oligonucleotide for detection of SNP TSC0062974
aataattaataaa

SEQ ID NO: 259185 - DNA, 13 bp, Artificial Sequence
  Oligonucleotide for detection of SNP TSC0062975
atgttttaataay

SEQ ID NO: 259186 - DNA, 13 bp, Artificial Sequence
  Oligonucleotide for detection of SNP TSC0062975
rttattaaaacat

SEQ ID NO: 259187 - DNA, 13 bp, Artificial Sequence
  Oligonucleotide for detection of SNP TSC0062975
atgtttgaataay

SEQ ID NO: 259188 - DNA, 13 bp, Artificial Sequence
  Oligonucleotide for detection of SNP TSC0062975
rttattcaaacat

SEQ ID NO: 259189 - DNA, 13 bp, Artificial Sequence
  Oligonucleotide for detection of SNP TSC0062975
gttgttaaagtat

SEQ ID NO: 259190 - DNA, 13 bp, Artificial Sequence
  Oligonucleotide for detection of SNP TSC0062975
atactttaacaac

SEQ ID NO: 259191 - DNA, 13 bp, Artificial Sequence
  Oligonucleotide for detection of SNP TSC0062975
gttgtttaagtat

SEQ ID NO: 259192 - DNA, 13 bp, Artificial Sequence
  Oligonucleotide for detection of SNP TSC0062975
atacttaaacaac

SEQ ID NO: 259193 - DNA, 13 bp, Artificial Sequence
  Oligonucleotide for detection of SNP TSC0062976
agttttgtgatta

SEQ ID NO: 259194 - DNA, 13 bp, Artificial Sequence
  Oligonucleotide for detection of SNP TSC0062976
taatcacaaaact

SEQ ID NO: 259195 - DNA, 13 bp, Artificial Sequence
  Oligonucleotide for detection of SNP TSC0062976
agttttatgatta

SEQ ID NO: 259196 - DNA, 13 bp, Artificial Sequence
  Oligonucleotide for detection of SNP TSC0062976
taatcataaaact

SEQ ID NO: 259197 - DNA, 13 bp, Artificial Sequence
  Oligonucleotide for detection of SNP TSC0006391
tgggggtggtggy

SEQ ID NO: 259198 - DNA, 13 bp, Artificial Sequence
  Oligonucleotide for detection of SNP TSC0006391
rccaccaccccca

SEQ ID NO: 259199 - DNA, 13 bp, Artificial Sequence
  Oligonucleotide for detection of SNP TSC0006391
tgggggcggtggy

SEQ ID NO: 259200 - DNA, 13 bp, Artificial Sequence
  Oligonucleotide for detection of SNP TSC0006391
rccaccgccccca

SEQ ID NO: 259201 - DNA, 13 bp, Artificial Sequence
  Oligonucleotide for detection of SNP TSC0005873
aatttaggaaata

SEQ ID NO: 259202 - DNA, 13 bp, Artificial Sequence
  Oligonucleotide for detection of SNP TSC0005873
tatttcctaaatt

SEQ ID NO: 259203 - DNA, 13 bp, Artificial Sequence
  Oligonucleotide for detection of SNP TSC0005873
tattttatggatt

SEQ ID NO: 259204 - DNA, 13 bp, Artificial Sequence
  Oligonucleotide for detection of SNP TSC0005873
aatccataaaata

SEQ ID NO: 259205 - DNA, 13 bp, Artificial Sequence
  Oligonucleotide for detection of SNP TSC0005873
tattttttggatt

SEQ ID NO: 259206 - DNA, 13 bp, Artificial Sequence
  Oligonucleotide for detection of SNP TSC0005873
aatccaaaaaata

SEQ ID NO: 259207 - DNA, 13 bp, Artificial Sequence
  Oligonucleotide for detection of SNP TSC0005874
ggtagaagatggy

SEQ ID NO: 259208 - DNA, 13 bp, Artificial Sequence
  Oligonucleotide for detection of SNP TSC0005874
rccatcttctacc

SEQ ID NO: 259209 - DNA, 13 bp, Artificial Sequence
  Oligonucleotide for detection of SNP TSC0005874
ggtagaggatggy

SEQ ID NO: 259210 - DNA, 13 bp, Artificial Sequence
  Oligonucleotide for detection of SNP TSC0005874
rccatcctctacc

SEQ ID NO: 259211 - DNA, 13 bp, Artificial Sequence
  Oligonucleotide for detection of SNP TSC0062977
ggttttaataatg

SEQ ID NO: 259212 - DNA, 13 bp, Artificial Sequence
  Oligonucleotide for detection of SNP TSC0062977
cattattaaaacc

SEQ ID NO: 259213 - DNA, 13 bp, Artificial Sequence
  Oligonucleotide for detection of SNP TSC0062977
ggtttttataatg

SEQ ID NO: 259214 - DNA, 13 bp, Artificial Sequence
  Oligonucleotide for detection of SNP TSC0062977
cattataaaaacc

SEQ ID NO: 259215 - DNA, 13 bp, Artificial Sequence
  Oligonucleotide for detection of SNP TSC0062977
ggttttaataacg

SEQ ID NO: 259216 - DNA, 13 bp, Artificial Sequence
  Oligonucleotide for detection of SNP TSC0062977
cgttattaaaacc

SEQ ID NO: 259217 - DNA, 13 bp, Artificial Sequence
  Oligonucleotide for detection of SNP TSC0062977
ggtttttataacg

SEQ ID NO: 259218 - DNA, 13 bp, Artificial Sequence
  Oligonucleotide for detection of SNP TSC0062977
cgttataaaaacc

SEQ ID NO: 259219 - DNA, 13 bp, Artificial Sequence
  Oligonucleotide for detection of SNP TSC0062977
tgttgttaaagty

SEQ ID NO: 259220 - DNA, 13 bp, Artificial Sequence
  Oligonucleotide for detection of SNP TSC0062977
ractttaacaaca

SEQ ID NO: 259221 - DNA, 13 bp, Artificial Sequence
  Oligonucleotide for detection of SNP TSC0062977
tgttgtaaaagty

SEQ ID NO: 259222 - DNA, 13 bp, Artificial Sequence
  Oligonucleotide for detection of SNP TSC0062977
racttttacaaca

SEQ ID NO: 259223 - DNA, 13 bp, Artificial Sequence
  Oligonucleotide for detection of SNP TSC0062977
cgttgttaaagty

SEQ ID NO: 259224 - DNA, 13 bp, Artificial Sequence
  Oligonucleotide for detection of SNP TSC0062977
ractttaacaacg

SEQ ID NO: 259225 - DNA, 13 bp, Artificial Sequence
  Oligonucleotide for detection of SNP TSC0062977
cgttgtaaaagty

SEQ ID NO: 259226 - DNA, 13 bp, Artificial Sequence
  Oligonucleotide for detection of SNP TSC0062977
racttttacaacg

SEQ ID NO: 259227 - DNA, 13 bp, Artificial Sequence
  Oligonucleotide for detection of SNP TSC0062978
ttattttagtggg

SEQ ID NO: 259228 - DNA, 13 bp, Artificial Sequence
  Oligonucleotide for detection of SNP TSC0062978
cccactaaaataa

SEQ ID NO: 259229 - DNA, 13 bp, Artificial Sequence
  Oligonucleotide for detection of SNP TSC0062978
ttatttgagtggg

SEQ ID NO: 259230 - DNA, 13 bp, Artificial Sequence
  Oligonucleotide for detection of SNP TSC0062978
cccactcaaataa

SEQ ID NO: 259231 - DNA, 13 bp, Artificial Sequence
  Oligonucleotide for detection of SNP TSC0062978
ttattttagcggg

SEQ ID NO: 259232 - DNA, 13 bp, Artificial Sequence
  Oligonucleotide for detection of SNP TSC0062978
cccgctaaaataa

SEQ ID NO: 259233 - DNA, 13 bp, Artificial Sequence
  Oligonucleotide for detection of SNP TSC0062978
ttattcgagtggg

SEQ ID NO: 259234 - DNA, 13 bp, Artificial Sequence
  Oligonucleotide for detection of SNP TSC0062978
cccactcgaataa

SEQ ID NO: 259235 - DNA, 13 bp, Artificial Sequence
  Oligonucleotide for detection of SNP TSC0062978
ttatttgagcggg

SEQ ID NO: 259236 - DNA, 13 bp, Artificial Sequence
  Oligonucleotide for detection of SNP TSC0062978
cccgctcaaataa

SEQ ID NO: 259237 - DNA, 13 bp, Artificial Sequence
  Oligonucleotide for detection of SNP TSC0062978
ttattcgagcggg

SEQ ID NO: 259238 - DNA, 13 bp, Artificial Sequence
  Oligonucleotide for detection of SNP TSC0062978
cccgctcgaataa

SEQ ID NO: 259239 - DNA, 13 bp, Artificial Sequence
  Oligonucleotide for detection of SNP TSC0062978
tttgttggggtga

SEQ ID NO: 259240 - DNA, 13 bp, Artificial Sequence
  Oligonucleotide for detection of SNP TSC0062978
tcaccccaacaaa

SEQ ID NO: 259241 - DNA, 13 bp, Artificial Sequence
  Oligonucleotide for detection of SNP TSC0062978
tttgtttgggtga

SEQ ID NO: 259242 - DNA, 13 bp, Artificial Sequence
  Oligonucleotide for detection of SNP TSC0062978
tcacccaaacaaa

SEQ ID NO: 259243 - DNA, 13 bp, Artificial Sequence
  Oligonucleotide for detection of SNP TSC0062978
ttcgttggggtga

SEQ ID NO: 259244 - DNA, 13 bp, Artificial Sequence
  Oligonucleotide for detection of SNP TSC0062978
tcaccccaacgaa

SEQ ID NO: 259245 - DNA, 13 bp, Artificial Sequence
  Oligonucleotide for detection of SNP TSC0062978
ttcgtttgggtga

SEQ ID NO: 259246 - DNA, 13 bp, Artificial Sequence
  Oligonucleotide for detection of SNP TSC0062978
tcacccaaacgaa

SEQ ID NO: 259247 - DNA, 13 bp, Artificial Sequence
  Oligonucleotide for detection of SNP TSC0062978
tttgttcgggtga

SEQ ID NO: 259248 - DNA, 13 bp, Artificial Sequence
  Oligonucleotide for detection of SNP TSC0062978
tcacccgaacaaa

SEQ ID NO: 259249 - DNA, 13 bp, Artificial Sequence
  Oligonucleotide for detection of SNP TSC0062978
ttcgttcgggtga

SEQ ID NO: 259250 - DNA, 13 bp, Artificial Sequence
  Oligonucleotide for detection of SNP TSC0062978
tcacccgaacgaa

SEQ ID NO: 259251 - DNA, 13 bp, Artificial Sequence
  Oligonucleotide for detection of SNP TSC0007808
ggatattgagatt

SEQ ID NO: 259252 - DNA, 13 bp, Artificial Sequence
  Oligonucleotide for detection of SNP TSC0007808
aatctcaatatcc

SEQ ID NO: 259253 - DNA, 13 bp, Artificial Sequence
  Oligonucleotide for detection of SNP TSC0007808
ggatatcgagatt

SEQ ID NO: 259254 - DNA, 13 bp, Artificial Sequence
  Oligonucleotide for detection of SNP TSC0007808
aatctcgatatcc

SEQ ID NO: 259255 - DNA, 13 bp, Artificial Sequence
  Oligonucleotide for detection of SNP TSC0007808
agttttgatgtty

SEQ ID NO: 259256 - DNA, 13 bp, Artificial Sequence
  Oligonucleotide for detection of SNP TSC0007808
raacatcaaaact

SEQ ID NO: 259257 - DNA, 13 bp, Artificial Sequence
  Oligonucleotide for detection of SNP TSC0007808
agttttaatgtty

SEQ ID NO: 259258 - DNA, 13 bp, Artificial Sequence
  Oligonucleotide for detection of SNP TSC0007808
raacattaaaact

SEQ ID NO: 259259 - DNA, 13 bp, Artificial Sequence
  Oligonucleotide for detection of SNP TSC0007808
agtttcgatgtty

SEQ ID NO: 259260 - DNA, 13 bp, Artificial Sequence
  Oligonucleotide for detection of SNP TSC0007808
raacatcgaaact

SEQ ID NO: 259261 - DNA, 13 bp, Artificial Sequence
  Oligonucleotide for detection of SNP TSC0007809
ttatgtgttaaag

SEQ ID NO: 259262 - DNA, 13 bp, Artificial Sequence
  Oligonucleotide for detection of SNP TSC0007809
ctttaacacataa

SEQ ID NO: 259263 - DNA, 13 bp, Artificial Sequence
  Oligonucleotide for detection of SNP TSC0007809
ttatgtattaaag

SEQ ID NO: 259264 - DNA, 13 bp, Artificial Sequence
  Oligonucleotide for detection of SNP TSC0007809
ctttaatacataa

SEQ ID NO: 259265 - DNA, 13 bp, Artificial Sequence
  Oligonucleotide for detection of SNP TSC0062979
gggtaataattgy

SEQ ID NO: 259266 - DNA, 13 bp, Artificial Sequence
  Oligonucleotide for detection of SNP TSC0062979
rcaattattaccc

SEQ ID NO: 259267 - DNA, 13 bp, Artificial Sequence
  Oligonucleotide for detection of SNP TSC0062979
gggtaagaattgy

SEQ ID NO: 259268 - DNA, 13 bp, Artificial Sequence
  Oligonucleotide for detection of SNP TSC0062979
rcaattcttaccc

SEQ ID NO: 259269 - DNA, 13 bp, Artificial Sequence
  Oligonucleotide for detection of SNP TSC0062979
gtagttattgtty

SEQ ID NO: 259270 - DNA, 13 bp, Artificial Sequence
  Oligonucleotide for detection of SNP TSC0062979
raacaataactac

SEQ ID NO: 259271 - DNA, 13 bp, Artificial Sequence
  Oligonucleotide for detection of SNP TSC0062980
ttaggtagtgtta

SEQ ID NO: 259272 - DNA, 13 bp, Artificial Sequence
  Oligonucleotide for detection of SNP TSC0062980
taacactacctaa

SEQ ID NO: 259273 - DNA, 13 bp, Artificial Sequence
  Oligonucleotide for detection of SNP TSC0062980
ttaggtggtgtta

SEQ ID NO: 259274 - DNA, 13 bp, Artificial Sequence
  Oligonucleotide for detection of SNP TSC0062980
taacaccacctaa

SEQ ID NO: 259275 - DNA, 13 bp, Artificial Sequence
  Oligonucleotide for detection of SNP TSC0062980
ttaggcggtgtta

SEQ ID NO: 259276 - DNA, 13 bp, Artificial Sequence
  Oligonucleotide for detection of SNP TSC0062980
taacaccgcctaa

SEQ ID NO: 259277 - DNA, 13 bp, Artificial Sequence
  Oligonucleotide for detection of SNP TSC0062980
tagtattgtttgg

SEQ ID NO: 259278 - DNA, 13 bp, Artificial Sequence
  Oligonucleotide for detection of SNP TSC0062980
ccaaacaatacta

SEQ ID NO: 259279 - DNA, 13 bp, Artificial Sequence
  Oligonucleotide for detection of SNP TSC0062980
tagtatcgtttgg

SEQ ID NO: 259280 - DNA, 13 bp, Artificial Sequence
  Oligonucleotide for detection of SNP TSC0062980
ccaaacgatacta

SEQ ID NO: 259281 - DNA, 13 bp, Artificial Sequence
  Oligonucleotide for detection of SNP TSC0062981
taataggttgttg

SEQ ID NO: 259282 - DNA, 13 bp, Artificial Sequence
  Oligonucleotide for detection of SNP TSC0062981
caacaacctatta

SEQ ID NO: 259283 - DNA, 13 bp, Artificial Sequence
  Oligonucleotide for detection of SNP TSC0062981
taatagattgttg

SEQ ID NO: 259284 - DNA, 13 bp, Artificial Sequence
  Oligonucleotide for detection of SNP TSC0062981
caacaatctatta

SEQ ID NO: 259285 - DNA, 13 bp, Artificial Sequence
  Oligonucleotide for detection of SNP TSC0062981
taataggttgtcg

SEQ ID NO: 259286 - DNA, 13 bp, Artificial Sequence
  Oligonucleotide for detection of SNP TSC0062981
cgacaacctatta

SEQ ID NO: 259287 - DNA, 13 bp, Artificial Sequence
  Oligonucleotide for detection of SNP TSC0062981
taatagattgtcg

SEQ ID NO: 259288 - DNA, 13 bp, Artificial Sequence
  Oligonucleotide for detection of SNP TSC0062981
cgacaatctatta

SEQ ID NO: 259289 - DNA, 13 bp, Artificial Sequence
  Oligonucleotide for detection of SNP TSC0009095
taaatgtttaatt

SEQ ID NO: 259290 - DNA, 13 bp, Artificial Sequence
  Oligonucleotide for detection of SNP TSC0009095
aattaaacattta

SEQ ID NO: 259291 - DNA, 13 bp, Artificial Sequence
  Oligonucleotide for detection of SNP TSC0009095
taaatggttaatt

SEQ ID NO: 259292 - DNA, 13 bp, Artificial Sequence
  Oligonucleotide for detection of SNP TSC0009095
aattaaccattta

SEQ ID NO: 259293 - DNA, 13 bp, Artificial Sequence
  Oligonucleotide for detection of SNP TSC0062982
taaattgaggaaa

SEQ ID NO: 259294 - DNA, 13 bp, Artificial Sequence
  Oligonucleotide for detection of SNP TSC0062982
tttcctcaattta

SEQ ID NO: 259295 - DNA, 13 bp, Artificial Sequence
  Oligonucleotide for detection of SNP TSC0062982
taaattaaggaaa

SEQ ID NO: 259296 - DNA, 13 bp, Artificial Sequence
  Oligonucleotide for detection of SNP TSC0062982
tttccttaattta

SEQ ID NO: 259297 - DNA, 13 bp, Artificial Sequence
  Oligonucleotide for detection of SNP TSC0062982
taaatcgaggaaa

SEQ ID NO: 259298 - DNA, 13 bp, Artificial Sequence
  Oligonucleotide for detection of SNP TSC0062982
tttcctcgattta

SEQ ID NO: 259299 - DNA, 13 bp, Artificial Sequence
  Oligonucleotide for detection of SNP TSC0062983
atttgaaaaagag

SEQ ID NO: 259300 - DNA, 13 bp, Artificial Sequence
  Oligonucleotide for detection of SNP TSC0062983
ctctttttcaaat

SEQ ID NO: 259301 - DNA, 13 bp, Artificial Sequence
  Oligonucleotide for detection of SNP TSC0062983
atttgataaagag

SEQ ID NO: 259302 - DNA, 13 bp, Artificial Sequence
  Oligonucleotide for detection of SNP TSC0062983
ctctttatcaaat

SEQ ID NO: 259303 - DNA, 13 bp, Artificial Sequence
  Oligonucleotide for detection of SNP TSC0062984
attataataatgg

SEQ ID NO: 259304 - DNA, 13 bp, Artificial Sequence
  Oligonucleotide for detection of SNP TSC0062984
ccattattataat

SEQ ID NO: 259305 - DNA, 13 bp, Artificial Sequence
  Oligonucleotide for detection of SNP TSC0062984
attatagtaatgg

SEQ ID NO: 259306 - DNA, 13 bp, Artificial Sequence
  Oligonucleotide for detection of SNP TSC0062984
ccattactataat

SEQ ID NO: 259307 - DNA, 13 bp, Artificial Sequence
  Oligonucleotide for detection of SNP TSC0007467
tgtttatttttay

SEQ ID NO: 259308 - DNA, 13 bp, Artificial Sequence
  Oligonucleotide for detection of SNP TSC0007467
rtaaaaataaaca

SEQ ID NO: 259309 - DNA, 13 bp, Artificial Sequence
  Oligonucleotide for detection of SNP TSC0007467
gtgggattgggta

SEQ ID NO: 259310 - DNA, 13 bp, Artificial Sequence
  Oligonucleotide for detection of SNP TSC0007467
tacccaatcccac

SEQ ID NO: 259311 - DNA, 13 bp, Artificial Sequence
  Oligonucleotide for detection of SNP TSC0007467
gtgggagtgggta

SEQ ID NO: 259312 - DNA, 13 bp, Artificial Sequence
  Oligonucleotide for detection of SNP TSC0007467
tacccactcccac

SEQ ID NO: 259313 - DNA, 13 bp, Artificial Sequence
  Oligonucleotide for detection of SNP TSC0009914
aggtttatgttty

SEQ ID NO: 259314 - DNA, 13 bp, Artificial Sequence
  Oligonucleotide for detection of SNP TSC0009914
raaacataaacct

SEQ ID NO: 259315 - DNA, 13 bp, Artificial Sequence
  Oligonucleotide for detection of SNP TSC0009914
aggtttacgttty

SEQ ID NO: 259316 - DNA, 13 bp, Artificial Sequence
  Oligonucleotide for detection of SNP TSC0009914
raaacgtaaacct

SEQ ID NO: 259317 - DNA, 13 bp, Artificial Sequence
  Oligonucleotide for detection of SNP TSC0009914
aggtttgcgttty

SEQ ID NO: 259318 - DNA, 13 bp, Artificial Sequence
  Oligonucleotide for detection of SNP TSC0009914
raaacgcaaacct

SEQ ID NO: 259319 - DNA, 13 bp, Artificial Sequence
  Oligonucleotide for detection of SNP TSC0062985
ggtttgtgtagtg

SEQ ID NO: 259320 - DNA, 13 bp, Artificial Sequence
  Oligonucleotide for detection of SNP TSC0062985
cactacacaaacc

SEQ ID NO: 259321 - DNA, 13 bp, Artificial Sequence
  Oligonucleotide for detection of SNP TSC0062985
ggtttgggtagtg

SEQ ID NO: 259322 - DNA, 13 bp, Artificial Sequence
  Oligonucleotide for detection of SNP TSC0062985
cactacccaaacc

SEQ ID NO: 259323 - DNA, 13 bp, Artificial Sequence
  Oligonucleotide for detection of SNP TSC0062985
ggtttgcgtagtg

SEQ ID NO: 259324 - DNA, 13 bp, Artificial Sequence
  Oligonucleotide for detection of SNP TSC0062985
cactacgcaaacc

SEQ ID NO: 259325 - DNA, 13 bp, Artificial Sequence
  Oligonucleotide for detection of SNP TSC0062985
tattgtgtaagty

SEQ ID NO: 259326 - DNA, 13 bp, Artificial Sequence
  Oligonucleotide for detection of SNP TSC0062985
racttacacaata

SEQ ID NO: 259327 - DNA, 13 bp, Artificial Sequence
  Oligonucleotide for detection of SNP TSC0062985
tattgtttaagty

SEQ ID NO: 259328 - DNA, 13 bp, Artificial Sequence
  Oligonucleotide for detection of SNP TSC0062985
racttaaacaata

SEQ ID NO: 259329 - DNA, 13 bp, Artificial Sequence
  Oligonucleotide for detection of SNP TSC0062985
tattgcgtaagty

SEQ ID NO: 259330 - DNA, 13 bp, Artificial Sequence
  Oligonucleotide for detection of SNP TSC0062985
racttacgcaata

SEQ ID NO: 259331 - DNA, 13 bp, Artificial Sequence
  Oligonucleotide for detection of SNP TSC0062986
ggataaggtattt

SEQ ID NO: 259332 - DNA, 13 bp, Artificial Sequence
  Oligonucleotide for detection of SNP TSC0062986
aaataccttatcc

SEQ ID NO: 259333 - DNA, 13 bp, Artificial Sequence
  Oligonucleotide for detection of SNP TSC0062986
ggataaagtattt

SEQ ID NO: 259334 - DNA, 13 bp, Artificial Sequence
  Oligonucleotide for detection of SNP TSC0062986
aaatactttatcc

SEQ ID NO: 259335 - DNA, 13 bp, Artificial Sequence
  Oligonucleotide for detection of SNP TSC0062987
ttggaaaaattay

SEQ ID NO: 259336 - DNA, 13 bp, Artificial Sequence
  Oligonucleotide for detection of SNP TSC0062987
rtaatttttccaa

SEQ ID NO: 259337 - DNA, 13 bp, Artificial Sequence
  Oligonucleotide for detection of SNP TSC0062987
ttggaataattay

SEQ ID NO: 259338 - DNA, 13 bp, Artificial Sequence
  Oligonucleotide for detection of SNP TSC0062987
rtaattattccaa

SEQ ID NO: 259339 - DNA, 13 bp, Artificial Sequence
  Oligonucleotide for detection of SNP TSC0062987
gtagtttttttaa

SEQ ID NO: 259340 - DNA, 13 bp, Artificial Sequence
  Oligonucleotide for detection of SNP TSC0062987
ttaaaaaaactac

SEQ ID NO: 259341 - DNA, 13 bp, Artificial Sequence
  Oligonucleotide for detection of SNP TSC0062988
ttataaaattata

SEQ ID NO: 259342 - DNA, 13 bp, Artificial Sequence
  Oligonucleotide for detection of SNP TSC0062988
tataattttataa

SEQ ID NO: 259343 - DNA, 13 bp, Artificial Sequence
  Oligonucleotide for detection of SNP TSC0062988
ttataagattata

SEQ ID NO: 259344 - DNA, 13 bp, Artificial Sequence
  Oligonucleotide for detection of SNP TSC0062988
tataatcttataa

SEQ ID NO: 259345 - DNA, 13 bp, Artificial Sequence
  Oligonucleotide for detection of SNP TSC0062989
ataagttttagaa

SEQ ID NO: 259346 - DNA, 13 bp, Artificial Sequence
  Oligonucleotide for detection of SNP TSC0062989
ttctaaaacttat

SEQ ID NO: 259347 - DNA, 13 bp, Artificial Sequence
  Oligonucleotide for detection of SNP TSC0062989
ataagtgttagaa

SEQ ID NO: 259348 - DNA, 13 bp, Artificial Sequence
  Oligonucleotide for detection of SNP TSC0062989
ttctaacacttat

SEQ ID NO: 259349 - DNA, 13 bp, Artificial Sequence
  Oligonucleotide for detection of SNP TSC0006437
gattaaatataat

SEQ ID NO: 259350 - DNA, 13 bp, Artificial Sequence
  Oligonucleotide for detection of SNP TSC0006437
attatatttaatc

SEQ ID NO: 259351 - DNA, 13 bp, Artificial Sequence
  Oligonucleotide for detection of SNP TSC0006437
gattaagtataat

SEQ ID NO: 259352 - DNA, 13 bp, Artificial Sequence
  Oligonucleotide for detection of SNP TSC0006437
attatacttaatc

SEQ ID NO: 259353 - DNA, 13 bp, Artificial Sequence
  Oligonucleotide for detection of SNP TSC0062990
taataggatgagg

SEQ ID NO: 259354 - DNA, 13 bp, Artificial Sequence
  Oligonucleotide for detection of SNP TSC0062990
cctcatcctatta

SEQ ID NO: 259355 - DNA, 13 bp, Artificial Sequence
  Oligonucleotide for detection of SNP TSC0062990
taatagtatgagg

SEQ ID NO: 259356 - DNA, 13 bp, Artificial Sequence
  Oligonucleotide for detection of SNP TSC0062990
cctcatactatta

SEQ ID NO: 259357 - DNA, 13 bp, Artificial Sequence
  Oligonucleotide for detection of SNP TSC0062992
atatatagaggta

SEQ ID NO: 259358 - DNA, 13 bp, Artificial Sequence
  Oligonucleotide for detection of SNP TSC0062992
tacctctatatat

SEQ ID NO: 259359 - DNA, 13 bp, Artificial Sequence
  Oligonucleotide for detection of SNP TSC0062992
atatatggaggta

SEQ ID NO: 259360 - DNA, 13 bp, Artificial Sequence
  Oligonucleotide for detection of SNP TSC0062992
tacctccatatat

SEQ ID NO: 259361 - DNA, 13 bp, Artificial Sequence
  Oligonucleotide for detection of SNP TSC0062992
atatacggaggta

SEQ ID NO: 259362 - DNA, 13 bp, Artificial Sequence
  Oligonucleotide for detection of SNP TSC0062992
tacctccgtatat

SEQ ID NO: 259363 - DNA, 13 bp, Artificial Sequence
  Oligonucleotide for detection of SNP TSC0006938
gaggttgaggttg

SEQ ID NO: 259364 - DNA, 13 bp, Artificial Sequence
  Oligonucleotide for detection of SNP TSC0006938
caacctcaacctc

SEQ ID NO: 259365 - DNA, 13 bp, Artificial Sequence
  Oligonucleotide for detection of SNP TSC0006938
gaggttaaggttg

SEQ ID NO: 259366 - DNA, 13 bp, Artificial Sequence
  Oligonucleotide for detection of SNP TSC0006938
caaccttaacctc

SEQ ID NO: 259367 - DNA, 13 bp, Artificial Sequence
  Oligonucleotide for detection of SNP TSC0006938
gaggtcgaggttg

SEQ ID NO: 259368 - DNA, 13 bp, Artificial Sequence
  Oligonucleotide for detection of SNP TSC0006938
caacctcgacctc

SEQ ID NO: 259369 - DNA, 13 bp, Artificial Sequence
  Oligonucleotide for detection of SNP TSC0006939
attaatgtttttt

SEQ ID NO: 259370 - DNA, 13 bp, Artificial Sequence
  Oligonucleotide for detection of SNP TSC0006939
aaaaaacattaat

SEQ ID NO: 259371 - DNA, 13 bp, Artificial Sequence
  Oligonucleotide for detection of SNP TSC0006939
attaacgtttttt

SEQ ID NO: 259372 - DNA, 13 bp, Artificial Sequence
  Oligonucleotide for detection of SNP TSC0006939
aaaaaacgttaat

SEQ ID NO: 259373 - DNA, 13 bp, Artificial Sequence
  Oligonucleotide for detection of SNP TSC0006939
aaaagaagttaat

SEQ ID NO: 259374 - DNA, 13 bp, Artificial Sequence
  Oligonucleotide for detection of SNP TSC0006939
attaacttctttt

SEQ ID NO: 259375 - DNA, 13 bp, Artificial Sequence
  Oligonucleotide for detection of SNP TSC0006939
aaaagatgttaat

SEQ ID NO: 259376 - DNA, 13 bp, Artificial Sequence
  Oligonucleotide for detection of SNP TSC0006939
attaacatctttt

SEQ ID NO: 259377 - DNA, 13 bp, Artificial Sequence
  Oligonucleotide for detection of SNP TSC0006939
aaaagacgttaat

SEQ ID NO: 259378 - DNA, 13 bp, Artificial Sequence
  Oligonucleotide for detection of SNP TSC0006939
attaacgtctttt

SEQ ID NO: 259379 - DNA, 13 bp, Artificial Sequence
  Oligonucleotide for detection of SNP TSC0062994
gttattataggtt

SEQ ID NO: 259380 - DNA, 13 bp, Artificial Sequence
  Oligonucleotide for detection of SNP TSC0062994
aacctataataac

SEQ ID NO: 259381 - DNA, 13 bp, Artificial Sequence
  Oligonucleotide for detection of SNP TSC0062994
gttattgtaggtt

SEQ ID NO: 259382 - DNA, 13 bp, Artificial Sequence
  Oligonucleotide for detection of SNP TSC0062994
aacctacaataac

SEQ ID NO: 259383 - DNA, 13 bp, Artificial Sequence
  Oligonucleotide for detection of SNP TSC0009031
attagttttagaa

SEQ ID NO: 259384 - DNA, 13 bp, Artificial Sequence
  Oligonucleotide for detection of SNP TSC0009031
ttctaaaactaat

SEQ ID NO: 259385 - DNA, 13 bp, Artificial Sequence
  Oligonucleotide for detection of SNP TSC0009031
attagtgttagaa

SEQ ID NO: 259386 - DNA, 13 bp, Artificial Sequence
  Oligonucleotide for detection of SNP TSC0009031
ttctaacactaat

SEQ ID NO: 259387 - DNA, 13 bp, Artificial Sequence
  Oligonucleotide for detection of SNP TSC0009031
ttttaagattagt

SEQ ID NO: 259388 - DNA, 13 bp, Artificial Sequence
  Oligonucleotide for detection of SNP TSC0009031
actaatcttaaaa

SEQ ID NO: 259389 - DNA, 13 bp, Artificial Sequence
  Oligonucleotide for detection of SNP TSC0009031
ttttaatattagt

SEQ ID NO: 259390 - DNA, 13 bp, Artificial Sequence
  Oligonucleotide for detection of SNP TSC0009031
actaatattaaaa

SEQ ID NO: 259391 - DNA, 13 bp, Artificial Sequence
  Oligonucleotide for detection of SNP TSC0062995
gatattaaataga

SEQ ID NO: 259392 - DNA, 13 bp, Artificial Sequence
  Oligonucleotide for detection of SNP TSC0062995
tctatttaatatc

SEQ ID NO: 259393 - DNA, 13 bp, Artificial Sequence
  Oligonucleotide for detection of SNP TSC0062995
gatatttaataga

SEQ ID NO: 259394 - DNA, 13 bp, Artificial Sequence
  Oligonucleotide for detection of SNP TSC0062995
tctattaaatatc

SEQ ID NO: 259395 - DNA, 13 bp, Artificial Sequence
  Oligonucleotide for detection of SNP TSC0062995
tttgtttaataty

SEQ ID NO: 259396 - DNA, 13 bp, Artificial Sequence
  Oligonucleotide for detection of SNP TSC0062995
ratattaaacaaa

SEQ ID NO: 259397 - DNA, 13 bp, Artificial Sequence
  Oligonucleotide for detection of SNP TSC0062995
tttgttaaataty

SEQ ID NO: 259398 - DNA, 13 bp, Artificial Sequence
  Oligonucleotide for detection of SNP TSC0062995
ratatttaacaaa

SEQ ID NO: 259399 - DNA, 13 bp, Artificial Sequence
  Oligonucleotide for detection of SNP TSC0062998
ggtaggatgaaga

SEQ ID NO: 259400 - DNA, 13 bp, Artificial Sequence
  Oligonucleotide for detection of SNP TSC0062998
tcttcatcctacc

SEQ ID NO: 259401 - DNA, 13 bp, Artificial Sequence
  Oligonucleotide for detection of SNP TSC0062998
ggtagggtgaaga

SEQ ID NO: 259402 - DNA, 13 bp, Artificial Sequence
  Oligonucleotide for detection of SNP TSC0062998
tcttcaccctacc

SEQ ID NO: 259403 - DNA, 13 bp, Artificial Sequence
  Oligonucleotide for detection of SNP TSC0062999
gttgtaattatty

SEQ ID NO: 259404 - DNA, 13 bp, Artificial Sequence
  Oligonucleotide for detection of SNP TSC0062999
raataattacaac

SEQ ID NO: 259405 - DNA, 13 bp, Artificial Sequence
  Oligonucleotide for detection of SNP TSC0062999
gttgtagttatty

SEQ ID NO: 259406 - DNA, 13 bp, Artificial Sequence
  Oligonucleotide for detection of SNP TSC0062999
raataactacaac

SEQ ID NO: 259407 - DNA, 13 bp, Artificial Sequence
  Oligonucleotide for detection of SNP TSC0063000
ttttttatttgcg

SEQ ID NO: 259408 - DNA, 13 bp, Artificial Sequence
  Oligonucleotide for detection of SNP TSC0063000
cgcaaataaaaaa

SEQ ID NO: 259409 - DNA, 13 bp, Artificial Sequence
  Oligonucleotide for detection of SNP TSC0063000
ttttttgtttgcg

SEQ ID NO: 259410 - DNA, 13 bp, Artificial Sequence
  Oligonucleotide for detection of SNP TSC0063000
cgcaaacaaaaaa

SEQ ID NO: 259411 - DNA, 13 bp, Artificial Sequence
  Oligonucleotide for detection of SNP TSC0063001
taaaaaatatatg

SEQ ID NO: 259412 - DNA, 13 bp, Artificial Sequence
  Oligonucleotide for detection of SNP TSC0063001
catatatttttta

SEQ ID NO: 259413 - DNA, 13 bp, Artificial Sequence
  Oligonucleotide for detection of SNP TSC0063001
taaaaattatatg

SEQ ID NO: 259414 - DNA, 13 bp, Artificial Sequence
  Oligonucleotide for detection of SNP TSC0063001
catataattttta

SEQ ID NO: 259415 - DNA, 13 bp, Artificial Sequence
  Oligonucleotide for detection of SNP TSC0063001
tatgtatttttta

SEQ ID NO: 259416 - DNA, 13 bp, Artificial Sequence
  Oligonucleotide for detection of SNP TSC0063001
taaaaaatacata

SEQ ID NO: 259417 - DNA, 13 bp, Artificial Sequence
  Oligonucleotide for detection of SNP TSC0063001
tatgtaattttta

SEQ ID NO: 259418 - DNA, 13 bp, Artificial Sequence
  Oligonucleotide for detection of SNP TSC0063001
taaaaattacata

SEQ ID NO: 259419 - DNA, 13 bp, Artificial Sequence
  Oligonucleotide for detection of SNP TSC0063002
aaatatatgaaty

SEQ ID NO: 259420 - DNA, 13 bp, Artificial Sequence
  Oligonucleotide for detection of SNP TSC0063002
rattcatatattt

SEQ ID NO: 259421 - DNA, 13 bp, Artificial Sequence
  Oligonucleotide for detection of SNP TSC0063002
aaatatgtgaaty

SEQ ID NO: 259422 - DNA, 13 bp, Artificial Sequence
  Oligonucleotide for detection of SNP TSC0063002
rattcacatattt

SEQ ID NO: 259423 - DNA, 13 bp, Artificial Sequence
  Oligonucleotide for detection of SNP TSC0063006
aatagaggtttag

SEQ ID NO: 259424 - DNA, 13 bp, Artificial Sequence
  Oligonucleotide for detection of SNP TSC0063006
ctaaacctctatt

SEQ ID NO: 259425 - DNA, 13 bp, Artificial Sequence
  Oligonucleotide for detection of SNP TSC0063006
aatagaagtttag

SEQ ID NO: 259426 - DNA, 13 bp, Artificial Sequence
  Oligonucleotide for detection of SNP TSC0063006
ctaaacttctatt

SEQ ID NO: 259427 - DNA, 13 bp, Artificial Sequence
  Oligonucleotide for detection of SNP TSC0063011
tagtatagtttay

SEQ ID NO: 259428 - DNA, 13 bp, Artificial Sequence
  Oligonucleotide for detection of SNP TSC0063011
rtaaactatacta

SEQ ID NO: 259429 - DNA, 13 bp, Artificial Sequence
  Oligonucleotide for detection of SNP TSC0063011
tagtatggtttay

SEQ ID NO: 259430 - DNA, 13 bp, Artificial Sequence
  Oligonucleotide for detection of SNP TSC0063011
rtaaaccatacta

SEQ ID NO: 259431 - DNA, 13 bp, Artificial Sequence
  Oligonucleotide for detection of SNP TSC0063011
tagtacggtttay

SEQ ID NO: 259432 - DNA, 13 bp, Artificial Sequence
  Oligonucleotide for detection of SNP TSC0063011
rtaaaccgtacta

SEQ ID NO: 259433 - DNA, 13 bp, Artificial Sequence
  Oligonucleotide for detection of SNP TSC0063012
attttatttagaa

SEQ ID NO: 259434 - DNA, 13 bp, Artificial Sequence
  Oligonucleotide for detection of SNP TSC0063012
ttctaaataaaat

SEQ ID NO: 259435 - DNA, 13 bp, Artificial Sequence
  Oligonucleotide for detection of SNP TSC0063012
attttagttagaa

SEQ ID NO: 259436 - DNA, 13 bp, Artificial Sequence
  Oligonucleotide for detection of SNP TSC0063012
ttctaactaaaat

SEQ ID NO: 259437 - DNA, 13 bp, Artificial Sequence
  Oligonucleotide for detection of SNP TSC0063012
ttttagatgagat

SEQ ID NO: 259438 - DNA, 13 bp, Artificial Sequence
  Oligonucleotide for detection of SNP TSC0063012
atctcatctaaaa

SEQ ID NO: 259439 - DNA, 13 bp, Artificial Sequence
  Oligonucleotide for detection of SNP TSC0063012
ttttagttgagat

SEQ ID NO: 259440 - DNA, 13 bp, Artificial Sequence
  Oligonucleotide for detection of SNP TSC0063012
atctcaactaaaa

SEQ ID NO: 259441 - DNA, 13 bp, Artificial Sequence
  Oligonucleotide for detection of SNP TSC0063013
gtggtatggaaty

SEQ ID NO: 259442 - DNA, 13 bp, Artificial Sequence
  Oligonucleotide for detection of SNP TSC0063013
rattccataccac

SEQ ID NO: 259443 - DNA, 13 bp, Artificial Sequence
  Oligonucleotide for detection of SNP TSC0063013
gtggtacggaaty

SEQ ID NO: 259444 - DNA, 13 bp, Artificial Sequence
  Oligonucleotide for detection of SNP TSC0063013
rattccgtaccac

SEQ ID NO: 259445 - DNA, 13 bp, Artificial Sequence
  Oligonucleotide for detection of SNP TSC0063013
ggttttgtgttay

SEQ ID NO: 259446 - DNA, 13 bp, Artificial Sequence
  Oligonucleotide for detection of SNP TSC0063013
rtaacacaaaacc

SEQ ID NO: 259447 - DNA, 13 bp, Artificial Sequence
  Oligonucleotide for detection of SNP TSC0063013
ggttttatgttay

SEQ ID NO: 259448 - DNA, 13 bp, Artificial Sequence
  Oligonucleotide for detection of SNP TSC0063013
rtaacataaaacc

SEQ ID NO: 259449 - DNA, 13 bp, Artificial Sequence
  Oligonucleotide for detection of SNP TSC0063013
ggtttcgtgttay

SEQ ID NO: 259450 - DNA, 13 bp, Artificial Sequence
  Oligonucleotide for detection of SNP TSC0063013
rtaacacgaaacc

SEQ ID NO: 259451 - DNA, 13 bp, Artificial Sequence
  Oligonucleotide for detection of SNP TSC0063014
ttatatgtggtag

SEQ ID NO: 259452 - DNA, 13 bp, Artificial Sequence
  Oligonucleotide for detection of SNP TSC0063014
ctaccacatataa

SEQ ID NO: 259453 - DNA, 13 bp, Artificial Sequence
  Oligonucleotide for detection of SNP TSC0063014
ttatacgtggtag

SEQ ID NO: 259454 - DNA, 13 bp, Artificial Sequence
  Oligonucleotide for detection of SNP TSC0063014
ctaccacgtataa

SEQ ID NO: 259455 - DNA, 13 bp, Artificial Sequence
  Oligonucleotide for detection of SNP TSC0063015
tattttattggag

SEQ ID NO: 259456 - DNA, 13 bp, Artificial Sequence
  Oligonucleotide for detection of SNP TSC0063015
ctccaataaaata

SEQ ID NO: 259457 - DNA, 13 bp, Artificial Sequence
  Oligonucleotide for detection of SNP TSC0063015
tattttgttggag

SEQ ID NO: 259458 - DNA, 13 bp, Artificial Sequence
  Oligonucleotide for detection of SNP TSC0063015
ctccaacaaaata

SEQ ID NO: 259459 - DNA, 13 bp, Artificial Sequence
  Oligonucleotide for detection of SNP TSC0063016
ataagagaaaaag

SEQ ID NO: 259460 - DNA, 13 bp, Artificial Sequence
  Oligonucleotide for detection of SNP TSC0063016
ctttttctcttat

SEQ ID NO: 259461 - DNA, 13 bp, Artificial Sequence
  Oligonucleotide for detection of SNP TSC0063016
ataagaaaaaaag

SEQ ID NO: 259462 - DNA, 13 bp, Artificial Sequence
  Oligonucleotide for detection of SNP TSC0063016
ctttttttcttat

SEQ ID NO: 259463 - DNA, 13 bp, Artificial Sequence
  Oligonucleotide for detection of SNP TSC0005039
atttgtatttaat

SEQ ID NO: 259464 - DNA, 13 bp, Artificial Sequence
  Oligonucleotide for detection of SNP TSC0005039
attaaatacaaat

SEQ ID NO: 259465 - DNA, 13 bp, Artificial Sequence
  Oligonucleotide for detection of SNP TSC0005039
atttgtgtttaat

SEQ ID NO: 259466 - DNA, 13 bp, Artificial Sequence
  Oligonucleotide for detection of SNP TSC0005039
attaaacacaaat

SEQ ID NO: 259467 - DNA, 13 bp, Artificial Sequence
  Oligonucleotide for detection of SNP TSC0063020
taggggatgagat

SEQ ID NO: 259468 - DNA, 13 bp, Artificial Sequence
  Oligonucleotide for detection of SNP TSC0063020
atctcatccccta

SEQ ID NO: 259469 - DNA, 13 bp, Artificial Sequence
  Oligonucleotide for detection of SNP TSC0063020
tagggggtgagat

SEQ ID NO: 259470 - DNA, 13 bp, Artificial Sequence
  Oligonucleotide for detection of SNP TSC0063020
atctcacccccta

SEQ ID NO: 259471 - DNA, 13 bp, Artificial Sequence
  Oligonucleotide for detection of SNP TSC0063021
aggattattgaty

SEQ ID NO: 259472 - DNA, 13 bp, Artificial Sequence
  Oligonucleotide for detection of SNP TSC0063021
ratcaataatcct

SEQ ID NO: 259473 - DNA, 13 bp, Artificial Sequence
  Oligonucleotide for detection of SNP TSC0063021
aggattgttgaty

SEQ ID NO: 259474 - DNA, 13 bp, Artificial Sequence
  Oligonucleotide for detection of SNP TSC0063021
ratcaacaatcct

SEQ ID NO: 259475 - DNA, 13 bp, Artificial Sequence
  Oligonucleotide for detection of SNP TSC0063021
aggatcgttgaty

SEQ ID NO: 259476 - DNA, 13 bp, Artificial Sequence
  Oligonucleotide for detection of SNP TSC0063021
ratcaacgatcct

SEQ ID NO: 259477 - DNA, 13 bp, Artificial Sequence
  Oligonucleotide for detection of SNP TSC0063021
gattagtggtttt

SEQ ID NO: 259478 - DNA, 13 bp, Artificial Sequence
  Oligonucleotide for detection of SNP TSC0063021
aaaaccactaatc

SEQ ID NO: 259479 - DNA, 13 bp, Artificial Sequence
  Oligonucleotide for detection of SNP TSC0063021
gattagcggtttt

SEQ ID NO: 259480 - DNA, 13 bp, Artificial Sequence
  Oligonucleotide for detection of SNP TSC0063021
aaaaccgctaatc

SEQ ID NO: 259481 - DNA, 13 bp, Artificial Sequence
  Oligonucleotide for detection of SNP TSC0063022
ttggaaatatggg

SEQ ID NO: 259482 - DNA, 13 bp, Artificial Sequence
  Oligonucleotide for detection of SNP TSC0063022
cccatatttccaa

SEQ ID NO: 259483 - DNA, 13 bp, Artificial Sequence
  Oligonucleotide for detection of SNP TSC0063022
ttggaagtatggg

SEQ ID NO: 259484 - DNA, 13 bp, Artificial Sequence
  Oligonucleotide for detection of SNP TSC0063022
cccatacttccaa

SEQ ID NO: 259485 - DNA, 13 bp, Artificial Sequence
  Oligonucleotide for detection of SNP TSC0063023
aattttgaatttt

SEQ ID NO: 259486 - DNA, 13 bp, Artificial Sequence
  Oligonucleotide for detection of SNP TSC0063023
aaaattcaaaatt

SEQ ID NO: 259487 - DNA, 13 bp, Artificial Sequence
  Oligonucleotide for detection of SNP TSC0063023
aatttcgaatttt

SEQ ID NO: 259488 - DNA, 13 bp, Artificial Sequence
  Oligonucleotide for detection of SNP TSC0063023
aaaattcgaaatt

SEQ ID NO: 259489 - DNA, 13 bp, Artificial Sequence
  Oligonucleotide for detection of SNP TSC0063023
agaatttgaaatt

SEQ ID NO: 259490 - DNA, 13 bp, Artificial Sequence
  Oligonucleotide for detection of SNP TSC0063023
aatttcaaattct

SEQ ID NO: 259491 - DNA, 13 bp, Artificial Sequence
  Oligonucleotide for detection of SNP TSC0063023
agaattcgaaatt

SEQ ID NO: 259492 - DNA, 13 bp, Artificial Sequence
  Oligonucleotide for detection of SNP TSC0063023
aatttcgaattct

SEQ ID NO: 259493 - DNA, 13 bp, Artificial Sequence
  Oligonucleotide for detection of SNP TSC0063024
gggaggttgatag

SEQ ID NO: 259494 - DNA, 13 bp, Artificial Sequence
  Oligonucleotide for detection of SNP TSC0063024
ctatcaacctccc

SEQ ID NO: 259495 - DNA, 13 bp, Artificial Sequence
  Oligonucleotide for detection of SNP TSC0063024
gggagggtgatag

SEQ ID NO: 259496 - DNA, 13 bp, Artificial Sequence
  Oligonucleotide for detection of SNP TSC0063024
ctatcaccctccc

SEQ ID NO: 259497 - DNA, 13 bp, Artificial Sequence
  Oligonucleotide for detection of SNP TSC0063024
ttgttaattttty

SEQ ID NO: 259498 - DNA, 13 bp, Artificial Sequence
  Oligonucleotide for detection of SNP TSC0063024
raaaaattaacaa

SEQ ID NO: 259499 - DNA, 13 bp, Artificial Sequence
  Oligonucleotide for detection of SNP TSC0063024
ttgttatttttty

SEQ ID NO: 259500 - DNA, 13 bp, Artificial Sequence
  Oligonucleotide for detection of SNP TSC0063024
raaaaaataacaa

SEQ ID NO: 259501 - DNA, 13 bp, Artificial Sequence
  Oligonucleotide for detection of SNP TSC0063025
ttttggttggagy

SEQ ID NO: 259502 - DNA, 13 bp, Artificial Sequence
  Oligonucleotide for detection of SNP TSC0063025
rctccaaccaaaa

SEQ ID NO: 259503 - DNA, 13 bp, Artificial Sequence
  Oligonucleotide for detection of SNP TSC0063025
ttttgggtggagy

SEQ ID NO: 259504 - DNA, 13 bp, Artificial Sequence
  Oligonucleotide for detection of SNP TSC0063025
rctccacccaaaa

SEQ ID NO: 259505 - DNA, 13 bp, Artificial Sequence
  Oligonucleotide for detection of SNP TSC0063025
gttttaattagaa

SEQ ID NO: 259506 - DNA, 13 bp, Artificial Sequence
  Oligonucleotide for detection of SNP TSC0063025
ttctaattaaaac

SEQ ID NO: 259507 - DNA, 13 bp, Artificial Sequence
  Oligonucleotide for detection of SNP TSC0063025
gttttatttagaa

SEQ ID NO: 259508 - DNA, 13 bp, Artificial Sequence
  Oligonucleotide for detection of SNP TSC0063025
ttctaaataaaac

SEQ ID NO: 259509 - DNA, 13 bp, Artificial Sequence
  Oligonucleotide for detection of SNP TSC0063027
tttttagtgaaga

SEQ ID NO: 259510 - DNA, 13 bp, Artificial Sequence
  Oligonucleotide for detection of SNP TSC0063027
tcttcactaaaaa

SEQ ID NO: 259511 - DNA, 13 bp, Artificial Sequence
  Oligonucleotide for detection of SNP TSC0063028
tatttgtgggtty

SEQ ID NO: 259512 - DNA, 13 bp, Artificial Sequence
  Oligonucleotide for detection of SNP TSC0063028
raacccacaaata

SEQ ID NO: 259513 - DNA, 13 bp, Artificial Sequence
  Oligonucleotide for detection of SNP TSC0063028
tatttgcgggtty

SEQ ID NO: 259514 - DNA, 13 bp, Artificial Sequence
  Oligonucleotide for detection of SNP TSC0063028
raacccgcaaata

SEQ ID NO: 259515 - DNA, 13 bp, Artificial Sequence
  Oligonucleotide for detection of SNP TSC0063028
ggatttgtaggta

SEQ ID NO: 259516 - DNA, 13 bp, Artificial Sequence
  Oligonucleotide for detection of SNP TSC0063028
tacctacaaatcc

SEQ ID NO: 259517 - DNA, 13 bp, Artificial Sequence
  Oligonucleotide for detection of SNP TSC0063028
ggatttataggta

SEQ ID NO: 259518 - DNA, 13 bp, Artificial Sequence
  Oligonucleotide for detection of SNP TSC0063028
tacctataaatcc

SEQ ID NO: 259519 - DNA, 13 bp, Artificial Sequence
  Oligonucleotide for detection of SNP TSC0063028
ggattcgtaggta

SEQ ID NO: 259520 - DNA, 13 bp, Artificial Sequence
  Oligonucleotide for detection of SNP TSC0063028
tacctacgaatcc

SEQ ID NO: 259521 - DNA, 13 bp, Artificial Sequence
  Oligonucleotide for detection of SNP TSC0063029
ggaggttgaagga

SEQ ID NO: 259522 - DNA, 13 bp, Artificial Sequence
  Oligonucleotide for detection of SNP TSC0063029
tccttcaacctcc

SEQ ID NO: 259523 - DNA, 13 bp, Artificial Sequence
  Oligonucleotide for detection of SNP TSC0063029
ggaggtcgaagga

SEQ ID NO: 259524 - DNA, 13 bp, Artificial Sequence
  Oligonucleotide for detection of SNP TSC0063029
tccttcgacctcc

SEQ ID NO: 259525 - DNA, 13 bp, Artificial Sequence
  Oligonucleotide for detection of SNP TSC0063030
agatttttttatt

SEQ ID NO: 259526 - DNA, 13 bp, Artificial Sequence
  Oligonucleotide for detection of SNP TSC0063030
aataaaaaaatct

SEQ ID NO: 259527 - DNA, 13 bp, Artificial Sequence
  Oligonucleotide for detection of SNP TSC0063030
agtggaggagttt

SEQ ID NO: 259528 - DNA, 13 bp, Artificial Sequence
  Oligonucleotide for detection of SNP TSC0063030
aaactcctccact

SEQ ID NO: 259529 - DNA, 13 bp, Artificial Sequence
  Oligonucleotide for detection of SNP TSC0063030
agtggatgagttt

SEQ ID NO: 259530 - DNA, 13 bp, Artificial Sequence
  Oligonucleotide for detection of SNP TSC0063030
aaactcatccact

SEQ ID NO: 259531 - DNA, 13 bp, Artificial Sequence
  Oligonucleotide for detection of SNP TSC0063030
agtggacgagttt

SEQ ID NO: 259532 - DNA, 13 bp, Artificial Sequence
  Oligonucleotide for detection of SNP TSC0063030
aaactcgtccact

SEQ ID NO: 259533 - DNA, 13 bp, Artificial Sequence
  Oligonucleotide for detection of SNP TSC0063031
gttggagttttty

SEQ ID NO: 259534 - DNA, 13 bp, Artificial Sequence
  Oligonucleotide for detection of SNP TSC0063031
raaaaactccaac

SEQ ID NO: 259535 - DNA, 13 bp, Artificial Sequence
  Oligonucleotide for detection of SNP TSC0063032
aagtagtgtttat

SEQ ID NO: 259536 - DNA, 13 bp, Artificial Sequence
  Oligonucleotide for detection of SNP TSC0063032
ataaacactactt

SEQ ID NO: 259537 - DNA, 13 bp, Artificial Sequence
  Oligonucleotide for detection of SNP TSC0063032
aagtagagtttat

SEQ ID NO: 259538 - DNA, 13 bp, Artificial Sequence
  Oligonucleotide for detection of SNP TSC0063032
ataaactctactt

SEQ ID NO: 259539 - DNA, 13 bp, Artificial Sequence
  Oligonucleotide for detection of SNP TSC0063033
attattagatgtt

SEQ ID NO: 259540 - DNA, 13 bp, Artificial Sequence
  Oligonucleotide for detection of SNP TSC0063033
aacatctaataat

SEQ ID NO: 259541 - DNA, 13 bp, Artificial Sequence
  Oligonucleotide for detection of SNP TSC0063033
attattggatgtt

SEQ ID NO: 259542 - DNA, 13 bp, Artificial Sequence
  Oligonucleotide for detection of SNP TSC0063033
aacatccaataat

SEQ ID NO: 259543 - DNA, 13 bp, Artificial Sequence
  Oligonucleotide for detection of SNP TSC0063034
ttgattattggat

SEQ ID NO: 259544 - DNA, 13 bp, Artificial Sequence
  Oligonucleotide for detection of SNP TSC0063034
atccaataatcaa

SEQ ID NO: 259545 - DNA, 13 bp, Artificial Sequence
  Oligonucleotide for detection of SNP TSC0063034
ttgattgttggat

SEQ ID NO: 259546 - DNA, 13 bp, Artificial Sequence
  Oligonucleotide for detection of SNP TSC0063034
atccaacaatcaa

SEQ ID NO: 259547 - DNA, 13 bp, Artificial Sequence
  Oligonucleotide for detection of SNP TSC0063035
aaaaaataaaaga

SEQ ID NO: 259548 - DNA, 13 bp, Artificial Sequence
  Oligonucleotide for detection of SNP TSC0063035
tcttttatttttt

SEQ ID NO: 259549 - DNA, 13 bp, Artificial Sequence
  Oligonucleotide for detection of SNP TSC0063036
ttatgatgatttg

SEQ ID NO: 259550 - DNA, 13 bp, Artificial Sequence
  Oligonucleotide for detection of SNP TSC0063036
caaatcatcataa

SEQ ID NO: 259551 - DNA, 13 bp, Artificial Sequence
  Oligonucleotide for detection of SNP TSC0063036
ttatgacgatttg

SEQ ID NO: 259552 - DNA, 13 bp, Artificial Sequence
  Oligonucleotide for detection of SNP TSC0063036
caaatcgtcataa

SEQ ID NO: 259553 - DNA, 13 bp, Artificial Sequence
  Oligonucleotide for detection of SNP TSC0063036
taaattgttatag

SEQ ID NO: 259554 - DNA, 13 bp, Artificial Sequence
  Oligonucleotide for detection of SNP TSC0063036
ctataacaattta

SEQ ID NO: 259555 - DNA, 13 bp, Artificial Sequence
  Oligonucleotide for detection of SNP TSC0063036
taaattattatag

SEQ ID NO: 259556 - DNA, 13 bp, Artificial Sequence
  Oligonucleotide for detection of SNP TSC0063036
ctataataattta

SEQ ID NO: 259557 - DNA, 13 bp, Artificial Sequence
  Oligonucleotide for detection of SNP TSC0063036
taaatcgttatag

SEQ ID NO: 259558 - DNA, 13 bp, Artificial Sequence
  Oligonucleotide for detection of SNP TSC0063036
ctataacgattta

SEQ ID NO: 259559 - DNA, 13 bp, Artificial Sequence
  Oligonucleotide for detection of SNP TSC0063037
gtaggtgtatggt

SEQ ID NO: 259560 - DNA, 13 bp, Artificial Sequence
  Oligonucleotide for detection of SNP TSC0063037
accatacacctac

SEQ ID NO: 259561 - DNA, 13 bp, Artificial Sequence
  Oligonucleotide for detection of SNP TSC0063037
gtaggtatatggt

SEQ ID NO: 259562 - DNA, 13 bp, Artificial Sequence
  Oligonucleotide for detection of SNP TSC0063037
accatatacctac

SEQ ID NO: 259563 - DNA, 13 bp, Artificial Sequence
  Oligonucleotide for detection of SNP TSC0063038
taagattggtagg

SEQ ID NO: 259564 - DNA, 13 bp, Artificial Sequence
  Oligonucleotide for detection of SNP TSC0063038
cctaccaatctta

SEQ ID NO: 259565 - DNA, 13 bp, Artificial Sequence
  Oligonucleotide for detection of SNP TSC0063038
taagatcggtagg

SEQ ID NO: 259566 - DNA, 13 bp, Artificial Sequence
  Oligonucleotide for detection of SNP TSC0063038
cctaccgatctta

SEQ ID NO: 259567 - DNA, 13 bp, Artificial Sequence
  Oligonucleotide for detection of SNP TSC0063038
tttattggttttg

SEQ ID NO: 259568 - DNA, 13 bp, Artificial Sequence
  Oligonucleotide for detection of SNP TSC0063038
caaaaccaataaa

SEQ ID NO: 259569 - DNA, 13 bp, Artificial Sequence
  Oligonucleotide for detection of SNP TSC0063038
tttattagttttg

SEQ ID NO: 259570 - DNA, 13 bp, Artificial Sequence
  Oligonucleotide for detection of SNP TSC0063038
caaaactaataaa

SEQ ID NO: 259571 - DNA, 13 bp, Artificial Sequence
  Oligonucleotide for detection of SNP TSC0063038
tttatcggttttg

SEQ ID NO: 259572 - DNA, 13 bp, Artificial Sequence
  Oligonucleotide for detection of SNP TSC0063038
caaaaccgataaa

SEQ ID NO: 259573 - DNA, 13 bp, Artificial Sequence
  Oligonucleotide for detection of SNP TSC0063039
ggaaagtgtgtgg

SEQ ID NO: 259574 - DNA, 13 bp, Artificial Sequence
  Oligonucleotide for detection of SNP TSC0063039
ccacacactttcc

SEQ ID NO: 259575 - DNA, 13 bp, Artificial Sequence
  Oligonucleotide for detection of SNP TSC0063039
ggaaagcgtgtgg

SEQ ID NO: 259576 - DNA, 13 bp, Artificial Sequence
  Oligonucleotide for detection of SNP TSC0063039
ccacacgctttcc

SEQ ID NO: 259577 - DNA, 13 bp, Artificial Sequence
  Oligonucleotide for detection of SNP TSC0063044
gtgatatgaatat

SEQ ID NO: 259578 - DNA, 13 bp, Artificial Sequence
  Oligonucleotide for detection of SNP TSC0063044
atattcatatcac

SEQ ID NO: 259579 - DNA, 13 bp, Artificial Sequence
  Oligonucleotide for detection of SNP TSC0063044
gtgataggaatat

SEQ ID NO: 259580 - DNA, 13 bp, Artificial Sequence
  Oligonucleotide for detection of SNP TSC0063044
atattcctatcac

SEQ ID NO: 259581 - DNA, 13 bp, Artificial Sequence
  Oligonucleotide for detection of SNP TSC0063045
taaaaaataggta

SEQ ID NO: 259582 - DNA, 13 bp, Artificial Sequence
  Oligonucleotide for detection of SNP TSC0063045
tacctatttttta

SEQ ID NO: 259583 - DNA, 13 bp, Artificial Sequence
  Oligonucleotide for detection of SNP TSC0063045
taaaaattaggta

SEQ ID NO: 259584 - DNA, 13 bp, Artificial Sequence
  Oligonucleotide for detection of SNP TSC0063045
tacctaattttta

SEQ ID NO: 259585 - DNA, 13 bp, Artificial Sequence
  Oligonucleotide for detection of SNP TSC0063046
gtatatagaaatt

SEQ ID NO: 259586 - DNA, 13 bp, Artificial Sequence
  Oligonucleotide for detection of SNP TSC0063046
aatttctatatac

SEQ ID NO: 259587 - DNA, 13 bp, Artificial Sequence
  Oligonucleotide for detection of SNP TSC0063046
gtatattgaaatt

SEQ ID NO: 259588 - DNA, 13 bp, Artificial Sequence
  Oligonucleotide for detection of SNP TSC0063046
aatttcaatatac

SEQ ID NO: 259589 - DNA, 13 bp, Artificial Sequence
  Oligonucleotide for detection of SNP TSC0063046
gtatatcgaaatt

SEQ ID NO: 259590 - DNA, 13 bp, Artificial Sequence
  Oligonucleotide for detection of SNP TSC0063046
aatttcgatatac

SEQ ID NO: 259591 - DNA, 13 bp, Artificial Sequence
  Oligonucleotide for detection of SNP TSC0063046
aatttttgtgtay

SEQ ID NO: 259592 - DNA, 13 bp, Artificial Sequence
  Oligonucleotide for detection of SNP TSC0063046
rtacacaaaaatt

SEQ ID NO: 259593 - DNA, 13 bp, Artificial Sequence
  Oligonucleotide for detection of SNP TSC0063046
aattttggtgtay

SEQ ID NO: 259594 - DNA, 13 bp, Artificial Sequence
  Oligonucleotide for detection of SNP TSC0063046
rtacaccaaaatt

SEQ ID NO: 259595 - DNA, 13 bp, Artificial Sequence
  Oligonucleotide for detection of SNP TSC0063046
aatttcggtgtay

SEQ ID NO: 259596 - DNA, 13 bp, Artificial Sequence
  Oligonucleotide for detection of SNP TSC0063046
rtacaccgaaatt

SEQ ID NO: 259597 - DNA, 13 bp, Artificial Sequence
  Oligonucleotide for detection of SNP TSC0063047
tgttaatgtaaat

SEQ ID NO: 259598 - DNA, 13 bp, Artificial Sequence
  Oligonucleotide for detection of SNP TSC0063047
atttacattaaca

SEQ ID NO: 259599 - DNA, 13 bp, Artificial Sequence
  Oligonucleotide for detection of SNP TSC0063047
tgttaacgtaaat

SEQ ID NO: 259600 - DNA, 13 bp, Artificial Sequence
  Oligonucleotide for detection of SNP TSC0063047
atttacgttaaca

SEQ ID NO: 259601 - DNA, 13 bp, Artificial Sequence
  Oligonucleotide for detection of SNP TSC0004970
aaaattattaagt

SEQ ID NO: 259602 - DNA, 13 bp, Artificial Sequence
  Oligonucleotide for detection of SNP TSC0004970
acttaataatttt

SEQ ID NO: 259603 - DNA, 13 bp, Artificial Sequence
  Oligonucleotide for detection of SNP TSC0004970
aaaatttttaagt

SEQ ID NO: 259604 - DNA, 13 bp, Artificial Sequence
  Oligonucleotide for detection of SNP TSC0004970
acttaaaaatttt

SEQ ID NO: 259605 - DNA, 13 bp, Artificial Sequence
  Oligonucleotide for detection of SNP TSC0004970
atttaaaaatttt

SEQ ID NO: 259606 - DNA, 13 bp, Artificial Sequence
  Oligonucleotide for detection of SNP TSC0004970
aaaatttttaaat

SEQ ID NO: 259607 - DNA, 13 bp, Artificial Sequence
  Oligonucleotide for detection of SNP TSC0063049
tgtagtattttty

SEQ ID NO: 259608 - DNA, 13 bp, Artificial Sequence
  Oligonucleotide for detection of SNP TSC0063049
raaaaatactaca

SEQ ID NO: 259609 - DNA, 13 bp, Artificial Sequence
  Oligonucleotide for detection of SNP TSC0063049
tgtagttttttty

SEQ ID NO: 259610 - DNA, 13 bp, Artificial Sequence
  Oligonucleotide for detection of SNP TSC0063049
raaaaaaactaca

SEQ ID NO: 259611 - DNA, 13 bp, Artificial Sequence
  Oligonucleotide for detection of SNP TSC0063049
ggggggtgttgta

SEQ ID NO: 259612 - DNA, 13 bp, Artificial Sequence
  Oligonucleotide for detection of SNP TSC0063049
tacaacacccccc

SEQ ID NO: 259613 - DNA, 13 bp, Artificial Sequence
  Oligonucleotide for detection of SNP TSC0063049
ggggggggttgta

SEQ ID NO: 259614 - DNA, 13 bp, Artificial Sequence
  Oligonucleotide for detection of SNP TSC0063049
tacaacccccccc

SEQ ID NO: 259615 - DNA, 13 bp, Artificial Sequence
  Oligonucleotide for detection of SNP TSC0063050
aatagaaattagg

SEQ ID NO: 259616 - DNA, 13 bp, Artificial Sequence
  Oligonucleotide for detection of SNP TSC0063050
cctaatttctatt

SEQ ID NO: 259617 - DNA, 13 bp, Artificial Sequence
  Oligonucleotide for detection of SNP TSC0063050
aatagatattagg

SEQ ID NO: 259618 - DNA, 13 bp, Artificial Sequence
  Oligonucleotide for detection of SNP TSC0063050
cctaatatctatt

SEQ ID NO: 259619 - DNA, 13 bp, Artificial Sequence
  Oligonucleotide for detection of SNP TSC0063050
tttgatttttatt

SEQ ID NO: 259620 - DNA, 13 bp, Artificial Sequence
  Oligonucleotide for detection of SNP TSC0063050
aataaaaatcaaa

SEQ ID NO: 259621 - DNA, 13 bp, Artificial Sequence
  Oligonucleotide for detection of SNP TSC0063050
tttgatatttatt

SEQ ID NO: 259622 - DNA, 13 bp, Artificial Sequence
  Oligonucleotide for detection of SNP TSC0063050
aataaatatcaaa

SEQ ID NO: 259623 - DNA, 13 bp, Artificial Sequence
  Oligonucleotide for detection of SNP TSC0063051
gttataatgaatt

SEQ ID NO: 259624 - DNA, 13 bp, Artificial Sequence
  Oligonucleotide for detection of SNP TSC0063051
aattcattataac

SEQ ID NO: 259625 - DNA, 13 bp, Artificial Sequence
  Oligonucleotide for detection of SNP TSC0063051
gttatagtgaatt

SEQ ID NO: 259626 - DNA, 13 bp, Artificial Sequence
  Oligonucleotide for detection of SNP TSC0063051
aattcactataac

SEQ ID NO: 259627 - DNA, 13 bp, Artificial Sequence
  Oligonucleotide for detection of SNP TSC0063052
tttatagtaggga

SEQ ID NO: 259628 - DNA, 13 bp, Artificial Sequence
  Oligonucleotide for detection of SNP TSC0063052
tccctactataaa

SEQ ID NO: 259629 - DNA, 13 bp, Artificial Sequence
  Oligonucleotide for detection of SNP TSC0063052
tttataataggga

SEQ ID NO: 259630 - DNA, 13 bp, Artificial Sequence
  Oligonucleotide for detection of SNP TSC0063052
tccctattataaa

SEQ ID NO: 259631 - DNA, 13 bp, Artificial Sequence
  Oligonucleotide for detection of SNP TSC0007658
ggttataatgtta

SEQ ID NO: 259632 - DNA, 13 bp, Artificial Sequence
  Oligonucleotide for detection of SNP TSC0007658
taacattataacc

SEQ ID NO: 259633 - DNA, 13 bp, Artificial Sequence
  Oligonucleotide for detection of SNP TSC0007658
ggttatgatgtta

SEQ ID NO: 259634 - DNA, 13 bp, Artificial Sequence
  Oligonucleotide for detection of SNP TSC0007658
taacatcataacc

SEQ ID NO: 259635 - DNA, 13 bp, Artificial Sequence
  Oligonucleotide for detection of SNP TSC0007658
ggttataacgtta

SEQ ID NO: 259636 - DNA, 13 bp, Artificial Sequence
  Oligonucleotide for detection of SNP TSC0007658
taacgttataacc

SEQ ID NO: 259637 - DNA, 13 bp, Artificial Sequence
  Oligonucleotide for detection of SNP TSC0007658
ggttatgacgtta

SEQ ID NO: 259638 - DNA, 13 bp, Artificial Sequence
  Oligonucleotide for detection of SNP TSC0007658
taacgtcataacc

SEQ ID NO: 259639 - DNA, 13 bp, Artificial Sequence
  Oligonucleotide for detection of SNP TSC0063056
tgattagtaaagy

SEQ ID NO: 259640 - DNA, 13 bp, Artificial Sequence
  Oligonucleotide for detection of SNP TSC0063056
rctttactaatca

SEQ ID NO: 259641 - DNA, 13 bp, Artificial Sequence
  Oligonucleotide for detection of SNP TSC0063056
tgattaataaagy

SEQ ID NO: 259642 - DNA, 13 bp, Artificial Sequence
  Oligonucleotide for detection of SNP TSC0063056
rctttattaatca

SEQ ID NO: 259643 - DNA, 13 bp, Artificial Sequence
  Oligonucleotide for detection of SNP TSC0063057
ttaataaaaatgt

SEQ ID NO: 259644 - DNA, 13 bp, Artificial Sequence
  Oligonucleotide for detection of SNP TSC0063057
acatttttattaa

SEQ ID NO: 259645 - DNA, 13 bp, Artificial Sequence
  Oligonucleotide for detection of SNP TSC0063057
ttaatagaaatgt

SEQ ID NO: 259646 - DNA, 13 bp, Artificial Sequence
  Oligonucleotide for detection of SNP TSC0063057
acatttctattaa

SEQ ID NO: 259647 - DNA, 13 bp, Artificial Sequence
  Oligonucleotide for detection of SNP TSC0063060
tataagtgttaag

SEQ ID NO: 259648 - DNA, 13 bp, Artificial Sequence
  Oligonucleotide for detection of SNP TSC0063060
cttaacacttata

SEQ ID NO: 259649 - DNA, 13 bp, Artificial Sequence
  Oligonucleotide for detection of SNP TSC0063060
tataagcgttaag

SEQ ID NO: 259650 - DNA, 13 bp, Artificial Sequence
  Oligonucleotide for detection of SNP TSC0063060
cttaacgcttata

SEQ ID NO: 259651 - DNA, 13 bp, Artificial Sequence
  Oligonucleotide for detection of SNP TSC0063060
tttgatgtttgtg

SEQ ID NO: 259652 - DNA, 13 bp, Artificial Sequence
  Oligonucleotide for detection of SNP TSC0063060
cacaaacatcaaa

SEQ ID NO: 259653 - DNA, 13 bp, Artificial Sequence
  Oligonucleotide for detection of SNP TSC0063060
tttgatatttgtg

SEQ ID NO: 259654 - DNA, 13 bp, Artificial Sequence
  Oligonucleotide for detection of SNP TSC0063060
cacaaatatcaaa

SEQ ID NO: 259655 - DNA, 13 bp, Artificial Sequence
  Oligonucleotide for detection of SNP TSC0063060
tttgacgtttgtg

SEQ ID NO: 259656 - DNA, 13 bp, Artificial Sequence
  Oligonucleotide for detection of SNP TSC0063060
cacaaacgtcaaa

SEQ ID NO: 259657 - DNA, 13 bp, Artificial Sequence
  Oligonucleotide for detection of SNP TSC0063062
ttgaaataaatga

SEQ ID NO: 259658 - DNA, 13 bp, Artificial Sequence
  Oligonucleotide for detection of SNP TSC0063062
tcatttatttcaa

SEQ ID NO: 259659 - DNA, 13 bp, Artificial Sequence
  Oligonucleotide for detection of SNP TSC0063063
tattgtagtattt

SEQ ID NO: 259660 - DNA, 13 bp, Artificial Sequence
  Oligonucleotide for detection of SNP TSC0063063
aaatactacaata

SEQ ID NO: 259661 - DNA, 13 bp, Artificial Sequence
  Oligonucleotide for detection of SNP TSC0063063
tattgtggtattt

SEQ ID NO: 259662 - DNA, 13 bp, Artificial Sequence
  Oligonucleotide for detection of SNP TSC0063063
aaataccacaata

SEQ ID NO: 259663 - DNA, 13 bp, Artificial Sequence
  Oligonucleotide for detection of SNP TSC0063064
ataaatatattga

SEQ ID NO: 259664 - DNA, 13 bp, Artificial Sequence
  Oligonucleotide for detection of SNP TSC0063064
tcaatatatttat

SEQ ID NO: 259665 - DNA, 13 bp, Artificial Sequence
  Oligonucleotide for detection of SNP TSC0063064
ataaatttattga

SEQ ID NO: 259666 - DNA, 13 bp, Artificial Sequence
  Oligonucleotide for detection of SNP TSC0063064
tcaataaatttat

SEQ ID NO: 259667 - DNA, 13 bp, Artificial Sequence
  Oligonucleotide for detection of SNP TSC0063064
ttaatgtgtttgt

SEQ ID NO: 259668 - DNA, 13 bp, Artificial Sequence
  Oligonucleotide for detection of SNP TSC0063064
acaaacacattaa

SEQ ID NO: 259669 - DNA, 13 bp, Artificial Sequence
  Oligonucleotide for detection of SNP TSC0063064
ttaatgggtttgt

SEQ ID NO: 259670 - DNA, 13 bp, Artificial Sequence
  Oligonucleotide for detection of SNP TSC0063064
acaaacccattaa

SEQ ID NO: 259671 - DNA, 13 bp, Artificial Sequence
  Oligonucleotide for detection of SNP TSC0063065
tattgaaggtata

SEQ ID NO: 259672 - DNA, 13 bp, Artificial Sequence
  Oligonucleotide for detection of SNP TSC0063065
tataccttcaata

SEQ ID NO: 259673 - DNA, 13 bp, Artificial Sequence
  Oligonucleotide for detection of SNP TSC0063065
tattgatggtata

SEQ ID NO: 259674 - DNA, 13 bp, Artificial Sequence
  Oligonucleotide for detection of SNP TSC0063065
tataccatcaata

SEQ ID NO: 259675 - DNA, 13 bp, Artificial Sequence
  Oligonucleotide for detection of SNP TSC0063065
tattgacggtata

SEQ ID NO: 259676 - DNA, 13 bp, Artificial Sequence
  Oligonucleotide for detection of SNP TSC0063065
tataccgtcaata

SEQ ID NO: 259677 - DNA, 13 bp, Artificial Sequence
  Oligonucleotide for detection of SNP TSC0063065
tgtgtttttagtg

SEQ ID NO: 259678 - DNA, 13 bp, Artificial Sequence
  Oligonucleotide for detection of SNP TSC0063065
cactaaaaacaca

SEQ ID NO: 259679 - DNA, 13 bp, Artificial Sequence
  Oligonucleotide for detection of SNP TSC0063065
tgtgttgttagtg

SEQ ID NO: 259680 - DNA, 13 bp, Artificial Sequence
  Oligonucleotide for detection of SNP TSC0063065
cactaacaacaca

SEQ ID NO: 259681 - DNA, 13 bp, Artificial Sequence
  Oligonucleotide for detection of SNP TSC0063065
tgtgtcgttagtg

SEQ ID NO: 259682 - DNA, 13 bp, Artificial Sequence
  Oligonucleotide for detection of SNP TSC0063065
cactaacgacaca

SEQ ID NO: 259683 - DNA, 13 bp, Artificial Sequence
  Oligonucleotide for detection of SNP TSC0063066
gagatggaaggay

SEQ ID NO: 259684 - DNA, 13 bp, Artificial Sequence
  Oligonucleotide for detection of SNP TSC0063066
rtccttccatctc

SEQ ID NO: 259685 - DNA, 13 bp, Artificial Sequence
  Oligonucleotide for detection of SNP TSC0063066
gagatgaaaggay

SEQ ID NO: 259686 - DNA, 13 bp, Artificial Sequence
  Oligonucleotide for detection of SNP TSC0063066
rtcctttcatctc

SEQ ID NO: 259687 - DNA, 13 bp, Artificial Sequence
  Oligonucleotide for detection of SNP TSC0063067
agagttagtttty

SEQ ID NO: 259688 - DNA, 13 bp, Artificial Sequence
  Oligonucleotide for detection of SNP TSC0063067
raaaactaactct

SEQ ID NO: 259689 - DNA, 13 bp, Artificial Sequence
  Oligonucleotide for detection of SNP TSC0063069
ttttagagtgaga

SEQ ID NO: 259690 - DNA, 13 bp, Artificial Sequence
  Oligonucleotide for detection of SNP TSC0063069
tctcactctaaaa

SEQ ID NO: 259691 - DNA, 13 bp, Artificial Sequence
  Oligonucleotide for detection of SNP TSC0063069
ttttagtgtgaga

SEQ ID NO: 259692 - DNA, 13 bp, Artificial Sequence
  Oligonucleotide for detection of SNP TSC0063069
tctcacactaaaa

SEQ ID NO: 259693 - DNA, 13 bp, Artificial Sequence
  Oligonucleotide for detection of SNP TSC0063069
ttttattttgaag

SEQ ID NO: 259694 - DNA, 13 bp, Artificial Sequence
  Oligonucleotide for detection of SNP TSC0063069
cttcaaaataaaa

SEQ ID NO: 259695 - DNA, 13 bp, Artificial Sequence
  Oligonucleotide for detection of SNP TSC0063069
ttttatattgaag

SEQ ID NO: 259696 - DNA, 13 bp, Artificial Sequence
  Oligonucleotide for detection of SNP TSC0063069
cttcaatataaaa

SEQ ID NO: 259697 - DNA, 13 bp, Artificial Sequence
  Oligonucleotide for detection of SNP TSC0063070
gtagaagagatta

SEQ ID NO: 259698 - DNA, 13 bp, Artificial Sequence
  Oligonucleotide for detection of SNP TSC0063070
taatctcttctac

SEQ ID NO: 259699 - DNA, 13 bp, Artificial Sequence
  Oligonucleotide for detection of SNP TSC0063070
gtagaaaagatta

SEQ ID NO: 259700 - DNA, 13 bp, Artificial Sequence
  Oligonucleotide for detection of SNP TSC0063070
taatcttttctac

SEQ ID NO: 259701 - DNA, 13 bp, Artificial Sequence
  Oligonucleotide for detection of SNP TSC0063071
aattttatagtgg

SEQ ID NO: 259702 - DNA, 13 bp, Artificial Sequence
  Oligonucleotide for detection of SNP TSC0063071
ccactataaaatt

SEQ ID NO: 259703 - DNA, 13 bp, Artificial Sequence
  Oligonucleotide for detection of SNP TSC0063074
tatttataaatty

SEQ ID NO: 259704 - DNA, 13 bp, Artificial Sequence
  Oligonucleotide for detection of SNP TSC0063074
raatttataaata

SEQ ID NO: 259705 - DNA, 13 bp, Artificial Sequence
  Oligonucleotide for detection of SNP TSC0063074
tatttagaaatty

SEQ ID NO: 259706 - DNA, 13 bp, Artificial Sequence
  Oligonucleotide for detection of SNP TSC0063074
raatttctaaata

SEQ ID NO: 259707 - DNA, 13 bp, Artificial Sequence
  Oligonucleotide for detection of SNP TSC0063074
ggatttataggtg

SEQ ID NO: 259708 - DNA, 13 bp, Artificial Sequence
  Oligonucleotide for detection of SNP TSC0063074
cacctataaatcc

SEQ ID NO: 259709 - DNA, 13 bp, Artificial Sequence
  Oligonucleotide for detection of SNP TSC0063074
ggatttttaggtg

SEQ ID NO: 259710 - DNA, 13 bp, Artificial Sequence
  Oligonucleotide for detection of SNP TSC0063074
cacctaaaaatcc

SEQ ID NO: 259711 - DNA, 13 bp, Artificial Sequence
  Oligonucleotide for detection of SNP TSC0063075
tagaagaatgtta

SEQ ID NO: 259712 - DNA, 13 bp, Artificial Sequence
  Oligonucleotide for detection of SNP TSC0063075
taacattcttcta

SEQ ID NO: 259713 - DNA, 13 bp, Artificial Sequence
  Oligonucleotide for detection of SNP TSC0063075
tagaagtatgtta

SEQ ID NO: 259714 - DNA, 13 bp, Artificial Sequence
  Oligonucleotide for detection of SNP TSC0063075
taacatacttcta

SEQ ID NO: 259715 - DNA, 13 bp, Artificial Sequence
  Oligonucleotide for detection of SNP TSC0063075
tggtatttttttg

SEQ ID NO: 259716 - DNA, 13 bp, Artificial Sequence
  Oligonucleotide for detection of SNP TSC0063075
caaaaaaatacca

SEQ ID NO: 259717 - DNA, 13 bp, Artificial Sequence
  Oligonucleotide for detection of SNP TSC0063075
tggtatgtttttg

SEQ ID NO: 259718 - DNA, 13 bp, Artificial Sequence
  Oligonucleotide for detection of SNP TSC0063075
caaaaacatacca

SEQ ID NO: 259719 - DNA, 13 bp, Artificial Sequence
  Oligonucleotide for detection of SNP TSC0004612
ttttttaagatta

SEQ ID NO: 259720 - DNA, 13 bp, Artificial Sequence
  Oligonucleotide for detection of SNP TSC0004612
taatcttaaaaaa

SEQ ID NO: 259721 - DNA, 13 bp, Artificial Sequence
  Oligonucleotide for detection of SNP TSC0004612
ttttttgagatta

SEQ ID NO: 259722 - DNA, 13 bp, Artificial Sequence
  Oligonucleotide for detection of SNP TSC0004612
taatctcaaaaaa

SEQ ID NO: 259723 - DNA, 13 bp, Artificial Sequence
  Oligonucleotide for detection of SNP TSC0004612
tttttcgagatta

SEQ ID NO: 259724 - DNA, 13 bp, Artificial Sequence
  Oligonucleotide for detection of SNP TSC0004612
taatctcgaaaaa

SEQ ID NO: 259725 - DNA, 13 bp, Artificial Sequence
  Oligonucleotide for detection of SNP TSC0004612
tggttttgggaaa

SEQ ID NO: 259726 - DNA, 13 bp, Artificial Sequence
  Oligonucleotide for detection of SNP TSC0004612
tttcccaaaacca

SEQ ID NO: 259727 - DNA, 13 bp, Artificial Sequence
  Oligonucleotide for detection of SNP TSC0004612
tggtttcgggaaa

SEQ ID NO: 259728 - DNA, 13 bp, Artificial Sequence
  Oligonucleotide for detection of SNP TSC0004612
tttcccgaaacca

SEQ ID NO: 259729 - DNA, 13 bp, Artificial Sequence
  Oligonucleotide for detection of SNP TSC0063080
aagaagaaatata

SEQ ID NO: 259730 - DNA, 13 bp, Artificial Sequence
  Oligonucleotide for detection of SNP TSC0063080
tatatttcttctt

SEQ ID NO: 259731 - DNA, 13 bp, Artificial Sequence
  Oligonucleotide for detection of SNP TSC0063080
aagaaggaatata

SEQ ID NO: 259732 - DNA, 13 bp, Artificial Sequence
  Oligonucleotide for detection of SNP TSC0063080
tatattccttctt

SEQ ID NO: 259733 - DNA, 13 bp, Artificial Sequence
  Oligonucleotide for detection of SNP TSC0063081
tatttataagtgg

SEQ ID NO: 259734 - DNA, 13 bp, Artificial Sequence
  Oligonucleotide for detection of SNP TSC0063081
ccacttataaata

SEQ ID NO: 259735 - DNA, 13 bp, Artificial Sequence
  Oligonucleotide for detection of SNP TSC0063081
tatttagaagtgg

SEQ ID NO: 259736 - DNA, 13 bp, Artificial Sequence
  Oligonucleotide for detection of SNP TSC0063081
ccacttctaaata

SEQ ID NO: 259737 - DNA, 13 bp, Artificial Sequence
  Oligonucleotide for detection of SNP TSC0063081
ttatttttggatg

SEQ ID NO: 259738 - DNA, 13 bp, Artificial Sequence
  Oligonucleotide for detection of SNP TSC0063081
catccaaaaataa

SEQ ID NO: 259739 - DNA, 13 bp, Artificial Sequence
  Oligonucleotide for detection of SNP TSC0063082
ttaaagtgaatty

SEQ ID NO: 259740 - DNA, 13 bp, Artificial Sequence
  Oligonucleotide for detection of SNP TSC0063082
raattcactttaa

SEQ ID NO: 259741 - DNA, 13 bp, Artificial Sequence
  Oligonucleotide for detection of SNP TSC0063082
ttaaagcgaatty

SEQ ID NO: 259742 - DNA, 13 bp, Artificial Sequence
  Oligonucleotide for detection of SNP TSC0063082
raattcgctttaa

SEQ ID NO: 259743 - DNA, 13 bp, Artificial Sequence
  Oligonucleotide for detection of SNP TSC0063082
gggtttgttttaa

SEQ ID NO: 259744 - DNA, 13 bp, Artificial Sequence
  Oligonucleotide for detection of SNP TSC0063082
ttaaaacaaaccc

SEQ ID NO: 259745 - DNA, 13 bp, Artificial Sequence
  Oligonucleotide for detection of SNP TSC0063082
gggtttattttaa

SEQ ID NO: 259746 - DNA, 13 bp, Artificial Sequence
  Oligonucleotide for detection of SNP TSC0063082
ttaaaataaaccc

SEQ ID NO: 259747 - DNA, 13 bp, Artificial Sequence
  Oligonucleotide for detection of SNP TSC0063082
gggttcgttttaa

SEQ ID NO: 259748 - DNA, 13 bp, Artificial Sequence
  Oligonucleotide for detection of SNP TSC0063082
ttaaaacgaaccc

SEQ ID NO: 259749 - DNA, 13 bp, Artificial Sequence
  Oligonucleotide for detection of SNP TSC0063084
gcgatttgtttay

SEQ ID NO: 259750 - DNA, 13 bp, Artificial Sequence
  Oligonucleotide for detection of SNP TSC0063084
rtaaacaaatcgc

SEQ ID NO: 259751 - DNA, 13 bp, Artificial Sequence
  Oligonucleotide for detection of SNP TSC0063084
gcgattcgtttay

SEQ ID NO: 259752 - DNA, 13 bp, Artificial Sequence
  Oligonucleotide for detection of SNP TSC0063084
rtaaacgaatcgc

SEQ ID NO: 259753 - DNA, 13 bp, Artificial Sequence
  Oligonucleotide for detection of SNP TSC0063084
gtgggtagatcgy

SEQ ID NO: 259754 - DNA, 13 bp, Artificial Sequence
  Oligonucleotide for detection of SNP TSC0063084
rcgatctacccac

SEQ ID NO: 259755 - DNA, 13 bp, Artificial Sequence
  Oligonucleotide for detection of SNP TSC0063084
gtgggtggatcgy

SEQ ID NO: 259756 - DNA, 13 bp, Artificial Sequence
  Oligonucleotide for detection of SNP TSC0063084
rcgatccacccac

SEQ ID NO: 259757 - DNA, 13 bp, Artificial Sequence
  Oligonucleotide for detection of SNP TSC0063084
gtgggcggatcgy

SEQ ID NO: 259758 - DNA, 13 bp, Artificial Sequence
  Oligonucleotide for detection of SNP TSC0063084
rcgatccgcccac

SEQ ID NO: 259759 - DNA, 13 bp, Artificial Sequence
  Oligonucleotide for detection of SNP TSC0063087
aggtttaatatty

SEQ ID NO: 259760 - DNA, 13 bp, Artificial Sequence
  Oligonucleotide for detection of SNP TSC0063087
raatattaaacct

SEQ ID NO: 259761 - DNA, 13 bp, Artificial Sequence
  Oligonucleotide for detection of SNP TSC0063087
aggtttgatatty

SEQ ID NO: 259762 - DNA, 13 bp, Artificial Sequence
  Oligonucleotide for detection of SNP TSC0063087
raatatcaaacct

SEQ ID NO: 259763 - DNA, 13 bp, Artificial Sequence
  Oligonucleotide for detection of SNP TSC0063087
aggttcgatatty

SEQ ID NO: 259764 - DNA, 13 bp, Artificial Sequence
  Oligonucleotide for detection of SNP TSC0063087
raatatcgaacct

SEQ ID NO: 259765 - DNA, 13 bp, Artificial Sequence
  Oligonucleotide for detection of SNP TSC0063087
ggatgttggattt

SEQ ID NO: 259766 - DNA, 13 bp, Artificial Sequence
  Oligonucleotide for detection of SNP TSC0063087
aaatccaacatcc

SEQ ID NO: 259767 - DNA, 13 bp, Artificial Sequence
  Oligonucleotide for detection of SNP TSC0063087
ggatgtcggattt

SEQ ID NO: 259768 - DNA, 13 bp, Artificial Sequence
  Oligonucleotide for detection of SNP TSC0063087
aaatccgacatcc

SEQ ID NO: 259769 - DNA, 13 bp, Artificial Sequence
  Oligonucleotide for detection of SNP TSC0063088
ggaatttaagtat

SEQ ID NO: 259770 - DNA, 13 bp, Artificial Sequence
  Oligonucleotide for detection of SNP TSC0063088
atacttaaattcc

SEQ ID NO: 259771 - DNA, 13 bp, Artificial Sequence
  Oligonucleotide for detection of SNP TSC0063088
ggaattgaagtat

SEQ ID NO: 259772 - DNA, 13 bp, Artificial Sequence
  Oligonucleotide for detection of SNP TSC0063088
atacttcaattcc

SEQ ID NO: 259773 - DNA, 13 bp, Artificial Sequence
  Oligonucleotide for detection of SNP TSC0063088
atatttaaattty

SEQ ID NO: 259774 - DNA, 13 bp, Artificial Sequence
  Oligonucleotide for detection of SNP TSC0063088
raaatttaaatat

SEQ ID NO: 259775 - DNA, 13 bp, Artificial Sequence
  Oligonucleotide for detection of SNP TSC0063088
atattttaattty

SEQ ID NO: 259776 - DNA, 13 bp, Artificial Sequence
  Oligonucleotide for detection of SNP TSC0063088
raaattaaaatat

SEQ ID NO: 259777 - DNA, 13 bp, Artificial Sequence
  Oligonucleotide for detection of SNP TSC0063089
tggtttaaaagty

SEQ ID NO: 259778 - DNA, 13 bp, Artificial Sequence
  Oligonucleotide for detection of SNP TSC0063089
racttttaaacca

SEQ ID NO: 259779 - DNA, 13 bp, Artificial Sequence
  Oligonucleotide for detection of SNP TSC0063089
tggttcgaaagty

SEQ ID NO: 259780 - DNA, 13 bp, Artificial Sequence
  Oligonucleotide for detection of SNP TSC0063089
ractttcgaacca

SEQ ID NO: 259781 - DNA, 13 bp, Artificial Sequence
  Oligonucleotide for detection of SNP TSC0063089
ggtttttggatta

SEQ ID NO: 259782 - DNA, 13 bp, Artificial Sequence
  Oligonucleotide for detection of SNP TSC0063089
taatccaaaaacc

SEQ ID NO: 259783 - DNA, 13 bp, Artificial Sequence
  Oligonucleotide for detection of SNP TSC0063089
ggttttcggatta

SEQ ID NO: 259784 - DNA, 13 bp, Artificial Sequence
  Oligonucleotide for detection of SNP TSC0063089
taatccgaaaacc

SEQ ID NO: 259785 - DNA, 13 bp, Artificial Sequence
  Oligonucleotide for detection of SNP TSC0063090
attttatgtattt

SEQ ID NO: 259786 - DNA, 13 bp, Artificial Sequence
  Oligonucleotide for detection of SNP TSC0063090
aaatacataaaat

SEQ ID NO: 259787 - DNA, 13 bp, Artificial Sequence
  Oligonucleotide for detection of SNP TSC0063090
attttacgtattt

SEQ ID NO: 259788 - DNA, 13 bp, Artificial Sequence
  Oligonucleotide for detection of SNP TSC0063090
aaatacgtaaaat

SEQ ID NO: 259789 - DNA, 13 bp, Artificial Sequence
  Oligonucleotide for detection of SNP TSC0063090
aggtatgtgagat

SEQ ID NO: 259790 - DNA, 13 bp, Artificial Sequence
  Oligonucleotide for detection of SNP TSC0063090
atctcacatacct

SEQ ID NO: 259791 - DNA, 13 bp, Artificial Sequence
  Oligonucleotide for detection of SNP TSC0063090
aggtatatgagat

SEQ ID NO: 259792 - DNA, 13 bp, Artificial Sequence
  Oligonucleotide for detection of SNP TSC0063090
atctcatatacct

SEQ ID NO: 259793 - DNA, 13 bp, Artificial Sequence
  Oligonucleotide for detection of SNP TSC0063090
aggtacgtgagat

SEQ ID NO: 259794 - DNA, 13 bp, Artificial Sequence
  Oligonucleotide for detection of SNP TSC0063090
atctcacgtacct

SEQ ID NO: 259795 - DNA, 13 bp, Artificial Sequence
  Oligonucleotide for detection of SNP TSC0063091
taaataattatay

SEQ ID NO: 259796 - DNA, 13 bp, Artificial Sequence
  Oligonucleotide for detection of SNP TSC0063091
rtataattattta

SEQ ID NO: 259797 - DNA, 13 bp, Artificial Sequence
  Oligonucleotide for detection of SNP TSC0063091
taaatatttatay

SEQ ID NO: 259798 - DNA, 13 bp, Artificial Sequence
  Oligonucleotide for detection of SNP TSC0063091
rtataaatattta

SEQ ID NO: 259799 - DNA, 13 bp, Artificial Sequence
  Oligonucleotide for detection of SNP TSC0063091
gtgtagttgttta

SEQ ID NO: 259800 - DNA, 13 bp, Artificial Sequence
  Oligonucleotide for detection of SNP TSC0063091
taaacaactacac

SEQ ID NO: 259801 - DNA, 13 bp, Artificial Sequence
  Oligonucleotide for detection of SNP TSC0063091
gtgtagatgttta

SEQ ID NO: 259802 - DNA, 13 bp, Artificial Sequence
  Oligonucleotide for detection of SNP TSC0063091
taaacatctacac

SEQ ID NO: 259803 - DNA, 13 bp, Artificial Sequence
  Oligonucleotide for detection of SNP TSC0063092
aaataaatataty

SEQ ID NO: 259804 - DNA, 13 bp, Artificial Sequence
  Oligonucleotide for detection of SNP TSC0063092
ratatatttattt

SEQ ID NO: 259805 - DNA, 13 bp, Artificial Sequence
  Oligonucleotide for detection of SNP TSC0063092
aaataattataty

SEQ ID NO: 259806 - DNA, 13 bp, Artificial Sequence
  Oligonucleotide for detection of SNP TSC0063092
ratataattattt

SEQ ID NO: 259807 - DNA, 13 bp, Artificial Sequence
  Oligonucleotide for detection of SNP TSC0063092
ggtgtatttgttt

SEQ ID NO: 259808 - DNA, 13 bp, Artificial Sequence
  Oligonucleotide for detection of SNP TSC0063092
aaacaaatacacc

SEQ ID NO: 259809 - DNA, 13 bp, Artificial Sequence
  Oligonucleotide for detection of SNP TSC0063092
ggtgtagttgttt

SEQ ID NO: 259810 - DNA, 13 bp, Artificial Sequence
  Oligonucleotide for detection of SNP TSC0063092
aaacaactacacc

SEQ ID NO: 259811 - DNA, 13 bp, Artificial Sequence
  Oligonucleotide for detection of SNP TSC0063093
tgtattaatgttt

SEQ ID NO: 259812 - DNA, 13 bp, Artificial Sequence
  Oligonucleotide for detection of SNP TSC0063093
aaacattaataca

SEQ ID NO: 259813 - DNA, 13 bp, Artificial Sequence
  Oligonucleotide for detection of SNP TSC0063093
tgtattgatgttt

SEQ ID NO: 259814 - DNA, 13 bp, Artificial Sequence
  Oligonucleotide for detection of SNP TSC0063093
aaacatcaataca

SEQ ID NO: 259815 - DNA, 13 bp, Artificial Sequence
  Oligonucleotide for detection of SNP TSC0063093
tgtatcgatgttt

SEQ ID NO: 259816 - DNA, 13 bp, Artificial Sequence
  Oligonucleotide for detection of SNP TSC0063093
aaacatcgataca

SEQ ID NO: 259817 - DNA, 13 bp, Artificial Sequence
  Oligonucleotide for detection of SNP TSC0063093
agatattggtgta

SEQ ID NO: 259818 - DNA, 13 bp, Artificial Sequence
  Oligonucleotide for detection of SNP TSC0063093
tacaccaatatct

SEQ ID NO: 259819 - DNA, 13 bp, Artificial Sequence
  Oligonucleotide for detection of SNP TSC0063093
agatatcggtgta

SEQ ID NO: 259820 - DNA, 13 bp, Artificial Sequence
  Oligonucleotide for detection of SNP TSC0063093
tacaccgatatct

SEQ ID NO: 259821 - DNA, 13 bp, Artificial Sequence
  Oligonucleotide for detection of SNP TSC0063094
ttagatgagaaaa

SEQ ID NO: 259822 - DNA, 13 bp, Artificial Sequence
  Oligonucleotide for detection of SNP TSC0063094
ttttctcatctaa

SEQ ID NO: 259823 - DNA, 13 bp, Artificial Sequence
  Oligonucleotide for detection of SNP TSC0006558
tttggaggatagg

SEQ ID NO: 259824 - DNA, 13 bp, Artificial Sequence
  Oligonucleotide for detection of SNP TSC0006558
cctatcctccaaa

SEQ ID NO: 259825 - DNA, 13 bp, Artificial Sequence
  Oligonucleotide for detection of SNP TSC0006558
tttggaagatagg

SEQ ID NO: 259826 - DNA, 13 bp, Artificial Sequence
  Oligonucleotide for detection of SNP TSC0006558
cctatcttccaaa

SEQ ID NO: 259827 - DNA, 13 bp, Artificial Sequence
  Oligonucleotide for detection of SNP TSC0006558
ttcggaggatagg

SEQ ID NO: 259828 - DNA, 13 bp, Artificial Sequence
  Oligonucleotide for detection of SNP TSC0006558
cctatcctccgaa

SEQ ID NO: 259829 - DNA, 13 bp, Artificial Sequence
  Oligonucleotide for detection of SNP TSC0006558
ttcggaagatagg

SEQ ID NO: 259830 - DNA, 13 bp, Artificial Sequence
  Oligonucleotide for detection of SNP TSC0006558
cctatcttccgaa

SEQ ID NO: 259831 - DNA, 13 bp, Artificial Sequence
  Oligonucleotide for detection of SNP TSC0063096
gtagttatttgga

SEQ ID NO: 259832 - DNA, 13 bp, Artificial Sequence
  Oligonucleotide for detection of SNP TSC0063096
tccaaataactac

SEQ ID NO: 259833 - DNA, 13 bp, Artificial Sequence
  Oligonucleotide for detection of SNP TSC0063096
gtagttgtttgga

SEQ ID NO: 259834 - DNA, 13 bp, Artificial Sequence
  Oligonucleotide for detection of SNP TSC0063096
tccaaacaactac

SEQ ID NO: 259835 - DNA, 13 bp, Artificial Sequence
  Oligonucleotide for detection of SNP TSC0063098
tgatggattgatt

SEQ ID NO: 259836 - DNA, 13 bp, Artificial Sequence
  Oligonucleotide for detection of SNP TSC0063098
aatcaatccatca

SEQ ID NO: 259837 - DNA, 13 bp, Artificial Sequence
  Oligonucleotide for detection of SNP TSC0063098
tgatgggttgatt

SEQ ID NO: 259838 - DNA, 13 bp, Artificial Sequence
  Oligonucleotide for detection of SNP TSC0063098
aatcaacccatca

SEQ ID NO: 259839 - DNA, 13 bp, Artificial Sequence
  Oligonucleotide for detection of SNP TSC0006043
ggaatgaatatga

SEQ ID NO: 259840 - DNA, 13 bp, Artificial Sequence
  Oligonucleotide for detection of SNP TSC0006043
tcatattcattcc

SEQ ID NO: 259841 - DNA, 13 bp, Artificial Sequence
  Oligonucleotide for detection of SNP TSC0006043
ggaatggatatga

SEQ ID NO: 259842 - DNA, 13 bp, Artificial Sequence
  Oligonucleotide for detection of SNP TSC0006043
tcatatccattcc

SEQ ID NO: 259843 - DNA, 13 bp, Artificial Sequence
  Oligonucleotide for detection of SNP TSC0007565
tgttgtaaggtta

SEQ ID NO: 259844 - DNA, 13 bp, Artificial Sequence
  Oligonucleotide for detection of SNP TSC0007565
taaccttacaaca

SEQ ID NO: 259845 - DNA, 13 bp, Artificial Sequence
  Oligonucleotide for detection of SNP TSC0007565
tgttgttaggtta

SEQ ID NO: 259846 - DNA, 13 bp, Artificial Sequence
  Oligonucleotide for detection of SNP TSC0007565
taacctaacaaca

SEQ ID NO: 259847 - DNA, 13 bp, Artificial Sequence
  Oligonucleotide for detection of SNP TSC0007565
taattttgtaata

SEQ ID NO: 259848 - DNA, 13 bp, Artificial Sequence
  Oligonucleotide for detection of SNP TSC0007565
tattacaaaatta

SEQ ID NO: 259849 - DNA, 13 bp, Artificial Sequence
  Oligonucleotide for detection of SNP TSC0007565
taatttggtaata

SEQ ID NO: 259850 - DNA, 13 bp, Artificial Sequence
  Oligonucleotide for detection of SNP TSC0007565
tattaccaaatta

SEQ ID NO: 259851 - DNA, 13 bp, Artificial Sequence
  Oligonucleotide for detection of SNP TSC0009042
attataatggtay

SEQ ID NO: 259852 - DNA, 13 bp, Artificial Sequence
  Oligonucleotide for detection of SNP TSC0009042
rtaccattataat

SEQ ID NO: 259853 - DNA, 13 bp, Artificial Sequence
  Oligonucleotide for detection of SNP TSC0009042
attatagtggtay

SEQ ID NO: 259854 - DNA, 13 bp, Artificial Sequence
  Oligonucleotide for detection of SNP TSC0009042
rtaccactataat

SEQ ID NO: 259855 - DNA, 13 bp, Artificial Sequence
  Oligonucleotide for detection of SNP TSC0063099
attaaatgttttt

SEQ ID NO: 259856 - DNA, 13 bp, Artificial Sequence
  Oligonucleotide for detection of SNP TSC0063099
aaaaacatttaat

SEQ ID NO: 259857 - DNA, 13 bp, Artificial Sequence
  Oligonucleotide for detection of SNP TSC0063099
aggggtatttggt

SEQ ID NO: 259858 - DNA, 13 bp, Artificial Sequence
  Oligonucleotide for detection of SNP TSC0063099
accaaatacccct

SEQ ID NO: 259859 - DNA, 13 bp, Artificial Sequence
  Oligonucleotide for detection of SNP TSC0063099
aggggtttttggt

SEQ ID NO: 259860 - DNA, 13 bp, Artificial Sequence
  Oligonucleotide for detection of SNP TSC0063099
accaaaaacccct

SEQ ID NO: 259861 - DNA, 13 bp, Artificial Sequence
  Oligonucleotide for detection of SNP TSC0063100
gttgtatgtatat

SEQ ID NO: 259862 - DNA, 13 bp, Artificial Sequence
  Oligonucleotide for detection of SNP TSC0063100
atatacatacaac

SEQ ID NO: 259863 - DNA, 13 bp, Artificial Sequence
  Oligonucleotide for detection of SNP TSC0063100
gttgtaggtatat

SEQ ID NO: 259864 - DNA, 13 bp, Artificial Sequence
  Oligonucleotide for detection of SNP TSC0063100
atatacctacaac

SEQ ID NO: 259865 - DNA, 13 bp, Artificial Sequence
  Oligonucleotide for detection of SNP TSC0063100
atatatatatagy

SEQ ID NO: 259866 - DNA, 13 bp, Artificial Sequence
  Oligonucleotide for detection of SNP TSC0063100
rctatatatatat

SEQ ID NO: 259867 - DNA, 13 bp, Artificial Sequence
  Oligonucleotide for detection of SNP TSC0063100
atatatttatagy

SEQ ID NO: 259868 - DNA, 13 bp, Artificial Sequence
  Oligonucleotide for detection of SNP TSC0063100
rctataaatatat

SEQ ID NO: 259869 - DNA, 13 bp, Artificial Sequence
  Oligonucleotide for detection of SNP TSC0008405
gaattatgaatat

SEQ ID NO: 259870 - DNA, 13 bp, Artificial Sequence
  Oligonucleotide for detection of SNP TSC0008405
atattcataattc

SEQ ID NO: 259871 - DNA, 13 bp, Artificial Sequence
  Oligonucleotide for detection of SNP TSC0008405
gaattacgaatat

SEQ ID NO: 259872 - DNA, 13 bp, Artificial Sequence
  Oligonucleotide for detection of SNP TSC0008405
atattcgtaattc

SEQ ID NO: 259873 - DNA, 13 bp, Artificial Sequence
  Oligonucleotide for detection of SNP TSC0008405
atatttgtagtty

SEQ ID NO: 259874 - DNA, 13 bp, Artificial Sequence
  Oligonucleotide for detection of SNP TSC0008405
raactacaaatat

SEQ ID NO: 259875 - DNA, 13 bp, Artificial Sequence
  Oligonucleotide for detection of SNP TSC0008405
atatttatagtty

SEQ ID NO: 259876 - DNA, 13 bp, Artificial Sequence
  Oligonucleotide for detection of SNP TSC0008405
raactataaatat

SEQ ID NO: 259877 - DNA, 13 bp, Artificial Sequence
  Oligonucleotide for detection of SNP TSC0008405
atattcgtagtty

SEQ ID NO: 259878 - DNA, 13 bp, Artificial Sequence
  Oligonucleotide for detection of SNP TSC0008405
raactacgaatat

SEQ ID NO: 259879 - DNA, 13 bp, Artificial Sequence
  Oligonucleotide for detection of SNP TSC0063101
tgagaagaattta

SEQ ID NO: 259880 - DNA, 13 bp, Artificial Sequence
  Oligonucleotide for detection of SNP TSC0063101
taaattcttctca

SEQ ID NO: 259881 - DNA, 13 bp, Artificial Sequence
  Oligonucleotide for detection of SNP TSC0063101
tgagaaaaattta

SEQ ID NO: 259882 - DNA, 13 bp, Artificial Sequence
  Oligonucleotide for detection of SNP TSC0063101
taaatttttctca

SEQ ID NO: 259883 - DNA, 13 bp, Artificial Sequence
  Oligonucleotide for detection of SNP TSC0063101
cgagaagaattta

SEQ ID NO: 259884 - DNA, 13 bp, Artificial Sequence
  Oligonucleotide for detection of SNP TSC0063101
taaattcttctcg

SEQ ID NO: 259885 - DNA, 13 bp, Artificial Sequence
  Oligonucleotide for detection of SNP TSC0063101
cgagaaaaattta

SEQ ID NO: 259886 - DNA, 13 bp, Artificial Sequence
  Oligonucleotide for detection of SNP TSC0063101
taaatttttctcg

SEQ ID NO: 259887 - DNA, 13 bp, Artificial Sequence
  Oligonucleotide for detection of SNP TSC0063103
ggagatgtggtga

SEQ ID NO: 259888 - DNA, 13 bp, Artificial Sequence
  Oligonucleotide for detection of SNP TSC0063103
tcaccacatctcc

SEQ ID NO: 259889 - DNA, 13 bp, Artificial Sequence
  Oligonucleotide for detection of SNP TSC0063103
ggagatatggtga

SEQ ID NO: 259890 - DNA, 13 bp, Artificial Sequence
  Oligonucleotide for detection of SNP TSC0063103
tcaccatatctcc

SEQ ID NO: 259891 - DNA, 13 bp, Artificial Sequence
  Oligonucleotide for detection of SNP TSC0063103
ggagacgtggtga

SEQ ID NO: 259892 - DNA, 13 bp, Artificial Sequence
  Oligonucleotide for detection of SNP TSC0063103
tcaccacgtctcc

SEQ ID NO: 259893 - DNA, 13 bp, Artificial Sequence
  Oligonucleotide for detection of SNP TSC0063105
ttttacgtattty

SEQ ID NO: 259894 - DNA, 13 bp, Artificial Sequence
  Oligonucleotide for detection of SNP TSC0063105
raaatacgtaaaa

SEQ ID NO: 259895 - DNA, 13 bp, Artificial Sequence
  Oligonucleotide for detection of SNP TSC0063105
gaaatatgtaggg

SEQ ID NO: 259896 - DNA, 13 bp, Artificial Sequence
  Oligonucleotide for detection of SNP TSC0063105
ccctacatatttc

SEQ ID NO: 259897 - DNA, 13 bp, Artificial Sequence
  Oligonucleotide for detection of SNP TSC0063105
gaaatacgtaggg

SEQ ID NO: 259898 - DNA, 13 bp, Artificial Sequence
  Oligonucleotide for detection of SNP TSC0063105
ccctacgtatttc

SEQ ID NO: 259899 - DNA, 13 bp, Artificial Sequence
  Oligonucleotide for detection of SNP TSC0063106
aataatattatgt

SEQ ID NO: 259900 - DNA, 13 bp, Artificial Sequence
  Oligonucleotide for detection of SNP TSC0063106
acataatattatt

SEQ ID NO: 259901 - DNA, 13 bp, Artificial Sequence
  Oligonucleotide for detection of SNP TSC0063106
aataatgttatgt

SEQ ID NO: 259902 - DNA, 13 bp, Artificial Sequence
  Oligonucleotide for detection of SNP TSC0063106
acataacattatt

SEQ ID NO: 259903 - DNA, 13 bp, Artificial Sequence
  Oligonucleotide for detection of SNP TSC0063106
aataatattacgt

SEQ ID NO: 259904 - DNA, 13 bp, Artificial Sequence
  Oligonucleotide for detection of SNP TSC0063106
acgtaatattatt

SEQ ID NO: 259905 - DNA, 13 bp, Artificial Sequence
  Oligonucleotide for detection of SNP TSC0063106
aataatgttacgt

SEQ ID NO: 259906 - DNA, 13 bp, Artificial Sequence
  Oligonucleotide for detection of SNP TSC0063106
acgtaacattatt

SEQ ID NO: 259907 - DNA, 13 bp, Artificial Sequence
  Oligonucleotide for detection of SNP TSC0005862
gagaaatgtaaaa

SEQ ID NO: 259908 - DNA, 13 bp, Artificial Sequence
  Oligonucleotide for detection of SNP TSC0005862
ttttacatttctc

SEQ ID NO: 259909 - DNA, 13 bp, Artificial Sequence
  Oligonucleotide for detection of SNP TSC0005862
gagaaaggtaaaa

SEQ ID NO: 259910 - DNA, 13 bp, Artificial Sequence
  Oligonucleotide for detection of SNP TSC0005862
ttttacctttctc

SEQ ID NO: 259911 - DNA, 13 bp, Artificial Sequence
  Oligonucleotide for detection of SNP TSC0005862
gagaaacgtaaaa

SEQ ID NO: 259912 - DNA, 13 bp, Artificial Sequence
  Oligonucleotide for detection of SNP TSC0005862
ttttacgtttctc

SEQ ID NO: 259913 - DNA, 13 bp, Artificial Sequence
  Oligonucleotide for detection of SNP TSC0063107
ggtgagaggaggt

SEQ ID NO: 259914 - DNA, 13 bp, Artificial Sequence
  Oligonucleotide for detection of SNP TSC0063107
acctcctctcacc

SEQ ID NO: 259915 - DNA, 13 bp, Artificial Sequence
  Oligonucleotide for detection of SNP TSC0063107
ggtgaggggaggt

SEQ ID NO: 259916 - DNA, 13 bp, Artificial Sequence
  Oligonucleotide for detection of SNP TSC0063107
acctcccctcacc

SEQ ID NO: 259917 - DNA, 13 bp, Artificial Sequence
  Oligonucleotide for detection of SNP TSC0063108
tggagatgtttta

SEQ ID NO: 259918 - DNA, 13 bp, Artificial Sequence
  Oligonucleotide for detection of SNP TSC0063108
taaaacatctcca

SEQ ID NO: 259919 - DNA, 13 bp, Artificial Sequence
  Oligonucleotide for detection of SNP TSC0063108
tggagacgtttta

SEQ ID NO: 259920 - DNA, 13 bp, Artificial Sequence
  Oligonucleotide for detection of SNP TSC0063108
taaaacgtctcca

SEQ ID NO: 259921 - DNA, 13 bp, Artificial Sequence
  Oligonucleotide for detection of SNP TSC0063109
ggtatgtgttata

SEQ ID NO: 259922 - DNA, 13 bp, Artificial Sequence
  Oligonucleotide for detection of SNP TSC0063109
tataacacatacc

SEQ ID NO: 259923 - DNA, 13 bp, Artificial Sequence
  Oligonucleotide for detection of SNP TSC0063109
ggtatgcgttata

SEQ ID NO: 259924 - DNA, 13 bp, Artificial Sequence
  Oligonucleotide for detection of SNP TSC0063109
tataacgcatacc

SEQ ID NO: 259925 - DNA, 13 bp, Artificial Sequence
  Oligonucleotide for detection of SNP TSC0063109
tataatgtatgty

SEQ ID NO: 259926 - DNA, 13 bp, Artificial Sequence
  Oligonucleotide for detection of SNP TSC0063109
racatacattata

SEQ ID NO: 259927 - DNA, 13 bp, Artificial Sequence
  Oligonucleotide for detection of SNP TSC0063109
tataatatatgty

SEQ ID NO: 259928 - DNA, 13 bp, Artificial Sequence
  Oligonucleotide for detection of SNP TSC0063109
racatatattata

SEQ ID NO: 259929 - DNA, 13 bp, Artificial Sequence
  Oligonucleotide for detection of SNP TSC0063109
tataacgtatgty

SEQ ID NO: 259930 - DNA, 13 bp, Artificial Sequence
  Oligonucleotide for detection of SNP TSC0063109
racatacgttata

SEQ ID NO: 259931 - DNA, 13 bp, Artificial Sequence
  Oligonucleotide for detection of SNP TSC0063110
aaaatagtattaa

SEQ ID NO: 259932 - DNA, 13 bp, Artificial Sequence
  Oligonucleotide for detection of SNP TSC0063110
ttaatactatttt

SEQ ID NO: 259933 - DNA, 13 bp, Artificial Sequence
  Oligonucleotide for detection of SNP TSC0063110
ttggtagtatttt

SEQ ID NO: 259934 - DNA, 13 bp, Artificial Sequence
  Oligonucleotide for detection of SNP TSC0063110
aaaatactaccaa

SEQ ID NO: 259935 - DNA, 13 bp, Artificial Sequence
  Oligonucleotide for detection of SNP TSC0063110
ttggtattatttt

SEQ ID NO: 259936 - DNA, 13 bp, Artificial Sequence
  Oligonucleotide for detection of SNP TSC0063110
aaaataataccaa

SEQ ID NO: 259937 - DNA, 13 bp, Artificial Sequence
  Oligonucleotide for detection of SNP TSC0063111
tttttggggtaaa

SEQ ID NO: 259938 - DNA, 13 bp, Artificial Sequence
  Oligonucleotide for detection of SNP TSC0063111
tttaccccaaaaa

SEQ ID NO: 259939 - DNA, 13 bp, Artificial Sequence
  Oligonucleotide for detection of SNP TSC0063111
tttttgaggtaaa

SEQ ID NO: 259940 - DNA, 13 bp, Artificial Sequence
  Oligonucleotide for detection of SNP TSC0063111
tttacctcaaaaa

SEQ ID NO: 259941 - DNA, 13 bp, Artificial Sequence
  Oligonucleotide for detection of SNP TSC0063112
aatttatggataa

SEQ ID NO: 259942 - DNA, 13 bp, Artificial Sequence
  Oligonucleotide for detection of SNP TSC0063112
ttatccataaatt

SEQ ID NO: 259943 - DNA, 13 bp, Artificial Sequence
  Oligonucleotide for detection of SNP TSC0063112
aatttacggataa

SEQ ID NO: 259944 - DNA, 13 bp, Artificial Sequence
  Oligonucleotide for detection of SNP TSC0063112
ttatccgtaaatt

SEQ ID NO: 259945 - DNA, 13 bp, Artificial Sequence
  Oligonucleotide for detection of SNP TSC0063112
ttatttgtgagtt

SEQ ID NO: 259946 - DNA, 13 bp, Artificial Sequence
  Oligonucleotide for detection of SNP TSC0063112
aactcacaaataa

SEQ ID NO: 259947 - DNA, 13 bp, Artificial Sequence
  Oligonucleotide for detection of SNP TSC0063112
ttattcgtgagtt

SEQ ID NO: 259948 - DNA, 13 bp, Artificial Sequence
  Oligonucleotide for detection of SNP TSC0063112
aactcacgaataa

SEQ ID NO: 259949 - DNA, 13 bp, Artificial Sequence
  Oligonucleotide for detection of SNP TSC0063114
tgttaagtttaaa

SEQ ID NO: 259950 - DNA, 13 bp, Artificial Sequence
  Oligonucleotide for detection of SNP TSC0063114
tttaaacttaaca

SEQ ID NO: 259951 - DNA, 13 bp, Artificial Sequence
  Oligonucleotide for detection of SNP TSC0006686
atatattgatgty

SEQ ID NO: 259952 - DNA, 13 bp, Artificial Sequence
  Oligonucleotide for detection of SNP TSC0006686
racatcaatatat

SEQ ID NO: 259953 - DNA, 13 bp, Artificial Sequence
  Oligonucleotide for detection of SNP TSC0006686
atatatcgatgty

SEQ ID NO: 259954 - DNA, 13 bp, Artificial Sequence
  Oligonucleotide for detection of SNP TSC0006686
racatcgatatat

SEQ ID NO: 259955 - DNA, 13 bp, Artificial Sequence
  Oligonucleotide for detection of SNP TSC0006686
gatattgatatat

SEQ ID NO: 259956 - DNA, 13 bp, Artificial Sequence
  Oligonucleotide for detection of SNP TSC0006686
atatatcaatatc

SEQ ID NO: 259957 - DNA, 13 bp, Artificial Sequence
  Oligonucleotide for detection of SNP TSC0006686
gatattaatatat

SEQ ID NO: 259958 - DNA, 13 bp, Artificial Sequence
  Oligonucleotide for detection of SNP TSC0006686
atatattaatatc

SEQ ID NO: 259959 - DNA, 13 bp, Artificial Sequence
  Oligonucleotide for detection of SNP TSC0006686
gatatcgatatat

SEQ ID NO: 259960 - DNA, 13 bp, Artificial Sequence
  Oligonucleotide for detection of SNP TSC0006686
atatatcgatatc

SEQ ID NO: 259961 - DNA, 13 bp, Artificial Sequence
  Oligonucleotide for detection of SNP TSC0008765
ggagtttgtttta

SEQ ID NO: 259962 - DNA, 13 bp, Artificial Sequence
  Oligonucleotide for detection of SNP TSC0008765
taaaacaaactcc

SEQ ID NO: 259963 - DNA, 13 bp, Artificial Sequence
  Oligonucleotide for detection of SNP TSC0008765
ggagttggtttta

SEQ ID NO: 259964 - DNA, 13 bp, Artificial Sequence
  Oligonucleotide for detection of SNP TSC0008765
taaaaccaactcc

SEQ ID NO: 259965 - DNA, 13 bp, Artificial Sequence
  Oligonucleotide for detection of SNP TSC0008765
taaagtaaattty

SEQ ID NO: 259966 - DNA, 13 bp, Artificial Sequence
  Oligonucleotide for detection of SNP TSC0008765
raaatttacttta

SEQ ID NO: 259967 - DNA, 13 bp, Artificial Sequence
  Oligonucleotide for detection of SNP TSC0008765
taaagttaattty

SEQ ID NO: 259968 - DNA, 13 bp, Artificial Sequence
  Oligonucleotide for detection of SNP TSC0008765
raaattaacttta

SEQ ID NO: 259969 - DNA, 13 bp, Artificial Sequence
  Oligonucleotide for detection of SNP TSC0063118
atatatatggaaa

SEQ ID NO: 259970 - DNA, 13 bp, Artificial Sequence
  Oligonucleotide for detection of SNP TSC0063118
tttccatatatat

SEQ ID NO: 259971 - DNA, 13 bp, Artificial Sequence
  Oligonucleotide for detection of SNP TSC0063118
atatatgtggaaa

SEQ ID NO: 259972 - DNA, 13 bp, Artificial Sequence
  Oligonucleotide for detection of SNP TSC0063118
tttccacatatat

SEQ ID NO: 259973 - DNA, 13 bp, Artificial Sequence
  Oligonucleotide for detection of SNP TSC0063118
atatacgtggaaa

SEQ ID NO: 259974 - DNA, 13 bp, Artificial Sequence
  Oligonucleotide for detection of SNP TSC0063118
tttccacgtatat

SEQ ID NO: 259975 - DNA, 13 bp, Artificial Sequence
  Oligonucleotide for detection of SNP TSC0063119
tatatgtgtgtgt

SEQ ID NO: 259976 - DNA, 13 bp, Artificial Sequence
  Oligonucleotide for detection of SNP TSC0063119
acacacacatata

SEQ ID NO: 259977 - DNA, 13 bp, Artificial Sequence
  Oligonucleotide for detection of SNP TSC0063119
tatacgtgtgtgt

SEQ ID NO: 259978 - DNA, 13 bp, Artificial Sequence
  Oligonucleotide for detection of SNP TSC0063119
acacacacgtata

SEQ ID NO: 259979 - DNA, 13 bp, Artificial Sequence
  Oligonucleotide for detection of SNP TSC0063119
tatatgcgtgtgt

SEQ ID NO: 259980 - DNA, 13 bp, Artificial Sequence
  Oligonucleotide for detection of SNP TSC0063119
acacacgcatata

SEQ ID NO: 259981 - DNA, 13 bp, Artificial Sequence
  Oligonucleotide for detection of SNP TSC0063119
tatacgcgtgtgt

SEQ ID NO: 259982 - DNA, 13 bp, Artificial Sequence
  Oligonucleotide for detection of SNP TSC0063119
acacacgcgtata

SEQ ID NO: 259983 - DNA, 13 bp, Artificial Sequence
  Oligonucleotide for detection of SNP TSC0063121
tatagatgtaaaa

SEQ ID NO: 259984 - DNA, 13 bp, Artificial Sequence
  Oligonucleotide for detection of SNP TSC0063121
ttttacatctata

SEQ ID NO: 259985 - DNA, 13 bp, Artificial Sequence
  Oligonucleotide for detection of SNP TSC0063121
tatagaggtaaaa

SEQ ID NO: 259986 - DNA, 13 bp, Artificial Sequence
  Oligonucleotide for detection of SNP TSC0063121
ttttacctctata

SEQ ID NO: 259987 - DNA, 13 bp, Artificial Sequence
  Oligonucleotide for detection of SNP TSC0063122
agtttaggaaatt

SEQ ID NO: 259988 - DNA, 13 bp, Artificial Sequence
  Oligonucleotide for detection of SNP TSC0063122
aatttcctaaact

SEQ ID NO: 259989 - DNA, 13 bp, Artificial Sequence
  Oligonucleotide for detection of SNP TSC0063122
agtttaagaaatt

SEQ ID NO: 259990 - DNA, 13 bp, Artificial Sequence
  Oligonucleotide for detection of SNP TSC0063122
aatttcttaaact

SEQ ID NO: 259991 - DNA, 13 bp, Artificial Sequence
  Oligonucleotide for detection of SNP TSC0063123
taggaatgtaaga

SEQ ID NO: 259992 - DNA, 13 bp, Artificial Sequence
  Oligonucleotide for detection of SNP TSC0063123
tcttacattccta

SEQ ID NO: 259993 - DNA, 13 bp, Artificial Sequence
  Oligonucleotide for detection of SNP TSC0063123
taggaaggtaaga

SEQ ID NO: 259994 - DNA, 13 bp, Artificial Sequence
  Oligonucleotide for detection of SNP TSC0063123
tcttaccttccta

SEQ ID NO: 259995 - DNA, 13 bp, Artificial Sequence
  Oligonucleotide for detection of SNP TSC0005676
ttatagtatattg

SEQ ID NO: 259996 - DNA, 13 bp, Artificial Sequence
  Oligonucleotide for detection of SNP TSC0005676
caatatactataa

SEQ ID NO: 259997 - DNA, 13 bp, Artificial Sequence
  Oligonucleotide for detection of SNP TSC0005676
ttataggatattg

SEQ ID NO: 259998 - DNA, 13 bp, Artificial Sequence
  Oligonucleotide for detection of SNP TSC0005676
caatatcctataa

SEQ ID NO: 259999 - DNA, 13 bp, Artificial Sequence
  Oligonucleotide for detection of SNP TSC0005676
tagtgtattgtag

SEQ ID NO: 260000 - DNA, 13 bp, Artificial Sequence
  Oligonucleotide for detection of SNP TSC0005676
ctacaatacacta

SEQ ID NO: 260001 - DNA, 13 bp, Artificial Sequence
  Oligonucleotide for detection of SNP TSC0005676
tagtgttttgtag

SEQ ID NO: 260002 - DNA, 13 bp, Artificial Sequence
  Oligonucleotide for detection of SNP TSC0005676
ctacaaaacacta

SEQ ID NO: 260003 - DNA, 13 bp, Artificial Sequence
  Oligonucleotide for detection of SNP TSC0005677
tagaattttgaty

SEQ ID NO: 260004 - DNA, 13 bp, Artificial Sequence
  Oligonucleotide for detection of SNP TSC0005677
ratcaaaattcta

SEQ ID NO: 260005 - DNA, 13 bp, Artificial Sequence
  Oligonucleotide for detection of SNP TSC0005677
tagaatgttgaty

SEQ ID NO: 260006 - DNA, 13 bp, Artificial Sequence
  Oligonucleotide for detection of SNP TSC0005677
ratcaacattcta

SEQ ID NO: 260007 - DNA, 13 bp, Artificial Sequence
  Oligonucleotide for detection of SNP TSC0005677
ggttaggattttg

SEQ ID NO: 260008 - DNA, 13 bp, Artificial Sequence
  Oligonucleotide for detection of SNP TSC0005677
caaaatcctaacc

SEQ ID NO: 260009 - DNA, 13 bp, Artificial Sequence
  Oligonucleotide for detection of SNP TSC0005677
ggttagtattttg

SEQ ID NO: 260010 - DNA, 13 bp, Artificial Sequence
  Oligonucleotide for detection of SNP TSC0005677
caaaatactaacc

SEQ ID NO: 260011 - DNA, 13 bp, Artificial Sequence
  Oligonucleotide for detection of SNP TSC0005678
ggttgtaatttay

SEQ ID NO: 260012 - DNA, 13 bp, Artificial Sequence
  Oligonucleotide for detection of SNP TSC0005678
rtaaattacaacc

SEQ ID NO: 260013 - DNA, 13 bp, Artificial Sequence
  Oligonucleotide for detection of SNP TSC0005678
ggttgtgatttay

SEQ ID NO: 260014 - DNA, 13 bp, Artificial Sequence
  Oligonucleotide for detection of SNP TSC0005678
rtaaatcacaacc

SEQ ID NO: 260015 - DNA, 13 bp, Artificial Sequence
  Oligonucleotide for detection of SNP TSC0007164
tatgaaagattaa

SEQ ID NO: 260016 - DNA, 13 bp, Artificial Sequence
  Oligonucleotide for detection of SNP TSC0007164
ttaatctttcata

SEQ ID NO: 260017 - DNA, 13 bp, Artificial Sequence
  Oligonucleotide for detection of SNP TSC0007164
tatgaatgattaa

SEQ ID NO: 260018 - DNA, 13 bp, Artificial Sequence
  Oligonucleotide for detection of SNP TSC0007164
ttaatcattcata

SEQ ID NO: 260019 - DNA, 13 bp, Artificial Sequence
  Oligonucleotide for detection of SNP TSC0007164
tacgaaagattaa

SEQ ID NO: 260020 - DNA, 13 bp, Artificial Sequence
  Oligonucleotide for detection of SNP TSC0007164
ttaatctttcgta

SEQ ID NO: 260021 - DNA, 13 bp, Artificial Sequence
  Oligonucleotide for detection of SNP TSC0007164
tacgaatgattaa

SEQ ID NO: 260022 - DNA, 13 bp, Artificial Sequence
  Oligonucleotide for detection of SNP TSC0007164
ttaatcattcgta

SEQ ID NO: 260023 - DNA, 13 bp, Artificial Sequence
  Oligonucleotide for detection of SNP TSC0007164
ttgattttttgta

SEQ ID NO: 260024 - DNA, 13 bp, Artificial Sequence
  Oligonucleotide for detection of SNP TSC0007164
tacaaaaaatcaa

SEQ ID NO: 260025 - DNA, 13 bp, Artificial Sequence
  Oligonucleotide for detection of SNP TSC0007164
ttgattatttgta

SEQ ID NO: 260026 - DNA, 13 bp, Artificial Sequence
  Oligonucleotide for detection of SNP TSC0007164
tacaaataatcaa

SEQ ID NO: 260027 - DNA, 13 bp, Artificial Sequence
  Oligonucleotide for detection of SNP TSC0007164
ttgatttttcgta

SEQ ID NO: 260028 - DNA, 13 bp, Artificial Sequence
  Oligonucleotide for detection of SNP TSC0007164
tacgaaaaatcaa

SEQ ID NO: 260029 - DNA, 13 bp, Artificial Sequence
  Oligonucleotide for detection of SNP TSC0007164
ttgattattcgta

SEQ ID NO: 260030 - DNA, 13 bp, Artificial Sequence
  Oligonucleotide for detection of SNP TSC0007164
tacgaataatcaa

SEQ ID NO: 260031 - DNA, 13 bp, Artificial Sequence
  Oligonucleotide for detection of SNP TSC0007828
gagatttttaatg

SEQ ID NO: 260032 - DNA, 13 bp, Artificial Sequence
  Oligonucleotide for detection of SNP TSC0007828
cattaaaaatctc

SEQ ID NO: 260033 - DNA, 13 bp, Artificial Sequence
  Oligonucleotide for detection of SNP TSC0007828
gagattgttaatg

SEQ ID NO: 260034 - DNA, 13 bp, Artificial Sequence
  Oligonucleotide for detection of SNP TSC0007828
cattaacaatctc

SEQ ID NO: 260035 - DNA, 13 bp, Artificial Sequence
  Oligonucleotide for detection of SNP TSC0007828
tattaggaattty

SEQ ID NO: 260036 - DNA, 13 bp, Artificial Sequence
  Oligonucleotide for detection of SNP TSC0007828
raaattcctaata

SEQ ID NO: 260037 - DNA, 13 bp, Artificial Sequence
  Oligonucleotide for detection of SNP TSC0007828
tattagtaattty

SEQ ID NO: 260038 - DNA, 13 bp, Artificial Sequence
  Oligonucleotide for detection of SNP TSC0007828
raaattactaata

SEQ ID NO: 260039 - DNA, 13 bp, Artificial Sequence
  Oligonucleotide for detection of SNP TSC0063127
gaggaggagtgag

SEQ ID NO: 260040 - DNA, 13 bp, Artificial Sequence
  Oligonucleotide for detection of SNP TSC0063127
ctcactcctcctc

SEQ ID NO: 260041 - DNA, 13 bp, Artificial Sequence
  Oligonucleotide for detection of SNP TSC0063127
gaggagtagtgag

SEQ ID NO: 260042 - DNA, 13 bp, Artificial Sequence
  Oligonucleotide for detection of SNP TSC0063127
ctcactactcctc

SEQ ID NO: 260043 - DNA, 13 bp, Artificial Sequence
  Oligonucleotide for detection of SNP TSC0063127
gaggaggagcgag

SEQ ID NO: 260044 - DNA, 13 bp, Artificial Sequence
  Oligonucleotide for detection of SNP TSC0063127
ctcgctcctcctc

SEQ ID NO: 260045 - DNA, 13 bp, Artificial Sequence
  Oligonucleotide for detection of SNP TSC0063127
gaggagtagcgag

SEQ ID NO: 260046 - DNA, 13 bp, Artificial Sequence
  Oligonucleotide for detection of SNP TSC0063127
ctcgctactcctc

SEQ ID NO: 260047 - DNA, 13 bp, Artificial Sequence
  Oligonucleotide for detection of SNP TSC0063128
ttgtttgttataa

SEQ ID NO: 260048 - DNA, 13 bp, Artificial Sequence
  Oligonucleotide for detection of SNP TSC0063128
ttataacaaacaa

SEQ ID NO: 260049 - DNA, 13 bp, Artificial Sequence
  Oligonucleotide for detection of SNP TSC0063128
ttgtttattataa

SEQ ID NO: 260050 - DNA, 13 bp, Artificial Sequence
  Oligonucleotide for detection of SNP TSC0063128
ttataataaacaa

SEQ ID NO: 260051 - DNA, 13 bp, Artificial Sequence
  Oligonucleotide for detection of SNP TSC0005345
tttttaaaagtaa

SEQ ID NO: 260052 - DNA, 13 bp, Artificial Sequence
  Oligonucleotide for detection of SNP TSC0005345
ttacttttaaaaa

SEQ ID NO: 260053 - DNA, 13 bp, Artificial Sequence
  Oligonucleotide for detection of SNP TSC0063130
ataaggttgtaaa

SEQ ID NO: 260054 - DNA, 13 bp, Artificial Sequence
  Oligonucleotide for detection of SNP TSC0063130
tttacaaccttat

SEQ ID NO: 260055 - DNA, 13 bp, Artificial Sequence
  Oligonucleotide for detection of SNP TSC0063130
ataagggtgtaaa

SEQ ID NO: 260056 - DNA, 13 bp, Artificial Sequence
  Oligonucleotide for detection of SNP TSC0063130
tttacacccttat

SEQ ID NO: 260057 - DNA, 13 bp, Artificial Sequence
  Oligonucleotide for detection of SNP TSC0063131
ttatgaaattttg

SEQ ID NO: 260058 - DNA, 13 bp, Artificial Sequence
  Oligonucleotide for detection of SNP TSC0063131
caaaatttcataa

SEQ ID NO: 260059 - DNA, 13 bp, Artificial Sequence
  Oligonucleotide for detection of SNP TSC0063131
ttatgagattttg

SEQ ID NO: 260060 - DNA, 13 bp, Artificial Sequence
  Oligonucleotide for detection of SNP TSC0063131
caaaatctcataa

SEQ ID NO: 260061 - DNA, 13 bp, Artificial Sequence
  Oligonucleotide for detection of SNP TSC0063131
ttacgaaattttg

SEQ ID NO: 260062 - DNA, 13 bp, Artificial Sequence
  Oligonucleotide for detection of SNP TSC0063131
caaaatttcgtaa

SEQ ID NO: 260063 - DNA, 13 bp, Artificial Sequence
  Oligonucleotide for detection of SNP TSC0063131
ttacgagattttg

SEQ ID NO: 260064 - DNA, 13 bp, Artificial Sequence
  Oligonucleotide for detection of SNP TSC0063131
caaaatctcgtaa

SEQ ID NO: 260065 - DNA, 13 bp, Artificial Sequence
  Oligonucleotide for detection of SNP TSC0063132
agtttatttattg

SEQ ID NO: 260066 - DNA, 13 bp, Artificial Sequence
  Oligonucleotide for detection of SNP TSC0063132
caataaataaact

SEQ ID NO: 260067 - DNA, 13 bp, Artificial Sequence
  Oligonucleotide for detection of SNP TSC0063132
agtttagttattg

SEQ ID NO: 260068 - DNA, 13 bp, Artificial Sequence
  Oligonucleotide for detection of SNP TSC0063132
caataactaaact

SEQ ID NO: 260069 - DNA, 13 bp, Artificial Sequence
  Oligonucleotide for detection of SNP TSC0063132
tagtggataggtt

SEQ ID NO: 260070 - DNA, 13 bp, Artificial Sequence
  Oligonucleotide for detection of SNP TSC0063132
aacctatccacta

SEQ ID NO: 260071 - DNA, 13 bp, Artificial Sequence
  Oligonucleotide for detection of SNP TSC0063132
tagtggttaggtt

SEQ ID NO: 260072 - DNA, 13 bp, Artificial Sequence
  Oligonucleotide for detection of SNP TSC0063132
aacctaaccacta

SEQ ID NO: 260073 - DNA, 13 bp, Artificial Sequence
  Oligonucleotide for detection of SNP TSC0008388
gtatattggtgta

SEQ ID NO: 260074 - DNA, 13 bp, Artificial Sequence
  Oligonucleotide for detection of SNP TSC0008388
tacaccaatatac

SEQ ID NO: 260075 - DNA, 13 bp, Artificial Sequence
  Oligonucleotide for detection of SNP TSC0008388
gtatatcggtgta

SEQ ID NO: 260076 - DNA, 13 bp, Artificial Sequence
  Oligonucleotide for detection of SNP TSC0008388
tacaccgatatac

SEQ ID NO: 260077 - DNA, 13 bp, Artificial Sequence
  Oligonucleotide for detection of SNP TSC0008388
tgtattggtatgy

SEQ ID NO: 260078 - DNA, 13 bp, Artificial Sequence
  Oligonucleotide for detection of SNP TSC0008388
rcataccaataca

SEQ ID NO: 260079 - DNA, 13 bp, Artificial Sequence
  Oligonucleotide for detection of SNP TSC0008388
tgtattagtatgy

SEQ ID NO: 260080 - DNA, 13 bp, Artificial Sequence
  Oligonucleotide for detection of SNP TSC0008388
rcatactaataca

SEQ ID NO: 260081 - DNA, 13 bp, Artificial Sequence
  Oligonucleotide for detection of SNP TSC0008388
tgtatcggtatgy

SEQ ID NO: 260082 - DNA, 13 bp, Artificial Sequence
  Oligonucleotide for detection of SNP TSC0008388
rcataccgataca

SEQ ID NO: 260083 - DNA, 13 bp, Artificial Sequence
  Oligonucleotide for detection of SNP TSC0063134
ttgaatatgttty

SEQ ID NO: 260084 - DNA, 13 bp, Artificial Sequence
  Oligonucleotide for detection of SNP TSC0063134
raaacatattcaa

SEQ ID NO: 260085 - DNA, 13 bp, Artificial Sequence
  Oligonucleotide for detection of SNP TSC0063134
ttgaatgtgttty

SEQ ID NO: 260086 - DNA, 13 bp, Artificial Sequence
  Oligonucleotide for detection of SNP TSC0063134
raaacacattcaa

SEQ ID NO: 260087 - DNA, 13 bp, Artificial Sequence
  Oligonucleotide for detection of SNP TSC0063134
ttgaacgtgttty

SEQ ID NO: 260088 - DNA, 13 bp, Artificial Sequence
  Oligonucleotide for detection of SNP TSC0063134
raaacacgttcaa

SEQ ID NO: 260089 - DNA, 13 bp, Artificial Sequence
  Oligonucleotide for detection of SNP TSC0063134
gaagtatgtttaa

SEQ ID NO: 260090 - DNA, 13 bp, Artificial Sequence
  Oligonucleotide for detection of SNP TSC0063134
ttaaacatacttc

SEQ ID NO: 260091 - DNA, 13 bp, Artificial Sequence
  Oligonucleotide for detection of SNP TSC0063134
gaagtacgtttaa

SEQ ID NO: 260092 - DNA, 13 bp, Artificial Sequence
  Oligonucleotide for detection of SNP TSC0063134
ttaaacgtacttc

SEQ ID NO: 260093 - DNA, 13 bp, Artificial Sequence
  Oligonucleotide for detection of SNP TSC0063135
agaagtttagggg

SEQ ID NO: 260094 - DNA, 13 bp, Artificial Sequence
  Oligonucleotide for detection of SNP TSC0063135
cccctaaacttct

SEQ ID NO: 260095 - DNA, 13 bp, Artificial Sequence
  Oligonucleotide for detection of SNP TSC0063135
agaagtgtagggg

SEQ ID NO: 260096 - DNA, 13 bp, Artificial Sequence
  Oligonucleotide for detection of SNP TSC0063135
cccctacacttct

SEQ ID NO: 260097 - DNA, 13 bp, Artificial Sequence
  Oligonucleotide for detection of SNP TSC0063136
ataaaaaaaatty

SEQ ID NO: 260098 - DNA, 13 bp, Artificial Sequence
  Oligonucleotide for detection of SNP TSC0063136
raattttttttat

SEQ ID NO: 260099 - DNA, 13 bp, Artificial Sequence
  Oligonucleotide for detection of SNP TSC0063136
ataaaagaaatty

SEQ ID NO: 260100 - DNA, 13 bp, Artificial Sequence
  Oligonucleotide for detection of SNP TSC0063136
raatttcttttat

SEQ ID NO: 260101 - DNA, 13 bp, Artificial Sequence
  Oligonucleotide for detection of SNP TSC0063138
aggggggtagatt

SEQ ID NO: 260102 - DNA, 13 bp, Artificial Sequence
  Oligonucleotide for detection of SNP TSC0063138
aatctacccccct

SEQ ID NO: 260103 - DNA, 13 bp, Artificial Sequence
  Oligonucleotide for detection of SNP TSC0063138
agggggatagatt

SEQ ID NO: 260104 - DNA, 13 bp, Artificial Sequence
  Oligonucleotide for detection of SNP TSC0063138
aatctatccccct

SEQ ID NO: 260105 - DNA, 13 bp, Artificial Sequence
  Oligonucleotide for detection of SNP TSC0063139
tgtttatttttgg

SEQ ID NO: 260106 - DNA, 13 bp, Artificial Sequence
  Oligonucleotide for detection of SNP TSC0063139
ccaaaaataaaca

SEQ ID NO: 260107 - DNA, 13 bp, Artificial Sequence
  Oligonucleotide for detection of SNP TSC0063139
tgtttagttttgg

SEQ ID NO: 260108 - DNA, 13 bp, Artificial Sequence
  Oligonucleotide for detection of SNP TSC0063139
ccaaaactaaaca

SEQ ID NO: 260109 - DNA, 13 bp, Artificial Sequence
  Oligonucleotide for detection of SNP TSC0063139
ttaaagatgagta

SEQ ID NO: 260110 - DNA, 13 bp, Artificial Sequence
  Oligonucleotide for detection of SNP TSC0063139
tactcatctttaa

SEQ ID NO: 260111 - DNA, 13 bp, Artificial Sequence
  Oligonucleotide for detection of SNP TSC0063139
ttaaagttgagta

SEQ ID NO: 260112 - DNA, 13 bp, Artificial Sequence
  Oligonucleotide for detection of SNP TSC0063139
tactcaactttaa

SEQ ID NO: 260113 - DNA, 13 bp, Artificial Sequence
  Oligonucleotide for detection of SNP TSC0063142
taagggtgggtat

SEQ ID NO: 260114 - DNA, 13 bp, Artificial Sequence
  Oligonucleotide for detection of SNP TSC0063142
atacccaccctta

SEQ ID NO: 260115 - DNA, 13 bp, Artificial Sequence
  Oligonucleotide for detection of SNP TSC0063142
taagggcgggtat

SEQ ID NO: 260116 - DNA, 13 bp, Artificial Sequence
  Oligonucleotide for detection of SNP TSC0063142
atacccgccctta

SEQ ID NO: 260117 - DNA, 13 bp, Artificial Sequence
  Oligonucleotide for detection of SNP TSC0063143
ttgttgattatgy

SEQ ID NO: 260118 - DNA, 13 bp, Artificial Sequence
  Oligonucleotide for detection of SNP TSC0063143
rcataatcaacaa

SEQ ID NO: 260119 - DNA, 13 bp, Artificial Sequence
  Oligonucleotide for detection of SNP TSC0063143
ttgttgtttatgy

SEQ ID NO: 260120 - DNA, 13 bp, Artificial Sequence
  Oligonucleotide for detection of SNP TSC0063143
rcataaacaacaa

SEQ ID NO: 260121 - DNA, 13 bp, Artificial Sequence
  Oligonucleotide for detection of SNP TSC0063143
gtatgattaatag

SEQ ID NO: 260122 - DNA, 13 bp, Artificial Sequence
  Oligonucleotide for detection of SNP TSC0063143
ctattaatcatac

SEQ ID NO: 260123 - DNA, 13 bp, Artificial Sequence
  Oligonucleotide for detection of SNP TSC0063143
gtatgagtaatag

SEQ ID NO: 260124 - DNA, 13 bp, Artificial Sequence
  Oligonucleotide for detection of SNP TSC0063143
ctattactcatac

SEQ ID NO: 260125 - DNA, 13 bp, Artificial Sequence
  Oligonucleotide for detection of SNP TSC0063144
ttatagagaaata

SEQ ID NO: 260126 - DNA, 13 bp, Artificial Sequence
  Oligonucleotide for detection of SNP TSC0063144
tatttctctataa

SEQ ID NO: 260127 - DNA, 13 bp, Artificial Sequence
  Oligonucleotide for detection of SNP TSC0063144
tgtttttttgtga

SEQ ID NO: 260128 - DNA, 13 bp, Artificial Sequence
  Oligonucleotide for detection of SNP TSC0063144
tcacaaaaaaaca

SEQ ID NO: 260129 - DNA, 13 bp, Artificial Sequence
  Oligonucleotide for detection of SNP TSC0063144
tgttttattgtga

SEQ ID NO: 260130 - DNA, 13 bp, Artificial Sequence
  Oligonucleotide for detection of SNP TSC0063144
tcacaataaaaca

SEQ ID NO: 260131 - DNA, 13 bp, Artificial Sequence
  Oligonucleotide for detection of SNP TSC0063145
agtttaggattgt

SEQ ID NO: 260132 - DNA, 13 bp, Artificial Sequence
  Oligonucleotide for detection of SNP TSC0063145
acaatcctaaact

SEQ ID NO: 260133 - DNA, 13 bp, Artificial Sequence
  Oligonucleotide for detection of SNP TSC0063145
agtttaagattgt

SEQ ID NO: 260134 - DNA, 13 bp, Artificial Sequence
  Oligonucleotide for detection of SNP TSC0063145
acaatcttaaact

SEQ ID NO: 260135 - DNA, 13 bp, Artificial Sequence
  Oligonucleotide for detection of SNP TSC0063146
tagtaatgtgaaa

SEQ ID NO: 260136 - DNA, 13 bp, Artificial Sequence
  Oligonucleotide for detection of SNP TSC0063146
tttcacattacta

SEQ ID NO: 260137 - DNA, 13 bp, Artificial Sequence
  Oligonucleotide for detection of SNP TSC0063146
tagtaacgtgaaa

SEQ ID NO: 260138 - DNA, 13 bp, Artificial Sequence
  Oligonucleotide for detection of SNP TSC0063146
tttcacgttacta

SEQ ID NO: 260139 - DNA, 13 bp, Artificial Sequence
  Oligonucleotide for detection of SNP TSC0063152
gttttttaaaatg

SEQ ID NO: 260140 - DNA, 13 bp, Artificial Sequence
  Oligonucleotide for detection of SNP TSC0063152
cattttaaaaaac

SEQ ID NO: 260141 - DNA, 13 bp, Artificial Sequence
  Oligonucleotide for detection of SNP TSC0063153
aaggaggataaga

SEQ ID NO: 260142 - DNA, 13 bp, Artificial Sequence
  Oligonucleotide for detection of SNP TSC0063153
tcttatcctcctt

SEQ ID NO: 260143 - DNA, 13 bp, Artificial Sequence
  Oligonucleotide for detection of SNP TSC0063153
aaggagtataaga

SEQ ID NO: 260144 - DNA, 13 bp, Artificial Sequence
  Oligonucleotide for detection of SNP TSC0063153
tcttatactcctt

SEQ ID NO: 260145 - DNA, 13 bp, Artificial Sequence
  Oligonucleotide for detection of SNP TSC0063154
gtgataaaaattt

SEQ ID NO: 260146 - DNA, 13 bp, Artificial Sequence
  Oligonucleotide for detection of SNP TSC0063154
aaatttttatcac

SEQ ID NO: 260147 - DNA, 13 bp, Artificial Sequence
  Oligonucleotide for detection of SNP TSC0063154
gtgatagaaattt

SEQ ID NO: 260148 - DNA, 13 bp, Artificial Sequence
  Oligonucleotide for detection of SNP TSC0063154
aaatttctatcac

SEQ ID NO: 260149 - DNA, 13 bp, Artificial Sequence
  Oligonucleotide for detection of SNP TSC0063155
aaaatagttgaat

SEQ ID NO: 260150 - DNA, 13 bp, Artificial Sequence
  Oligonucleotide for detection of SNP TSC0063155
attcaactatttt

SEQ ID NO: 260151 - DNA, 13 bp, Artificial Sequence
  Oligonucleotide for detection of SNP TSC0063155
aaaataattgaat

SEQ ID NO: 260152 - DNA, 13 bp, Artificial Sequence
  Oligonucleotide for detection of SNP TSC0063155
attcaattatttt

SEQ ID NO: 260153 - DNA, 13 bp, Artificial Sequence
  Oligonucleotide for detection of SNP TSC0063158
aaaaagtttaggt

SEQ ID NO: 260154 - DNA, 13 bp, Artificial Sequence
  Oligonucleotide for detection of SNP TSC0063158
acctaaacttttt

SEQ ID NO: 260155 - DNA, 13 bp, Artificial Sequence
  Oligonucleotide for detection of SNP TSC0063158
aaaaaggttaggt

SEQ ID NO: 260156 - DNA, 13 bp, Artificial Sequence
  Oligonucleotide for detection of SNP TSC0063158
acctaaccttttt

SEQ ID NO: 260157 - DNA, 13 bp, Artificial Sequence
  Oligonucleotide for detection of SNP TSC0063166
atagtcgtatttt

SEQ ID NO: 260158 - DNA, 13 bp, Artificial Sequence
  Oligonucleotide for detection of SNP TSC0063166
aaaatacgactat

SEQ ID NO: 260159 - DNA, 13 bp, Artificial Sequence
  Oligonucleotide for detection of SNP TSC0063166
aggatatggttat

SEQ ID NO: 260160 - DNA, 13 bp, Artificial Sequence
  Oligonucleotide for detection of SNP TSC0063166
ataaccatatcct

SEQ ID NO: 260161 - DNA, 13 bp, Artificial Sequence
  Oligonucleotide for detection of SNP TSC0063166
aggatacggttat

SEQ ID NO: 260162 - DNA, 13 bp, Artificial Sequence
  Oligonucleotide for detection of SNP TSC0063166
ataaccgtatcct

SEQ ID NO: 260163 - DNA, 13 bp, Artificial Sequence
  Oligonucleotide for detection of SNP TSC0063167
ttatattttatay

SEQ ID NO: 260164 - DNA, 13 bp, Artificial Sequence
  Oligonucleotide for detection of SNP TSC0063167
rtataaaatataa

SEQ ID NO: 260165 - DNA, 13 bp, Artificial Sequence
  Oligonucleotide for detection of SNP TSC0063167
gtgtgaaatatag

SEQ ID NO: 260166 - DNA, 13 bp, Artificial Sequence
  Oligonucleotide for detection of SNP TSC0063167
ctatatttcacac

SEQ ID NO: 260167 - DNA, 13 bp, Artificial Sequence
  Oligonucleotide for detection of SNP TSC0063167
gtgtgatatatag

SEQ ID NO: 260168 - DNA, 13 bp, Artificial Sequence
  Oligonucleotide for detection of SNP TSC0063167
ctatatatcacac

SEQ ID NO: 260169 - DNA, 13 bp, Artificial Sequence
  Oligonucleotide for detection of SNP TSC0063168
atatttttgtatg

SEQ ID NO: 260170 - DNA, 13 bp, Artificial Sequence
  Oligonucleotide for detection of SNP TSC0063168
catacaaaaatat

SEQ ID NO: 260171 - DNA, 13 bp, Artificial Sequence
  Oligonucleotide for detection of SNP TSC0063168
atatttgtgtatg

SEQ ID NO: 260172 - DNA, 13 bp, Artificial Sequence
  Oligonucleotide for detection of SNP TSC0063168
catacacaaatat

SEQ ID NO: 260173 - DNA, 13 bp, Artificial Sequence
  Oligonucleotide for detection of SNP TSC0063168
tatgtaaaagtgt

SEQ ID NO: 260174 - DNA, 13 bp, Artificial Sequence
  Oligonucleotide for detection of SNP TSC0063168
acacttttacata

SEQ ID NO: 260175 - DNA, 13 bp, Artificial Sequence
  Oligonucleotide for detection of SNP TSC0063168
tatgtataagtgt

SEQ ID NO: 260176 - DNA, 13 bp, Artificial Sequence
  Oligonucleotide for detection of SNP TSC0063168
acacttatacata

SEQ ID NO: 260177 - DNA, 13 bp, Artificial Sequence
  Oligonucleotide for detection of SNP TSC0063169
gaggtaataatta

SEQ ID NO: 260178 - DNA, 13 bp, Artificial Sequence
  Oligonucleotide for detection of SNP TSC0063169
taattattacctc

SEQ ID NO: 260179 - DNA, 13 bp, Artificial Sequence
  Oligonucleotide for detection of SNP TSC0063169
gaggtagtaatta

SEQ ID NO: 260180 - DNA, 13 bp, Artificial Sequence
  Oligonucleotide for detection of SNP TSC0063169
taattactacctc

SEQ ID NO: 260181 - DNA, 13 bp, Artificial Sequence
  Oligonucleotide for detection of SNP TSC0063170
aggttaatttgat

SEQ ID NO: 260182 - DNA, 13 bp, Artificial Sequence
  Oligonucleotide for detection of SNP TSC0063170
atcaaattaacct

SEQ ID NO: 260183 - DNA, 13 bp, Artificial Sequence
  Oligonucleotide for detection of SNP TSC0063170
aggttattttgat

SEQ ID NO: 260184 - DNA, 13 bp, Artificial Sequence
  Oligonucleotide for detection of SNP TSC0063170
atcaaaataacct

SEQ ID NO: 260185 - DNA, 13 bp, Artificial Sequence
  Oligonucleotide for detection of SNP TSC0063170
attaaaataattt

SEQ ID NO: 260186 - DNA, 13 bp, Artificial Sequence
  Oligonucleotide for detection of SNP TSC0063170
aaattattttaat

SEQ ID NO: 260187 - DNA, 13 bp, Artificial Sequence
  Oligonucleotide for detection of SNP TSC0063172
ggtgttgtagtta

SEQ ID NO: 260188 - DNA, 13 bp, Artificial Sequence
  Oligonucleotide for detection of SNP TSC0063172
taactacaacacc

SEQ ID NO: 260189 - DNA, 13 bp, Artificial Sequence
  Oligonucleotide for detection of SNP TSC0063172
ggtgttatagtta

SEQ ID NO: 260190 - DNA, 13 bp, Artificial Sequence
  Oligonucleotide for detection of SNP TSC0063172
taactataacacc

SEQ ID NO: 260191 - DNA, 13 bp, Artificial Sequence
  Oligonucleotide for detection of SNP TSC0063172
ggcgttgtagtta

SEQ ID NO: 260192 - DNA, 13 bp, Artificial Sequence
  Oligonucleotide for detection of SNP TSC0063172
taactacaacgcc

SEQ ID NO: 260193 - DNA, 13 bp, Artificial Sequence
  Oligonucleotide for detection of SNP TSC0063172
ggcgttatagtta

SEQ ID NO: 260194 - DNA, 13 bp, Artificial Sequence
  Oligonucleotide for detection of SNP TSC0063172
taactataacgcc

SEQ ID NO: 260195 - DNA, 13 bp, Artificial Sequence
  Oligonucleotide for detection of SNP TSC0063173
aattataaatata

SEQ ID NO: 260196 - DNA, 13 bp, Artificial Sequence
  Oligonucleotide for detection of SNP TSC0063173
tatatttataatt

SEQ ID NO: 260197 - DNA, 13 bp, Artificial Sequence
  Oligonucleotide for detection of SNP TSC0063173
aattatgaatata

SEQ ID NO: 260198 - DNA, 13 bp, Artificial Sequence
  Oligonucleotide for detection of SNP TSC0063173
tatattcataatt

SEQ ID NO: 260199 - DNA, 13 bp, Artificial Sequence
  Oligonucleotide for detection of SNP TSC0063175
taaaaagaattaa

SEQ ID NO: 260200 - DNA, 13 bp, Artificial Sequence
  Oligonucleotide for detection of SNP TSC0063175
ttaattcttttta

SEQ ID NO: 260201 - DNA, 13 bp, Artificial Sequence
  Oligonucleotide for detection of SNP TSC0063176
attaaatagaaat

SEQ ID NO: 260202 - DNA, 13 bp, Artificial Sequence
  Oligonucleotide for detection of SNP TSC0063176
atttctatttaat

SEQ ID NO: 260203 - DNA, 13 bp, Artificial Sequence
  Oligonucleotide for detection of SNP TSC0063176
attaaagagaaat

SEQ ID NO: 260204 - DNA, 13 bp, Artificial Sequence
  Oligonucleotide for detection of SNP TSC0063176
atttctctttaat

SEQ ID NO: 260205 - DNA, 13 bp, Artificial Sequence
  Oligonucleotide for detection of SNP TSC0063176
atttttgtttgat

SEQ ID NO: 260206 - DNA, 13 bp, Artificial Sequence
  Oligonucleotide for detection of SNP TSC0063176
atcaaacaaaaat

SEQ ID NO: 260207 - DNA, 13 bp, Artificial Sequence
  Oligonucleotide for detection of SNP TSC0063176
atttttttttgat

SEQ ID NO: 260208 - DNA, 13 bp, Artificial Sequence
  Oligonucleotide for detection of SNP TSC0063176
atcaaaaaaaaat

SEQ ID NO: 260209 - DNA, 13 bp, Artificial Sequence
  Oligonucleotide for detection of SNP TSC0063177
gtatgtattattg

SEQ ID NO: 260210 - DNA, 13 bp, Artificial Sequence
  Oligonucleotide for detection of SNP TSC0063177
caataatacatac

SEQ ID NO: 260211 - DNA, 13 bp, Artificial Sequence
  Oligonucleotide for detection of SNP TSC0063177
gtatgttttattg

SEQ ID NO: 260212 - DNA, 13 bp, Artificial Sequence
  Oligonucleotide for detection of SNP TSC0063177
caataaaacatac

SEQ ID NO: 260213 - DNA, 13 bp, Artificial Sequence
  Oligonucleotide for detection of SNP TSC0063177
gtatgtgttattg

SEQ ID NO: 260214 - DNA, 13 bp, Artificial Sequence
  Oligonucleotide for detection of SNP TSC0063177
caataacacatac

SEQ ID NO: 260215 - DNA, 13 bp, Artificial Sequence
  Oligonucleotide for detection of SNP TSC0063177
gtatgcgttattg

SEQ ID NO: 260216 - DNA, 13 bp, Artificial Sequence
  Oligonucleotide for detection of SNP TSC0063177
caataacgcatac

SEQ ID NO: 260217 - DNA, 13 bp, Artificial Sequence
  Oligonucleotide for detection of SNP TSC0063177
tagtggtgtatgy

SEQ ID NO: 260218 - DNA, 13 bp, Artificial Sequence
  Oligonucleotide for detection of SNP TSC0063177
rcatacaccacta

SEQ ID NO: 260219 - DNA, 13 bp, Artificial Sequence
  Oligonucleotide for detection of SNP TSC0063177
tagtggggtatgy

SEQ ID NO: 260220 - DNA, 13 bp, Artificial Sequence
  Oligonucleotide for detection of SNP TSC0063177
rcataccccacta

SEQ ID NO: 260221 - DNA, 13 bp, Artificial Sequence
  Oligonucleotide for detection of SNP TSC0063177
tagtggcgtatgy

SEQ ID NO: 260222 - DNA, 13 bp, Artificial Sequence
  Oligonucleotide for detection of SNP TSC0063177
rcatacgccacta

SEQ ID NO: 260223 - DNA, 13 bp, Artificial Sequence
  Oligonucleotide for detection of SNP TSC0063178
ttttgtataaaaa

SEQ ID NO: 260224 - DNA, 13 bp, Artificial Sequence
  Oligonucleotide for detection of SNP TSC0063178
tttttatacaaaa

SEQ ID NO: 260225 - DNA, 13 bp, Artificial Sequence
  Oligonucleotide for detection of SNP TSC0063178
ttttgtttaaaaa

SEQ ID NO: 260226 - DNA, 13 bp, Artificial Sequence
  Oligonucleotide for detection of SNP TSC0063178
tttttaaacaaaa

SEQ ID NO: 260227 - DNA, 13 bp, Artificial Sequence
  Oligonucleotide for detection of SNP TSC0063179
tatagttgtatgy

SEQ ID NO: 260228 - DNA, 13 bp, Artificial Sequence
  Oligonucleotide for detection of SNP TSC0063179
rcatacaactata

SEQ ID NO: 260229 - DNA, 13 bp, Artificial Sequence
  Oligonucleotide for detection of SNP TSC0063179
tatagtcgtatgy

SEQ ID NO: 260230 - DNA, 13 bp, Artificial Sequence
  Oligonucleotide for detection of SNP TSC0063179
rcatacgactata

SEQ ID NO: 260231 - DNA, 13 bp, Artificial Sequence
  Oligonucleotide for detection of SNP TSC0063179
gtatgtgattgta

SEQ ID NO: 260232 - DNA, 13 bp, Artificial Sequence
  Oligonucleotide for detection of SNP TSC0063179
tacaatcacatac

SEQ ID NO: 260233 - DNA, 13 bp, Artificial Sequence
  Oligonucleotide for detection of SNP TSC0063179
gtatgtaattgta

SEQ ID NO: 260234 - DNA, 13 bp, Artificial Sequence
  Oligonucleotide for detection of SNP TSC0063179
tacaattacatac

SEQ ID NO: 260235 - DNA, 13 bp, Artificial Sequence
  Oligonucleotide for detection of SNP TSC0063179
gtatgcgattgta

SEQ ID NO: 260236 - DNA, 13 bp, Artificial Sequence
  Oligonucleotide for detection of SNP TSC0063179
tacaatcgcatac

SEQ ID NO: 260237 - DNA, 13 bp, Artificial Sequence
  Oligonucleotide for detection of SNP TSC0063180
atggtatgaagtt

SEQ ID NO: 260238 - DNA, 13 bp, Artificial Sequence
  Oligonucleotide for detection of SNP TSC0063180
aacttcataccat

SEQ ID NO: 260239 - DNA, 13 bp, Artificial Sequence
  Oligonucleotide for detection of SNP TSC0063180
atggtacgaagtt

SEQ ID NO: 260240 - DNA, 13 bp, Artificial Sequence
  Oligonucleotide for detection of SNP TSC0063180
aacttcgtaccat

SEQ ID NO: 260241 - DNA, 13 bp, Artificial Sequence
  Oligonucleotide for detection of SNP TSC0063180
aattttgtgttat

SEQ ID NO: 260242 - DNA, 13 bp, Artificial Sequence
  Oligonucleotide for detection of SNP TSC0063180
ataacacaaaatt

SEQ ID NO: 260243 - DNA, 13 bp, Artificial Sequence
  Oligonucleotide for detection of SNP TSC0063180
aattttatgttat

SEQ ID NO: 260244 - DNA, 13 bp, Artificial Sequence
  Oligonucleotide for detection of SNP TSC0063180
ataacataaaatt

SEQ ID NO: 260245 - DNA, 13 bp, Artificial Sequence
  Oligonucleotide for detection of SNP TSC0063180
aatttcgtgttat

SEQ ID NO: 260246 - DNA, 13 bp, Artificial Sequence
  Oligonucleotide for detection of SNP TSC0063180
ataacacgaaatt

SEQ ID NO: 260247 - DNA, 13 bp, Artificial Sequence
  Oligonucleotide for detection of SNP TSC0063183
aagattggaggat

SEQ ID NO: 260248 - DNA, 13 bp, Artificial Sequence
  Oligonucleotide for detection of SNP TSC0063183
atcctccaatctt

SEQ ID NO: 260249 - DNA, 13 bp, Artificial Sequence
  Oligonucleotide for detection of SNP TSC0063183
aagattagaggat

SEQ ID NO: 260250 - DNA, 13 bp, Artificial Sequence
  Oligonucleotide for detection of SNP TSC0063183
atcctctaatctt

SEQ ID NO: 260251 - DNA, 13 bp, Artificial Sequence
  Oligonucleotide for detection of SNP TSC0063183
aagatcggaggat

SEQ ID NO: 260252 - DNA, 13 bp, Artificial Sequence
  Oligonucleotide for detection of SNP TSC0063183
atcctccgatctt

SEQ ID NO: 260253 - DNA, 13 bp, Artificial Sequence
  Oligonucleotide for detection of SNP TSC0063184
tttgagttagaga

SEQ ID NO: 260254 - DNA, 13 bp, Artificial Sequence
  Oligonucleotide for detection of SNP TSC0063184
tctctaactcaaa

SEQ ID NO: 260255 - DNA, 13 bp, Artificial Sequence
  Oligonucleotide for detection of SNP TSC0063184
tttgagatagaga

SEQ ID NO: 260256 - DNA, 13 bp, Artificial Sequence
  Oligonucleotide for detection of SNP TSC0063184
tctctatctcaaa

SEQ ID NO: 260257 - DNA, 13 bp, Artificial Sequence
  Oligonucleotide for detection of SNP TSC0063188
tagaatatgattg

SEQ ID NO: 260258 - DNA, 13 bp, Artificial Sequence
  Oligonucleotide for detection of SNP TSC0063188
caatcatattcta

SEQ ID NO: 260259 - DNA, 13 bp, Artificial Sequence
  Oligonucleotide for detection of SNP TSC0063188
tagaatgtgattg

SEQ ID NO: 260260 - DNA, 13 bp, Artificial Sequence
  Oligonucleotide for detection of SNP TSC0063188
caatcacattcta

SEQ ID NO: 260261 - DNA, 13 bp, Artificial Sequence
  Oligonucleotide for detection of SNP TSC0063193
ttttttcggttat

SEQ ID NO: 260262 - DNA, 13 bp, Artificial Sequence
  Oligonucleotide for detection of SNP TSC0063193
ataaccgaaaaaa

SEQ ID NO: 260263 - DNA, 13 bp, Artificial Sequence
  Oligonucleotide for detection of SNP TSC0063193
atgattgaaaaga

SEQ ID NO: 260264 - DNA, 13 bp, Artificial Sequence
  Oligonucleotide for detection of SNP TSC0063193
tcttttcaatcat

SEQ ID NO: 260265 - DNA, 13 bp, Artificial Sequence
  Oligonucleotide for detection of SNP TSC0063193
atgatttaaaaga

SEQ ID NO: 260266 - DNA, 13 bp, Artificial Sequence
  Oligonucleotide for detection of SNP TSC0063193
tcttttaaatcat

SEQ ID NO: 260267 - DNA, 13 bp, Artificial Sequence
  Oligonucleotide for detection of SNP TSC0063193
atgatcgaaaaga

SEQ ID NO: 260268 - DNA, 13 bp, Artificial Sequence
  Oligonucleotide for detection of SNP TSC0063193
tcttttcgatcat

SEQ ID NO: 260269 - DNA, 13 bp, Artificial Sequence
  Oligonucleotide for detection of SNP TSC0063194
tagaatgtagtay

SEQ ID NO: 260270 - DNA, 13 bp, Artificial Sequence
  Oligonucleotide for detection of SNP TSC0063194
rtactacattcta

SEQ ID NO: 260271 - DNA, 13 bp, Artificial Sequence
  Oligonucleotide for detection of SNP TSC0063194
tagaatatagtay

SEQ ID NO: 260272 - DNA, 13 bp, Artificial Sequence
  Oligonucleotide for detection of SNP TSC0063194
rtactatattcta

SEQ ID NO: 260273 - DNA, 13 bp, Artificial Sequence
  Oligonucleotide for detection of SNP TSC0006237
taggatgtaaaat

SEQ ID NO: 260274 - DNA, 13 bp, Artificial Sequence
  Oligonucleotide for detection of SNP TSC0006237
attttacatccta

SEQ ID NO: 260275 - DNA, 13 bp, Artificial Sequence
  Oligonucleotide for detection of SNP TSC0006237
taggatataaaat

SEQ ID NO: 260276 - DNA, 13 bp, Artificial Sequence
  Oligonucleotide for detection of SNP TSC0006237
attttatatccta

SEQ ID NO: 260277 - DNA, 13 bp, Artificial Sequence
  Oligonucleotide for detection of SNP TSC0063196
aagagtgtagaty

SEQ ID NO: 260278 - DNA, 13 bp, Artificial Sequence
  Oligonucleotide for detection of SNP TSC0063196
ratctacactctt

SEQ ID NO: 260279 - DNA, 13 bp, Artificial Sequence
  Oligonucleotide for detection of SNP TSC0063196
aagagtatagaty

SEQ ID NO: 260280 - DNA, 13 bp, Artificial Sequence
  Oligonucleotide for detection of SNP TSC0063196
ratctatactctt

SEQ ID NO: 260281 - DNA, 13 bp, Artificial Sequence
  Oligonucleotide for detection of SNP TSC0063196
aagagcgtagaty

SEQ ID NO: 260282 - DNA, 13 bp, Artificial Sequence
  Oligonucleotide for detection of SNP TSC0063196
ratctacgctctt

SEQ ID NO: 260283 - DNA, 13 bp, Artificial Sequence
  Oligonucleotide for detection of SNP TSC0063197
aaagtatttaaay

SEQ ID NO: 260284 - DNA, 13 bp, Artificial Sequence
  Oligonucleotide for detection of SNP TSC0063197
rtttaaatacttt

SEQ ID NO: 260285 - DNA, 13 bp, Artificial Sequence
  Oligonucleotide for detection of SNP TSC0063197
aaagtagttaaay

SEQ ID NO: 260286 - DNA, 13 bp, Artificial Sequence
  Oligonucleotide for detection of SNP TSC0063197
rtttaactacttt

SEQ ID NO: 260287 - DNA, 13 bp, Artificial Sequence
  Oligonucleotide for detection of SNP TSC0063198
ttagtaaagatta

SEQ ID NO: 260288 - DNA, 13 bp, Artificial Sequence
  Oligonucleotide for detection of SNP TSC0063198
taatctttactaa

SEQ ID NO: 260289 - DNA, 13 bp, Artificial Sequence
  Oligonucleotide for detection of SNP TSC0063198
ttagtagagatta

SEQ ID NO: 260290 - DNA, 13 bp, Artificial Sequence
  Oligonucleotide for detection of SNP TSC0063198
taatctctactaa

SEQ ID NO: 260291 - DNA, 13 bp, Artificial Sequence
  Oligonucleotide for detection of SNP TSC0063203
gggttgggttata

SEQ ID NO: 260292 - DNA, 13 bp, Artificial Sequence
  Oligonucleotide for detection of SNP TSC0063203
tataacccaaccc

SEQ ID NO: 260293 - DNA, 13 bp, Artificial Sequence
  Oligonucleotide for detection of SNP TSC0063203
gggttgagttata

SEQ ID NO: 260294 - DNA, 13 bp, Artificial Sequence
  Oligonucleotide for detection of SNP TSC0063203
tataactcaaccc

SEQ ID NO: 260295 - DNA, 13 bp, Artificial Sequence
  Oligonucleotide for detection of SNP TSC0063204
gttatgattgttg

SEQ ID NO: 260296 - DNA, 13 bp, Artificial Sequence
  Oligonucleotide for detection of SNP TSC0063204
caacaatcataac

SEQ ID NO: 260297 - DNA, 13 bp, Artificial Sequence
  Oligonucleotide for detection of SNP TSC0063204
gttatggttgttg

SEQ ID NO: 260298 - DNA, 13 bp, Artificial Sequence
  Oligonucleotide for detection of SNP TSC0063204
caacaaccataac

SEQ ID NO: 260299 - DNA, 13 bp, Artificial Sequence
  Oligonucleotide for detection of SNP TSC0063204
gttacgattgttg

SEQ ID NO: 260300 - DNA, 13 bp, Artificial Sequence
  Oligonucleotide for detection of SNP TSC0063204
caacaatcgtaac

SEQ ID NO: 260301 - DNA, 13 bp, Artificial Sequence
  Oligonucleotide for detection of SNP TSC0063204
gttacggttgttg

SEQ ID NO: 260302 - DNA, 13 bp, Artificial Sequence
  Oligonucleotide for detection of SNP TSC0063204
caacaaccgtaac

SEQ ID NO: 260303 - DNA, 13 bp, Artificial Sequence
  Oligonucleotide for detection of SNP TSC0063205
tgttgaatggtaa

SEQ ID NO: 260304 - DNA, 13 bp, Artificial Sequence
  Oligonucleotide for detection of SNP TSC0063205
ttaccattcaaca

SEQ ID NO: 260305 - DNA, 13 bp, Artificial Sequence
  Oligonucleotide for detection of SNP TSC0063205
tgttgagtggtaa

SEQ ID NO: 260306 - DNA, 13 bp, Artificial Sequence
  Oligonucleotide for detection of SNP TSC0063205
ttaccactcaaca

SEQ ID NO: 260307 - DNA, 13 bp, Artificial Sequence
  Oligonucleotide for detection of SNP TSC0063206
atttagattagag

SEQ ID NO: 260308 - DNA, 13 bp, Artificial Sequence
  Oligonucleotide for detection of SNP TSC0063206
ctctaatctaaat

SEQ ID NO: 260309 - DNA, 13 bp, Artificial Sequence
  Oligonucleotide for detection of SNP TSC0063206
atttagtttagag

SEQ ID NO: 260310 - DNA, 13 bp, Artificial Sequence
  Oligonucleotide for detection of SNP TSC0063206
ctctaaactaaat

SEQ ID NO: 260311 - DNA, 13 bp, Artificial Sequence
  Oligonucleotide for detection of SNP TSC0063206
ttttgatttaaat

SEQ ID NO: 260312 - DNA, 13 bp, Artificial Sequence
  Oligonucleotide for detection of SNP TSC0063206
atttaaatcaaaa

SEQ ID NO: 260313 - DNA, 13 bp, Artificial Sequence
  Oligonucleotide for detection of SNP TSC0063206
ttttgaattaaat

SEQ ID NO: 260314 - DNA, 13 bp, Artificial Sequence
  Oligonucleotide for detection of SNP TSC0063206
atttaattcaaaa

SEQ ID NO: 260315 - DNA, 13 bp, Artificial Sequence
  Oligonucleotide for detection of SNP TSC0063210
tttattatagtay

SEQ ID NO: 260316 - DNA, 13 bp, Artificial Sequence
  Oligonucleotide for detection of SNP TSC0063210
rtactataataaa

SEQ ID NO: 260317 - DNA, 13 bp, Artificial Sequence
  Oligonucleotide for detection of SNP TSC0063210
tttattgtagtay

SEQ ID NO: 260318 - DNA, 13 bp, Artificial Sequence
  Oligonucleotide for detection of SNP TSC0063210
rtactacaataaa

SEQ ID NO: 260319 - DNA, 13 bp, Artificial Sequence
  Oligonucleotide for detection of SNP TSC0063210
tttatcgtagtay

SEQ ID NO: 260320 - DNA, 13 bp, Artificial Sequence
  Oligonucleotide for detection of SNP TSC0063210
rtactacgataaa

SEQ ID NO: 260321 - DNA, 13 bp, Artificial Sequence
  Oligonucleotide for detection of SNP TSC0063210
gtgttatgataaa

SEQ ID NO: 260322 - DNA, 13 bp, Artificial Sequence
  Oligonucleotide for detection of SNP TSC0063210
tttatcataacac

SEQ ID NO: 260323 - DNA, 13 bp, Artificial Sequence
  Oligonucleotide for detection of SNP TSC0063210
gtgttacgataaa

SEQ ID NO: 260324 - DNA, 13 bp, Artificial Sequence
  Oligonucleotide for detection of SNP TSC0063210
tttatcgtaacac

SEQ ID NO: 260325 - DNA, 13 bp, Artificial Sequence
  Oligonucleotide for detection of SNP TSC0063211
tgtggtatgaaty

SEQ ID NO: 260326 - DNA, 13 bp, Artificial Sequence
  Oligonucleotide for detection of SNP TSC0063211
rattcataccaca

SEQ ID NO: 260327 - DNA, 13 bp, Artificial Sequence
  Oligonucleotide for detection of SNP TSC0063211
tgtggtttgaaty

SEQ ID NO: 260328 - DNA, 13 bp, Artificial Sequence
  Oligonucleotide for detection of SNP TSC0063211
rattcaaaccaca

SEQ ID NO: 260329 - DNA, 13 bp, Artificial Sequence
  Oligonucleotide for detection of SNP TSC0063211
ggtttatgttata

SEQ ID NO: 260330 - DNA, 13 bp, Artificial Sequence
  Oligonucleotide for detection of SNP TSC0063211
tataacataaacc

SEQ ID NO: 260331 - DNA, 13 bp, Artificial Sequence
  Oligonucleotide for detection of SNP TSC0063211
ggtttaggttata

SEQ ID NO: 260332 - DNA, 13 bp, Artificial Sequence
  Oligonucleotide for detection of SNP TSC0063211
tataacctaaacc

SEQ ID NO: 260333 - DNA, 13 bp, Artificial Sequence
  Oligonucleotide for detection of SNP TSC0063213
ttaaaagttaata

SEQ ID NO: 260334 - DNA, 13 bp, Artificial Sequence
  Oligonucleotide for detection of SNP TSC0063213
tattaacttttaa

SEQ ID NO: 260335 - DNA, 13 bp, Artificial Sequence
  Oligonucleotide for detection of SNP TSC0063214
gaaatagattaaa

SEQ ID NO: 260336 - DNA, 13 bp, Artificial Sequence
  Oligonucleotide for detection of SNP TSC0063214
tttaatctatttc

SEQ ID NO: 260337 - DNA, 13 bp, Artificial Sequence
  Oligonucleotide for detection of SNP TSC0063214
gaaataaattaaa

SEQ ID NO: 260338 - DNA, 13 bp, Artificial Sequence
  Oligonucleotide for detection of SNP TSC0063214
tttaatttatttc

SEQ ID NO: 260339 - DNA, 13 bp, Artificial Sequence
  Oligonucleotide for detection of SNP TSC0063216
atgataatataaa

SEQ ID NO: 260340 - DNA, 13 bp, Artificial Sequence
  Oligonucleotide for detection of SNP TSC0063216
tttatattatcat

SEQ ID NO: 260341 - DNA, 13 bp, Artificial Sequence
  Oligonucleotide for detection of SNP TSC0063216
atgatagtataaa

SEQ ID NO: 260342 - DNA, 13 bp, Artificial Sequence
  Oligonucleotide for detection of SNP TSC0063216
tttatactatcat

SEQ ID NO: 260343 - DNA, 13 bp, Artificial Sequence
  Oligonucleotide for detection of SNP TSC0063217
gattttttaaaat

SEQ ID NO: 260344 - DNA, 13 bp, Artificial Sequence
  Oligonucleotide for detection of SNP TSC0063217
attttaaaaaatc

SEQ ID NO: 260345 - DNA, 13 bp, Artificial Sequence
  Oligonucleotide for detection of SNP TSC0063217
gattttgtaaaat

SEQ ID NO: 260346 - DNA, 13 bp, Artificial Sequence
  Oligonucleotide for detection of SNP TSC0063217
attttacaaaatc

SEQ ID NO: 260347 - DNA, 13 bp, Artificial Sequence
  Oligonucleotide for detection of SNP TSC0063217
attttggaaagty

SEQ ID NO: 260348 - DNA, 13 bp, Artificial Sequence
  Oligonucleotide for detection of SNP TSC0063217
ractttccaaaat

SEQ ID NO: 260349 - DNA, 13 bp, Artificial Sequence
  Oligonucleotide for detection of SNP TSC0063217
attttgtaaagty

SEQ ID NO: 260350 - DNA, 13 bp, Artificial Sequence
  Oligonucleotide for detection of SNP TSC0063217
ractttacaaaat

SEQ ID NO: 260351 - DNA, 13 bp, Artificial Sequence
  Oligonucleotide for detection of SNP TSC0063224
aatagagataaaa

SEQ ID NO: 260352 - DNA, 13 bp, Artificial Sequence
  Oligonucleotide for detection of SNP TSC0063224
ttttatctctatt

SEQ ID NO: 260353 - DNA, 13 bp, Artificial Sequence
  Oligonucleotide for detection of SNP TSC0063224
aatagaaataaaa

SEQ ID NO: 260354 - DNA, 13 bp, Artificial Sequence
  Oligonucleotide for detection of SNP TSC0063224
ttttatttctatt

SEQ ID NO: 260355 - DNA, 13 bp, Artificial Sequence
  Oligonucleotide for detection of SNP TSC0063226
aagattaaattty

SEQ ID NO: 260356 - DNA, 13 bp, Artificial Sequence
  Oligonucleotide for detection of SNP TSC0063226
raaatttaatctt

SEQ ID NO: 260357 - DNA, 13 bp, Artificial Sequence
  Oligonucleotide for detection of SNP TSC0063226
aagattgaattty

SEQ ID NO: 260358 - DNA, 13 bp, Artificial Sequence
  Oligonucleotide for detection of SNP TSC0063226
raaattcaatctt

SEQ ID NO: 260359 - DNA, 13 bp, Artificial Sequence
  Oligonucleotide for detection of SNP TSC0063227
tttggttttttgy

SEQ ID NO: 260360 - DNA, 13 bp, Artificial Sequence
  Oligonucleotide for detection of SNP TSC0063227
rcaaaaaaccaaa

SEQ ID NO: 260361 - DNA, 13 bp, Artificial Sequence
  Oligonucleotide for detection of SNP TSC0063227
tttggtgttttgy

SEQ ID NO: 260362 - DNA, 13 bp, Artificial Sequence
  Oligonucleotide for detection of SNP TSC0063227
rcaaaacaccaaa

SEQ ID NO: 260363 - DNA, 13 bp, Artificial Sequence
  Oligonucleotide for detection of SNP TSC0063227
tttggtttttcgy

SEQ ID NO: 260364 - DNA, 13 bp, Artificial Sequence
  Oligonucleotide for detection of SNP TSC0063227
rcgaaaaaccaaa

SEQ ID NO: 260365 - DNA, 13 bp, Artificial Sequence
  Oligonucleotide for detection of SNP TSC0063227
tttggtgtttcgy

SEQ ID NO: 260366 - DNA, 13 bp, Artificial Sequence
  Oligonucleotide for detection of SNP TSC0063227
rcgaaacaccaaa

SEQ ID NO: 260367 - DNA, 13 bp, Artificial Sequence
  Oligonucleotide for detection of SNP TSC0063227
gtggaggattaag

SEQ ID NO: 260368 - DNA, 13 bp, Artificial Sequence
  Oligonucleotide for detection of SNP TSC0063227
cttaatcctccac

SEQ ID NO: 260369 - DNA, 13 bp, Artificial Sequence
  Oligonucleotide for detection of SNP TSC0063227
gtggagtattaag

SEQ ID NO: 260370 - DNA, 13 bp, Artificial Sequence
  Oligonucleotide for detection of SNP TSC0063227
cttaatactccac

SEQ ID NO: 260371 - DNA, 13 bp, Artificial Sequence
  Oligonucleotide for detection of SNP TSC0063227
gcggaggattaag

SEQ ID NO: 260372 - DNA, 13 bp, Artificial Sequence
  Oligonucleotide for detection of SNP TSC0063227
cttaatcctccgc

SEQ ID NO: 260373 - DNA, 13 bp, Artificial Sequence
  Oligonucleotide for detection of SNP TSC0063227
gcggagtattaag

SEQ ID NO: 260374 - DNA, 13 bp, Artificial Sequence
  Oligonucleotide for detection of SNP TSC0063227
cttaatactccgc

SEQ ID NO: 260375 - DNA, 13 bp, Artificial Sequence
  Oligonucleotide for detection of SNP TSC0063228
aaaataaatttty

SEQ ID NO: 260376 - DNA, 13 bp, Artificial Sequence
  Oligonucleotide for detection of SNP TSC0063228
raaaatttatttt

SEQ ID NO: 260377 - DNA, 13 bp, Artificial Sequence
  Oligonucleotide for detection of SNP TSC0063228
aaaatagatttty

SEQ ID NO: 260378 - DNA, 13 bp, Artificial Sequence
  Oligonucleotide for detection of SNP TSC0063228
raaaatctatttt

SEQ ID NO: 260379 - DNA, 13 bp, Artificial Sequence
  Oligonucleotide for detection of SNP TSC0004826
tttagaagttaaa

SEQ ID NO: 260380 - DNA, 13 bp, Artificial Sequence
  Oligonucleotide for detection of SNP TSC0004826
tttaacttctaaa

SEQ ID NO: 260381 - DNA, 13 bp, Artificial Sequence
  Oligonucleotide for detection of SNP TSC0004826
tttagaggttaaa

SEQ ID NO: 260382 - DNA, 13 bp, Artificial Sequence
  Oligonucleotide for detection of SNP TSC0004826
tttaacctctaaa

SEQ ID NO: 260383 - DNA, 13 bp, Artificial Sequence
  Oligonucleotide for detection of SNP TSC0004827
ggagtagtgtaty

SEQ ID NO: 260384 - DNA, 13 bp, Artificial Sequence
  Oligonucleotide for detection of SNP TSC0004827
ratacactactcc

SEQ ID NO: 260385 - DNA, 13 bp, Artificial Sequence
  Oligonucleotide for detection of SNP TSC0004827
ggagtaatgtaty

SEQ ID NO: 260386 - DNA, 13 bp, Artificial Sequence
  Oligonucleotide for detection of SNP TSC0004827
ratacattactcc

SEQ ID NO: 260387 - DNA, 13 bp, Artificial Sequence
  Oligonucleotide for detection of SNP TSC0063229
tggtatttagttt

SEQ ID NO: 260388 - DNA, 13 bp, Artificial Sequence
  Oligonucleotide for detection of SNP TSC0063229
aaactaaatacca

SEQ ID NO: 260389 - DNA, 13 bp, Artificial Sequence
  Oligonucleotide for detection of SNP TSC0063229
tggtatgtagttt

SEQ ID NO: 260390 - DNA, 13 bp, Artificial Sequence
  Oligonucleotide for detection of SNP TSC0063229
aaactacatacca

SEQ ID NO: 260391 - DNA, 13 bp, Artificial Sequence
  Oligonucleotide for detection of SNP TSC0063229
aaattagatatta

SEQ ID NO: 260392 - DNA, 13 bp, Artificial Sequence
  Oligonucleotide for detection of SNP TSC0063229
taatatctaattt

SEQ ID NO: 260393 - DNA, 13 bp, Artificial Sequence
  Oligonucleotide for detection of SNP TSC0063229
aaattatatatta

SEQ ID NO: 260394 - DNA, 13 bp, Artificial Sequence
  Oligonucleotide for detection of SNP TSC0063229
taatatataattt

SEQ ID NO: 260395 - DNA, 13 bp, Artificial Sequence
  Oligonucleotide for detection of SNP TSC0063230
tggatttttaata

SEQ ID NO: 260396 - DNA, 13 bp, Artificial Sequence
  Oligonucleotide for detection of SNP TSC0063230
tattaaaaatcca

SEQ ID NO: 260397 - DNA, 13 bp, Artificial Sequence
  Oligonucleotide for detection of SNP TSC0063230
tggattgttaata

SEQ ID NO: 260398 - DNA, 13 bp, Artificial Sequence
  Oligonucleotide for detection of SNP TSC0063230
tattaacaatcca

SEQ ID NO: 260399 - DNA, 13 bp, Artificial Sequence
  Oligonucleotide for detection of SNP TSC0063230
tggatcgttaata

SEQ ID NO: 260400 - DNA, 13 bp, Artificial Sequence
  Oligonucleotide for detection of SNP TSC0063230
tattaacgatcca

SEQ ID NO: 260401 - DNA, 13 bp, Artificial Sequence
  Oligonucleotide for detection of SNP TSC0063230
tattaaagattta

SEQ ID NO: 260402 - DNA, 13 bp, Artificial Sequence
  Oligonucleotide for detection of SNP TSC0063230
taaatctttaata

SEQ ID NO: 260403 - DNA, 13 bp, Artificial Sequence
  Oligonucleotide for detection of SNP TSC0063230
tattaatgattta

SEQ ID NO: 260404 - DNA, 13 bp, Artificial Sequence
  Oligonucleotide for detection of SNP TSC0063230
taaatcattaata

SEQ ID NO: 260405 - DNA, 13 bp, Artificial Sequence
  Oligonucleotide for detection of SNP TSC0063230
tattaacgattta

SEQ ID NO: 260406 - DNA, 13 bp, Artificial Sequence
  Oligonucleotide for detection of SNP TSC0063230
taaatcgttaata

SEQ ID NO: 260407 - DNA, 13 bp, Artificial Sequence
  Oligonucleotide for detection of SNP TSC0063234
tttttgtaaattt

SEQ ID NO: 260408 - DNA, 13 bp, Artificial Sequence
  Oligonucleotide for detection of SNP TSC0063234
aaatttacaaaaa

SEQ ID NO: 260409 - DNA, 13 bp, Artificial Sequence
  Oligonucleotide for detection of SNP TSC0063234
aaatttataaaaa

SEQ ID NO: 260410 - DNA, 13 bp, Artificial Sequence
  Oligonucleotide for detection of SNP TSC0063234
tttttataaattt

SEQ ID NO: 260411 - DNA, 13 bp, Artificial Sequence
  Oligonucleotide for detection of SNP TSC0063234
aaatttttaaaaa

SEQ ID NO: 260412 - DNA, 13 bp, Artificial Sequence
  Oligonucleotide for detection of SNP TSC0063234
tttttaaaaattt

SEQ ID NO: 260413 - DNA, 13 bp, Artificial Sequence
  Oligonucleotide for detection of SNP TSC0063235
tttagaaaaataa

SEQ ID NO: 260414 - DNA, 13 bp, Artificial Sequence
  Oligonucleotide for detection of SNP TSC0063235
ttatttttctaaa

SEQ ID NO: 260415 - DNA, 13 bp, Artificial Sequence
  Oligonucleotide for detection of SNP TSC0063235
tttagataaataa

SEQ ID NO: 260416 - DNA, 13 bp, Artificial Sequence
  Oligonucleotide for detection of SNP TSC0063235
ttatttatctaaa

SEQ ID NO: 260417 - DNA, 13 bp, Artificial Sequence
  Oligonucleotide for detection of SNP TSC0063235
ttatttttttggg

SEQ ID NO: 260418 - DNA, 13 bp, Artificial Sequence
  Oligonucleotide for detection of SNP TSC0063235
cccaaaaaaataa

SEQ ID NO: 260419 - DNA, 13 bp, Artificial Sequence
  Oligonucleotide for detection of SNP TSC0063235
ttatttgtttggg

SEQ ID NO: 260420 - DNA, 13 bp, Artificial Sequence
  Oligonucleotide for detection of SNP TSC0063235
cccaaacaaataa

SEQ ID NO: 260421 - DNA, 13 bp, Artificial Sequence
  Oligonucleotide for detection of SNP TSC0063240
tgattgtgttagy

SEQ ID NO: 260422 - DNA, 13 bp, Artificial Sequence
  Oligonucleotide for detection of SNP TSC0063240
rctaacacaatca

SEQ ID NO: 260423 - DNA, 13 bp, Artificial Sequence
  Oligonucleotide for detection of SNP TSC0063240
tgattgggttagy

SEQ ID NO: 260424 - DNA, 13 bp, Artificial Sequence
  Oligonucleotide for detection of SNP TSC0063240
rctaacccaatca

SEQ ID NO: 260425 - DNA, 13 bp, Artificial Sequence
  Oligonucleotide for detection of SNP TSC0063244
gtgattggggaty

SEQ ID NO: 260426 - DNA, 13 bp, Artificial Sequence
  Oligonucleotide for detection of SNP TSC0063244
ratccccaatcac

SEQ ID NO: 260427 - DNA, 13 bp, Artificial Sequence
  Oligonucleotide for detection of SNP TSC0063244
gtgattagggaty

SEQ ID NO: 260428 - DNA, 13 bp, Artificial Sequence
  Oligonucleotide for detection of SNP TSC0063244
ratccctaatcac

SEQ ID NO: 260429 - DNA, 13 bp, Artificial Sequence
  Oligonucleotide for detection of SNP TSC0063245
taaatatttgatt

SEQ ID NO: 260430 - DNA, 13 bp, Artificial Sequence
  Oligonucleotide for detection of SNP TSC0063245
aatcaaatattta

SEQ ID NO: 260431 - DNA, 13 bp, Artificial Sequence
  Oligonucleotide for detection of SNP TSC0063245
taaatagttgatt

SEQ ID NO: 260432 - DNA, 13 bp, Artificial Sequence
  Oligonucleotide for detection of SNP TSC0063245
aatcaactattta

SEQ ID NO: 260433 - DNA, 13 bp, Artificial Sequence
  Oligonucleotide for detection of SNP TSC0063245
aattaagtattta

SEQ ID NO: 260434 - DNA, 13 bp, Artificial Sequence
  Oligonucleotide for detection of SNP TSC0063245
taaatacttaatt

SEQ ID NO: 260435 - DNA, 13 bp, Artificial Sequence
  Oligonucleotide for detection of SNP TSC0063245
aattaattattta

SEQ ID NO: 260436 - DNA, 13 bp, Artificial Sequence
  Oligonucleotide for detection of SNP TSC0063245
taaataattaatt

SEQ ID NO: 260437 - DNA, 13 bp, Artificial Sequence
  Oligonucleotide for detection of SNP TSC0063246
ggattttgtggaa

SEQ ID NO: 260438 - DNA, 13 bp, Artificial Sequence
  Oligonucleotide for detection of SNP TSC0063246
ttccacaaaatcc

SEQ ID NO: 260439 - DNA, 13 bp, Artificial Sequence
  Oligonucleotide for detection of SNP TSC0063246
ggatttcgtggaa

SEQ ID NO: 260440 - DNA, 13 bp, Artificial Sequence
  Oligonucleotide for detection of SNP TSC0063246
ttccacgaaatcc

SEQ ID NO: 260441 - DNA, 13 bp, Artificial Sequence
  Oligonucleotide for detection of SNP TSC0063248
tggtttaagatta

SEQ ID NO: 260442 - DNA, 13 bp, Artificial Sequence
  Oligonucleotide for detection of SNP TSC0063248
taatcttaaacca

SEQ ID NO: 260443 - DNA, 13 bp, Artificial Sequence
  Oligonucleotide for detection of SNP TSC0063248
tggtttgagatta

SEQ ID NO: 260444 - DNA, 13 bp, Artificial Sequence
  Oligonucleotide for detection of SNP TSC0063248
taatctcaaacca

SEQ ID NO: 260445 - DNA, 13 bp, Artificial Sequence
  Oligonucleotide for detection of SNP TSC0063248
tggttcgagatta

SEQ ID NO: 260446 - DNA, 13 bp, Artificial Sequence
  Oligonucleotide for detection of SNP TSC0063248
taatctcgaacca

SEQ ID NO: 260447 - DNA, 13 bp, Artificial Sequence
  Oligonucleotide for detection of SNP TSC0063248
tggttttggatta

SEQ ID NO: 260448 - DNA, 13 bp, Artificial Sequence
  Oligonucleotide for detection of SNP TSC0063248
taatccaaaacca

SEQ ID NO: 260449 - DNA, 13 bp, Artificial Sequence
  Oligonucleotide for detection of SNP TSC0063248
tggtttcggatta

SEQ ID NO: 260450 - DNA, 13 bp, Artificial Sequence
  Oligonucleotide for detection of SNP TSC0063248
taatccgaaacca

SEQ ID NO: 260451 - DNA, 13 bp, Artificial Sequence
  Oligonucleotide for detection of SNP TSC0063249
taattgtggaatg

SEQ ID NO: 260452 - DNA, 13 bp, Artificial Sequence
  Oligonucleotide for detection of SNP TSC0063249
cattccacaatta

SEQ ID NO: 260453 - DNA, 13 bp, Artificial Sequence
  Oligonucleotide for detection of SNP TSC0063249
taattgcggaatg

SEQ ID NO: 260454 - DNA, 13 bp, Artificial Sequence
  Oligonucleotide for detection of SNP TSC0063249
cattccgcaatta

SEQ ID NO: 260455 - DNA, 13 bp, Artificial Sequence
  Oligonucleotide for detection of SNP TSC0063250
ttttataaagtaa

SEQ ID NO: 260456 - DNA, 13 bp, Artificial Sequence
  Oligonucleotide for detection of SNP TSC0063250
ttactttataaaa

SEQ ID NO: 260457 - DNA, 13 bp, Artificial Sequence
  Oligonucleotide for detection of SNP TSC0063250
ttttatgaagtaa

SEQ ID NO: 260458 - DNA, 13 bp, Artificial Sequence
  Oligonucleotide for detection of SNP TSC0063250
ttacttcataaaa

SEQ ID NO: 260459 - DNA, 13 bp, Artificial Sequence
  Oligonucleotide for detection of SNP TSC0063251
ttttatattgtaa

SEQ ID NO: 260460 - DNA, 13 bp, Artificial Sequence
  Oligonucleotide for detection of SNP TSC0063251
ttacaatataaaa

SEQ ID NO: 260461 - DNA, 13 bp, Artificial Sequence
  Oligonucleotide for detection of SNP TSC0063251
ttttattttgtaa

SEQ ID NO: 260462 - DNA, 13 bp, Artificial Sequence
  Oligonucleotide for detection of SNP TSC0063251
ttacaaaataaaa

SEQ ID NO: 260463 - DNA, 13 bp, Artificial Sequence
  Oligonucleotide for detection of SNP TSC0063252
aaaaaaaatgtaa

SEQ ID NO: 260464 - DNA, 13 bp, Artificial Sequence
  Oligonucleotide for detection of SNP TSC0063252
ttacatttttttt

SEQ ID NO: 260465 - DNA, 13 bp, Artificial Sequence
  Oligonucleotide for detection of SNP TSC0063252
aaaaaatatgtaa

SEQ ID NO: 260466 - DNA, 13 bp, Artificial Sequence
  Oligonucleotide for detection of SNP TSC0063252
ttacatatttttt

SEQ ID NO: 260467 - DNA, 13 bp, Artificial Sequence
  Oligonucleotide for detection of SNP TSC0063254
gatgtattttagy

SEQ ID NO: 260468 - DNA, 13 bp, Artificial Sequence
  Oligonucleotide for detection of SNP TSC0063254
rctaaaatacatc

SEQ ID NO: 260469 - DNA, 13 bp, Artificial Sequence
  Oligonucleotide for detection of SNP TSC0063254
gttgaattgtaty

SEQ ID NO: 260470 - DNA, 13 bp, Artificial Sequence
  Oligonucleotide for detection of SNP TSC0063254
ratacaattcaac

SEQ ID NO: 260471 - DNA, 13 bp, Artificial Sequence
  Oligonucleotide for detection of SNP TSC0063254
gttgaaatgtaty

SEQ ID NO: 260472 - DNA, 13 bp, Artificial Sequence
  Oligonucleotide for detection of SNP TSC0063254
ratacatttcaac

SEQ ID NO: 260473 - DNA, 13 bp, Artificial Sequence
  Oligonucleotide for detection of SNP TSC0063256
gttttttgtagtt

SEQ ID NO: 260474 - DNA, 13 bp, Artificial Sequence
  Oligonucleotide for detection of SNP TSC0063256
aactacaaaaaac

SEQ ID NO: 260475 - DNA, 13 bp, Artificial Sequence
  Oligonucleotide for detection of SNP TSC0063256
gtttttcgtagtt

SEQ ID NO: 260476 - DNA, 13 bp, Artificial Sequence
  Oligonucleotide for detection of SNP TSC0063256
aactacgaaaaac

SEQ ID NO: 260477 - DNA, 13 bp, Artificial Sequence
  Oligonucleotide for detection of SNP TSC0063256
agttgtggaaggy

SEQ ID NO: 260478 - DNA, 13 bp, Artificial Sequence
  Oligonucleotide for detection of SNP TSC0063256
rccttccacaact

SEQ ID NO: 260479 - DNA, 13 bp, Artificial Sequence
  Oligonucleotide for detection of SNP TSC0063256
agttgtagaaggy

SEQ ID NO: 260480 - DNA, 13 bp, Artificial Sequence
  Oligonucleotide for detection of SNP TSC0063256
rccttctacaact

SEQ ID NO: 260481 - DNA, 13 bp, Artificial Sequence
  Oligonucleotide for detection of SNP TSC0063256
agttgcggaaggy

SEQ ID NO: 260482 - DNA, 13 bp, Artificial Sequence
  Oligonucleotide for detection of SNP TSC0063256
rccttccgcaact

SEQ ID NO: 260483 - DNA, 13 bp, Artificial Sequence
  Oligonucleotide for detection of SNP TSC0063257
gggtatgaggttg

SEQ ID NO: 260484 - DNA, 13 bp, Artificial Sequence
  Oligonucleotide for detection of SNP TSC0063257
caacctcataccc

SEQ ID NO: 260485 - DNA, 13 bp, Artificial Sequence
  Oligonucleotide for detection of SNP TSC0063257
gggtataaggttg

SEQ ID NO: 260486 - DNA, 13 bp, Artificial Sequence
  Oligonucleotide for detection of SNP TSC0063257
caaccttataccc

SEQ ID NO: 260487 - DNA, 13 bp, Artificial Sequence
  Oligonucleotide for detection of SNP TSC0063258
ggttattgtgatg

SEQ ID NO: 260488 - DNA, 13 bp, Artificial Sequence
  Oligonucleotide for detection of SNP TSC0063258
catcacaataacc

SEQ ID NO: 260489 - DNA, 13 bp, Artificial Sequence
  Oligonucleotide for detection of SNP TSC0063258
ggttatggtgatg

SEQ ID NO: 260490 - DNA, 13 bp, Artificial Sequence
  Oligonucleotide for detection of SNP TSC0063258
catcaccataacc

SEQ ID NO: 260491 - DNA, 13 bp, Artificial Sequence
  Oligonucleotide for detection of SNP TSC0063258
ggttatcgtgatg

SEQ ID NO: 260492 - DNA, 13 bp, Artificial Sequence
  Oligonucleotide for detection of SNP TSC0063258
catcacgataacc

SEQ ID NO: 260493 - DNA, 13 bp, Artificial Sequence
  Oligonucleotide for detection of SNP TSC0063258
tattatgatggty

SEQ ID NO: 260494 - DNA, 13 bp, Artificial Sequence
  Oligonucleotide for detection of SNP TSC0063258
raccatcataata

SEQ ID NO: 260495 - DNA, 13 bp, Artificial Sequence
  Oligonucleotide for detection of SNP TSC0063258
tattattatggty

SEQ ID NO: 260496 - DNA, 13 bp, Artificial Sequence
  Oligonucleotide for detection of SNP TSC0063258
raccataataata

SEQ ID NO: 260497 - DNA, 13 bp, Artificial Sequence
  Oligonucleotide for detection of SNP TSC0063258
tattacgatggty

SEQ ID NO: 260498 - DNA, 13 bp, Artificial Sequence
  Oligonucleotide for detection of SNP TSC0063258
raccatcgtaata

SEQ ID NO: 260499 - DNA, 13 bp, Artificial Sequence
  Oligonucleotide for detection of SNP TSC0063259
ttgtttttaagga

SEQ ID NO: 260500 - DNA, 13 bp, Artificial Sequence
  Oligonucleotide for detection of SNP TSC0063259
tccttaaaaacaa

SEQ ID NO: 260501 - DNA, 13 bp, Artificial Sequence
  Oligonucleotide for detection of SNP TSC0063259
ttgtttgtaagga

SEQ ID NO: 260502 - DNA, 13 bp, Artificial Sequence
  Oligonucleotide for detection of SNP TSC0063259
tccttacaaacaa

SEQ ID NO: 260503 - DNA, 13 bp, Artificial Sequence
  Oligonucleotide for detection of SNP TSC0063260
tgtagtaaaagta

SEQ ID NO: 260504 - DNA, 13 bp, Artificial Sequence
  Oligonucleotide for detection of SNP TSC0063260
tacttttactaca

SEQ ID NO: 260505 - DNA, 13 bp, Artificial Sequence
  Oligonucleotide for detection of SNP TSC0063260
tgtagtgaaagta

SEQ ID NO: 260506 - DNA, 13 bp, Artificial Sequence
  Oligonucleotide for detection of SNP TSC0063260
tactttcactaca

SEQ ID NO: 260507 - DNA, 13 bp, Artificial Sequence
  Oligonucleotide for detection of SNP TSC0063261
ttttggtgataay

SEQ ID NO: 260508 - DNA, 13 bp, Artificial Sequence
  Oligonucleotide for detection of SNP TSC0063261
rttatcaccaaaa

SEQ ID NO: 260509 - DNA, 13 bp, Artificial Sequence
  Oligonucleotide for detection of SNP TSC0063261
ttttggcgataay

SEQ ID NO: 260510 - DNA, 13 bp, Artificial Sequence
  Oligonucleotide for detection of SNP TSC0063261
rttatcgccaaaa

SEQ ID NO: 260511 - DNA, 13 bp, Artificial Sequence
  Oligonucleotide for detection of SNP TSC0063261
gttgttgttagga

SEQ ID NO: 260512 - DNA, 13 bp, Artificial Sequence
  Oligonucleotide for detection of SNP TSC0063261
tcctaacaacaac

SEQ ID NO: 260513 - DNA, 13 bp, Artificial Sequence
  Oligonucleotide for detection of SNP TSC0063261
gttgttattagga

SEQ ID NO: 260514 - DNA, 13 bp, Artificial Sequence
  Oligonucleotide for detection of SNP TSC0063261
tcctaataacaac

SEQ ID NO: 260515 - DNA, 13 bp, Artificial Sequence
  Oligonucleotide for detection of SNP TSC0063261
gttgtcgttagga

SEQ ID NO: 260516 - DNA, 13 bp, Artificial Sequence
  Oligonucleotide for detection of SNP TSC0063261
tcctaacgacaac

SEQ ID NO: 260517 - DNA, 13 bp, Artificial Sequence
  Oligonucleotide for detection of SNP TSC0063262
ttttgaaaagagg

SEQ ID NO: 260518 - DNA, 13 bp, Artificial Sequence
  Oligonucleotide for detection of SNP TSC0063262
cctcttttcaaaa

SEQ ID NO: 260519 - DNA, 13 bp, Artificial Sequence
  Oligonucleotide for detection of SNP TSC0063262
ttttgagaagagg

SEQ ID NO: 260520 - DNA, 13 bp, Artificial Sequence
  Oligonucleotide for detection of SNP TSC0063262
cctcttctcaaaa

SEQ ID NO: 260521 - DNA, 13 bp, Artificial Sequence
  Oligonucleotide for detection of SNP TSC0063265
ataaaggatttty

SEQ ID NO: 260522 - DNA, 13 bp, Artificial Sequence
  Oligonucleotide for detection of SNP TSC0063265
raaaatcctttat

SEQ ID NO: 260523 - DNA, 13 bp, Artificial Sequence
  Oligonucleotide for detection of SNP TSC0063265
ataaagaatttty

SEQ ID NO: 260524 - DNA, 13 bp, Artificial Sequence
  Oligonucleotide for detection of SNP TSC0063265
raaaattctttat

SEQ ID NO: 260525 - DNA, 13 bp, Artificial Sequence
  Oligonucleotide for detection of SNP TSC0063266
tttaaagattaaa

SEQ ID NO: 260526 - DNA, 13 bp, Artificial Sequence
  Oligonucleotide for detection of SNP TSC0063266
tttaatctttaaa

SEQ ID NO: 260527 - DNA, 13 bp, Artificial Sequence
  Oligonucleotide for detection of SNP TSC0063267
tttggggttggta

SEQ ID NO: 260528 - DNA, 13 bp, Artificial Sequence
  Oligonucleotide for detection of SNP TSC0063267
taccaaccccaaa

SEQ ID NO: 260529 - DNA, 13 bp, Artificial Sequence
  Oligonucleotide for detection of SNP TSC0063267
tttgggattggta

SEQ ID NO: 260530 - DNA, 13 bp, Artificial Sequence
  Oligonucleotide for detection of SNP TSC0063267
taccaatcccaaa

SEQ ID NO: 260531 - DNA, 13 bp, Artificial Sequence
  Oligonucleotide for detection of SNP TSC0063268
tatatatgattgt

SEQ ID NO: 260532 - DNA, 13 bp, Artificial Sequence
  Oligonucleotide for detection of SNP TSC0063268
acaatcatatata

SEQ ID NO: 260533 - DNA, 13 bp, Artificial Sequence
  Oligonucleotide for detection of SNP TSC0063268
tatatacgattgt

SEQ ID NO: 260534 - DNA, 13 bp, Artificial Sequence
  Oligonucleotide for detection of SNP TSC0063268
acaatcgtatata

SEQ ID NO: 260535 - DNA, 13 bp, Artificial Sequence
  Oligonucleotide for detection of SNP TSC0063268
atagttgtgtgtg

SEQ ID NO: 260536 - DNA, 13 bp, Artificial Sequence
  Oligonucleotide for detection of SNP TSC0063268
cacacacaactat

SEQ ID NO: 260537 - DNA, 13 bp, Artificial Sequence
  Oligonucleotide for detection of SNP TSC0063268
atagttatgtgtg

SEQ ID NO: 260538 - DNA, 13 bp, Artificial Sequence
  Oligonucleotide for detection of SNP TSC0063268
cacacataactat

SEQ ID NO: 260539 - DNA, 13 bp, Artificial Sequence
  Oligonucleotide for detection of SNP TSC0063268
atagtcgtgtgtg

SEQ ID NO: 260540 - DNA, 13 bp, Artificial Sequence
  Oligonucleotide for detection of SNP TSC0063268
cacacacgactat

SEQ ID NO: 260541 - DNA, 13 bp, Artificial Sequence
  Oligonucleotide for detection of SNP TSC0063269
tgattgtaagtty

SEQ ID NO: 260542 - DNA, 13 bp, Artificial Sequence
  Oligonucleotide for detection of SNP TSC0063269
raacttacaatca

SEQ ID NO: 260543 - DNA, 13 bp, Artificial Sequence
  Oligonucleotide for detection of SNP TSC0063269
tgattggaagtty

SEQ ID NO: 260544 - DNA, 13 bp, Artificial Sequence
  Oligonucleotide for detection of SNP TSC0063269
raacttccaatca

SEQ ID NO: 260545 - DNA, 13 bp, Artificial Sequence
  Oligonucleotide for detection of SNP TSC0063269
cgattgtaagtty

SEQ ID NO: 260546 - DNA, 13 bp, Artificial Sequence
  Oligonucleotide for detection of SNP TSC0063269
raacttacaatcg

SEQ ID NO: 260547 - DNA, 13 bp, Artificial Sequence
  Oligonucleotide for detection of SNP TSC0063269
cgattggaagtty

SEQ ID NO: 260548 - DNA, 13 bp, Artificial Sequence
  Oligonucleotide for detection of SNP TSC0063269
raacttccaatcg

SEQ ID NO: 260549 - DNA, 13 bp, Artificial Sequence
  Oligonucleotide for detection of SNP TSC0063269
gggtttatagttg

SEQ ID NO: 260550 - DNA, 13 bp, Artificial Sequence
  Oligonucleotide for detection of SNP TSC0063269
caactataaaccc

SEQ ID NO: 260551 - DNA, 13 bp, Artificial Sequence
  Oligonucleotide for detection of SNP TSC0063269
gggtttttagttg

SEQ ID NO: 260552 - DNA, 13 bp, Artificial Sequence
  Oligonucleotide for detection of SNP TSC0063269
caactaaaaaccc

SEQ ID NO: 260553 - DNA, 13 bp, Artificial Sequence
  Oligonucleotide for detection of SNP TSC0063269
gggtttatagtcg

SEQ ID NO: 260554 - DNA, 13 bp, Artificial Sequence
  Oligonucleotide for detection of SNP TSC0063269
cgactataaaccc

SEQ ID NO: 260555 - DNA, 13 bp, Artificial Sequence
  Oligonucleotide for detection of SNP TSC0063269
gggtttttagtcg

SEQ ID NO: 260556 - DNA, 13 bp, Artificial Sequence
  Oligonucleotide for detection of SNP TSC0063269
cgactaaaaaccc

SEQ ID NO: 260557 - DNA, 13 bp, Artificial Sequence
  Oligonucleotide for detection of SNP TSC0063271
atagggtgagatt

SEQ ID NO: 260558 - DNA, 13 bp, Artificial Sequence
  Oligonucleotide for detection of SNP TSC0063271
aatctcaccctat

SEQ ID NO: 260559 - DNA, 13 bp, Artificial Sequence
  Oligonucleotide for detection of SNP TSC0063271
atagggcgagatt

SEQ ID NO: 260560 - DNA, 13 bp, Artificial Sequence
  Oligonucleotide for detection of SNP TSC0063271
aatctcgccctat

SEQ ID NO: 260561 - DNA, 13 bp, Artificial Sequence
  Oligonucleotide for detection of SNP TSC0000436
attattattgaga

SEQ ID NO: 260562 - DNA, 13 bp, Artificial Sequence
  Oligonucleotide for detection of SNP TSC0000436
tctcaataataat

SEQ ID NO: 260563 - DNA, 13 bp, Artificial Sequence
  Oligonucleotide for detection of SNP TSC0000436
attatttttgaga

SEQ ID NO: 260564 - DNA, 13 bp, Artificial Sequence
  Oligonucleotide for detection of SNP TSC0000436
tctcaaaaataat

SEQ ID NO: 260565 - DNA, 13 bp, Artificial Sequence
  Oligonucleotide for detection of SNP TSC0008589
attattaggtaay

SEQ ID NO: 260566 - DNA, 13 bp, Artificial Sequence
  Oligonucleotide for detection of SNP TSC0008589
rttacctaataat

SEQ ID NO: 260567 - DNA, 13 bp, Artificial Sequence
  Oligonucleotide for detection of SNP TSC0008589
attatttggtaay

SEQ ID NO: 260568 - DNA, 13 bp, Artificial Sequence
  Oligonucleotide for detection of SNP TSC0008589
rttaccaaataat

SEQ ID NO: 260569 - DNA, 13 bp, Artificial Sequence
  Oligonucleotide for detection of SNP TSC0008589
gttgtttggtagt

SEQ ID NO: 260570 - DNA, 13 bp, Artificial Sequence
  Oligonucleotide for detection of SNP TSC0008589
actaccaaacaac

SEQ ID NO: 260571 - DNA, 13 bp, Artificial Sequence
  Oligonucleotide for detection of SNP TSC0008589
gttgttaggtagt

SEQ ID NO: 260572 - DNA, 13 bp, Artificial Sequence
  Oligonucleotide for detection of SNP TSC0008589
actacctaacaac

SEQ ID NO: 260573 - DNA, 13 bp, Artificial Sequence
  Oligonucleotide for detection of SNP TSC0008590
gaaatgtatatgy

SEQ ID NO: 260574 - DNA, 13 bp, Artificial Sequence
  Oligonucleotide for detection of SNP TSC0008590
rcatatacatttc

SEQ ID NO: 260575 - DNA, 13 bp, Artificial Sequence
  Oligonucleotide for detection of SNP TSC0008590
gaaatggatatgy

SEQ ID NO: 260576 - DNA, 13 bp, Artificial Sequence
  Oligonucleotide for detection of SNP TSC0008590
rcatatccatttc

SEQ ID NO: 260577 - DNA, 13 bp, Artificial Sequence
  Oligonucleotide for detection of SNP TSC0008590
gtatatttattty

SEQ ID NO: 260578 - DNA, 13 bp, Artificial Sequence
  Oligonucleotide for detection of SNP TSC0008590
raaataaatatac

SEQ ID NO: 260579 - DNA, 13 bp, Artificial Sequence
  Oligonucleotide for detection of SNP TSC0008591
taaaatagataga

SEQ ID NO: 260580 - DNA, 13 bp, Artificial Sequence
  Oligonucleotide for detection of SNP TSC0008591
tctatctatttta

SEQ ID NO: 260581 - DNA, 13 bp, Artificial Sequence
  Oligonucleotide for detection of SNP TSC0008591
taaaatggataga

SEQ ID NO: 260582 - DNA, 13 bp, Artificial Sequence
  Oligonucleotide for detection of SNP TSC0008591
tctatccatttta

SEQ ID NO: 260583 - DNA, 13 bp, Artificial Sequence
  Oligonucleotide for detection of SNP TSC0008591
taaaacggataga

SEQ ID NO: 260584 - DNA, 13 bp, Artificial Sequence
  Oligonucleotide for detection of SNP TSC0008591
tctatccgtttta

SEQ ID NO: 260585 - DNA, 13 bp, Artificial Sequence
  Oligonucleotide for detection of SNP TSC0063277
gtttgggattatt

SEQ ID NO: 260586 - DNA, 13 bp, Artificial Sequence
  Oligonucleotide for detection of SNP TSC0063277
aataatcccaaac

SEQ ID NO: 260587 - DNA, 13 bp, Artificial Sequence
  Oligonucleotide for detection of SNP TSC0063277
gtttggaattatt

SEQ ID NO: 260588 - DNA, 13 bp, Artificial Sequence
  Oligonucleotide for detection of SNP TSC0063277
aataattccaaac

SEQ ID NO: 260589 - DNA, 13 bp, Artificial Sequence
  Oligonucleotide for detection of SNP TSC0006735
atggaagtgggat

SEQ ID NO: 260590 - DNA, 13 bp, Artificial Sequence
  Oligonucleotide for detection of SNP TSC0006735
atcccacttccat

SEQ ID NO: 260591 - DNA, 13 bp, Artificial Sequence
  Oligonucleotide for detection of SNP TSC0006735
atggaaatgggat

SEQ ID NO: 260592 - DNA, 13 bp, Artificial Sequence
  Oligonucleotide for detection of SNP TSC0006735
atcccatttccat

SEQ ID NO: 260593 - DNA, 13 bp, Artificial Sequence
  Oligonucleotide for detection of SNP TSC0006735
atggaagcgggat

SEQ ID NO: 260594 - DNA, 13 bp, Artificial Sequence
  Oligonucleotide for detection of SNP TSC0006735
atcccgcttccat

SEQ ID NO: 260595 - DNA, 13 bp, Artificial Sequence
  Oligonucleotide for detection of SNP TSC0006735
atggaaacgggat

SEQ ID NO: 260596 - DNA, 13 bp, Artificial Sequence
  Oligonucleotide for detection of SNP TSC0006735
atcccgtttccat

SEQ ID NO: 260597 - DNA, 13 bp, Artificial Sequence
  Oligonucleotide for detection of SNP TSC0006736
tggaagtgggaty

SEQ ID NO: 260598 - DNA, 13 bp, Artificial Sequence
  Oligonucleotide for detection of SNP TSC0006736
ratcccacttcca

SEQ ID NO: 260599 - DNA, 13 bp, Artificial Sequence
  Oligonucleotide for detection of SNP TSC0006736
tggaagcgggaty

SEQ ID NO: 260600 - DNA, 13 bp, Artificial Sequence
  Oligonucleotide for detection of SNP TSC0006736
ratcccgcttcca

SEQ ID NO: 260601 - DNA, 13 bp, Artificial Sequence
  Oligonucleotide for detection of SNP TSC0009962
agttttatggttt

SEQ ID NO: 260602 - DNA, 13 bp, Artificial Sequence
  Oligonucleotide for detection of SNP TSC0009962
aaaccataaaact

SEQ ID NO: 260603 - DNA, 13 bp, Artificial Sequence
  Oligonucleotide for detection of SNP TSC0009962
agttttgtggttt

SEQ ID NO: 260604 - DNA, 13 bp, Artificial Sequence
  Oligonucleotide for detection of SNP TSC0009962
aaaccacaaaact

SEQ ID NO: 260605 - DNA, 13 bp, Artificial Sequence
  Oligonucleotide for detection of SNP TSC0009962
agtttcgtggttt

SEQ ID NO: 260606 - DNA, 13 bp, Artificial Sequence
  Oligonucleotide for detection of SNP TSC0009962
aaaccacgaaact

SEQ ID NO: 260607 - DNA, 13 bp, Artificial Sequence
  Oligonucleotide for detection of SNP TSC0009962
aggttatgaggtt

SEQ ID NO: 260608 - DNA, 13 bp, Artificial Sequence
  Oligonucleotide for detection of SNP TSC0009962
aacctcataacct

SEQ ID NO: 260609 - DNA, 13 bp, Artificial Sequence
  Oligonucleotide for detection of SNP TSC0009962
aggttacgaggtt

SEQ ID NO: 260610 - DNA, 13 bp, Artificial Sequence
  Oligonucleotide for detection of SNP TSC0009962
aacctcgtaacct

SEQ ID NO: 260611 - DNA, 13 bp, Artificial Sequence
  Oligonucleotide for detection of SNP TSC0009963
gtgttaggagtty

SEQ ID NO: 260612 - DNA, 13 bp, Artificial Sequence
  Oligonucleotide for detection of SNP TSC0009963
raactcctaacac

SEQ ID NO: 260613 - DNA, 13 bp, Artificial Sequence
  Oligonucleotide for detection of SNP TSC0009963
gtgttaagagtty

SEQ ID NO: 260614 - DNA, 13 bp, Artificial Sequence
  Oligonucleotide for detection of SNP TSC0009963
raactcttaacac

SEQ ID NO: 260615 - DNA, 13 bp, Artificial Sequence
  Oligonucleotide for detection of SNP TSC0063280
ggatggagtattt

SEQ ID NO: 260616 - DNA, 13 bp, Artificial Sequence
  Oligonucleotide for detection of SNP TSC0063280
aaatactccatcc

SEQ ID NO: 260617 - DNA, 13 bp, Artificial Sequence
  Oligonucleotide for detection of SNP TSC0063280
ggatggggtattt

SEQ ID NO: 260618 - DNA, 13 bp, Artificial Sequence
  Oligonucleotide for detection of SNP TSC0063280
aaataccccatcc

SEQ ID NO: 260619 - DNA, 13 bp, Artificial Sequence
  Oligonucleotide for detection of SNP TSC0007709
tttttagtaatgg

SEQ ID NO: 260620 - DNA, 13 bp, Artificial Sequence
  Oligonucleotide for detection of SNP TSC0007709
ccattactaaaaa

SEQ ID NO: 260621 - DNA, 13 bp, Artificial Sequence
  Oligonucleotide for detection of SNP TSC0007709
tttttaataatgg

SEQ ID NO: 260622 - DNA, 13 bp, Artificial Sequence
  Oligonucleotide for detection of SNP TSC0007709
ccattattaaaaa

SEQ ID NO: 260623 - DNA, 13 bp, Artificial Sequence
  Oligonucleotide for detection of SNP TSC0007710
ggatttgttttty

SEQ ID NO: 260624 - DNA, 13 bp, Artificial Sequence
  Oligonucleotide for detection of SNP TSC0007710
raaaaacaaatcc

SEQ ID NO: 260625 - DNA, 13 bp, Artificial Sequence
  Oligonucleotide for detection of SNP TSC0007710
ggatttattttty

SEQ ID NO: 260626 - DNA, 13 bp, Artificial Sequence
  Oligonucleotide for detection of SNP TSC0007710
raaaaataaatcc

SEQ ID NO: 260627 - DNA, 13 bp, Artificial Sequence
  Oligonucleotide for detection of SNP TSC0063282
gtgtttgtatagg

SEQ ID NO: 260628 - DNA, 13 bp, Artificial Sequence
  Oligonucleotide for detection of SNP TSC0063282
cctatacaaacac

SEQ ID NO: 260629 - DNA, 13 bp, Artificial Sequence
  Oligonucleotide for detection of SNP TSC0063282
gtgtttatatagg

SEQ ID NO: 260630 - DNA, 13 bp, Artificial Sequence
  Oligonucleotide for detection of SNP TSC0063282
cctatataaacac

SEQ ID NO: 260631 - DNA, 13 bp, Artificial Sequence
  Oligonucleotide for detection of SNP TSC0063283
tttgtagtgtaay

SEQ ID NO: 260632 - DNA, 13 bp, Artificial Sequence
  Oligonucleotide for detection of SNP TSC0063283
rttacactacaaa

SEQ ID NO: 260633 - DNA, 13 bp, Artificial Sequence
  Oligonucleotide for detection of SNP TSC0063283
tttgtaatgtaay

SEQ ID NO: 260634 - DNA, 13 bp, Artificial Sequence
  Oligonucleotide for detection of SNP TSC0063283
rttacattacaaa

SEQ ID NO: 260635 - DNA, 13 bp, Artificial Sequence
  Oligonucleotide for detection of SNP TSC0063288
tttgggtggggat

SEQ ID NO: 260636 - DNA, 13 bp, Artificial Sequence
  Oligonucleotide for detection of SNP TSC0063288
atccccacccaaa

SEQ ID NO: 260637 - DNA, 13 bp, Artificial Sequence
  Oligonucleotide for detection of SNP TSC0063288
tttgggcggggat

SEQ ID NO: 260638 - DNA, 13 bp, Artificial Sequence
  Oligonucleotide for detection of SNP TSC0063288
atccccgcccaaa

SEQ ID NO: 260639 - DNA, 13 bp, Artificial Sequence
  Oligonucleotide for detection of SNP TSC0063290
agatgagagtatg

SEQ ID NO: 260640 - DNA, 13 bp, Artificial Sequence
  Oligonucleotide for detection of SNP TSC0063290
catactctcatct

SEQ ID NO: 260641 - DNA, 13 bp, Artificial Sequence
  Oligonucleotide for detection of SNP TSC0063290
agatgaaagtatg

SEQ ID NO: 260642 - DNA, 13 bp, Artificial Sequence
  Oligonucleotide for detection of SNP TSC0063290
catactttcatct

SEQ ID NO: 260643 - DNA, 13 bp, Artificial Sequence
  Oligonucleotide for detection of SNP TSC0009101
tgggatatattty

SEQ ID NO: 260644 - DNA, 13 bp, Artificial Sequence
  Oligonucleotide for detection of SNP TSC0009101
raaatatatccca

SEQ ID NO: 260645 - DNA, 13 bp, Artificial Sequence
  Oligonucleotide for detection of SNP TSC0009101
gaaatgtgtttta

SEQ ID NO: 260646 - DNA, 13 bp, Artificial Sequence
  Oligonucleotide for detection of SNP TSC0009101
taaaacacatttc

SEQ ID NO: 260647 - DNA, 13 bp, Artificial Sequence
  Oligonucleotide for detection of SNP TSC0009101
gaaatgcgtttta

SEQ ID NO: 260648 - DNA, 13 bp, Artificial Sequence
  Oligonucleotide for detection of SNP TSC0009101
taaaacgcatttc

SEQ ID NO: 260649 - DNA, 13 bp, Artificial Sequence
  Oligonucleotide for detection of SNP TSC0063294
ttttatagaagty

SEQ ID NO: 260650 - DNA, 13 bp, Artificial Sequence
  Oligonucleotide for detection of SNP TSC0063294
racttctataaaa

SEQ ID NO: 260651 - DNA, 13 bp, Artificial Sequence
  Oligonucleotide for detection of SNP TSC0063294
ttttatggaagty

SEQ ID NO: 260652 - DNA, 13 bp, Artificial Sequence
  Oligonucleotide for detection of SNP TSC0063294
racttccataaaa

SEQ ID NO: 260653 - DNA, 13 bp, Artificial Sequence
  Oligonucleotide for detection of SNP TSC0063294
ttttacggaagty

SEQ ID NO: 260654 - DNA, 13 bp, Artificial Sequence
  Oligonucleotide for detection of SNP TSC0063294
racttccgtaaaa

SEQ ID NO: 260655 - DNA, 13 bp, Artificial Sequence
  Oligonucleotide for detection of SNP TSC0063294
gatttttgtaaga

SEQ ID NO: 260656 - DNA, 13 bp, Artificial Sequence
  Oligonucleotide for detection of SNP TSC0063294
tcttacaaaaatc

SEQ ID NO: 260657 - DNA, 13 bp, Artificial Sequence
  Oligonucleotide for detection of SNP TSC0063294
gattttcgtaaga

SEQ ID NO: 260658 - DNA, 13 bp, Artificial Sequence
  Oligonucleotide for detection of SNP TSC0063294
tcttacgaaaatc

SEQ ID NO: 260659 - DNA, 13 bp, Artificial Sequence
  Oligonucleotide for detection of SNP TSC0063295
aattaatttaata

SEQ ID NO: 260660 - DNA, 13 bp, Artificial Sequence
  Oligonucleotide for detection of SNP TSC0063295
tattaaattaatt

SEQ ID NO: 260661 - DNA, 13 bp, Artificial Sequence
  Oligonucleotide for detection of SNP TSC0063295
aattaagttaata

SEQ ID NO: 260662 - DNA, 13 bp, Artificial Sequence
  Oligonucleotide for detection of SNP TSC0063295
tattaacttaatt

SEQ ID NO: 260663 - DNA, 13 bp, Artificial Sequence
  Oligonucleotide for detection of SNP TSC0063295
tgttaagttagtt

SEQ ID NO: 260664 - DNA, 13 bp, Artificial Sequence
  Oligonucleotide for detection of SNP TSC0063295
aactaacttaaca

SEQ ID NO: 260665 - DNA, 13 bp, Artificial Sequence
  Oligonucleotide for detection of SNP TSC0063295
tgttaatttagtt

SEQ ID NO: 260666 - DNA, 13 bp, Artificial Sequence
  Oligonucleotide for detection of SNP TSC0063295
aactaaattaaca

SEQ ID NO: 260667 - DNA, 13 bp, Artificial Sequence
  Oligonucleotide for detection of SNP TSC0001113
agtgtatgttttt

SEQ ID NO: 260668 - DNA, 13 bp, Artificial Sequence
  Oligonucleotide for detection of SNP TSC0001113
aaaaacatacact

SEQ ID NO: 260669 - DNA, 13 bp, Artificial Sequence
  Oligonucleotide for detection of SNP TSC0001113
agtgtacgttttt

SEQ ID NO: 260670 - DNA, 13 bp, Artificial Sequence
  Oligonucleotide for detection of SNP TSC0001113
aaaaacgtacact

SEQ ID NO: 260671 - DNA, 13 bp, Artificial Sequence
  Oligonucleotide for detection of SNP TSC0001113
aagaatgtatatt

SEQ ID NO: 260672 - DNA, 13 bp, Artificial Sequence
  Oligonucleotide for detection of SNP TSC0001113
aatatacattctt

SEQ ID NO: 260673 - DNA, 13 bp, Artificial Sequence
  Oligonucleotide for detection of SNP TSC0001113
aagaatatatatt

SEQ ID NO: 260674 - DNA, 13 bp, Artificial Sequence
  Oligonucleotide for detection of SNP TSC0001113
aatatatattctt

SEQ ID NO: 260675 - DNA, 13 bp, Artificial Sequence
  Oligonucleotide for detection of SNP TSC0001113
aagaacgtatatt

SEQ ID NO: 260676 - DNA, 13 bp, Artificial Sequence
  Oligonucleotide for detection of SNP TSC0001113
aatatacgttctt

SEQ ID NO: 260677 - DNA, 13 bp, Artificial Sequence
  Oligonucleotide for detection of SNP TSC0001114
tttttcgttagtg

SEQ ID NO: 260678 - DNA, 13 bp, Artificial Sequence
  Oligonucleotide for detection of SNP TSC0001114
cactaacgaaaaa

SEQ ID NO: 260679 - DNA, 13 bp, Artificial Sequence
  Oligonucleotide for detection of SNP TSC0001114
tattggtgaaagg

SEQ ID NO: 260680 - DNA, 13 bp, Artificial Sequence
  Oligonucleotide for detection of SNP TSC0001114
cctttcaccaata

SEQ ID NO: 260681 - DNA, 13 bp, Artificial Sequence
  Oligonucleotide for detection of SNP TSC0001114
tattggcgaaagg

SEQ ID NO: 260682 - DNA, 13 bp, Artificial Sequence
  Oligonucleotide for detection of SNP TSC0001114
cctttcgccaata

SEQ ID NO: 260683 - DNA, 13 bp, Artificial Sequence
  Oligonucleotide for detection of SNP TSC0063297
tattatatataaa

SEQ ID NO: 260684 - DNA, 13 bp, Artificial Sequence
  Oligonucleotide for detection of SNP TSC0063297
tttatatataata

SEQ ID NO: 260685 - DNA, 13 bp, Artificial Sequence
  Oligonucleotide for detection of SNP TSC0063300
atgatttttttta

SEQ ID NO: 260686 - DNA, 13 bp, Artificial Sequence
  Oligonucleotide for detection of SNP TSC0063300
taaaaaaaatcat

SEQ ID NO: 260687 - DNA, 13 bp, Artificial Sequence
  Oligonucleotide for detection of SNP TSC0063300
atgattgttttta

SEQ ID NO: 260688 - DNA, 13 bp, Artificial Sequence
  Oligonucleotide for detection of SNP TSC0063300
taaaaacaatcat

SEQ ID NO: 260689 - DNA, 13 bp, Artificial Sequence
  Oligonucleotide for detection of SNP TSC0063300
taaagagagttat

SEQ ID NO: 260690 - DNA, 13 bp, Artificial Sequence
  Oligonucleotide for detection of SNP TSC0063300
ataactctcttta

SEQ ID NO: 260691 - DNA, 13 bp, Artificial Sequence
  Oligonucleotide for detection of SNP TSC0063300
taaagatagttat

SEQ ID NO: 260692 - DNA, 13 bp, Artificial Sequence
  Oligonucleotide for detection of SNP TSC0063300
ataactatcttta

SEQ ID NO: 260693 - DNA, 13 bp, Artificial Sequence
  Oligonucleotide for detection of SNP TSC0063301
gttatttgaaaty

SEQ ID NO: 260694 - DNA, 13 bp, Artificial Sequence
  Oligonucleotide for detection of SNP TSC0063301
ratttcaaataac

SEQ ID NO: 260695 - DNA, 13 bp, Artificial Sequence
  Oligonucleotide for detection of SNP TSC0063301
gttattggaaaty

SEQ ID NO: 260696 - DNA, 13 bp, Artificial Sequence
  Oligonucleotide for detection of SNP TSC0063301
ratttccaataac

SEQ ID NO: 260697 - DNA, 13 bp, Artificial Sequence
  Oligonucleotide for detection of SNP TSC0063301
gttattcgaaaty

SEQ ID NO: 260698 - DNA, 13 bp, Artificial Sequence
  Oligonucleotide for detection of SNP TSC0063301
ratttcgaataac

SEQ ID NO: 260699 - DNA, 13 bp, Artificial Sequence
  Oligonucleotide for detection of SNP TSC0063301
gttatcggaaaty

SEQ ID NO: 260700 - DNA, 13 bp, Artificial Sequence
  Oligonucleotide for detection of SNP TSC0063301
ratttccgataac

SEQ ID NO: 260701 - DNA, 13 bp, Artificial Sequence
  Oligonucleotide for detection of SNP TSC0063301
gattttgggtgay

SEQ ID NO: 260702 - DNA, 13 bp, Artificial Sequence
  Oligonucleotide for detection of SNP TSC0063301
rtcacccaaaatc

SEQ ID NO: 260703 - DNA, 13 bp, Artificial Sequence
  Oligonucleotide for detection of SNP TSC0063301
gatttcgggtgay

SEQ ID NO: 260704 - DNA, 13 bp, Artificial Sequence
  Oligonucleotide for detection of SNP TSC0063301
rtcacccgaaatc

SEQ ID NO: 260705 - DNA, 13 bp, Artificial Sequence
  Oligonucleotide for detection of SNP TSC0063301
gattttcggtgay

SEQ ID NO: 260706 - DNA, 13 bp, Artificial Sequence
  Oligonucleotide for detection of SNP TSC0063301
rtcaccgaaaatc

SEQ ID NO: 260707 - DNA, 13 bp, Artificial Sequence
  Oligonucleotide for detection of SNP TSC0007575
tttggtattatga

SEQ ID NO: 260708 - DNA, 13 bp, Artificial Sequence
  Oligonucleotide for detection of SNP TSC0007575
tcataataccaaa

SEQ ID NO: 260709 - DNA, 13 bp, Artificial Sequence
  Oligonucleotide for detection of SNP TSC0007575
tttggttttatga

SEQ ID NO: 260710 - DNA, 13 bp, Artificial Sequence
  Oligonucleotide for detection of SNP TSC0007575
tcataaaaccaaa

SEQ ID NO: 260711 - DNA, 13 bp, Artificial Sequence
  Oligonucleotide for detection of SNP TSC0007575
tttggtattacga

SEQ ID NO: 260712 - DNA, 13 bp, Artificial Sequence
  Oligonucleotide for detection of SNP TSC0007575
tcgtaataccaaa

SEQ ID NO: 260713 - DNA, 13 bp, Artificial Sequence
  Oligonucleotide for detection of SNP TSC0007575
tttggttttacga

SEQ ID NO: 260714 - DNA, 13 bp, Artificial Sequence
  Oligonucleotide for detection of SNP TSC0007575
tcgtaaaaccaaa

SEQ ID NO: 260715 - DNA, 13 bp, Artificial Sequence
  Oligonucleotide for detection of SNP TSC0007575
ttgtagtgttaag

SEQ ID NO: 260716 - DNA, 13 bp, Artificial Sequence
  Oligonucleotide for detection of SNP TSC0007575
cttaacactacaa

SEQ ID NO: 260717 - DNA, 13 bp, Artificial Sequence
  Oligonucleotide for detection of SNP TSC0007575
ttgtagagttaag

SEQ ID NO: 260718 - DNA, 13 bp, Artificial Sequence
  Oligonucleotide for detection of SNP TSC0007575
cttaactctacaa

SEQ ID NO: 260719 - DNA, 13 bp, Artificial Sequence
  Oligonucleotide for detection of SNP TSC0007575
tcgtagtgttaag

SEQ ID NO: 260720 - DNA, 13 bp, Artificial Sequence
  Oligonucleotide for detection of SNP TSC0007575
cttaacactacga

SEQ ID NO: 260721 - DNA, 13 bp, Artificial Sequence
  Oligonucleotide for detection of SNP TSC0007575
tcgtagagttaag

SEQ ID NO: 260722 - DNA, 13 bp, Artificial Sequence
  Oligonucleotide for detection of SNP TSC0007575
cttaactctacga

SEQ ID NO: 260723 - DNA, 13 bp, Artificial Sequence
  Oligonucleotide for detection of SNP TSC0001483
ttagatgtaagty

SEQ ID NO: 260724 - DNA, 13 bp, Artificial Sequence
  Oligonucleotide for detection of SNP TSC0001483
racttacatctaa

SEQ ID NO: 260725 - DNA, 13 bp, Artificial Sequence
  Oligonucleotide for detection of SNP TSC0001484
agtaatattgagy

SEQ ID NO: 260726 - DNA, 13 bp, Artificial Sequence
  Oligonucleotide for detection of SNP TSC0001484
rctcaatattact

SEQ ID NO: 260727 - DNA, 13 bp, Artificial Sequence
  Oligonucleotide for detection of SNP TSC0001484
agtaattttgagy

SEQ ID NO: 260728 - DNA, 13 bp, Artificial Sequence
  Oligonucleotide for detection of SNP TSC0001484
rctcaaaattact

SEQ ID NO: 260729 - DNA, 13 bp, Artificial Sequence
  Oligonucleotide for detection of SNP TSC0001484
gtttagtgttgtt

SEQ ID NO: 260730 - DNA, 13 bp, Artificial Sequence
  Oligonucleotide for detection of SNP TSC0001484
aacaacactaaac

SEQ ID NO: 260731 - DNA, 13 bp, Artificial Sequence
  Oligonucleotide for detection of SNP TSC0000821
aagtttaggaggt

SEQ ID NO: 260732 - DNA, 13 bp, Artificial Sequence
  Oligonucleotide for detection of SNP TSC0000821
acctcctaaactt

SEQ ID NO: 260733 - DNA, 13 bp, Artificial Sequence
  Oligonucleotide for detection of SNP TSC0000821
aagttttggaggt

SEQ ID NO: 260734 - DNA, 13 bp, Artificial Sequence
  Oligonucleotide for detection of SNP TSC0000821
acctccaaaactt

SEQ ID NO: 260735 - DNA, 13 bp, Artificial Sequence
  Oligonucleotide for detection of SNP TSC0000821
aagtttcggaggt

SEQ ID NO: 260736 - DNA, 13 bp, Artificial Sequence
  Oligonucleotide for detection of SNP TSC0000821
acctccgaaactt

SEQ ID NO: 260737 - DNA, 13 bp, Artificial Sequence
  Oligonucleotide for detection of SNP TSC0000822
tttatcgtgttgy

SEQ ID NO: 260738 - DNA, 13 bp, Artificial Sequence
  Oligonucleotide for detection of SNP TSC0000822
rcaacacgataaa

SEQ ID NO: 260739 - DNA, 13 bp, Artificial Sequence
  Oligonucleotide for detection of SNP TSC0000822
gtaatatggtgaa

SEQ ID NO: 260740 - DNA, 13 bp, Artificial Sequence
  Oligonucleotide for detection of SNP TSC0000822
ttcaccatattac

SEQ ID NO: 260741 - DNA, 13 bp, Artificial Sequence
  Oligonucleotide for detection of SNP TSC0000822
gtaatacggtgaa

SEQ ID NO: 260742 - DNA, 13 bp, Artificial Sequence
  Oligonucleotide for detection of SNP TSC0000822
ttcaccgtattac

SEQ ID NO: 260743 - DNA, 13 bp, Artificial Sequence
  Oligonucleotide for detection of SNP TSC0063303
tgtaagattagga

SEQ ID NO: 260744 - DNA, 13 bp, Artificial Sequence
  Oligonucleotide for detection of SNP TSC0063303
tcctaatcttaca

SEQ ID NO: 260745 - DNA, 13 bp, Artificial Sequence
  Oligonucleotide for detection of SNP TSC0063303
tgtaagtttagga

SEQ ID NO: 260746 - DNA, 13 bp, Artificial Sequence
  Oligonucleotide for detection of SNP TSC0063303
tcctaaacttaca

SEQ ID NO: 260747 - DNA, 13 bp, Artificial Sequence
  Oligonucleotide for detection of SNP TSC0063304
agtattatgtaay

SEQ ID NO: 260748 - DNA, 13 bp, Artificial Sequence
  Oligonucleotide for detection of SNP TSC0063304
rttacataatact

SEQ ID NO: 260749 - DNA, 13 bp, Artificial Sequence
  Oligonucleotide for detection of SNP TSC0063304
agtattgtgtaay

SEQ ID NO: 260750 - DNA, 13 bp, Artificial Sequence
  Oligonucleotide for detection of SNP TSC0063304
rttacacaatact

SEQ ID NO: 260751 - DNA, 13 bp, Artificial Sequence
  Oligonucleotide for detection of SNP TSC0063304
agtatcgtgtaay

SEQ ID NO: 260752 - DNA, 13 bp, Artificial Sequence
  Oligonucleotide for detection of SNP TSC0063304
rttacacgatact

SEQ ID NO: 260753 - DNA, 13 bp, Artificial Sequence
  Oligonucleotide for detection of SNP TSC0063304
gttatatgatgtt

SEQ ID NO: 260754 - DNA, 13 bp, Artificial Sequence
  Oligonucleotide for detection of SNP TSC0063304
aacatcatataac

SEQ ID NO: 260755 - DNA, 13 bp, Artificial Sequence
  Oligonucleotide for detection of SNP TSC0063304
gttatacgatgtt

SEQ ID NO: 260756 - DNA, 13 bp, Artificial Sequence
  Oligonucleotide for detection of SNP TSC0063304
aacatcgtataac

SEQ ID NO: 260757 - DNA, 13 bp, Artificial Sequence
  Oligonucleotide for detection of SNP TSC0063310
aagggtaagtttt

SEQ ID NO: 260758 - DNA, 13 bp, Artificial Sequence
  Oligonucleotide for detection of SNP TSC0063310
aaaacttaccctt

SEQ ID NO: 260759 - DNA, 13 bp, Artificial Sequence
  Oligonucleotide for detection of SNP TSC0063310
aagggtgagtttt

SEQ ID NO: 260760 - DNA, 13 bp, Artificial Sequence
  Oligonucleotide for detection of SNP TSC0063310
aaaactcaccctt

SEQ ID NO: 260761 - DNA, 13 bp, Artificial Sequence
  Oligonucleotide for detection of SNP TSC0063310
aagggcgagtttt

SEQ ID NO: 260762 - DNA, 13 bp, Artificial Sequence
  Oligonucleotide for detection of SNP TSC0063310
aaaactcgccctt

SEQ ID NO: 260763 - DNA, 13 bp, Artificial Sequence
  Oligonucleotide for detection of SNP TSC0063310
agaatttgttttt

SEQ ID NO: 260764 - DNA, 13 bp, Artificial Sequence
  Oligonucleotide for detection of SNP TSC0063310
aaaaacaaattct

SEQ ID NO: 260765 - DNA, 13 bp, Artificial Sequence
  Oligonucleotide for detection of SNP TSC0063310
agaattcgttttt

SEQ ID NO: 260766 - DNA, 13 bp, Artificial Sequence
  Oligonucleotide for detection of SNP TSC0063310
aaaaacgaattct

SEQ ID NO: 260767 - DNA, 13 bp, Artificial Sequence
  Oligonucleotide for detection of SNP TSC0063311
ttaaggggataga

SEQ ID NO: 260768 - DNA, 13 bp, Artificial Sequence
  Oligonucleotide for detection of SNP TSC0063311
tctatccccttaa

SEQ ID NO: 260769 - DNA, 13 bp, Artificial Sequence
  Oligonucleotide for detection of SNP TSC0063311
ttaaggagataga

SEQ ID NO: 260770 - DNA, 13 bp, Artificial Sequence
  Oligonucleotide for detection of SNP TSC0063311
tctatctccttaa

SEQ ID NO: 260771 - DNA, 13 bp, Artificial Sequence
  Oligonucleotide for detection of SNP TSC0007095
tatattaaagtta

SEQ ID NO: 260772 - DNA, 13 bp, Artificial Sequence
  Oligonucleotide for detection of SNP TSC0007095
taactttaatata

SEQ ID NO: 260773 - DNA, 13 bp, Artificial Sequence
  Oligonucleotide for detection of SNP TSC0007095
tatatttaagtta

SEQ ID NO: 260774 - DNA, 13 bp, Artificial Sequence
  Oligonucleotide for detection of SNP TSC0007095
taacttaaatata

SEQ ID NO: 260775 - DNA, 13 bp, Artificial Sequence
  Oligonucleotide for detection of SNP TSC0007095
taattttaatatg

SEQ ID NO: 260776 - DNA, 13 bp, Artificial Sequence
  Oligonucleotide for detection of SNP TSC0007095
catattaaaatta

SEQ ID NO: 260777 - DNA, 13 bp, Artificial Sequence
  Oligonucleotide for detection of SNP TSC0063313
aaggatattagta

SEQ ID NO: 260778 - DNA, 13 bp, Artificial Sequence
  Oligonucleotide for detection of SNP TSC0063313
tactaatatcctt

SEQ ID NO: 260779 - DNA, 13 bp, Artificial Sequence
  Oligonucleotide for detection of SNP TSC0063313
aaggattttagta

SEQ ID NO: 260780 - DNA, 13 bp, Artificial Sequence
  Oligonucleotide for detection of SNP TSC0063313
tactaaaatcctt

SEQ ID NO: 260781 - DNA, 13 bp, Artificial Sequence
  Oligonucleotide for detection of SNP TSC0063315
gatttatgaaaaa

SEQ ID NO: 260782 - DNA, 13 bp, Artificial Sequence
  Oligonucleotide for detection of SNP TSC0063315
tttttcataaatc

SEQ ID NO: 260783 - DNA, 13 bp, Artificial Sequence
  Oligonucleotide for detection of SNP TSC0063315
gatttacgaaaaa

SEQ ID NO: 260784 - DNA, 13 bp, Artificial Sequence
  Oligonucleotide for detection of SNP TSC0063315
tttttcgtaaatc

SEQ ID NO: 260785 - DNA, 13 bp, Artificial Sequence
  Oligonucleotide for detection of SNP TSC0063315
ttttttatgggty

SEQ ID NO: 260786 - DNA, 13 bp, Artificial Sequence
  Oligonucleotide for detection of SNP TSC0063315
racccataaaaaa

SEQ ID NO: 260787 - DNA, 13 bp, Artificial Sequence
  Oligonucleotide for detection of SNP TSC0063316
tgtgtgagagagg

SEQ ID NO: 260788 - DNA, 13 bp, Artificial Sequence
  Oligonucleotide for detection of SNP TSC0063316
cctctctcacaca

SEQ ID NO: 260789 - DNA, 13 bp, Artificial Sequence
  Oligonucleotide for detection of SNP TSC0063316
tgtgtgtgagagg

SEQ ID NO: 260790 - DNA, 13 bp, Artificial Sequence
  Oligonucleotide for detection of SNP TSC0063316
cctctcacacaca

SEQ ID NO: 260791 - DNA, 13 bp, Artificial Sequence
  Oligonucleotide for detection of SNP TSC0063317
taagataatttty

SEQ ID NO: 260792 - DNA, 13 bp, Artificial Sequence
  Oligonucleotide for detection of SNP TSC0063317
raaaattatctta

SEQ ID NO: 260793 - DNA, 13 bp, Artificial Sequence
  Oligonucleotide for detection of SNP TSC0063317
taagatgatttty

SEQ ID NO: 260794 - DNA, 13 bp, Artificial Sequence
  Oligonucleotide for detection of SNP TSC0063317
raaaatcatctta

SEQ ID NO: 260795 - DNA, 13 bp, Artificial Sequence
  Oligonucleotide for detection of SNP TSC0063318
tttttagtattag

SEQ ID NO: 260796 - DNA, 13 bp, Artificial Sequence
  Oligonucleotide for detection of SNP TSC0063318
ctaatactaaaaa

SEQ ID NO: 260797 - DNA, 13 bp, Artificial Sequence
  Oligonucleotide for detection of SNP TSC0063319
tatttagtatagt

SEQ ID NO: 260798 - DNA, 13 bp, Artificial Sequence
  Oligonucleotide for detection of SNP TSC0063319
actatactaaata

SEQ ID NO: 260799 - DNA, 13 bp, Artificial Sequence
  Oligonucleotide for detection of SNP TSC0063319
tatttaatatagt

SEQ ID NO: 260800 - DNA, 13 bp, Artificial Sequence
  Oligonucleotide for detection of SNP TSC0063319
actatattaaata

SEQ ID NO: 260801 - DNA, 13 bp, Artificial Sequence
  Oligonucleotide for detection of SNP TSC0001271
ggtgggatagggg

SEQ ID NO: 260802 - DNA, 13 bp, Artificial Sequence
  Oligonucleotide for detection of SNP TSC0001271
cccctatcccacc

SEQ ID NO: 260803 - DNA, 13 bp, Artificial Sequence
  Oligonucleotide for detection of SNP TSC0001271
ggtggggtagggg

SEQ ID NO: 260804 - DNA, 13 bp, Artificial Sequence
  Oligonucleotide for detection of SNP TSC0001271
cccctaccccacc

SEQ ID NO: 260805 - DNA, 13 bp, Artificial Sequence
  Oligonucleotide for detection of SNP TSC0063324
ttgttgtggggta

SEQ ID NO: 260806 - DNA, 13 bp, Artificial Sequence
  Oligonucleotide for detection of SNP TSC0063324
taccccacaacaa

SEQ ID NO: 260807 - DNA, 13 bp, Artificial Sequence
  Oligonucleotide for detection of SNP TSC0063324
ttgttgcggggta

SEQ ID NO: 260808 - DNA, 13 bp, Artificial Sequence
  Oligonucleotide for detection of SNP TSC0063324
taccccgcaacaa

SEQ ID NO: 260809 - DNA, 13 bp, Artificial Sequence
  Oligonucleotide for detection of SNP TSC0063324
tgttttgtagtag

SEQ ID NO: 260810 - DNA, 13 bp, Artificial Sequence
  Oligonucleotide for detection of SNP TSC0063324
ctactacaaaaca

SEQ ID NO: 260811 - DNA, 13 bp, Artificial Sequence
  Oligonucleotide for detection of SNP TSC0063324
tgttttatagtag

SEQ ID NO: 260812 - DNA, 13 bp, Artificial Sequence
  Oligonucleotide for detection of SNP TSC0063324
ctactataaaaca

SEQ ID NO: 260813 - DNA, 13 bp, Artificial Sequence
  Oligonucleotide for detection of SNP TSC0063324
tgtttcgtagtag

SEQ ID NO: 260814 - DNA, 13 bp, Artificial Sequence
  Oligonucleotide for detection of SNP TSC0063324
ctactacgaaaca

SEQ ID NO: 260815 - DNA, 13 bp, Artificial Sequence
  Oligonucleotide for detection of SNP TSC0001301
gttttagtagagt

SEQ ID NO: 260816 - DNA, 13 bp, Artificial Sequence
  Oligonucleotide for detection of SNP TSC0001301
actctactaaaac

SEQ ID NO: 260817 - DNA, 13 bp, Artificial Sequence
  Oligonucleotide for detection of SNP TSC0001301
gttttaatagagt

SEQ ID NO: 260818 - DNA, 13 bp, Artificial Sequence
  Oligonucleotide for detection of SNP TSC0001301
actctattaaaac

SEQ ID NO: 260819 - DNA, 13 bp, Artificial Sequence
  Oligonucleotide for detection of SNP TSC0008673
gtttgtagtttty

SEQ ID NO: 260820 - DNA, 13 bp, Artificial Sequence
  Oligonucleotide for detection of SNP TSC0008673
raaaactacaaac

SEQ ID NO: 260821 - DNA, 13 bp, Artificial Sequence
  Oligonucleotide for detection of SNP TSC0008673
gtttgtggtttty

SEQ ID NO: 260822 - DNA, 13 bp, Artificial Sequence
  Oligonucleotide for detection of SNP TSC0008673
raaaaccacaaac

SEQ ID NO: 260823 - DNA, 13 bp, Artificial Sequence
  Oligonucleotide for detection of SNP TSC0008673
gtttgcggtttty

SEQ ID NO: 260824 - DNA, 13 bp, Artificial Sequence
  Oligonucleotide for detection of SNP TSC0008673
raaaaccgcaaac

SEQ ID NO: 260825 - DNA, 13 bp, Artificial Sequence
  Oligonucleotide for detection of SNP TSC0008673
ggggattgtaggy

SEQ ID NO: 260826 - DNA, 13 bp, Artificial Sequence
  Oligonucleotide for detection of SNP TSC0008673
rcctacaatcccc

SEQ ID NO: 260827 - DNA, 13 bp, Artificial Sequence
  Oligonucleotide for detection of SNP TSC0008673
ggggatcgtaggy

SEQ ID NO: 260828 - DNA, 13 bp, Artificial Sequence
  Oligonucleotide for detection of SNP TSC0008673
rcctacgatcccc

SEQ ID NO: 260829 - DNA, 13 bp, Artificial Sequence
  Oligonucleotide for detection of SNP TSC0001572
tgaggtgggagaa

SEQ ID NO: 260830 - DNA, 13 bp, Artificial Sequence
  Oligonucleotide for detection of SNP TSC0001572
ttctcccacctca

SEQ ID NO: 260831 - DNA, 13 bp, Artificial Sequence
  Oligonucleotide for detection of SNP TSC0001572
tgaggtaggagaa

SEQ ID NO: 260832 - DNA, 13 bp, Artificial Sequence
  Oligonucleotide for detection of SNP TSC0001572
ttctcctacctca

SEQ ID NO: 260833 - DNA, 13 bp, Artificial Sequence
  Oligonucleotide for detection of SNP TSC0001572
tgaggcgggagaa

SEQ ID NO: 260834 - DNA, 13 bp, Artificial Sequence
  Oligonucleotide for detection of SNP TSC0001572
ttctcccgcctca

SEQ ID NO: 260835 - DNA, 13 bp, Artificial Sequence
  Oligonucleotide for detection of SNP TSC0063327
gtttggataattt

SEQ ID NO: 260836 - DNA, 13 bp, Artificial Sequence
  Oligonucleotide for detection of SNP TSC0063327
aaattatccaaac

SEQ ID NO: 260837 - DNA, 13 bp, Artificial Sequence
  Oligonucleotide for detection of SNP TSC0063327
gtttggttaattt

SEQ ID NO: 260838 - DNA, 13 bp, Artificial Sequence
  Oligonucleotide for detection of SNP TSC0063327
aaattaaccaaac

SEQ ID NO: 260839 - DNA, 13 bp, Artificial Sequence
  Oligonucleotide for detection of SNP TSC0063327
aaattatttaggy

SEQ ID NO: 260840 - DNA, 13 bp, Artificial Sequence
  Oligonucleotide for detection of SNP TSC0063327
rcctaaataattt

SEQ ID NO: 260841 - DNA, 13 bp, Artificial Sequence
  Oligonucleotide for detection of SNP TSC0001448
taaaaaatgtatt

SEQ ID NO: 260842 - DNA, 13 bp, Artificial Sequence
  Oligonucleotide for detection of SNP TSC0001448
aatacatttttta

SEQ ID NO: 260843 - DNA, 13 bp, Artificial Sequence
  Oligonucleotide for detection of SNP TSC0001448
taaaaagtgtatt

SEQ ID NO: 260844 - DNA, 13 bp, Artificial Sequence
  Oligonucleotide for detection of SNP TSC0001448
aatacacttttta

SEQ ID NO: 260845 - DNA, 13 bp, Artificial Sequence
  Oligonucleotide for detection of SNP TSC0063329
agattatgataaa

SEQ ID NO: 260846 - DNA, 13 bp, Artificial Sequence
  Oligonucleotide for detection of SNP TSC0063329
tttatcataatct

SEQ ID NO: 260847 - DNA, 13 bp, Artificial Sequence
  Oligonucleotide for detection of SNP TSC0063329
agattacgataaa

SEQ ID NO: 260848 - DNA, 13 bp, Artificial Sequence
  Oligonucleotide for detection of SNP TSC0063329
tttatcgtaatct

SEQ ID NO: 260849 - DNA, 13 bp, Artificial Sequence
  Oligonucleotide for detection of SNP TSC0000564
ataatgataaatg

SEQ ID NO: 260850 - DNA, 13 bp, Artificial Sequence
  Oligonucleotide for detection of SNP TSC0000564
catttatcattat

SEQ ID NO: 260851 - DNA, 13 bp, Artificial Sequence
  Oligonucleotide for detection of SNP TSC0000564
ataatggtaaatg

SEQ ID NO: 260852 - DNA, 13 bp, Artificial Sequence
  Oligonucleotide for detection of SNP TSC0000564
catttaccattat

SEQ ID NO: 260853 - DNA, 13 bp, Artificial Sequence
  Oligonucleotide for detection of SNP TSC0063330
gaaaagatagtga

SEQ ID NO: 260854 - DNA, 13 bp, Artificial Sequence
  Oligonucleotide for detection of SNP TSC0063330
tcactatcttttc

SEQ ID NO: 260855 - DNA, 13 bp, Artificial Sequence
  Oligonucleotide for detection of SNP TSC0063330
gaaaagttagtga

SEQ ID NO: 260856 - DNA, 13 bp, Artificial Sequence
  Oligonucleotide for detection of SNP TSC0063330
tcactaacttttc

SEQ ID NO: 260857 - DNA, 13 bp, Artificial Sequence
  Oligonucleotide for detection of SNP TSC0000620
tggtagtgagtta

SEQ ID NO: 260858 - DNA, 13 bp, Artificial Sequence
  Oligonucleotide for detection of SNP TSC0000620
taactcactacca

SEQ ID NO: 260859 - DNA, 13 bp, Artificial Sequence
  Oligonucleotide for detection of SNP TSC0000620
tggtagggagtta

SEQ ID NO: 260860 - DNA, 13 bp, Artificial Sequence
  Oligonucleotide for detection of SNP TSC0000620
taactccctacca

SEQ ID NO: 260861 - DNA, 13 bp, Artificial Sequence
  Oligonucleotide for detection of SNP TSC0000621
attgttgtagtty

SEQ ID NO: 260862 - DNA, 13 bp, Artificial Sequence
  Oligonucleotide for detection of SNP TSC0000621
raactacaacaat

SEQ ID NO: 260863 - DNA, 13 bp, Artificial Sequence
  Oligonucleotide for detection of SNP TSC0000621
attgttatagtty

SEQ ID NO: 260864 - DNA, 13 bp, Artificial Sequence
  Oligonucleotide for detection of SNP TSC0000621
raactataacaat

SEQ ID NO: 260865 - DNA, 13 bp, Artificial Sequence
  Oligonucleotide for detection of SNP TSC0000808
gttaagtttgtag

SEQ ID NO: 260866 - DNA, 13 bp, Artificial Sequence
  Oligonucleotide for detection of SNP TSC0000808
ctacaaacttaac

SEQ ID NO: 260867 - DNA, 13 bp, Artificial Sequence
  Oligonucleotide for detection of SNP TSC0000808
gttaaggttgtag

SEQ ID NO: 260868 - DNA, 13 bp, Artificial Sequence
  Oligonucleotide for detection of SNP TSC0000808
ctacaaccttaac

SEQ ID NO: 260869 - DNA, 13 bp, Artificial Sequence
  Oligonucleotide for detection of SNP TSC0063332
taaaaataagtty

SEQ ID NO: 260870 - DNA, 13 bp, Artificial Sequence
  Oligonucleotide for detection of SNP TSC0063332
raacttattttta

SEQ ID NO: 260871 - DNA, 13 bp, Artificial Sequence
  Oligonucleotide for detection of SNP TSC0063332
taaaaagaagtty

SEQ ID NO: 260872 - DNA, 13 bp, Artificial Sequence
  Oligonucleotide for detection of SNP TSC0063332
raacttcttttta

SEQ ID NO: 260873 - DNA, 13 bp, Artificial Sequence
  Oligonucleotide for detection of SNP TSC0063332
gaatttatttttg

SEQ ID NO: 260874 - DNA, 13 bp, Artificial Sequence
  Oligonucleotide for detection of SNP TSC0063332
caaaaataaattc

SEQ ID NO: 260875 - DNA, 13 bp, Artificial Sequence
  Oligonucleotide for detection of SNP TSC0063332
gaatttttttttg

SEQ ID NO: 260876 - DNA, 13 bp, Artificial Sequence
  Oligonucleotide for detection of SNP TSC0063332
caaaaaaaaattc

SEQ ID NO: 260877 - DNA, 13 bp, Artificial Sequence
  Oligonucleotide for detection of SNP TSC0063333
ttaataataatga

SEQ ID NO: 260878 - DNA, 13 bp, Artificial Sequence
  Oligonucleotide for detection of SNP TSC0063333
tcattattattaa

SEQ ID NO: 260879 - DNA, 13 bp, Artificial Sequence
  Oligonucleotide for detection of SNP TSC0063333
ttaatagtaatga

SEQ ID NO: 260880 - DNA, 13 bp, Artificial Sequence
  Oligonucleotide for detection of SNP TSC0063333
tcattactattaa

SEQ ID NO: 260881 - DNA, 13 bp, Artificial Sequence
  Oligonucleotide for detection of SNP TSC0063334
tatgaatgtagaa

SEQ ID NO: 260882 - DNA, 13 bp, Artificial Sequence
  Oligonucleotide for detection of SNP TSC0063334
ttctacattcata

SEQ ID NO: 260883 - DNA, 13 bp, Artificial Sequence
  Oligonucleotide for detection of SNP TSC0063334
tatgaaggtagaa

SEQ ID NO: 260884 - DNA, 13 bp, Artificial Sequence
  Oligonucleotide for detection of SNP TSC0063334
ttctaccttcata

SEQ ID NO: 260885 - DNA, 13 bp, Artificial Sequence
  Oligonucleotide for detection of SNP TSC0063337
gattatattttay

SEQ ID NO: 260886 - DNA, 13 bp, Artificial Sequence
  Oligonucleotide for detection of SNP TSC0063337
rtaaaatataatc

SEQ ID NO: 260887 - DNA, 13 bp, Artificial Sequence
  Oligonucleotide for detection of SNP TSC0063337
gattattttttay

SEQ ID NO: 260888 - DNA, 13 bp, Artificial Sequence
  Oligonucleotide for detection of SNP TSC0063337
rtaaaaaataatc

SEQ ID NO: 260889 - DNA, 13 bp, Artificial Sequence
  Oligonucleotide for detection of SNP TSC0063337
gtaaaatataaty

SEQ ID NO: 260890 - DNA, 13 bp, Artificial Sequence
  Oligonucleotide for detection of SNP TSC0063337
rattatattttac

SEQ ID NO: 260891 - DNA, 13 bp, Artificial Sequence
  Oligonucleotide for detection of SNP TSC0063337
gtaaaaaataaty

SEQ ID NO: 260892 - DNA, 13 bp, Artificial Sequence
  Oligonucleotide for detection of SNP TSC0063337
rattattttttac

SEQ ID NO: 260893 - DNA, 13 bp, Artificial Sequence
  Oligonucleotide for detection of SNP TSC0063341
ttttattgtatgt

SEQ ID NO: 260894 - DNA, 13 bp, Artificial Sequence
  Oligonucleotide for detection of SNP TSC0063341
acatacaataaaa

SEQ ID NO: 260895 - DNA, 13 bp, Artificial Sequence
  Oligonucleotide for detection of SNP TSC0063341
ttttatcgtatgt

SEQ ID NO: 260896 - DNA, 13 bp, Artificial Sequence
  Oligonucleotide for detection of SNP TSC0063341
acatacgataaaa

SEQ ID NO: 260897 - DNA, 13 bp, Artificial Sequence
  Oligonucleotide for detection of SNP TSC0063341
atatgtgatgaga

SEQ ID NO: 260898 - DNA, 13 bp, Artificial Sequence
  Oligonucleotide for detection of SNP TSC0063341
tctcatcacatat

SEQ ID NO: 260899 - DNA, 13 bp, Artificial Sequence
  Oligonucleotide for detection of SNP TSC0063341
atatgtaatgaga

SEQ ID NO: 260900 - DNA, 13 bp, Artificial Sequence
  Oligonucleotide for detection of SNP TSC0063341
tctcattacatat

SEQ ID NO: 260901 - DNA, 13 bp, Artificial Sequence
  Oligonucleotide for detection of SNP TSC0063341
atatgcgatgaga

SEQ ID NO: 260902 - DNA, 13 bp, Artificial Sequence
  Oligonucleotide for detection of SNP TSC0063341
tctcatcgcatat

SEQ ID NO: 260903 - DNA, 13 bp, Artificial Sequence
  Oligonucleotide for detection of SNP TSC0063342
gtaaagtggataa

SEQ ID NO: 260904 - DNA, 13 bp, Artificial Sequence
  Oligonucleotide for detection of SNP TSC0063342
ttatccactttac

SEQ ID NO: 260905 - DNA, 13 bp, Artificial Sequence
  Oligonucleotide for detection of SNP TSC0063342
gtaaaggggataa

SEQ ID NO: 260906 - DNA, 13 bp, Artificial Sequence
  Oligonucleotide for detection of SNP TSC0063342
ttatcccctttac

SEQ ID NO: 260907 - DNA, 13 bp, Artificial Sequence
  Oligonucleotide for detection of SNP TSC0063343
aaaggatgtagaa

SEQ ID NO: 260908 - DNA, 13 bp, Artificial Sequence
  Oligonucleotide for detection of SNP TSC0063343
ttctacatccttt

SEQ ID NO: 260909 - DNA, 13 bp, Artificial Sequence
  Oligonucleotide for detection of SNP TSC0063343
aaaggacgtagaa

SEQ ID NO: 260910 - DNA, 13 bp, Artificial Sequence
  Oligonucleotide for detection of SNP TSC0063343
ttctacgtccttt

SEQ ID NO: 260911 - DNA, 13 bp, Artificial Sequence
  Oligonucleotide for detection of SNP TSC0063344
gtaattgtggaat

SEQ ID NO: 260912 - DNA, 13 bp, Artificial Sequence
  Oligonucleotide for detection of SNP TSC0063344
attccacaattac

SEQ ID NO: 260913 - DNA, 13 bp, Artificial Sequence
  Oligonucleotide for detection of SNP TSC0063344
gtaattatggaat

SEQ ID NO: 260914 - DNA, 13 bp, Artificial Sequence
  Oligonucleotide for detection of SNP TSC0063344
attccataattac

SEQ ID NO: 260915 - DNA, 13 bp, Artificial Sequence
  Oligonucleotide for detection of SNP TSC0063345
atggtaggatttg

SEQ ID NO: 260916 - DNA, 13 bp, Artificial Sequence
  Oligonucleotide for detection of SNP TSC0063345
caaatcctaccat

SEQ ID NO: 260917 - DNA, 13 bp, Artificial Sequence
  Oligonucleotide for detection of SNP TSC0063345
atggtaagatttg

SEQ ID NO: 260918 - DNA, 13 bp, Artificial Sequence
  Oligonucleotide for detection of SNP TSC0063345
caaatcttaccat

SEQ ID NO: 260919 - DNA, 13 bp, Artificial Sequence
  Oligonucleotide for detection of SNP TSC0063345
atggtaggattcg

SEQ ID NO: 260920 - DNA, 13 bp, Artificial Sequence
  Oligonucleotide for detection of SNP TSC0063345
cgaatcctaccat

SEQ ID NO: 260921 - DNA, 13 bp, Artificial Sequence
  Oligonucleotide for detection of SNP TSC0063345
atggtaagattcg

SEQ ID NO: 260922 - DNA, 13 bp, Artificial Sequence
  Oligonucleotide for detection of SNP TSC0063345
cgaatcttaccat

SEQ ID NO: 260923 - DNA, 13 bp, Artificial Sequence
  Oligonucleotide for detection of SNP TSC0063353
agtagtggggatt

SEQ ID NO: 260924 - DNA, 13 bp, Artificial Sequence
  Oligonucleotide for detection of SNP TSC0063353
aatccccactact

SEQ ID NO: 260925 - DNA, 13 bp, Artificial Sequence
  Oligonucleotide for detection of SNP TSC0063353
agtagcggggatt

SEQ ID NO: 260926 - DNA, 13 bp, Artificial Sequence
  Oligonucleotide for detection of SNP TSC0063353
aatccccgctact

SEQ ID NO: 260927 - DNA, 13 bp, Artificial Sequence
  Oligonucleotide for detection of SNP TSC0063353
aatttttgttatt

SEQ ID NO: 260928 - DNA, 13 bp, Artificial Sequence
  Oligonucleotide for detection of SNP TSC0063353
aataacaaaaatt

SEQ ID NO: 260929 - DNA, 13 bp, Artificial Sequence
  Oligonucleotide for detection of SNP TSC0063353
aattttcgttatt

SEQ ID NO: 260930 - DNA, 13 bp, Artificial Sequence
  Oligonucleotide for detection of SNP TSC0063353
aataacgaaaatt

SEQ ID NO: 260931 - DNA, 13 bp, Artificial Sequence
  Oligonucleotide for detection of SNP TSC0063354
atttatgtatata

SEQ ID NO: 260932 - DNA, 13 bp, Artificial Sequence
  Oligonucleotide for detection of SNP TSC0063354
tatatacataaat

SEQ ID NO: 260933 - DNA, 13 bp, Artificial Sequence
  Oligonucleotide for detection of SNP TSC0063354
tatatagataggt

SEQ ID NO: 260934 - DNA, 13 bp, Artificial Sequence
  Oligonucleotide for detection of SNP TSC0063354
acctatctatata

SEQ ID NO: 260935 - DNA, 13 bp, Artificial Sequence
  Oligonucleotide for detection of SNP TSC0063354
tatatatataggt

SEQ ID NO: 260936 - DNA, 13 bp, Artificial Sequence
  Oligonucleotide for detection of SNP TSC0063354
acctatatatata

SEQ ID NO: 260937 - DNA, 13 bp, Artificial Sequence
  Oligonucleotide for detection of SNP TSC0063355
tgttttaaagttg

SEQ ID NO: 260938 - DNA, 13 bp, Artificial Sequence
  Oligonucleotide for detection of SNP TSC0063355
caactttaaaaca

SEQ ID NO: 260939 - DNA, 13 bp, Artificial Sequence
  Oligonucleotide for detection of SNP TSC0063355
tgttttgaagttg

SEQ ID NO: 260940 - DNA, 13 bp, Artificial Sequence
  Oligonucleotide for detection of SNP TSC0063355
caacttcaaaaca

SEQ ID NO: 260941 - DNA, 13 bp, Artificial Sequence
  Oligonucleotide for detection of SNP TSC0063356
attaaagaatttt

SEQ ID NO: 260942 - DNA, 13 bp, Artificial Sequence
  Oligonucleotide for detection of SNP TSC0063356
aaaattctttaat

SEQ ID NO: 260943 - DNA, 13 bp, Artificial Sequence
  Oligonucleotide for detection of SNP TSC0063361
agggtatgggtty

SEQ ID NO: 260944 - DNA, 13 bp, Artificial Sequence
  Oligonucleotide for detection of SNP TSC0063361
raacccataccct

SEQ ID NO: 260945 - DNA, 13 bp, Artificial Sequence
  Oligonucleotide for detection of SNP TSC0063361
agggtacgggtty

SEQ ID NO: 260946 - DNA, 13 bp, Artificial Sequence
  Oligonucleotide for detection of SNP TSC0063361
raacccgtaccct

SEQ ID NO: 260947 - DNA, 13 bp, Artificial Sequence
  Oligonucleotide for detection of SNP TSC0063361
gagttcgtgtttt

SEQ ID NO: 260948 - DNA, 13 bp, Artificial Sequence
  Oligonucleotide for detection of SNP TSC0063361
aaaacacgaactc

SEQ ID NO: 260949 - DNA, 13 bp, Artificial Sequence
  Oligonucleotide for detection of SNP TSC0063362
ttttatacggtag

SEQ ID NO: 260950 - DNA, 13 bp, Artificial Sequence
  Oligonucleotide for detection of SNP TSC0063362
ctaccgtataaaa

SEQ ID NO: 260951 - DNA, 13 bp, Artificial Sequence
  Oligonucleotide for detection of SNP TSC0063362
ttttattcggtag

SEQ ID NO: 260952 - DNA, 13 bp, Artificial Sequence
  Oligonucleotide for detection of SNP TSC0063362
ctaccgaataaaa

SEQ ID NO: 260953 - DNA, 13 bp, Artificial Sequence
  Oligonucleotide for detection of SNP TSC0063362
ttgttgtgtgaag

SEQ ID NO: 260954 - DNA, 13 bp, Artificial Sequence
  Oligonucleotide for detection of SNP TSC0063362
cttcacacaacaa

SEQ ID NO: 260955 - DNA, 13 bp, Artificial Sequence
  Oligonucleotide for detection of SNP TSC0063362
ttgttgggtgaag

SEQ ID NO: 260956 - DNA, 13 bp, Artificial Sequence
  Oligonucleotide for detection of SNP TSC0063362
cttcacccaacaa

SEQ ID NO: 260957 - DNA, 13 bp, Artificial Sequence
  Oligonucleotide for detection of SNP TSC0063362
ttgtcgtgtgaag

SEQ ID NO: 260958 - DNA, 13 bp, Artificial Sequence
  Oligonucleotide for detection of SNP TSC0063362
cttcacacgacaa

SEQ ID NO: 260959 - DNA, 13 bp, Artificial Sequence
  Oligonucleotide for detection of SNP TSC0063362
ttgtcgggtgaag

SEQ ID NO: 260960 - DNA, 13 bp, Artificial Sequence
  Oligonucleotide for detection of SNP TSC0063362
cttcacccgacaa

SEQ ID NO: 260961 - DNA, 13 bp, Artificial Sequence
  Oligonucleotide for detection of SNP TSC0063363
agtaggaaggaag

SEQ ID NO: 260962 - DNA, 13 bp, Artificial Sequence
  Oligonucleotide for detection of SNP TSC0063363
cttccttcctact

SEQ ID NO: 260963 - DNA, 13 bp, Artificial Sequence
  Oligonucleotide for detection of SNP TSC0063363
agtaggtaggaag

SEQ ID NO: 260964 - DNA, 13 bp, Artificial Sequence
  Oligonucleotide for detection of SNP TSC0063363
cttcctacctact

SEQ ID NO: 260965 - DNA, 13 bp, Artificial Sequence
  Oligonucleotide for detection of SNP TSC0063364
agtgaaagaggaa

SEQ ID NO: 260966 - DNA, 13 bp, Artificial Sequence
  Oligonucleotide for detection of SNP TSC0063364
ttcctctttcact

SEQ ID NO: 260967 - DNA, 13 bp, Artificial Sequence
  Oligonucleotide for detection of SNP TSC0063364
agtgaaggaggaa

SEQ ID NO: 260968 - DNA, 13 bp, Artificial Sequence
  Oligonucleotide for detection of SNP TSC0063364
ttcctccttcact

SEQ ID NO: 260969 - DNA, 13 bp, Artificial Sequence
  Oligonucleotide for detection of SNP TSC0063365
tattttagttttt

SEQ ID NO: 260970 - DNA, 13 bp, Artificial Sequence
  Oligonucleotide for detection of SNP TSC0063365
aaaaactaaaata

SEQ ID NO: 260971 - DNA, 13 bp, Artificial Sequence
  Oligonucleotide for detection of SNP TSC0063365
aggaattggagta

SEQ ID NO: 260972 - DNA, 13 bp, Artificial Sequence
  Oligonucleotide for detection of SNP TSC0063365
tactccaattcct

SEQ ID NO: 260973 - DNA, 13 bp, Artificial Sequence
  Oligonucleotide for detection of SNP TSC0063365
aggaatcggagta

SEQ ID NO: 260974 - DNA, 13 bp, Artificial Sequence
  Oligonucleotide for detection of SNP TSC0063365
tactccgattcct

SEQ ID NO: 260975 - DNA, 13 bp, Artificial Sequence
  Oligonucleotide for detection of SNP TSC0063366
gataaaggagggg

SEQ ID NO: 260976 - DNA, 13 bp, Artificial Sequence
  Oligonucleotide for detection of SNP TSC0063366
cccctcctttatc

SEQ ID NO: 260977 - DNA, 13 bp, Artificial Sequence
  Oligonucleotide for detection of SNP TSC0063366
gataaaagagggg

SEQ ID NO: 260978 - DNA, 13 bp, Artificial Sequence
  Oligonucleotide for detection of SNP TSC0063366
cccctcttttatc

SEQ ID NO: 260979 - DNA, 13 bp, Artificial Sequence
  Oligonucleotide for detection of SNP TSC0063367
aagtaagtaatay

SEQ ID NO: 260980 - DNA, 13 bp, Artificial Sequence
  Oligonucleotide for detection of SNP TSC0063367
rtattacttactt

SEQ ID NO: 260981 - DNA, 13 bp, Artificial Sequence
  Oligonucleotide for detection of SNP TSC0063367
aagtaaataatay

SEQ ID NO: 260982 - DNA, 13 bp, Artificial Sequence
  Oligonucleotide for detection of SNP TSC0063367
rtattatttactt

SEQ ID NO: 260983 - DNA, 13 bp, Artificial Sequence
  Oligonucleotide for detection of SNP TSC0063372
aatagtaaaagat

SEQ ID NO: 260984 - DNA, 13 bp, Artificial Sequence
  Oligonucleotide for detection of SNP TSC0063372
atcttttactatt

SEQ ID NO: 260985 - DNA, 13 bp, Artificial Sequence
  Oligonucleotide for detection of SNP TSC0063372
aatagtgaaagat

SEQ ID NO: 260986 - DNA, 13 bp, Artificial Sequence
  Oligonucleotide for detection of SNP TSC0063372
atctttcactatt

SEQ ID NO: 260987 - DNA, 13 bp, Artificial Sequence
  Oligonucleotide for detection of SNP TSC0063372
aatagcgaaagat

SEQ ID NO: 260988 - DNA, 13 bp, Artificial Sequence
  Oligonucleotide for detection of SNP TSC0063372
atctttcgctatt

SEQ ID NO: 260989 - DNA, 13 bp, Artificial Sequence
  Oligonucleotide for detection of SNP TSC0063376
gtttggtgaatty

SEQ ID NO: 260990 - DNA, 13 bp, Artificial Sequence
  Oligonucleotide for detection of SNP TSC0063376
raattcaccaaac

SEQ ID NO: 260991 - DNA, 13 bp, Artificial Sequence
  Oligonucleotide for detection of SNP TSC0063376
gtttggcgaatty

SEQ ID NO: 260992 - DNA, 13 bp, Artificial Sequence
  Oligonucleotide for detection of SNP TSC0063376
raattcgccaaac

SEQ ID NO: 260993 - DNA, 13 bp, Artificial Sequence
  Oligonucleotide for detection of SNP TSC0063376
ggatttgttaagy

SEQ ID NO: 260994 - DNA, 13 bp, Artificial Sequence
  Oligonucleotide for detection of SNP TSC0063376
rcttaacaaatcc

SEQ ID NO: 260995 - DNA, 13 bp, Artificial Sequence
  Oligonucleotide for detection of SNP TSC0063376
ggatttattaagy

SEQ ID NO: 260996 - DNA, 13 bp, Artificial Sequence
  Oligonucleotide for detection of SNP TSC0063376
rcttaataaatcc

SEQ ID NO: 260997 - DNA, 13 bp, Artificial Sequence
  Oligonucleotide for detection of SNP TSC0063376
ggattcgttaagy

SEQ ID NO: 260998 - DNA, 13 bp, Artificial Sequence
  Oligonucleotide for detection of SNP TSC0063376
rcttaacgaatcc

SEQ ID NO: 260999 - DNA, 13 bp, Artificial Sequence
  Oligonucleotide for detection of SNP TSC0063378
ttattttttagta

SEQ ID NO: 261000 - DNA, 13 bp, Artificial Sequence
  Oligonucleotide for detection of SNP TSC0063378
tactaaaaaataa

SEQ ID NO: 261001 - DNA, 13 bp, Artificial Sequence
  Oligonucleotide for detection of SNP TSC0063378
ttatttgttagta

SEQ ID NO: 261002 - DNA, 13 bp, Artificial Sequence
  Oligonucleotide for detection of SNP TSC0063378
tactaacaaataa

SEQ ID NO: 261003 - DNA, 13 bp, Artificial Sequence
  Oligonucleotide for detection of SNP TSC0063378
tgttgagaaataa

SEQ ID NO: 261004 - DNA, 13 bp, Artificial Sequence
  Oligonucleotide for detection of SNP TSC0063378
ttatttctcaaca

SEQ ID NO: 261005 - DNA, 13 bp, Artificial Sequence
  Oligonucleotide for detection of SNP TSC0063378
tgttgataaataa

SEQ ID NO: 261006 - DNA, 13 bp, Artificial Sequence
  Oligonucleotide for detection of SNP TSC0063378
ttatttatcaaca

SEQ ID NO: 261007 - DNA, 13 bp, Artificial Sequence
  Oligonucleotide for detection of SNP TSC0063379
agtgtaatggcgy

SEQ ID NO: 261008 - DNA, 13 bp, Artificial Sequence
  Oligonucleotide for detection of SNP TSC0063379
rcgccattacact

SEQ ID NO: 261009 - DNA, 13 bp, Artificial Sequence
  Oligonucleotide for detection of SNP TSC0063379
agtgtagtggcgy

SEQ ID NO: 261010 - DNA, 13 bp, Artificial Sequence
  Oligonucleotide for detection of SNP TSC0063379
rcgccactacact

SEQ ID NO: 261011 - DNA, 13 bp, Artificial Sequence
  Oligonucleotide for detection of SNP TSC0063381
atgtattgattay

SEQ ID NO: 261012 - DNA, 13 bp, Artificial Sequence
  Oligonucleotide for detection of SNP TSC0063381
rtaatcaatacat

SEQ ID NO: 261013 - DNA, 13 bp, Artificial Sequence
  Oligonucleotide for detection of SNP TSC0063381
atgtatggattay

SEQ ID NO: 261014 - DNA, 13 bp, Artificial Sequence
  Oligonucleotide for detection of SNP TSC0063381
rtaatccatacat

SEQ ID NO: 261015 - DNA, 13 bp, Artificial Sequence
  Oligonucleotide for detection of SNP TSC0063381
atgtatcgattay

SEQ ID NO: 261016 - DNA, 13 bp, Artificial Sequence
  Oligonucleotide for detection of SNP TSC0063381
rtaatcgatacat

SEQ ID NO: 261017 - DNA, 13 bp, Artificial Sequence
  Oligonucleotide for detection of SNP TSC0063381
atgtacggattay

SEQ ID NO: 261018 - DNA, 13 bp, Artificial Sequence
  Oligonucleotide for detection of SNP TSC0063381
rtaatccgtacat

SEQ ID NO: 261019 - DNA, 13 bp, Artificial Sequence
  Oligonucleotide for detection of SNP TSC0063381
gtgattggtatat

SEQ ID NO: 261020 - DNA, 13 bp, Artificial Sequence
  Oligonucleotide for detection of SNP TSC0063381
atataccaatcac

SEQ ID NO: 261021 - DNA, 13 bp, Artificial Sequence
  Oligonucleotide for detection of SNP TSC0063381
gtgatttgtatat

SEQ ID NO: 261022 - DNA, 13 bp, Artificial Sequence
  Oligonucleotide for detection of SNP TSC0063381
atatacaaatcac

SEQ ID NO: 261023 - DNA, 13 bp, Artificial Sequence
  Oligonucleotide for detection of SNP TSC0063381
gtgatcggtatat

SEQ ID NO: 261024 - DNA, 13 bp, Artificial Sequence
  Oligonucleotide for detection of SNP TSC0063381
atataccgatcac

SEQ ID NO: 261025 - DNA, 13 bp, Artificial Sequence
  Oligonucleotide for detection of SNP TSC0063381
gtgattcgtatat

SEQ ID NO: 261026 - DNA, 13 bp, Artificial Sequence
  Oligonucleotide for detection of SNP TSC0063381
atatacgaatcac

SEQ ID NO: 261027 - DNA, 13 bp, Artificial Sequence
  Oligonucleotide for detection of SNP TSC0063382
tttgaatagtgga

SEQ ID NO: 261028 - DNA, 13 bp, Artificial Sequence
  Oligonucleotide for detection of SNP TSC0063382
tccactattcaaa

SEQ ID NO: 261029 - DNA, 13 bp, Artificial Sequence
  Oligonucleotide for detection of SNP TSC0063382
tttgaagagtgga

SEQ ID NO: 261030 - DNA, 13 bp, Artificial Sequence
  Oligonucleotide for detection of SNP TSC0063382
tccactcttcaaa

SEQ ID NO: 261031 - DNA, 13 bp, Artificial Sequence
  Oligonucleotide for detection of SNP TSC0063382
tttattgtttaag

SEQ ID NO: 261032 - DNA, 13 bp, Artificial Sequence
  Oligonucleotide for detection of SNP TSC0063382
cttaaacaataaa

SEQ ID NO: 261033 - DNA, 13 bp, Artificial Sequence
  Oligonucleotide for detection of SNP TSC0063382
tttattttttaag

SEQ ID NO: 261034 - DNA, 13 bp, Artificial Sequence
  Oligonucleotide for detection of SNP TSC0063382
cttaaaaaataaa

SEQ ID NO: 261035 - DNA, 13 bp, Artificial Sequence
  Oligonucleotide for detection of SNP TSC0063383
ataaaaggtttta

SEQ ID NO: 261036 - DNA, 13 bp, Artificial Sequence
  Oligonucleotide for detection of SNP TSC0063383
taaaaccttttat

SEQ ID NO: 261037 - DNA, 13 bp, Artificial Sequence
  Oligonucleotide for detection of SNP TSC0063383
taagatgttttat

SEQ ID NO: 261038 - DNA, 13 bp, Artificial Sequence
  Oligonucleotide for detection of SNP TSC0063383
ataaaacatctta

SEQ ID NO: 261039 - DNA, 13 bp, Artificial Sequence
  Oligonucleotide for detection of SNP TSC0063383
taagattttttat

SEQ ID NO: 261040 - DNA, 13 bp, Artificial Sequence
  Oligonucleotide for detection of SNP TSC0063383
ataaaaaatctta

SEQ ID NO: 261041 - DNA, 13 bp, Artificial Sequence
  Oligonucleotide for detection of SNP TSC0063383
taagacgttttat

SEQ ID NO: 261042 - DNA, 13 bp, Artificial Sequence
  Oligonucleotide for detection of SNP TSC0063383
ataaaacgtctta

SEQ ID NO: 261043 - DNA, 13 bp, Artificial Sequence
  Oligonucleotide for detection of SNP TSC0063384
ggaattggtttaa

SEQ ID NO: 261044 - DNA, 13 bp, Artificial Sequence
  Oligonucleotide for detection of SNP TSC0063384
ttaaaccaattcc

SEQ ID NO: 261045 - DNA, 13 bp, Artificial Sequence
  Oligonucleotide for detection of SNP TSC0063384
ggaatttgtttaa

SEQ ID NO: 261046 - DNA, 13 bp, Artificial Sequence
  Oligonucleotide for detection of SNP TSC0063384
ttaaacaaattcc

SEQ ID NO: 261047 - DNA, 13 bp, Artificial Sequence
  Oligonucleotide for detection of SNP TSC0063384
ggaatcggtttaa

SEQ ID NO: 261048 - DNA, 13 bp, Artificial Sequence
  Oligonucleotide for detection of SNP TSC0063384
ttaaaccgattcc

SEQ ID NO: 261049 - DNA, 13 bp, Artificial Sequence
  Oligonucleotide for detection of SNP TSC0063384
ggaattcgtttaa

SEQ ID NO: 261050 - DNA, 13 bp, Artificial Sequence
  Oligonucleotide for detection of SNP TSC0063384
ttaaacgaattcc

SEQ ID NO: 261051 - DNA, 13 bp, Artificial Sequence
  Oligonucleotide for detection of SNP TSC0063388
gattttaatttta

SEQ ID NO: 261052 - DNA, 13 bp, Artificial Sequence
  Oligonucleotide for detection of SNP TSC0063388
taaaattaaaatc

SEQ ID NO: 261053 - DNA, 13 bp, Artificial Sequence
  Oligonucleotide for detection of SNP TSC0063388
taaaattaaaaty

SEQ ID NO: 261054 - DNA, 13 bp, Artificial Sequence
  Oligonucleotide for detection of SNP TSC0063388
rattttaatttta

SEQ ID NO: 261055 - DNA, 13 bp, Artificial Sequence
  Oligonucleotide for detection of SNP TSC0063388
taaaatgaaaaty

SEQ ID NO: 261056 - DNA, 13 bp, Artificial Sequence
  Oligonucleotide for detection of SNP TSC0063388
rattttcatttta

SEQ ID NO: 261057 - DNA, 13 bp, Artificial Sequence
  Oligonucleotide for detection of SNP TSC0063390
ttgtttgtaataa

SEQ ID NO: 261058 - DNA, 13 bp, Artificial Sequence
  Oligonucleotide for detection of SNP TSC0063390
ttattacaaacaa

SEQ ID NO: 261059 - DNA, 13 bp, Artificial Sequence
  Oligonucleotide for detection of SNP TSC0063390
ttgtttataataa

SEQ ID NO: 261060 - DNA, 13 bp, Artificial Sequence
  Oligonucleotide for detection of SNP TSC0063390
ttattataaacaa

SEQ ID NO: 261061 - DNA, 13 bp, Artificial Sequence
  Oligonucleotide for detection of SNP TSC0063391
atggtaaaggaty

SEQ ID NO: 261062 - DNA, 13 bp, Artificial Sequence
  Oligonucleotide for detection of SNP TSC0063391
ratcctttaccat

SEQ ID NO: 261063 - DNA, 13 bp, Artificial Sequence
  Oligonucleotide for detection of SNP TSC0063391
atggtagaggaty

SEQ ID NO: 261064 - DNA, 13 bp, Artificial Sequence
  Oligonucleotide for detection of SNP TSC0063391
ratcctctaccat

SEQ ID NO: 261065 - DNA, 13 bp, Artificial Sequence
  Oligonucleotide for detection of SNP TSC0004671
gaagtggtgtata

SEQ ID NO: 261066 - DNA, 13 bp, Artificial Sequence
  Oligonucleotide for detection of SNP TSC0004671
tatacaccacttc

SEQ ID NO: 261067 - DNA, 13 bp, Artificial Sequence
  Oligonucleotide for detection of SNP TSC0004671
gaagtgatgtata

SEQ ID NO: 261068 - DNA, 13 bp, Artificial Sequence
  Oligonucleotide for detection of SNP TSC0004671
tatacatcacttc

SEQ ID NO: 261069 - DNA, 13 bp, Artificial Sequence
  Oligonucleotide for detection of SNP TSC0063392
atgtaaggaagtt

SEQ ID NO: 261070 - DNA, 13 bp, Artificial Sequence
  Oligonucleotide for detection of SNP TSC0063392
aacttccttacat

SEQ ID NO: 261071 - DNA, 13 bp, Artificial Sequence
  Oligonucleotide for detection of SNP TSC0063392
atgtaaagaagtt

SEQ ID NO: 261072 - DNA, 13 bp, Artificial Sequence
  Oligonucleotide for detection of SNP TSC0063392
aacttctttacat

SEQ ID NO: 261073 - DNA, 13 bp, Artificial Sequence
  Oligonucleotide for detection of SNP TSC0063392
acgtaaggaagtt

SEQ ID NO: 261074 - DNA, 13 bp, Artificial Sequence
  Oligonucleotide for detection of SNP TSC0063392
aacttccttacgt

SEQ ID NO: 261075 - DNA, 13 bp, Artificial Sequence
  Oligonucleotide for detection of SNP TSC0063392
acgtaaagaagtt

SEQ ID NO: 261076 - DNA, 13 bp, Artificial Sequence
  Oligonucleotide for detection of SNP TSC0063392
aacttctttacgt

SEQ ID NO: 261077 - DNA, 13 bp, Artificial Sequence
  Oligonucleotide for detection of SNP TSC0063394
aaagtatgtgtaa

SEQ ID NO: 261078 - DNA, 13 bp, Artificial Sequence
  Oligonucleotide for detection of SNP TSC0063394
ttacacatacttt

SEQ ID NO: 261079 - DNA, 13 bp, Artificial Sequence
  Oligonucleotide for detection of SNP TSC0063394
aaagtacgtgtaa

SEQ ID NO: 261080 - DNA, 13 bp, Artificial Sequence
  Oligonucleotide for detection of SNP TSC0063394
ttacacgtacttt

SEQ ID NO: 261081 - DNA, 13 bp, Artificial Sequence
  Oligonucleotide for detection of SNP TSC0005947
gtttttttattta

SEQ ID NO: 261082 - DNA, 13 bp, Artificial Sequence
  Oligonucleotide for detection of SNP TSC0005947
taaataaaaaaac

SEQ ID NO: 261083 - DNA, 13 bp, Artificial Sequence
  Oligonucleotide for detection of SNP TSC0005947
tgaataggaaagy

SEQ ID NO: 261084 - DNA, 13 bp, Artificial Sequence
  Oligonucleotide for detection of SNP TSC0005947
rctttcctattca

SEQ ID NO: 261085 - DNA, 13 bp, Artificial Sequence
  Oligonucleotide for detection of SNP TSC0005947
tgaatatgaaagy

SEQ ID NO: 261086 - DNA, 13 bp, Artificial Sequence
  Oligonucleotide for detection of SNP TSC0005947
rctttcatattca

SEQ ID NO: 261087 - DNA, 13 bp, Artificial Sequence
  Oligonucleotide for detection of SNP TSC0005947
tgaatacgaaagy

SEQ ID NO: 261088 - DNA, 13 bp, Artificial Sequence
  Oligonucleotide for detection of SNP TSC0005947
rctttcgtattca

SEQ ID NO: 261089 - DNA, 13 bp, Artificial Sequence
  Oligonucleotide for detection of SNP TSC0063401
gaaatgaaaagtt

SEQ ID NO: 261090 - DNA, 13 bp, Artificial Sequence
  Oligonucleotide for detection of SNP TSC0063401
aacttttcatttc

SEQ ID NO: 261091 - DNA, 13 bp, Artificial Sequence
  Oligonucleotide for detection of SNP TSC0063401
gaaatggaaagtt

SEQ ID NO: 261092 - DNA, 13 bp, Artificial Sequence
  Oligonucleotide for detection of SNP TSC0063401
aactttccatttc

SEQ ID NO: 261093 - DNA, 13 bp, Artificial Sequence
  Oligonucleotide for detection of SNP TSC0063402
tttatgttttttg

SEQ ID NO: 261094 - DNA, 13 bp, Artificial Sequence
  Oligonucleotide for detection of SNP TSC0063402
caaaaaacataaa

SEQ ID NO: 261095 - DNA, 13 bp, Artificial Sequence
  Oligonucleotide for detection of SNP TSC0063402
tagggggtatgaa

SEQ ID NO: 261096 - DNA, 13 bp, Artificial Sequence
  Oligonucleotide for detection of SNP TSC0063402
ttcatacccccta

SEQ ID NO: 261097 - DNA, 13 bp, Artificial Sequence
  Oligonucleotide for detection of SNP TSC0063402
taggggttatgaa

SEQ ID NO: 261098 - DNA, 13 bp, Artificial Sequence
  Oligonucleotide for detection of SNP TSC0063402
ttcataaccccta

SEQ ID NO: 261099 - DNA, 13 bp, Artificial Sequence
  Oligonucleotide for detection of SNP TSC0063405
taagtatgtttgg

SEQ ID NO: 261100 - DNA, 13 bp, Artificial Sequence
  Oligonucleotide for detection of SNP TSC0063405
ccaaacatactta

SEQ ID NO: 261101 - DNA, 13 bp, Artificial Sequence
  Oligonucleotide for detection of SNP TSC0063405
taagtacgtttgg

SEQ ID NO: 261102 - DNA, 13 bp, Artificial Sequence
  Oligonucleotide for detection of SNP TSC0063405
ccaaacgtactta

SEQ ID NO: 261103 - DNA, 13 bp, Artificial Sequence
  Oligonucleotide for detection of SNP TSC0063405
ttagatgtattta

SEQ ID NO: 261104 - DNA, 13 bp, Artificial Sequence
  Oligonucleotide for detection of SNP TSC0063405
taaatacatctaa

SEQ ID NO: 261105 - DNA, 13 bp, Artificial Sequence
  Oligonucleotide for detection of SNP TSC0063405
ttagatatattta

SEQ ID NO: 261106 - DNA, 13 bp, Artificial Sequence
  Oligonucleotide for detection of SNP TSC0063405
taaatatatctaa

SEQ ID NO: 261107 - DNA, 13 bp, Artificial Sequence
  Oligonucleotide for detection of SNP TSC0063405
ttagacgtattta

SEQ ID NO: 261108 - DNA, 13 bp, Artificial Sequence
  Oligonucleotide for detection of SNP TSC0063405
taaatacgtctaa

SEQ ID NO: 261109 - DNA, 13 bp, Artificial Sequence
  Oligonucleotide for detection of SNP TSC0008384
agtgaaaataggt

SEQ ID NO: 261110 - DNA, 13 bp, Artificial Sequence
  Oligonucleotide for detection of SNP TSC0008384
acctattttcact

SEQ ID NO: 261111 - DNA, 13 bp, Artificial Sequence
  Oligonucleotide for detection of SNP TSC0008384
agtgaagataggt

SEQ ID NO: 261112 - DNA, 13 bp, Artificial Sequence
  Oligonucleotide for detection of SNP TSC0008384
acctatcttcact

SEQ ID NO: 261113 - DNA, 13 bp, Artificial Sequence
  Oligonucleotide for detection of SNP TSC0063412
atattgatatatt

SEQ ID NO: 261114 - DNA, 13 bp, Artificial Sequence
  Oligonucleotide for detection of SNP TSC0063412
aatatatcaatat

SEQ ID NO: 261115 - DNA, 13 bp, Artificial Sequence
  Oligonucleotide for detection of SNP TSC0063412
aatatattaatgt

SEQ ID NO: 261116 - DNA, 13 bp, Artificial Sequence
  Oligonucleotide for detection of SNP TSC0063412
acattaatatatt

SEQ ID NO: 261117 - DNA, 13 bp, Artificial Sequence
  Oligonucleotide for detection of SNP TSC0063412
aatataataatgt

SEQ ID NO: 261118 - DNA, 13 bp, Artificial Sequence
  Oligonucleotide for detection of SNP TSC0063412
acattattatatt

SEQ ID NO: 261119 - DNA, 13 bp, Artificial Sequence
  Oligonucleotide for detection of SNP TSC0063413
ttttgaaaaagga

SEQ ID NO: 261120 - DNA, 13 bp, Artificial Sequence
  Oligonucleotide for detection of SNP TSC0063413
tcctttttcaaaa

SEQ ID NO: 261121 - DNA, 13 bp, Artificial Sequence
  Oligonucleotide for detection of SNP TSC0063413
ttttgagaaagga

SEQ ID NO: 261122 - DNA, 13 bp, Artificial Sequence
  Oligonucleotide for detection of SNP TSC0063413
tcctttctcaaaa

SEQ ID NO: 261123 - DNA, 13 bp, Artificial Sequence
  Oligonucleotide for detection of SNP TSC0063414
taggggtatttay

SEQ ID NO: 261124 - DNA, 13 bp, Artificial Sequence
  Oligonucleotide for detection of SNP TSC0063414
rtaaataccccta

SEQ ID NO: 261125 - DNA, 13 bp, Artificial Sequence
  Oligonucleotide for detection of SNP TSC0063414
tagggggatttay

SEQ ID NO: 261126 - DNA, 13 bp, Artificial Sequence
  Oligonucleotide for detection of SNP TSC0063414
rtaaatcccccta

SEQ ID NO: 261127 - DNA, 13 bp, Artificial Sequence
  Oligonucleotide for detection of SNP TSC0063414
gtaaatatttttg

SEQ ID NO: 261128 - DNA, 13 bp, Artificial Sequence
  Oligonucleotide for detection of SNP TSC0063414
caaaaatatttac

SEQ ID NO: 261129 - DNA, 13 bp, Artificial Sequence
  Oligonucleotide for detection of SNP TSC0063414
gtaaatttttttg

SEQ ID NO: 261130 - DNA, 13 bp, Artificial Sequence
  Oligonucleotide for detection of SNP TSC0063414
caaaaaaatttac

SEQ ID NO: 261131 - DNA, 13 bp, Artificial Sequence
  Oligonucleotide for detection of SNP TSC0063415
tttttgtggaagy

SEQ ID NO: 261132 - DNA, 13 bp, Artificial Sequence
  Oligonucleotide for detection of SNP TSC0063415
rcttccacaaaaa

SEQ ID NO: 261133 - DNA, 13 bp, Artificial Sequence
  Oligonucleotide for detection of SNP TSC0063415
tttttggggaagy

SEQ ID NO: 261134 - DNA, 13 bp, Artificial Sequence
  Oligonucleotide for detection of SNP TSC0063415
rcttccccaaaaa

SEQ ID NO: 261135 - DNA, 13 bp, Artificial Sequence
  Oligonucleotide for detection of SNP TSC0063415
gtttttatagaag

SEQ ID NO: 261136 - DNA, 13 bp, Artificial Sequence
  Oligonucleotide for detection of SNP TSC0063415
cttctataaaaac

SEQ ID NO: 261137 - DNA, 13 bp, Artificial Sequence
  Oligonucleotide for detection of SNP TSC0063415
gtttttttagaag

SEQ ID NO: 261138 - DNA, 13 bp, Artificial Sequence
  Oligonucleotide for detection of SNP TSC0063415
cttctaaaaaaac

SEQ ID NO: 261139 - DNA, 13 bp, Artificial Sequence
  Oligonucleotide for detection of SNP TSC0063418
atgatattattat

SEQ ID NO: 261140 - DNA, 13 bp, Artificial Sequence
  Oligonucleotide for detection of SNP TSC0063418
ataataatatcat

SEQ ID NO: 261141 - DNA, 13 bp, Artificial Sequence
  Oligonucleotide for detection of SNP TSC0063418
atgataatattat

SEQ ID NO: 261142 - DNA, 13 bp, Artificial Sequence
  Oligonucleotide for detection of SNP TSC0063418
ataatattatcat

SEQ ID NO: 261143 - DNA, 13 bp, Artificial Sequence
  Oligonucleotide for detection of SNP TSC0063419
taagatatttttt

SEQ ID NO: 261144 - DNA, 13 bp, Artificial Sequence
  Oligonucleotide for detection of SNP TSC0063419
aaaaaatatctta

SEQ ID NO: 261145 - DNA, 13 bp, Artificial Sequence
  Oligonucleotide for detection of SNP TSC0063419
taagatgtttttt

SEQ ID NO: 261146 - DNA, 13 bp, Artificial Sequence
  Oligonucleotide for detection of SNP TSC0063419
aaaaaacatctta

SEQ ID NO: 261147 - DNA, 13 bp, Artificial Sequence
  Oligonucleotide for detection of SNP TSC0063421
ttttaatgtagtg

SEQ ID NO: 261148 - DNA, 13 bp, Artificial Sequence
  Oligonucleotide for detection of SNP TSC0063421
cactacattaaaa

SEQ ID NO: 261149 - DNA, 13 bp, Artificial Sequence
  Oligonucleotide for detection of SNP TSC0063421
ttttaacgtagtg

SEQ ID NO: 261150 - DNA, 13 bp, Artificial Sequence
  Oligonucleotide for detection of SNP TSC0063421
cactacgttaaaa

SEQ ID NO: 261151 - DNA, 13 bp, Artificial Sequence
  Oligonucleotide for detection of SNP TSC0063421
ttttaatgtagcg

SEQ ID NO: 261152 - DNA, 13 bp, Artificial Sequence
  Oligonucleotide for detection of SNP TSC0063421
cgctacattaaaa

SEQ ID NO: 261153 - DNA, 13 bp, Artificial Sequence
  Oligonucleotide for detection of SNP TSC0063421
ttttaacgtagcg

SEQ ID NO: 261154 - DNA, 13 bp, Artificial Sequence
  Oligonucleotide for detection of SNP TSC0063421
cgctacgttaaaa

SEQ ID NO: 261155 - DNA, 13 bp, Artificial Sequence
  Oligonucleotide for detection of SNP TSC0063421
tgttgtgttaaaa

SEQ ID NO: 261156 - DNA, 13 bp, Artificial Sequence
  Oligonucleotide for detection of SNP TSC0063421
ttttaacacaaca

SEQ ID NO: 261157 - DNA, 13 bp, Artificial Sequence
  Oligonucleotide for detection of SNP TSC0063421
tgttgtattaaaa

SEQ ID NO: 261158 - DNA, 13 bp, Artificial Sequence
  Oligonucleotide for detection of SNP TSC0063421
ttttaatacaaca

SEQ ID NO: 261159 - DNA, 13 bp, Artificial Sequence
  Oligonucleotide for detection of SNP TSC0063421
cgttgtgttaaaa

SEQ ID NO: 261160 - DNA, 13 bp, Artificial Sequence
  Oligonucleotide for detection of SNP TSC0063421
ttttaacacaacg

SEQ ID NO: 261161 - DNA, 13 bp, Artificial Sequence
  Oligonucleotide for detection of SNP TSC0063421
cgttgtattaaaa

SEQ ID NO: 261162 - DNA, 13 bp, Artificial Sequence
  Oligonucleotide for detection of SNP TSC0063421
ttttaatacaacg

SEQ ID NO: 261163 - DNA, 13 bp, Artificial Sequence
  Oligonucleotide for detection of SNP TSC0063421
tgttgcgttaaaa

SEQ ID NO: 261164 - DNA, 13 bp, Artificial Sequence
  Oligonucleotide for detection of SNP TSC0063421
ttttaacgcaaca

SEQ ID NO: 261165 - DNA, 13 bp, Artificial Sequence
  Oligonucleotide for detection of SNP TSC0063421
cgttgcgttaaaa

SEQ ID NO: 261166 - DNA, 13 bp, Artificial Sequence
  Oligonucleotide for detection of SNP TSC0063421
ttttaacgcaacg

SEQ ID NO: 261167 - DNA, 13 bp, Artificial Sequence
  Oligonucleotide for detection of SNP TSC0008634
ttgagtaaattay

SEQ ID NO: 261168 - DNA, 13 bp, Artificial Sequence
  Oligonucleotide for detection of SNP TSC0008634
rtaatttactcaa

SEQ ID NO: 261169 - DNA, 13 bp, Artificial Sequence
  Oligonucleotide for detection of SNP TSC0008634
ttgagttaattay

SEQ ID NO: 261170 - DNA, 13 bp, Artificial Sequence
  Oligonucleotide for detection of SNP TSC0008634
rtaattaactcaa

SEQ ID NO: 261171 - DNA, 13 bp, Artificial Sequence
  Oligonucleotide for detection of SNP TSC0008634
tcgagtaaattay

SEQ ID NO: 261172 - DNA, 13 bp, Artificial Sequence
  Oligonucleotide for detection of SNP TSC0008634
rtaatttactcga

SEQ ID NO: 261173 - DNA, 13 bp, Artificial Sequence
  Oligonucleotide for detection of SNP TSC0008634
tcgagttaattay

SEQ ID NO: 261174 - DNA, 13 bp, Artificial Sequence
  Oligonucleotide for detection of SNP TSC0008634
rtaattaactcga

SEQ ID NO: 261175 - DNA, 13 bp, Artificial Sequence
  Oligonucleotide for detection of SNP TSC0008634
gtagtttgtttgg

SEQ ID NO: 261176 - DNA, 13 bp, Artificial Sequence
  Oligonucleotide for detection of SNP TSC0008634
ccaaacaaactac

SEQ ID NO: 261177 - DNA, 13 bp, Artificial Sequence
  Oligonucleotide for detection of SNP TSC0008634
gtagttagtttgg

SEQ ID NO: 261178 - DNA, 13 bp, Artificial Sequence
  Oligonucleotide for detection of SNP TSC0008634
ccaaactaactac

SEQ ID NO: 261179 - DNA, 13 bp, Artificial Sequence
  Oligonucleotide for detection of SNP TSC0008634
gtagtttgttcgg

SEQ ID NO: 261180 - DNA, 13 bp, Artificial Sequence
  Oligonucleotide for detection of SNP TSC0008634
ccgaacaaactac

SEQ ID NO: 261181 - DNA, 13 bp, Artificial Sequence
  Oligonucleotide for detection of SNP TSC0008634
gtagttagttcgg

SEQ ID NO: 261182 - DNA, 13 bp, Artificial Sequence
  Oligonucleotide for detection of SNP TSC0008634
ccgaactaactac

SEQ ID NO: 261183 - DNA, 13 bp, Artificial Sequence
  Oligonucleotide for detection of SNP TSC0006529
agttatatttgga

SEQ ID NO: 261184 - DNA, 13 bp, Artificial Sequence
  Oligonucleotide for detection of SNP TSC0006529
tccaaatataact

SEQ ID NO: 261185 - DNA, 13 bp, Artificial Sequence
  Oligonucleotide for detection of SNP TSC0006529
agttatgtttgga

SEQ ID NO: 261186 - DNA, 13 bp, Artificial Sequence
  Oligonucleotide for detection of SNP TSC0006529
tccaaacataact

SEQ ID NO: 261187 - DNA, 13 bp, Artificial Sequence
  Oligonucleotide for detection of SNP TSC0006529
agttacgtttgga

SEQ ID NO: 261188 - DNA, 13 bp, Artificial Sequence
  Oligonucleotide for detection of SNP TSC0006529
tccaaacgtaact

SEQ ID NO: 261189 - DNA, 13 bp, Artificial Sequence
  Oligonucleotide for detection of SNP TSC0063423
ggaatttttaggt

SEQ ID NO: 261190 - DNA, 13 bp, Artificial Sequence
  Oligonucleotide for detection of SNP TSC0063423
acctaaaaattcc

SEQ ID NO: 261191 - DNA, 13 bp, Artificial Sequence
  Oligonucleotide for detection of SNP TSC0063423
ggaattgttaggt

SEQ ID NO: 261192 - DNA, 13 bp, Artificial Sequence
  Oligonucleotide for detection of SNP TSC0063423
acctaacaattcc

SEQ ID NO: 261193 - DNA, 13 bp, Artificial Sequence
  Oligonucleotide for detection of SNP TSC0063423
atttgggaattty

SEQ ID NO: 261194 - DNA, 13 bp, Artificial Sequence
  Oligonucleotide for detection of SNP TSC0063423
raaattcccaaat

SEQ ID NO: 261195 - DNA, 13 bp, Artificial Sequence
  Oligonucleotide for detection of SNP TSC0063423
atttggtaattty

SEQ ID NO: 261196 - DNA, 13 bp, Artificial Sequence
  Oligonucleotide for detection of SNP TSC0063423
raaattaccaaat

SEQ ID NO: 261197 - DNA, 13 bp, Artificial Sequence
  Oligonucleotide for detection of SNP TSC0063424
ggttggaatttgg

SEQ ID NO: 261198 - DNA, 13 bp, Artificial Sequence
  Oligonucleotide for detection of SNP TSC0063424
ccaaattccaacc

SEQ ID NO: 261199 - DNA, 13 bp, Artificial Sequence
  Oligonucleotide for detection of SNP TSC0063424
ggttgggatttgg

SEQ ID NO: 261200 - DNA, 13 bp, Artificial Sequence
  Oligonucleotide for detection of SNP TSC0063424
ccaaatcccaacc

SEQ ID NO: 261201 - DNA, 13 bp, Artificial Sequence
  Oligonucleotide for detection of SNP TSC0006439
tattttaggagag

SEQ ID NO: 261202 - DNA, 13 bp, Artificial Sequence
  Oligonucleotide for detection of SNP TSC0006439
ctctcctaaaata

SEQ ID NO: 261203 - DNA, 13 bp, Artificial Sequence
  Oligonucleotide for detection of SNP TSC0006439
tattttgggagag

SEQ ID NO: 261204 - DNA, 13 bp, Artificial Sequence
  Oligonucleotide for detection of SNP TSC0006439
ctctcccaaaata

SEQ ID NO: 261205 - DNA, 13 bp, Artificial Sequence
  Oligonucleotide for detection of SNP TSC0006440
ttaaatatgatag

SEQ ID NO: 261206 - DNA, 13 bp, Artificial Sequence
  Oligonucleotide for detection of SNP TSC0006440
ctatcatatttaa

SEQ ID NO: 261207 - DNA, 13 bp, Artificial Sequence
  Oligonucleotide for detection of SNP TSC0006440
ttaaatgtgatag

SEQ ID NO: 261208 - DNA, 13 bp, Artificial Sequence
  Oligonucleotide for detection of SNP TSC0006440
ctatcacatttaa

SEQ ID NO: 261209 - DNA, 13 bp, Artificial Sequence
  Oligonucleotide for detection of SNP TSC0006440
ttaaacgtgatag

SEQ ID NO: 261210 - DNA, 13 bp, Artificial Sequence
  Oligonucleotide for detection of SNP TSC0006440
ctatcacgtttaa

SEQ ID NO: 261211 - DNA, 13 bp, Artificial Sequence
  Oligonucleotide for detection of SNP TSC0005924
taaagtaattgat

SEQ ID NO: 261212 - DNA, 13 bp, Artificial Sequence
  Oligonucleotide for detection of SNP TSC0005924
atcaattacttta

SEQ ID NO: 261213 - DNA, 13 bp, Artificial Sequence
  Oligonucleotide for detection of SNP TSC0005924
taaagtgattgat

SEQ ID NO: 261214 - DNA, 13 bp, Artificial Sequence
  Oligonucleotide for detection of SNP TSC0005924
atcaatcacttta

SEQ ID NO: 261215 - DNA, 13 bp, Artificial Sequence
  Oligonucleotide for detection of SNP TSC0005924
taaagcgattgat

SEQ ID NO: 261216 - DNA, 13 bp, Artificial Sequence
  Oligonucleotide for detection of SNP TSC0005924
atcaatcgcttta

SEQ ID NO: 261217 - DNA, 13 bp, Artificial Sequence
  Oligonucleotide for detection of SNP TSC0005924
attaattgtttta

SEQ ID NO: 261218 - DNA, 13 bp, Artificial Sequence
  Oligonucleotide for detection of SNP TSC0005924
taaaacaattaat

SEQ ID NO: 261219 - DNA, 13 bp, Artificial Sequence
  Oligonucleotide for detection of SNP TSC0005924
attaatcgtttta

SEQ ID NO: 261220 - DNA, 13 bp, Artificial Sequence
  Oligonucleotide for detection of SNP TSC0005924
taaaacgattaat

SEQ ID NO: 261221 - DNA, 13 bp, Artificial Sequence
  Oligonucleotide for detection of SNP TSC0063425
gtaaggaagtata

SEQ ID NO: 261222 - DNA, 13 bp, Artificial Sequence
  Oligonucleotide for detection of SNP TSC0063425
tatacttccttac

SEQ ID NO: 261223 - DNA, 13 bp, Artificial Sequence
  Oligonucleotide for detection of SNP TSC0063427
ttaagatgaatty

SEQ ID NO: 261224 - DNA, 13 bp, Artificial Sequence
  Oligonucleotide for detection of SNP TSC0063427
raattcatcttaa

SEQ ID NO: 261225 - DNA, 13 bp, Artificial Sequence
  Oligonucleotide for detection of SNP TSC0063427
ttaagacgaatty

SEQ ID NO: 261226 - DNA, 13 bp, Artificial Sequence
  Oligonucleotide for detection of SNP TSC0063427
raattcgtcttaa

SEQ ID NO: 261227 - DNA, 13 bp, Artificial Sequence
  Oligonucleotide for detection of SNP TSC0063428
atagagaatgtgg

SEQ ID NO: 261228 - DNA, 13 bp, Artificial Sequence
  Oligonucleotide for detection of SNP TSC0063428
ccacattctctat

SEQ ID NO: 261229 - DNA, 13 bp, Artificial Sequence
  Oligonucleotide for detection of SNP TSC0063428
atagaggatgtgg

SEQ ID NO: 261230 - DNA, 13 bp, Artificial Sequence
  Oligonucleotide for detection of SNP TSC0063428
ccacatcctctat

SEQ ID NO: 261231 - DNA, 13 bp, Artificial Sequence
  Oligonucleotide for detection of SNP TSC0010334
aagatagagttty

SEQ ID NO: 261232 - DNA, 13 bp, Artificial Sequence
  Oligonucleotide for detection of SNP TSC0010334
raaactctatctt

SEQ ID NO: 261233 - DNA, 13 bp, Artificial Sequence
  Oligonucleotide for detection of SNP TSC0010334
aagataaagttty

SEQ ID NO: 261234 - DNA, 13 bp, Artificial Sequence
  Oligonucleotide for detection of SNP TSC0010334
raaactttatctt

SEQ ID NO: 261235 - DNA, 13 bp, Artificial Sequence
  Oligonucleotide for detection of SNP TSC0010336
tatatggttttta

SEQ ID NO: 261236 - DNA, 13 bp, Artificial Sequence
  Oligonucleotide for detection of SNP TSC0010336
taaaaaccatata

SEQ ID NO: 261237 - DNA, 13 bp, Artificial Sequence
  Oligonucleotide for detection of SNP TSC0010336
tatatgattttta

SEQ ID NO: 261238 - DNA, 13 bp, Artificial Sequence
  Oligonucleotide for detection of SNP TSC0010336
taaaaatcatata

SEQ ID NO: 261239 - DNA, 13 bp, Artificial Sequence
  Oligonucleotide for detection of SNP TSC0006554
ttgggtttagtgg

SEQ ID NO: 261240 - DNA, 13 bp, Artificial Sequence
  Oligonucleotide for detection of SNP TSC0006554
ccactaaacccaa

SEQ ID NO: 261241 - DNA, 13 bp, Artificial Sequence
  Oligonucleotide for detection of SNP TSC0005242
ggaggaatttttg

SEQ ID NO: 261242 - DNA, 13 bp, Artificial Sequence
  Oligonucleotide for detection of SNP TSC0005242
caaaaattcctcc

SEQ ID NO: 261243 - DNA, 13 bp, Artificial Sequence
  Oligonucleotide for detection of SNP TSC0005242
ggaggagtttttg

SEQ ID NO: 261244 - DNA, 13 bp, Artificial Sequence
  Oligonucleotide for detection of SNP TSC0005242
caaaaactcctcc

SEQ ID NO: 261245 - DNA, 13 bp, Artificial Sequence
  Oligonucleotide for detection of SNP TSC0063429
tggtggtgtatay

SEQ ID NO: 261246 - DNA, 13 bp, Artificial Sequence
  Oligonucleotide for detection of SNP TSC0063429
rtatacaccacca

SEQ ID NO: 261247 - DNA, 13 bp, Artificial Sequence
  Oligonucleotide for detection of SNP TSC0063429
tggtggcgtatay

SEQ ID NO: 261248 - DNA, 13 bp, Artificial Sequence
  Oligonucleotide for detection of SNP TSC0063429
rtatacgccacca

SEQ ID NO: 261249 - DNA, 13 bp, Artificial Sequence
  Oligonucleotide for detection of SNP TSC0063430
aatttaggttagy

SEQ ID NO: 261250 - DNA, 13 bp, Artificial Sequence
  Oligonucleotide for detection of SNP TSC0063430
rctaacctaaatt

SEQ ID NO: 261251 - DNA, 13 bp, Artificial Sequence
  Oligonucleotide for detection of SNP TSC0063430
aatttaagttagy

SEQ ID NO: 261252 - DNA, 13 bp, Artificial Sequence
  Oligonucleotide for detection of SNP TSC0063430
rctaacttaaatt

SEQ ID NO: 261253 - DNA, 13 bp, Artificial Sequence
  Oligonucleotide for detection of SNP TSC0063431
aaggtaaaggagt

SEQ ID NO: 261254 - DNA, 13 bp, Artificial Sequence
  Oligonucleotide for detection of SNP TSC0063431
actcctttacctt

SEQ ID NO: 261255 - DNA, 13 bp, Artificial Sequence
  Oligonucleotide for detection of SNP TSC0063431
aaggtataggagt

SEQ ID NO: 261256 - DNA, 13 bp, Artificial Sequence
  Oligonucleotide for detection of SNP TSC0063431
actcctatacctt

SEQ ID NO: 261257 - DNA, 13 bp, Artificial Sequence
  Oligonucleotide for detection of SNP TSC0063432
agaaaaatgtagt

SEQ ID NO: 261258 - DNA, 13 bp, Artificial Sequence
  Oligonucleotide for detection of SNP TSC0063432
actacatttttct

SEQ ID NO: 261259 - DNA, 13 bp, Artificial Sequence
  Oligonucleotide for detection of SNP TSC0063432
agaaaagtgtagt

SEQ ID NO: 261260 - DNA, 13 bp, Artificial Sequence
  Oligonucleotide for detection of SNP TSC0063432
actacacttttct

SEQ ID NO: 261261 - DNA, 13 bp, Artificial Sequence
  Oligonucleotide for detection of SNP TSC0063435
tgatgttggtttt

SEQ ID NO: 261262 - DNA, 13 bp, Artificial Sequence
  Oligonucleotide for detection of SNP TSC0063435
aaaaccaacatca

SEQ ID NO: 261263 - DNA, 13 bp, Artificial Sequence
  Oligonucleotide for detection of SNP TSC0063435
cgatgttggtttt

SEQ ID NO: 261264 - DNA, 13 bp, Artificial Sequence
  Oligonucleotide for detection of SNP TSC0063435
aaaaccaacatcg

SEQ ID NO: 261265 - DNA, 13 bp, Artificial Sequence
  Oligonucleotide for detection of SNP TSC0063435
tgatgtcggtttt

SEQ ID NO: 261266 - DNA, 13 bp, Artificial Sequence
  Oligonucleotide for detection of SNP TSC0063435
aaaaccgacatca

SEQ ID NO: 261267 - DNA, 13 bp, Artificial Sequence
  Oligonucleotide for detection of SNP TSC0063435
cgatgtcggtttt

SEQ ID NO: 261268 - DNA, 13 bp, Artificial Sequence
  Oligonucleotide for detection of SNP TSC0063435
aaaaccgacatcg

SEQ ID NO: 261269 - DNA, 13 bp, Artificial Sequence
  Oligonucleotide for detection of SNP TSC0063435
aagattggtattg

SEQ ID NO: 261270 - DNA, 13 bp, Artificial Sequence
  Oligonucleotide for detection of SNP TSC0063435
caataccaatctt

SEQ ID NO: 261271 - DNA, 13 bp, Artificial Sequence
  Oligonucleotide for detection of SNP TSC0063435
aagattagtattg

SEQ ID NO: 261272 - DNA, 13 bp, Artificial Sequence
  Oligonucleotide for detection of SNP TSC0063435
caatactaatctt

SEQ ID NO: 261273 - DNA, 13 bp, Artificial Sequence
  Oligonucleotide for detection of SNP TSC0063435
aagatcggtattg

SEQ ID NO: 261274 - DNA, 13 bp, Artificial Sequence
  Oligonucleotide for detection of SNP TSC0063435
caataccgatctt

SEQ ID NO: 261275 - DNA, 13 bp, Artificial Sequence
  Oligonucleotide for detection of SNP TSC0063435
aagattagtatcg

SEQ ID NO: 261276 - DNA, 13 bp, Artificial Sequence
  Oligonucleotide for detection of SNP TSC0063435
cgatactaatctt

SEQ ID NO: 261277 - DNA, 13 bp, Artificial Sequence
  Oligonucleotide for detection of SNP TSC0063435
aagattggtatcg

SEQ ID NO: 261278 - DNA, 13 bp, Artificial Sequence
  Oligonucleotide for detection of SNP TSC0063435
cgataccaatctt

SEQ ID NO: 261279 - DNA, 13 bp, Artificial Sequence
  Oligonucleotide for detection of SNP TSC0063435
aagatcggtatcg

SEQ ID NO: 261280 - DNA, 13 bp, Artificial Sequence
  Oligonucleotide for detection of SNP TSC0063435
cgataccgatctt

SEQ ID NO: 261281 - DNA, 13 bp, Artificial Sequence
  Oligonucleotide for detection of SNP TSC0063436
atttttggagagg

SEQ ID NO: 261282 - DNA, 13 bp, Artificial Sequence
  Oligonucleotide for detection of SNP TSC0063436
cctctccaaaaat

SEQ ID NO: 261283 - DNA, 13 bp, Artificial Sequence
  Oligonucleotide for detection of SNP TSC0063436
atttttagagagg

SEQ ID NO: 261284 - DNA, 13 bp, Artificial Sequence
  Oligonucleotide for detection of SNP TSC0063436
cctctctaaaaat

SEQ ID NO: 261285 - DNA, 13 bp, Artificial Sequence
  Oligonucleotide for detection of SNP TSC0063436
attttcggagagg

SEQ ID NO: 261286 - DNA, 13 bp, Artificial Sequence
  Oligonucleotide for detection of SNP TSC0063436
cctctccgaaaat

SEQ ID NO: 261287 - DNA, 13 bp, Artificial Sequence
  Oligonucleotide for detection of SNP TSC0010533
atattgagtaatt

SEQ ID NO: 261288 - DNA, 13 bp, Artificial Sequence
  Oligonucleotide for detection of SNP TSC0010533
aattactcaatat

SEQ ID NO: 261289 - DNA, 13 bp, Artificial Sequence
  Oligonucleotide for detection of SNP TSC0010533
atattgggtaatt

SEQ ID NO: 261290 - DNA, 13 bp, Artificial Sequence
  Oligonucleotide for detection of SNP TSC0010533
aattacccaatat

SEQ ID NO: 261291 - DNA, 13 bp, Artificial Sequence
  Oligonucleotide for detection of SNP TSC0063438
ggaaattggtata

SEQ ID NO: 261292 - DNA, 13 bp, Artificial Sequence
  Oligonucleotide for detection of SNP TSC0063438
tataccaatttcc

SEQ ID NO: 261293 - DNA, 13 bp, Artificial Sequence
  Oligonucleotide for detection of SNP TSC0063438
ggaaatcggtata

SEQ ID NO: 261294 - DNA, 13 bp, Artificial Sequence
  Oligonucleotide for detection of SNP TSC0063438
tataccgatttcc

SEQ ID NO: 261295 - DNA, 13 bp, Artificial Sequence
  Oligonucleotide for detection of SNP TSC0063438
tatattgatttty

SEQ ID NO: 261296 - DNA, 13 bp, Artificial Sequence
  Oligonucleotide for detection of SNP TSC0063438
raaaatcaatata

SEQ ID NO: 261297 - DNA, 13 bp, Artificial Sequence
  Oligonucleotide for detection of SNP TSC0063438
tatattaatttty

SEQ ID NO: 261298 - DNA, 13 bp, Artificial Sequence
  Oligonucleotide for detection of SNP TSC0063438
raaaattaatata

SEQ ID NO: 261299 - DNA, 13 bp, Artificial Sequence
  Oligonucleotide for detection of SNP TSC0063438
tatatcgatttty

SEQ ID NO: 261300 - DNA, 13 bp, Artificial Sequence
  Oligonucleotide for detection of SNP TSC0063438
raaaatcgatata

SEQ ID NO: 261301 - DNA, 13 bp, Artificial Sequence
  Oligonucleotide for detection of SNP TSC0063439
taaggaataagtt

SEQ ID NO: 261302 - DNA, 13 bp, Artificial Sequence
  Oligonucleotide for detection of SNP TSC0063439
aacttattcctta

SEQ ID NO: 261303 - DNA, 13 bp, Artificial Sequence
  Oligonucleotide for detection of SNP TSC0063439
taaggagtaagtt

SEQ ID NO: 261304 - DNA, 13 bp, Artificial Sequence
  Oligonucleotide for detection of SNP TSC0063439
aacttactcctta

SEQ ID NO: 261305 - DNA, 13 bp, Artificial Sequence
  Oligonucleotide for detection of SNP TSC0063440
tttagttgtatta

SEQ ID NO: 261306 - DNA, 13 bp, Artificial Sequence
  Oligonucleotide for detection of SNP TSC0063440
taatacaactaaa

SEQ ID NO: 261307 - DNA, 13 bp, Artificial Sequence
  Oligonucleotide for detection of SNP TSC0063440
tttagtcgtatta

SEQ ID NO: 261308 - DNA, 13 bp, Artificial Sequence
  Oligonucleotide for detection of SNP TSC0063440
taatacgactaaa

SEQ ID NO: 261309 - DNA, 13 bp, Artificial Sequence
  Oligonucleotide for detection of SNP TSC0063440
tgatgtggttgaa

SEQ ID NO: 261310 - DNA, 13 bp, Artificial Sequence
  Oligonucleotide for detection of SNP TSC0063440
ttcaaccacatca

SEQ ID NO: 261311 - DNA, 13 bp, Artificial Sequence
  Oligonucleotide for detection of SNP TSC0063440
tgatgtagttgaa

SEQ ID NO: 261312 - DNA, 13 bp, Artificial Sequence
  Oligonucleotide for detection of SNP TSC0063440
ttcaactacatca

SEQ ID NO: 261313 - DNA, 13 bp, Artificial Sequence
  Oligonucleotide for detection of SNP TSC0063440
tgatgcggttgaa

SEQ ID NO: 261314 - DNA, 13 bp, Artificial Sequence
  Oligonucleotide for detection of SNP TSC0063440
ttcaaccgcatca

SEQ ID NO: 261315 - DNA, 13 bp, Artificial Sequence
  Oligonucleotide for detection of SNP TSC0005019
aaattaggtaatg

SEQ ID NO: 261316 - DNA, 13 bp, Artificial Sequence
  Oligonucleotide for detection of SNP TSC0005019
cattacctaattt

SEQ ID NO: 261317 - DNA, 13 bp, Artificial Sequence
  Oligonucleotide for detection of SNP TSC0005019
aaattaagtaatg

SEQ ID NO: 261318 - DNA, 13 bp, Artificial Sequence
  Oligonucleotide for detection of SNP TSC0005019
cattacttaattt

SEQ ID NO: 261319 - DNA, 13 bp, Artificial Sequence
  Oligonucleotide for detection of SNP TSC0005020
tgagtgataaaty

SEQ ID NO: 261320 - DNA, 13 bp, Artificial Sequence
  Oligonucleotide for detection of SNP TSC0005020
ratttatcactca

SEQ ID NO: 261321 - DNA, 13 bp, Artificial Sequence
  Oligonucleotide for detection of SNP TSC0005020
tgagtggtaaaty

SEQ ID NO: 261322 - DNA, 13 bp, Artificial Sequence
  Oligonucleotide for detection of SNP TSC0005020
ratttaccactca

SEQ ID NO: 261323 - DNA, 13 bp, Artificial Sequence
  Oligonucleotide for detection of SNP TSC0005021
ggaatggttatay

SEQ ID NO: 261324 - DNA, 13 bp, Artificial Sequence
  Oligonucleotide for detection of SNP TSC0005021
rtataaccattcc

SEQ ID NO: 261325 - DNA, 13 bp, Artificial Sequence
  Oligonucleotide for detection of SNP TSC0005021
ggaatgattatay

SEQ ID NO: 261326 - DNA, 13 bp, Artificial Sequence
  Oligonucleotide for detection of SNP TSC0005021
rtataatcattcc

SEQ ID NO: 261327 - DNA, 13 bp, Artificial Sequence
  Oligonucleotide for detection of SNP TSC0063441
gaaaatgagaaaa

SEQ ID NO: 261328 - DNA, 13 bp, Artificial Sequence
  Oligonucleotide for detection of SNP TSC0063441
ttttctcattttc

SEQ ID NO: 261329 - DNA, 13 bp, Artificial Sequence
  Oligonucleotide for detection of SNP TSC0063441
gaaaataagaaaa

SEQ ID NO: 261330 - DNA, 13 bp, Artificial Sequence
  Oligonucleotide for detection of SNP TSC0063441
ttttcttattttc

SEQ ID NO: 261331 - DNA, 13 bp, Artificial Sequence
  Oligonucleotide for detection of SNP TSC0063441
gaaaacgagaaaa

SEQ ID NO: 261332 - DNA, 13 bp, Artificial Sequence
  Oligonucleotide for detection of SNP TSC0063441
ttttctcgttttc

SEQ ID NO: 261333 - DNA, 13 bp, Artificial Sequence
  Oligonucleotide for detection of SNP TSC0063442
ttaggtatgtttt

SEQ ID NO: 261334 - DNA, 13 bp, Artificial Sequence
  Oligonucleotide for detection of SNP TSC0063442
aaaacatacctaa

SEQ ID NO: 261335 - DNA, 13 bp, Artificial Sequence
  Oligonucleotide for detection of SNP TSC0063442
ttaggtttgtttt

SEQ ID NO: 261336 - DNA, 13 bp, Artificial Sequence
  Oligonucleotide for detection of SNP TSC0063442
aaaacaaacctaa

SEQ ID NO: 261337 - DNA, 13 bp, Artificial Sequence
  Oligonucleotide for detection of SNP TSC0063442
aagatatatttaa

SEQ ID NO: 261338 - DNA, 13 bp, Artificial Sequence
  Oligonucleotide for detection of SNP TSC0063442
ttaaatatatctt

SEQ ID NO: 261339 - DNA, 13 bp, Artificial Sequence
  Oligonucleotide for detection of SNP TSC0063442
aagatagatttaa

SEQ ID NO: 261340 - DNA, 13 bp, Artificial Sequence
  Oligonucleotide for detection of SNP TSC0063442
ttaaatctatctt

SEQ ID NO: 261341 - DNA, 13 bp, Artificial Sequence
  Oligonucleotide for detection of SNP TSC0004886
agttatgtagttg

SEQ ID NO: 261342 - DNA, 13 bp, Artificial Sequence
  Oligonucleotide for detection of SNP TSC0004886
caactacataact

SEQ ID NO: 261343 - DNA, 13 bp, Artificial Sequence
  Oligonucleotide for detection of SNP TSC0004886
agttatatagttg

SEQ ID NO: 261344 - DNA, 13 bp, Artificial Sequence
  Oligonucleotide for detection of SNP TSC0004886
caactatataact

SEQ ID NO: 261345 - DNA, 13 bp, Artificial Sequence
  Oligonucleotide for detection of SNP TSC0004887
ataatgagaatga

SEQ ID NO: 261346 - DNA, 13 bp, Artificial Sequence
  Oligonucleotide for detection of SNP TSC0004887
tcattctcattat

SEQ ID NO: 261347 - DNA, 13 bp, Artificial Sequence
  Oligonucleotide for detection of SNP TSC0004887
ataatgtgaatga

SEQ ID NO: 261348 - DNA, 13 bp, Artificial Sequence
  Oligonucleotide for detection of SNP TSC0004887
tcattcacattat

SEQ ID NO: 261349 - DNA, 13 bp, Artificial Sequence
  Oligonucleotide for detection of SNP TSC0004887
ataatgagaacga

SEQ ID NO: 261350 - DNA, 13 bp, Artificial Sequence
  Oligonucleotide for detection of SNP TSC0004887
tcgttctcattat

SEQ ID NO: 261351 - DNA, 13 bp, Artificial Sequence
  Oligonucleotide for detection of SNP TSC0004887
ataatgtgaacga

SEQ ID NO: 261352 - DNA, 13 bp, Artificial Sequence
  Oligonucleotide for detection of SNP TSC0004887
tcgttcacattat

SEQ ID NO: 261353 - DNA, 13 bp, Artificial Sequence
  Oligonucleotide for detection of SNP TSC0004887
tcgtttttattat

SEQ ID NO: 261354 - DNA, 13 bp, Artificial Sequence
  Oligonucleotide for detection of SNP TSC0004887
ataataaaaacga

SEQ ID NO: 261355 - DNA, 13 bp, Artificial Sequence
  Oligonucleotide for detection of SNP TSC0004887
tcgtttatattat

SEQ ID NO: 261356 - DNA, 13 bp, Artificial Sequence
  Oligonucleotide for detection of SNP TSC0004887
ataatataaacga

SEQ ID NO: 261357 - DNA, 13 bp, Artificial Sequence
  Oligonucleotide for detection of SNP TSC0004888
gtataaagtggag

SEQ ID NO: 261358 - DNA, 13 bp, Artificial Sequence
  Oligonucleotide for detection of SNP TSC0004888
ctccactttatac

SEQ ID NO: 261359 - DNA, 13 bp, Artificial Sequence
  Oligonucleotide for detection of SNP TSC0004888
gtataatgtggag

SEQ ID NO: 261360 - DNA, 13 bp, Artificial Sequence
  Oligonucleotide for detection of SNP TSC0004888
ctccacattatac

SEQ ID NO: 261361 - DNA, 13 bp, Artificial Sequence
  Oligonucleotide for detection of SNP TSC0063443
ttttggggattag

SEQ ID NO: 261362 - DNA, 13 bp, Artificial Sequence
  Oligonucleotide for detection of SNP TSC0063443
ctaatccccaaaa

SEQ ID NO: 261363 - DNA, 13 bp, Artificial Sequence
  Oligonucleotide for detection of SNP TSC0063443
ttttggagattag

SEQ ID NO: 261364 - DNA, 13 bp, Artificial Sequence
  Oligonucleotide for detection of SNP TSC0063443
ctaatctccaaaa

SEQ ID NO: 261365 - DNA, 13 bp, Artificial Sequence
  Oligonucleotide for detection of SNP TSC0063444
gtaaataggataa

SEQ ID NO: 261366 - DNA, 13 bp, Artificial Sequence
  Oligonucleotide for detection of SNP TSC0063444
ttatcctatttac

SEQ ID NO: 261367 - DNA, 13 bp, Artificial Sequence
  Oligonucleotide for detection of SNP TSC0063444
gtaaattggataa

SEQ ID NO: 261368 - DNA, 13 bp, Artificial Sequence
  Oligonucleotide for detection of SNP TSC0063444
ttatccaatttac

SEQ ID NO: 261369 - DNA, 13 bp, Artificial Sequence
  Oligonucleotide for detection of SNP TSC0063444
gtaaatcggataa

SEQ ID NO: 261370 - DNA, 13 bp, Artificial Sequence
  Oligonucleotide for detection of SNP TSC0063444
ttatccgatttac

SEQ ID NO: 261371 - DNA, 13 bp, Artificial Sequence
  Oligonucleotide for detection of SNP TSC0063444
ttatttggtttay

SEQ ID NO: 261372 - DNA, 13 bp, Artificial Sequence
  Oligonucleotide for detection of SNP TSC0063444
rtaaaccaaataa

SEQ ID NO: 261373 - DNA, 13 bp, Artificial Sequence
  Oligonucleotide for detection of SNP TSC0063444
ttattcggtttay

SEQ ID NO: 261374 - DNA, 13 bp, Artificial Sequence
  Oligonucleotide for detection of SNP TSC0063444
rtaaaccgaataa

SEQ ID NO: 261375 - DNA, 13 bp, Artificial Sequence
  Oligonucleotide for detection of SNP TSC0063445
gaggtatggttty

SEQ ID NO: 261376 - DNA, 13 bp, Artificial Sequence
  Oligonucleotide for detection of SNP TSC0063445
raaaccatacctc

SEQ ID NO: 261377 - DNA, 13 bp, Artificial Sequence
  Oligonucleotide for detection of SNP TSC0063445
gaggtacggttty

SEQ ID NO: 261378 - DNA, 13 bp, Artificial Sequence
  Oligonucleotide for detection of SNP TSC0063445
raaaccgtacctc

SEQ ID NO: 261379 - DNA, 13 bp, Artificial Sequence
  Oligonucleotide for detection of SNP TSC0063445
gggattgtattty

SEQ ID NO: 261380 - DNA, 13 bp, Artificial Sequence
  Oligonucleotide for detection of SNP TSC0063445
raaatacaatccc

SEQ ID NO: 261381 - DNA, 13 bp, Artificial Sequence
  Oligonucleotide for detection of SNP TSC0063445
gggattatattty

SEQ ID NO: 261382 - DNA, 13 bp, Artificial Sequence
  Oligonucleotide for detection of SNP TSC0063445
raaatataatccc

SEQ ID NO: 261383 - DNA, 13 bp, Artificial Sequence
  Oligonucleotide for detection of SNP TSC0063445
gggatcgtattty

SEQ ID NO: 261384 - DNA, 13 bp, Artificial Sequence
  Oligonucleotide for detection of SNP TSC0063445
raaatacgatccc

SEQ ID NO: 261385 - DNA, 13 bp, Artificial Sequence
  Oligonucleotide for detection of SNP TSC0063446
taatgtattgtat

SEQ ID NO: 261386 - DNA, 13 bp, Artificial Sequence
  Oligonucleotide for detection of SNP TSC0063446
atacaatacatta

SEQ ID NO: 261387 - DNA, 13 bp, Artificial Sequence
  Oligonucleotide for detection of SNP TSC0063446
taatgtgttgtat

SEQ ID NO: 261388 - DNA, 13 bp, Artificial Sequence
  Oligonucleotide for detection of SNP TSC0063446
atacaacacatta

SEQ ID NO: 261389 - DNA, 13 bp, Artificial Sequence
  Oligonucleotide for detection of SNP TSC0063446
taatgcgttgtat

SEQ ID NO: 261390 - DNA, 13 bp, Artificial Sequence
  Oligonucleotide for detection of SNP TSC0063446
atacaacgcatta

SEQ ID NO: 261391 - DNA, 13 bp, Artificial Sequence
  Oligonucleotide for detection of SNP TSC0063448
aatgttaaatgty

SEQ ID NO: 261392 - DNA, 13 bp, Artificial Sequence
  Oligonucleotide for detection of SNP TSC0063448
racatttaacatt

SEQ ID NO: 261393 - DNA, 13 bp, Artificial Sequence
  Oligonucleotide for detection of SNP TSC0063448
aatgtttaatgty

SEQ ID NO: 261394 - DNA, 13 bp, Artificial Sequence
  Oligonucleotide for detection of SNP TSC0063448
racattaaacatt

SEQ ID NO: 261395 - DNA, 13 bp, Artificial Sequence
  Oligonucleotide for detection of SNP TSC0004901
tatagtattaagg

SEQ ID NO: 261396 - DNA, 13 bp, Artificial Sequence
  Oligonucleotide for detection of SNP TSC0004901
ccttaatactata

SEQ ID NO: 261397 - DNA, 13 bp, Artificial Sequence
  Oligonucleotide for detection of SNP TSC0004901
tatagtgttaagg

SEQ ID NO: 261398 - DNA, 13 bp, Artificial Sequence
  Oligonucleotide for detection of SNP TSC0004901
ccttaacactata

SEQ ID NO: 261399 - DNA, 13 bp, Artificial Sequence
  Oligonucleotide for detection of SNP TSC0004901
tatagcgttaagg

SEQ ID NO: 261400 - DNA, 13 bp, Artificial Sequence
  Oligonucleotide for detection of SNP TSC0004901
ccttaacgctata

SEQ ID NO: 261401 - DNA, 13 bp, Artificial Sequence
  Oligonucleotide for detection of SNP TSC0004901
ttttgatgttgtg

SEQ ID NO: 261402 - DNA, 13 bp, Artificial Sequence
  Oligonucleotide for detection of SNP TSC0004901
cacaacatcaaaa

SEQ ID NO: 261403 - DNA, 13 bp, Artificial Sequence
  Oligonucleotide for detection of SNP TSC0004901
ttttgacgttgtg

SEQ ID NO: 261404 - DNA, 13 bp, Artificial Sequence
  Oligonucleotide for detection of SNP TSC0004901
cacaacgtcaaaa

SEQ ID NO: 261405 - DNA, 13 bp, Artificial Sequence
  Oligonucleotide for detection of SNP TSC0004902
taaggttggaaat

SEQ ID NO: 261406 - DNA, 13 bp, Artificial Sequence
  Oligonucleotide for detection of SNP TSC0004902
atttccaacctta

SEQ ID NO: 261407 - DNA, 13 bp, Artificial Sequence
  Oligonucleotide for detection of SNP TSC0004902
taaggtcggaaat

SEQ ID NO: 261408 - DNA, 13 bp, Artificial Sequence
  Oligonucleotide for detection of SNP TSC0004902
atttccgacctta

SEQ ID NO: 261409 - DNA, 13 bp, Artificial Sequence
  Oligonucleotide for detection of SNP TSC0004902
attttcgattttg

SEQ ID NO: 261410 - DNA, 13 bp, Artificial Sequence
  Oligonucleotide for detection of SNP TSC0004902
caaaatcgaaaat

SEQ ID NO: 261411 - DNA, 13 bp, Artificial Sequence
  Oligonucleotide for detection of SNP TSC0063451
atgtaggtttaty

SEQ ID NO: 261412 - DNA, 13 bp, Artificial Sequence
  Oligonucleotide for detection of SNP TSC0063451
rataaacctacat

SEQ ID NO: 261413 - DNA, 13 bp, Artificial Sequence
  Oligonucleotide for detection of SNP TSC0063451
atgtagatttaty

SEQ ID NO: 261414 - DNA, 13 bp, Artificial Sequence
  Oligonucleotide for detection of SNP TSC0063451
rataaatctacat

SEQ ID NO: 261415 - DNA, 13 bp, Artificial Sequence
  Oligonucleotide for detection of SNP TSC0063453
atagattgtaagy

SEQ ID NO: 261416 - DNA, 13 bp, Artificial Sequence
  Oligonucleotide for detection of SNP TSC0063453
rcttacaatctat

SEQ ID NO: 261417 - DNA, 13 bp, Artificial Sequence
  Oligonucleotide for detection of SNP TSC0063453
atagatcgtaagy

SEQ ID NO: 261418 - DNA, 13 bp, Artificial Sequence
  Oligonucleotide for detection of SNP TSC0063453
rcttacgatctat

SEQ ID NO: 261419 - DNA, 13 bp, Artificial Sequence
  Oligonucleotide for detection of SNP TSC0063453
gtttatggtttat

SEQ ID NO: 261420 - DNA, 13 bp, Artificial Sequence
  Oligonucleotide for detection of SNP TSC0063453
ataaaccataaac

SEQ ID NO: 261421 - DNA, 13 bp, Artificial Sequence
  Oligonucleotide for detection of SNP TSC0063453
gtttatagtttat

SEQ ID NO: 261422 - DNA, 13 bp, Artificial Sequence
  Oligonucleotide for detection of SNP TSC0063453
ataaactataaac

SEQ ID NO: 261423 - DNA, 13 bp, Artificial Sequence
  Oligonucleotide for detection of SNP TSC0063453
gtttacggtttat

SEQ ID NO: 261424 - DNA, 13 bp, Artificial Sequence
  Oligonucleotide for detection of SNP TSC0063453
ataaaccgtaaac

SEQ ID NO: 261425 - DNA, 13 bp, Artificial Sequence
  Oligonucleotide for detection of SNP TSC0063454
gtaaattattata

SEQ ID NO: 261426 - DNA, 13 bp, Artificial Sequence
  Oligonucleotide for detection of SNP TSC0063454
tataataatttac

SEQ ID NO: 261427 - DNA, 13 bp, Artificial Sequence
  Oligonucleotide for detection of SNP TSC0063454
gtaaatgattata

SEQ ID NO: 261428 - DNA, 13 bp, Artificial Sequence
  Oligonucleotide for detection of SNP TSC0063454
tataatcatttac

SEQ ID NO: 261429 - DNA, 13 bp, Artificial Sequence
  Oligonucleotide for detection of SNP TSC0063454
tataataatttay

SEQ ID NO: 261430 - DNA, 13 bp, Artificial Sequence
  Oligonucleotide for detection of SNP TSC0063454
rtaaattattata

SEQ ID NO: 261431 - DNA, 13 bp, Artificial Sequence
  Oligonucleotide for detection of SNP TSC0063454
tataattatttay

SEQ ID NO: 261432 - DNA, 13 bp, Artificial Sequence
  Oligonucleotide for detection of SNP TSC0063454
rtaaataattata

SEQ ID NO: 261433 - DNA, 13 bp, Artificial Sequence
  Oligonucleotide for detection of SNP TSC0063455
atataaataataa

SEQ ID NO: 261434 - DNA, 13 bp, Artificial Sequence
  Oligonucleotide for detection of SNP TSC0063455
ttattatttatat

SEQ ID NO: 261435 - DNA, 13 bp, Artificial Sequence
  Oligonucleotide for detection of SNP TSC0063455
atataagtaataa

SEQ ID NO: 261436 - DNA, 13 bp, Artificial Sequence
  Oligonucleotide for detection of SNP TSC0063455
ttattacttatat

SEQ ID NO: 261437 - DNA, 13 bp, Artificial Sequence
  Oligonucleotide for detection of SNP TSC0004743
atgagaatataty

SEQ ID NO: 261438 - DNA, 13 bp, Artificial Sequence
  Oligonucleotide for detection of SNP TSC0004743
ratatattctcat

SEQ ID NO: 261439 - DNA, 13 bp, Artificial Sequence
  Oligonucleotide for detection of SNP TSC0004743
atgagattataty

SEQ ID NO: 261440 - DNA, 13 bp, Artificial Sequence
  Oligonucleotide for detection of SNP TSC0004743
ratataatctcat

SEQ ID NO: 261441 - DNA, 13 bp, Artificial Sequence
  Oligonucleotide for detection of SNP TSC0004743
ggtgtatttttat

SEQ ID NO: 261442 - DNA, 13 bp, Artificial Sequence
  Oligonucleotide for detection of SNP TSC0004743
ataaaaatacacc

SEQ ID NO: 261443 - DNA, 13 bp, Artificial Sequence
  Oligonucleotide for detection of SNP TSC0004743
ggtgtaattttat

SEQ ID NO: 261444 - DNA, 13 bp, Artificial Sequence
  Oligonucleotide for detection of SNP TSC0004743
ataaaattacacc

SEQ ID NO: 261445 - DNA, 13 bp, Artificial Sequence
  Oligonucleotide for detection of SNP TSC0004809
ttatttaattgty

SEQ ID NO: 261446 - DNA, 13 bp, Artificial Sequence
  Oligonucleotide for detection of SNP TSC0004809
racaattaaataa

SEQ ID NO: 261447 - DNA, 13 bp, Artificial Sequence
  Oligonucleotide for detection of SNP TSC0004809
ttatttgattgty

SEQ ID NO: 261448 - DNA, 13 bp, Artificial Sequence
  Oligonucleotide for detection of SNP TSC0004809
racaatcaaataa

SEQ ID NO: 261449 - DNA, 13 bp, Artificial Sequence
  Oligonucleotide for detection of SNP TSC0004809
ttatttaatcgty

SEQ ID NO: 261450 - DNA, 13 bp, Artificial Sequence
  Oligonucleotide for detection of SNP TSC0004809
racgattaaataa

SEQ ID NO: 261451 - DNA, 13 bp, Artificial Sequence
  Oligonucleotide for detection of SNP TSC0004809
ttatttgatcgty

SEQ ID NO: 261452 - DNA, 13 bp, Artificial Sequence
  Oligonucleotide for detection of SNP TSC0004809
racgatcaaataa

SEQ ID NO: 261453 - DNA, 13 bp, Artificial Sequence
  Oligonucleotide for detection of SNP TSC0007113
agttaggttaagt

SEQ ID NO: 261454 - DNA, 13 bp, Artificial Sequence
  Oligonucleotide for detection of SNP TSC0007113
acttaacctaact

SEQ ID NO: 261455 - DNA, 13 bp, Artificial Sequence
  Oligonucleotide for detection of SNP TSC0007113
agttagattaagt

SEQ ID NO: 261456 - DNA, 13 bp, Artificial Sequence
  Oligonucleotide for detection of SNP TSC0007113
acttaatctaact

SEQ ID NO: 261457 - DNA, 13 bp, Artificial Sequence
  Oligonucleotide for detection of SNP TSC0000849
aatatgtgtgtta

SEQ ID NO: 261458 - DNA, 13 bp, Artificial Sequence
  Oligonucleotide for detection of SNP TSC0000849
taacacacatatt

SEQ ID NO: 261459 - DNA, 13 bp, Artificial Sequence
  Oligonucleotide for detection of SNP TSC0000849
aatatgcgtgtta

SEQ ID NO: 261460 - DNA, 13 bp, Artificial Sequence
  Oligonucleotide for detection of SNP TSC0000849
taacacgcatatt

SEQ ID NO: 261461 - DNA, 13 bp, Artificial Sequence
  Oligonucleotide for detection of SNP TSC0000849
taatatgtatatt

SEQ ID NO: 261462 - DNA, 13 bp, Artificial Sequence
  Oligonucleotide for detection of SNP TSC0000849
aatatacatatta

SEQ ID NO: 261463 - DNA, 13 bp, Artificial Sequence
  Oligonucleotide for detection of SNP TSC0000849
taatatatatatt

SEQ ID NO: 261464 - DNA, 13 bp, Artificial Sequence
  Oligonucleotide for detection of SNP TSC0000849
aatatatatatta

SEQ ID NO: 261465 - DNA, 13 bp, Artificial Sequence
  Oligonucleotide for detection of SNP TSC0000849
taatacgtatatt

SEQ ID NO: 261466 - DNA, 13 bp, Artificial Sequence
  Oligonucleotide for detection of SNP TSC0000849
aatatacgtatta

SEQ ID NO: 261467 - DNA, 13 bp, Artificial Sequence
  Oligonucleotide for detection of SNP TSC0000139
gttattgtaattg

SEQ ID NO: 261468 - DNA, 13 bp, Artificial Sequence
  Oligonucleotide for detection of SNP TSC0000139
caattacaataac

SEQ ID NO: 261469 - DNA, 13 bp, Artificial Sequence
  Oligonucleotide for detection of SNP TSC0000139
gttattataattg

SEQ ID NO: 261470 - DNA, 13 bp, Artificial Sequence
  Oligonucleotide for detection of SNP TSC0000139
caattataataac

SEQ ID NO: 261471 - DNA, 13 bp, Artificial Sequence
  Oligonucleotide for detection of SNP TSC0000139
gttattgtaatcg

SEQ ID NO: 261472 - DNA, 13 bp, Artificial Sequence
  Oligonucleotide for detection of SNP TSC0000139
cgattacaataac

SEQ ID NO: 261473 - DNA, 13 bp, Artificial Sequence
  Oligonucleotide for detection of SNP TSC0000139
gttattataatcg

SEQ ID NO: 261474 - DNA, 13 bp, Artificial Sequence
  Oligonucleotide for detection of SNP TSC0000139
cgattataataac

SEQ ID NO: 261475 - DNA, 13 bp, Artificial Sequence
  Oligonucleotide for detection of SNP TSC0063458
atgttggggatta

SEQ ID NO: 261476 - DNA, 13 bp, Artificial Sequence
  Oligonucleotide for detection of SNP TSC0063458
taatccccaacat

SEQ ID NO: 261477 - DNA, 13 bp, Artificial Sequence
  Oligonucleotide for detection of SNP TSC0063458
atgttgaggatta

SEQ ID NO: 261478 - DNA, 13 bp, Artificial Sequence
  Oligonucleotide for detection of SNP TSC0063458
taatcctcaacat

SEQ ID NO: 261479 - DNA, 13 bp, Artificial Sequence
  Oligonucleotide for detection of SNP TSC0063458
acgttggggatta

SEQ ID NO: 261480 - DNA, 13 bp, Artificial Sequence
  Oligonucleotide for detection of SNP TSC0063458
taatccccaacgt

SEQ ID NO: 261481 - DNA, 13 bp, Artificial Sequence
  Oligonucleotide for detection of SNP TSC0063458
acgttgaggatta

SEQ ID NO: 261482 - DNA, 13 bp, Artificial Sequence
  Oligonucleotide for detection of SNP TSC0063458
taatcctcaacgt

SEQ ID NO: 261483 - DNA, 13 bp, Artificial Sequence
  Oligonucleotide for detection of SNP TSC0063458
atgtcggggatta

SEQ ID NO: 261484 - DNA, 13 bp, Artificial Sequence
  Oligonucleotide for detection of SNP TSC0063458
taatccccgacat

SEQ ID NO: 261485 - DNA, 13 bp, Artificial Sequence
  Oligonucleotide for detection of SNP TSC0063458
atgtcgaggatta

SEQ ID NO: 261486 - DNA, 13 bp, Artificial Sequence
  Oligonucleotide for detection of SNP TSC0063458
taatcctcgacat

SEQ ID NO: 261487 - DNA, 13 bp, Artificial Sequence
  Oligonucleotide for detection of SNP TSC0063458
acgtcggggatta

SEQ ID NO: 261488 - DNA, 13 bp, Artificial Sequence
  Oligonucleotide for detection of SNP TSC0063458
taatccccgacgt

SEQ ID NO: 261489 - DNA, 13 bp, Artificial Sequence
  Oligonucleotide for detection of SNP TSC0063458
acgtcgaggatta

SEQ ID NO: 261490 - DNA, 13 bp, Artificial Sequence
  Oligonucleotide for detection of SNP TSC0063458
taatcctcgacgt

SEQ ID NO: 261491 - DNA, 13 bp, Artificial Sequence
  Oligonucleotide for detection of SNP TSC0063459
tattgtgtaatga

SEQ ID NO: 261492 - DNA, 13 bp, Artificial Sequence
  Oligonucleotide for detection of SNP TSC0063459
tcattacacaata

SEQ ID NO: 261493 - DNA, 13 bp, Artificial Sequence
  Oligonucleotide for detection of SNP TSC0063459
tattgtataatga

SEQ ID NO: 261494 - DNA, 13 bp, Artificial Sequence
  Oligonucleotide for detection of SNP TSC0063459
tcattatacaata

SEQ ID NO: 261495 - DNA, 13 bp, Artificial Sequence
  Oligonucleotide for detection of SNP TSC0063460
taaaggatttaaa

SEQ ID NO: 261496 - DNA, 13 bp, Artificial Sequence
  Oligonucleotide for detection of SNP TSC0063460
tttaaatccttta

SEQ ID NO: 261497 - DNA, 13 bp, Artificial Sequence
  Oligonucleotide for detection of SNP TSC0063460
taaaggttttaaa

SEQ ID NO: 261498 - DNA, 13 bp, Artificial Sequence
  Oligonucleotide for detection of SNP TSC0063460
tttaaaaccttta

SEQ ID NO: 261499 - DNA, 13 bp, Artificial Sequence
  Oligonucleotide for detection of SNP TSC0063460
tttggatttttta

SEQ ID NO: 261500 - DNA, 13 bp, Artificial Sequence
  Oligonucleotide for detection of SNP TSC0063460
taaaaaatccaaa

SEQ ID NO: 261501 - DNA, 13 bp, Artificial Sequence
  Oligonucleotide for detection of SNP TSC0063460
tttggagttttta

SEQ ID NO: 261502 - DNA, 13 bp, Artificial Sequence
  Oligonucleotide for detection of SNP TSC0063460
taaaaactccaaa

SEQ ID NO: 261503 - DNA, 13 bp, Artificial Sequence
  Oligonucleotide for detection of SNP TSC0063461
tttatagatgata

SEQ ID NO: 261504 - DNA, 13 bp, Artificial Sequence
  Oligonucleotide for detection of SNP TSC0063461
tatcatctataaa

SEQ ID NO: 261505 - DNA, 13 bp, Artificial Sequence
  Oligonucleotide for detection of SNP TSC0063461
tttataaatgata

SEQ ID NO: 261506 - DNA, 13 bp, Artificial Sequence
  Oligonucleotide for detection of SNP TSC0063461
tatcatttataaa

SEQ ID NO: 261507 - DNA, 13 bp, Artificial Sequence
  Oligonucleotide for detection of SNP TSC0063462
taaaggattgtgg

SEQ ID NO: 261508 - DNA, 13 bp, Artificial Sequence
  Oligonucleotide for detection of SNP TSC0063462
ccacaatccttta

SEQ ID NO: 261509 - DNA, 13 bp, Artificial Sequence
  Oligonucleotide for detection of SNP TSC0063462
taaaggtttgtgg

SEQ ID NO: 261510 - DNA, 13 bp, Artificial Sequence
  Oligonucleotide for detection of SNP TSC0063462
ccacaaaccttta

SEQ ID NO: 261511 - DNA, 13 bp, Artificial Sequence
  Oligonucleotide for detection of SNP TSC0063464
aaataaaagggtg

SEQ ID NO: 261512 - DNA, 13 bp, Artificial Sequence
  Oligonucleotide for detection of SNP TSC0063464
cacccttttattt

SEQ ID NO: 261513 - DNA, 13 bp, Artificial Sequence
  Oligonucleotide for detection of SNP TSC0063464
aaataatagggtg

SEQ ID NO: 261514 - DNA, 13 bp, Artificial Sequence
  Oligonucleotide for detection of SNP TSC0063464
caccctattattt

SEQ ID NO: 261515 - DNA, 13 bp, Artificial Sequence
  Oligonucleotide for detection of SNP TSC0063467
aattggtgggagy

SEQ ID NO: 261516 - DNA, 13 bp, Artificial Sequence
  Oligonucleotide for detection of SNP TSC0063467
rctcccaccaatt

SEQ ID NO: 261517 - DNA, 13 bp, Artificial Sequence
  Oligonucleotide for detection of SNP TSC0063467
aattggcgggagy

SEQ ID NO: 261518 - DNA, 13 bp, Artificial Sequence
  Oligonucleotide for detection of SNP TSC0063467
rctcccgccaatt

SEQ ID NO: 261519 - DNA, 13 bp, Artificial Sequence
  Oligonucleotide for detection of SNP TSC0063468
gtgtgttagagag

SEQ ID NO: 261520 - DNA, 13 bp, Artificial Sequence
  Oligonucleotide for detection of SNP TSC0063468
ctctctaacacac

SEQ ID NO: 261521 - DNA, 13 bp, Artificial Sequence
  Oligonucleotide for detection of SNP TSC0063468
gtgtgtgagagag

SEQ ID NO: 261522 - DNA, 13 bp, Artificial Sequence
  Oligonucleotide for detection of SNP TSC0063468
ctctctcacacac

SEQ ID NO: 261523 - DNA, 13 bp, Artificial Sequence
  Oligonucleotide for detection of SNP TSC0063468
tttttttatatay

SEQ ID NO: 261524 - DNA, 13 bp, Artificial Sequence
  Oligonucleotide for detection of SNP TSC0063468
rtatataaaaaaa

SEQ ID NO: 261525 - DNA, 13 bp, Artificial Sequence
  Oligonucleotide for detection of SNP TSC0000806
tgtagaagaggaa

SEQ ID NO: 261526 - DNA, 13 bp, Artificial Sequence
  Oligonucleotide for detection of SNP TSC0000806
ttcctcttctaca

SEQ ID NO: 261527 - DNA, 13 bp, Artificial Sequence
  Oligonucleotide for detection of SNP TSC0000806
tgtagaggaggaa

SEQ ID NO: 261528 - DNA, 13 bp, Artificial Sequence
  Oligonucleotide for detection of SNP TSC0000806
ttcctcctctaca

SEQ ID NO: 261529 - DNA, 13 bp, Artificial Sequence
  Oligonucleotide for detection of SNP TSC0063469
attagggtagaga

SEQ ID NO: 261530 - DNA, 13 bp, Artificial Sequence
  Oligonucleotide for detection of SNP TSC0063469
tctctaccctaat

SEQ ID NO: 261531 - DNA, 13 bp, Artificial Sequence
  Oligonucleotide for detection of SNP TSC0063469
attaggatagaga

SEQ ID NO: 261532 - DNA, 13 bp, Artificial Sequence
  Oligonucleotide for detection of SNP TSC0063469
tctctatcctaat

SEQ ID NO: 261533 - DNA, 13 bp, Artificial Sequence
  Oligonucleotide for detection of SNP TSC0063470
cgtttagttatag

SEQ ID NO: 261534 - DNA, 13 bp, Artificial Sequence
  Oligonucleotide for detection of SNP TSC0063470
ctataactaaacg

SEQ ID NO: 261535 - DNA, 13 bp, Artificial Sequence
  Oligonucleotide for detection of SNP TSC0063470
cgtttaattatag

SEQ ID NO: 261536 - DNA, 13 bp, Artificial Sequence
  Oligonucleotide for detection of SNP TSC0063470
ctataattaaacg

SEQ ID NO: 261537 - DNA, 13 bp, Artificial Sequence
  Oligonucleotide for detection of SNP TSC0007504
tatagtattgtgt

SEQ ID NO: 261538 - DNA, 13 bp, Artificial Sequence
  Oligonucleotide for detection of SNP TSC0007504
acacaatactata

SEQ ID NO: 261539 - DNA, 13 bp, Artificial Sequence
  Oligonucleotide for detection of SNP TSC0007504
tatagtgttgtgt

SEQ ID NO: 261540 - DNA, 13 bp, Artificial Sequence
  Oligonucleotide for detection of SNP TSC0007504
acacaacactata

SEQ ID NO: 261541 - DNA, 13 bp, Artificial Sequence
  Oligonucleotide for detection of SNP TSC0007505
aaaattagaatty

SEQ ID NO: 261542 - DNA, 13 bp, Artificial Sequence
  Oligonucleotide for detection of SNP TSC0007505
raattctaatttt

SEQ ID NO: 261543 - DNA, 13 bp, Artificial Sequence
  Oligonucleotide for detection of SNP TSC0007505
aaaattggaatty

SEQ ID NO: 261544 - DNA, 13 bp, Artificial Sequence
  Oligonucleotide for detection of SNP TSC0007505
raattccaatttt

SEQ ID NO: 261545 - DNA, 13 bp, Artificial Sequence
  Oligonucleotide for detection of SNP TSC0063472
tatttatgttata

SEQ ID NO: 261546 - DNA, 13 bp, Artificial Sequence
  Oligonucleotide for detection of SNP TSC0063472
tataacataaata

SEQ ID NO: 261547 - DNA, 13 bp, Artificial Sequence
  Oligonucleotide for detection of SNP TSC0063472
tatttacgttata

SEQ ID NO: 261548 - DNA, 13 bp, Artificial Sequence
  Oligonucleotide for detection of SNP TSC0063472
tataacgtaaata

SEQ ID NO: 261549 - DNA, 13 bp, Artificial Sequence
  Oligonucleotide for detection of SNP TSC0063472
tatgatgtaaata

SEQ ID NO: 261550 - DNA, 13 bp, Artificial Sequence
  Oligonucleotide for detection of SNP TSC0063472
tatttacatcata

SEQ ID NO: 261551 - DNA, 13 bp, Artificial Sequence
  Oligonucleotide for detection of SNP TSC0063472
tatgatataaata

SEQ ID NO: 261552 - DNA, 13 bp, Artificial Sequence
  Oligonucleotide for detection of SNP TSC0063472
tatttatatcata

SEQ ID NO: 261553 - DNA, 13 bp, Artificial Sequence
  Oligonucleotide for detection of SNP TSC0063472
tatgacgtaaata

SEQ ID NO: 261554 - DNA, 13 bp, Artificial Sequence
  Oligonucleotide for detection of SNP TSC0063472
tatttacgtcata

SEQ ID NO: 261555 - DNA, 13 bp, Artificial Sequence
  Oligonucleotide for detection of SNP TSC0000511
aagaaataagtta

SEQ ID NO: 261556 - DNA, 13 bp, Artificial Sequence
  Oligonucleotide for detection of SNP TSC0000511
taacttatttctt

SEQ ID NO: 261557 - DNA, 13 bp, Artificial Sequence
  Oligonucleotide for detection of SNP TSC0000511
aagaaagaagtta

SEQ ID NO: 261558 - DNA, 13 bp, Artificial Sequence
  Oligonucleotide for detection of SNP TSC0000511
taacttctttctt

SEQ ID NO: 261559 - DNA, 13 bp, Artificial Sequence
  Oligonucleotide for detection of SNP TSC0063475
gggaagtataaay

SEQ ID NO: 261560 - DNA, 13 bp, Artificial Sequence
  Oligonucleotide for detection of SNP TSC0063475
rtttatacttccc

SEQ ID NO: 261561 - DNA, 13 bp, Artificial Sequence
  Oligonucleotide for detection of SNP TSC0063475
gggaaggataaay

SEQ ID NO: 261562 - DNA, 13 bp, Artificial Sequence
  Oligonucleotide for detection of SNP TSC0063475
rtttatccttccc

SEQ ID NO: 261563 - DNA, 13 bp, Artificial Sequence
  Oligonucleotide for detection of SNP TSC0063480
gttattaaggtga

SEQ ID NO: 261564 - DNA, 13 bp, Artificial Sequence
  Oligonucleotide for detection of SNP TSC0063480
tcaccttaataac

SEQ ID NO: 261565 - DNA, 13 bp, Artificial Sequence
  Oligonucleotide for detection of SNP TSC0063480
gttattgaggtga

SEQ ID NO: 261566 - DNA, 13 bp, Artificial Sequence
  Oligonucleotide for detection of SNP TSC0063480
tcacctcaataac

SEQ ID NO: 261567 - DNA, 13 bp, Artificial Sequence
  Oligonucleotide for detection of SNP TSC0063480
gttatcgaggtga

SEQ ID NO: 261568 - DNA, 13 bp, Artificial Sequence
  Oligonucleotide for detection of SNP TSC0063480
tcacctcgataac

SEQ ID NO: 261569 - DNA, 13 bp, Artificial Sequence
  Oligonucleotide for detection of SNP TSC0063480
ttattttggtagy

SEQ ID NO: 261570 - DNA, 13 bp, Artificial Sequence
  Oligonucleotide for detection of SNP TSC0063480
rctaccaaaataa

SEQ ID NO: 261571 - DNA, 13 bp, Artificial Sequence
  Oligonucleotide for detection of SNP TSC0063480
ttatttcggtagy

SEQ ID NO: 261572 - DNA, 13 bp, Artificial Sequence
  Oligonucleotide for detection of SNP TSC0063480
rctaccgaaataa

SEQ ID NO: 261573 - DNA, 13 bp, Artificial Sequence
  Oligonucleotide for detection of SNP TSC0008223
ttagagggtttgy

SEQ ID NO: 261574 - DNA, 13 bp, Artificial Sequence
  Oligonucleotide for detection of SNP TSC0008223
rcaaaccctctaa

SEQ ID NO: 261575 - DNA, 13 bp, Artificial Sequence
  Oligonucleotide for detection of SNP TSC0008223
ttagagagtttgy

SEQ ID NO: 261576 - DNA, 13 bp, Artificial Sequence
  Oligonucleotide for detection of SNP TSC0008223
rcaaactctctaa

SEQ ID NO: 261577 - DNA, 13 bp, Artificial Sequence
  Oligonucleotide for detection of SNP TSC0008223
ttagagggttcgy

SEQ ID NO: 261578 - DNA, 13 bp, Artificial Sequence
  Oligonucleotide for detection of SNP TSC0008223
rcgaaccctctaa

SEQ ID NO: 261579 - DNA, 13 bp, Artificial Sequence
  Oligonucleotide for detection of SNP TSC0008223
ttagagagttcgy

SEQ ID NO: 261580 - DNA, 13 bp, Artificial Sequence
  Oligonucleotide for detection of SNP TSC0008223
rcgaactctctaa

SEQ ID NO: 261581 - DNA, 13 bp, Artificial Sequence
  Oligonucleotide for detection of SNP TSC0008224
ttttggatgtgtt

SEQ ID NO: 261582 - DNA, 13 bp, Artificial Sequence
  Oligonucleotide for detection of SNP TSC0008224
aacacatccaaaa

SEQ ID NO: 261583 - DNA, 13 bp, Artificial Sequence
  Oligonucleotide for detection of SNP TSC0008224
ttttgggtgtgtt

SEQ ID NO: 261584 - DNA, 13 bp, Artificial Sequence
  Oligonucleotide for detection of SNP TSC0008224
aacacacccaaaa

SEQ ID NO: 261585 - DNA, 13 bp, Artificial Sequence
  Oligonucleotide for detection of SNP TSC0063483
ttttttaatgttg

SEQ ID NO: 261586 - DNA, 13 bp, Artificial Sequence
  Oligonucleotide for detection of SNP TSC0063483
caacattaaaaaa

SEQ ID NO: 261587 - DNA, 13 bp, Artificial Sequence
  Oligonucleotide for detection of SNP TSC0063483
tttttttatgttg

SEQ ID NO: 261588 - DNA, 13 bp, Artificial Sequence
  Oligonucleotide for detection of SNP TSC0063483
caacataaaaaaa

SEQ ID NO: 261589 - DNA, 13 bp, Artificial Sequence
  Oligonucleotide for detection of SNP TSC0063483
ttttttaatgtcg

SEQ ID NO: 261590 - DNA, 13 bp, Artificial Sequence
  Oligonucleotide for detection of SNP TSC0063483
cgacattaaaaaa

SEQ ID NO: 261591 - DNA, 13 bp, Artificial Sequence
  Oligonucleotide for detection of SNP TSC0063483
tttttttatgtcg

SEQ ID NO: 261592 - DNA, 13 bp, Artificial Sequence
  Oligonucleotide for detection of SNP TSC0063483
cgacataaaaaaa

SEQ ID NO: 261593 - DNA, 13 bp, Artificial Sequence
  Oligonucleotide for detection of SNP TSC0063483
tggtattgaagag

SEQ ID NO: 261594 - DNA, 13 bp, Artificial Sequence
  Oligonucleotide for detection of SNP TSC0063483
ctcttcaatacca

SEQ ID NO: 261595 - DNA, 13 bp, Artificial Sequence
  Oligonucleotide for detection of SNP TSC0063483
tggtatagaagag

SEQ ID NO: 261596 - DNA, 13 bp, Artificial Sequence
  Oligonucleotide for detection of SNP TSC0063483
ctcttctatacca

SEQ ID NO: 261597 - DNA, 13 bp, Artificial Sequence
  Oligonucleotide for detection of SNP TSC0063483
cggtattgaagag

SEQ ID NO: 261598 - DNA, 13 bp, Artificial Sequence
  Oligonucleotide for detection of SNP TSC0063483
ctcttcaataccg

SEQ ID NO: 261599 - DNA, 13 bp, Artificial Sequence
  Oligonucleotide for detection of SNP TSC0063483
cggtatagaagag

SEQ ID NO: 261600 - DNA, 13 bp, Artificial Sequence
  Oligonucleotide for detection of SNP TSC0063483
ctcttctataccg

SEQ ID NO: 261601 - DNA, 13 bp, Artificial Sequence
  Oligonucleotide for detection of SNP TSC0063485
atagaagagtaty

SEQ ID NO: 261602 - DNA, 13 bp, Artificial Sequence
  Oligonucleotide for detection of SNP TSC0063485
ratactcttctat

SEQ ID NO: 261603 - DNA, 13 bp, Artificial Sequence
  Oligonucleotide for detection of SNP TSC0063485
atagaaaagtaty

SEQ ID NO: 261604 - DNA, 13 bp, Artificial Sequence
  Oligonucleotide for detection of SNP TSC0063485
ratacttttctat

SEQ ID NO: 261605 - DNA, 13 bp, Artificial Sequence
  Oligonucleotide for detection of SNP TSC0063486
agaggatgtagta

SEQ ID NO: 261606 - DNA, 13 bp, Artificial Sequence
  Oligonucleotide for detection of SNP TSC0063486
tactacatcctct

SEQ ID NO: 261607 - DNA, 13 bp, Artificial Sequence
  Oligonucleotide for detection of SNP TSC0063486
agaggaggtagta

SEQ ID NO: 261608 - DNA, 13 bp, Artificial Sequence
  Oligonucleotide for detection of SNP TSC0063486
tactacctcctct

SEQ ID NO: 261609 - DNA, 13 bp, Artificial Sequence
  Oligonucleotide for detection of SNP TSC0000871
tgtattttagtta

SEQ ID NO: 261610 - DNA, 13 bp, Artificial Sequence
  Oligonucleotide for detection of SNP TSC0000871
taactaaaataca

SEQ ID NO: 261611 - DNA, 13 bp, Artificial Sequence
  Oligonucleotide for detection of SNP TSC0000871
tgtattgtagtta

SEQ ID NO: 261612 - DNA, 13 bp, Artificial Sequence
  Oligonucleotide for detection of SNP TSC0000871
taactacaataca

SEQ ID NO: 261613 - DNA, 13 bp, Artificial Sequence
  Oligonucleotide for detection of SNP TSC0000871
tggttgaaatata

SEQ ID NO: 261614 - DNA, 13 bp, Artificial Sequence
  Oligonucleotide for detection of SNP TSC0000871
tatatttcaacca

SEQ ID NO: 261615 - DNA, 13 bp, Artificial Sequence
  Oligonucleotide for detection of SNP TSC0000871
tggttgtaatata

SEQ ID NO: 261616 - DNA, 13 bp, Artificial Sequence
  Oligonucleotide for detection of SNP TSC0000871
tatattacaacca

SEQ ID NO: 261617 - DNA, 13 bp, Artificial Sequence
  Oligonucleotide for detection of SNP TSC0001357
tagattattttay

SEQ ID NO: 261618 - DNA, 13 bp, Artificial Sequence
  Oligonucleotide for detection of SNP TSC0001357
rtaaaataatcta

SEQ ID NO: 261619 - DNA, 13 bp, Artificial Sequence
  Oligonucleotide for detection of SNP TSC0001357
tagatttttttay

SEQ ID NO: 261620 - DNA, 13 bp, Artificial Sequence
  Oligonucleotide for detection of SNP TSC0001357
rtaaaaaaatcta

SEQ ID NO: 261621 - DNA, 13 bp, Artificial Sequence
  Oligonucleotide for detection of SNP TSC0001357
gtaaaatagttta

SEQ ID NO: 261622 - DNA, 13 bp, Artificial Sequence
  Oligonucleotide for detection of SNP TSC0001357
taaactattttac

SEQ ID NO: 261623 - DNA, 13 bp, Artificial Sequence
  Oligonucleotide for detection of SNP TSC0001357
gtaaaagagttta

SEQ ID NO: 261624 - DNA, 13 bp, Artificial Sequence
  Oligonucleotide for detection of SNP TSC0001357
taaactcttttac

SEQ ID NO: 261625 - DNA, 13 bp, Artificial Sequence
  Oligonucleotide for detection of SNP TSC0063493
ttttaggggtttt

SEQ ID NO: 261626 - DNA, 13 bp, Artificial Sequence
  Oligonucleotide for detection of SNP TSC0063493
aaaacccctaaaa

SEQ ID NO: 261627 - DNA, 13 bp, Artificial Sequence
  Oligonucleotide for detection of SNP TSC0063493
ttttagaggtttt

SEQ ID NO: 261628 - DNA, 13 bp, Artificial Sequence
  Oligonucleotide for detection of SNP TSC0063493
aaaacctctaaaa

SEQ ID NO: 261629 - DNA, 13 bp, Artificial Sequence
  Oligonucleotide for detection of SNP TSC0000615
taaagtagtttty

SEQ ID NO: 261630 - DNA, 13 bp, Artificial Sequence
  Oligonucleotide for detection of SNP TSC0000615
raaaactacttta

SEQ ID NO: 261631 - DNA, 13 bp, Artificial Sequence
  Oligonucleotide for detection of SNP TSC0000615
taaagttgtttty

SEQ ID NO: 261632 - DNA, 13 bp, Artificial Sequence
  Oligonucleotide for detection of SNP TSC0000615
raaaacaacttta

SEQ ID NO: 261633 - DNA, 13 bp, Artificial Sequence
  Oligonucleotide for detection of SNP TSC0000615
ggaagttgtttta

SEQ ID NO: 261634 - DNA, 13 bp, Artificial Sequence
  Oligonucleotide for detection of SNP TSC0000615
taaaacaacttcc

SEQ ID NO: 261635 - DNA, 13 bp, Artificial Sequence
  Oligonucleotide for detection of SNP TSC0000615
ggaagtagtttta

SEQ ID NO: 261636 - DNA, 13 bp, Artificial Sequence
  Oligonucleotide for detection of SNP TSC0000615
taaaactacttcc

SEQ ID NO: 261637 - DNA, 13 bp, Artificial Sequence
  Oligonucleotide for detection of SNP TSC0000616
taaagacgtattt

SEQ ID NO: 261638 - DNA, 13 bp, Artificial Sequence
  Oligonucleotide for detection of SNP TSC0000616
aaatacgtcttta

SEQ ID NO: 261639 - DNA, 13 bp, Artificial Sequence
  Oligonucleotide for detection of SNP TSC0000616
agatatgttttta

SEQ ID NO: 261640 - DNA, 13 bp, Artificial Sequence
  Oligonucleotide for detection of SNP TSC0000616
taaaaacatatct

SEQ ID NO: 261641 - DNA, 13 bp, Artificial Sequence
  Oligonucleotide for detection of SNP TSC0000616
agatatattttta

SEQ ID NO: 261642 - DNA, 13 bp, Artificial Sequence
  Oligonucleotide for detection of SNP TSC0000616
taaaaatatatct

SEQ ID NO: 261643 - DNA, 13 bp, Artificial Sequence
  Oligonucleotide for detection of SNP TSC0000616
agatacgttttta

SEQ ID NO: 261644 - DNA, 13 bp, Artificial Sequence
  Oligonucleotide for detection of SNP TSC0000616
taaaaacgtatct

SEQ ID NO: 261645 - DNA, 13 bp, Artificial Sequence
  Oligonucleotide for detection of SNP TSC0000617
ggaaggagttata

SEQ ID NO: 261646 - DNA, 13 bp, Artificial Sequence
  Oligonucleotide for detection of SNP TSC0000617
tataactccttcc

SEQ ID NO: 261647 - DNA, 13 bp, Artificial Sequence
  Oligonucleotide for detection of SNP TSC0000617
ggaaggtgttata

SEQ ID NO: 261648 - DNA, 13 bp, Artificial Sequence
  Oligonucleotide for detection of SNP TSC0000617
tataacaccttcc

SEQ ID NO: 261649 - DNA, 13 bp, Artificial Sequence
  Oligonucleotide for detection of SNP TSC0063494
gtggaaagtgaag

SEQ ID NO: 261650 - DNA, 13 bp, Artificial Sequence
  Oligonucleotide for detection of SNP TSC0063494
cttcactttccac

SEQ ID NO: 261651 - DNA, 13 bp, Artificial Sequence
  Oligonucleotide for detection of SNP TSC0063494
gtggaaggtgaag

SEQ ID NO: 261652 - DNA, 13 bp, Artificial Sequence
  Oligonucleotide for detection of SNP TSC0063494
cttcaccttccac

SEQ ID NO: 261653 - DNA, 13 bp, Artificial Sequence
  Oligonucleotide for detection of SNP TSC0063495
tgtattttatata

SEQ ID NO: 261654 - DNA, 13 bp, Artificial Sequence
  Oligonucleotide for detection of SNP TSC0063495
tatataaaataca

SEQ ID NO: 261655 - DNA, 13 bp, Artificial Sequence
  Oligonucleotide for detection of SNP TSC0063495
tatatataatgta

SEQ ID NO: 261656 - DNA, 13 bp, Artificial Sequence
  Oligonucleotide for detection of SNP TSC0063495
tacattatatata

SEQ ID NO: 261657 - DNA, 13 bp, Artificial Sequence
  Oligonucleotide for detection of SNP TSC0063495
tatatagaatgta

SEQ ID NO: 261658 - DNA, 13 bp, Artificial Sequence
  Oligonucleotide for detection of SNP TSC0063495
tacattctatata

SEQ ID NO: 261659 - DNA, 13 bp, Artificial Sequence
  Oligonucleotide for detection of SNP TSC0063497
tatttgattttaa

SEQ ID NO: 261660 - DNA, 13 bp, Artificial Sequence
  Oligonucleotide for detection of SNP TSC0063497
ttaaaatcaaata

SEQ ID NO: 261661 - DNA, 13 bp, Artificial Sequence
  Oligonucleotide for detection of SNP TSC0063497
tatttggttttaa

SEQ ID NO: 261662 - DNA, 13 bp, Artificial Sequence
  Oligonucleotide for detection of SNP TSC0063497
ttaaaaccaaata

SEQ ID NO: 261663 - DNA, 13 bp, Artificial Sequence
  Oligonucleotide for detection of SNP TSC0063498
gggttgtaggagy

SEQ ID NO: 261664 - DNA, 13 bp, Artificial Sequence
  Oligonucleotide for detection of SNP TSC0063498
rctcctacaaccc

SEQ ID NO: 261665 - DNA, 13 bp, Artificial Sequence
  Oligonucleotide for detection of SNP TSC0063498
gggttgaaggagy

SEQ ID NO: 261666 - DNA, 13 bp, Artificial Sequence
  Oligonucleotide for detection of SNP TSC0063498
rctccttcaaccc

SEQ ID NO: 261667 - DNA, 13 bp, Artificial Sequence
  Oligonucleotide for detection of SNP TSC0063499
atggttatatttt

SEQ ID NO: 261668 - DNA, 13 bp, Artificial Sequence
  Oligonucleotide for detection of SNP TSC0063499
aaaatataaccat

SEQ ID NO: 261669 - DNA, 13 bp, Artificial Sequence
  Oligonucleotide for detection of SNP TSC0063499
atggttgtatttt

SEQ ID NO: 261670 - DNA, 13 bp, Artificial Sequence
  Oligonucleotide for detection of SNP TSC0063499
aaaatacaaccat

SEQ ID NO: 261671 - DNA, 13 bp, Artificial Sequence
  Oligonucleotide for detection of SNP TSC0063500
tttattataggtt

SEQ ID NO: 261672 - DNA, 13 bp, Artificial Sequence
  Oligonucleotide for detection of SNP TSC0063500
aacctataataaa

SEQ ID NO: 261673 - DNA, 13 bp, Artificial Sequence
  Oligonucleotide for detection of SNP TSC0010319
tgtggtattaggg

SEQ ID NO: 261674 - DNA, 13 bp, Artificial Sequence
  Oligonucleotide for detection of SNP TSC0010319
ccctaataccaca

SEQ ID NO: 261675 - DNA, 13 bp, Artificial Sequence
  Oligonucleotide for detection of SNP TSC0010319
tgtggtgttaggg

SEQ ID NO: 261676 - DNA, 13 bp, Artificial Sequence
  Oligonucleotide for detection of SNP TSC0010319
ccctaacaccaca

SEQ ID NO: 261677 - DNA, 13 bp, Artificial Sequence
  Oligonucleotide for detection of SNP TSC0010319
tgcggtattaggg

SEQ ID NO: 261678 - DNA, 13 bp, Artificial Sequence
  Oligonucleotide for detection of SNP TSC0010319
ccctaataccgca

SEQ ID NO: 261679 - DNA, 13 bp, Artificial Sequence
  Oligonucleotide for detection of SNP TSC0010319
tgcggtgttaggg

SEQ ID NO: 261680 - DNA, 13 bp, Artificial Sequence
  Oligonucleotide for detection of SNP TSC0010319
ccctaacaccgca

SEQ ID NO: 261681 - DNA, 13 bp, Artificial Sequence
  Oligonucleotide for detection of SNP TSC0010319
tgtggcgttaggg

SEQ ID NO: 261682 - DNA, 13 bp, Artificial Sequence
  Oligonucleotide for detection of SNP TSC0010319
ccctaacgccaca

SEQ ID NO: 261683 - DNA, 13 bp, Artificial Sequence
  Oligonucleotide for detection of SNP TSC0010319
tgcggcgttaggg

SEQ ID NO: 261684 - DNA, 13 bp, Artificial Sequence
  Oligonucleotide for detection of SNP TSC0010319
ccctaacgccgca

SEQ ID NO: 261685 - DNA, 13 bp, Artificial Sequence
  Oligonucleotide for detection of SNP TSC0010319
ttttggtgttgta

SEQ ID NO: 261686 - DNA, 13 bp, Artificial Sequence
  Oligonucleotide for detection of SNP TSC0010319
tacaacaccaaaa

SEQ ID NO: 261687 - DNA, 13 bp, Artificial Sequence
  Oligonucleotide for detection of SNP TSC0010319
ttttggtgtcgta

SEQ ID NO: 261688 - DNA, 13 bp, Artificial Sequence
  Oligonucleotide for detection of SNP TSC0010319
tacgacaccaaaa

SEQ ID NO: 261689 - DNA, 13 bp, Artificial Sequence
  Oligonucleotide for detection of SNP TSC0010319
ttttggcgttgta

SEQ ID NO: 261690 - DNA, 13 bp, Artificial Sequence
  Oligonucleotide for detection of SNP TSC0010319
tacaacgccaaaa

SEQ ID NO: 261691 - DNA, 13 bp, Artificial Sequence
  Oligonucleotide for detection of SNP TSC0010319
ttttggcgtcgta

SEQ ID NO: 261692 - DNA, 13 bp, Artificial Sequence
  Oligonucleotide for detection of SNP TSC0010319
tacgacgccaaaa

SEQ ID NO: 261693 - DNA, 13 bp, Artificial Sequence
  Oligonucleotide for detection of SNP TSC0010320
aagtttatatagy

SEQ ID NO: 261694 - DNA, 13 bp, Artificial Sequence
  Oligonucleotide for detection of SNP TSC0010320
rctatataaactt

SEQ ID NO: 261695 - DNA, 13 bp, Artificial Sequence
  Oligonucleotide for detection of SNP TSC0010320
aagtttttatagy

SEQ ID NO: 261696 - DNA, 13 bp, Artificial Sequence
  Oligonucleotide for detection of SNP TSC0010320
rctataaaaactt

SEQ ID NO: 261697 - DNA, 13 bp, Artificial Sequence
  Oligonucleotide for detection of SNP TSC0010320
gttgtgtaaattt

SEQ ID NO: 261698 - DNA, 13 bp, Artificial Sequence
  Oligonucleotide for detection of SNP TSC0010320
aaatttacacaac

SEQ ID NO: 261699 - DNA, 13 bp, Artificial Sequence
  Oligonucleotide for detection of SNP TSC0010320
gttgtggaaattt

SEQ ID NO: 261700 - DNA, 13 bp, Artificial Sequence
  Oligonucleotide for detection of SNP TSC0010320
aaatttccacaac

SEQ ID NO: 261701 - DNA, 13 bp, Artificial Sequence
  Oligonucleotide for detection of SNP TSC0063504
taagttttatttg

SEQ ID NO: 261702 - DNA, 13 bp, Artificial Sequence
  Oligonucleotide for detection of SNP TSC0063504
caaataaaactta

SEQ ID NO: 261703 - DNA, 13 bp, Artificial Sequence
  Oligonucleotide for detection of SNP TSC0063504
taagttgtatttg

SEQ ID NO: 261704 - DNA, 13 bp, Artificial Sequence
  Oligonucleotide for detection of SNP TSC0063504
caaatacaactta

SEQ ID NO: 261705 - DNA, 13 bp, Artificial Sequence
  Oligonucleotide for detection of SNP TSC0063504
taaatagaatttg

SEQ ID NO: 261706 - DNA, 13 bp, Artificial Sequence
  Oligonucleotide for detection of SNP TSC0063504
caaattctattta

SEQ ID NO: 261707 - DNA, 13 bp, Artificial Sequence
  Oligonucleotide for detection of SNP TSC0063504
taaatataatttg

SEQ ID NO: 261708 - DNA, 13 bp, Artificial Sequence
  Oligonucleotide for detection of SNP TSC0063504
caaattatattta

SEQ ID NO: 261709 - DNA, 13 bp, Artificial Sequence
  Oligonucleotide for detection of SNP TSC0009746
aagtataaaggaa

SEQ ID NO: 261710 - DNA, 13 bp, Artificial Sequence
  Oligonucleotide for detection of SNP TSC0009746
ttcctttatactt

SEQ ID NO: 261711 - DNA, 13 bp, Artificial Sequence
  Oligonucleotide for detection of SNP TSC0009746
aagtatgaaggaa

SEQ ID NO: 261712 - DNA, 13 bp, Artificial Sequence
  Oligonucleotide for detection of SNP TSC0009746
ttccttcatactt

SEQ ID NO: 261713 - DNA, 13 bp, Artificial Sequence
  Oligonucleotide for detection of SNP TSC0009746
aagtacgaaggaa

SEQ ID NO: 261714 - DNA, 13 bp, Artificial Sequence
  Oligonucleotide for detection of SNP TSC0009746
ttccttcgtactt

SEQ ID NO: 261715 - DNA, 13 bp, Artificial Sequence
  Oligonucleotide for detection of SNP TSC0010082
tataaagtggttt

SEQ ID NO: 261716 - DNA, 13 bp, Artificial Sequence
  Oligonucleotide for detection of SNP TSC0010082
aaaccactttata

SEQ ID NO: 261717 - DNA, 13 bp, Artificial Sequence
  Oligonucleotide for detection of SNP TSC0010082
tataaaatggttt

SEQ ID NO: 261718 - DNA, 13 bp, Artificial Sequence
  Oligonucleotide for detection of SNP TSC0010082
aaaccattttata

SEQ ID NO: 261719 - DNA, 13 bp, Artificial Sequence
  Oligonucleotide for detection of SNP TSC0063505
gggaaaggatttt

SEQ ID NO: 261720 - DNA, 13 bp, Artificial Sequence
  Oligonucleotide for detection of SNP TSC0063505
aaaatcctttccc

SEQ ID NO: 261721 - DNA, 13 bp, Artificial Sequence
  Oligonucleotide for detection of SNP TSC0063505
gggaaatgatttt

SEQ ID NO: 261722 - DNA, 13 bp, Artificial Sequence
  Oligonucleotide for detection of SNP TSC0063505
aaaatcatttccc

SEQ ID NO: 261723 - DNA, 13 bp, Artificial Sequence
  Oligonucleotide for detection of SNP TSC0063505
gggaaacgatttt

SEQ ID NO: 261724 - DNA, 13 bp, Artificial Sequence
  Oligonucleotide for detection of SNP TSC0063505
aaaatcgtttccc

SEQ ID NO: 261725 - DNA, 13 bp, Artificial Sequence
  Oligonucleotide for detection of SNP TSC0000746
tatatttgtttag

SEQ ID NO: 261726 - DNA, 13 bp, Artificial Sequence
  Oligonucleotide for detection of SNP TSC0000746
ctaaacaaatata

SEQ ID NO: 261727 - DNA, 13 bp, Artificial Sequence
  Oligonucleotide for detection of SNP TSC0000746
tatattcgtttag

SEQ ID NO: 261728 - DNA, 13 bp, Artificial Sequence
  Oligonucleotide for detection of SNP TSC0000746
ctaaacgaatata

SEQ ID NO: 261729 - DNA, 13 bp, Artificial Sequence
  Oligonucleotide for detection of SNP TSC0000746
ttgaatgggtatg

SEQ ID NO: 261730 - DNA, 13 bp, Artificial Sequence
  Oligonucleotide for detection of SNP TSC0000746
catacccattcaa

SEQ ID NO: 261731 - DNA, 13 bp, Artificial Sequence
  Oligonucleotide for detection of SNP TSC0000746
ttgaattggtatg

SEQ ID NO: 261732 - DNA, 13 bp, Artificial Sequence
  Oligonucleotide for detection of SNP TSC0000746
cataccaattcaa

SEQ ID NO: 261733 - DNA, 13 bp, Artificial Sequence
  Oligonucleotide for detection of SNP TSC0000746
ttgaacgggtatg

SEQ ID NO: 261734 - DNA, 13 bp, Artificial Sequence
  Oligonucleotide for detection of SNP TSC0000746
catacccgttcaa

SEQ ID NO: 261735 - DNA, 13 bp, Artificial Sequence
  Oligonucleotide for detection of SNP TSC0000746
ttgaatcggtatg

SEQ ID NO: 261736 - DNA, 13 bp, Artificial Sequence
  Oligonucleotide for detection of SNP TSC0000746
cataccgattcaa

SEQ ID NO: 261737 - DNA, 13 bp, Artificial Sequence
  Oligonucleotide for detection of SNP TSC0008482
tttttaaatgtaa

SEQ ID NO: 261738 - DNA, 13 bp, Artificial Sequence
  Oligonucleotide for detection of SNP TSC0008482
ttacatttaaaaa

SEQ ID NO: 261739 - DNA, 13 bp, Artificial Sequence
  Oligonucleotide for detection of SNP TSC0008482
tttttagatgtaa

SEQ ID NO: 261740 - DNA, 13 bp, Artificial Sequence
  Oligonucleotide for detection of SNP TSC0008482
ttacatctaaaaa

SEQ ID NO: 261741 - DNA, 13 bp, Artificial Sequence
  Oligonucleotide for detection of SNP TSC0063507
attaaaaagtgta

SEQ ID NO: 261742 - DNA, 13 bp, Artificial Sequence
  Oligonucleotide for detection of SNP TSC0063507
tacactttttaat

SEQ ID NO: 261743 - DNA, 13 bp, Artificial Sequence
  Oligonucleotide for detection of SNP TSC0063507
attaaagagtgta

SEQ ID NO: 261744 - DNA, 13 bp, Artificial Sequence
  Oligonucleotide for detection of SNP TSC0063507
tacactctttaat

SEQ ID NO: 261745 - DNA, 13 bp, Artificial Sequence
  Oligonucleotide for detection of SNP TSC0063509
atgataaagaaaa

SEQ ID NO: 261746 - DNA, 13 bp, Artificial Sequence
  Oligonucleotide for detection of SNP TSC0063509
ttttctttatcat

SEQ ID NO: 261747 - DNA, 13 bp, Artificial Sequence
  Oligonucleotide for detection of SNP TSC0063509
atgatagagaaaa

SEQ ID NO: 261748 - DNA, 13 bp, Artificial Sequence
  Oligonucleotide for detection of SNP TSC0063509
ttttctctatcat

SEQ ID NO: 261749 - DNA, 13 bp, Artificial Sequence
  Oligonucleotide for detection of SNP TSC0063510
gttgtttttttat

SEQ ID NO: 261750 - DNA, 13 bp, Artificial Sequence
  Oligonucleotide for detection of SNP TSC0063510
ataaaaaaacaac

SEQ ID NO: 261751 - DNA, 13 bp, Artificial Sequence
  Oligonucleotide for detection of SNP TSC0063512
tgggaaatttttt

SEQ ID NO: 261752 - DNA, 13 bp, Artificial Sequence
  Oligonucleotide for detection of SNP TSC0063512
aaaaaatttccca

SEQ ID NO: 261753 - DNA, 13 bp, Artificial Sequence
  Oligonucleotide for detection of SNP TSC0063512
tgggaagtttttt

SEQ ID NO: 261754 - DNA, 13 bp, Artificial Sequence
  Oligonucleotide for detection of SNP TSC0063512
aaaaaacttccca

SEQ ID NO: 261755 - DNA, 13 bp, Artificial Sequence
  Oligonucleotide for detection of SNP TSC0063513
tatttatttgatt

SEQ ID NO: 261756 - DNA, 13 bp, Artificial Sequence
  Oligonucleotide for detection of SNP TSC0063513
aatcaaataaata

SEQ ID NO: 261757 - DNA, 13 bp, Artificial Sequence
  Oligonucleotide for detection of SNP TSC0063513
tatttagttgatt

SEQ ID NO: 261758 - DNA, 13 bp, Artificial Sequence
  Oligonucleotide for detection of SNP TSC0063513
aatcaactaaata

SEQ ID NO: 261759 - DNA, 13 bp, Artificial Sequence
  Oligonucleotide for detection of SNP TSC0063513
aattagttaagtg

SEQ ID NO: 261760 - DNA, 13 bp, Artificial Sequence
  Oligonucleotide for detection of SNP TSC0063513
cacttaactaatt

SEQ ID NO: 261761 - DNA, 13 bp, Artificial Sequence
  Oligonucleotide for detection of SNP TSC0063514
gtttggtgggggg

SEQ ID NO: 261762 - DNA, 13 bp, Artificial Sequence
  Oligonucleotide for detection of SNP TSC0063514
ccccccaccaaac

SEQ ID NO: 261763 - DNA, 13 bp, Artificial Sequence
  Oligonucleotide for detection of SNP TSC0063514
gtttggggggggg

SEQ ID NO: 261764 - DNA, 13 bp, Artificial Sequence
  Oligonucleotide for detection of SNP TSC0063514
cccccccccaaac

SEQ ID NO: 261765 - DNA, 13 bp, Artificial Sequence
  Oligonucleotide for detection of SNP TSC0063514
gtttggcgggggg

SEQ ID NO: 261766 - DNA, 13 bp, Artificial Sequence
  Oligonucleotide for detection of SNP TSC0063514
ccccccgccaaac

SEQ ID NO: 261767 - DNA, 13 bp, Artificial Sequence
  Oligonucleotide for detection of SNP TSC0063514
ttttttgttaagy

SEQ ID NO: 261768 - DNA, 13 bp, Artificial Sequence
  Oligonucleotide for detection of SNP TSC0063514
rcttaacaaaaaa

SEQ ID NO: 261769 - DNA, 13 bp, Artificial Sequence
  Oligonucleotide for detection of SNP TSC0063514
tttttcgttaagy

SEQ ID NO: 261770 - DNA, 13 bp, Artificial Sequence
  Oligonucleotide for detection of SNP TSC0063514
rcttaacgaaaaa

SEQ ID NO: 261771 - DNA, 13 bp, Artificial Sequence
  Oligonucleotide for detection of SNP TSC0063517
tattttaagtata

SEQ ID NO: 261772 - DNA, 13 bp, Artificial Sequence
  Oligonucleotide for detection of SNP TSC0063517
tatacttaaaata

SEQ ID NO: 261773 - DNA, 13 bp, Artificial Sequence
  Oligonucleotide for detection of SNP TSC0063517
tattttgagtata

SEQ ID NO: 261774 - DNA, 13 bp, Artificial Sequence
  Oligonucleotide for detection of SNP TSC0063517
tatactcaaaata

SEQ ID NO: 261775 - DNA, 13 bp, Artificial Sequence
  Oligonucleotide for detection of SNP TSC0005682
attattattatty

SEQ ID NO: 261776 - DNA, 13 bp, Artificial Sequence
  Oligonucleotide for detection of SNP TSC0005682
raataataataat

SEQ ID NO: 261777 - DNA, 13 bp, Artificial Sequence
  Oligonucleotide for detection of SNP TSC0005683
aagttatgggaaa

SEQ ID NO: 261778 - DNA, 13 bp, Artificial Sequence
  Oligonucleotide for detection of SNP TSC0005683
tttcccataactt

SEQ ID NO: 261779 - DNA, 13 bp, Artificial Sequence
  Oligonucleotide for detection of SNP TSC0005683
aagttacgggaaa

SEQ ID NO: 261780 - DNA, 13 bp, Artificial Sequence
  Oligonucleotide for detection of SNP TSC0005683
tttcccgtaactt

SEQ ID NO: 261781 - DNA, 13 bp, Artificial Sequence
  Oligonucleotide for detection of SNP TSC0000622
aagtttttattty

SEQ ID NO: 261782 - DNA, 13 bp, Artificial Sequence
  Oligonucleotide for detection of SNP TSC0000622
raaataaaaactt

SEQ ID NO: 261783 - DNA, 13 bp, Artificial Sequence
  Oligonucleotide for detection of SNP TSC0000622
aagtttgtattty

SEQ ID NO: 261784 - DNA, 13 bp, Artificial Sequence
  Oligonucleotide for detection of SNP TSC0000622
raaatacaaactt

SEQ ID NO: 261785 - DNA, 13 bp, Artificial Sequence
  Oligonucleotide for detection of SNP TSC0000622
gaagtagaggttt

SEQ ID NO: 261786 - DNA, 13 bp, Artificial Sequence
  Oligonucleotide for detection of SNP TSC0000622
aaacctctacttc

SEQ ID NO: 261787 - DNA, 13 bp, Artificial Sequence
  Oligonucleotide for detection of SNP TSC0000622
gaagtataggttt

SEQ ID NO: 261788 - DNA, 13 bp, Artificial Sequence
  Oligonucleotide for detection of SNP TSC0000622
aaacctatacttc

SEQ ID NO: 261789 - DNA, 13 bp, Artificial Sequence
  Oligonucleotide for detection of SNP TSC0000624
gattttataaggg

SEQ ID NO: 261790 - DNA, 13 bp, Artificial Sequence
  Oligonucleotide for detection of SNP TSC0000624
cccttataaaatc

SEQ ID NO: 261791 - DNA, 13 bp, Artificial Sequence
  Oligonucleotide for detection of SNP TSC0063518
ggtaattgtattt

SEQ ID NO: 261792 - DNA, 13 bp, Artificial Sequence
  Oligonucleotide for detection of SNP TSC0063518
aaatacaattacc

SEQ ID NO: 261793 - DNA, 13 bp, Artificial Sequence
  Oligonucleotide for detection of SNP TSC0063518
ggtaatggtattt

SEQ ID NO: 261794 - DNA, 13 bp, Artificial Sequence
  Oligonucleotide for detection of SNP TSC0063518
aaataccattacc

SEQ ID NO: 261795 - DNA, 13 bp, Artificial Sequence
  Oligonucleotide for detection of SNP TSC0063518
aagtataattgty

SEQ ID NO: 261796 - DNA, 13 bp, Artificial Sequence
  Oligonucleotide for detection of SNP TSC0063518
racaattatactt

SEQ ID NO: 261797 - DNA, 13 bp, Artificial Sequence
  Oligonucleotide for detection of SNP TSC0063518
aagtattattgty

SEQ ID NO: 261798 - DNA, 13 bp, Artificial Sequence
  Oligonucleotide for detection of SNP TSC0063518
racaataatactt

SEQ ID NO: 261799 - DNA, 13 bp, Artificial Sequence
  Oligonucleotide for detection of SNP TSC0063521
gtaattttgttag

SEQ ID NO: 261800 - DNA, 13 bp, Artificial Sequence
  Oligonucleotide for detection of SNP TSC0063521
ctaacaaaattac

SEQ ID NO: 261801 - DNA, 13 bp, Artificial Sequence
  Oligonucleotide for detection of SNP TSC0063521
gtaattgtgttag

SEQ ID NO: 261802 - DNA, 13 bp, Artificial Sequence
  Oligonucleotide for detection of SNP TSC0063521
ctaacacaattac

SEQ ID NO: 261803 - DNA, 13 bp, Artificial Sequence
  Oligonucleotide for detection of SNP TSC0063521
ttaatagagttay

SEQ ID NO: 261804 - DNA, 13 bp, Artificial Sequence
  Oligonucleotide for detection of SNP TSC0063521
rtaactctattaa

SEQ ID NO: 261805 - DNA, 13 bp, Artificial Sequence
  Oligonucleotide for detection of SNP TSC0063521
ttaatatagttay

SEQ ID NO: 261806 - DNA, 13 bp, Artificial Sequence
  Oligonucleotide for detection of SNP TSC0063521
rtaactatattaa

SEQ ID NO: 261807 - DNA, 13 bp, Artificial Sequence
  Oligonucleotide for detection of SNP TSC0000572
tagttaattgatt

SEQ ID NO: 261808 - DNA, 13 bp, Artificial Sequence
  Oligonucleotide for detection of SNP TSC0000572
aatcaattaacta

SEQ ID NO: 261809 - DNA, 13 bp, Artificial Sequence
  Oligonucleotide for detection of SNP TSC0000572
tagttagttgatt

SEQ ID NO: 261810 - DNA, 13 bp, Artificial Sequence
  Oligonucleotide for detection of SNP TSC0000572
aatcaactaacta

SEQ ID NO: 261811 - DNA, 13 bp, Artificial Sequence
  Oligonucleotide for detection of SNP TSC0000573
tgagggttttttt

SEQ ID NO: 261812 - DNA, 13 bp, Artificial Sequence
  Oligonucleotide for detection of SNP TSC0000573
aaaaaaaccctca

SEQ ID NO: 261813 - DNA, 13 bp, Artificial Sequence
  Oligonucleotide for detection of SNP TSC0000573
tgaggggtttttt

SEQ ID NO: 261814 - DNA, 13 bp, Artificial Sequence
  Oligonucleotide for detection of SNP TSC0000573
aaaaaacccctca

SEQ ID NO: 261815 - DNA, 13 bp, Artificial Sequence
  Oligonucleotide for detection of SNP TSC0063522
aatttaagtttaa

SEQ ID NO: 261816 - DNA, 13 bp, Artificial Sequence
  Oligonucleotide for detection of SNP TSC0063522
ttaaacttaaatt

SEQ ID NO: 261817 - DNA, 13 bp, Artificial Sequence
  Oligonucleotide for detection of SNP TSC0063523
gttgttataaagg

SEQ ID NO: 261818 - DNA, 13 bp, Artificial Sequence
  Oligonucleotide for detection of SNP TSC0063523
cctttataacaac

SEQ ID NO: 261819 - DNA, 13 bp, Artificial Sequence
  Oligonucleotide for detection of SNP TSC0063523
gttgttttaaagg

SEQ ID NO: 261820 - DNA, 13 bp, Artificial Sequence
  Oligonucleotide for detection of SNP TSC0063523
cctttaaaacaac

SEQ ID NO: 261821 - DNA, 13 bp, Artificial Sequence
  Oligonucleotide for detection of SNP TSC0063523
tttttgtaatagy

SEQ ID NO: 261822 - DNA, 13 bp, Artificial Sequence
  Oligonucleotide for detection of SNP TSC0063523
rctattacaaaaa

SEQ ID NO: 261823 - DNA, 13 bp, Artificial Sequence
  Oligonucleotide for detection of SNP TSC0063523
tttttggaatagy

SEQ ID NO: 261824 - DNA, 13 bp, Artificial Sequence
  Oligonucleotide for detection of SNP TSC0063523
rctattccaaaaa

SEQ ID NO: 261825 - DNA, 13 bp, Artificial Sequence
  Oligonucleotide for detection of SNP TSC0063524
tgaaaaagattty

SEQ ID NO: 261826 - DNA, 13 bp, Artificial Sequence
  Oligonucleotide for detection of SNP TSC0063524
raaatctttttca

SEQ ID NO: 261827 - DNA, 13 bp, Artificial Sequence
  Oligonucleotide for detection of SNP TSC0063524
tgaaaatgattty

SEQ ID NO: 261828 - DNA, 13 bp, Artificial Sequence
  Oligonucleotide for detection of SNP TSC0063524
raaatcattttca

SEQ ID NO: 261829 - DNA, 13 bp, Artificial Sequence
  Oligonucleotide for detection of SNP TSC0063524
ggggtttttttta

SEQ ID NO: 261830 - DNA, 13 bp, Artificial Sequence
  Oligonucleotide for detection of SNP TSC0063524
taaaaaaaacccc

SEQ ID NO: 261831 - DNA, 13 bp, Artificial Sequence
  Oligonucleotide for detection of SNP TSC0063524
ggggttattttta

SEQ ID NO: 261832 - DNA, 13 bp, Artificial Sequence
  Oligonucleotide for detection of SNP TSC0063524
taaaaataacccc

SEQ ID NO: 261833 - DNA, 13 bp, Artificial Sequence
  Oligonucleotide for detection of SNP TSC0063527
gtaattagaatty

SEQ ID NO: 261834 - DNA, 13 bp, Artificial Sequence
  Oligonucleotide for detection of SNP TSC0063527
raattctaattac

SEQ ID NO: 261835 - DNA, 13 bp, Artificial Sequence
  Oligonucleotide for detection of SNP TSC0063527
gtaatttgaatty

SEQ ID NO: 261836 - DNA, 13 bp, Artificial Sequence
  Oligonucleotide for detection of SNP TSC0063527
raattcaaattac

SEQ ID NO: 261837 - DNA, 13 bp, Artificial Sequence
  Oligonucleotide for detection of SNP TSC0063527
gaattttgattgy

SEQ ID NO: 261838 - DNA, 13 bp, Artificial Sequence
  Oligonucleotide for detection of SNP TSC0063527
rcaatcaaaattc

SEQ ID NO: 261839 - DNA, 13 bp, Artificial Sequence
  Oligonucleotide for detection of SNP TSC0063527
gaatttagattgy

SEQ ID NO: 261840 - DNA, 13 bp, Artificial Sequence
  Oligonucleotide for detection of SNP TSC0063527
rcaatctaaattc

SEQ ID NO: 261841 - DNA, 13 bp, Artificial Sequence
  Oligonucleotide for detection of SNP TSC0063530
ttttgagtttaaa

SEQ ID NO: 261842 - DNA, 13 bp, Artificial Sequence
  Oligonucleotide for detection of SNP TSC0063530
tttaaactcaaaa

SEQ ID NO: 261843 - DNA, 13 bp, Artificial Sequence
  Oligonucleotide for detection of SNP TSC0063530
ttttgaatttaaa

SEQ ID NO: 261844 - DNA, 13 bp, Artificial Sequence
  Oligonucleotide for detection of SNP TSC0063530
tttaaattcaaaa

SEQ ID NO: 261845 - DNA, 13 bp, Artificial Sequence
  Oligonucleotide for detection of SNP TSC0063533
aaatttattgtgt

SEQ ID NO: 261846 - DNA, 13 bp, Artificial Sequence
  Oligonucleotide for detection of SNP TSC0063533
acacaataaattt

SEQ ID NO: 261847 - DNA, 13 bp, Artificial Sequence
  Oligonucleotide for detection of SNP TSC0063533
aaattcgttgtgt

SEQ ID NO: 261848 - DNA, 13 bp, Artificial Sequence
  Oligonucleotide for detection of SNP TSC0063533
acacaacgaattt

SEQ ID NO: 261849 - DNA, 13 bp, Artificial Sequence
  Oligonucleotide for detection of SNP TSC0063533
atatagtgaattt

SEQ ID NO: 261850 - DNA, 13 bp, Artificial Sequence
  Oligonucleotide for detection of SNP TSC0063533
aaattcactatat

SEQ ID NO: 261851 - DNA, 13 bp, Artificial Sequence
  Oligonucleotide for detection of SNP TSC0063533
atatagcgaattt

SEQ ID NO: 261852 - DNA, 13 bp, Artificial Sequence
  Oligonucleotide for detection of SNP TSC0063533
aaattcgctatat

SEQ ID NO: 261853 - DNA, 13 bp, Artificial Sequence
  Oligonucleotide for detection of SNP TSC0063534
ataattatttata

SEQ ID NO: 261854 - DNA, 13 bp, Artificial Sequence
  Oligonucleotide for detection of SNP TSC0063534
tataaataattat

SEQ ID NO: 261855 - DNA, 13 bp, Artificial Sequence
  Oligonucleotide for detection of SNP TSC0063534
ataattttttata

SEQ ID NO: 261856 - DNA, 13 bp, Artificial Sequence
  Oligonucleotide for detection of SNP TSC0063534
tataaaaaattat

SEQ ID NO: 261857 - DNA, 13 bp, Artificial Sequence
  Oligonucleotide for detection of SNP TSC0063534
tgtgaataattat

SEQ ID NO: 261858 - DNA, 13 bp, Artificial Sequence
  Oligonucleotide for detection of SNP TSC0063534
ataattattcaca

SEQ ID NO: 261859 - DNA, 13 bp, Artificial Sequence
  Oligonucleotide for detection of SNP TSC0063534
tgtgaagaattat

SEQ ID NO: 261860 - DNA, 13 bp, Artificial Sequence
  Oligonucleotide for detection of SNP TSC0063534
ataattcttcaca

SEQ ID NO: 261861 - DNA, 13 bp, Artificial Sequence
  Oligonucleotide for detection of SNP TSC0063535
ttggggataaaat

SEQ ID NO: 261862 - DNA, 13 bp, Artificial Sequence
  Oligonucleotide for detection of SNP TSC0063535
attttatccccaa

SEQ ID NO: 261863 - DNA, 13 bp, Artificial Sequence
  Oligonucleotide for detection of SNP TSC0063535
ttggggttaaaat

SEQ ID NO: 261864 - DNA, 13 bp, Artificial Sequence
  Oligonucleotide for detection of SNP TSC0063535
attttaaccccaa

SEQ ID NO: 261865 - DNA, 13 bp, Artificial Sequence
  Oligonucleotide for detection of SNP TSC0063535
attttagttttaa

SEQ ID NO: 261866 - DNA, 13 bp, Artificial Sequence
  Oligonucleotide for detection of SNP TSC0063535
ttaaaactaaaat

SEQ ID NO: 261867 - DNA, 13 bp, Artificial Sequence
  Oligonucleotide for detection of SNP TSC0063538
gtttaagagtagt

SEQ ID NO: 261868 - DNA, 13 bp, Artificial Sequence
  Oligonucleotide for detection of SNP TSC0063538
actactcttaaac

SEQ ID NO: 261869 - DNA, 13 bp, Artificial Sequence
  Oligonucleotide for detection of SNP TSC0063538
gtttaaaagtagt

SEQ ID NO: 261870 - DNA, 13 bp, Artificial Sequence
  Oligonucleotide for detection of SNP TSC0063538
actacttttaaac

SEQ ID NO: 261871 - DNA, 13 bp, Artificial Sequence
  Oligonucleotide for detection of SNP TSC0063539
aataagtaaaata

SEQ ID NO: 261872 - DNA, 13 bp, Artificial Sequence
  Oligonucleotide for detection of SNP TSC0063539
tattttacttatt

SEQ ID NO: 261873 - DNA, 13 bp, Artificial Sequence
  Oligonucleotide for detection of SNP TSC0063539
aataaggaaaata

SEQ ID NO: 261874 - DNA, 13 bp, Artificial Sequence
  Oligonucleotide for detection of SNP TSC0063539
tattttccttatt

SEQ ID NO: 261875 - DNA, 13 bp, Artificial Sequence
  Oligonucleotide for detection of SNP TSC0063540
taaagaataataa

SEQ ID NO: 261876 - DNA, 13 bp, Artificial Sequence
  Oligonucleotide for detection of SNP TSC0063540
ttattattcttta

SEQ ID NO: 261877 - DNA, 13 bp, Artificial Sequence
  Oligonucleotide for detection of SNP TSC0063540
taaagagtaataa

SEQ ID NO: 261878 - DNA, 13 bp, Artificial Sequence
  Oligonucleotide for detection of SNP TSC0063540
ttattactcttta

SEQ ID NO: 261879 - DNA, 13 bp, Artificial Sequence
  Oligonucleotide for detection of SNP TSC0063544
gggtaatggaaat

SEQ ID NO: 261880 - DNA, 13 bp, Artificial Sequence
  Oligonucleotide for detection of SNP TSC0063544
atttccattaccc

SEQ ID NO: 261881 - DNA, 13 bp, Artificial Sequence
  Oligonucleotide for detection of SNP TSC0063544
gggtaacggaaat

SEQ ID NO: 261882 - DNA, 13 bp, Artificial Sequence
  Oligonucleotide for detection of SNP TSC0063544
atttccgttaccc

SEQ ID NO: 261883 - DNA, 13 bp, Artificial Sequence
  Oligonucleotide for detection of SNP TSC0063546
aaatttaagagga

SEQ ID NO: 261884 - DNA, 13 bp, Artificial Sequence
  Oligonucleotide for detection of SNP TSC0063546
tcctcttaaattt

SEQ ID NO: 261885 - DNA, 13 bp, Artificial Sequence
  Oligonucleotide for detection of SNP TSC0063546
aaatttgagagga

SEQ ID NO: 261886 - DNA, 13 bp, Artificial Sequence
  Oligonucleotide for detection of SNP TSC0063546
tcctctcaaattt

SEQ ID NO: 261887 - DNA, 13 bp, Artificial Sequence
  Oligonucleotide for detection of SNP TSC0063546
aaattcgagagga

SEQ ID NO: 261888 - DNA, 13 bp, Artificial Sequence
  Oligonucleotide for detection of SNP TSC0063546
tcctctcgaattt

SEQ ID NO: 261889 - DNA, 13 bp, Artificial Sequence
  Oligonucleotide for detection of SNP TSC0063546
ttttttcgggttt

SEQ ID NO: 261890 - DNA, 13 bp, Artificial Sequence
  Oligonucleotide for detection of SNP TSC0063546
aaacccgaaaaaa

SEQ ID NO: 261891 - DNA, 13 bp, Artificial Sequence
  Oligonucleotide for detection of SNP TSC0063547
aagttatgtttta

SEQ ID NO: 261892 - DNA, 13 bp, Artificial Sequence
  Oligonucleotide for detection of SNP TSC0063547
taaaacataactt

SEQ ID NO: 261893 - DNA, 13 bp, Artificial Sequence
  Oligonucleotide for detection of SNP TSC0063547
aagttaggtttta

SEQ ID NO: 261894 - DNA, 13 bp, Artificial Sequence
  Oligonucleotide for detection of SNP TSC0063547
taaaacctaactt

SEQ ID NO: 261895 - DNA, 13 bp, Artificial Sequence
  Oligonucleotide for detection of SNP TSC0063547
tgaagtatgattt

SEQ ID NO: 261896 - DNA, 13 bp, Artificial Sequence
  Oligonucleotide for detection of SNP TSC0063547
aaatcatacttca

SEQ ID NO: 261897 - DNA, 13 bp, Artificial Sequence
  Oligonucleotide for detection of SNP TSC0063547
tgaagtttgattt

SEQ ID NO: 261898 - DNA, 13 bp, Artificial Sequence
  Oligonucleotide for detection of SNP TSC0063547
aaatcaaacttca

SEQ ID NO: 261899 - DNA, 13 bp, Artificial Sequence
  Oligonucleotide for detection of SNP TSC0063548
ggaaatttatttg

SEQ ID NO: 261900 - DNA, 13 bp, Artificial Sequence
  Oligonucleotide for detection of SNP TSC0063548
caaataaatttcc

SEQ ID NO: 261901 - DNA, 13 bp, Artificial Sequence
  Oligonucleotide for detection of SNP TSC0063548
ggaaatgtatttg

SEQ ID NO: 261902 - DNA, 13 bp, Artificial Sequence
  Oligonucleotide for detection of SNP TSC0063548
caaatacatttcc

SEQ ID NO: 261903 - DNA, 13 bp, Artificial Sequence
  Oligonucleotide for detection of SNP TSC0063549
ttgggtaaagtaa

SEQ ID NO: 261904 - DNA, 13 bp, Artificial Sequence
  Oligonucleotide for detection of SNP TSC0063549
ttactttacccaa

SEQ ID NO: 261905 - DNA, 13 bp, Artificial Sequence
  Oligonucleotide for detection of SNP TSC0063549
ttgggtgaagtaa

SEQ ID NO: 261906 - DNA, 13 bp, Artificial Sequence
  Oligonucleotide for detection of SNP TSC0063549
ttacttcacccaa

SEQ ID NO: 261907 - DNA, 13 bp, Artificial Sequence
  Oligonucleotide for detection of SNP TSC0063549
ttgggcgaagtaa

SEQ ID NO: 261908 - DNA, 13 bp, Artificial Sequence
  Oligonucleotide for detection of SNP TSC0063549
ttacttcgcccaa

SEQ ID NO: 261909 - DNA, 13 bp, Artificial Sequence
  Oligonucleotide for detection of SNP TSC0063550
tgtgtatgttata

SEQ ID NO: 261910 - DNA, 13 bp, Artificial Sequence
  Oligonucleotide for detection of SNP TSC0063550
tataacatacaca

SEQ ID NO: 261911 - DNA, 13 bp, Artificial Sequence
  Oligonucleotide for detection of SNP TSC0063550
tgcgtatgttata

SEQ ID NO: 261912 - DNA, 13 bp, Artificial Sequence
  Oligonucleotide for detection of SNP TSC0063550
tataacatacgca

SEQ ID NO: 261913 - DNA, 13 bp, Artificial Sequence
  Oligonucleotide for detection of SNP TSC0063550
tgtgtacgttata

SEQ ID NO: 261914 - DNA, 13 bp, Artificial Sequence
  Oligonucleotide for detection of SNP TSC0063550
tataacgtacaca

SEQ ID NO: 261915 - DNA, 13 bp, Artificial Sequence
  Oligonucleotide for detection of SNP TSC0063550
tgcgtacgttata

SEQ ID NO: 261916 - DNA, 13 bp, Artificial Sequence
  Oligonucleotide for detection of SNP TSC0063550
tataacgtacgca

SEQ ID NO: 261917 - DNA, 13 bp, Artificial Sequence
  Oligonucleotide for detection of SNP TSC0063550
tatagtgtatgta

SEQ ID NO: 261918 - DNA, 13 bp, Artificial Sequence
  Oligonucleotide for detection of SNP TSC0063550
tacatacactata

SEQ ID NO: 261919 - DNA, 13 bp, Artificial Sequence
  Oligonucleotide for detection of SNP TSC0063550
tatagtatatgta

SEQ ID NO: 261920 - DNA, 13 bp, Artificial Sequence
  Oligonucleotide for detection of SNP TSC0063550
tacatatactata

SEQ ID NO: 261921 - DNA, 13 bp, Artificial Sequence
  Oligonucleotide for detection of SNP TSC0063550
tatagcgtatgta

SEQ ID NO: 261922 - DNA, 13 bp, Artificial Sequence
  Oligonucleotide for detection of SNP TSC0063550
tacatacgctata

SEQ ID NO: 261923 - DNA, 13 bp, Artificial Sequence
  Oligonucleotide for detection of SNP TSC0063550
tatagtatacgta

SEQ ID NO: 261924 - DNA, 13 bp, Artificial Sequence
  Oligonucleotide for detection of SNP TSC0063550
tacgtatactata

SEQ ID NO: 261925 - DNA, 13 bp, Artificial Sequence
  Oligonucleotide for detection of SNP TSC0063550
tatagtgtacgta

SEQ ID NO: 261926 - DNA, 13 bp, Artificial Sequence
  Oligonucleotide for detection of SNP TSC0063550
tacgtacactata

SEQ ID NO: 261927 - DNA, 13 bp, Artificial Sequence
  Oligonucleotide for detection of SNP TSC0063550
tatagcgtacgta

SEQ ID NO: 261928 - DNA, 13 bp, Artificial Sequence
  Oligonucleotide for detection of SNP TSC0063550
tacgtacgctata

SEQ ID NO: 261929 - DNA, 13 bp, Artificial Sequence
  Oligonucleotide for detection of SNP TSC0063551
gtgttatgttaaa

SEQ ID NO: 261930 - DNA, 13 bp, Artificial Sequence
  Oligonucleotide for detection of SNP TSC0063551
tttaacataacac

SEQ ID NO: 261931 - DNA, 13 bp, Artificial Sequence
  Oligonucleotide for detection of SNP TSC0063551
gtgttacgttaaa

SEQ ID NO: 261932 - DNA, 13 bp, Artificial Sequence
  Oligonucleotide for detection of SNP TSC0063551
tttaacgtaacac

SEQ ID NO: 261933 - DNA, 13 bp, Artificial Sequence
  Oligonucleotide for detection of SNP TSC0063551
tttggtgtagtay

SEQ ID NO: 261934 - DNA, 13 bp, Artificial Sequence
  Oligonucleotide for detection of SNP TSC0063551
rtactacaccaaa

SEQ ID NO: 261935 - DNA, 13 bp, Artificial Sequence
  Oligonucleotide for detection of SNP TSC0063551
tttggtatagtay

SEQ ID NO: 261936 - DNA, 13 bp, Artificial Sequence
  Oligonucleotide for detection of SNP TSC0063551
rtactataccaaa

SEQ ID NO: 261937 - DNA, 13 bp, Artificial Sequence
  Oligonucleotide for detection of SNP TSC0063551
tttggcgtagtay

SEQ ID NO: 261938 - DNA, 13 bp, Artificial Sequence
  Oligonucleotide for detection of SNP TSC0063551
rtactacgccaaa

SEQ ID NO: 261939 - DNA, 13 bp, Artificial Sequence
  Oligonucleotide for detection of SNP TSC0063552
tggttttttatag

SEQ ID NO: 261940 - DNA, 13 bp, Artificial Sequence
  Oligonucleotide for detection of SNP TSC0063552
ctataaaaaacca

SEQ ID NO: 261941 - DNA, 13 bp, Artificial Sequence
  Oligonucleotide for detection of SNP TSC0063552
tggtttgttatag

SEQ ID NO: 261942 - DNA, 13 bp, Artificial Sequence
  Oligonucleotide for detection of SNP TSC0063552
ctataacaaacca

SEQ ID NO: 261943 - DNA, 13 bp, Artificial Sequence
  Oligonucleotide for detection of SNP TSC0063552
tggttcgttatag

SEQ ID NO: 261944 - DNA, 13 bp, Artificial Sequence
  Oligonucleotide for detection of SNP TSC0063552
ctataacgaacca

SEQ ID NO: 261945 - DNA, 13 bp, Artificial Sequence
  Oligonucleotide for detection of SNP TSC0063552
ttgtagaggatta

SEQ ID NO: 261946 - DNA, 13 bp, Artificial Sequence
  Oligonucleotide for detection of SNP TSC0063552
taatcctctacaa

SEQ ID NO: 261947 - DNA, 13 bp, Artificial Sequence
  Oligonucleotide for detection of SNP TSC0063552
ttgtagtggatta

SEQ ID NO: 261948 - DNA, 13 bp, Artificial Sequence
  Oligonucleotide for detection of SNP TSC0063552
taatccactacaa

SEQ ID NO: 261949 - DNA, 13 bp, Artificial Sequence
  Oligonucleotide for detection of SNP TSC0063552
ttgtagcggatta

SEQ ID NO: 261950 - DNA, 13 bp, Artificial Sequence
  Oligonucleotide for detection of SNP TSC0063552
taatccgctacaa

SEQ ID NO: 261951 - DNA, 13 bp, Artificial Sequence
  Oligonucleotide for detection of SNP TSC0063553
aggtatgttggga

SEQ ID NO: 261952 - DNA, 13 bp, Artificial Sequence
  Oligonucleotide for detection of SNP TSC0063553
tcccaacatacct

SEQ ID NO: 261953 - DNA, 13 bp, Artificial Sequence
  Oligonucleotide for detection of SNP TSC0063553
aggtatattggga

SEQ ID NO: 261954 - DNA, 13 bp, Artificial Sequence
  Oligonucleotide for detection of SNP TSC0063553
tcccaatatacct

SEQ ID NO: 261955 - DNA, 13 bp, Artificial Sequence
  Oligonucleotide for detection of SNP TSC0063553
aggtacgttggga

SEQ ID NO: 261956 - DNA, 13 bp, Artificial Sequence
  Oligonucleotide for detection of SNP TSC0063553
tcccaacgtacct

SEQ ID NO: 261957 - DNA, 13 bp, Artificial Sequence
  Oligonucleotide for detection of SNP TSC0063554
gtagaagggttgt

SEQ ID NO: 261958 - DNA, 13 bp, Artificial Sequence
  Oligonucleotide for detection of SNP TSC0063554
acaacccttctac

SEQ ID NO: 261959 - DNA, 13 bp, Artificial Sequence
  Oligonucleotide for detection of SNP TSC0063554
gtagaaaggttgt

SEQ ID NO: 261960 - DNA, 13 bp, Artificial Sequence
  Oligonucleotide for detection of SNP TSC0063554
acaacctttctac

SEQ ID NO: 261961 - DNA, 13 bp, Artificial Sequence
  Oligonucleotide for detection of SNP TSC0063555
ttaaaatggagta

SEQ ID NO: 261962 - DNA, 13 bp, Artificial Sequence
  Oligonucleotide for detection of SNP TSC0063555
tactccattttaa

SEQ ID NO: 261963 - DNA, 13 bp, Artificial Sequence
  Oligonucleotide for detection of SNP TSC0063555
ttaaaacggagta

SEQ ID NO: 261964 - DNA, 13 bp, Artificial Sequence
  Oligonucleotide for detection of SNP TSC0063555
tactccgttttaa

SEQ ID NO: 261965 - DNA, 13 bp, Artificial Sequence
  Oligonucleotide for detection of SNP TSC0063555
tatttcgttttaa

SEQ ID NO: 261966 - DNA, 13 bp, Artificial Sequence
  Oligonucleotide for detection of SNP TSC0063555
ttaaaacgaaata

SEQ ID NO: 261967 - DNA, 13 bp, Artificial Sequence
  Oligonucleotide for detection of SNP TSC0063556
tttttttaagtga

SEQ ID NO: 261968 - DNA, 13 bp, Artificial Sequence
  Oligonucleotide for detection of SNP TSC0063556
tcacttaaaaaaa

SEQ ID NO: 261969 - DNA, 13 bp, Artificial Sequence
  Oligonucleotide for detection of SNP TSC0063556
ttttttaaagtga

SEQ ID NO: 261970 - DNA, 13 bp, Artificial Sequence
  Oligonucleotide for detection of SNP TSC0063556
tcactttaaaaaa

SEQ ID NO: 261971 - DNA, 13 bp, Artificial Sequence
  Oligonucleotide for detection of SNP TSC0063562
attggtttgagat

SEQ ID NO: 261972 - DNA, 13 bp, Artificial Sequence
  Oligonucleotide for detection of SNP TSC0063562
atctcaaaccaat

SEQ ID NO: 261973 - DNA, 13 bp, Artificial Sequence
  Oligonucleotide for detection of SNP TSC0063562
attggtgtgagat

SEQ ID NO: 261974 - DNA, 13 bp, Artificial Sequence
  Oligonucleotide for detection of SNP TSC0063562
atctcacaccaat

SEQ ID NO: 261975 - DNA, 13 bp, Artificial Sequence
  Oligonucleotide for detection of SNP TSC0063562
attttagattagt

SEQ ID NO: 261976 - DNA, 13 bp, Artificial Sequence
  Oligonucleotide for detection of SNP TSC0063562
actaatctaaaat

SEQ ID NO: 261977 - DNA, 13 bp, Artificial Sequence
  Oligonucleotide for detection of SNP TSC0063562
attttatattagt

SEQ ID NO: 261978 - DNA, 13 bp, Artificial Sequence
  Oligonucleotide for detection of SNP TSC0063562
actaatataaaat

SEQ ID NO: 261979 - DNA, 13 bp, Artificial Sequence
  Oligonucleotide for detection of SNP TSC0063563
ttgtttttaagat

SEQ ID NO: 261980 - DNA, 13 bp, Artificial Sequence
  Oligonucleotide for detection of SNP TSC0063563
atcttaaaaacaa

SEQ ID NO: 261981 - DNA, 13 bp, Artificial Sequence
  Oligonucleotide for detection of SNP TSC0063563
ttgtttgtaagat

SEQ ID NO: 261982 - DNA, 13 bp, Artificial Sequence
  Oligonucleotide for detection of SNP TSC0063563
atcttacaaacaa

SEQ ID NO: 261983 - DNA, 13 bp, Artificial Sequence
  Oligonucleotide for detection of SNP TSC0063563
attttggaaatag

SEQ ID NO: 261984 - DNA, 13 bp, Artificial Sequence
  Oligonucleotide for detection of SNP TSC0063563
ctatttccaaaat

SEQ ID NO: 261985 - DNA, 13 bp, Artificial Sequence
  Oligonucleotide for detection of SNP TSC0063563
attttgtaaatag

SEQ ID NO: 261986 - DNA, 13 bp, Artificial Sequence
  Oligonucleotide for detection of SNP TSC0063563
ctatttacaaaat

SEQ ID NO: 261987 - DNA, 13 bp, Artificial Sequence
  Oligonucleotide for detection of SNP TSC0063565
gttgggaatttga

SEQ ID NO: 261988 - DNA, 13 bp, Artificial Sequence
  Oligonucleotide for detection of SNP TSC0063565
tcaaattcccaac

SEQ ID NO: 261989 - DNA, 13 bp, Artificial Sequence
  Oligonucleotide for detection of SNP TSC0063565
gttgggtatttga

SEQ ID NO: 261990 - DNA, 13 bp, Artificial Sequence
  Oligonucleotide for detection of SNP TSC0063565
tcaaatacccaac

SEQ ID NO: 261991 - DNA, 13 bp, Artificial Sequence
  Oligonucleotide for detection of SNP TSC0063565
ttaaatttttagy

SEQ ID NO: 261992 - DNA, 13 bp, Artificial Sequence
  Oligonucleotide for detection of SNP TSC0063565
rctaaaaatttaa

SEQ ID NO: 261993 - DNA, 13 bp, Artificial Sequence
  Oligonucleotide for detection of SNP TSC0063565
ttaaatgtttagy

SEQ ID NO: 261994 - DNA, 13 bp, Artificial Sequence
  Oligonucleotide for detection of SNP TSC0063565
rctaaacatttaa

SEQ ID NO: 261995 - DNA, 13 bp, Artificial Sequence
  Oligonucleotide for detection of SNP TSC0063566
aattgtagtattt

SEQ ID NO: 261996 - DNA, 13 bp, Artificial Sequence
  Oligonucleotide for detection of SNP TSC0063566
aaatactacaatt

SEQ ID NO: 261997 - DNA, 13 bp, Artificial Sequence
  Oligonucleotide for detection of SNP TSC0063566
aattgtggtattt

SEQ ID NO: 261998 - DNA, 13 bp, Artificial Sequence
  Oligonucleotide for detection of SNP TSC0063566
aaataccacaatt

SEQ ID NO: 261999 - DNA, 13 bp, Artificial Sequence
  Oligonucleotide for detection of SNP TSC0063566
aattgcggtattt

SEQ ID NO: 262000 - DNA, 13 bp, Artificial Sequence
  Oligonucleotide for detection of SNP TSC0063566
aaataccgcaatt

SEQ ID NO: 262001 - DNA, 13 bp, Artificial Sequence
  Oligonucleotide for detection of SNP TSC0063566
aaatattgtaatt

SEQ ID NO: 262002 - DNA, 13 bp, Artificial Sequence
  Oligonucleotide for detection of SNP TSC0063566
aattacaatattt

SEQ ID NO: 262003 - DNA, 13 bp, Artificial Sequence
  Oligonucleotide for detection of SNP TSC0063566
aaatatcgtaatt

SEQ ID NO: 262004 - DNA, 13 bp, Artificial Sequence
  Oligonucleotide for detection of SNP TSC0063566
aattacgatattt

SEQ ID NO: 262005 - DNA, 13 bp, Artificial Sequence
  Oligonucleotide for detection of SNP TSC0063568
tagttaaatttty

SEQ ID NO: 262006 - DNA, 13 bp, Artificial Sequence
  Oligonucleotide for detection of SNP TSC0063568
raaaatttaacta

SEQ ID NO: 262007 - DNA, 13 bp, Artificial Sequence
  Oligonucleotide for detection of SNP TSC0063568
tagttatatttty

SEQ ID NO: 262008 - DNA, 13 bp, Artificial Sequence
  Oligonucleotide for detection of SNP TSC0063568
raaaatataacta

SEQ ID NO: 262009 - DNA, 13 bp, Artificial Sequence
  Oligonucleotide for detection of SNP TSC0063568
ggaaatttggtta

SEQ ID NO: 262010 - DNA, 13 bp, Artificial Sequence
  Oligonucleotide for detection of SNP TSC0063568
taaccaaatttcc

SEQ ID NO: 262011 - DNA, 13 bp, Artificial Sequence
  Oligonucleotide for detection of SNP TSC0063568
ggaaatatggtta

SEQ ID NO: 262012 - DNA, 13 bp, Artificial Sequence
  Oligonucleotide for detection of SNP TSC0063568
taaccatatttcc

SEQ ID NO: 262013 - DNA, 13 bp, Artificial Sequence
  Oligonucleotide for detection of SNP TSC0063569
tggtataattgat

SEQ ID NO: 262014 - DNA, 13 bp, Artificial Sequence
  Oligonucleotide for detection of SNP TSC0063569
atcaattatacca

SEQ ID NO: 262015 - DNA, 13 bp, Artificial Sequence
  Oligonucleotide for detection of SNP TSC0063569
tggtattattgat

SEQ ID NO: 262016 - DNA, 13 bp, Artificial Sequence
  Oligonucleotide for detection of SNP TSC0063569
atcaataatacca

SEQ ID NO: 262017 - DNA, 13 bp, Artificial Sequence
  Oligonucleotide for detection of SNP TSC0063569
attagttgtatta

SEQ ID NO: 262018 - DNA, 13 bp, Artificial Sequence
  Oligonucleotide for detection of SNP TSC0063569
taatacaactaat

SEQ ID NO: 262019 - DNA, 13 bp, Artificial Sequence
  Oligonucleotide for detection of SNP TSC0063571
ttatgggttgaag

SEQ ID NO: 262020 - DNA, 13 bp, Artificial Sequence
  Oligonucleotide for detection of SNP TSC0063571
cttcaacccataa

SEQ ID NO: 262021 - DNA, 13 bp, Artificial Sequence
  Oligonucleotide for detection of SNP TSC0063571
ttatggattgaag

SEQ ID NO: 262022 - DNA, 13 bp, Artificial Sequence
  Oligonucleotide for detection of SNP TSC0063571
cttcaatccataa

SEQ ID NO: 262023 - DNA, 13 bp, Artificial Sequence
  Oligonucleotide for detection of SNP TSC0063572
ggattaaagatty

SEQ ID NO: 262024 - DNA, 13 bp, Artificial Sequence
  Oligonucleotide for detection of SNP TSC0063572
raatctttaatcc

SEQ ID NO: 262025 - DNA, 13 bp, Artificial Sequence
  Oligonucleotide for detection of SNP TSC0063572
ggattatagatty

SEQ ID NO: 262026 - DNA, 13 bp, Artificial Sequence
  Oligonucleotide for detection of SNP TSC0063572
raatctataatcc

SEQ ID NO: 262027 - DNA, 13 bp, Artificial Sequence
  Oligonucleotide for detection of SNP TSC0063572
gggtttttgatty

SEQ ID NO: 262028 - DNA, 13 bp, Artificial Sequence
  Oligonucleotide for detection of SNP TSC0063572
raatcaaaaaccc

SEQ ID NO: 262029 - DNA, 13 bp, Artificial Sequence
  Oligonucleotide for detection of SNP TSC0063572
gggtttatgatty

SEQ ID NO: 262030 - DNA, 13 bp, Artificial Sequence
  Oligonucleotide for detection of SNP TSC0063572
raatcataaaccc

SEQ ID NO: 262031 - DNA, 13 bp, Artificial Sequence
  Oligonucleotide for detection of SNP TSC0063575
gaaaattgtagga

SEQ ID NO: 262032 - DNA, 13 bp, Artificial Sequence
  Oligonucleotide for detection of SNP TSC0063575
tcctacaattttc

SEQ ID NO: 262033 - DNA, 13 bp, Artificial Sequence
  Oligonucleotide for detection of SNP TSC0063575
gaaaatcgtagga

SEQ ID NO: 262034 - DNA, 13 bp, Artificial Sequence
  Oligonucleotide for detection of SNP TSC0063575
tcctacgattttc

SEQ ID NO: 262035 - DNA, 13 bp, Artificial Sequence
  Oligonucleotide for detection of SNP TSC0063580
gataaggatttty

SEQ ID NO: 262036 - DNA, 13 bp, Artificial Sequence
  Oligonucleotide for detection of SNP TSC0063580
raaaatccttatc

SEQ ID NO: 262037 - DNA, 13 bp, Artificial Sequence
  Oligonucleotide for detection of SNP TSC0063580
gataagaatttty

SEQ ID NO: 262038 - DNA, 13 bp, Artificial Sequence
  Oligonucleotide for detection of SNP TSC0063580
raaaattcttatc

SEQ ID NO: 262039 - DNA, 13 bp, Artificial Sequence
  Oligonucleotide for detection of SNP TSC0063582
tgattagtggtaa

SEQ ID NO: 262040 - DNA, 13 bp, Artificial Sequence
  Oligonucleotide for detection of SNP TSC0063582
ttaccactaatca

SEQ ID NO: 262041 - DNA, 13 bp, Artificial Sequence
  Oligonucleotide for detection of SNP TSC0063582
tgattaatggtaa

SEQ ID NO: 262042 - DNA, 13 bp, Artificial Sequence
  Oligonucleotide for detection of SNP TSC0063582
ttaccattaatca

SEQ ID NO: 262043 - DNA, 13 bp, Artificial Sequence
  Oligonucleotide for detection of SNP TSC0063583
gatagtatatttg

SEQ ID NO: 262044 - DNA, 13 bp, Artificial Sequence
  Oligonucleotide for detection of SNP TSC0063583
caaatatactatc

SEQ ID NO: 262045 - DNA, 13 bp, Artificial Sequence
  Oligonucleotide for detection of SNP TSC0063583
gatagtgtatttg

SEQ ID NO: 262046 - DNA, 13 bp, Artificial Sequence
  Oligonucleotide for detection of SNP TSC0063583
caaatacactatc

SEQ ID NO: 262047 - DNA, 13 bp, Artificial Sequence
  Oligonucleotide for detection of SNP TSC0063584
ttaggaagattty

SEQ ID NO: 262048 - DNA, 13 bp, Artificial Sequence
  Oligonucleotide for detection of SNP TSC0063584
raaatcttcctaa

SEQ ID NO: 262049 - DNA, 13 bp, Artificial Sequence
  Oligonucleotide for detection of SNP TSC0063584
ttaggaggattty

SEQ ID NO: 262050 - DNA, 13 bp, Artificial Sequence
  Oligonucleotide for detection of SNP TSC0063584
raaatcctcctaa

SEQ ID NO: 262051 - DNA, 13 bp, Artificial Sequence
  Oligonucleotide for detection of SNP TSC0009090
agataaattggta

SEQ ID NO: 262052 - DNA, 13 bp, Artificial Sequence
  Oligonucleotide for detection of SNP TSC0009090
taccaatttatct

SEQ ID NO: 262053 - DNA, 13 bp, Artificial Sequence
  Oligonucleotide for detection of SNP TSC0009090
agataatttggta

SEQ ID NO: 262054 - DNA, 13 bp, Artificial Sequence
  Oligonucleotide for detection of SNP TSC0009090
taccaaattatct

SEQ ID NO: 262055 - DNA, 13 bp, Artificial Sequence
  Oligonucleotide for detection of SNP TSC0009090
tgttagattgttt

SEQ ID NO: 262056 - DNA, 13 bp, Artificial Sequence
  Oligonucleotide for detection of SNP TSC0009090
aaacaatctaaca

SEQ ID NO: 262057 - DNA, 13 bp, Artificial Sequence
  Oligonucleotide for detection of SNP TSC0009091
ggattgttgttat

SEQ ID NO: 262058 - DNA, 13 bp, Artificial Sequence
  Oligonucleotide for detection of SNP TSC0009091
ataacaacaatcc

SEQ ID NO: 262059 - DNA, 13 bp, Artificial Sequence
  Oligonucleotide for detection of SNP TSC0009091
ggattggtgttat

SEQ ID NO: 262060 - DNA, 13 bp, Artificial Sequence
  Oligonucleotide for detection of SNP TSC0009091
ataacaccaatcc

SEQ ID NO: 262061 - DNA, 13 bp, Artificial Sequence
  Oligonucleotide for detection of SNP TSC0009091
atggtagtaatty

SEQ ID NO: 262062 - DNA, 13 bp, Artificial Sequence
  Oligonucleotide for detection of SNP TSC0009091
raattactaccat

SEQ ID NO: 262063 - DNA, 13 bp, Artificial Sequence
  Oligonucleotide for detection of SNP TSC0009091
atggtattaatty

SEQ ID NO: 262064 - DNA, 13 bp, Artificial Sequence
  Oligonucleotide for detection of SNP TSC0009091
raattaataccat

SEQ ID NO: 262065 - DNA, 13 bp, Artificial Sequence
  Oligonucleotide for detection of SNP TSC0063585
aaatttataagaa

SEQ ID NO: 262066 - DNA, 13 bp, Artificial Sequence
  Oligonucleotide for detection of SNP TSC0063585
ttcttataaattt

SEQ ID NO: 262067 - DNA, 13 bp, Artificial Sequence
  Oligonucleotide for detection of SNP TSC0063585
aaatttgtaagaa

SEQ ID NO: 262068 - DNA, 13 bp, Artificial Sequence
  Oligonucleotide for detection of SNP TSC0063585
ttcttacaaattt

SEQ ID NO: 262069 - DNA, 13 bp, Artificial Sequence
  Oligonucleotide for detection of SNP TSC0063585
aaattcgtaagaa

SEQ ID NO: 262070 - DNA, 13 bp, Artificial Sequence
  Oligonucleotide for detection of SNP TSC0063585
ttcttacgaattt

SEQ ID NO: 262071 - DNA, 13 bp, Artificial Sequence
  Oligonucleotide for detection of SNP TSC0063588
agatttaggttty

SEQ ID NO: 262072 - DNA, 13 bp, Artificial Sequence
  Oligonucleotide for detection of SNP TSC0063588
raaacctaaatct

SEQ ID NO: 262073 - DNA, 13 bp, Artificial Sequence
  Oligonucleotide for detection of SNP TSC0063588
agattttggttty

SEQ ID NO: 262074 - DNA, 13 bp, Artificial Sequence
  Oligonucleotide for detection of SNP TSC0063588
raaaccaaaatct

SEQ ID NO: 262075 - DNA, 13 bp, Artificial Sequence
  Oligonucleotide for detection of SNP TSC0063588
agatttcggttty

SEQ ID NO: 262076 - DNA, 13 bp, Artificial Sequence
  Oligonucleotide for detection of SNP TSC0063588
raaaccgaaatct

SEQ ID NO: 262077 - DNA, 13 bp, Artificial Sequence
  Oligonucleotide for detection of SNP TSC0063588
gaggtttgggttt

SEQ ID NO: 262078 - DNA, 13 bp, Artificial Sequence
  Oligonucleotide for detection of SNP TSC0063588
aaacccaaacctc

SEQ ID NO: 262079 - DNA, 13 bp, Artificial Sequence
  Oligonucleotide for detection of SNP TSC0063588
gaggttggggttt

SEQ ID NO: 262080 - DNA, 13 bp, Artificial Sequence
  Oligonucleotide for detection of SNP TSC0063588
aaaccccaacctc

SEQ ID NO: 262081 - DNA, 13 bp, Artificial Sequence
  Oligonucleotide for detection of SNP TSC0063588
gaggtcggggttt

SEQ ID NO: 262082 - DNA, 13 bp, Artificial Sequence
  Oligonucleotide for detection of SNP TSC0063588
aaaccccgacctc

SEQ ID NO: 262083 - DNA, 13 bp, Artificial Sequence
  Oligonucleotide for detection of SNP TSC0063589
aaataaagttttt

SEQ ID NO: 262084 - DNA, 13 bp, Artificial Sequence
  Oligonucleotide for detection of SNP TSC0063589
aaaaactttattt

SEQ ID NO: 262085 - DNA, 13 bp, Artificial Sequence
  Oligonucleotide for detection of SNP TSC0063589
aaataatgttttt

SEQ ID NO: 262086 - DNA, 13 bp, Artificial Sequence
  Oligonucleotide for detection of SNP TSC0063589
aaaaacattattt

SEQ ID NO: 262087 - DNA, 13 bp, Artificial Sequence
  Oligonucleotide for detection of SNP TSC0063589
aaataacgttttt

SEQ ID NO: 262088 - DNA, 13 bp, Artificial Sequence
  Oligonucleotide for detection of SNP TSC0063589
aaaaacgttattt

SEQ ID NO: 262089 - DNA, 13 bp, Artificial Sequence
  Oligonucleotide for detection of SNP TSC0063589
agaaattttattt

SEQ ID NO: 262090 - DNA, 13 bp, Artificial Sequence
  Oligonucleotide for detection of SNP TSC0063589
aaataaaatttct

SEQ ID NO: 262091 - DNA, 13 bp, Artificial Sequence
  Oligonucleotide for detection of SNP TSC0063589
agaaatgttattt

SEQ ID NO: 262092 - DNA, 13 bp, Artificial Sequence
  Oligonucleotide for detection of SNP TSC0063589
aaataacatttct

SEQ ID NO: 262093 - DNA, 13 bp, Artificial Sequence
  Oligonucleotide for detection of SNP TSC0063589
agaaacgttattt

SEQ ID NO: 262094 - DNA, 13 bp, Artificial Sequence
  Oligonucleotide for detection of SNP TSC0063589
aaataacgtttct

SEQ ID NO: 262095 - DNA, 13 bp, Artificial Sequence
  Oligonucleotide for detection of SNP TSC0063595
ttaatattgtaga

SEQ ID NO: 262096 - DNA, 13 bp, Artificial Sequence
  Oligonucleotide for detection of SNP TSC0063595
tctacaatattaa

SEQ ID NO: 262097 - DNA, 13 bp, Artificial Sequence
  Oligonucleotide for detection of SNP TSC0063595
ttaatagtgtaga

SEQ ID NO: 262098 - DNA, 13 bp, Artificial Sequence
  Oligonucleotide for detection of SNP TSC0063595
tctacactattaa

SEQ ID NO: 262099 - DNA, 13 bp, Artificial Sequence
  Oligonucleotide for detection of SNP TSC0063595
ttaatatcgtaga

SEQ ID NO: 262100 - DNA, 13 bp, Artificial Sequence
  Oligonucleotide for detection of SNP TSC0063595
tctacgatattaa

SEQ ID NO: 262101 - DNA, 13 bp, Artificial Sequence
  Oligonucleotide for detection of SNP TSC0063595
ttaatagcgtaga

SEQ ID NO: 262102 - DNA, 13 bp, Artificial Sequence
  Oligonucleotide for detection of SNP TSC0063595
tctacgctattaa

SEQ ID NO: 262103 - DNA, 13 bp, Artificial Sequence
  Oligonucleotide for detection of SNP TSC0063595
tttgtgatgttgg

SEQ ID NO: 262104 - DNA, 13 bp, Artificial Sequence
  Oligonucleotide for detection of SNP TSC0063595
ccaacatcacaaa

SEQ ID NO: 262105 - DNA, 13 bp, Artificial Sequence
  Oligonucleotide for detection of SNP TSC0063595
tttgtgttgttgg

SEQ ID NO: 262106 - DNA, 13 bp, Artificial Sequence
  Oligonucleotide for detection of SNP TSC0063595
ccaacaacacaaa

SEQ ID NO: 262107 - DNA, 13 bp, Artificial Sequence
  Oligonucleotide for detection of SNP TSC0063595
tttgcgatgttgg

SEQ ID NO: 262108 - DNA, 13 bp, Artificial Sequence
  Oligonucleotide for detection of SNP TSC0063595
ccaacatcgcaaa

SEQ ID NO: 262109 - DNA, 13 bp, Artificial Sequence
  Oligonucleotide for detection of SNP TSC0063595
tttgcgttgttgg

SEQ ID NO: 262110 - DNA, 13 bp, Artificial Sequence
  Oligonucleotide for detection of SNP TSC0063595
ccaacaacgcaaa

SEQ ID NO: 262111 - DNA, 13 bp, Artificial Sequence
  Oligonucleotide for detection of SNP TSC0063596
attgagtattgtt

SEQ ID NO: 262112 - DNA, 13 bp, Artificial Sequence
  Oligonucleotide for detection of SNP TSC0063596
aacaatactcaat

SEQ ID NO: 262113 - DNA, 13 bp, Artificial Sequence
  Oligonucleotide for detection of SNP TSC0063596
attgaggattgtt

SEQ ID NO: 262114 - DNA, 13 bp, Artificial Sequence
  Oligonucleotide for detection of SNP TSC0063596
aacaatcctcaat

SEQ ID NO: 262115 - DNA, 13 bp, Artificial Sequence
  Oligonucleotide for detection of SNP TSC0063596
aataatatttagt

SEQ ID NO: 262116 - DNA, 13 bp, Artificial Sequence
  Oligonucleotide for detection of SNP TSC0063596
actaaatattatt

SEQ ID NO: 262117 - DNA, 13 bp, Artificial Sequence
  Oligonucleotide for detection of SNP TSC0063596
aataatttttagt

SEQ ID NO: 262118 - DNA, 13 bp, Artificial Sequence
  Oligonucleotide for detection of SNP TSC0063596
actaaaaattatt

SEQ ID NO: 262119 - DNA, 13 bp, Artificial Sequence
  Oligonucleotide for detection of SNP TSC0063597
ttttagtgtaagt

SEQ ID NO: 262120 - DNA, 13 bp, Artificial Sequence
  Oligonucleotide for detection of SNP TSC0063597
acttacactaaaa

SEQ ID NO: 262121 - DNA, 13 bp, Artificial Sequence
  Oligonucleotide for detection of SNP TSC0063597
ttttagggtaagt

SEQ ID NO: 262122 - DNA, 13 bp, Artificial Sequence
  Oligonucleotide for detection of SNP TSC0063597
acttaccctaaaa

SEQ ID NO: 262123 - DNA, 13 bp, Artificial Sequence
  Oligonucleotide for detection of SNP TSC0063597
atttgtattaggg

SEQ ID NO: 262124 - DNA, 13 bp, Artificial Sequence
  Oligonucleotide for detection of SNP TSC0063597
ccctaatacaaat

SEQ ID NO: 262125 - DNA, 13 bp, Artificial Sequence
  Oligonucleotide for detection of SNP TSC0063597
atttgttttaggg

SEQ ID NO: 262126 - DNA, 13 bp, Artificial Sequence
  Oligonucleotide for detection of SNP TSC0063597
ccctaaaacaaat

SEQ ID NO: 262127 - DNA, 13 bp, Artificial Sequence
  Oligonucleotide for detection of SNP TSC0063598
agaataaaaatta

SEQ ID NO: 262128 - DNA, 13 bp, Artificial Sequence
  Oligonucleotide for detection of SNP TSC0063598
taatttttattct

SEQ ID NO: 262129 - DNA, 13 bp, Artificial Sequence
  Oligonucleotide for detection of SNP TSC0063598
agaatataaatta

SEQ ID NO: 262130 - DNA, 13 bp, Artificial Sequence
  Oligonucleotide for detection of SNP TSC0063598
taatttatattct

SEQ ID NO: 262131 - DNA, 13 bp, Artificial Sequence
  Oligonucleotide for detection of SNP TSC0063599
gatattttgaatt

SEQ ID NO: 262132 - DNA, 13 bp, Artificial Sequence
  Oligonucleotide for detection of SNP TSC0063599
aattcaaaatatc

SEQ ID NO: 262133 - DNA, 13 bp, Artificial Sequence
  Oligonucleotide for detection of SNP TSC0063599
gatattgtgaatt

SEQ ID NO: 262134 - DNA, 13 bp, Artificial Sequence
  Oligonucleotide for detection of SNP TSC0063599
aattcacaatatc

SEQ ID NO: 262135 - DNA, 13 bp, Artificial Sequence
  Oligonucleotide for detection of SNP TSC0063599
gatatcgtgaatt

SEQ ID NO: 262136 - DNA, 13 bp, Artificial Sequence
  Oligonucleotide for detection of SNP TSC0063599
aattcacgatatc

SEQ ID NO: 262137 - DNA, 13 bp, Artificial Sequence
  Oligonucleotide for detection of SNP TSC0063599
aatttaagataty

SEQ ID NO: 262138 - DNA, 13 bp, Artificial Sequence
  Oligonucleotide for detection of SNP TSC0063599
ratatcttaaatt

SEQ ID NO: 262139 - DNA, 13 bp, Artificial Sequence
  Oligonucleotide for detection of SNP TSC0063599
aatttatgataty

SEQ ID NO: 262140 - DNA, 13 bp, Artificial Sequence
  Oligonucleotide for detection of SNP TSC0063599
ratatcataaatt

SEQ ID NO: 262141 - DNA, 13 bp, Artificial Sequence
  Oligonucleotide for detection of SNP TSC0063599
aatttacgataty

SEQ ID NO: 262142 - DNA, 13 bp, Artificial Sequence
  Oligonucleotide for detection of SNP TSC0063599
ratatcgtaaatt

SEQ ID NO: 262143 - DNA, 13 bp, Artificial Sequence
  Oligonucleotide for detection of SNP TSC0063601
tttatgatttata

SEQ ID NO: 262144 - DNA, 13 bp, Artificial Sequence
  Oligonucleotide for detection of SNP TSC0063601
tataaatcataaa

SEQ ID NO: 262145 - DNA, 13 bp, Artificial Sequence
  Oligonucleotide for detection of SNP TSC0063601
tttatggtttata

SEQ ID NO: 262146 - DNA, 13 bp, Artificial Sequence
  Oligonucleotide for detection of SNP TSC0063601
tataaaccataaa

SEQ ID NO: 262147 - DNA, 13 bp, Artificial Sequence
  Oligonucleotide for detection of SNP TSC0009838
taagattttgtaa

SEQ ID NO: 262148 - DNA, 13 bp, Artificial Sequence
  Oligonucleotide for detection of SNP TSC0009838
ttacaaaatctta

SEQ ID NO: 262149 - DNA, 13 bp, Artificial Sequence
  Oligonucleotide for detection of SNP TSC0009838
taagatgttgtaa

SEQ ID NO: 262150 - DNA, 13 bp, Artificial Sequence
  Oligonucleotide for detection of SNP TSC0009838
ttacaacatctta

SEQ ID NO: 262151 - DNA, 13 bp, Artificial Sequence
  Oligonucleotide for detection of SNP TSC0009838
ttgtaaaattttg

SEQ ID NO: 262152 - DNA, 13 bp, Artificial Sequence
  Oligonucleotide for detection of SNP TSC0009838
caaaattttacaa

SEQ ID NO: 262153 - DNA, 13 bp, Artificial Sequence
  Oligonucleotide for detection of SNP TSC0009838
ttgtaatattttg

SEQ ID NO: 262154 - DNA, 13 bp, Artificial Sequence
  Oligonucleotide for detection of SNP TSC0009838
caaaatattacaa

SEQ ID NO: 262155 - DNA, 13 bp, Artificial Sequence
  Oligonucleotide for detection of SNP TSC0005160
ttaagtattagat

SEQ ID NO: 262156 - DNA, 13 bp, Artificial Sequence
  Oligonucleotide for detection of SNP TSC0005160
atctaatacttaa

SEQ ID NO: 262157 - DNA, 13 bp, Artificial Sequence
  Oligonucleotide for detection of SNP TSC0005160
ttaagtgttagat

SEQ ID NO: 262158 - DNA, 13 bp, Artificial Sequence
  Oligonucleotide for detection of SNP TSC0005160
atctaacacttaa

SEQ ID NO: 262159 - DNA, 13 bp, Artificial Sequence
  Oligonucleotide for detection of SNP TSC0004586
aatggagtgagay

SEQ ID NO: 262160 - DNA, 13 bp, Artificial Sequence
  Oligonucleotide for detection of SNP TSC0004586
rtctcactccatt

SEQ ID NO: 262161 - DNA, 13 bp, Artificial Sequence
  Oligonucleotide for detection of SNP TSC0004586
aatggaatgagay

SEQ ID NO: 262162 - DNA, 13 bp, Artificial Sequence
  Oligonucleotide for detection of SNP TSC0004586
rtctcattccatt

SEQ ID NO: 262163 - DNA, 13 bp, Artificial Sequence
  Oligonucleotide for detection of SNP TSC0004586
aacggagtgagay

SEQ ID NO: 262164 - DNA, 13 bp, Artificial Sequence
  Oligonucleotide for detection of SNP TSC0004586
rtctcactccgtt

SEQ ID NO: 262165 - DNA, 13 bp, Artificial Sequence
  Oligonucleotide for detection of SNP TSC0004586
aacggaatgagay

SEQ ID NO: 262166 - DNA, 13 bp, Artificial Sequence
  Oligonucleotide for detection of SNP TSC0004586
rtctcattccgtt

SEQ ID NO: 262167 - DNA, 13 bp, Artificial Sequence
  Oligonucleotide for detection of SNP TSC0004586
aatggagcgagay

SEQ ID NO: 262168 - DNA, 13 bp, Artificial Sequence
  Oligonucleotide for detection of SNP TSC0004586
rtctcgctccatt

SEQ ID NO: 262169 - DNA, 13 bp, Artificial Sequence
  Oligonucleotide for detection of SNP TSC0004586
aatggaacgagay

SEQ ID NO: 262170 - DNA, 13 bp, Artificial Sequence
  Oligonucleotide for detection of SNP TSC0004586
rtctcgttccatt

SEQ ID NO: 262171 - DNA, 13 bp, Artificial Sequence
  Oligonucleotide for detection of SNP TSC0004586
aacggagcgagay

SEQ ID NO: 262172 - DNA, 13 bp, Artificial Sequence
  Oligonucleotide for detection of SNP TSC0004586
rtctcgctccgtt

SEQ ID NO: 262173 - DNA, 13 bp, Artificial Sequence
  Oligonucleotide for detection of SNP TSC0004586
aacggaacgagay

SEQ ID NO: 262174 - DNA, 13 bp, Artificial Sequence
  Oligonucleotide for detection of SNP TSC0004586
rtctcgttccgtt

SEQ ID NO: 262175 - DNA, 13 bp, Artificial Sequence
  Oligonucleotide for detection of SNP TSC0004587
gggattataggaa

SEQ ID NO: 262176 - DNA, 13 bp, Artificial Sequence
  Oligonucleotide for detection of SNP TSC0004587
ttcctataatccc

SEQ ID NO: 262177 - DNA, 13 bp, Artificial Sequence
  Oligonucleotide for detection of SNP TSC0004587
gggattttaggaa

SEQ ID NO: 262178 - DNA, 13 bp, Artificial Sequence
  Oligonucleotide for detection of SNP TSC0004587
ttcctaaaatccc

SEQ ID NO: 262179 - DNA, 13 bp, Artificial Sequence
  Oligonucleotide for detection of SNP TSC0004587
tttttgtagttty

SEQ ID NO: 262180 - DNA, 13 bp, Artificial Sequence
  Oligonucleotide for detection of SNP TSC0004587
raaactacaaaaa

SEQ ID NO: 262181 - DNA, 13 bp, Artificial Sequence
  Oligonucleotide for detection of SNP TSC0004587
tttttgaagttty

SEQ ID NO: 262182 - DNA, 13 bp, Artificial Sequence
  Oligonucleotide for detection of SNP TSC0004587
raaacttcaaaaa

SEQ ID NO: 262183 - DNA, 13 bp, Artificial Sequence
  Oligonucleotide for detection of SNP TSC0063604
gttattaaatgaa

SEQ ID NO: 262184 - DNA, 13 bp, Artificial Sequence
  Oligonucleotide for detection of SNP TSC0063604
ttcatttaataac

SEQ ID NO: 262185 - DNA, 13 bp, Artificial Sequence
  Oligonucleotide for detection of SNP TSC0063604
gttattgaatgaa

SEQ ID NO: 262186 - DNA, 13 bp, Artificial Sequence
  Oligonucleotide for detection of SNP TSC0063604
ttcattcaataac

SEQ ID NO: 262187 - DNA, 13 bp, Artificial Sequence
  Oligonucleotide for detection of SNP TSC0063604
gttattaaacgaa

SEQ ID NO: 262188 - DNA, 13 bp, Artificial Sequence
  Oligonucleotide for detection of SNP TSC0063604
ttcgtttaataac

SEQ ID NO: 262189 - DNA, 13 bp, Artificial Sequence
  Oligonucleotide for detection of SNP TSC0063604
gttattgaacgaa

SEQ ID NO: 262190 - DNA, 13 bp, Artificial Sequence
  Oligonucleotide for detection of SNP TSC0063604
ttcgttcaataac

SEQ ID NO: 262191 - DNA, 13 bp, Artificial Sequence
  Oligonucleotide for detection of SNP TSC0063605
atgataggtttta

SEQ ID NO: 262192 - DNA, 13 bp, Artificial Sequence
  Oligonucleotide for detection of SNP TSC0063605
taaaacctatcat

SEQ ID NO: 262193 - DNA, 13 bp, Artificial Sequence
  Oligonucleotide for detection of SNP TSC0063605
atgataagtttta

SEQ ID NO: 262194 - DNA, 13 bp, Artificial Sequence
  Oligonucleotide for detection of SNP TSC0063605
taaaacttatcat

SEQ ID NO: 262195 - DNA, 13 bp, Artificial Sequence
  Oligonucleotide for detection of SNP TSC0063606
ttatgtggaatta

SEQ ID NO: 262196 - DNA, 13 bp, Artificial Sequence
  Oligonucleotide for detection of SNP TSC0063606
taattccacataa

SEQ ID NO: 262197 - DNA, 13 bp, Artificial Sequence
  Oligonucleotide for detection of SNP TSC0063606
ttatgtagaatta

SEQ ID NO: 262198 - DNA, 13 bp, Artificial Sequence
  Oligonucleotide for detection of SNP TSC0063606
taattctacataa

SEQ ID NO: 262199 - DNA, 13 bp, Artificial Sequence
  Oligonucleotide for detection of SNP TSC0063606
ttatgcggaatta

SEQ ID NO: 262200 - DNA, 13 bp, Artificial Sequence
  Oligonucleotide for detection of SNP TSC0063606
taattccgcataa

SEQ ID NO: 262201 - DNA, 13 bp, Artificial Sequence
  Oligonucleotide for detection of SNP TSC0063609
aataaaagtttay

SEQ ID NO: 262202 - DNA, 13 bp, Artificial Sequence
  Oligonucleotide for detection of SNP TSC0063609
rtaaacttttatt

SEQ ID NO: 262203 - DNA, 13 bp, Artificial Sequence
  Oligonucleotide for detection of SNP TSC0063609
aataaatgtttay

SEQ ID NO: 262204 - DNA, 13 bp, Artificial Sequence
  Oligonucleotide for detection of SNP TSC0063609
rtaaacatttatt

SEQ ID NO: 262205 - DNA, 13 bp, Artificial Sequence
  Oligonucleotide for detection of SNP TSC0063609
gtaaatttttgtt

SEQ ID NO: 262206 - DNA, 13 bp, Artificial Sequence
  Oligonucleotide for detection of SNP TSC0063609
aacaaaaatttac

SEQ ID NO: 262207 - DNA, 13 bp, Artificial Sequence
  Oligonucleotide for detection of SNP TSC0063609
gtaaatatttgtt

SEQ ID NO: 262208 - DNA, 13 bp, Artificial Sequence
  Oligonucleotide for detection of SNP TSC0063609
aacaaatatttac

SEQ ID NO: 262209 - DNA, 13 bp, Artificial Sequence
  Oligonucleotide for detection of SNP TSC0063610
tttaggagtaatt

SEQ ID NO: 262210 - DNA, 13 bp, Artificial Sequence
  Oligonucleotide for detection of SNP TSC0063610
aattactcctaaa

SEQ ID NO: 262211 - DNA, 13 bp, Artificial Sequence
  Oligonucleotide for detection of SNP TSC0063610
tttaggggtaatt

SEQ ID NO: 262212 - DNA, 13 bp, Artificial Sequence
  Oligonucleotide for detection of SNP TSC0063610
aattacccctaaa

SEQ ID NO: 262213 - DNA, 13 bp, Artificial Sequence
  Oligonucleotide for detection of SNP TSC0063611
tttgatatcgtta

SEQ ID NO: 262214 - DNA, 13 bp, Artificial Sequence
  Oligonucleotide for detection of SNP TSC0063611
taacgatatcaaa

SEQ ID NO: 262215 - DNA, 13 bp, Artificial Sequence
  Oligonucleotide for detection of SNP TSC0063611
tttgatgtcgtta

SEQ ID NO: 262216 - DNA, 13 bp, Artificial Sequence
  Oligonucleotide for detection of SNP TSC0063611
taacgacatcaaa

SEQ ID NO: 262217 - DNA, 13 bp, Artificial Sequence
  Oligonucleotide for detection of SNP TSC0063611
tttgacgtcgtta

SEQ ID NO: 262218 - DNA, 13 bp, Artificial Sequence
  Oligonucleotide for detection of SNP TSC0063611
taacgacgtcaaa

SEQ ID NO: 262219 - DNA, 13 bp, Artificial Sequence
  Oligonucleotide for detection of SNP TSC0063611
tagtggtgttaga

SEQ ID NO: 262220 - DNA, 13 bp, Artificial Sequence
  Oligonucleotide for detection of SNP TSC0063611
tctaacaccacta

SEQ ID NO: 262221 - DNA, 13 bp, Artificial Sequence
  Oligonucleotide for detection of SNP TSC0063611
tagcggtgttaga

SEQ ID NO: 262222 - DNA, 13 bp, Artificial Sequence
  Oligonucleotide for detection of SNP TSC0063611
tctaacaccgcta

SEQ ID NO: 262223 - DNA, 13 bp, Artificial Sequence
  Oligonucleotide for detection of SNP TSC0063611
tagtggcgttaga

SEQ ID NO: 262224 - DNA, 13 bp, Artificial Sequence
  Oligonucleotide for detection of SNP TSC0063611
tctaacgccacta

SEQ ID NO: 262225 - DNA, 13 bp, Artificial Sequence
  Oligonucleotide for detection of SNP TSC0063611
tagcggcgttaga

SEQ ID NO: 262226 - DNA, 13 bp, Artificial Sequence
  Oligonucleotide for detection of SNP TSC0063611
tctaacgccgcta

SEQ ID NO: 262227 - DNA, 13 bp, Artificial Sequence
  Oligonucleotide for detection of SNP TSC0063612
aagttttgggttt

SEQ ID NO: 262228 - DNA, 13 bp, Artificial Sequence
  Oligonucleotide for detection of SNP TSC0063612
aaacccaaaactt

SEQ ID NO: 262229 - DNA, 13 bp, Artificial Sequence
  Oligonucleotide for detection of SNP TSC0063612
aagtttcgggttt

SEQ ID NO: 262230 - DNA, 13 bp, Artificial Sequence
  Oligonucleotide for detection of SNP TSC0063612
aaacccgaaactt

SEQ ID NO: 262231 - DNA, 13 bp, Artificial Sequence
  Oligonucleotide for detection of SNP TSC0063612
aggtttggagttt

SEQ ID NO: 262232 - DNA, 13 bp, Artificial Sequence
  Oligonucleotide for detection of SNP TSC0063612
aaactccaaacct

SEQ ID NO: 262233 - DNA, 13 bp, Artificial Sequence
  Oligonucleotide for detection of SNP TSC0063612
aggtttagagttt

SEQ ID NO: 262234 - DNA, 13 bp, Artificial Sequence
  Oligonucleotide for detection of SNP TSC0063612
aaactctaaacct

SEQ ID NO: 262235 - DNA, 13 bp, Artificial Sequence
  Oligonucleotide for detection of SNP TSC0063612
aggttcggagttt

SEQ ID NO: 262236 - DNA, 13 bp, Artificial Sequence
  Oligonucleotide for detection of SNP TSC0063612
aaactccgaacct

SEQ ID NO: 262237 - DNA, 13 bp, Artificial Sequence
  Oligonucleotide for detection of SNP TSC0004588
ttttatgttgaat

SEQ ID NO: 262238 - DNA, 13 bp, Artificial Sequence
  Oligonucleotide for detection of SNP TSC0004588
attcaacataaaa

SEQ ID NO: 262239 - DNA, 13 bp, Artificial Sequence
  Oligonucleotide for detection of SNP TSC0004588
ttttacgttgaat

SEQ ID NO: 262240 - DNA, 13 bp, Artificial Sequence
  Oligonucleotide for detection of SNP TSC0004588
attcaacgtaaaa

SEQ ID NO: 262241 - DNA, 13 bp, Artificial Sequence
  Oligonucleotide for detection of SNP TSC0004588
atttaatgtgaga

SEQ ID NO: 262242 - DNA, 13 bp, Artificial Sequence
  Oligonucleotide for detection of SNP TSC0004588
tctcacattaaat

SEQ ID NO: 262243 - DNA, 13 bp, Artificial Sequence
  Oligonucleotide for detection of SNP TSC0004588
atttaacgtgaga

SEQ ID NO: 262244 - DNA, 13 bp, Artificial Sequence
  Oligonucleotide for detection of SNP TSC0004588
tctcacgttaaat

SEQ ID NO: 262245 - DNA, 13 bp, Artificial Sequence
  Oligonucleotide for detection of SNP TSC0063619
gtgagaggggatt

SEQ ID NO: 262246 - DNA, 13 bp, Artificial Sequence
  Oligonucleotide for detection of SNP TSC0063619
aatcccctctcac

SEQ ID NO: 262247 - DNA, 13 bp, Artificial Sequence
  Oligonucleotide for detection of SNP TSC0063619
gtgagaagggatt

SEQ ID NO: 262248 - DNA, 13 bp, Artificial Sequence
  Oligonucleotide for detection of SNP TSC0063619
aatcccttctcac

SEQ ID NO: 262249 - DNA, 13 bp, Artificial Sequence
  Oligonucleotide for detection of SNP TSC0063620
gttagttagatty

SEQ ID NO: 262250 - DNA, 13 bp, Artificial Sequence
  Oligonucleotide for detection of SNP TSC0063620
raatctaactaac

SEQ ID NO: 262251 - DNA, 13 bp, Artificial Sequence
  Oligonucleotide for detection of SNP TSC0063620
gttagtgagatty

SEQ ID NO: 262252 - DNA, 13 bp, Artificial Sequence
  Oligonucleotide for detection of SNP TSC0063620
raatctcactaac

SEQ ID NO: 262253 - DNA, 13 bp, Artificial Sequence
  Oligonucleotide for detection of SNP TSC0063620
ggatttgattggy

SEQ ID NO: 262254 - DNA, 13 bp, Artificial Sequence
  Oligonucleotide for detection of SNP TSC0063620
rccaatcaaatcc

SEQ ID NO: 262255 - DNA, 13 bp, Artificial Sequence
  Oligonucleotide for detection of SNP TSC0063620
ggattttattggy

SEQ ID NO: 262256 - DNA, 13 bp, Artificial Sequence
  Oligonucleotide for detection of SNP TSC0063620
rccaataaaatcc

SEQ ID NO: 262257 - DNA, 13 bp, Artificial Sequence
  Oligonucleotide for detection of SNP TSC0010773
aataggggggttg

SEQ ID NO: 262258 - DNA, 13 bp, Artificial Sequence
  Oligonucleotide for detection of SNP TSC0010773
caacccccctatt

SEQ ID NO: 262259 - DNA, 13 bp, Artificial Sequence
  Oligonucleotide for detection of SNP TSC0010773
aataggagggttg

SEQ ID NO: 262260 - DNA, 13 bp, Artificial Sequence
  Oligonucleotide for detection of SNP TSC0010773
caaccctcctatt

SEQ ID NO: 262261 - DNA, 13 bp, Artificial Sequence
  Oligonucleotide for detection of SNP TSC0005980
ttagaattgtata

SEQ ID NO: 262262 - DNA, 13 bp, Artificial Sequence
  Oligonucleotide for detection of SNP TSC0005980
tatacaattctaa

SEQ ID NO: 262263 - DNA, 13 bp, Artificial Sequence
  Oligonucleotide for detection of SNP TSC0005980
ttagaagtgtata

SEQ ID NO: 262264 - DNA, 13 bp, Artificial Sequence
  Oligonucleotide for detection of SNP TSC0005980
tatacacttctaa

SEQ ID NO: 262265 - DNA, 13 bp, Artificial Sequence
  Oligonucleotide for detection of SNP TSC0005980
tgtgtaattttaa

SEQ ID NO: 262266 - DNA, 13 bp, Artificial Sequence
  Oligonucleotide for detection of SNP TSC0005980
ttaaaattacaca

SEQ ID NO: 262267 - DNA, 13 bp, Artificial Sequence
  Oligonucleotide for detection of SNP TSC0005980
tgtgtatttttaa

SEQ ID NO: 262268 - DNA, 13 bp, Artificial Sequence
  Oligonucleotide for detection of SNP TSC0005980
ttaaaaatacaca

SEQ ID NO: 262269 - DNA, 13 bp, Artificial Sequence
  Oligonucleotide for detection of SNP TSC0005981
ttattagtttatt

SEQ ID NO: 262270 - DNA, 13 bp, Artificial Sequence
  Oligonucleotide for detection of SNP TSC0005981
aataaactaataa

SEQ ID NO: 262271 - DNA, 13 bp, Artificial Sequence
  Oligonucleotide for detection of SNP TSC0063622
taaggtagaattt

SEQ ID NO: 262272 - DNA, 13 bp, Artificial Sequence
  Oligonucleotide for detection of SNP TSC0063622
aaattctacctta

SEQ ID NO: 262273 - DNA, 13 bp, Artificial Sequence
  Oligonucleotide for detection of SNP TSC0063622
taaggttgaattt

SEQ ID NO: 262274 - DNA, 13 bp, Artificial Sequence
  Oligonucleotide for detection of SNP TSC0063622
aaattcaacctta

SEQ ID NO: 262275 - DNA, 13 bp, Artificial Sequence
  Oligonucleotide for detection of SNP TSC0063622
agatttagttttg

SEQ ID NO: 262276 - DNA, 13 bp, Artificial Sequence
  Oligonucleotide for detection of SNP TSC0063622
caaaactaaatct

SEQ ID NO: 262277 - DNA, 13 bp, Artificial Sequence
  Oligonucleotide for detection of SNP TSC0005337
ttttagtagttay

SEQ ID NO: 262278 - DNA, 13 bp, Artificial Sequence
  Oligonucleotide for detection of SNP TSC0005337
rtaactactaaaa

SEQ ID NO: 262279 - DNA, 13 bp, Artificial Sequence
  Oligonucleotide for detection of SNP TSC0005337
gtggtttttgaag

SEQ ID NO: 262280 - DNA, 13 bp, Artificial Sequence
  Oligonucleotide for detection of SNP TSC0005337
cttcaaaaaccac

SEQ ID NO: 262281 - DNA, 13 bp, Artificial Sequence
  Oligonucleotide for detection of SNP TSC0005337
gtggttgttgaag

SEQ ID NO: 262282 - DNA, 13 bp, Artificial Sequence
  Oligonucleotide for detection of SNP TSC0005337
cttcaacaaccac

SEQ ID NO: 262283 - DNA, 13 bp, Artificial Sequence
  Oligonucleotide for detection of SNP TSC0063624
aggaaaatattty

SEQ ID NO: 262284 - DNA, 13 bp, Artificial Sequence
  Oligonucleotide for detection of SNP TSC0063624
raaatattttcct

SEQ ID NO: 262285 - DNA, 13 bp, Artificial Sequence
  Oligonucleotide for detection of SNP TSC0063624
aggaaagtattty

SEQ ID NO: 262286 - DNA, 13 bp, Artificial Sequence
  Oligonucleotide for detection of SNP TSC0063624
raaatactttcct

SEQ ID NO: 262287 - DNA, 13 bp, Artificial Sequence
  Oligonucleotide for detection of SNP TSC0063627
aggtaggagaatt

SEQ ID NO: 262288 - DNA, 13 bp, Artificial Sequence
  Oligonucleotide for detection of SNP TSC0063627
aattctcctacct

SEQ ID NO: 262289 - DNA, 13 bp, Artificial Sequence
  Oligonucleotide for detection of SNP TSC0063627
aggtagaagaatt

SEQ ID NO: 262290 - DNA, 13 bp, Artificial Sequence
  Oligonucleotide for detection of SNP TSC0063627
aattcttctacct

SEQ ID NO: 262291 - DNA, 13 bp, Artificial Sequence
  Oligonucleotide for detection of SNP TSC0063628
agtttttaaaaay

SEQ ID NO: 262292 - DNA, 13 bp, Artificial Sequence
  Oligonucleotide for detection of SNP TSC0063628
rtttttaaaaact

SEQ ID NO: 262293 - DNA, 13 bp, Artificial Sequence
  Oligonucleotide for detection of SNP TSC0063628
agttttaaaaaay

SEQ ID NO: 262294 - DNA, 13 bp, Artificial Sequence
  Oligonucleotide for detection of SNP TSC0063628
rttttttaaaact

SEQ ID NO: 262295 - DNA, 13 bp, Artificial Sequence
  Oligonucleotide for detection of SNP TSC0063629
tgatatagtttgg

SEQ ID NO: 262296 - DNA, 13 bp, Artificial Sequence
  Oligonucleotide for detection of SNP TSC0063629
ccaaactatatca

SEQ ID NO: 262297 - DNA, 13 bp, Artificial Sequence
  Oligonucleotide for detection of SNP TSC0063629
tgatatggtttgg

SEQ ID NO: 262298 - DNA, 13 bp, Artificial Sequence
  Oligonucleotide for detection of SNP TSC0063629
ccaaaccatatca

SEQ ID NO: 262299 - DNA, 13 bp, Artificial Sequence
  Oligonucleotide for detection of SNP TSC0063631
taaggaatagaat

SEQ ID NO: 262300 - DNA, 13 bp, Artificial Sequence
  Oligonucleotide for detection of SNP TSC0063631
attctattcctta

SEQ ID NO: 262301 - DNA, 13 bp, Artificial Sequence
  Oligonucleotide for detection of SNP TSC0063631
taaggagtagaat

SEQ ID NO: 262302 - DNA, 13 bp, Artificial Sequence
  Oligonucleotide for detection of SNP TSC0063631
attctactcctta

SEQ ID NO: 262303 - DNA, 13 bp, Artificial Sequence
  Oligonucleotide for detection of SNP TSC0063632
ttttttaggatgt

SEQ ID NO: 262304 - DNA, 13 bp, Artificial Sequence
  Oligonucleotide for detection of SNP TSC0063632
acatcctaaaaaa

SEQ ID NO: 262305 - DNA, 13 bp, Artificial Sequence
  Oligonucleotide for detection of SNP TSC0063633
ttattgatttatg

SEQ ID NO: 262306 - DNA, 13 bp, Artificial Sequence
  Oligonucleotide for detection of SNP TSC0063633
cataaatcaataa

SEQ ID NO: 262307 - DNA, 13 bp, Artificial Sequence
  Oligonucleotide for detection of SNP TSC0063635
ttattttttataa

SEQ ID NO: 262308 - DNA, 13 bp, Artificial Sequence
  Oligonucleotide for detection of SNP TSC0063635
ttataaaaaataa

SEQ ID NO: 262309 - DNA, 13 bp, Artificial Sequence
  Oligonucleotide for detection of SNP TSC0063636
tgttgtttattty

SEQ ID NO: 262310 - DNA, 13 bp, Artificial Sequence
  Oligonucleotide for detection of SNP TSC0063636
raaataaacaaca

SEQ ID NO: 262311 - DNA, 13 bp, Artificial Sequence
  Oligonucleotide for detection of SNP TSC0063636
tgttgtgtattty

SEQ ID NO: 262312 - DNA, 13 bp, Artificial Sequence
  Oligonucleotide for detection of SNP TSC0063636
raaatacacaaca

SEQ ID NO: 262313 - DNA, 13 bp, Artificial Sequence
  Oligonucleotide for detection of SNP TSC0063636
tgttgcgtattty

SEQ ID NO: 262314 - DNA, 13 bp, Artificial Sequence
  Oligonucleotide for detection of SNP TSC0063636
raaatacgcaaca

SEQ ID NO: 262315 - DNA, 13 bp, Artificial Sequence
  Oligonucleotide for detection of SNP TSC0063636
gagataggtaata

SEQ ID NO: 262316 - DNA, 13 bp, Artificial Sequence
  Oligonucleotide for detection of SNP TSC0063636
tattacctatctc

SEQ ID NO: 262317 - DNA, 13 bp, Artificial Sequence
  Oligonucleotide for detection of SNP TSC0063638
agttttttgtttg

SEQ ID NO: 262318 - DNA, 13 bp, Artificial Sequence
  Oligonucleotide for detection of SNP TSC0063638
caaacaaaaaact

SEQ ID NO: 262319 - DNA, 13 bp, Artificial Sequence
  Oligonucleotide for detection of SNP TSC0063638
agttttgtgtttg

SEQ ID NO: 262320 - DNA, 13 bp, Artificial Sequence
  Oligonucleotide for detection of SNP TSC0063638
caaacacaaaact

SEQ ID NO: 262321 - DNA, 13 bp, Artificial Sequence
  Oligonucleotide for detection of SNP TSC0063638
taagtataaagtt

SEQ ID NO: 262322 - DNA, 13 bp, Artificial Sequence
  Oligonucleotide for detection of SNP TSC0063638
aactttatactta

SEQ ID NO: 262323 - DNA, 13 bp, Artificial Sequence
  Oligonucleotide for detection of SNP TSC0063640
ggttatatggtag

SEQ ID NO: 262324 - DNA, 13 bp, Artificial Sequence
  Oligonucleotide for detection of SNP TSC0063640
ctaccatataacc

SEQ ID NO: 262325 - DNA, 13 bp, Artificial Sequence
  Oligonucleotide for detection of SNP TSC0063640
ggttatgtggtag

SEQ ID NO: 262326 - DNA, 13 bp, Artificial Sequence
  Oligonucleotide for detection of SNP TSC0063640
ctaccacataacc

SEQ ID NO: 262327 - DNA, 13 bp, Artificial Sequence
  Oligonucleotide for detection of SNP TSC0063640
ggttacgtggtag

SEQ ID NO: 262328 - DNA, 13 bp, Artificial Sequence
  Oligonucleotide for detection of SNP TSC0063640
ctaccacgtaacc

SEQ ID NO: 262329 - DNA, 13 bp, Artificial Sequence
  Oligonucleotide for detection of SNP TSC0063640
ttgttatgtggty

SEQ ID NO: 262330 - DNA, 13 bp, Artificial Sequence
  Oligonucleotide for detection of SNP TSC0063640
raccacataacaa

SEQ ID NO: 262331 - DNA, 13 bp, Artificial Sequence
  Oligonucleotide for detection of SNP TSC0063640
ttgttacgtggty

SEQ ID NO: 262332 - DNA, 13 bp, Artificial Sequence
  Oligonucleotide for detection of SNP TSC0063640
raccacgtaacaa

SEQ ID NO: 262333 - DNA, 13 bp, Artificial Sequence
  Oligonucleotide for detection of SNP TSC0063642
taaagtttaagaa

SEQ ID NO: 262334 - DNA, 13 bp, Artificial Sequence
  Oligonucleotide for detection of SNP TSC0063642
ttcttaaacttta

SEQ ID NO: 262335 - DNA, 13 bp, Artificial Sequence
  Oligonucleotide for detection of SNP TSC0063642
taaagtataagaa

SEQ ID NO: 262336 - DNA, 13 bp, Artificial Sequence
  Oligonucleotide for detection of SNP TSC0063642
ttcttatacttta

SEQ ID NO: 262337 - DNA, 13 bp, Artificial Sequence
  Oligonucleotide for detection of SNP TSC0063643
attgagaagaagy

SEQ ID NO: 262338 - DNA, 13 bp, Artificial Sequence
  Oligonucleotide for detection of SNP TSC0063643
rcttcttctcaat

SEQ ID NO: 262339 - DNA, 13 bp, Artificial Sequence
  Oligonucleotide for detection of SNP TSC0063643
attgaggagaagy

SEQ ID NO: 262340 - DNA, 13 bp, Artificial Sequence
  Oligonucleotide for detection of SNP TSC0063643
rcttctcctcaat

SEQ ID NO: 262341 - DNA, 13 bp, Artificial Sequence
  Oligonucleotide for detection of SNP TSC0063643
atcgagaagaagy

SEQ ID NO: 262342 - DNA, 13 bp, Artificial Sequence
  Oligonucleotide for detection of SNP TSC0063643
rcttcttctcgat

SEQ ID NO: 262343 - DNA, 13 bp, Artificial Sequence
  Oligonucleotide for detection of SNP TSC0063643
atcgaggagaagy

SEQ ID NO: 262344 - DNA, 13 bp, Artificial Sequence
  Oligonucleotide for detection of SNP TSC0063643
rcttctcctcgat

SEQ ID NO: 262345 - DNA, 13 bp, Artificial Sequence
  Oligonucleotide for detection of SNP TSC0063647
ttaaataggttaa

SEQ ID NO: 262346 - DNA, 13 bp, Artificial Sequence
  Oligonucleotide for detection of SNP TSC0063647
ttaacctatttaa

SEQ ID NO: 262347 - DNA, 13 bp, Artificial Sequence
  Oligonucleotide for detection of SNP TSC0063647
ttaaattggttaa

SEQ ID NO: 262348 - DNA, 13 bp, Artificial Sequence
  Oligonucleotide for detection of SNP TSC0063647
ttaaccaatttaa

SEQ ID NO: 262349 - DNA, 13 bp, Artificial Sequence
  Oligonucleotide for detection of SNP TSC0063647
ttggtttatttaa

SEQ ID NO: 262350 - DNA, 13 bp, Artificial Sequence
  Oligonucleotide for detection of SNP TSC0063647
ttaaataaaccaa

SEQ ID NO: 262351 - DNA, 13 bp, Artificial Sequence
  Oligonucleotide for detection of SNP TSC0063647
ttggttaatttaa

SEQ ID NO: 262352 - DNA, 13 bp, Artificial Sequence
  Oligonucleotide for detection of SNP TSC0063647
ttaaattaaccaa

SEQ ID NO: 262353 - DNA, 13 bp, Artificial Sequence
  Oligonucleotide for detection of SNP TSC0008796
ggagggtgttaag

SEQ ID NO: 262354 - DNA, 13 bp, Artificial Sequence
  Oligonucleotide for detection of SNP TSC0008796
cttaacaccctcc

SEQ ID NO: 262355 - DNA, 13 bp, Artificial Sequence
  Oligonucleotide for detection of SNP TSC0008796
ggagggcgttaag

SEQ ID NO: 262356 - DNA, 13 bp, Artificial Sequence
  Oligonucleotide for detection of SNP TSC0008796
cttaacgccctcc

SEQ ID NO: 262357 - DNA, 13 bp, Artificial Sequence
  Oligonucleotide for detection of SNP TSC0008797
gtattaattttgt

SEQ ID NO: 262358 - DNA, 13 bp, Artificial Sequence
  Oligonucleotide for detection of SNP TSC0008797
acaaaattaatac

SEQ ID NO: 262359 - DNA, 13 bp, Artificial Sequence
  Oligonucleotide for detection of SNP TSC0008797
gtattatttttgt

SEQ ID NO: 262360 - DNA, 13 bp, Artificial Sequence
  Oligonucleotide for detection of SNP TSC0008797
acaaaaataatac

SEQ ID NO: 262361 - DNA, 13 bp, Artificial Sequence
  Oligonucleotide for detection of SNP TSC0008797
ataaaattaatgy

SEQ ID NO: 262362 - DNA, 13 bp, Artificial Sequence
  Oligonucleotide for detection of SNP TSC0008797
rcattaattttat

SEQ ID NO: 262363 - DNA, 13 bp, Artificial Sequence
  Oligonucleotide for detection of SNP TSC0008797
ataaaaataatgy

SEQ ID NO: 262364 - DNA, 13 bp, Artificial Sequence
  Oligonucleotide for detection of SNP TSC0008797
rcattatttttat

SEQ ID NO: 262365 - DNA, 13 bp, Artificial Sequence
  Oligonucleotide for detection of SNP TSC0063648
aatgggatttaay

SEQ ID NO: 262366 - DNA, 13 bp, Artificial Sequence
  Oligonucleotide for detection of SNP TSC0063648
rttaaatcccatt

SEQ ID NO: 262367 - DNA, 13 bp, Artificial Sequence
  Oligonucleotide for detection of SNP TSC0063648
aatgggttttaay

SEQ ID NO: 262368 - DNA, 13 bp, Artificial Sequence
  Oligonucleotide for detection of SNP TSC0063648
rttaaaacccatt

SEQ ID NO: 262369 - DNA, 13 bp, Artificial Sequence
  Oligonucleotide for detection of SNP TSC0063648
gttaaattttatt

SEQ ID NO: 262370 - DNA, 13 bp, Artificial Sequence
  Oligonucleotide for detection of SNP TSC0063648
aataaaatttaac

SEQ ID NO: 262371 - DNA, 13 bp, Artificial Sequence
  Oligonucleotide for detection of SNP TSC0063649
tggtgtgtattta

SEQ ID NO: 262372 - DNA, 13 bp, Artificial Sequence
  Oligonucleotide for detection of SNP TSC0063649
taaatacacacca

SEQ ID NO: 262373 - DNA, 13 bp, Artificial Sequence
  Oligonucleotide for detection of SNP TSC0063649
tggtgtatattta

SEQ ID NO: 262374 - DNA, 13 bp, Artificial Sequence
  Oligonucleotide for detection of SNP TSC0063649
taaatatacacca

SEQ ID NO: 262375 - DNA, 13 bp, Artificial Sequence
  Oligonucleotide for detection of SNP TSC0063649
cggtgtgtattta

SEQ ID NO: 262376 - DNA, 13 bp, Artificial Sequence
  Oligonucleotide for detection of SNP TSC0063649
taaatacacaccg

SEQ ID NO: 262377 - DNA, 13 bp, Artificial Sequence
  Oligonucleotide for detection of SNP TSC0063649
cggtgtatattta

SEQ ID NO: 262378 - DNA, 13 bp, Artificial Sequence
  Oligonucleotide for detection of SNP TSC0063649
taaatatacaccg

SEQ ID NO: 262379 - DNA, 13 bp, Artificial Sequence
  Oligonucleotide for detection of SNP TSC0063651
agaattattttaa

SEQ ID NO: 262380 - DNA, 13 bp, Artificial Sequence
  Oligonucleotide for detection of SNP TSC0063651
ttaaaataattct

SEQ ID NO: 262381 - DNA, 13 bp, Artificial Sequence
  Oligonucleotide for detection of SNP TSC0063651
agaattgttttaa

SEQ ID NO: 262382 - DNA, 13 bp, Artificial Sequence
  Oligonucleotide for detection of SNP TSC0063651
ttaaaacaattct

SEQ ID NO: 262383 - DNA, 13 bp, Artificial Sequence
  Oligonucleotide for detection of SNP TSC0063651
agaatcgttttaa

SEQ ID NO: 262384 - DNA, 13 bp, Artificial Sequence
  Oligonucleotide for detection of SNP TSC0063651
ttaaaacgattct

SEQ ID NO: 262385 - DNA, 13 bp, Artificial Sequence
  Oligonucleotide for detection of SNP TSC0063653
tatatagtatggg

SEQ ID NO: 262386 - DNA, 13 bp, Artificial Sequence
  Oligonucleotide for detection of SNP TSC0063653
cccatactatata

SEQ ID NO: 262387 - DNA, 13 bp, Artificial Sequence
  Oligonucleotide for detection of SNP TSC0063653
tatataatatggg

SEQ ID NO: 262388 - DNA, 13 bp, Artificial Sequence
  Oligonucleotide for detection of SNP TSC0063653
cccatattatata

SEQ ID NO: 262389 - DNA, 13 bp, Artificial Sequence
  Oligonucleotide for detection of SNP TSC0063654
tattgttgttaag

SEQ ID NO: 262390 - DNA, 13 bp, Artificial Sequence
  Oligonucleotide for detection of SNP TSC0063654
cttaacaacaata

SEQ ID NO: 262391 - DNA, 13 bp, Artificial Sequence
  Oligonucleotide for detection of SNP TSC0063654
tattgtcgttaag

SEQ ID NO: 262392 - DNA, 13 bp, Artificial Sequence
  Oligonucleotide for detection of SNP TSC0063654
cttaacgacaata

SEQ ID NO: 262393 - DNA, 13 bp, Artificial Sequence
  Oligonucleotide for detection of SNP TSC0063654
tttgatggtagtg

SEQ ID NO: 262394 - DNA, 13 bp, Artificial Sequence
  Oligonucleotide for detection of SNP TSC0063654
cactaccatcaaa

SEQ ID NO: 262395 - DNA, 13 bp, Artificial Sequence
  Oligonucleotide for detection of SNP TSC0063654
tttgatagtagtg

SEQ ID NO: 262396 - DNA, 13 bp, Artificial Sequence
  Oligonucleotide for detection of SNP TSC0063654
cactactatcaaa

SEQ ID NO: 262397 - DNA, 13 bp, Artificial Sequence
  Oligonucleotide for detection of SNP TSC0063654
tttgacggtagtg

SEQ ID NO: 262398 - DNA, 13 bp, Artificial Sequence
  Oligonucleotide for detection of SNP TSC0063654
cactaccgtcaaa

SEQ ID NO: 262399 - DNA, 13 bp, Artificial Sequence
  Oligonucleotide for detection of SNP TSC0063655
ataaaagattata

SEQ ID NO: 262400 - DNA, 13 bp, Artificial Sequence
  Oligonucleotide for detection of SNP TSC0063655
tataatcttttat

SEQ ID NO: 262401 - DNA, 13 bp, Artificial Sequence
  Oligonucleotide for detection of SNP TSC0063656
ttttgcgatagty

SEQ ID NO: 262402 - DNA, 13 bp, Artificial Sequence
  Oligonucleotide for detection of SNP TSC0063656
ractatcgcaaaa

SEQ ID NO: 262403 - DNA, 13 bp, Artificial Sequence
  Oligonucleotide for detection of SNP TSC0063656
gattgttgtaaaa

SEQ ID NO: 262404 - DNA, 13 bp, Artificial Sequence
  Oligonucleotide for detection of SNP TSC0063656
ttttacaacaatc

SEQ ID NO: 262405 - DNA, 13 bp, Artificial Sequence
  Oligonucleotide for detection of SNP TSC0063656
gattgtcgtaaaa

SEQ ID NO: 262406 - DNA, 13 bp, Artificial Sequence
  Oligonucleotide for detection of SNP TSC0063656
ttttacgacaatc

SEQ ID NO: 262407 - DNA, 13 bp, Artificial Sequence
  Oligonucleotide for detection of SNP TSC0063657
aatttggggttat

SEQ ID NO: 262408 - DNA, 13 bp, Artificial Sequence
  Oligonucleotide for detection of SNP TSC0063657
ataaccccaaatt

SEQ ID NO: 262409 - DNA, 13 bp, Artificial Sequence
  Oligonucleotide for detection of SNP TSC0063657
atggttttaaatt

SEQ ID NO: 262410 - DNA, 13 bp, Artificial Sequence
  Oligonucleotide for detection of SNP TSC0063657
aatttaaaaccat

SEQ ID NO: 262411 - DNA, 13 bp, Artificial Sequence
  Oligonucleotide for detection of SNP TSC0063658
ataaatttagaga

SEQ ID NO: 262412 - DNA, 13 bp, Artificial Sequence
  Oligonucleotide for detection of SNP TSC0063658
tctctaaatttat

SEQ ID NO: 262413 - DNA, 13 bp, Artificial Sequence
  Oligonucleotide for detection of SNP TSC0063658
ataaatgtagaga

SEQ ID NO: 262414 - DNA, 13 bp, Artificial Sequence
  Oligonucleotide for detection of SNP TSC0063658
tctctacatttat

SEQ ID NO: 262415 - DNA, 13 bp, Artificial Sequence
  Oligonucleotide for detection of SNP TSC0001116
atatgtataatty

SEQ ID NO: 262416 - DNA, 13 bp, Artificial Sequence
  Oligonucleotide for detection of SNP TSC0001116
raattatacatat

SEQ ID NO: 262417 - DNA, 13 bp, Artificial Sequence
  Oligonucleotide for detection of SNP TSC0001116
atatgtgtaatty

SEQ ID NO: 262418 - DNA, 13 bp, Artificial Sequence
  Oligonucleotide for detection of SNP TSC0001116
raattacacatat

SEQ ID NO: 262419 - DNA, 13 bp, Artificial Sequence
  Oligonucleotide for detection of SNP TSC0008760
gtaaatagtttag

SEQ ID NO: 262420 - DNA, 13 bp, Artificial Sequence
  Oligonucleotide for detection of SNP TSC0008760
ctaaactatttac

SEQ ID NO: 262421 - DNA, 13 bp, Artificial Sequence
  Oligonucleotide for detection of SNP TSC0008760
gtaaatggtttag

SEQ ID NO: 262422 - DNA, 13 bp, Artificial Sequence
  Oligonucleotide for detection of SNP TSC0008760
ctaaaccatttac

SEQ ID NO: 262423 - DNA, 13 bp, Artificial Sequence
  Oligonucleotide for detection of SNP TSC0008760
gtaaacggtttag

SEQ ID NO: 262424 - DNA, 13 bp, Artificial Sequence
  Oligonucleotide for detection of SNP TSC0008760
ctaaaccgtttac

SEQ ID NO: 262425 - DNA, 13 bp, Artificial Sequence
  Oligonucleotide for detection of SNP TSC0008760
ttgaattgtttgy

SEQ ID NO: 262426 - DNA, 13 bp, Artificial Sequence
  Oligonucleotide for detection of SNP TSC0008760
rcaaacaattcaa

SEQ ID NO: 262427 - DNA, 13 bp, Artificial Sequence
  Oligonucleotide for detection of SNP TSC0008760
ttgaatcgtttgy

SEQ ID NO: 262428 - DNA, 13 bp, Artificial Sequence
  Oligonucleotide for detection of SNP TSC0008760
rcaaacgattcaa

SEQ ID NO: 262429 - DNA, 13 bp, Artificial Sequence
  Oligonucleotide for detection of SNP TSC0063659
tttagttttgtgt

SEQ ID NO: 262430 - DNA, 13 bp, Artificial Sequence
  Oligonucleotide for detection of SNP TSC0063659
acacaaaactaaa

SEQ ID NO: 262431 - DNA, 13 bp, Artificial Sequence
  Oligonucleotide for detection of SNP TSC0063659
tttagtgttgtgt

SEQ ID NO: 262432 - DNA, 13 bp, Artificial Sequence
  Oligonucleotide for detection of SNP TSC0063659
acacaacactaaa

SEQ ID NO: 262433 - DNA, 13 bp, Artificial Sequence
  Oligonucleotide for detection of SNP TSC0063659
tttagtttcgtgt

SEQ ID NO: 262434 - DNA, 13 bp, Artificial Sequence
  Oligonucleotide for detection of SNP TSC0063659
acacgaaactaaa

SEQ ID NO: 262435 - DNA, 13 bp, Artificial Sequence
  Oligonucleotide for detection of SNP TSC0063659
tttagtgtcgtgt

SEQ ID NO: 262436 - DNA, 13 bp, Artificial Sequence
  Oligonucleotide for detection of SNP TSC0063659
acacgacactaaa

SEQ ID NO: 262437 - DNA, 13 bp, Artificial Sequence
  Oligonucleotide for detection of SNP TSC0063659
atatgggattggg

SEQ ID NO: 262438 - DNA, 13 bp, Artificial Sequence
  Oligonucleotide for detection of SNP TSC0063659
cccaatcccatat

SEQ ID NO: 262439 - DNA, 13 bp, Artificial Sequence
  Oligonucleotide for detection of SNP TSC0063659
atatggtattggg

SEQ ID NO: 262440 - DNA, 13 bp, Artificial Sequence
  Oligonucleotide for detection of SNP TSC0063659
cccaataccatat

SEQ ID NO: 262441 - DNA, 13 bp, Artificial Sequence
  Oligonucleotide for detection of SNP TSC0063659
atacgggattggg

SEQ ID NO: 262442 - DNA, 13 bp, Artificial Sequence
  Oligonucleotide for detection of SNP TSC0063659
cccaatcccgtat

SEQ ID NO: 262443 - DNA, 13 bp, Artificial Sequence
  Oligonucleotide for detection of SNP TSC0063659
atacggtattggg

SEQ ID NO: 262444 - DNA, 13 bp, Artificial Sequence
  Oligonucleotide for detection of SNP TSC0063659
cccaataccgtat

SEQ ID NO: 262445 - DNA, 13 bp, Artificial Sequence
  Oligonucleotide for detection of SNP TSC0001489
tattcgggaggtt

SEQ ID NO: 262446 - DNA, 13 bp, Artificial Sequence
  Oligonucleotide for detection of SNP TSC0001489
aacctcccgaata

SEQ ID NO: 262447 - DNA, 13 bp, Artificial Sequence
  Oligonucleotide for detection of SNP TSC0001489
tattcgagaggtt

SEQ ID NO: 262448 - DNA, 13 bp, Artificial Sequence
  Oligonucleotide for detection of SNP TSC0001489
aacctctcgaata

SEQ ID NO: 262449 - DNA, 13 bp, Artificial Sequence
  Oligonucleotide for detection of SNP TSC0063661
tattttatgagat

SEQ ID NO: 262450 - DNA, 13 bp, Artificial Sequence
  Oligonucleotide for detection of SNP TSC0063661
atctcataaaata

SEQ ID NO: 262451 - DNA, 13 bp, Artificial Sequence
  Oligonucleotide for detection of SNP TSC0063661
tattttttgagat

SEQ ID NO: 262452 - DNA, 13 bp, Artificial Sequence
  Oligonucleotide for detection of SNP TSC0063661
atctcaaaaaata

SEQ ID NO: 262453 - DNA, 13 bp, Artificial Sequence
  Oligonucleotide for detection of SNP TSC0063663
tgtttagtgttat

SEQ ID NO: 262454 - DNA, 13 bp, Artificial Sequence
  Oligonucleotide for detection of SNP TSC0063663
ataacactaaaca

SEQ ID NO: 262455 - DNA, 13 bp, Artificial Sequence
  Oligonucleotide for detection of SNP TSC0063663
tgtttaatgttat

SEQ ID NO: 262456 - DNA, 13 bp, Artificial Sequence
  Oligonucleotide for detection of SNP TSC0063663
ataacattaaaca

SEQ ID NO: 262457 - DNA, 13 bp, Artificial Sequence
  Oligonucleotide for detection of SNP TSC0063664
gtgattatagtat

SEQ ID NO: 262458 - DNA, 13 bp, Artificial Sequence
  Oligonucleotide for detection of SNP TSC0063664
atactataatcac

SEQ ID NO: 262459 - DNA, 13 bp, Artificial Sequence
  Oligonucleotide for detection of SNP TSC0063664
gtgattgtagtat

SEQ ID NO: 262460 - DNA, 13 bp, Artificial Sequence
  Oligonucleotide for detection of SNP TSC0063664
atactacaatcac

SEQ ID NO: 262461 - DNA, 13 bp, Artificial Sequence
  Oligonucleotide for detection of SNP TSC0063664
gtgatcgtagtat

SEQ ID NO: 262462 - DNA, 13 bp, Artificial Sequence
  Oligonucleotide for detection of SNP TSC0063664
atactacgatcac

SEQ ID NO: 262463 - DNA, 13 bp, Artificial Sequence
  Oligonucleotide for detection of SNP TSC0063664
atattatgattay

SEQ ID NO: 262464 - DNA, 13 bp, Artificial Sequence
  Oligonucleotide for detection of SNP TSC0063664
rtaatcataatat

SEQ ID NO: 262465 - DNA, 13 bp, Artificial Sequence
  Oligonucleotide for detection of SNP TSC0063664
atattacgattay

SEQ ID NO: 262466 - DNA, 13 bp, Artificial Sequence
  Oligonucleotide for detection of SNP TSC0063664
rtaatcgtaatat

SEQ ID NO: 262467 - DNA, 13 bp, Artificial Sequence
  Oligonucleotide for detection of SNP TSC0063665
aatatgattataa

SEQ ID NO: 262468 - DNA, 13 bp, Artificial Sequence
  Oligonucleotide for detection of SNP TSC0063665
ttataatcatatt

SEQ ID NO: 262469 - DNA, 13 bp, Artificial Sequence
  Oligonucleotide for detection of SNP TSC0063665
aatatggttataa

SEQ ID NO: 262470 - DNA, 13 bp, Artificial Sequence
  Oligonucleotide for detection of SNP TSC0063665
ttataaccatatt

SEQ ID NO: 262471 - DNA, 13 bp, Artificial Sequence
  Oligonucleotide for detection of SNP TSC0063666
gtagtaattatta

SEQ ID NO: 262472 - DNA, 13 bp, Artificial Sequence
  Oligonucleotide for detection of SNP TSC0063666
taataattactac

SEQ ID NO: 262473 - DNA, 13 bp, Artificial Sequence
  Oligonucleotide for detection of SNP TSC0063666
gtagtatttatta

SEQ ID NO: 262474 - DNA, 13 bp, Artificial Sequence
  Oligonucleotide for detection of SNP TSC0063666
taataaatactac

SEQ ID NO: 262475 - DNA, 13 bp, Artificial Sequence
  Oligonucleotide for detection of SNP TSC0063666
taatgattattay

SEQ ID NO: 262476 - DNA, 13 bp, Artificial Sequence
  Oligonucleotide for detection of SNP TSC0063666
rtaataatcatta

SEQ ID NO: 262477 - DNA, 13 bp, Artificial Sequence
  Oligonucleotide for detection of SNP TSC0063666
taatgaatattay

SEQ ID NO: 262478 - DNA, 13 bp, Artificial Sequence
  Oligonucleotide for detection of SNP TSC0063666
rtaatattcatta

SEQ ID NO: 262479 - DNA, 13 bp, Artificial Sequence
  Oligonucleotide for detection of SNP TSC0063667
aggataagaatga

SEQ ID NO: 262480 - DNA, 13 bp, Artificial Sequence
  Oligonucleotide for detection of SNP TSC0063667
tcattcttatcct

SEQ ID NO: 262481 - DNA, 13 bp, Artificial Sequence
  Oligonucleotide for detection of SNP TSC0063667
aggatatgaatga

SEQ ID NO: 262482 - DNA, 13 bp, Artificial Sequence
  Oligonucleotide for detection of SNP TSC0063667
tcattcatatcct

SEQ ID NO: 262483 - DNA, 13 bp, Artificial Sequence
  Oligonucleotide for detection of SNP TSC0063668
tgatatatatgtg

SEQ ID NO: 262484 - DNA, 13 bp, Artificial Sequence
  Oligonucleotide for detection of SNP TSC0063668
cacatatatatca

SEQ ID NO: 262485 - DNA, 13 bp, Artificial Sequence
  Oligonucleotide for detection of SNP TSC0063668
tgatatttatgtg

SEQ ID NO: 262486 - DNA, 13 bp, Artificial Sequence
  Oligonucleotide for detection of SNP TSC0063668
cacataaatatca

SEQ ID NO: 262487 - DNA, 13 bp, Artificial Sequence
  Oligonucleotide for detection of SNP TSC0063668
tatatatatatta

SEQ ID NO: 262488 - DNA, 13 bp, Artificial Sequence
  Oligonucleotide for detection of SNP TSC0063668
taatatatatata

SEQ ID NO: 262489 - DNA, 13 bp, Artificial Sequence
  Oligonucleotide for detection of SNP TSC0063668
tatataaatatta

SEQ ID NO: 262490 - DNA, 13 bp, Artificial Sequence
  Oligonucleotide for detection of SNP TSC0063668
taatatttatata

SEQ ID NO: 262491 - DNA, 13 bp, Artificial Sequence
  Oligonucleotide for detection of SNP TSC0063669
gaatatatggata

SEQ ID NO: 262492 - DNA, 13 bp, Artificial Sequence
  Oligonucleotide for detection of SNP TSC0063669
tatccatatattc

SEQ ID NO: 262493 - DNA, 13 bp, Artificial Sequence
  Oligonucleotide for detection of SNP TSC0063669
gaatatgtggata

SEQ ID NO: 262494 - DNA, 13 bp, Artificial Sequence
  Oligonucleotide for detection of SNP TSC0063669
tatccacatattc

SEQ ID NO: 262495 - DNA, 13 bp, Artificial Sequence
  Oligonucleotide for detection of SNP TSC0063669
gaatacgtggata

SEQ ID NO: 262496 - DNA, 13 bp, Artificial Sequence
  Oligonucleotide for detection of SNP TSC0063669
tatccacgtattc

SEQ ID NO: 262497 - DNA, 13 bp, Artificial Sequence
  Oligonucleotide for detection of SNP TSC0063669
tatttatgtgtty

SEQ ID NO: 262498 - DNA, 13 bp, Artificial Sequence
  Oligonucleotide for detection of SNP TSC0063669
raacacataaata

SEQ ID NO: 262499 - DNA, 13 bp, Artificial Sequence
  Oligonucleotide for detection of SNP TSC0063669
tatttacgtgtty

SEQ ID NO: 262500 - DNA, 13 bp, Artificial Sequence
  Oligonucleotide for detection of SNP TSC0063669
raacacgtaaata

SEQ ID NO: 262501 - DNA, 13 bp, Artificial Sequence
  Oligonucleotide for detection of SNP TSC0000877
gtataaagtagga

SEQ ID NO: 262502 - DNA, 13 bp, Artificial Sequence
  Oligonucleotide for detection of SNP TSC0000877
tcctactttatac

SEQ ID NO: 262503 - DNA, 13 bp, Artificial Sequence
  Oligonucleotide for detection of SNP TSC0000877
gtataaggtagga

SEQ ID NO: 262504 - DNA, 13 bp, Artificial Sequence
  Oligonucleotide for detection of SNP TSC0000877
tcctaccttatac

SEQ ID NO: 262505 - DNA, 13 bp, Artificial Sequence
  Oligonucleotide for detection of SNP TSC0063673
ttggttggttggg

SEQ ID NO: 262506 - DNA, 13 bp, Artificial Sequence
  Oligonucleotide for detection of SNP TSC0063673
cccaaccaaccaa

SEQ ID NO: 262507 - DNA, 13 bp, Artificial Sequence
  Oligonucleotide for detection of SNP TSC0063673
ttggttagttggg

SEQ ID NO: 262508 - DNA, 13 bp, Artificial Sequence
  Oligonucleotide for detection of SNP TSC0063673
cccaactaaccaa

SEQ ID NO: 262509 - DNA, 13 bp, Artificial Sequence
  Oligonucleotide for detection of SNP TSC0063674
gtttggaaggtat

SEQ ID NO: 262510 - DNA, 13 bp, Artificial Sequence
  Oligonucleotide for detection of SNP TSC0063674
ataccttccaaac

SEQ ID NO: 262511 - DNA, 13 bp, Artificial Sequence
  Oligonucleotide for detection of SNP TSC0063674
gtttggtaggtat

SEQ ID NO: 262512 - DNA, 13 bp, Artificial Sequence
  Oligonucleotide for detection of SNP TSC0063674
atacctaccaaac

SEQ ID NO: 262513 - DNA, 13 bp, Artificial Sequence
  Oligonucleotide for detection of SNP TSC0063674
atgttttttagay

SEQ ID NO: 262514 - DNA, 13 bp, Artificial Sequence
  Oligonucleotide for detection of SNP TSC0063674
rtctaaaaaacat

SEQ ID NO: 262515 - DNA, 13 bp, Artificial Sequence
  Oligonucleotide for detection of SNP TSC0063674
atgtttgttagay

SEQ ID NO: 262516 - DNA, 13 bp, Artificial Sequence
  Oligonucleotide for detection of SNP TSC0063674
rtctaacaaacat

SEQ ID NO: 262517 - DNA, 13 bp, Artificial Sequence
  Oligonucleotide for detection of SNP TSC0063679
aaaagagaggtgg

SEQ ID NO: 262518 - DNA, 13 bp, Artificial Sequence
  Oligonucleotide for detection of SNP TSC0063679
ccacctctctttt

SEQ ID NO: 262519 - DNA, 13 bp, Artificial Sequence
  Oligonucleotide for detection of SNP TSC0063679
aaaagataggtgg

SEQ ID NO: 262520 - DNA, 13 bp, Artificial Sequence
  Oligonucleotide for detection of SNP TSC0063679
ccacctatctttt

SEQ ID NO: 262521 - DNA, 13 bp, Artificial Sequence
  Oligonucleotide for detection of SNP TSC0063681
gaataagttgaaa

SEQ ID NO: 262522 - DNA, 13 bp, Artificial Sequence
  Oligonucleotide for detection of SNP TSC0063681
tttcaacttattc

SEQ ID NO: 262523 - DNA, 13 bp, Artificial Sequence
  Oligonucleotide for detection of SNP TSC0063681
gaataaattgaaa

SEQ ID NO: 262524 - DNA, 13 bp, Artificial Sequence
  Oligonucleotide for detection of SNP TSC0063681
tttcaatttattc

SEQ ID NO: 262525 - DNA, 13 bp, Artificial Sequence
  Oligonucleotide for detection of SNP TSC0063682
ttaagttaattta

SEQ ID NO: 262526 - DNA, 13 bp, Artificial Sequence
  Oligonucleotide for detection of SNP TSC0063682
taaattaacttaa

SEQ ID NO: 262527 - DNA, 13 bp, Artificial Sequence
  Oligonucleotide for detection of SNP TSC0063682
ttaagtgaattta

SEQ ID NO: 262528 - DNA, 13 bp, Artificial Sequence
  Oligonucleotide for detection of SNP TSC0063682
taaattcacttaa

SEQ ID NO: 262529 - DNA, 13 bp, Artificial Sequence
  Oligonucleotide for detection of SNP TSC0063682
taaattaatttaa

SEQ ID NO: 262530 - DNA, 13 bp, Artificial Sequence
  Oligonucleotide for detection of SNP TSC0063682
ttaaattaattta

SEQ ID NO: 262531 - DNA, 13 bp, Artificial Sequence
  Oligonucleotide for detection of SNP TSC0063682
taaatttatttaa

SEQ ID NO: 262532 - DNA, 13 bp, Artificial Sequence
  Oligonucleotide for detection of SNP TSC0063682
ttaaataaattta

SEQ ID NO: 262533 - DNA, 13 bp, Artificial Sequence
  Oligonucleotide for detection of SNP TSC0063684
tgaggatggtagg

SEQ ID NO: 262534 - DNA, 13 bp, Artificial Sequence
  Oligonucleotide for detection of SNP TSC0063684
cctaccatcctca

SEQ ID NO: 262535 - DNA, 13 bp, Artificial Sequence
  Oligonucleotide for detection of SNP TSC0063684
tgaggacggtagg

SEQ ID NO: 262536 - DNA, 13 bp, Artificial Sequence
  Oligonucleotide for detection of SNP TSC0063684
cctaccgtcctca

SEQ ID NO: 262537 - DNA, 13 bp, Artificial Sequence
  Oligonucleotide for detection of SNP TSC0007733
aaggttatttatg

SEQ ID NO: 262538 - DNA, 13 bp, Artificial Sequence
  Oligonucleotide for detection of SNP TSC0007733
cataaataacctt

SEQ ID NO: 262539 - DNA, 13 bp, Artificial Sequence
  Oligonucleotide for detection of SNP TSC0007733
aaggttgtttatg

SEQ ID NO: 262540 - DNA, 13 bp, Artificial Sequence
  Oligonucleotide for detection of SNP TSC0007733
cataaacaacctt

SEQ ID NO: 262541 - DNA, 13 bp, Artificial Sequence
  Oligonucleotide for detection of SNP TSC0007733
aaggtcgtttatg

SEQ ID NO: 262542 - DNA, 13 bp, Artificial Sequence
  Oligonucleotide for detection of SNP TSC0007733
cataaacgacctt

SEQ ID NO: 262543 - DNA, 13 bp, Artificial Sequence
  Oligonucleotide for detection of SNP TSC0007733
tatgagtgatttt

SEQ ID NO: 262544 - DNA, 13 bp, Artificial Sequence
  Oligonucleotide for detection of SNP TSC0007733
aaaatcactcata

SEQ ID NO: 262545 - DNA, 13 bp, Artificial Sequence
  Oligonucleotide for detection of SNP TSC0007733
tatgagcgatttt

SEQ ID NO: 262546 - DNA, 13 bp, Artificial Sequence
  Oligonucleotide for detection of SNP TSC0007733
aaaatcgctcata

SEQ ID NO: 262547 - DNA, 13 bp, Artificial Sequence
  Oligonucleotide for detection of SNP TSC0063689
ggtttaatgagty

SEQ ID NO: 262548 - DNA, 13 bp, Artificial Sequence
  Oligonucleotide for detection of SNP TSC0063689
ractcattaaacc

SEQ ID NO: 262549 - DNA, 13 bp, Artificial Sequence
  Oligonucleotide for detection of SNP TSC0010251
atattaatggtga

SEQ ID NO: 262550 - DNA, 13 bp, Artificial Sequence
  Oligonucleotide for detection of SNP TSC0010251
tcaccattaatat

SEQ ID NO: 262551 - DNA, 13 bp, Artificial Sequence
  Oligonucleotide for detection of SNP TSC0010251
atattagtggtga

SEQ ID NO: 262552 - DNA, 13 bp, Artificial Sequence
  Oligonucleotide for detection of SNP TSC0010251
tcaccactaatat

SEQ ID NO: 262553 - DNA, 13 bp, Artificial Sequence
  Oligonucleotide for detection of SNP TSC0010293
tgattaataggat

SEQ ID NO: 262554 - DNA, 13 bp, Artificial Sequence
  Oligonucleotide for detection of SNP TSC0010293
atcctattaatca

SEQ ID NO: 262555 - DNA, 13 bp, Artificial Sequence
  Oligonucleotide for detection of SNP TSC0010293
tgattagtaggat

SEQ ID NO: 262556 - DNA, 13 bp, Artificial Sequence
  Oligonucleotide for detection of SNP TSC0010293
atcctactaatca

SEQ ID NO: 262557 - DNA, 13 bp, Artificial Sequence
  Oligonucleotide for detection of SNP TSC0063693
tggaaagaaaagt

SEQ ID NO: 262558 - DNA, 13 bp, Artificial Sequence
  Oligonucleotide for detection of SNP TSC0063693
acttttctttcca

SEQ ID NO: 262559 - DNA, 13 bp, Artificial Sequence
  Oligonucleotide for detection of SNP TSC0063693
tggaaaaaaaagt

SEQ ID NO: 262560 - DNA, 13 bp, Artificial Sequence
  Oligonucleotide for detection of SNP TSC0063693
acttttttttcca

SEQ ID NO: 262561 - DNA, 13 bp, Artificial Sequence
  Oligonucleotide for detection of SNP TSC0063694
tgattttattttt

SEQ ID NO: 262562 - DNA, 13 bp, Artificial Sequence
  Oligonucleotide for detection of SNP TSC0063694
aaaaataaaatca

SEQ ID NO: 262563 - DNA, 13 bp, Artificial Sequence
  Oligonucleotide for detection of SNP TSC0063694
tgatttgattttt

SEQ ID NO: 262564 - DNA, 13 bp, Artificial Sequence
  Oligonucleotide for detection of SNP TSC0063694
aaaaatcaaatca

SEQ ID NO: 262565 - DNA, 13 bp, Artificial Sequence
  Oligonucleotide for detection of SNP TSC0063694
aagaataaagtta

SEQ ID NO: 262566 - DNA, 13 bp, Artificial Sequence
  Oligonucleotide for detection of SNP TSC0063694
taactttattctt

SEQ ID NO: 262567 - DNA, 13 bp, Artificial Sequence
  Oligonucleotide for detection of SNP TSC0001589
ttaggtttgttaa

SEQ ID NO: 262568 - DNA, 13 bp, Artificial Sequence
  Oligonucleotide for detection of SNP TSC0001589
ttaacaaacctaa

SEQ ID NO: 262569 - DNA, 13 bp, Artificial Sequence
  Oligonucleotide for detection of SNP TSC0001589
ttaataaatttgg

SEQ ID NO: 262570 - DNA, 13 bp, Artificial Sequence
  Oligonucleotide for detection of SNP TSC0001589
ccaaatttattaa

SEQ ID NO: 262571 - DNA, 13 bp, Artificial Sequence
  Oligonucleotide for detection of SNP TSC0001589
ttaatatatttgg

SEQ ID NO: 262572 - DNA, 13 bp, Artificial Sequence
  Oligonucleotide for detection of SNP TSC0001589
ccaaatatattaa

SEQ ID NO: 262573 - DNA, 13 bp, Artificial Sequence
  Oligonucleotide for detection of SNP TSC0001590
aagttggggtagg

SEQ ID NO: 262574 - DNA, 13 bp, Artificial Sequence
  Oligonucleotide for detection of SNP TSC0001590
cctaccccaactt

SEQ ID NO: 262575 - DNA, 13 bp, Artificial Sequence
  Oligonucleotide for detection of SNP TSC0063696
ggaaggtggttgy

SEQ ID NO: 262576 - DNA, 13 bp, Artificial Sequence
  Oligonucleotide for detection of SNP TSC0063696
rcaaccaccttcc

SEQ ID NO: 262577 - DNA, 13 bp, Artificial Sequence
  Oligonucleotide for detection of SNP TSC0063696
ggaaggcggttgy

SEQ ID NO: 262578 - DNA, 13 bp, Artificial Sequence
  Oligonucleotide for detection of SNP TSC0063696
rcaaccgccttcc

SEQ ID NO: 262579 - DNA, 13 bp, Artificial Sequence
  Oligonucleotide for detection of SNP TSC0063696
gtaatcgttttty

SEQ ID NO: 262580 - DNA, 13 bp, Artificial Sequence
  Oligonucleotide for detection of SNP TSC0063696
raaaaacgattac

SEQ ID NO: 262581 - DNA, 13 bp, Artificial Sequence
  Oligonucleotide for detection of SNP TSC0063697
ggatagatataaa

SEQ ID NO: 262582 - DNA, 13 bp, Artificial Sequence
  Oligonucleotide for detection of SNP TSC0063697
tttatatctatcc

SEQ ID NO: 262583 - DNA, 13 bp, Artificial Sequence
  Oligonucleotide for detection of SNP TSC0063697
ggatagttataaa

SEQ ID NO: 262584 - DNA, 13 bp, Artificial Sequence
  Oligonucleotide for detection of SNP TSC0063697
tttataactatcc

SEQ ID NO: 262585 - DNA, 13 bp, Artificial Sequence
  Oligonucleotide for detection of SNP TSC0063698
tagagtgtatgty

SEQ ID NO: 262586 - DNA, 13 bp, Artificial Sequence
  Oligonucleotide for detection of SNP TSC0063698
racatacactcta

SEQ ID NO: 262587 - DNA, 13 bp, Artificial Sequence
  Oligonucleotide for detection of SNP TSC0063698
tagagtatatgty

SEQ ID NO: 262588 - DNA, 13 bp, Artificial Sequence
  Oligonucleotide for detection of SNP TSC0063698
racatatactcta

SEQ ID NO: 262589 - DNA, 13 bp, Artificial Sequence
  Oligonucleotide for detection of SNP TSC0000679
ggtttatggatty

SEQ ID NO: 262590 - DNA, 13 bp, Artificial Sequence
  Oligonucleotide for detection of SNP TSC0000679
raatccataaacc

SEQ ID NO: 262591 - DNA, 13 bp, Artificial Sequence
  Oligonucleotide for detection of SNP TSC0000679
ggtttacggatty

SEQ ID NO: 262592 - DNA, 13 bp, Artificial Sequence
  Oligonucleotide for detection of SNP TSC0000679
raatccgtaaacc

SEQ ID NO: 262593 - DNA, 13 bp, Artificial Sequence
  Oligonucleotide for detection of SNP TSC0000679
gaatttataaaty

SEQ ID NO: 262594 - DNA, 13 bp, Artificial Sequence
  Oligonucleotide for detection of SNP TSC0000679
ratttataaattc

SEQ ID NO: 262595 - DNA, 13 bp, Artificial Sequence
  Oligonucleotide for detection of SNP TSC0000679
gaatttgtaaaty

SEQ ID NO: 262596 - DNA, 13 bp, Artificial Sequence
  Oligonucleotide for detection of SNP TSC0000679
ratttacaaattc

SEQ ID NO: 262597 - DNA, 13 bp, Artificial Sequence
  Oligonucleotide for detection of SNP TSC0000679
gaattcgtaaaty

SEQ ID NO: 262598 - DNA, 13 bp, Artificial Sequence
  Oligonucleotide for detection of SNP TSC0000679
ratttacgaattc

SEQ ID NO: 262599 - DNA, 13 bp, Artificial Sequence
  Oligonucleotide for detection of SNP TSC0000680
ttttgttttttgg

SEQ ID NO: 262600 - DNA, 13 bp, Artificial Sequence
  Oligonucleotide for detection of SNP TSC0000680
ccaaaaaacaaaa

SEQ ID NO: 262601 - DNA, 13 bp, Artificial Sequence
  Oligonucleotide for detection of SNP TSC0000680
ttaagaaatagag

SEQ ID NO: 262602 - DNA, 13 bp, Artificial Sequence
  Oligonucleotide for detection of SNP TSC0000680
ctctatttcttaa

SEQ ID NO: 262603 - DNA, 13 bp, Artificial Sequence
  Oligonucleotide for detection of SNP TSC0000680
ttaagatatagag

SEQ ID NO: 262604 - DNA, 13 bp, Artificial Sequence
  Oligonucleotide for detection of SNP TSC0000680
ctctatatcttaa

SEQ ID NO: 262605 - DNA, 13 bp, Artificial Sequence
  Oligonucleotide for detection of SNP TSC0063700
aatttaagtgttt

SEQ ID NO: 262606 - DNA, 13 bp, Artificial Sequence
  Oligonucleotide for detection of SNP TSC0063700
aaacacttaaatt

SEQ ID NO: 262607 - DNA, 13 bp, Artificial Sequence
  Oligonucleotide for detection of SNP TSC0063700
aatttaggtgttt

SEQ ID NO: 262608 - DNA, 13 bp, Artificial Sequence
  Oligonucleotide for detection of SNP TSC0063700
aaacacctaaatt

SEQ ID NO: 262609 - DNA, 13 bp, Artificial Sequence
  Oligonucleotide for detection of SNP TSC0063700
aatttaagcgttt

SEQ ID NO: 262610 - DNA, 13 bp, Artificial Sequence
  Oligonucleotide for detection of SNP TSC0063700
aaacgcttaaatt

SEQ ID NO: 262611 - DNA, 13 bp, Artificial Sequence
  Oligonucleotide for detection of SNP TSC0063700
aatttaggcgttt

SEQ ID NO: 262612 - DNA, 13 bp, Artificial Sequence
  Oligonucleotide for detection of SNP TSC0063700
aaacgcctaaatt

SEQ ID NO: 262613 - DNA, 13 bp, Artificial Sequence
  Oligonucleotide for detection of SNP TSC0009751
atggaattataaa

SEQ ID NO: 262614 - DNA, 13 bp, Artificial Sequence
  Oligonucleotide for detection of SNP TSC0009751
tttataattccat

SEQ ID NO: 262615 - DNA, 13 bp, Artificial Sequence
  Oligonucleotide for detection of SNP TSC0009751
atggaaatataaa

SEQ ID NO: 262616 - DNA, 13 bp, Artificial Sequence
  Oligonucleotide for detection of SNP TSC0009751
tttatatttccat

SEQ ID NO: 262617 - DNA, 13 bp, Artificial Sequence
  Oligonucleotide for detection of SNP TSC0010073
ggaaaatggtaag

SEQ ID NO: 262618 - DNA, 13 bp, Artificial Sequence
  Oligonucleotide for detection of SNP TSC0010073
cttaccattttcc

SEQ ID NO: 262619 - DNA, 13 bp, Artificial Sequence
  Oligonucleotide for detection of SNP TSC0010073
ggaaaacggtaag

SEQ ID NO: 262620 - DNA, 13 bp, Artificial Sequence
  Oligonucleotide for detection of SNP TSC0010073
cttaccgttttcc

SEQ ID NO: 262621 - DNA, 13 bp, Artificial Sequence
  Oligonucleotide for detection of SNP TSC0008326
tggaggtgtagtt

SEQ ID NO: 262622 - DNA, 13 bp, Artificial Sequence
  Oligonucleotide for detection of SNP TSC0008326
aactacacctcca

SEQ ID NO: 262623 - DNA, 13 bp, Artificial Sequence
  Oligonucleotide for detection of SNP TSC0008326
tggaggcgtagtt

SEQ ID NO: 262624 - DNA, 13 bp, Artificial Sequence
  Oligonucleotide for detection of SNP TSC0008326
aactacgcctcca

SEQ ID NO: 262625 - DNA, 13 bp, Artificial Sequence
  Oligonucleotide for detection of SNP TSC0008326
agttgtgttttta

SEQ ID NO: 262626 - DNA, 13 bp, Artificial Sequence
  Oligonucleotide for detection of SNP TSC0008326
taaaaacacaact

SEQ ID NO: 262627 - DNA, 13 bp, Artificial Sequence
  Oligonucleotide for detection of SNP TSC0008326
agttgcgttttta

SEQ ID NO: 262628 - DNA, 13 bp, Artificial Sequence
  Oligonucleotide for detection of SNP TSC0008326
taaaaacgcaact

SEQ ID NO: 262629 - DNA, 13 bp, Artificial Sequence
  Oligonucleotide for detection of SNP TSC0000387
tagtatagatgtt

SEQ ID NO: 262630 - DNA, 13 bp, Artificial Sequence
  Oligonucleotide for detection of SNP TSC0000387
aacatctatacta

SEQ ID NO: 262631 - DNA, 13 bp, Artificial Sequence
  Oligonucleotide for detection of SNP TSC0000387
tagtattgatgtt

SEQ ID NO: 262632 - DNA, 13 bp, Artificial Sequence
  Oligonucleotide for detection of SNP TSC0000387
aacatcaatacta

SEQ ID NO: 262633 - DNA, 13 bp, Artificial Sequence
  Oligonucleotide for detection of SNP TSC0000387
aatatttgtgttg

SEQ ID NO: 262634 - DNA, 13 bp, Artificial Sequence
  Oligonucleotide for detection of SNP TSC0000387
caacacaaatatt

SEQ ID NO: 262635 - DNA, 13 bp, Artificial Sequence
  Oligonucleotide for detection of SNP TSC0000387
aatattagtgttg

SEQ ID NO: 262636 - DNA, 13 bp, Artificial Sequence
  Oligonucleotide for detection of SNP TSC0000387
caacactaatatt

SEQ ID NO: 262637 - DNA, 13 bp, Artificial Sequence
  Oligonucleotide for detection of SNP TSC0063702
tagaaatgtgtgg

SEQ ID NO: 262638 - DNA, 13 bp, Artificial Sequence
  Oligonucleotide for detection of SNP TSC0063702
ccacacatttcta

SEQ ID NO: 262639 - DNA, 13 bp, Artificial Sequence
  Oligonucleotide for detection of SNP TSC0063702
tagaaacgtgtgg

SEQ ID NO: 262640 - DNA, 13 bp, Artificial Sequence
  Oligonucleotide for detection of SNP TSC0063702
ccacacgtttcta

SEQ ID NO: 262641 - DNA, 13 bp, Artificial Sequence
  Oligonucleotide for detection of SNP TSC0001268
ttatttttgaggy

SEQ ID NO: 262642 - DNA, 13 bp, Artificial Sequence
  Oligonucleotide for detection of SNP TSC0001268
rcctcaaaaataa

SEQ ID NO: 262643 - DNA, 13 bp, Artificial Sequence
  Oligonucleotide for detection of SNP TSC0001268
ttatttgtgaggy

SEQ ID NO: 262644 - DNA, 13 bp, Artificial Sequence
  Oligonucleotide for detection of SNP TSC0001268
rcctcacaaataa

SEQ ID NO: 262645 - DNA, 13 bp, Artificial Sequence
  Oligonucleotide for detection of SNP TSC0001268
ttattcgtgaggy

SEQ ID NO: 262646 - DNA, 13 bp, Artificial Sequence
  Oligonucleotide for detection of SNP TSC0001268
rcctcacgaataa

SEQ ID NO: 262647 - DNA, 13 bp, Artificial Sequence
  Oligonucleotide for detection of SNP TSC0001268
gttttaggagtag

SEQ ID NO: 262648 - DNA, 13 bp, Artificial Sequence
  Oligonucleotide for detection of SNP TSC0001268
ctactcctaaaac

SEQ ID NO: 262649 - DNA, 13 bp, Artificial Sequence
  Oligonucleotide for detection of SNP TSC0001268
gttttatgagtag

SEQ ID NO: 262650 - DNA, 13 bp, Artificial Sequence
  Oligonucleotide for detection of SNP TSC0001268
ctactcataaaac

SEQ ID NO: 262651 - DNA, 13 bp, Artificial Sequence
  Oligonucleotide for detection of SNP TSC0001268
gttttacgagtag

SEQ ID NO: 262652 - DNA, 13 bp, Artificial Sequence
  Oligonucleotide for detection of SNP TSC0001268
ctactcgtaaaac

SEQ ID NO: 262653 - DNA, 13 bp, Artificial Sequence
  Oligonucleotide for detection of SNP TSC0001269
tagtggggtgaty

SEQ ID NO: 262654 - DNA, 13 bp, Artificial Sequence
  Oligonucleotide for detection of SNP TSC0001269
ratcaccccacta

SEQ ID NO: 262655 - DNA, 13 bp, Artificial Sequence
  Oligonucleotide for detection of SNP TSC0001269
tagtggggcgaty

SEQ ID NO: 262656 - DNA, 13 bp, Artificial Sequence
  Oligonucleotide for detection of SNP TSC0001269
ratcgccccacta

SEQ ID NO: 262657 - DNA, 13 bp, Artificial Sequence
  Oligonucleotide for detection of SNP TSC0063704
atgtgaagaaatt

SEQ ID NO: 262658 - DNA, 13 bp, Artificial Sequence
  Oligonucleotide for detection of SNP TSC0063704
aatttcttcacat

SEQ ID NO: 262659 - DNA, 13 bp, Artificial Sequence
  Oligonucleotide for detection of SNP TSC0063704
atgtgaggaaatt

SEQ ID NO: 262660 - DNA, 13 bp, Artificial Sequence
  Oligonucleotide for detection of SNP TSC0063704
aatttcctcacat

SEQ ID NO: 262661 - DNA, 13 bp, Artificial Sequence
  Oligonucleotide for detection of SNP TSC0063704
atgcgaagaaatt

SEQ ID NO: 262662 - DNA, 13 bp, Artificial Sequence
  Oligonucleotide for detection of SNP TSC0063704
aatttcttcgcat

SEQ ID NO: 262663 - DNA, 13 bp, Artificial Sequence
  Oligonucleotide for detection of SNP TSC0063704
atgcgaggaaatt

SEQ ID NO: 262664 - DNA, 13 bp, Artificial Sequence
  Oligonucleotide for detection of SNP TSC0063704
aatttcctcgcat

SEQ ID NO: 262665 - DNA, 13 bp, Artificial Sequence
  Oligonucleotide for detection of SNP TSC0063711
tatgttatggata

SEQ ID NO: 262666 - DNA, 13 bp, Artificial Sequence
  Oligonucleotide for detection of SNP TSC0063711
tatccataacata

SEQ ID NO: 262667 - DNA, 13 bp, Artificial Sequence
  Oligonucleotide for detection of SNP TSC0063711
tatgttttggata

SEQ ID NO: 262668 - DNA, 13 bp, Artificial Sequence
  Oligonucleotide for detection of SNP TSC0063711
tatccaaaacata

SEQ ID NO: 262669 - DNA, 13 bp, Artificial Sequence
  Oligonucleotide for detection of SNP TSC0063711
tatttatagtatg

SEQ ID NO: 262670 - DNA, 13 bp, Artificial Sequence
  Oligonucleotide for detection of SNP TSC0063711
catactataaata

SEQ ID NO: 262671 - DNA, 13 bp, Artificial Sequence
  Oligonucleotide for detection of SNP TSC0063711
tatttaaagtatg

SEQ ID NO: 262672 - DNA, 13 bp, Artificial Sequence
  Oligonucleotide for detection of SNP TSC0063711
catactttaaata

SEQ ID NO: 262673 - DNA, 13 bp, Artificial Sequence
  Oligonucleotide for detection of SNP TSC0063712
aatgatattagtt

SEQ ID NO: 262674 - DNA, 13 bp, Artificial Sequence
  Oligonucleotide for detection of SNP TSC0063712
aactaatatcatt

SEQ ID NO: 262675 - DNA, 13 bp, Artificial Sequence
  Oligonucleotide for detection of SNP TSC0063712
aatgatgttagtt

SEQ ID NO: 262676 - DNA, 13 bp, Artificial Sequence
  Oligonucleotide for detection of SNP TSC0063712
aactaacatcatt

SEQ ID NO: 262677 - DNA, 13 bp, Artificial Sequence
  Oligonucleotide for detection of SNP TSC0063712
aatgacgttagtt

SEQ ID NO: 262678 - DNA, 13 bp, Artificial Sequence
  Oligonucleotide for detection of SNP TSC0063712
aactaacgtcatt

SEQ ID NO: 262679 - DNA, 13 bp, Artificial Sequence
  Oligonucleotide for detection of SNP TSC0063712
agttggtgttatt

SEQ ID NO: 262680 - DNA, 13 bp, Artificial Sequence
  Oligonucleotide for detection of SNP TSC0063712
aataacaccaact

SEQ ID NO: 262681 - DNA, 13 bp, Artificial Sequence
  Oligonucleotide for detection of SNP TSC0063712
agttggcgttatt

SEQ ID NO: 262682 - DNA, 13 bp, Artificial Sequence
  Oligonucleotide for detection of SNP TSC0063712
aataacgccaact

SEQ ID NO: 262683 - DNA, 13 bp, Artificial Sequence
  Oligonucleotide for detection of SNP TSC0063713
tttttaagaaaty

SEQ ID NO: 262684 - DNA, 13 bp, Artificial Sequence
  Oligonucleotide for detection of SNP TSC0063713
ratttcttaaaaa

SEQ ID NO: 262685 - DNA, 13 bp, Artificial Sequence
  Oligonucleotide for detection of SNP TSC0063713
tttttaggaaaty

SEQ ID NO: 262686 - DNA, 13 bp, Artificial Sequence
  Oligonucleotide for detection of SNP TSC0063713
ratttcctaaaaa

SEQ ID NO: 262687 - DNA, 13 bp, Artificial Sequence
  Oligonucleotide for detection of SNP TSC0063714
tattgttttatga

SEQ ID NO: 262688 - DNA, 13 bp, Artificial Sequence
  Oligonucleotide for detection of SNP TSC0063714
tcataaaacaata

SEQ ID NO: 262689 - DNA, 13 bp, Artificial Sequence
  Oligonucleotide for detection of SNP TSC0063714
tattgtgttatga

SEQ ID NO: 262690 - DNA, 13 bp, Artificial Sequence
  Oligonucleotide for detection of SNP TSC0063714
tcataacacaata

SEQ ID NO: 262691 - DNA, 13 bp, Artificial Sequence
  Oligonucleotide for detection of SNP TSC0063714
ttataagataata

SEQ ID NO: 262692 - DNA, 13 bp, Artificial Sequence
  Oligonucleotide for detection of SNP TSC0063714
tattatcttataa

SEQ ID NO: 262693 - DNA, 13 bp, Artificial Sequence
  Oligonucleotide for detection of SNP TSC0063724
tgaaaagaaaaaa

SEQ ID NO: 262694 - DNA, 13 bp, Artificial Sequence
  Oligonucleotide for detection of SNP TSC0063724
ttttttcttttca

SEQ ID NO: 262695 - DNA, 13 bp, Artificial Sequence
  Oligonucleotide for detection of SNP TSC0063725
attataagatata

SEQ ID NO: 262696 - DNA, 13 bp, Artificial Sequence
  Oligonucleotide for detection of SNP TSC0063725
tatatcttataat

SEQ ID NO: 262697 - DNA, 13 bp, Artificial Sequence
  Oligonucleotide for detection of SNP TSC0063725
attataggatata

SEQ ID NO: 262698 - DNA, 13 bp, Artificial Sequence
  Oligonucleotide for detection of SNP TSC0063725
tatatcctataat

SEQ ID NO: 262699 - DNA, 13 bp, Artificial Sequence
  Oligonucleotide for detection of SNP TSC0063726
aaaagtgatttta

SEQ ID NO: 262700 - DNA, 13 bp, Artificial Sequence
  Oligonucleotide for detection of SNP TSC0063726
taaaatcactttt

SEQ ID NO: 262701 - DNA, 13 bp, Artificial Sequence
  Oligonucleotide for detection of SNP TSC0063726
aaaagtaatttta

SEQ ID NO: 262702 - DNA, 13 bp, Artificial Sequence
  Oligonucleotide for detection of SNP TSC0063726
taaaattactttt

SEQ ID NO: 262703 - DNA, 13 bp, Artificial Sequence
  Oligonucleotide for detection of SNP TSC0063727
aaattggtatata

SEQ ID NO: 262704 - DNA, 13 bp, Artificial Sequence
  Oligonucleotide for detection of SNP TSC0063727
tatataccaattt

SEQ ID NO: 262705 - DNA, 13 bp, Artificial Sequence
  Oligonucleotide for detection of SNP TSC0063727
aaattgatatata

SEQ ID NO: 262706 - DNA, 13 bp, Artificial Sequence
  Oligonucleotide for detection of SNP TSC0063727
tatatatcaattt

SEQ ID NO: 262707 - DNA, 13 bp, Artificial Sequence
  Oligonucleotide for detection of SNP TSC0063728
aatgatatattaa

SEQ ID NO: 262708 - DNA, 13 bp, Artificial Sequence
  Oligonucleotide for detection of SNP TSC0063728
ttaatatatcatt

SEQ ID NO: 262709 - DNA, 13 bp, Artificial Sequence
  Oligonucleotide for detection of SNP TSC0063728
aatgatttattaa

SEQ ID NO: 262710 - DNA, 13 bp, Artificial Sequence
  Oligonucleotide for detection of SNP TSC0063728
ttaataaatcatt

SEQ ID NO: 262711 - DNA, 13 bp, Artificial Sequence
  Oligonucleotide for detection of SNP TSC0063728
ttgatgtgttatt

SEQ ID NO: 262712 - DNA, 13 bp, Artificial Sequence
  Oligonucleotide for detection of SNP TSC0063728
aataacacatcaa

SEQ ID NO: 262713 - DNA, 13 bp, Artificial Sequence
  Oligonucleotide for detection of SNP TSC0063728
ttgatgggttatt

SEQ ID NO: 262714 - DNA, 13 bp, Artificial Sequence
  Oligonucleotide for detection of SNP TSC0063728
aataacccatcaa

SEQ ID NO: 262715 - DNA, 13 bp, Artificial Sequence
  Oligonucleotide for detection of SNP TSC0010746
gagtgaaattggg

SEQ ID NO: 262716 - DNA, 13 bp, Artificial Sequence
  Oligonucleotide for detection of SNP TSC0010746
cccaatttcactc

SEQ ID NO: 262717 - DNA, 13 bp, Artificial Sequence
  Oligonucleotide for detection of SNP TSC0010746
gagtgagattggg

SEQ ID NO: 262718 - DNA, 13 bp, Artificial Sequence
  Oligonucleotide for detection of SNP TSC0010746
cccaatctcactc

SEQ ID NO: 262719 - DNA, 13 bp, Artificial Sequence
  Oligonucleotide for detection of SNP TSC0063729
agaggttgatgag

SEQ ID NO: 262720 - DNA, 13 bp, Artificial Sequence
  Oligonucleotide for detection of SNP TSC0063729
ctcatcaacctct

SEQ ID NO: 262721 - DNA, 13 bp, Artificial Sequence
  Oligonucleotide for detection of SNP TSC0063729
agaggtcgatgag

SEQ ID NO: 262722 - DNA, 13 bp, Artificial Sequence
  Oligonucleotide for detection of SNP TSC0063729
ctcatcgacctct

SEQ ID NO: 262723 - DNA, 13 bp, Artificial Sequence
  Oligonucleotide for detection of SNP TSC0063729
agaggttgacgag

SEQ ID NO: 262724 - DNA, 13 bp, Artificial Sequence
  Oligonucleotide for detection of SNP TSC0063729
ctcgtcaacctct

SEQ ID NO: 262725 - DNA, 13 bp, Artificial Sequence
  Oligonucleotide for detection of SNP TSC0063729
agaggtcgacgag

SEQ ID NO: 262726 - DNA, 13 bp, Artificial Sequence
  Oligonucleotide for detection of SNP TSC0063729
ctcgtcgacctct

SEQ ID NO: 262727 - DNA, 13 bp, Artificial Sequence
  Oligonucleotide for detection of SNP TSC0063729
tttgttgattttt

SEQ ID NO: 262728 - DNA, 13 bp, Artificial Sequence
  Oligonucleotide for detection of SNP TSC0063729
aaaaatcaacaaa

SEQ ID NO: 262729 - DNA, 13 bp, Artificial Sequence
  Oligonucleotide for detection of SNP TSC0063729
ttcgttgattttt

SEQ ID NO: 262730 - DNA, 13 bp, Artificial Sequence
  Oligonucleotide for detection of SNP TSC0063729
aaaaatcaacgaa

SEQ ID NO: 262731 - DNA, 13 bp, Artificial Sequence
  Oligonucleotide for detection of SNP TSC0063729
ttcgttaattttt

SEQ ID NO: 262732 - DNA, 13 bp, Artificial Sequence
  Oligonucleotide for detection of SNP TSC0063729
aaaaattaacgaa

SEQ ID NO: 262733 - DNA, 13 bp, Artificial Sequence
  Oligonucleotide for detection of SNP TSC0063729
tttgtcgattttt

SEQ ID NO: 262734 - DNA, 13 bp, Artificial Sequence
  Oligonucleotide for detection of SNP TSC0063729
aaaaatcgacaaa

SEQ ID NO: 262735 - DNA, 13 bp, Artificial Sequence
  Oligonucleotide for detection of SNP TSC0063729
ttcgtcgattttt

SEQ ID NO: 262736 - DNA, 13 bp, Artificial Sequence
  Oligonucleotide for detection of SNP TSC0063729
aaaaatcgacgaa

SEQ ID NO: 262737 - DNA, 13 bp, Artificial Sequence
  Oligonucleotide for detection of SNP TSC0010530
ggagggtgatgga

SEQ ID NO: 262738 - DNA, 13 bp, Artificial Sequence
  Oligonucleotide for detection of SNP TSC0010530
tccatcaccctcc

SEQ ID NO: 262739 - DNA, 13 bp, Artificial Sequence
  Oligonucleotide for detection of SNP TSC0010530
ggagggcgatgga

SEQ ID NO: 262740 - DNA, 13 bp, Artificial Sequence
  Oligonucleotide for detection of SNP TSC0010530
tccatcgccctcc

SEQ ID NO: 262741 - DNA, 13 bp, Artificial Sequence
  Oligonucleotide for detection of SNP TSC0010531
aaaaaagaaaaay

SEQ ID NO: 262742 - DNA, 13 bp, Artificial Sequence
  Oligonucleotide for detection of SNP TSC0010531
rtttttctttttt

SEQ ID NO: 262743 - DNA, 13 bp, Artificial Sequence
  Oligonucleotide for detection of SNP TSC0063738
ttgtaagattttg

SEQ ID NO: 262744 - DNA, 13 bp, Artificial Sequence
  Oligonucleotide for detection of SNP TSC0063738
caaaatcttacaa

SEQ ID NO: 262745 - DNA, 13 bp, Artificial Sequence
  Oligonucleotide for detection of SNP TSC0063739
tatataatagtga

SEQ ID NO: 262746 - DNA, 13 bp, Artificial Sequence
  Oligonucleotide for detection of SNP TSC0063739
tcactattatata

SEQ ID NO: 262747 - DNA, 13 bp, Artificial Sequence
  Oligonucleotide for detection of SNP TSC0063739
tatatattagtga

SEQ ID NO: 262748 - DNA, 13 bp, Artificial Sequence
  Oligonucleotide for detection of SNP TSC0063739
tcactaatatata

SEQ ID NO: 262749 - DNA, 13 bp, Artificial Sequence
  Oligonucleotide for detection of SNP TSC0063739
ttattgttatatg

SEQ ID NO: 262750 - DNA, 13 bp, Artificial Sequence
  Oligonucleotide for detection of SNP TSC0063739
catataacaataa

SEQ ID NO: 262751 - DNA, 13 bp, Artificial Sequence
  Oligonucleotide for detection of SNP TSC0063739
ttattgatatatg

SEQ ID NO: 262752 - DNA, 13 bp, Artificial Sequence
  Oligonucleotide for detection of SNP TSC0063739
catatatcaataa

SEQ ID NO: 262753 - DNA, 13 bp, Artificial Sequence
  Oligonucleotide for detection of SNP TSC0063740
ttatagataatty

SEQ ID NO: 262754 - DNA, 13 bp, Artificial Sequence
  Oligonucleotide for detection of SNP TSC0063740
raattatctataa

SEQ ID NO: 262755 - DNA, 13 bp, Artificial Sequence
  Oligonucleotide for detection of SNP TSC0063740
ttatagttaatty

SEQ ID NO: 262756 - DNA, 13 bp, Artificial Sequence
  Oligonucleotide for detection of SNP TSC0063740
raattaactataa

SEQ ID NO: 262757 - DNA, 13 bp, Artificial Sequence
  Oligonucleotide for detection of SNP TSC0063742
tttttgggaagtt

SEQ ID NO: 262758 - DNA, 13 bp, Artificial Sequence
  Oligonucleotide for detection of SNP TSC0063742
aacttcccaaaaa

SEQ ID NO: 262759 - DNA, 13 bp, Artificial Sequence
  Oligonucleotide for detection of SNP TSC0063742
tttttgagaagtt

SEQ ID NO: 262760 - DNA, 13 bp, Artificial Sequence
  Oligonucleotide for detection of SNP TSC0063742
aacttctcaaaaa

SEQ ID NO: 262761 - DNA, 13 bp, Artificial Sequence
  Oligonucleotide for detection of SNP TSC0063744
taaagggttttay

SEQ ID NO: 262762 - DNA, 13 bp, Artificial Sequence
  Oligonucleotide for detection of SNP TSC0063744
rtaaaacccttta

SEQ ID NO: 262763 - DNA, 13 bp, Artificial Sequence
  Oligonucleotide for detection of SNP TSC0063747
aggaattatttgg

SEQ ID NO: 262764 - DNA, 13 bp, Artificial Sequence
  Oligonucleotide for detection of SNP TSC0063747
ccaaataattcct

SEQ ID NO: 262765 - DNA, 13 bp, Artificial Sequence
  Oligonucleotide for detection of SNP TSC0063747
aggaatgatttgg

SEQ ID NO: 262766 - DNA, 13 bp, Artificial Sequence
  Oligonucleotide for detection of SNP TSC0063747
ccaaatcattcct

SEQ ID NO: 262767 - DNA, 13 bp, Artificial Sequence
  Oligonucleotide for detection of SNP TSC0063747
aggaacgatttgg

SEQ ID NO: 262768 - DNA, 13 bp, Artificial Sequence
  Oligonucleotide for detection of SNP TSC0063747
ccaaatcgttcct

SEQ ID NO: 262769 - DNA, 13 bp, Artificial Sequence
  Oligonucleotide for detection of SNP TSC0063747
ttagattgttttt

SEQ ID NO: 262770 - DNA, 13 bp, Artificial Sequence
  Oligonucleotide for detection of SNP TSC0063747
aaaaacaatctaa

SEQ ID NO: 262771 - DNA, 13 bp, Artificial Sequence
  Oligonucleotide for detection of SNP TSC0063747
ttagatcgttttt

SEQ ID NO: 262772 - DNA, 13 bp, Artificial Sequence
  Oligonucleotide for detection of SNP TSC0063747
aaaaacgatctaa

SEQ ID NO: 262773 - DNA, 13 bp, Artificial Sequence
  Oligonucleotide for detection of SNP TSC0063748
tttaaggtaattt

SEQ ID NO: 262774 - DNA, 13 bp, Artificial Sequence
  Oligonucleotide for detection of SNP TSC0063748
aaattaccttaaa

SEQ ID NO: 262775 - DNA, 13 bp, Artificial Sequence
  Oligonucleotide for detection of SNP TSC0063748
tttaagataattt

SEQ ID NO: 262776 - DNA, 13 bp, Artificial Sequence
  Oligonucleotide for detection of SNP TSC0063748
aaattatcttaaa

SEQ ID NO: 262777 - DNA, 13 bp, Artificial Sequence
  Oligonucleotide for detection of SNP TSC0063749
tatagaaagaaag

SEQ ID NO: 262778 - DNA, 13 bp, Artificial Sequence
  Oligonucleotide for detection of SNP TSC0063749
ctttctttctata

SEQ ID NO: 262779 - DNA, 13 bp, Artificial Sequence
  Oligonucleotide for detection of SNP TSC0063750
ggaagtgagtttt

SEQ ID NO: 262780 - DNA, 13 bp, Artificial Sequence
  Oligonucleotide for detection of SNP TSC0063750
aaaactcacttcc

SEQ ID NO: 262781 - DNA, 13 bp, Artificial Sequence
  Oligonucleotide for detection of SNP TSC0063750
ggaagtaagtttt

SEQ ID NO: 262782 - DNA, 13 bp, Artificial Sequence
  Oligonucleotide for detection of SNP TSC0063750
aaaacttacttcc

SEQ ID NO: 262783 - DNA, 13 bp, Artificial Sequence
  Oligonucleotide for detection of SNP TSC0063750
ggaagcgagtttt

SEQ ID NO: 262784 - DNA, 13 bp, Artificial Sequence
  Oligonucleotide for detection of SNP TSC0063750
aaaactcgcttcc

SEQ ID NO: 262785 - DNA, 13 bp, Artificial Sequence
  Oligonucleotide for detection of SNP TSC0063751
gagatatagagag

SEQ ID NO: 262786 - DNA, 13 bp, Artificial Sequence
  Oligonucleotide for detection of SNP TSC0063751
ctctctatatctc

SEQ ID NO: 262787 - DNA, 13 bp, Artificial Sequence
  Oligonucleotide for detection of SNP TSC0063751
gagatagagagag

SEQ ID NO: 262788 - DNA, 13 bp, Artificial Sequence
  Oligonucleotide for detection of SNP TSC0063751
ctctctctatctc

SEQ ID NO: 262789 - DNA, 13 bp, Artificial Sequence
  Oligonucleotide for detection of SNP TSC0063752
agagagagaagag

SEQ ID NO: 262790 - DNA, 13 bp, Artificial Sequence
  Oligonucleotide for detection of SNP TSC0063752
ctcttctctctct

SEQ ID NO: 262791 - DNA, 13 bp, Artificial Sequence
  Oligonucleotide for detection of SNP TSC0063752
agagagtgaagag

SEQ ID NO: 262792 - DNA, 13 bp, Artificial Sequence
  Oligonucleotide for detection of SNP TSC0063752
ctcttcactctct

SEQ ID NO: 262793 - DNA, 13 bp, Artificial Sequence
  Oligonucleotide for detection of SNP TSC0063753
tgttatgatttta

SEQ ID NO: 262794 - DNA, 13 bp, Artificial Sequence
  Oligonucleotide for detection of SNP TSC0063753
taaaatcataaca

SEQ ID NO: 262795 - DNA, 13 bp, Artificial Sequence
  Oligonucleotide for detection of SNP TSC0063753
tgttacgatttta

SEQ ID NO: 262796 - DNA, 13 bp, Artificial Sequence
  Oligonucleotide for detection of SNP TSC0063753
taaaatcgtaaca

SEQ ID NO: 262797 - DNA, 13 bp, Artificial Sequence
  Oligonucleotide for detection of SNP TSC0063753
taaaattgtgata

SEQ ID NO: 262798 - DNA, 13 bp, Artificial Sequence
  Oligonucleotide for detection of SNP TSC0063753
tatcacaatttta

SEQ ID NO: 262799 - DNA, 13 bp, Artificial Sequence
  Oligonucleotide for detection of SNP TSC0063753
taaaatggtgata

SEQ ID NO: 262800 - DNA, 13 bp, Artificial Sequence
  Oligonucleotide for detection of SNP TSC0063753
tatcaccatttta

SEQ ID NO: 262801 - DNA, 13 bp, Artificial Sequence
  Oligonucleotide for detection of SNP TSC0063753
taaaatcgtgata

SEQ ID NO: 262802 - DNA, 13 bp, Artificial Sequence
  Oligonucleotide for detection of SNP TSC0063753
tatcacgatttta

SEQ ID NO: 262803 - DNA, 13 bp, Artificial Sequence
  Oligonucleotide for detection of SNP TSC0063754
tgtgttaagattt

SEQ ID NO: 262804 - DNA, 13 bp, Artificial Sequence
  Oligonucleotide for detection of SNP TSC0063754
aaatcttaacaca

SEQ ID NO: 262805 - DNA, 13 bp, Artificial Sequence
  Oligonucleotide for detection of SNP TSC0063754
tgtgtttagattt

SEQ ID NO: 262806 - DNA, 13 bp, Artificial Sequence
  Oligonucleotide for detection of SNP TSC0063754
aaatctaaacaca

SEQ ID NO: 262807 - DNA, 13 bp, Artificial Sequence
  Oligonucleotide for detection of SNP TSC0063754
tgtgttgagattt

SEQ ID NO: 262808 - DNA, 13 bp, Artificial Sequence
  Oligonucleotide for detection of SNP TSC0063754
aaatctcaacaca

SEQ ID NO: 262809 - DNA, 13 bp, Artificial Sequence
  Oligonucleotide for detection of SNP TSC0063754
tgtgtcgagattt

SEQ ID NO: 262810 - DNA, 13 bp, Artificial Sequence
  Oligonucleotide for detection of SNP TSC0063754
aaatctcgacaca

SEQ ID NO: 262811 - DNA, 13 bp, Artificial Sequence
  Oligonucleotide for detection of SNP TSC0063754
aggttttggtata

SEQ ID NO: 262812 - DNA, 13 bp, Artificial Sequence
  Oligonucleotide for detection of SNP TSC0063754
tataccaaaacct

SEQ ID NO: 262813 - DNA, 13 bp, Artificial Sequence
  Oligonucleotide for detection of SNP TSC0063754
aggtttgggtata

SEQ ID NO: 262814 - DNA, 13 bp, Artificial Sequence
  Oligonucleotide for detection of SNP TSC0063754
tatacccaaacct

SEQ ID NO: 262815 - DNA, 13 bp, Artificial Sequence
  Oligonucleotide for detection of SNP TSC0063754
aggtttcggtata

SEQ ID NO: 262816 - DNA, 13 bp, Artificial Sequence
  Oligonucleotide for detection of SNP TSC0063754
tataccgaaacct

SEQ ID NO: 262817 - DNA, 13 bp, Artificial Sequence
  Oligonucleotide for detection of SNP TSC0063755
gtgattggagtta

SEQ ID NO: 262818 - DNA, 13 bp, Artificial Sequence
  Oligonucleotide for detection of SNP TSC0063755
taactccaatcac

SEQ ID NO: 262819 - DNA, 13 bp, Artificial Sequence
  Oligonucleotide for detection of SNP TSC0063755
gtgattagagtta

SEQ ID NO: 262820 - DNA, 13 bp, Artificial Sequence
  Oligonucleotide for detection of SNP TSC0063755
taactctaatcac

SEQ ID NO: 262821 - DNA, 13 bp, Artificial Sequence
  Oligonucleotide for detection of SNP TSC0063756
aggattggaggag

SEQ ID NO: 262822 - DNA, 13 bp, Artificial Sequence
  Oligonucleotide for detection of SNP TSC0063756
ctcctccaatcct

SEQ ID NO: 262823 - DNA, 13 bp, Artificial Sequence
  Oligonucleotide for detection of SNP TSC0063756
aggattagaggag

SEQ ID NO: 262824 - DNA, 13 bp, Artificial Sequence
  Oligonucleotide for detection of SNP TSC0063756
ctcctctaatcct

SEQ ID NO: 262825 - DNA, 13 bp, Artificial Sequence
  Oligonucleotide for detection of SNP TSC0063757
gggaagtagagat

SEQ ID NO: 262826 - DNA, 13 bp, Artificial Sequence
  Oligonucleotide for detection of SNP TSC0063757
atctctacttccc

SEQ ID NO: 262827 - DNA, 13 bp, Artificial Sequence
  Oligonucleotide for detection of SNP TSC0063757
gggaaggagagat

SEQ ID NO: 262828 - DNA, 13 bp, Artificial Sequence
  Oligonucleotide for detection of SNP TSC0063757
atctctccttccc

SEQ ID NO: 262829 - DNA, 13 bp, Artificial Sequence
  Oligonucleotide for detection of SNP TSC0063758
tgtaataagttga

SEQ ID NO: 262830 - DNA, 13 bp, Artificial Sequence
  Oligonucleotide for detection of SNP TSC0063758
tcaacttattaca

SEQ ID NO: 262831 - DNA, 13 bp, Artificial Sequence
  Oligonucleotide for detection of SNP TSC0063758
tgtaatgagttga

SEQ ID NO: 262832 - DNA, 13 bp, Artificial Sequence
  Oligonucleotide for detection of SNP TSC0063758
tcaactcattaca

SEQ ID NO: 262833 - DNA, 13 bp, Artificial Sequence
  Oligonucleotide for detection of SNP TSC0063759
gggtgaatagtag

SEQ ID NO: 262834 - DNA, 13 bp, Artificial Sequence
  Oligonucleotide for detection of SNP TSC0063759
ctactattcaccc

SEQ ID NO: 262835 - DNA, 13 bp, Artificial Sequence
  Oligonucleotide for detection of SNP TSC0063759
gggtgagtagtag

SEQ ID NO: 262836 - DNA, 13 bp, Artificial Sequence
  Oligonucleotide for detection of SNP TSC0063759
ctactactcaccc

SEQ ID NO: 262837 - DNA, 13 bp, Artificial Sequence
  Oligonucleotide for detection of SNP TSC0063760
gttatatgtataa

SEQ ID NO: 262838 - DNA, 13 bp, Artificial Sequence
  Oligonucleotide for detection of SNP TSC0063760
ttatacatataac

SEQ ID NO: 262839 - DNA, 13 bp, Artificial Sequence
  Oligonucleotide for detection of SNP TSC0063760
gttatacgtataa

SEQ ID NO: 262840 - DNA, 13 bp, Artificial Sequence
  Oligonucleotide for detection of SNP TSC0063760
ttatacgtataac

SEQ ID NO: 262841 - DNA, 13 bp, Artificial Sequence
  Oligonucleotide for detection of SNP TSC0063760
ttatgtgtataay

SEQ ID NO: 262842 - DNA, 13 bp, Artificial Sequence
  Oligonucleotide for detection of SNP TSC0063760
rttatacacataa

SEQ ID NO: 262843 - DNA, 13 bp, Artificial Sequence
  Oligonucleotide for detection of SNP TSC0063760
ttatgtatataay

SEQ ID NO: 262844 - DNA, 13 bp, Artificial Sequence
  Oligonucleotide for detection of SNP TSC0063760
rttatatacataa

SEQ ID NO: 262845 - DNA, 13 bp, Artificial Sequence
  Oligonucleotide for detection of SNP TSC0063760
ttatgcgtataay

SEQ ID NO: 262846 - DNA, 13 bp, Artificial Sequence
  Oligonucleotide for detection of SNP TSC0063760
rttatacgcataa

SEQ ID NO: 262847 - DNA, 13 bp, Artificial Sequence
  Oligonucleotide for detection of SNP TSC0063761
attttatggtgtt

SEQ ID NO: 262848 - DNA, 13 bp, Artificial Sequence
  Oligonucleotide for detection of SNP TSC0063761
aacaccataaaat

SEQ ID NO: 262849 - DNA, 13 bp, Artificial Sequence
  Oligonucleotide for detection of SNP TSC0063761
attttacggtgtt

SEQ ID NO: 262850 - DNA, 13 bp, Artificial Sequence
  Oligonucleotide for detection of SNP TSC0063761
aacaccgtaaaat

SEQ ID NO: 262851 - DNA, 13 bp, Artificial Sequence
  Oligonucleotide for detection of SNP TSC0063761
agtattataaaat

SEQ ID NO: 262852 - DNA, 13 bp, Artificial Sequence
  Oligonucleotide for detection of SNP TSC0063761
attttataatact

SEQ ID NO: 262853 - DNA, 13 bp, Artificial Sequence
  Oligonucleotide for detection of SNP TSC0063761
agtattgtaaaat

SEQ ID NO: 262854 - DNA, 13 bp, Artificial Sequence
  Oligonucleotide for detection of SNP TSC0063761
attttacaatact

SEQ ID NO: 262855 - DNA, 13 bp, Artificial Sequence
  Oligonucleotide for detection of SNP TSC0063761
agtatcgtaaaat

SEQ ID NO: 262856 - DNA, 13 bp, Artificial Sequence
  Oligonucleotide for detection of SNP TSC0063761
attttacgatact

SEQ ID NO: 262857 - DNA, 13 bp, Artificial Sequence
  Oligonucleotide for detection of SNP TSC0063762
aataaaggaagaa

SEQ ID NO: 262858 - DNA, 13 bp, Artificial Sequence
  Oligonucleotide for detection of SNP TSC0063762
ttcttcctttatt

SEQ ID NO: 262859 - DNA, 13 bp, Artificial Sequence
  Oligonucleotide for detection of SNP TSC0063762
aataaatgaagaa

SEQ ID NO: 262860 - DNA, 13 bp, Artificial Sequence
  Oligonucleotide for detection of SNP TSC0063762
ttcttcatttatt

SEQ ID NO: 262861 - DNA, 13 bp, Artificial Sequence
  Oligonucleotide for detection of SNP TSC0063762
aataaacgaagaa

SEQ ID NO: 262862 - DNA, 13 bp, Artificial Sequence
  Oligonucleotide for detection of SNP TSC0063762
ttcttcgtttatt

SEQ ID NO: 262863 - DNA, 13 bp, Artificial Sequence
  Oligonucleotide for detection of SNP TSC0063763
tttttaaaaaaty

SEQ ID NO: 262864 - DNA, 13 bp, Artificial Sequence
  Oligonucleotide for detection of SNP TSC0063763
rattttttaaaaa

SEQ ID NO: 262865 - DNA, 13 bp, Artificial Sequence
  Oligonucleotide for detection of SNP TSC0063764
taaatttttttta

SEQ ID NO: 262866 - DNA, 13 bp, Artificial Sequence
  Oligonucleotide for detection of SNP TSC0063764
taaaaaaaattta

SEQ ID NO: 262867 - DNA, 13 bp, Artificial Sequence
  Oligonucleotide for detection of SNP TSC0063764
taaagagagttta

SEQ ID NO: 262868 - DNA, 13 bp, Artificial Sequence
  Oligonucleotide for detection of SNP TSC0063764
taaactctcttta

SEQ ID NO: 262869 - DNA, 13 bp, Artificial Sequence
  Oligonucleotide for detection of SNP TSC0063764
taaagatagttta

SEQ ID NO: 262870 - DNA, 13 bp, Artificial Sequence
  Oligonucleotide for detection of SNP TSC0063764
taaactatcttta

SEQ ID NO: 262871 - DNA, 13 bp, Artificial Sequence
  Oligonucleotide for detection of SNP TSC0063769
ggttagaatgaty

SEQ ID NO: 262872 - DNA, 13 bp, Artificial Sequence
  Oligonucleotide for detection of SNP TSC0063769
ratcattctaacc

SEQ ID NO: 262873 - DNA, 13 bp, Artificial Sequence
  Oligonucleotide for detection of SNP TSC0063769
ggttaggatgaty

SEQ ID NO: 262874 - DNA, 13 bp, Artificial Sequence
  Oligonucleotide for detection of SNP TSC0063769
ratcatcctaacc

SEQ ID NO: 262875 - DNA, 13 bp, Artificial Sequence
  Oligonucleotide for detection of SNP TSC0063770
gttgaaggtatgg

SEQ ID NO: 262876 - DNA, 13 bp, Artificial Sequence
  Oligonucleotide for detection of SNP TSC0063770
ccataccttcaac

SEQ ID NO: 262877 - DNA, 13 bp, Artificial Sequence
  Oligonucleotide for detection of SNP TSC0063770
gttgaaagtatgg

SEQ ID NO: 262878 - DNA, 13 bp, Artificial Sequence
  Oligonucleotide for detection of SNP TSC0063770
ccatactttcaac

SEQ ID NO: 262879 - DNA, 13 bp, Artificial Sequence
  Oligonucleotide for detection of SNP TSC0063772
gagaaaatgataa

SEQ ID NO: 262880 - DNA, 13 bp, Artificial Sequence
  Oligonucleotide for detection of SNP TSC0063772
ttatcattttctc

SEQ ID NO: 262881 - DNA, 13 bp, Artificial Sequence
  Oligonucleotide for detection of SNP TSC0063772
gagaaagtgataa

SEQ ID NO: 262882 - DNA, 13 bp, Artificial Sequence
  Oligonucleotide for detection of SNP TSC0063772
ttatcactttctc

SEQ ID NO: 262883 - DNA, 13 bp, Artificial Sequence
  Oligonucleotide for detection of SNP TSC0063773
tgggatatttttg

SEQ ID NO: 262884 - DNA, 13 bp, Artificial Sequence
  Oligonucleotide for detection of SNP TSC0063773
caaaaatatccca

SEQ ID NO: 262885 - DNA, 13 bp, Artificial Sequence
  Oligonucleotide for detection of SNP TSC0063773
tgggatttttttg

SEQ ID NO: 262886 - DNA, 13 bp, Artificial Sequence
  Oligonucleotide for detection of SNP TSC0063773
caaaaaaatccca

SEQ ID NO: 262887 - DNA, 13 bp, Artificial Sequence
  Oligonucleotide for detection of SNP TSC0063773
tagggatatttta

SEQ ID NO: 262888 - DNA, 13 bp, Artificial Sequence
  Oligonucleotide for detection of SNP TSC0063773
taaaatatcccta

SEQ ID NO: 262889 - DNA, 13 bp, Artificial Sequence
  Oligonucleotide for detection of SNP TSC0063773
tagggagatttta

SEQ ID NO: 262890 - DNA, 13 bp, Artificial Sequence
  Oligonucleotide for detection of SNP TSC0063773
taaaatctcccta

SEQ ID NO: 262891 - DNA, 13 bp, Artificial Sequence
  Oligonucleotide for detection of SNP TSC0063774
ttattaatataag

SEQ ID NO: 262892 - DNA, 13 bp, Artificial Sequence
  Oligonucleotide for detection of SNP TSC0063774
cttatattaataa

SEQ ID NO: 262893 - DNA, 13 bp, Artificial Sequence
  Oligonucleotide for detection of SNP TSC0063774
ttattagtataag

SEQ ID NO: 262894 - DNA, 13 bp, Artificial Sequence
  Oligonucleotide for detection of SNP TSC0063774
cttatactaataa

SEQ ID NO: 262895 - DNA, 13 bp, Artificial Sequence
  Oligonucleotide for detection of SNP TSC0063775
attttattttgga

SEQ ID NO: 262896 - DNA, 13 bp, Artificial Sequence
  Oligonucleotide for detection of SNP TSC0063775
tccaaaataaaat

SEQ ID NO: 262897 - DNA, 13 bp, Artificial Sequence
  Oligonucleotide for detection of SNP TSC0063775
attttagtttgga

SEQ ID NO: 262898 - DNA, 13 bp, Artificial Sequence
  Oligonucleotide for detection of SNP TSC0063775
tccaaactaaaat

SEQ ID NO: 262899 - DNA, 13 bp, Artificial Sequence
  Oligonucleotide for detection of SNP TSC0063775
tttaaagtaagat

SEQ ID NO: 262900 - DNA, 13 bp, Artificial Sequence
  Oligonucleotide for detection of SNP TSC0063775
atcttactttaaa

SEQ ID NO: 262901 - DNA, 13 bp, Artificial Sequence
  Oligonucleotide for detection of SNP TSC0063775
tttaaattaagat

SEQ ID NO: 262902 - DNA, 13 bp, Artificial Sequence
  Oligonucleotide for detection of SNP TSC0063775
atcttaatttaaa

SEQ ID NO: 262903 - DNA, 13 bp, Artificial Sequence
  Oligonucleotide for detection of SNP TSC0063776
aattattggatag

SEQ ID NO: 262904 - DNA, 13 bp, Artificial Sequence
  Oligonucleotide for detection of SNP TSC0063776
ctatccaataatt

SEQ ID NO: 262905 - DNA, 13 bp, Artificial Sequence
  Oligonucleotide for detection of SNP TSC0063776
aattatgggatag

SEQ ID NO: 262906 - DNA, 13 bp, Artificial Sequence
  Oligonucleotide for detection of SNP TSC0063776
ctatcccataatt

SEQ ID NO: 262907 - DNA, 13 bp, Artificial Sequence
  Oligonucleotide for detection of SNP TSC0063777
ttagaaaaaggag

SEQ ID NO: 262908 - DNA, 13 bp, Artificial Sequence
  Oligonucleotide for detection of SNP TSC0063777
ctcctttttctaa

SEQ ID NO: 262909 - DNA, 13 bp, Artificial Sequence
  Oligonucleotide for detection of SNP TSC0063777
ttagaagaaggag

SEQ ID NO: 262910 - DNA, 13 bp, Artificial Sequence
  Oligonucleotide for detection of SNP TSC0063777
ctccttcttctaa

SEQ ID NO: 262911 - DNA, 13 bp, Artificial Sequence
  Oligonucleotide for detection of SNP TSC0063782
tgttttatatatg

SEQ ID NO: 262912 - DNA, 13 bp, Artificial Sequence
  Oligonucleotide for detection of SNP TSC0063782
catatataaaaca

SEQ ID NO: 262913 - DNA, 13 bp, Artificial Sequence
  Oligonucleotide for detection of SNP TSC0004644
ttatttgaaaatg

SEQ ID NO: 262914 - DNA, 13 bp, Artificial Sequence
  Oligonucleotide for detection of SNP TSC0004644
cattttcaaataa

SEQ ID NO: 262915 - DNA, 13 bp, Artificial Sequence
  Oligonucleotide for detection of SNP TSC0004644
ttatttaaaaatg

SEQ ID NO: 262916 - DNA, 13 bp, Artificial Sequence
  Oligonucleotide for detection of SNP TSC0004644
catttttaaataa

SEQ ID NO: 262917 - DNA, 13 bp, Artificial Sequence
  Oligonucleotide for detection of SNP TSC0063784
gggattggtatty

SEQ ID NO: 262918 - DNA, 13 bp, Artificial Sequence
  Oligonucleotide for detection of SNP TSC0063784
raataccaatccc

SEQ ID NO: 262919 - DNA, 13 bp, Artificial Sequence
  Oligonucleotide for detection of SNP TSC0063784
gggattagtatty

SEQ ID NO: 262920 - DNA, 13 bp, Artificial Sequence
  Oligonucleotide for detection of SNP TSC0063784
raatactaatccc

SEQ ID NO: 262921 - DNA, 13 bp, Artificial Sequence
  Oligonucleotide for detection of SNP TSC0063785
gtgtttattggag

SEQ ID NO: 262922 - DNA, 13 bp, Artificial Sequence
  Oligonucleotide for detection of SNP TSC0063785
ctccaataaacac

SEQ ID NO: 262923 - DNA, 13 bp, Artificial Sequence
  Oligonucleotide for detection of SNP TSC0063785
gtgttttttggag

SEQ ID NO: 262924 - DNA, 13 bp, Artificial Sequence
  Oligonucleotide for detection of SNP TSC0063785
ctccaaaaaacac

SEQ ID NO: 262925 - DNA, 13 bp, Artificial Sequence
  Oligonucleotide for detection of SNP TSC0063785
ttttaatgggtay

SEQ ID NO: 262926 - DNA, 13 bp, Artificial Sequence
  Oligonucleotide for detection of SNP TSC0063785
rtacccattaaaa

SEQ ID NO: 262927 - DNA, 13 bp, Artificial Sequence
  Oligonucleotide for detection of SNP TSC0063785
ttttaaagggtay

SEQ ID NO: 262928 - DNA, 13 bp, Artificial Sequence
  Oligonucleotide for detection of SNP TSC0063785
rtaccctttaaaa

SEQ ID NO: 262929 - DNA, 13 bp, Artificial Sequence
  Oligonucleotide for detection of SNP TSC0063788
aaaatagttttaa

SEQ ID NO: 262930 - DNA, 13 bp, Artificial Sequence
  Oligonucleotide for detection of SNP TSC0063788
ttaaaactatttt

SEQ ID NO: 262931 - DNA, 13 bp, Artificial Sequence
  Oligonucleotide for detection of SNP TSC0063788
ttggaggtatttt

SEQ ID NO: 262932 - DNA, 13 bp, Artificial Sequence
  Oligonucleotide for detection of SNP TSC0063788
aaaatacctccaa

SEQ ID NO: 262933 - DNA, 13 bp, Artificial Sequence
  Oligonucleotide for detection of SNP TSC0063788
ttggagttatttt

SEQ ID NO: 262934 - DNA, 13 bp, Artificial Sequence
  Oligonucleotide for detection of SNP TSC0063788
aaaataactccaa

SEQ ID NO: 262935 - DNA, 13 bp, Artificial Sequence
  Oligonucleotide for detection of SNP TSC0063789
attttgagatata

SEQ ID NO: 262936 - DNA, 13 bp, Artificial Sequence
  Oligonucleotide for detection of SNP TSC0063789
tatatctcaaaat

SEQ ID NO: 262937 - DNA, 13 bp, Artificial Sequence
  Oligonucleotide for detection of SNP TSC0063789
attttgggatata

SEQ ID NO: 262938 - DNA, 13 bp, Artificial Sequence
  Oligonucleotide for detection of SNP TSC0063789
tatatcccaaaat

SEQ ID NO: 262939 - DNA, 13 bp, Artificial Sequence
  Oligonucleotide for detection of SNP TSC0063793
ttatagattgagt

SEQ ID NO: 262940 - DNA, 13 bp, Artificial Sequence
  Oligonucleotide for detection of SNP TSC0063793
actcaatctataa

SEQ ID NO: 262941 - DNA, 13 bp, Artificial Sequence
  Oligonucleotide for detection of SNP TSC0063793
ttataggttgagt

SEQ ID NO: 262942 - DNA, 13 bp, Artificial Sequence
  Oligonucleotide for detection of SNP TSC0063793
actcaacctataa

SEQ ID NO: 262943 - DNA, 13 bp, Artificial Sequence
  Oligonucleotide for detection of SNP TSC0063794
taagtttttaata

SEQ ID NO: 262944 - DNA, 13 bp, Artificial Sequence
  Oligonucleotide for detection of SNP TSC0063794
tattaaaaactta

SEQ ID NO: 262945 - DNA, 13 bp, Artificial Sequence
  Oligonucleotide for detection of SNP TSC0063794
taagttgttaata

SEQ ID NO: 262946 - DNA, 13 bp, Artificial Sequence
  Oligonucleotide for detection of SNP TSC0063794
tattaacaactta

SEQ ID NO: 262947 - DNA, 13 bp, Artificial Sequence
  Oligonucleotide for detection of SNP TSC0063794
tgttgagagtttg

SEQ ID NO: 262948 - DNA, 13 bp, Artificial Sequence
  Oligonucleotide for detection of SNP TSC0063794
caaactctcaaca

SEQ ID NO: 262949 - DNA, 13 bp, Artificial Sequence
  Oligonucleotide for detection of SNP TSC0063794
tgttgatagtttg

SEQ ID NO: 262950 - DNA, 13 bp, Artificial Sequence
  Oligonucleotide for detection of SNP TSC0063794
caaactatcaaca

SEQ ID NO: 262951 - DNA, 13 bp, Artificial Sequence
  Oligonucleotide for detection of SNP TSC0063796
taatatggagtty

SEQ ID NO: 262952 - DNA, 13 bp, Artificial Sequence
  Oligonucleotide for detection of SNP TSC0063796
raactccatatta

SEQ ID NO: 262953 - DNA, 13 bp, Artificial Sequence
  Oligonucleotide for detection of SNP TSC0063796
taatacggagtty

SEQ ID NO: 262954 - DNA, 13 bp, Artificial Sequence
  Oligonucleotide for detection of SNP TSC0063796
raactccgtatta

SEQ ID NO: 262955 - DNA, 13 bp, Artificial Sequence
  Oligonucleotide for detection of SNP TSC0063800
tgtaaggtagtta

SEQ ID NO: 262956 - DNA, 13 bp, Artificial Sequence
  Oligonucleotide for detection of SNP TSC0063800
taactaccttaca

SEQ ID NO: 262957 - DNA, 13 bp, Artificial Sequence
  Oligonucleotide for detection of SNP TSC0063800
tgtaagatagtta

SEQ ID NO: 262958 - DNA, 13 bp, Artificial Sequence
  Oligonucleotide for detection of SNP TSC0063800
taactatcttaca

SEQ ID NO: 262959 - DNA, 13 bp, Artificial Sequence
  Oligonucleotide for detection of SNP TSC0063801
ttgtaataaaatg

SEQ ID NO: 262960 - DNA, 13 bp, Artificial Sequence
  Oligonucleotide for detection of SNP TSC0063801
cattttattacaa

SEQ ID NO: 262961 - DNA, 13 bp, Artificial Sequence
  Oligonucleotide for detection of SNP TSC0063801
ttgtaagaaaatg

SEQ ID NO: 262962 - DNA, 13 bp, Artificial Sequence
  Oligonucleotide for detection of SNP TSC0063801
cattttcttacaa

SEQ ID NO: 262963 - DNA, 13 bp, Artificial Sequence
  Oligonucleotide for detection of SNP TSC0063801
tattttgttgtaa

SEQ ID NO: 262964 - DNA, 13 bp, Artificial Sequence
  Oligonucleotide for detection of SNP TSC0063801
ttacaacaaaata

SEQ ID NO: 262965 - DNA, 13 bp, Artificial Sequence
  Oligonucleotide for detection of SNP TSC0063801
tatttttttgtaa

SEQ ID NO: 262966 - DNA, 13 bp, Artificial Sequence
  Oligonucleotide for detection of SNP TSC0063801
ttacaaaaaaata

SEQ ID NO: 262967 - DNA, 13 bp, Artificial Sequence
  Oligonucleotide for detection of SNP TSC0008951
aaggaatattgaa

SEQ ID NO: 262968 - DNA, 13 bp, Artificial Sequence
  Oligonucleotide for detection of SNP TSC0008951
ttcaatattcctt

SEQ ID NO: 262969 - DNA, 13 bp, Artificial Sequence
  Oligonucleotide for detection of SNP TSC0008951
aaggaagattgaa

SEQ ID NO: 262970 - DNA, 13 bp, Artificial Sequence
  Oligonucleotide for detection of SNP TSC0008951
ttcaatcttcctt

SEQ ID NO: 262971 - DNA, 13 bp, Artificial Sequence
  Oligonucleotide for detection of SNP TSC0063805
aatttatgagatg

SEQ ID NO: 262972 - DNA, 13 bp, Artificial Sequence
  Oligonucleotide for detection of SNP TSC0063805
catctcataaatt

SEQ ID NO: 262973 - DNA, 13 bp, Artificial Sequence
  Oligonucleotide for detection of SNP TSC0063805
aatttacgagatg

SEQ ID NO: 262974 - DNA, 13 bp, Artificial Sequence
  Oligonucleotide for detection of SNP TSC0063805
catctcgtaaatt

SEQ ID NO: 262975 - DNA, 13 bp, Artificial Sequence
  Oligonucleotide for detection of SNP TSC0004996
tatggtatgtgat

SEQ ID NO: 262976 - DNA, 13 bp, Artificial Sequence
  Oligonucleotide for detection of SNP TSC0004996
atcacataccata

SEQ ID NO: 262977 - DNA, 13 bp, Artificial Sequence
  Oligonucleotide for detection of SNP TSC0004996
tatggtttgtgat

SEQ ID NO: 262978 - DNA, 13 bp, Artificial Sequence
  Oligonucleotide for detection of SNP TSC0004996
atcacaaaccata

SEQ ID NO: 262979 - DNA, 13 bp, Artificial Sequence
  Oligonucleotide for detection of SNP TSC0004996
attataagttata

SEQ ID NO: 262980 - DNA, 13 bp, Artificial Sequence
  Oligonucleotide for detection of SNP TSC0004996
tataacttataat

SEQ ID NO: 262981 - DNA, 13 bp, Artificial Sequence
  Oligonucleotide for detection of SNP TSC0010508
tagttaagtgaat

SEQ ID NO: 262982 - DNA, 13 bp, Artificial Sequence
  Oligonucleotide for detection of SNP TSC0010508
attcacttaacta

SEQ ID NO: 262983 - DNA, 13 bp, Artificial Sequence
  Oligonucleotide for detection of SNP TSC0010508
tagttaggtgaat

SEQ ID NO: 262984 - DNA, 13 bp, Artificial Sequence
  Oligonucleotide for detection of SNP TSC0010508
attcacctaacta

SEQ ID NO: 262985 - DNA, 13 bp, Artificial Sequence
  Oligonucleotide for detection of SNP TSC0063807
agagaattgtttg

SEQ ID NO: 262986 - DNA, 13 bp, Artificial Sequence
  Oligonucleotide for detection of SNP TSC0063807
caaacaattctct

SEQ ID NO: 262987 - DNA, 13 bp, Artificial Sequence
  Oligonucleotide for detection of SNP TSC0063807
agagaagtgtttg

SEQ ID NO: 262988 - DNA, 13 bp, Artificial Sequence
  Oligonucleotide for detection of SNP TSC0063807
caaacacttctct

SEQ ID NO: 262989 - DNA, 13 bp, Artificial Sequence
  Oligonucleotide for detection of SNP TSC0004693
atttttttgtatg

SEQ ID NO: 262990 - DNA, 13 bp, Artificial Sequence
  Oligonucleotide for detection of SNP TSC0004693
catacaaaaaaat

SEQ ID NO: 262991 - DNA, 13 bp, Artificial Sequence
  Oligonucleotide for detection of SNP TSC0004693
atttttgtgtatg

SEQ ID NO: 262992 - DNA, 13 bp, Artificial Sequence
  Oligonucleotide for detection of SNP TSC0004693
catacacaaaaat

SEQ ID NO: 262993 - DNA, 13 bp, Artificial Sequence
  Oligonucleotide for detection of SNP TSC0004693
attttcgtgtatg

SEQ ID NO: 262994 - DNA, 13 bp, Artificial Sequence
  Oligonucleotide for detection of SNP TSC0004693
catacacgaaaat

SEQ ID NO: 262995 - DNA, 13 bp, Artificial Sequence
  Oligonucleotide for detection of SNP TSC0004693
tatataggaggat

SEQ ID NO: 262996 - DNA, 13 bp, Artificial Sequence
  Oligonucleotide for detection of SNP TSC0004693
atcctcctatata

SEQ ID NO: 262997 - DNA, 13 bp, Artificial Sequence
  Oligonucleotide for detection of SNP TSC0004693
tatatatgaggat

SEQ ID NO: 262998 - DNA, 13 bp, Artificial Sequence
  Oligonucleotide for detection of SNP TSC0004693
atcctcatatata

SEQ ID NO: 262999 - DNA, 13 bp, Artificial Sequence
  Oligonucleotide for detection of SNP TSC0004693
tatatacgaggat

SEQ ID NO: 263000 - DNA, 13 bp, Artificial Sequence
  Oligonucleotide for detection of SNP TSC0004693
atcctcgtatata

SEQ ID NO: 263001 - DNA, 13 bp, Artificial Sequence
  Oligonucleotide for detection of SNP TSC0004538
tattaatggtgat

SEQ ID NO: 263002 - DNA, 13 bp, Artificial Sequence
  Oligonucleotide for detection of SNP TSC0004538
atcaccattaata

SEQ ID NO: 263003 - DNA, 13 bp, Artificial Sequence
  Oligonucleotide for detection of SNP TSC0004538
tattaacggtgat

SEQ ID NO: 263004 - DNA, 13 bp, Artificial Sequence
  Oligonucleotide for detection of SNP TSC0004538
atcaccgttaata

SEQ ID NO: 263005 - DNA, 13 bp, Artificial Sequence
  Oligonucleotide for detection of SNP TSC0005271
tgtggtatttgtt

SEQ ID NO: 263006 - DNA, 13 bp, Artificial Sequence
  Oligonucleotide for detection of SNP TSC0005271
aacaaataccaca

SEQ ID NO: 263007 - DNA, 13 bp, Artificial Sequence
  Oligonucleotide for detection of SNP TSC0005271
tgtggtttttgtt

SEQ ID NO: 263008 - DNA, 13 bp, Artificial Sequence
  Oligonucleotide for detection of SNP TSC0005271
aacaaaaaccaca

SEQ ID NO: 263009 - DNA, 13 bp, Artificial Sequence
  Oligonucleotide for detection of SNP TSC0005271
agtaaatgttata

SEQ ID NO: 263010 - DNA, 13 bp, Artificial Sequence
  Oligonucleotide for detection of SNP TSC0005271
tataacatttact

SEQ ID NO: 263011 - DNA, 13 bp, Artificial Sequence
  Oligonucleotide for detection of SNP TSC0005271
agtaaaagttata

SEQ ID NO: 263012 - DNA, 13 bp, Artificial Sequence
  Oligonucleotide for detection of SNP TSC0005271
tataacttttact

SEQ ID NO: 263013 - DNA, 13 bp, Artificial Sequence
  Oligonucleotide for detection of SNP TSC0010431
ggaagaatttttg

SEQ ID NO: 263014 - DNA, 13 bp, Artificial Sequence
  Oligonucleotide for detection of SNP TSC0010431
caaaaattcttcc

SEQ ID NO: 263015 - DNA, 13 bp, Artificial Sequence
  Oligonucleotide for detection of SNP TSC0010431
ggaagagtttttg

SEQ ID NO: 263016 - DNA, 13 bp, Artificial Sequence
  Oligonucleotide for detection of SNP TSC0010431
caaaaactcttcc

SEQ ID NO: 263017 - DNA, 13 bp, Artificial Sequence
  Oligonucleotide for detection of SNP TSC0010431
ggaagaattttcg

SEQ ID NO: 263018 - DNA, 13 bp, Artificial Sequence
  Oligonucleotide for detection of SNP TSC0010431
cgaaaattcttcc

SEQ ID NO: 263019 - DNA, 13 bp, Artificial Sequence
  Oligonucleotide for detection of SNP TSC0010431
ggaagagttttcg

SEQ ID NO: 263020 - DNA, 13 bp, Artificial Sequence
  Oligonucleotide for detection of SNP TSC0010431
cgaaaactcttcc

SEQ ID NO: 263021 - DNA, 13 bp, Artificial Sequence
  Oligonucleotide for detection of SNP TSC0007270
gtaggtattgttt

SEQ ID NO: 263022 - DNA, 13 bp, Artificial Sequence
  Oligonucleotide for detection of SNP TSC0007270
aaacaatacctac

SEQ ID NO: 263023 - DNA, 13 bp, Artificial Sequence
  Oligonucleotide for detection of SNP TSC0007270
gtaggtgttgttt

SEQ ID NO: 263024 - DNA, 13 bp, Artificial Sequence
  Oligonucleotide for detection of SNP TSC0007270
aaacaacacctac

SEQ ID NO: 263025 - DNA, 13 bp, Artificial Sequence
  Oligonucleotide for detection of SNP TSC0007270
gtaggcgttgttt

SEQ ID NO: 263026 - DNA, 13 bp, Artificial Sequence
  Oligonucleotide for detection of SNP TSC0007270
aaacaacgcctac

SEQ ID NO: 263027 - DNA, 13 bp, Artificial Sequence
  Oligonucleotide for detection of SNP TSC0007270
aagtaatgtttay

SEQ ID NO: 263028 - DNA, 13 bp, Artificial Sequence
  Oligonucleotide for detection of SNP TSC0007270
rtaaacattactt

SEQ ID NO: 263029 - DNA, 13 bp, Artificial Sequence
  Oligonucleotide for detection of SNP TSC0007270
aagtaacgtttay

SEQ ID NO: 263030 - DNA, 13 bp, Artificial Sequence
  Oligonucleotide for detection of SNP TSC0007270
rtaaacgttactt

SEQ ID NO: 263031 - DNA, 13 bp, Artificial Sequence
  Oligonucleotide for detection of SNP TSC0063810
aattgagtttttt

SEQ ID NO: 263032 - DNA, 13 bp, Artificial Sequence
  Oligonucleotide for detection of SNP TSC0063810
aaaaaactcaatt

SEQ ID NO: 263033 - DNA, 13 bp, Artificial Sequence
  Oligonucleotide for detection of SNP TSC0063810
aattgaatttttt

SEQ ID NO: 263034 - DNA, 13 bp, Artificial Sequence
  Oligonucleotide for detection of SNP TSC0063810
aaaaaattcaatt

SEQ ID NO: 263035 - DNA, 13 bp, Artificial Sequence
  Oligonucleotide for detection of SNP TSC0063811
ttttggattttaa

SEQ ID NO: 263036 - DNA, 13 bp, Artificial Sequence
  Oligonucleotide for detection of SNP TSC0063811
ttaaaatccaaaa

SEQ ID NO: 263037 - DNA, 13 bp, Artificial Sequence
  Oligonucleotide for detection of SNP TSC0063811
ttttgggttttaa

SEQ ID NO: 263038 - DNA, 13 bp, Artificial Sequence
  Oligonucleotide for detection of SNP TSC0063811
ttaaaacccaaaa

SEQ ID NO: 263039 - DNA, 13 bp, Artificial Sequence
  Oligonucleotide for detection of SNP TSC0063812
tgagagtgaatga

SEQ ID NO: 263040 - DNA, 13 bp, Artificial Sequence
  Oligonucleotide for detection of SNP TSC0063812
tcattcactctca

SEQ ID NO: 263041 - DNA, 13 bp, Artificial Sequence
  Oligonucleotide for detection of SNP TSC0063812
tgagagcgaatga

SEQ ID NO: 263042 - DNA, 13 bp, Artificial Sequence
  Oligonucleotide for detection of SNP TSC0063812
tcattcgctctca

SEQ ID NO: 263043 - DNA, 13 bp, Artificial Sequence
  Oligonucleotide for detection of SNP TSC0005796
aaattattagaty

SEQ ID NO: 263044 - DNA, 13 bp, Artificial Sequence
  Oligonucleotide for detection of SNP TSC0005796
ratctaataattt

SEQ ID NO: 263045 - DNA, 13 bp, Artificial Sequence
  Oligonucleotide for detection of SNP TSC0005796
aaattagtagaty

SEQ ID NO: 263046 - DNA, 13 bp, Artificial Sequence
  Oligonucleotide for detection of SNP TSC0005796
ratctactaattt

SEQ ID NO: 263047 - DNA, 13 bp, Artificial Sequence
  Oligonucleotide for detection of SNP TSC0005796
gatttgttgattt

SEQ ID NO: 263048 - DNA, 13 bp, Artificial Sequence
  Oligonucleotide for detection of SNP TSC0005796
aaatcaacaaatc

SEQ ID NO: 263049 - DNA, 13 bp, Artificial Sequence
  Oligonucleotide for detection of SNP TSC0007102
ttataaattgtat

SEQ ID NO: 263050 - DNA, 13 bp, Artificial Sequence
  Oligonucleotide for detection of SNP TSC0007102
atacaatttataa

SEQ ID NO: 263051 - DNA, 13 bp, Artificial Sequence
  Oligonucleotide for detection of SNP TSC0007102
ttataagttgtat

SEQ ID NO: 263052 - DNA, 13 bp, Artificial Sequence
  Oligonucleotide for detection of SNP TSC0007102
atacaacttataa

SEQ ID NO: 263053 - DNA, 13 bp, Artificial Sequence
  Oligonucleotide for detection of SNP TSC0063814
agttttgataaat

SEQ ID NO: 263054 - DNA, 13 bp, Artificial Sequence
  Oligonucleotide for detection of SNP TSC0063814
atttatcaaaact

SEQ ID NO: 263055 - DNA, 13 bp, Artificial Sequence
  Oligonucleotide for detection of SNP TSC0063814
agttttaataaat

SEQ ID NO: 263056 - DNA, 13 bp, Artificial Sequence
  Oligonucleotide for detection of SNP TSC0063814
atttattaaaact

SEQ ID NO: 263057 - DNA, 13 bp, Artificial Sequence
  Oligonucleotide for detection of SNP TSC0063815
tgataatggaaaa

SEQ ID NO: 263058 - DNA, 13 bp, Artificial Sequence
  Oligonucleotide for detection of SNP TSC0063815
ttttccattatca

SEQ ID NO: 263059 - DNA, 13 bp, Artificial Sequence
  Oligonucleotide for detection of SNP TSC0063815
tgataacggaaaa

SEQ ID NO: 263060 - DNA, 13 bp, Artificial Sequence
  Oligonucleotide for detection of SNP TSC0063815
ttttccgttatca

SEQ ID NO: 263061 - DNA, 13 bp, Artificial Sequence
  Oligonucleotide for detection of SNP TSC0004983
tatttgaagataa

SEQ ID NO: 263062 - DNA, 13 bp, Artificial Sequence
  Oligonucleotide for detection of SNP TSC0004983
ttatcttcaaata

SEQ ID NO: 263063 - DNA, 13 bp, Artificial Sequence
  Oligonucleotide for detection of SNP TSC0004983
tatttggagataa

SEQ ID NO: 263064 - DNA, 13 bp, Artificial Sequence
  Oligonucleotide for detection of SNP TSC0004983
ttatctccaaata

SEQ ID NO: 263065 - DNA, 13 bp, Artificial Sequence
  Oligonucleotide for detection of SNP TSC0063818
gtgtttagtttat

SEQ ID NO: 263066 - DNA, 13 bp, Artificial Sequence
  Oligonucleotide for detection of SNP TSC0063818
ataaactaaacac

SEQ ID NO: 263067 - DNA, 13 bp, Artificial Sequence
  Oligonucleotide for detection of SNP TSC0063818
gtgtttggtttat

SEQ ID NO: 263068 - DNA, 13 bp, Artificial Sequence
  Oligonucleotide for detection of SNP TSC0063818
ataaaccaaacac

SEQ ID NO: 263069 - DNA, 13 bp, Artificial Sequence
  Oligonucleotide for detection of SNP TSC0063818
gtgttcggtttat

SEQ ID NO: 263070 - DNA, 13 bp, Artificial Sequence
  Oligonucleotide for detection of SNP TSC0063818
ataaaccgaacac

SEQ ID NO: 263071 - DNA, 13 bp, Artificial Sequence
  Oligonucleotide for detection of SNP TSC0063818
ataggttgggtay

SEQ ID NO: 263072 - DNA, 13 bp, Artificial Sequence
  Oligonucleotide for detection of SNP TSC0063818
rtacccaacctat

SEQ ID NO: 263073 - DNA, 13 bp, Artificial Sequence
  Oligonucleotide for detection of SNP TSC0063818
ataggtcgggtay

SEQ ID NO: 263074 - DNA, 13 bp, Artificial Sequence
  Oligonucleotide for detection of SNP TSC0063818
rtacccgacctat

SEQ ID NO: 263075 - DNA, 13 bp, Artificial Sequence
  Oligonucleotide for detection of SNP TSC0063819
atggtttttaatt

SEQ ID NO: 263076 - DNA, 13 bp, Artificial Sequence
  Oligonucleotide for detection of SNP TSC0063819
aattaaaaaccat

SEQ ID NO: 263077 - DNA, 13 bp, Artificial Sequence
  Oligonucleotide for detection of SNP TSC0063819
atggttgttaatt

SEQ ID NO: 263078 - DNA, 13 bp, Artificial Sequence
  Oligonucleotide for detection of SNP TSC0063819
aattaacaaccat

SEQ ID NO: 263079 - DNA, 13 bp, Artificial Sequence
  Oligonucleotide for detection of SNP TSC0063819
acggtttttaatt

SEQ ID NO: 263080 - DNA, 13 bp, Artificial Sequence
  Oligonucleotide for detection of SNP TSC0063819
aattaaaaaccgt

SEQ ID NO: 263081 - DNA, 13 bp, Artificial Sequence
  Oligonucleotide for detection of SNP TSC0063819
acggttgttaatt

SEQ ID NO: 263082 - DNA, 13 bp, Artificial Sequence
  Oligonucleotide for detection of SNP TSC0063819
aattaacaaccgt

SEQ ID NO: 263083 - DNA, 13 bp, Artificial Sequence
  Oligonucleotide for detection of SNP TSC0063819
atggtcgttaatt

SEQ ID NO: 263084 - DNA, 13 bp, Artificial Sequence
  Oligonucleotide for detection of SNP TSC0063819
aattaacgaccat

SEQ ID NO: 263085 - DNA, 13 bp, Artificial Sequence
  Oligonucleotide for detection of SNP TSC0063819
acggtcgttaatt

SEQ ID NO: 263086 - DNA, 13 bp, Artificial Sequence
  Oligonucleotide for detection of SNP TSC0063819
aattaacgaccgt

SEQ ID NO: 263087 - DNA, 13 bp, Artificial Sequence
  Oligonucleotide for detection of SNP TSC0063819
agttgggggttgt

SEQ ID NO: 263088 - DNA, 13 bp, Artificial Sequence
  Oligonucleotide for detection of SNP TSC0063819
acaacccccaact

SEQ ID NO: 263089 - DNA, 13 bp, Artificial Sequence
  Oligonucleotide for detection of SNP TSC0063819
agttggtggttgt

SEQ ID NO: 263090 - DNA, 13 bp, Artificial Sequence
  Oligonucleotide for detection of SNP TSC0063819
acaaccaccaact

SEQ ID NO: 263091 - DNA, 13 bp, Artificial Sequence
  Oligonucleotide for detection of SNP TSC0063819
agttgggggtcgt

SEQ ID NO: 263092 - DNA, 13 bp, Artificial Sequence
  Oligonucleotide for detection of SNP TSC0063819
acgacccccaact

SEQ ID NO: 263093 - DNA, 13 bp, Artificial Sequence
  Oligonucleotide for detection of SNP TSC0063819
agttggcggttgt

SEQ ID NO: 263094 - DNA, 13 bp, Artificial Sequence
  Oligonucleotide for detection of SNP TSC0063819
acaaccgccaact

SEQ ID NO: 263095 - DNA, 13 bp, Artificial Sequence
  Oligonucleotide for detection of SNP TSC0063819
agttggtggtcgt

SEQ ID NO: 263096 - DNA, 13 bp, Artificial Sequence
  Oligonucleotide for detection of SNP TSC0063819
acgaccaccaact

SEQ ID NO: 263097 - DNA, 13 bp, Artificial Sequence
  Oligonucleotide for detection of SNP TSC0063819
agttggcggtcgt

SEQ ID NO: 263098 - DNA, 13 bp, Artificial Sequence
  Oligonucleotide for detection of SNP TSC0063819
acgaccgccaact

SEQ ID NO: 263099 - DNA, 13 bp, Artificial Sequence
  Oligonucleotide for detection of SNP TSC0063820
attatgatggagt

SEQ ID NO: 263100 - DNA, 13 bp, Artificial Sequence
  Oligonucleotide for detection of SNP TSC0063820
actccatcataat

SEQ ID NO: 263101 - DNA, 13 bp, Artificial Sequence
  Oligonucleotide for detection of SNP TSC0063820
attatgttggagt

SEQ ID NO: 263102 - DNA, 13 bp, Artificial Sequence
  Oligonucleotide for detection of SNP TSC0063820
actccaacataat

SEQ ID NO: 263103 - DNA, 13 bp, Artificial Sequence
  Oligonucleotide for detection of SNP TSC0063820
attttattatgat

SEQ ID NO: 263104 - DNA, 13 bp, Artificial Sequence
  Oligonucleotide for detection of SNP TSC0063820
atcataataaaat

SEQ ID NO: 263105 - DNA, 13 bp, Artificial Sequence
  Oligonucleotide for detection of SNP TSC0063820
attttaatatgat

SEQ ID NO: 263106 - DNA, 13 bp, Artificial Sequence
  Oligonucleotide for detection of SNP TSC0063820
atcatattaaaat

SEQ ID NO: 263107 - DNA, 13 bp, Artificial Sequence
  Oligonucleotide for detection of SNP TSC0063821
tgagattggtaga

SEQ ID NO: 263108 - DNA, 13 bp, Artificial Sequence
  Oligonucleotide for detection of SNP TSC0063821
tctaccaatctca

SEQ ID NO: 263109 - DNA, 13 bp, Artificial Sequence
  Oligonucleotide for detection of SNP TSC0063821
tgagatgggtaga

SEQ ID NO: 263110 - DNA, 13 bp, Artificial Sequence
  Oligonucleotide for detection of SNP TSC0063821
tctacccatctca

SEQ ID NO: 263111 - DNA, 13 bp, Artificial Sequence
  Oligonucleotide for detection of SNP TSC0063821
tgagatcggtaga

SEQ ID NO: 263112 - DNA, 13 bp, Artificial Sequence
  Oligonucleotide for detection of SNP TSC0063821
tctaccgatctca

SEQ ID NO: 263113 - DNA, 13 bp, Artificial Sequence
  Oligonucleotide for detection of SNP TSC0063821
tttgttgatttta

SEQ ID NO: 263114 - DNA, 13 bp, Artificial Sequence
  Oligonucleotide for detection of SNP TSC0063821
taaaatcaacaaa

SEQ ID NO: 263115 - DNA, 13 bp, Artificial Sequence
  Oligonucleotide for detection of SNP TSC0063821
tttgtttatttta

SEQ ID NO: 263116 - DNA, 13 bp, Artificial Sequence
  Oligonucleotide for detection of SNP TSC0063821
taaaataaacaaa

SEQ ID NO: 263117 - DNA, 13 bp, Artificial Sequence
  Oligonucleotide for detection of SNP TSC0063821
tttgtcgatttta

SEQ ID NO: 263118 - DNA, 13 bp, Artificial Sequence
  Oligonucleotide for detection of SNP TSC0063821
taaaatcgacaaa

SEQ ID NO: 263119 - DNA, 13 bp, Artificial Sequence
  Oligonucleotide for detection of SNP TSC0063822
gatatataattaa

SEQ ID NO: 263120 - DNA, 13 bp, Artificial Sequence
  Oligonucleotide for detection of SNP TSC0063822
ttaattatatatc

SEQ ID NO: 263121 - DNA, 13 bp, Artificial Sequence
  Oligonucleotide for detection of SNP TSC0063822
gatatagaattaa

SEQ ID NO: 263122 - DNA, 13 bp, Artificial Sequence
  Oligonucleotide for detection of SNP TSC0063822
ttaattctatatc

SEQ ID NO: 263123 - DNA, 13 bp, Artificial Sequence
  Oligonucleotide for detection of SNP TSC0063822
ttagttgtgtgty

SEQ ID NO: 263124 - DNA, 13 bp, Artificial Sequence
  Oligonucleotide for detection of SNP TSC0063822
racacacaactaa

SEQ ID NO: 263125 - DNA, 13 bp, Artificial Sequence
  Oligonucleotide for detection of SNP TSC0063822
ttagttttgtgty

SEQ ID NO: 263126 - DNA, 13 bp, Artificial Sequence
  Oligonucleotide for detection of SNP TSC0063822
racacaaaactaa

SEQ ID NO: 263127 - DNA, 13 bp, Artificial Sequence
  Oligonucleotide for detection of SNP TSC0063823
tttttacgtgtta

SEQ ID NO: 263128 - DNA, 13 bp, Artificial Sequence
  Oligonucleotide for detection of SNP TSC0063823
taacacgtaaaaa

SEQ ID NO: 263129 - DNA, 13 bp, Artificial Sequence
  Oligonucleotide for detection of SNP TSC0063823
tgatatgtaagga

SEQ ID NO: 263130 - DNA, 13 bp, Artificial Sequence
  Oligonucleotide for detection of SNP TSC0063823
tccttacatatca

SEQ ID NO: 263131 - DNA, 13 bp, Artificial Sequence
  Oligonucleotide for detection of SNP TSC0063823
tgatacgtaagga

SEQ ID NO: 263132 - DNA, 13 bp, Artificial Sequence
  Oligonucleotide for detection of SNP TSC0063823
tccttacgtatca

SEQ ID NO: 263133 - DNA, 13 bp, Artificial Sequence
  Oligonucleotide for detection of SNP TSC0063824
gaaaagaaaagaa

SEQ ID NO: 263134 - DNA, 13 bp, Artificial Sequence
  Oligonucleotide for detection of SNP TSC0063824
ttcttttcttttc

SEQ ID NO: 263135 - DNA, 13 bp, Artificial Sequence
  Oligonucleotide for detection of SNP TSC0063824
gaaaagtaaagaa

SEQ ID NO: 263136 - DNA, 13 bp, Artificial Sequence
  Oligonucleotide for detection of SNP TSC0063824
ttctttacttttc

SEQ ID NO: 263137 - DNA, 13 bp, Artificial Sequence
  Oligonucleotide for detection of SNP TSC0063825
gatttttagagag

SEQ ID NO: 263138 - DNA, 13 bp, Artificial Sequence
  Oligonucleotide for detection of SNP TSC0063825
ctctctaaaaatc

SEQ ID NO: 263139 - DNA, 13 bp, Artificial Sequence
  Oligonucleotide for detection of SNP TSC0063825
gattttgagagag

SEQ ID NO: 263140 - DNA, 13 bp, Artificial Sequence
  Oligonucleotide for detection of SNP TSC0063825
ctctctcaaaatc

SEQ ID NO: 263141 - DNA, 13 bp, Artificial Sequence
  Oligonucleotide for detection of SNP TSC0063826
agtggtgatgggy

SEQ ID NO: 263142 - DNA, 13 bp, Artificial Sequence
  Oligonucleotide for detection of SNP TSC0063826
rcccatcaccact

SEQ ID NO: 263143 - DNA, 13 bp, Artificial Sequence
  Oligonucleotide for detection of SNP TSC0063826
agtggtaatgggy

SEQ ID NO: 263144 - DNA, 13 bp, Artificial Sequence
  Oligonucleotide for detection of SNP TSC0063826
rcccattaccact

SEQ ID NO: 263145 - DNA, 13 bp, Artificial Sequence
  Oligonucleotide for detection of SNP TSC0063828
tttttaattagag

SEQ ID NO: 263146 - DNA, 13 bp, Artificial Sequence
  Oligonucleotide for detection of SNP TSC0063828
ctctaattaaaaa

SEQ ID NO: 263147 - DNA, 13 bp, Artificial Sequence
  Oligonucleotide for detection of SNP TSC0063828
tttttatttagag

SEQ ID NO: 263148 - DNA, 13 bp, Artificial Sequence
  Oligonucleotide for detection of SNP TSC0063828
ctctaaataaaaa

SEQ ID NO: 263149 - DNA, 13 bp, Artificial Sequence
  Oligonucleotide for detection of SNP TSC0063828
ttttggttagaaa

SEQ ID NO: 263150 - DNA, 13 bp, Artificial Sequence
  Oligonucleotide for detection of SNP TSC0063828
tttctaaccaaaa

SEQ ID NO: 263151 - DNA, 13 bp, Artificial Sequence
  Oligonucleotide for detection of SNP TSC0063828
ttttgggtagaaa

SEQ ID NO: 263152 - DNA, 13 bp, Artificial Sequence
  Oligonucleotide for detection of SNP TSC0063828
tttctacccaaaa

SEQ ID NO: 263153 - DNA, 13 bp, Artificial Sequence
  Oligonucleotide for detection of SNP TSC0063829
ataaatataaatg

SEQ ID NO: 263154 - DNA, 13 bp, Artificial Sequence
  Oligonucleotide for detection of SNP TSC0063829
catttatatttat

SEQ ID NO: 263155 - DNA, 13 bp, Artificial Sequence
  Oligonucleotide for detection of SNP TSC0063829
ataaatttaaatg

SEQ ID NO: 263156 - DNA, 13 bp, Artificial Sequence
  Oligonucleotide for detection of SNP TSC0063829
catttaaatttat

SEQ ID NO: 263157 - DNA, 13 bp, Artificial Sequence
  Oligonucleotide for detection of SNP TSC0007918
gggtatgttttty

SEQ ID NO: 263158 - DNA, 13 bp, Artificial Sequence
  Oligonucleotide for detection of SNP TSC0007918
raaaaacataccc

SEQ ID NO: 263159 - DNA, 13 bp, Artificial Sequence
  Oligonucleotide for detection of SNP TSC0007918
gggtatattttty

SEQ ID NO: 263160 - DNA, 13 bp, Artificial Sequence
  Oligonucleotide for detection of SNP TSC0007918
raaaaatataccc

SEQ ID NO: 263161 - DNA, 13 bp, Artificial Sequence
  Oligonucleotide for detection of SNP TSC0063831
tgatataaataat

SEQ ID NO: 263162 - DNA, 13 bp, Artificial Sequence
  Oligonucleotide for detection of SNP TSC0063831
attatttatatca

SEQ ID NO: 263163 - DNA, 13 bp, Artificial Sequence
  Oligonucleotide for detection of SNP TSC0063831
tgatatgaataat

SEQ ID NO: 263164 - DNA, 13 bp, Artificial Sequence
  Oligonucleotide for detection of SNP TSC0063831
attattcatatca

SEQ ID NO: 263165 - DNA, 13 bp, Artificial Sequence
  Oligonucleotide for detection of SNP TSC0063833
ttgtagtgtttgg

SEQ ID NO: 263166 - DNA, 13 bp, Artificial Sequence
  Oligonucleotide for detection of SNP TSC0063833
ccaaacactacaa

SEQ ID NO: 263167 - DNA, 13 bp, Artificial Sequence
  Oligonucleotide for detection of SNP TSC0063833
ttgtagcgtttgg

SEQ ID NO: 263168 - DNA, 13 bp, Artificial Sequence
  Oligonucleotide for detection of SNP TSC0063833
ccaaacgctacaa

SEQ ID NO: 263169 - DNA, 13 bp, Artificial Sequence
  Oligonucleotide for detection of SNP TSC0063833
ttagatgttgtag

SEQ ID NO: 263170 - DNA, 13 bp, Artificial Sequence
  Oligonucleotide for detection of SNP TSC0063833
ctacaacatctaa

SEQ ID NO: 263171 - DNA, 13 bp, Artificial Sequence
  Oligonucleotide for detection of SNP TSC0063833
ttagatattgtag

SEQ ID NO: 263172 - DNA, 13 bp, Artificial Sequence
  Oligonucleotide for detection of SNP TSC0063833
ctacaatatctaa

SEQ ID NO: 263173 - DNA, 13 bp, Artificial Sequence
  Oligonucleotide for detection of SNP TSC0063833
ttagacgttgtag

SEQ ID NO: 263174 - DNA, 13 bp, Artificial Sequence
  Oligonucleotide for detection of SNP TSC0063833
ctacaacgtctaa

SEQ ID NO: 263175 - DNA, 13 bp, Artificial Sequence
  Oligonucleotide for detection of SNP TSC0063834
ttagttatgtgty

SEQ ID NO: 263176 - DNA, 13 bp, Artificial Sequence
  Oligonucleotide for detection of SNP TSC0063834
racacataactaa

SEQ ID NO: 263177 - DNA, 13 bp, Artificial Sequence
  Oligonucleotide for detection of SNP TSC0063836
gtagatagagatg

SEQ ID NO: 263178 - DNA, 13 bp, Artificial Sequence
  Oligonucleotide for detection of SNP TSC0063836
catctctatctac

SEQ ID NO: 263179 - DNA, 13 bp, Artificial Sequence
  Oligonucleotide for detection of SNP TSC0063836
gtagatggagatg

SEQ ID NO: 263180 - DNA, 13 bp, Artificial Sequence
  Oligonucleotide for detection of SNP TSC0063836
catctccatctac

SEQ ID NO: 263181 - DNA, 13 bp, Artificial Sequence
  Oligonucleotide for detection of SNP TSC0001433
tttttgaagtgaa

SEQ ID NO: 263182 - DNA, 13 bp, Artificial Sequence
  Oligonucleotide for detection of SNP TSC0001433
ttcacttcaaaaa

SEQ ID NO: 263183 - DNA, 13 bp, Artificial Sequence
  Oligonucleotide for detection of SNP TSC0001433
tttttggagtgaa

SEQ ID NO: 263184 - DNA, 13 bp, Artificial Sequence
  Oligonucleotide for detection of SNP TSC0001433
ttcactccaaaaa

SEQ ID NO: 263185 - DNA, 13 bp, Artificial Sequence
  Oligonucleotide for detection of SNP TSC0001434
tggaggtgatgaa

SEQ ID NO: 263186 - DNA, 13 bp, Artificial Sequence
  Oligonucleotide for detection of SNP TSC0001434
ttcatcacctcca

SEQ ID NO: 263187 - DNA, 13 bp, Artificial Sequence
  Oligonucleotide for detection of SNP TSC0001434
tggaggcgatgaa

SEQ ID NO: 263188 - DNA, 13 bp, Artificial Sequence
  Oligonucleotide for detection of SNP TSC0001434
ttcatcgcctcca

SEQ ID NO: 263189 - DNA, 13 bp, Artificial Sequence
  Oligonucleotide for detection of SNP TSC0001435
gatttaatttgtg

SEQ ID NO: 263190 - DNA, 13 bp, Artificial Sequence
  Oligonucleotide for detection of SNP TSC0001435
cacaaattaaatc

SEQ ID NO: 263191 - DNA, 13 bp, Artificial Sequence
  Oligonucleotide for detection of SNP TSC0001435
gatttagtttgtg

SEQ ID NO: 263192 - DNA, 13 bp, Artificial Sequence
  Oligonucleotide for detection of SNP TSC0001435
cacaaactaaatc

SEQ ID NO: 263193 - DNA, 13 bp, Artificial Sequence
  Oligonucleotide for detection of SNP TSC0008607
atttgtgaataag

SEQ ID NO: 263194 - DNA, 13 bp, Artificial Sequence
  Oligonucleotide for detection of SNP TSC0008607
cttattcacaaat

SEQ ID NO: 263195 - DNA, 13 bp, Artificial Sequence
  Oligonucleotide for detection of SNP TSC0008607
atttgtaaataag

SEQ ID NO: 263196 - DNA, 13 bp, Artificial Sequence
  Oligonucleotide for detection of SNP TSC0008607
cttatttacaaat

SEQ ID NO: 263197 - DNA, 13 bp, Artificial Sequence
  Oligonucleotide for detection of SNP TSC0063840
attttaaggtttt

SEQ ID NO: 263198 - DNA, 13 bp, Artificial Sequence
  Oligonucleotide for detection of SNP TSC0063840
aaaaccttaaaat

SEQ ID NO: 263199 - DNA, 13 bp, Artificial Sequence
  Oligonucleotide for detection of SNP TSC0063842
aattaagggttat

SEQ ID NO: 263200 - DNA, 13 bp, Artificial Sequence
  Oligonucleotide for detection of SNP TSC0063842
ataacccttaatt

SEQ ID NO: 263201 - DNA, 13 bp, Artificial Sequence
  Oligonucleotide for detection of SNP TSC0063842
aattaaaggttat

SEQ ID NO: 263202 - DNA, 13 bp, Artificial Sequence
  Oligonucleotide for detection of SNP TSC0063842
ataacctttaatt

SEQ ID NO: 263203 - DNA, 13 bp, Artificial Sequence
  Oligonucleotide for detection of SNP TSC0000488
tataaggttagaa

SEQ ID NO: 263204 - DNA, 13 bp, Artificial Sequence
  Oligonucleotide for detection of SNP TSC0000488
ttctaaccttata

SEQ ID NO: 263205 - DNA, 13 bp, Artificial Sequence
  Oligonucleotide for detection of SNP TSC0000488
tataagattagaa

SEQ ID NO: 263206 - DNA, 13 bp, Artificial Sequence
  Oligonucleotide for detection of SNP TSC0000488
ttctaatcttata

SEQ ID NO: 263207 - DNA, 13 bp, Artificial Sequence
  Oligonucleotide for detection of SNP TSC0000489
atgtttaggaatg

SEQ ID NO: 263208 - DNA, 13 bp, Artificial Sequence
  Oligonucleotide for detection of SNP TSC0000489
cattcctaaacat

SEQ ID NO: 263209 - DNA, 13 bp, Artificial Sequence
  Oligonucleotide for detection of SNP TSC0000489
atgtttgggaatg

SEQ ID NO: 263210 - DNA, 13 bp, Artificial Sequence
  Oligonucleotide for detection of SNP TSC0000489
cattcccaaacat

SEQ ID NO: 263211 - DNA, 13 bp, Artificial Sequence
  Oligonucleotide for detection of SNP TSC0000489
atgttcgggaatg

SEQ ID NO: 263212 - DNA, 13 bp, Artificial Sequence
  Oligonucleotide for detection of SNP TSC0000489
cattcccgaacat

SEQ ID NO: 263213 - DNA, 13 bp, Artificial Sequence
  Oligonucleotide for detection of SNP TSC0000489
tatttttgggtat

SEQ ID NO: 263214 - DNA, 13 bp, Artificial Sequence
  Oligonucleotide for detection of SNP TSC0000489
atacccaaaaata

SEQ ID NO: 263215 - DNA, 13 bp, Artificial Sequence
  Oligonucleotide for detection of SNP TSC0000489
tattttcgggtat

SEQ ID NO: 263216 - DNA, 13 bp, Artificial Sequence
  Oligonucleotide for detection of SNP TSC0000489
atacccgaaaata

SEQ ID NO: 263217 - DNA, 13 bp, Artificial Sequence
  Oligonucleotide for detection of SNP TSC0000490
gtgttttgtaaaa

SEQ ID NO: 263218 - DNA, 13 bp, Artificial Sequence
  Oligonucleotide for detection of SNP TSC0000490
ttttacaaaacac

SEQ ID NO: 263219 - DNA, 13 bp, Artificial Sequence
  Oligonucleotide for detection of SNP TSC0000490
gtgtttcgtaaaa

SEQ ID NO: 263220 - DNA, 13 bp, Artificial Sequence
  Oligonucleotide for detection of SNP TSC0000490
ttttacgaaacac

SEQ ID NO: 263221 - DNA, 13 bp, Artificial Sequence
  Oligonucleotide for detection of SNP TSC0000490
ttttgtgggatay

SEQ ID NO: 263222 - DNA, 13 bp, Artificial Sequence
  Oligonucleotide for detection of SNP TSC0000490
rtatcccacaaaa

SEQ ID NO: 263223 - DNA, 13 bp, Artificial Sequence
  Oligonucleotide for detection of SNP TSC0000490
ttttgtaggatay

SEQ ID NO: 263224 - DNA, 13 bp, Artificial Sequence
  Oligonucleotide for detection of SNP TSC0000490
rtatcctacaaaa

SEQ ID NO: 263225 - DNA, 13 bp, Artificial Sequence
  Oligonucleotide for detection of SNP TSC0000490
ttttgcgggatay

SEQ ID NO: 263226 - DNA, 13 bp, Artificial Sequence
  Oligonucleotide for detection of SNP TSC0000490
rtatcccgcaaaa

SEQ ID NO: 263227 - DNA, 13 bp, Artificial Sequence
  Oligonucleotide for detection of SNP TSC0001052
ttatttgttaata

SEQ ID NO: 263228 - DNA, 13 bp, Artificial Sequence
  Oligonucleotide for detection of SNP TSC0001052
tattaacaaataa

SEQ ID NO: 263229 - DNA, 13 bp, Artificial Sequence
  Oligonucleotide for detection of SNP TSC0001052
tgttggaaaatgg

SEQ ID NO: 263230 - DNA, 13 bp, Artificial Sequence
  Oligonucleotide for detection of SNP TSC0001052
ccattttccaaca

SEQ ID NO: 263231 - DNA, 13 bp, Artificial Sequence
  Oligonucleotide for detection of SNP TSC0001052
tgttggtaaatgg

SEQ ID NO: 263232 - DNA, 13 bp, Artificial Sequence
  Oligonucleotide for detection of SNP TSC0001052
ccatttaccaaca

SEQ ID NO: 263233 - DNA, 13 bp, Artificial Sequence
  Oligonucleotide for detection of SNP TSC0001053
aagtagtatttta

SEQ ID NO: 263234 - DNA, 13 bp, Artificial Sequence
  Oligonucleotide for detection of SNP TSC0001053
taaaatactactt

SEQ ID NO: 263235 - DNA, 13 bp, Artificial Sequence
  Oligonucleotide for detection of SNP TSC0001053
aagtagaatttta

SEQ ID NO: 263236 - DNA, 13 bp, Artificial Sequence
  Oligonucleotide for detection of SNP TSC0001053
taaaattctactt

SEQ ID NO: 263237 - DNA, 13 bp, Artificial Sequence
  Oligonucleotide for detection of SNP TSC0001054
atatttgtttgag

SEQ ID NO: 263238 - DNA, 13 bp, Artificial Sequence
  Oligonucleotide for detection of SNP TSC0001054
ctcaaacaaatat

SEQ ID NO: 263239 - DNA, 13 bp, Artificial Sequence
  Oligonucleotide for detection of SNP TSC0001054
atatttatttgag

SEQ ID NO: 263240 - DNA, 13 bp, Artificial Sequence
  Oligonucleotide for detection of SNP TSC0001054
ctcaaataaatat

SEQ ID NO: 263241 - DNA, 13 bp, Artificial Sequence
  Oligonucleotide for detection of SNP TSC0005812
tggtttttggtgt

SEQ ID NO: 263242 - DNA, 13 bp, Artificial Sequence
  Oligonucleotide for detection of SNP TSC0005812
acaccaaaaacca

SEQ ID NO: 263243 - DNA, 13 bp, Artificial Sequence
  Oligonucleotide for detection of SNP TSC0005812
tggtttgtggtgt

SEQ ID NO: 263244 - DNA, 13 bp, Artificial Sequence
  Oligonucleotide for detection of SNP TSC0005812
acaccacaaacca

SEQ ID NO: 263245 - DNA, 13 bp, Artificial Sequence
  Oligonucleotide for detection of SNP TSC0005812
atattagaagtta

SEQ ID NO: 263246 - DNA, 13 bp, Artificial Sequence
  Oligonucleotide for detection of SNP TSC0005812
taacttctaatat

SEQ ID NO: 263247 - DNA, 13 bp, Artificial Sequence
  Oligonucleotide for detection of SNP TSC0005812
atattataagtta

SEQ ID NO: 263248 - DNA, 13 bp, Artificial Sequence
  Oligonucleotide for detection of SNP TSC0005812
taacttataatat

SEQ ID NO: 263249 - DNA, 13 bp, Artificial Sequence
  Oligonucleotide for detection of SNP TSC0005813
tattatgaagtta

SEQ ID NO: 263250 - DNA, 13 bp, Artificial Sequence
  Oligonucleotide for detection of SNP TSC0005813
taacttcataata

SEQ ID NO: 263251 - DNA, 13 bp, Artificial Sequence
  Oligonucleotide for detection of SNP TSC0005813
tattataaagtta

SEQ ID NO: 263252 - DNA, 13 bp, Artificial Sequence
  Oligonucleotide for detection of SNP TSC0005813
taactttataata

SEQ ID NO: 263253 - DNA, 13 bp, Artificial Sequence
  Oligonucleotide for detection of SNP TSC0005813
tattacgaagtta

SEQ ID NO: 263254 - DNA, 13 bp, Artificial Sequence
  Oligonucleotide for detection of SNP TSC0005813
taacttcgtaata

SEQ ID NO: 263255 - DNA, 13 bp, Artificial Sequence
  Oligonucleotide for detection of SNP TSC0005814
atatagggggaaa

SEQ ID NO: 263256 - DNA, 13 bp, Artificial Sequence
  Oligonucleotide for detection of SNP TSC0005814
tttccccctatat

SEQ ID NO: 263257 - DNA, 13 bp, Artificial Sequence
  Oligonucleotide for detection of SNP TSC0005814
atatagagggaaa

SEQ ID NO: 263258 - DNA, 13 bp, Artificial Sequence
  Oligonucleotide for detection of SNP TSC0005814
tttccctctatat

SEQ ID NO: 263259 - DNA, 13 bp, Artificial Sequence
  Oligonucleotide for detection of SNP TSC0005815
tgttttattggtt

SEQ ID NO: 263260 - DNA, 13 bp, Artificial Sequence
  Oligonucleotide for detection of SNP TSC0005815
aaccaataaaaca

SEQ ID NO: 263261 - DNA, 13 bp, Artificial Sequence
  Oligonucleotide for detection of SNP TSC0005815
aattaatggaata

SEQ ID NO: 263262 - DNA, 13 bp, Artificial Sequence
  Oligonucleotide for detection of SNP TSC0005815
tattccattaatt

SEQ ID NO: 263263 - DNA, 13 bp, Artificial Sequence
  Oligonucleotide for detection of SNP TSC0005815
aattaacggaata

SEQ ID NO: 263264 - DNA, 13 bp, Artificial Sequence
  Oligonucleotide for detection of SNP TSC0005815
tattccgttaatt

SEQ ID NO: 263265 - DNA, 13 bp, Artificial Sequence
  Oligonucleotide for detection of SNP TSC0009840
tggttatgttatt

SEQ ID NO: 263266 - DNA, 13 bp, Artificial Sequence
  Oligonucleotide for detection of SNP TSC0009840
aataacataacca

SEQ ID NO: 263267 - DNA, 13 bp, Artificial Sequence
  Oligonucleotide for detection of SNP TSC0009840
tggttacgttatt

SEQ ID NO: 263268 - DNA, 13 bp, Artificial Sequence
  Oligonucleotide for detection of SNP TSC0009840
aataacgtaacca

SEQ ID NO: 263269 - DNA, 13 bp, Artificial Sequence
  Oligonucleotide for detection of SNP TSC0010426
ttgtgaatgttta

SEQ ID NO: 263270 - DNA, 13 bp, Artificial Sequence
  Oligonucleotide for detection of SNP TSC0010426
taaacattcacaa

SEQ ID NO: 263271 - DNA, 13 bp, Artificial Sequence
  Oligonucleotide for detection of SNP TSC0010426
ttgtgagtgttta

SEQ ID NO: 263272 - DNA, 13 bp, Artificial Sequence
  Oligonucleotide for detection of SNP TSC0010426
taaacactcacaa

SEQ ID NO: 263273 - DNA, 13 bp, Artificial Sequence
  Oligonucleotide for detection of SNP TSC0000393
aatgaaattttty

SEQ ID NO: 263274 - DNA, 13 bp, Artificial Sequence
  Oligonucleotide for detection of SNP TSC0000393
raaaaatttcatt

SEQ ID NO: 263275 - DNA, 13 bp, Artificial Sequence
  Oligonucleotide for detection of SNP TSC0000393
aatgaagttttty

SEQ ID NO: 263276 - DNA, 13 bp, Artificial Sequence
  Oligonucleotide for detection of SNP TSC0000393
raaaaacttcatt

SEQ ID NO: 263277 - DNA, 13 bp, Artificial Sequence
  Oligonucleotide for detection of SNP TSC0063851
gtgatatgtttgy

SEQ ID NO: 263278 - DNA, 13 bp, Artificial Sequence
  Oligonucleotide for detection of SNP TSC0063851
rcaaacatatcac

SEQ ID NO: 263279 - DNA, 13 bp, Artificial Sequence
  Oligonucleotide for detection of SNP TSC0063851
gtgatacgtttgy

SEQ ID NO: 263280 - DNA, 13 bp, Artificial Sequence
  Oligonucleotide for detection of SNP TSC0063851
rcaaacgtatcac

SEQ ID NO: 263281 - DNA, 13 bp, Artificial Sequence
  Oligonucleotide for detection of SNP TSC0063851
gtgatatgttcgy

SEQ ID NO: 263282 - DNA, 13 bp, Artificial Sequence
  Oligonucleotide for detection of SNP TSC0063851
rcgaacatatcac

SEQ ID NO: 263283 - DNA, 13 bp, Artificial Sequence
  Oligonucleotide for detection of SNP TSC0063851
gtgatacgttcgy

SEQ ID NO: 263284 - DNA, 13 bp, Artificial Sequence
  Oligonucleotide for detection of SNP TSC0063851
rcgaacgtatcac

SEQ ID NO: 263285 - DNA, 13 bp, Artificial Sequence
  Oligonucleotide for detection of SNP TSC0063851
gtgggtgtattay

SEQ ID NO: 263286 - DNA, 13 bp, Artificial Sequence
  Oligonucleotide for detection of SNP TSC0063851
rtaatacacccac

SEQ ID NO: 263287 - DNA, 13 bp, Artificial Sequence
  Oligonucleotide for detection of SNP TSC0063851
gtgggtatattay

SEQ ID NO: 263288 - DNA, 13 bp, Artificial Sequence
  Oligonucleotide for detection of SNP TSC0063851
rtaatatacccac

SEQ ID NO: 263289 - DNA, 13 bp, Artificial Sequence
  Oligonucleotide for detection of SNP TSC0063851
gcgggtgtattay

SEQ ID NO: 263290 - DNA, 13 bp, Artificial Sequence
  Oligonucleotide for detection of SNP TSC0063851
rtaatacacccgc

SEQ ID NO: 263291 - DNA, 13 bp, Artificial Sequence
  Oligonucleotide for detection of SNP TSC0063851
gcgggtatattay

SEQ ID NO: 263292 - DNA, 13 bp, Artificial Sequence
  Oligonucleotide for detection of SNP TSC0063851
rtaatatacccgc

SEQ ID NO: 263293 - DNA, 13 bp, Artificial Sequence
  Oligonucleotide for detection of SNP TSC0063851
gtgggcgtattay

SEQ ID NO: 263294 - DNA, 13 bp, Artificial Sequence
  Oligonucleotide for detection of SNP TSC0063851
rtaatacgcccac

SEQ ID NO: 263295 - DNA, 13 bp, Artificial Sequence
  Oligonucleotide for detection of SNP TSC0063851
gcgggcgtattay

SEQ ID NO: 263296 - DNA, 13 bp, Artificial Sequence
  Oligonucleotide for detection of SNP TSC0063851
rtaatacgcccgc

SEQ ID NO: 263297 - DNA, 13 bp, Artificial Sequence
  Oligonucleotide for detection of SNP TSC0009618
aggtggatgtaty

SEQ ID NO: 263298 - DNA, 13 bp, Artificial Sequence
  Oligonucleotide for detection of SNP TSC0009618
ratacatccacct

SEQ ID NO: 263299 - DNA, 13 bp, Artificial Sequence
  Oligonucleotide for detection of SNP TSC0009618
aggtgggtgtaty

SEQ ID NO: 263300 - DNA, 13 bp, Artificial Sequence
  Oligonucleotide for detection of SNP TSC0009618
ratacacccacct

SEQ ID NO: 263301 - DNA, 13 bp, Artificial Sequence
  Oligonucleotide for detection of SNP TSC0063853
gtaattggtatta

SEQ ID NO: 263302 - DNA, 13 bp, Artificial Sequence
  Oligonucleotide for detection of SNP TSC0063853
taataccaattac

SEQ ID NO: 263303 - DNA, 13 bp, Artificial Sequence
  Oligonucleotide for detection of SNP TSC0063853
gtaattagtatta

SEQ ID NO: 263304 - DNA, 13 bp, Artificial Sequence
  Oligonucleotide for detection of SNP TSC0063853
taatactaattac

SEQ ID NO: 263305 - DNA, 13 bp, Artificial Sequence
  Oligonucleotide for detection of SNP TSC0063855
atagtatatttgy

SEQ ID NO: 263306 - DNA, 13 bp, Artificial Sequence
  Oligonucleotide for detection of SNP TSC0063855
rcaaatatactat

SEQ ID NO: 263307 - DNA, 13 bp, Artificial Sequence
  Oligonucleotide for detection of SNP TSC0063855
atagtagatttgy

SEQ ID NO: 263308 - DNA, 13 bp, Artificial Sequence
  Oligonucleotide for detection of SNP TSC0063855
rcaaatctactat

SEQ ID NO: 263309 - DNA, 13 bp, Artificial Sequence
  Oligonucleotide for detection of SNP TSC0063855
gtaggtgtgttgt

SEQ ID NO: 263310 - DNA, 13 bp, Artificial Sequence
  Oligonucleotide for detection of SNP TSC0063855
acaacacacctac

SEQ ID NO: 263311 - DNA, 13 bp, Artificial Sequence
  Oligonucleotide for detection of SNP TSC0063855
gtaggtttgttgt

SEQ ID NO: 263312 - DNA, 13 bp, Artificial Sequence
  Oligonucleotide for detection of SNP TSC0063855
acaacaaacctac

SEQ ID NO: 263313 - DNA, 13 bp, Artificial Sequence
  Oligonucleotide for detection of SNP TSC0063856
attttatgttgty

SEQ ID NO: 263314 - DNA, 13 bp, Artificial Sequence
  Oligonucleotide for detection of SNP TSC0063856
racaacataaaat

SEQ ID NO: 263315 - DNA, 13 bp, Artificial Sequence
  Oligonucleotide for detection of SNP TSC0063856
gataatatgggat

SEQ ID NO: 263316 - DNA, 13 bp, Artificial Sequence
  Oligonucleotide for detection of SNP TSC0063856
atcccatattatc

SEQ ID NO: 263317 - DNA, 13 bp, Artificial Sequence
  Oligonucleotide for detection of SNP TSC0063856
gataatttgggat

SEQ ID NO: 263318 - DNA, 13 bp, Artificial Sequence
  Oligonucleotide for detection of SNP TSC0063856
atcccaaattatc

SEQ ID NO: 263319 - DNA, 13 bp, Artificial Sequence
  Oligonucleotide for detection of SNP TSC0063857
tatatatgagtta

SEQ ID NO: 263320 - DNA, 13 bp, Artificial Sequence
  Oligonucleotide for detection of SNP TSC0063857
taactcatatata

SEQ ID NO: 263321 - DNA, 13 bp, Artificial Sequence
  Oligonucleotide for detection of SNP TSC0063857
tatatacgagtta

SEQ ID NO: 263322 - DNA, 13 bp, Artificial Sequence
  Oligonucleotide for detection of SNP TSC0063857
taactcgtatata

SEQ ID NO: 263323 - DNA, 13 bp, Artificial Sequence
  Oligonucleotide for detection of SNP TSC0063857
tgatttatgtata

SEQ ID NO: 263324 - DNA, 13 bp, Artificial Sequence
  Oligonucleotide for detection of SNP TSC0063857
tatacataaatca

SEQ ID NO: 263325 - DNA, 13 bp, Artificial Sequence
  Oligonucleotide for detection of SNP TSC0063857
tgattcgtgtata

SEQ ID NO: 263326 - DNA, 13 bp, Artificial Sequence
  Oligonucleotide for detection of SNP TSC0063857
tatacacgaatca

SEQ ID NO: 263327 - DNA, 13 bp, Artificial Sequence
  Oligonucleotide for detection of SNP TSC0063858
taagtaatggaga

SEQ ID NO: 263328 - DNA, 13 bp, Artificial Sequence
  Oligonucleotide for detection of SNP TSC0063858
tctccattactta

SEQ ID NO: 263329 - DNA, 13 bp, Artificial Sequence
  Oligonucleotide for detection of SNP TSC0063858
taagtagtggaga

SEQ ID NO: 263330 - DNA, 13 bp, Artificial Sequence
  Oligonucleotide for detection of SNP TSC0063858
tctccactactta

SEQ ID NO: 263331 - DNA, 13 bp, Artificial Sequence
  Oligonucleotide for detection of SNP TSC0007971
taagttaaataaa

SEQ ID NO: 263332 - DNA, 13 bp, Artificial Sequence
  Oligonucleotide for detection of SNP TSC0007971
tttatttaactta

SEQ ID NO: 263333 - DNA, 13 bp, Artificial Sequence
  Oligonucleotide for detection of SNP TSC0007971
taagttgaataaa

SEQ ID NO: 263334 - DNA, 13 bp, Artificial Sequence
  Oligonucleotide for detection of SNP TSC0007971
tttattcaactta

SEQ ID NO: 263335 - DNA, 13 bp, Artificial Sequence
  Oligonucleotide for detection of SNP TSC0000481
gtttgtaaggatt

SEQ ID NO: 263336 - DNA, 13 bp, Artificial Sequence
  Oligonucleotide for detection of SNP TSC0000481
aatccttacaaac

SEQ ID NO: 263337 - DNA, 13 bp, Artificial Sequence
  Oligonucleotide for detection of SNP TSC0000481
gtttgtgaggatt

SEQ ID NO: 263338 - DNA, 13 bp, Artificial Sequence
  Oligonucleotide for detection of SNP TSC0000481
aatcctcacaaac

SEQ ID NO: 263339 - DNA, 13 bp, Artificial Sequence
  Oligonucleotide for detection of SNP TSC0000481
gttcgtaaggatt

SEQ ID NO: 263340 - DNA, 13 bp, Artificial Sequence
  Oligonucleotide for detection of SNP TSC0000481
aatccttacgaac

SEQ ID NO: 263341 - DNA, 13 bp, Artificial Sequence
  Oligonucleotide for detection of SNP TSC0000481
gttcgtgaggatt

SEQ ID NO: 263342 - DNA, 13 bp, Artificial Sequence
  Oligonucleotide for detection of SNP TSC0000481
aatcctcacgaac

SEQ ID NO: 263343 - DNA, 13 bp, Artificial Sequence
  Oligonucleotide for detection of SNP TSC0063861
ttagttatatgta

SEQ ID NO: 263344 - DNA, 13 bp, Artificial Sequence
  Oligonucleotide for detection of SNP TSC0063861
tacatataactaa

SEQ ID NO: 263345 - DNA, 13 bp, Artificial Sequence
  Oligonucleotide for detection of SNP TSC0063861
ttagttttatgta

SEQ ID NO: 263346 - DNA, 13 bp, Artificial Sequence
  Oligonucleotide for detection of SNP TSC0063861
tacataaaactaa

SEQ ID NO: 263347 - DNA, 13 bp, Artificial Sequence
  Oligonucleotide for detection of SNP TSC0063861
tatatatgattag

SEQ ID NO: 263348 - DNA, 13 bp, Artificial Sequence
  Oligonucleotide for detection of SNP TSC0063861
ctaatcatatata

SEQ ID NO: 263349 - DNA, 13 bp, Artificial Sequence
  Oligonucleotide for detection of SNP TSC0000454
aatgtagaaaata

SEQ ID NO: 263350 - DNA, 13 bp, Artificial Sequence
  Oligonucleotide for detection of SNP TSC0000454
tattttctacatt

SEQ ID NO: 263351 - DNA, 13 bp, Artificial Sequence
  Oligonucleotide for detection of SNP TSC0063862
gtaagggagaaat

SEQ ID NO: 263352 - DNA, 13 bp, Artificial Sequence
  Oligonucleotide for detection of SNP TSC0063862
atttctcccttac

SEQ ID NO: 263353 - DNA, 13 bp, Artificial Sequence
  Oligonucleotide for detection of SNP TSC0063862
gtaaggaagaaat

SEQ ID NO: 263354 - DNA, 13 bp, Artificial Sequence
  Oligonucleotide for detection of SNP TSC0063862
atttcttccttac

SEQ ID NO: 263355 - DNA, 13 bp, Artificial Sequence
  Oligonucleotide for detection of SNP TSC0063865
attaggtgagtat

SEQ ID NO: 263356 - DNA, 13 bp, Artificial Sequence
  Oligonucleotide for detection of SNP TSC0063865
atactcacctaat

SEQ ID NO: 263357 - DNA, 13 bp, Artificial Sequence
  Oligonucleotide for detection of SNP TSC0063865
attaggcgagtat

SEQ ID NO: 263358 - DNA, 13 bp, Artificial Sequence
  Oligonucleotide for detection of SNP TSC0063865
atactcgcctaat

SEQ ID NO: 263359 - DNA, 13 bp, Artificial Sequence
  Oligonucleotide for detection of SNP TSC0063865
atatttgtttgat

SEQ ID NO: 263360 - DNA, 13 bp, Artificial Sequence
  Oligonucleotide for detection of SNP TSC0063865
atcaaacaaatat

SEQ ID NO: 263361 - DNA, 13 bp, Artificial Sequence
  Oligonucleotide for detection of SNP TSC0063865
atattcgtttgat

SEQ ID NO: 263362 - DNA, 13 bp, Artificial Sequence
  Oligonucleotide for detection of SNP TSC0063865
atcaaacgaatat

SEQ ID NO: 263363 - DNA, 13 bp, Artificial Sequence
  Oligonucleotide for detection of SNP TSC0063866
tatgttaatattt

SEQ ID NO: 263364 - DNA, 13 bp, Artificial Sequence
  Oligonucleotide for detection of SNP TSC0063866
aaatattaacata

SEQ ID NO: 263365 - DNA, 13 bp, Artificial Sequence
  Oligonucleotide for detection of SNP TSC0063866
tatgttgatattt

SEQ ID NO: 263366 - DNA, 13 bp, Artificial Sequence
  Oligonucleotide for detection of SNP TSC0063866
aaatatcaacata

SEQ ID NO: 263367 - DNA, 13 bp, Artificial Sequence
  Oligonucleotide for detection of SNP TSC0063866
tacgttaatattt

SEQ ID NO: 263368 - DNA, 13 bp, Artificial Sequence
  Oligonucleotide for detection of SNP TSC0063866
aaatattaacgta

SEQ ID NO: 263369 - DNA, 13 bp, Artificial Sequence
  Oligonucleotide for detection of SNP TSC0063866
tacgttgatattt

SEQ ID NO: 263370 - DNA, 13 bp, Artificial Sequence
  Oligonucleotide for detection of SNP TSC0063866
aaatatcaacgta

SEQ ID NO: 263371 - DNA, 13 bp, Artificial Sequence
  Oligonucleotide for detection of SNP TSC0000358
agatattagttga

SEQ ID NO: 263372 - DNA, 13 bp, Artificial Sequence
  Oligonucleotide for detection of SNP TSC0000358
tcaactaatatct

SEQ ID NO: 263373 - DNA, 13 bp, Artificial Sequence
  Oligonucleotide for detection of SNP TSC0000358
agatatgagttga

SEQ ID NO: 263374 - DNA, 13 bp, Artificial Sequence
  Oligonucleotide for detection of SNP TSC0000358
tcaactcatatct

SEQ ID NO: 263375 - DNA, 13 bp, Artificial Sequence
  Oligonucleotide for detection of SNP TSC0063867
ataaaaataagtt

SEQ ID NO: 263376 - DNA, 13 bp, Artificial Sequence
  Oligonucleotide for detection of SNP TSC0063867
aacttatttttat

SEQ ID NO: 263377 - DNA, 13 bp, Artificial Sequence
  Oligonucleotide for detection of SNP TSC0063867
ataaaattaagtt

SEQ ID NO: 263378 - DNA, 13 bp, Artificial Sequence
  Oligonucleotide for detection of SNP TSC0063867
aacttaattttat

SEQ ID NO: 263379 - DNA, 13 bp, Artificial Sequence
  Oligonucleotide for detection of SNP TSC0063867
aatttatttttat

SEQ ID NO: 263380 - DNA, 13 bp, Artificial Sequence
  Oligonucleotide for detection of SNP TSC0063867
ataaaaataaatt

SEQ ID NO: 263381 - DNA, 13 bp, Artificial Sequence
  Oligonucleotide for detection of SNP TSC0063867
aatttagttttat

SEQ ID NO: 263382 - DNA, 13 bp, Artificial Sequence
  Oligonucleotide for detection of SNP TSC0063867
ataaaactaaatt

SEQ ID NO: 263383 - DNA, 13 bp, Artificial Sequence
  Oligonucleotide for detection of SNP TSC0063868
ttgtgtagttgtt

SEQ ID NO: 263384 - DNA, 13 bp, Artificial Sequence
  Oligonucleotide for detection of SNP TSC0063868
aacaactacacaa

SEQ ID NO: 263385 - DNA, 13 bp, Artificial Sequence
  Oligonucleotide for detection of SNP TSC0063868
ttgtgttgttgtt

SEQ ID NO: 263386 - DNA, 13 bp, Artificial Sequence
  Oligonucleotide for detection of SNP TSC0063868
aacaacaacacaa

SEQ ID NO: 263387 - DNA, 13 bp, Artificial Sequence
  Oligonucleotide for detection of SNP TSC0063868
ttgtgtcgttgtt

SEQ ID NO: 263388 - DNA, 13 bp, Artificial Sequence
  Oligonucleotide for detection of SNP TSC0063868
aacaacgacacaa

SEQ ID NO: 263389 - DNA, 13 bp, Artificial Sequence
  Oligonucleotide for detection of SNP TSC0063868
aatagttgtatag

SEQ ID NO: 263390 - DNA, 13 bp, Artificial Sequence
  Oligonucleotide for detection of SNP TSC0063868
ctatacaactatt

SEQ ID NO: 263391 - DNA, 13 bp, Artificial Sequence
  Oligonucleotide for detection of SNP TSC0063868
aatagtggtatag

SEQ ID NO: 263392 - DNA, 13 bp, Artificial Sequence
  Oligonucleotide for detection of SNP TSC0063868
ctataccactatt

SEQ ID NO: 263393 - DNA, 13 bp, Artificial Sequence
  Oligonucleotide for detection of SNP TSC0063868
aatagcggtatag

SEQ ID NO: 263394 - DNA, 13 bp, Artificial Sequence
  Oligonucleotide for detection of SNP TSC0063868
ctataccgctatt

SEQ ID NO: 263395 - DNA, 13 bp, Artificial Sequence
  Oligonucleotide for detection of SNP TSC0063869
gtaagatgttgty

SEQ ID NO: 263396 - DNA, 13 bp, Artificial Sequence
  Oligonucleotide for detection of SNP TSC0063869
racaacatcttac

SEQ ID NO: 263397 - DNA, 13 bp, Artificial Sequence
  Oligonucleotide for detection of SNP TSC0063869
gtaagacgttgty

SEQ ID NO: 263398 - DNA, 13 bp, Artificial Sequence
  Oligonucleotide for detection of SNP TSC0063869
racaacgtcttac

SEQ ID NO: 263399 - DNA, 13 bp, Artificial Sequence
  Oligonucleotide for detection of SNP TSC0001026
agaaaagttgatg

SEQ ID NO: 263400 - DNA, 13 bp, Artificial Sequence
  Oligonucleotide for detection of SNP TSC0001026
catcaacttttct

SEQ ID NO: 263401 - DNA, 13 bp, Artificial Sequence
  Oligonucleotide for detection of SNP TSC0001026
agaaaaattgatg

SEQ ID NO: 263402 - DNA, 13 bp, Artificial Sequence
  Oligonucleotide for detection of SNP TSC0001026
catcaatttttct

SEQ ID NO: 263403 - DNA, 13 bp, Artificial Sequence
  Oligonucleotide for detection of SNP TSC0063873
atatttattattg

SEQ ID NO: 263404 - DNA, 13 bp, Artificial Sequence
  Oligonucleotide for detection of SNP TSC0063873
caataataaatat

SEQ ID NO: 263405 - DNA, 13 bp, Artificial Sequence
  Oligonucleotide for detection of SNP TSC0001554
gtatttttttgtt

SEQ ID NO: 263406 - DNA, 13 bp, Artificial Sequence
  Oligonucleotide for detection of SNP TSC0001554
aacaaaaaaatac

SEQ ID NO: 263407 - DNA, 13 bp, Artificial Sequence
  Oligonucleotide for detection of SNP TSC0001554
gtatttgtttgtt

SEQ ID NO: 263408 - DNA, 13 bp, Artificial Sequence
  Oligonucleotide for detection of SNP TSC0001554
aacaaacaaatac

SEQ ID NO: 263409 - DNA, 13 bp, Artificial Sequence
  Oligonucleotide for detection of SNP TSC0001554
gtattttttcgtt

SEQ ID NO: 263410 - DNA, 13 bp, Artificial Sequence
  Oligonucleotide for detection of SNP TSC0001554
aacgaaaaaatac

SEQ ID NO: 263411 - DNA, 13 bp, Artificial Sequence
  Oligonucleotide for detection of SNP TSC0001554
gtatttgttcgtt

SEQ ID NO: 263412 - DNA, 13 bp, Artificial Sequence
  Oligonucleotide for detection of SNP TSC0001554
aacgaacaaatac

SEQ ID NO: 263413 - DNA, 13 bp, Artificial Sequence
  Oligonucleotide for detection of SNP TSC0001554
agtggggaggtgy

SEQ ID NO: 263414 - DNA, 13 bp, Artificial Sequence
  Oligonucleotide for detection of SNP TSC0001554
rcacctccccact

SEQ ID NO: 263415 - DNA, 13 bp, Artificial Sequence
  Oligonucleotide for detection of SNP TSC0001554
agtgggtaggtgy

SEQ ID NO: 263416 - DNA, 13 bp, Artificial Sequence
  Oligonucleotide for detection of SNP TSC0001554
rcacctacccact

SEQ ID NO: 263417 - DNA, 13 bp, Artificial Sequence
  Oligonucleotide for detection of SNP TSC0001554
agcggggaggtgy

SEQ ID NO: 263418 - DNA, 13 bp, Artificial Sequence
  Oligonucleotide for detection of SNP TSC0001554
rcacctccccgct

SEQ ID NO: 263419 - DNA, 13 bp, Artificial Sequence
  Oligonucleotide for detection of SNP TSC0001554
agcgggtaggtgy

SEQ ID NO: 263420 - DNA, 13 bp, Artificial Sequence
  Oligonucleotide for detection of SNP TSC0001554
rcacctacccgct

SEQ ID NO: 263421 - DNA, 13 bp, Artificial Sequence
  Oligonucleotide for detection of SNP TSC0063875
attatgttatttt

SEQ ID NO: 263422 - DNA, 13 bp, Artificial Sequence
  Oligonucleotide for detection of SNP TSC0063875
aaaataacataat

SEQ ID NO: 263423 - DNA, 13 bp, Artificial Sequence
  Oligonucleotide for detection of SNP TSC0063875
attatggtatttt

SEQ ID NO: 263424 - DNA, 13 bp, Artificial Sequence
  Oligonucleotide for detection of SNP TSC0063875
aaaataccataat

SEQ ID NO: 263425 - DNA, 13 bp, Artificial Sequence
  Oligonucleotide for detection of SNP TSC0063875
aaaatggtatggt

SEQ ID NO: 263426 - DNA, 13 bp, Artificial Sequence
  Oligonucleotide for detection of SNP TSC0063875
accataccatttt

SEQ ID NO: 263427 - DNA, 13 bp, Artificial Sequence
  Oligonucleotide for detection of SNP TSC0063875
aaaatgttatggt

SEQ ID NO: 263428 - DNA, 13 bp, Artificial Sequence
  Oligonucleotide for detection of SNP TSC0063875
accataacatttt

SEQ ID NO: 263429 - DNA, 13 bp, Artificial Sequence
  Oligonucleotide for detection of SNP TSC0063876
gtgtgtattttta

SEQ ID NO: 263430 - DNA, 13 bp, Artificial Sequence
  Oligonucleotide for detection of SNP TSC0063876
taaaaatacacac

SEQ ID NO: 263431 - DNA, 13 bp, Artificial Sequence
  Oligonucleotide for detection of SNP TSC0063876
taaaaatatatay

SEQ ID NO: 263432 - DNA, 13 bp, Artificial Sequence
  Oligonucleotide for detection of SNP TSC0063876
rtatatattttta

SEQ ID NO: 263433 - DNA, 13 bp, Artificial Sequence
  Oligonucleotide for detection of SNP TSC0063876
taaaaagatatay

SEQ ID NO: 263434 - DNA, 13 bp, Artificial Sequence
  Oligonucleotide for detection of SNP TSC0063876
rtatatcttttta

SEQ ID NO: 263435 - DNA, 13 bp, Artificial Sequence
  Oligonucleotide for detection of SNP TSC0000761
tcgtatattttty

SEQ ID NO: 263436 - DNA, 13 bp, Artificial Sequence
  Oligonucleotide for detection of SNP TSC0000761
raaaaatatacga

SEQ ID NO: 263437 - DNA, 13 bp, Artificial Sequence
  Oligonucleotide for detection of SNP TSC0000761
tcgtatgttttty

SEQ ID NO: 263438 - DNA, 13 bp, Artificial Sequence
  Oligonucleotide for detection of SNP TSC0000761
raaaaacatacga

SEQ ID NO: 263439 - DNA, 13 bp, Artificial Sequence
  Oligonucleotide for detection of SNP TSC0000075
attttttggagta

SEQ ID NO: 263440 - DNA, 13 bp, Artificial Sequence
  Oligonucleotide for detection of SNP TSC0000075
tactccaaaaaat

SEQ ID NO: 263441 - DNA, 13 bp, Artificial Sequence
  Oligonucleotide for detection of SNP TSC0000075
atttttgggagta

SEQ ID NO: 263442 - DNA, 13 bp, Artificial Sequence
  Oligonucleotide for detection of SNP TSC0000075
tactcccaaaaat

SEQ ID NO: 263443 - DNA, 13 bp, Artificial Sequence
  Oligonucleotide for detection of SNP TSC0000075
atttttcggagta

SEQ ID NO: 263444 - DNA, 13 bp, Artificial Sequence
  Oligonucleotide for detection of SNP TSC0000075
tactccgaaaaat

SEQ ID NO: 263445 - DNA, 13 bp, Artificial Sequence
  Oligonucleotide for detection of SNP TSC0000075
tattttgaaagat

SEQ ID NO: 263446 - DNA, 13 bp, Artificial Sequence
  Oligonucleotide for detection of SNP TSC0000075
atctttcaaaata

SEQ ID NO: 263447 - DNA, 13 bp, Artificial Sequence
  Oligonucleotide for detection of SNP TSC0000075
tatttttaaagat

SEQ ID NO: 263448 - DNA, 13 bp, Artificial Sequence
  Oligonucleotide for detection of SNP TSC0000075
atctttaaaaata

SEQ ID NO: 263449 - DNA, 13 bp, Artificial Sequence
  Oligonucleotide for detection of SNP TSC0000075
tatttcgaaagat

SEQ ID NO: 263450 - DNA, 13 bp, Artificial Sequence
  Oligonucleotide for detection of SNP TSC0000075
atctttcgaaata

SEQ ID NO: 263451 - DNA, 13 bp, Artificial Sequence
  Oligonucleotide for detection of SNP TSC0063877
aaatatattgagt

SEQ ID NO: 263452 - DNA, 13 bp, Artificial Sequence
  Oligonucleotide for detection of SNP TSC0063877
actcaatatattt

SEQ ID NO: 263453 - DNA, 13 bp, Artificial Sequence
  Oligonucleotide for detection of SNP TSC0063877
aaatattttgagt

SEQ ID NO: 263454 - DNA, 13 bp, Artificial Sequence
  Oligonucleotide for detection of SNP TSC0063877
actcaaaatattt

SEQ ID NO: 263455 - DNA, 13 bp, Artificial Sequence
  Oligonucleotide for detection of SNP TSC0063877
atttaaagtattt

SEQ ID NO: 263456 - DNA, 13 bp, Artificial Sequence
  Oligonucleotide for detection of SNP TSC0063877
aaatactttaaat

SEQ ID NO: 263457 - DNA, 13 bp, Artificial Sequence
  Oligonucleotide for detection of SNP TSC0063878
tcgagaatataay

SEQ ID NO: 263458 - DNA, 13 bp, Artificial Sequence
  Oligonucleotide for detection of SNP TSC0063878
rttatattctcga

SEQ ID NO: 263459 - DNA, 13 bp, Artificial Sequence
  Oligonucleotide for detection of SNP TSC0063878
tcgagagtataay

SEQ ID NO: 263460 - DNA, 13 bp, Artificial Sequence
  Oligonucleotide for detection of SNP TSC0063878
rttatactctcga

SEQ ID NO: 263461 - DNA, 13 bp, Artificial Sequence
  Oligonucleotide for detection of SNP TSC0001248
taatggggtagaa

SEQ ID NO: 263462 - DNA, 13 bp, Artificial Sequence
  Oligonucleotide for detection of SNP TSC0001248
ttctaccccatta

SEQ ID NO: 263463 - DNA, 13 bp, Artificial Sequence
  Oligonucleotide for detection of SNP TSC0001248
taatggagtagaa

SEQ ID NO: 263464 - DNA, 13 bp, Artificial Sequence
  Oligonucleotide for detection of SNP TSC0001248
ttctactccatta

SEQ ID NO: 263465 - DNA, 13 bp, Artificial Sequence
  Oligonucleotide for detection of SNP TSC0001137
taggtagttttta

SEQ ID NO: 263466 - DNA, 13 bp, Artificial Sequence
  Oligonucleotide for detection of SNP TSC0001137
taaaaactaccta

SEQ ID NO: 263467 - DNA, 13 bp, Artificial Sequence
  Oligonucleotide for detection of SNP TSC0001137
taggtaattttta

SEQ ID NO: 263468 - DNA, 13 bp, Artificial Sequence
  Oligonucleotide for detection of SNP TSC0001137
taaaaattaccta

SEQ ID NO: 263469 - DNA, 13 bp, Artificial Sequence
  Oligonucleotide for detection of SNP TSC0063879
aggttgagtatgg

SEQ ID NO: 263470 - DNA, 13 bp, Artificial Sequence
  Oligonucleotide for detection of SNP TSC0063879
ccatactcaacct

SEQ ID NO: 263471 - DNA, 13 bp, Artificial Sequence
  Oligonucleotide for detection of SNP TSC0063879
aggttgtgtatgg

SEQ ID NO: 263472 - DNA, 13 bp, Artificial Sequence
  Oligonucleotide for detection of SNP TSC0063879
ccatacacaacct

SEQ ID NO: 263473 - DNA, 13 bp, Artificial Sequence
  Oligonucleotide for detection of SNP TSC0063880
tatggtatatatg

SEQ ID NO: 263474 - DNA, 13 bp, Artificial Sequence
  Oligonucleotide for detection of SNP TSC0063880
catatataccata

SEQ ID NO: 263475 - DNA, 13 bp, Artificial Sequence
  Oligonucleotide for detection of SNP TSC0063880
tatggtttatatg

SEQ ID NO: 263476 - DNA, 13 bp, Artificial Sequence
  Oligonucleotide for detection of SNP TSC0063880
catataaaccata

SEQ ID NO: 263477 - DNA, 13 bp, Artificial Sequence
  Oligonucleotide for detection of SNP TSC0063880
tacggtatatatg

SEQ ID NO: 263478 - DNA, 13 bp, Artificial Sequence
  Oligonucleotide for detection of SNP TSC0063880
catatataccgta

SEQ ID NO: 263479 - DNA, 13 bp, Artificial Sequence
  Oligonucleotide for detection of SNP TSC0063880
tacggtttatatg

SEQ ID NO: 263480 - DNA, 13 bp, Artificial Sequence
  Oligonucleotide for detection of SNP TSC0063880
catataaaccgta

SEQ ID NO: 263481 - DNA, 13 bp, Artificial Sequence
  Oligonucleotide for detection of SNP TSC0063880
tatatatattgtg

SEQ ID NO: 263482 - DNA, 13 bp, Artificial Sequence
  Oligonucleotide for detection of SNP TSC0063880
cacaatatatata

SEQ ID NO: 263483 - DNA, 13 bp, Artificial Sequence
  Oligonucleotide for detection of SNP TSC0063880
tatataaattgtg

SEQ ID NO: 263484 - DNA, 13 bp, Artificial Sequence
  Oligonucleotide for detection of SNP TSC0063880
cacaatttatata

SEQ ID NO: 263485 - DNA, 13 bp, Artificial Sequence
  Oligonucleotide for detection of SNP TSC0063880
tatatatatcgtg

SEQ ID NO: 263486 - DNA, 13 bp, Artificial Sequence
  Oligonucleotide for detection of SNP TSC0063880
cacgatatatata

SEQ ID NO: 263487 - DNA, 13 bp, Artificial Sequence
  Oligonucleotide for detection of SNP TSC0063880
tatataaatcgtg

SEQ ID NO: 263488 - DNA, 13 bp, Artificial Sequence
  Oligonucleotide for detection of SNP TSC0063880
cacgatttatata

SEQ ID NO: 263489 - DNA, 13 bp, Artificial Sequence
  Oligonucleotide for detection of SNP TSC0063882
ttttggagggtgg

SEQ ID NO: 263490 - DNA, 13 bp, Artificial Sequence
  Oligonucleotide for detection of SNP TSC0063882
ccaccctccaaaa

SEQ ID NO: 263491 - DNA, 13 bp, Artificial Sequence
  Oligonucleotide for detection of SNP TSC0063882
ttttggggggtgg

SEQ ID NO: 263492 - DNA, 13 bp, Artificial Sequence
  Oligonucleotide for detection of SNP TSC0063882
ccaccccccaaaa

SEQ ID NO: 263493 - DNA, 13 bp, Artificial Sequence
  Oligonucleotide for detection of SNP TSC0063883
taaattaaaagaa

SEQ ID NO: 263494 - DNA, 13 bp, Artificial Sequence
  Oligonucleotide for detection of SNP TSC0063883
ttcttttaattta

SEQ ID NO: 263495 - DNA, 13 bp, Artificial Sequence
  Oligonucleotide for detection of SNP TSC0063883
taaattgaaagaa

SEQ ID NO: 263496 - DNA, 13 bp, Artificial Sequence
  Oligonucleotide for detection of SNP TSC0063883
ttctttcaattta

SEQ ID NO: 263497 - DNA, 13 bp, Artificial Sequence
  Oligonucleotide for detection of SNP TSC0063883
taaatcgaaagaa

SEQ ID NO: 263498 - DNA, 13 bp, Artificial Sequence
  Oligonucleotide for detection of SNP TSC0063883
ttctttcgattta

SEQ ID NO: 263499 - DNA, 13 bp, Artificial Sequence
  Oligonucleotide for detection of SNP TSC0063886
taaagtaataatt

SEQ ID NO: 263500 - DNA, 13 bp, Artificial Sequence
  Oligonucleotide for detection of SNP TSC0063886
aattattacttta

SEQ ID NO: 263501 - DNA, 13 bp, Artificial Sequence
  Oligonucleotide for detection of SNP TSC0063886
taaagtgataatt

SEQ ID NO: 263502 - DNA, 13 bp, Artificial Sequence
  Oligonucleotide for detection of SNP TSC0063886
aattatcacttta

SEQ ID NO: 263503 - DNA, 13 bp, Artificial Sequence
  Oligonucleotide for detection of SNP TSC0063887
gtaaggattttaa

SEQ ID NO: 263504 - DNA, 13 bp, Artificial Sequence
  Oligonucleotide for detection of SNP TSC0063887
ttaaaatccttac

SEQ ID NO: 263505 - DNA, 13 bp, Artificial Sequence
  Oligonucleotide for detection of SNP TSC0063887
gtaaggtttttaa

SEQ ID NO: 263506 - DNA, 13 bp, Artificial Sequence
  Oligonucleotide for detection of SNP TSC0063887
ttaaaaaccttac

SEQ ID NO: 263507 - DNA, 13 bp, Artificial Sequence
  Oligonucleotide for detection of SNP TSC0063889
ttttttaaagtat

SEQ ID NO: 263508 - DNA, 13 bp, Artificial Sequence
  Oligonucleotide for detection of SNP TSC0063889
atactttaaaaaa

SEQ ID NO: 263509 - DNA, 13 bp, Artificial Sequence
  Oligonucleotide for detection of SNP TSC0063889
ttttttgaagtat

SEQ ID NO: 263510 - DNA, 13 bp, Artificial Sequence
  Oligonucleotide for detection of SNP TSC0063889
atacttcaaaaaa

SEQ ID NO: 263511 - DNA, 13 bp, Artificial Sequence
  Oligonucleotide for detection of SNP TSC0063889
tttttcgaagtat

SEQ ID NO: 263512 - DNA, 13 bp, Artificial Sequence
  Oligonucleotide for detection of SNP TSC0063889
atacttcgaaaaa

SEQ ID NO: 263513 - DNA, 13 bp, Artificial Sequence
  Oligonucleotide for detection of SNP TSC0063889
atattttgagagg

SEQ ID NO: 263514 - DNA, 13 bp, Artificial Sequence
  Oligonucleotide for detection of SNP TSC0063889
cctctcaaaatat

SEQ ID NO: 263515 - DNA, 13 bp, Artificial Sequence
  Oligonucleotide for detection of SNP TSC0063889
atatttcgagagg

SEQ ID NO: 263516 - DNA, 13 bp, Artificial Sequence
  Oligonucleotide for detection of SNP TSC0063889
cctctcgaaatat

SEQ ID NO: 263517 - DNA, 13 bp, Artificial Sequence
  Oligonucleotide for detection of SNP TSC0063890
tgatttaatagta

SEQ ID NO: 263518 - DNA, 13 bp, Artificial Sequence
  Oligonucleotide for detection of SNP TSC0063890
tactattaaatca

SEQ ID NO: 263519 - DNA, 13 bp, Artificial Sequence
  Oligonucleotide for detection of SNP TSC0063890
tgatttgatagta

SEQ ID NO: 263520 - DNA, 13 bp, Artificial Sequence
  Oligonucleotide for detection of SNP TSC0063890
tactatcaaatca

SEQ ID NO: 263521 - DNA, 13 bp, Artificial Sequence
  Oligonucleotide for detection of SNP TSC0063890
tgattcgatagta

SEQ ID NO: 263522 - DNA, 13 bp, Artificial Sequence
  Oligonucleotide for detection of SNP TSC0063890
tactatcgaatca

SEQ ID NO: 263523 - DNA, 13 bp, Artificial Sequence
  Oligonucleotide for detection of SNP TSC0063890
tattattgaatta

SEQ ID NO: 263524 - DNA, 13 bp, Artificial Sequence
  Oligonucleotide for detection of SNP TSC0063890
taattcaataata

SEQ ID NO: 263525 - DNA, 13 bp, Artificial Sequence
  Oligonucleotide for detection of SNP TSC0063890
tattatcgaatta

SEQ ID NO: 263526 - DNA, 13 bp, Artificial Sequence
  Oligonucleotide for detection of SNP TSC0063890
taattcgataata

SEQ ID NO: 263527 - DNA, 13 bp, Artificial Sequence
  Oligonucleotide for detection of SNP TSC0063891
taaagtattgaga

SEQ ID NO: 263528 - DNA, 13 bp, Artificial Sequence
  Oligonucleotide for detection of SNP TSC0063891
tctcaatacttta

SEQ ID NO: 263529 - DNA, 13 bp, Artificial Sequence
  Oligonucleotide for detection of SNP TSC0063891
taaagtgttgaga

SEQ ID NO: 263530 - DNA, 13 bp, Artificial Sequence
  Oligonucleotide for detection of SNP TSC0063891
tctcaacacttta

SEQ ID NO: 263531 - DNA, 13 bp, Artificial Sequence
  Oligonucleotide for detection of SNP TSC0063893
tgttataaattag

SEQ ID NO: 263532 - DNA, 13 bp, Artificial Sequence
  Oligonucleotide for detection of SNP TSC0063893
ctaatttataaca

SEQ ID NO: 263533 - DNA, 13 bp, Artificial Sequence
  Oligonucleotide for detection of SNP TSC0063893
tgttattaattag

SEQ ID NO: 263534 - DNA, 13 bp, Artificial Sequence
  Oligonucleotide for detection of SNP TSC0063893
ctaattaataaca

SEQ ID NO: 263535 - DNA, 13 bp, Artificial Sequence
  Oligonucleotide for detection of SNP TSC0063893
ttagtttatgata

SEQ ID NO: 263536 - DNA, 13 bp, Artificial Sequence
  Oligonucleotide for detection of SNP TSC0063893
tatcataaactaa

SEQ ID NO: 263537 - DNA, 13 bp, Artificial Sequence
  Oligonucleotide for detection of SNP TSC0063893
ttagttaatgata

SEQ ID NO: 263538 - DNA, 13 bp, Artificial Sequence
  Oligonucleotide for detection of SNP TSC0063893
tatcattaactaa

SEQ ID NO: 263539 - DNA, 13 bp, Artificial Sequence
  Oligonucleotide for detection of SNP TSC0063894
gtatttaataggt

SEQ ID NO: 263540 - DNA, 13 bp, Artificial Sequence
  Oligonucleotide for detection of SNP TSC0063894
acctattaaatac

SEQ ID NO: 263541 - DNA, 13 bp, Artificial Sequence
  Oligonucleotide for detection of SNP TSC0063894
gtatttgataggt

SEQ ID NO: 263542 - DNA, 13 bp, Artificial Sequence
  Oligonucleotide for detection of SNP TSC0063894
acctatcaaatac

SEQ ID NO: 263543 - DNA, 13 bp, Artificial Sequence
  Oligonucleotide for detection of SNP TSC0063894
gtattcgataggt

SEQ ID NO: 263544 - DNA, 13 bp, Artificial Sequence
  Oligonucleotide for detection of SNP TSC0063894
acctatcgaatac

SEQ ID NO: 263545 - DNA, 13 bp, Artificial Sequence
  Oligonucleotide for detection of SNP TSC0063894
atttatcggatgy

SEQ ID NO: 263546 - DNA, 13 bp, Artificial Sequence
  Oligonucleotide for detection of SNP TSC0063894
rcatccgataaat

SEQ ID NO: 263547 - DNA, 13 bp, Artificial Sequence
  Oligonucleotide for detection of SNP TSC0063895
ggttagtaatgtt

SEQ ID NO: 263548 - DNA, 13 bp, Artificial Sequence
  Oligonucleotide for detection of SNP TSC0063895
aacattactaacc

SEQ ID NO: 263549 - DNA, 13 bp, Artificial Sequence
  Oligonucleotide for detection of SNP TSC0063895
ggttaggaatgtt

SEQ ID NO: 263550 - DNA, 13 bp, Artificial Sequence
  Oligonucleotide for detection of SNP TSC0063895
aacattcctaacc

SEQ ID NO: 263551 - DNA, 13 bp, Artificial Sequence
  Oligonucleotide for detection of SNP TSC0063895
aatattattggty

SEQ ID NO: 263552 - DNA, 13 bp, Artificial Sequence
  Oligonucleotide for detection of SNP TSC0063895
raccaataatatt

SEQ ID NO: 263553 - DNA, 13 bp, Artificial Sequence
  Oligonucleotide for detection of SNP TSC0063895
aatatttttggty

SEQ ID NO: 263554 - DNA, 13 bp, Artificial Sequence
  Oligonucleotide for detection of SNP TSC0063895
raccaaaaatatt

SEQ ID NO: 263555 - DNA, 13 bp, Artificial Sequence
  Oligonucleotide for detection of SNP TSC0063896
taggttattttgt

SEQ ID NO: 263556 - DNA, 13 bp, Artificial Sequence
  Oligonucleotide for detection of SNP TSC0063896
acaaaataaccta

SEQ ID NO: 263557 - DNA, 13 bp, Artificial Sequence
  Oligonucleotide for detection of SNP TSC0063896
taggtttttttgt

SEQ ID NO: 263558 - DNA, 13 bp, Artificial Sequence
  Oligonucleotide for detection of SNP TSC0063896
acaaaaaaaccta

SEQ ID NO: 263559 - DNA, 13 bp, Artificial Sequence
  Oligonucleotide for detection of SNP TSC0063896
ataagataattta

SEQ ID NO: 263560 - DNA, 13 bp, Artificial Sequence
  Oligonucleotide for detection of SNP TSC0063896
taaattatcttat

SEQ ID NO: 263561 - DNA, 13 bp, Artificial Sequence
  Oligonucleotide for detection of SNP TSC0063896
ataagagaattta

SEQ ID NO: 263562 - DNA, 13 bp, Artificial Sequence
  Oligonucleotide for detection of SNP TSC0063896
taaattctcttat

SEQ ID NO: 263563 - DNA, 13 bp, Artificial Sequence
  Oligonucleotide for detection of SNP TSC0010360
tatggtaaggtty

SEQ ID NO: 263564 - DNA, 13 bp, Artificial Sequence
  Oligonucleotide for detection of SNP TSC0010360
raaccttaccata

SEQ ID NO: 263565 - DNA, 13 bp, Artificial Sequence
  Oligonucleotide for detection of SNP TSC0010360
tatggtgaggtty

SEQ ID NO: 263566 - DNA, 13 bp, Artificial Sequence
  Oligonucleotide for detection of SNP TSC0010360
raacctcaccata

SEQ ID NO: 263567 - DNA, 13 bp, Artificial Sequence
  Oligonucleotide for detection of SNP TSC0063898
tagattatatgaa

SEQ ID NO: 263568 - DNA, 13 bp, Artificial Sequence
  Oligonucleotide for detection of SNP TSC0063898
ttcatataatcta

SEQ ID NO: 263569 - DNA, 13 bp, Artificial Sequence
  Oligonucleotide for detection of SNP TSC0063898
tagattgtatgaa

SEQ ID NO: 263570 - DNA, 13 bp, Artificial Sequence
  Oligonucleotide for detection of SNP TSC0063898
ttcatacaatcta

SEQ ID NO: 263571 - DNA, 13 bp, Artificial Sequence
  Oligonucleotide for detection of SNP TSC0063899
tgaatgatagtaa

SEQ ID NO: 263572 - DNA, 13 bp, Artificial Sequence
  Oligonucleotide for detection of SNP TSC0063899
ttactatcattca

SEQ ID NO: 263573 - DNA, 13 bp, Artificial Sequence
  Oligonucleotide for detection of SNP TSC0063899
tgaatgttagtaa

SEQ ID NO: 263574 - DNA, 13 bp, Artificial Sequence
  Oligonucleotide for detection of SNP TSC0063899
ttactaacattca

SEQ ID NO: 263575 - DNA, 13 bp, Artificial Sequence
  Oligonucleotide for detection of SNP TSC0063899
ttgttgttattta

SEQ ID NO: 263576 - DNA, 13 bp, Artificial Sequence
  Oligonucleotide for detection of SNP TSC0063899
taaataacaacaa

SEQ ID NO: 263577 - DNA, 13 bp, Artificial Sequence
  Oligonucleotide for detection of SNP TSC0063899
ttgttggtattta

SEQ ID NO: 263578 - DNA, 13 bp, Artificial Sequence
  Oligonucleotide for detection of SNP TSC0063899
taaataccaacaa

SEQ ID NO: 263579 - DNA, 13 bp, Artificial Sequence
  Oligonucleotide for detection of SNP TSC0063900
gattttattggga

SEQ ID NO: 263580 - DNA, 13 bp, Artificial Sequence
  Oligonucleotide for detection of SNP TSC0063900
tcccaataaaatc

SEQ ID NO: 263581 - DNA, 13 bp, Artificial Sequence
  Oligonucleotide for detection of SNP TSC0063900
gattttgttggga

SEQ ID NO: 263582 - DNA, 13 bp, Artificial Sequence
  Oligonucleotide for detection of SNP TSC0063900
tcccaacaaaatc

SEQ ID NO: 263583 - DNA, 13 bp, Artificial Sequence
  Oligonucleotide for detection of SNP TSC0063901
aattattggaaat

SEQ ID NO: 263584 - DNA, 13 bp, Artificial Sequence
  Oligonucleotide for detection of SNP TSC0063901
atttccaataatt

SEQ ID NO: 263585 - DNA, 13 bp, Artificial Sequence
  Oligonucleotide for detection of SNP TSC0063901
aattatcggaaat

SEQ ID NO: 263586 - DNA, 13 bp, Artificial Sequence
  Oligonucleotide for detection of SNP TSC0063901
atttccgataatt

SEQ ID NO: 263587 - DNA, 13 bp, Artificial Sequence
  Oligonucleotide for detection of SNP TSC0063901
attttcgatgatt

SEQ ID NO: 263588 - DNA, 13 bp, Artificial Sequence
  Oligonucleotide for detection of SNP TSC0063901
aatcatcgaaaat

SEQ ID NO: 263589 - DNA, 13 bp, Artificial Sequence
  Oligonucleotide for detection of SNP TSC0063902
ataaattggttat

SEQ ID NO: 263590 - DNA, 13 bp, Artificial Sequence
  Oligonucleotide for detection of SNP TSC0063902
ataaccaatttat

SEQ ID NO: 263591 - DNA, 13 bp, Artificial Sequence
  Oligonucleotide for detection of SNP TSC0063902
ataaatgggttat

SEQ ID NO: 263592 - DNA, 13 bp, Artificial Sequence
  Oligonucleotide for detection of SNP TSC0063902
ataacccatttat

SEQ ID NO: 263593 - DNA, 13 bp, Artificial Sequence
  Oligonucleotide for detection of SNP TSC0063902
ataaatcggttat

SEQ ID NO: 263594 - DNA, 13 bp, Artificial Sequence
  Oligonucleotide for detection of SNP TSC0063902
ataaccgatttat

SEQ ID NO: 263595 - DNA, 13 bp, Artificial Sequence
  Oligonucleotide for detection of SNP TSC0063902
atggttgatttgt

SEQ ID NO: 263596 - DNA, 13 bp, Artificial Sequence
  Oligonucleotide for detection of SNP TSC0063902
acaaatcaaccat

SEQ ID NO: 263597 - DNA, 13 bp, Artificial Sequence
  Oligonucleotide for detection of SNP TSC0063902
atggttaatttgt

SEQ ID NO: 263598 - DNA, 13 bp, Artificial Sequence
  Oligonucleotide for detection of SNP TSC0063902
acaaattaaccat

SEQ ID NO: 263599 - DNA, 13 bp, Artificial Sequence
  Oligonucleotide for detection of SNP TSC0063902
atggtttatttgt

SEQ ID NO: 263600 - DNA, 13 bp, Artificial Sequence
  Oligonucleotide for detection of SNP TSC0063902
acaaataaaccat

SEQ ID NO: 263601 - DNA, 13 bp, Artificial Sequence
  Oligonucleotide for detection of SNP TSC0063902
atggtcgatttgt

SEQ ID NO: 263602 - DNA, 13 bp, Artificial Sequence
  Oligonucleotide for detection of SNP TSC0063902
acaaatcgaccat

SEQ ID NO: 263603 - DNA, 13 bp, Artificial Sequence
  Oligonucleotide for detection of SNP TSC0063903
ttaaggttttaga

SEQ ID NO: 263604 - DNA, 13 bp, Artificial Sequence
  Oligonucleotide for detection of SNP TSC0063903
tctaaaaccttaa

SEQ ID NO: 263605 - DNA, 13 bp, Artificial Sequence
  Oligonucleotide for detection of SNP TSC0063903
ttaagggtttaga

SEQ ID NO: 263606 - DNA, 13 bp, Artificial Sequence
  Oligonucleotide for detection of SNP TSC0063903
tctaaacccttaa

SEQ ID NO: 263607 - DNA, 13 bp, Artificial Sequence
  Oligonucleotide for detection of SNP TSC0005425
ttaataatgagtt

SEQ ID NO: 263608 - DNA, 13 bp, Artificial Sequence
  Oligonucleotide for detection of SNP TSC0005425
aactcattattaa

SEQ ID NO: 263609 - DNA, 13 bp, Artificial Sequence
  Oligonucleotide for detection of SNP TSC0005425
ttaatagtgagtt

SEQ ID NO: 263610 - DNA, 13 bp, Artificial Sequence
  Oligonucleotide for detection of SNP TSC0005425
aactcactattaa

SEQ ID NO: 263611 - DNA, 13 bp, Artificial Sequence
  Oligonucleotide for detection of SNP TSC0063911
tgaaattgtaaga

SEQ ID NO: 263612 - DNA, 13 bp, Artificial Sequence
  Oligonucleotide for detection of SNP TSC0063911
tcttacaatttca

SEQ ID NO: 263613 - DNA, 13 bp, Artificial Sequence
  Oligonucleotide for detection of SNP TSC0063911
tgaaatcgtaaga

SEQ ID NO: 263614 - DNA, 13 bp, Artificial Sequence
  Oligonucleotide for detection of SNP TSC0063911
tcttacgatttca

SEQ ID NO: 263615 - DNA, 13 bp, Artificial Sequence
  Oligonucleotide for detection of SNP TSC0063912
aaatgataggatt

SEQ ID NO: 263616 - DNA, 13 bp, Artificial Sequence
  Oligonucleotide for detection of SNP TSC0063912
aatcctatcattt

SEQ ID NO: 263617 - DNA, 13 bp, Artificial Sequence
  Oligonucleotide for detection of SNP TSC0063912
aaatgagaggatt

SEQ ID NO: 263618 - DNA, 13 bp, Artificial Sequence
  Oligonucleotide for detection of SNP TSC0063912
aatcctctcattt

SEQ ID NO: 263619 - DNA, 13 bp, Artificial Sequence
  Oligonucleotide for detection of SNP TSC0063913
atatgtattagtt

SEQ ID NO: 263620 - DNA, 13 bp, Artificial Sequence
  Oligonucleotide for detection of SNP TSC0063913
aactaatacatat

SEQ ID NO: 263621 - DNA, 13 bp, Artificial Sequence
  Oligonucleotide for detection of SNP TSC0063913
atatgtgttagtt

SEQ ID NO: 263622 - DNA, 13 bp, Artificial Sequence
  Oligonucleotide for detection of SNP TSC0063913
aactaacacatat

SEQ ID NO: 263623 - DNA, 13 bp, Artificial Sequence
  Oligonucleotide for detection of SNP TSC0063913
atacgtattagtt

SEQ ID NO: 263624 - DNA, 13 bp, Artificial Sequence
  Oligonucleotide for detection of SNP TSC0063913
aactaatacgtat

SEQ ID NO: 263625 - DNA, 13 bp, Artificial Sequence
  Oligonucleotide for detection of SNP TSC0063913
atacgtgttagtt

SEQ ID NO: 263626 - DNA, 13 bp, Artificial Sequence
  Oligonucleotide for detection of SNP TSC0063913
aactaacacgtat

SEQ ID NO: 263627 - DNA, 13 bp, Artificial Sequence
  Oligonucleotide for detection of SNP TSC0063913
atatgcgttagtt

SEQ ID NO: 263628 - DNA, 13 bp, Artificial Sequence
  Oligonucleotide for detection of SNP TSC0063913
aactaacgcatat

SEQ ID NO: 263629 - DNA, 13 bp, Artificial Sequence
  Oligonucleotide for detection of SNP TSC0063913
atacgcgttagtt

SEQ ID NO: 263630 - DNA, 13 bp, Artificial Sequence
  Oligonucleotide for detection of SNP TSC0063913
aactaacgcgtat

SEQ ID NO: 263631 - DNA, 13 bp, Artificial Sequence
  Oligonucleotide for detection of SNP TSC0063913
agttaatgtgtgt

SEQ ID NO: 263632 - DNA, 13 bp, Artificial Sequence
  Oligonucleotide for detection of SNP TSC0063913
acacacattaact

SEQ ID NO: 263633 - DNA, 13 bp, Artificial Sequence
  Oligonucleotide for detection of SNP TSC0063913
agttaatgcgtgt

SEQ ID NO: 263634 - DNA, 13 bp, Artificial Sequence
  Oligonucleotide for detection of SNP TSC0063913
acacgcattaact

SEQ ID NO: 263635 - DNA, 13 bp, Artificial Sequence
  Oligonucleotide for detection of SNP TSC0063913
agttaacgtgtgt

SEQ ID NO: 263636 - DNA, 13 bp, Artificial Sequence
  Oligonucleotide for detection of SNP TSC0063913
acacacgttaact

SEQ ID NO: 263637 - DNA, 13 bp, Artificial Sequence
  Oligonucleotide for detection of SNP TSC0063913
agttaacgcgtgt

SEQ ID NO: 263638 - DNA, 13 bp, Artificial Sequence
  Oligonucleotide for detection of SNP TSC0063913
acacgcgttaact

SEQ ID NO: 263639 - DNA, 13 bp, Artificial Sequence
  Oligonucleotide for detection of SNP TSC0063914
tttaaagttaaat

SEQ ID NO: 263640 - DNA, 13 bp, Artificial Sequence
  Oligonucleotide for detection of SNP TSC0063914
atttaactttaaa

SEQ ID NO: 263641 - DNA, 13 bp, Artificial Sequence
  Oligonucleotide for detection of SNP TSC0063914
tttaaaattaaat

SEQ ID NO: 263642 - DNA, 13 bp, Artificial Sequence
  Oligonucleotide for detection of SNP TSC0063914
atttaattttaaa

SEQ ID NO: 263643 - DNA, 13 bp, Artificial Sequence
  Oligonucleotide for detection of SNP TSC0007686
attttaggaggga

SEQ ID NO: 263644 - DNA, 13 bp, Artificial Sequence
  Oligonucleotide for detection of SNP TSC0007686
tccctcctaaaat

SEQ ID NO: 263645 - DNA, 13 bp, Artificial Sequence
  Oligonucleotide for detection of SNP TSC0007686
attttaagaggga

SEQ ID NO: 263646 - DNA, 13 bp, Artificial Sequence
  Oligonucleotide for detection of SNP TSC0007686
tccctcttaaaat

SEQ ID NO: 263647 - DNA, 13 bp, Artificial Sequence
  Oligonucleotide for detection of SNP TSC0063915
ttatttagttatt

SEQ ID NO: 263648 - DNA, 13 bp, Artificial Sequence
  Oligonucleotide for detection of SNP TSC0063915
aataactaaataa

SEQ ID NO: 263649 - DNA, 13 bp, Artificial Sequence
  Oligonucleotide for detection of SNP TSC0063915
agtgattaggtga

SEQ ID NO: 263650 - DNA, 13 bp, Artificial Sequence
  Oligonucleotide for detection of SNP TSC0063915
tcacctaatcact

SEQ ID NO: 263651 - DNA, 13 bp, Artificial Sequence
  Oligonucleotide for detection of SNP TSC0063915
agtgatgaggtga

SEQ ID NO: 263652 - DNA, 13 bp, Artificial Sequence
  Oligonucleotide for detection of SNP TSC0063915
tcacctcatcact

SEQ ID NO: 263653 - DNA, 13 bp, Artificial Sequence
  Oligonucleotide for detection of SNP TSC0063915
agtgacgaggtga

SEQ ID NO: 263654 - DNA, 13 bp, Artificial Sequence
  Oligonucleotide for detection of SNP TSC0063915
tcacctcgtcact

SEQ ID NO: 263655 - DNA, 13 bp, Artificial Sequence
  Oligonucleotide for detection of SNP TSC0063916
gagaaatagatga

SEQ ID NO: 263656 - DNA, 13 bp, Artificial Sequence
  Oligonucleotide for detection of SNP TSC0063916
tcatctatttctc

SEQ ID NO: 263657 - DNA, 13 bp, Artificial Sequence
  Oligonucleotide for detection of SNP TSC0063916
gagaaagagatga

SEQ ID NO: 263658 - DNA, 13 bp, Artificial Sequence
  Oligonucleotide for detection of SNP TSC0063916
tcatctctttctc

SEQ ID NO: 263659 - DNA, 13 bp, Artificial Sequence
  Oligonucleotide for detection of SNP TSC0063918
tgttagataaaaa

SEQ ID NO: 263660 - DNA, 13 bp, Artificial Sequence
  Oligonucleotide for detection of SNP TSC0063918
tttttatctaaca

SEQ ID NO: 263661 - DNA, 13 bp, Artificial Sequence
  Oligonucleotide for detection of SNP TSC0063918
tgttaggtaaaaa

SEQ ID NO: 263662 - DNA, 13 bp, Artificial Sequence
  Oligonucleotide for detection of SNP TSC0063918
tttttacctaaca

SEQ ID NO: 263663 - DNA, 13 bp, Artificial Sequence
  Oligonucleotide for detection of SNP TSC0063919
ttttattaagatg

SEQ ID NO: 263664 - DNA, 13 bp, Artificial Sequence
  Oligonucleotide for detection of SNP TSC0063919
catcttaataaaa

SEQ ID NO: 263665 - DNA, 13 bp, Artificial Sequence
  Oligonucleotide for detection of SNP TSC0063919
ttttatgaagatg

SEQ ID NO: 263666 - DNA, 13 bp, Artificial Sequence
  Oligonucleotide for detection of SNP TSC0063919
catcttcataaaa

SEQ ID NO: 263667 - DNA, 13 bp, Artificial Sequence
  Oligonucleotide for detection of SNP TSC0063919
tattttgataaaa

SEQ ID NO: 263668 - DNA, 13 bp, Artificial Sequence
  Oligonucleotide for detection of SNP TSC0063919
ttttatcaaaata

SEQ ID NO: 263669 - DNA, 13 bp, Artificial Sequence
  Oligonucleotide for detection of SNP TSC0063919
tatttttataaaa

SEQ ID NO: 263670 - DNA, 13 bp, Artificial Sequence
  Oligonucleotide for detection of SNP TSC0063919
ttttataaaaata

SEQ ID NO: 263671 - DNA, 13 bp, Artificial Sequence
  Oligonucleotide for detection of SNP TSC0063920
gtttgtgaatttt

SEQ ID NO: 263672 - DNA, 13 bp, Artificial Sequence
  Oligonucleotide for detection of SNP TSC0063920
aaaattcacaaac

SEQ ID NO: 263673 - DNA, 13 bp, Artificial Sequence
  Oligonucleotide for detection of SNP TSC0063920
gtttgtaaatttt

SEQ ID NO: 263674 - DNA, 13 bp, Artificial Sequence
  Oligonucleotide for detection of SNP TSC0063920
aaaatttacaaac

SEQ ID NO: 263675 - DNA, 13 bp, Artificial Sequence
  Oligonucleotide for detection of SNP TSC0063921
ttattgaagtttt

SEQ ID NO: 263676 - DNA, 13 bp, Artificial Sequence
  Oligonucleotide for detection of SNP TSC0063921
aaaacttcaataa

SEQ ID NO: 263677 - DNA, 13 bp, Artificial Sequence
  Oligonucleotide for detection of SNP TSC0063921
ttattgtagtttt

SEQ ID NO: 263678 - DNA, 13 bp, Artificial Sequence
  Oligonucleotide for detection of SNP TSC0063921
aaaactacaataa

SEQ ID NO: 263679 - DNA, 13 bp, Artificial Sequence
  Oligonucleotide for detection of SNP TSC0063922
tatgtgttaatga

SEQ ID NO: 263680 - DNA, 13 bp, Artificial Sequence
  Oligonucleotide for detection of SNP TSC0063922
tcattaacacata

SEQ ID NO: 263681 - DNA, 13 bp, Artificial Sequence
  Oligonucleotide for detection of SNP TSC0063922
tatgtgataatga

SEQ ID NO: 263682 - DNA, 13 bp, Artificial Sequence
  Oligonucleotide for detection of SNP TSC0063922
tcattatcacata

SEQ ID NO: 263683 - DNA, 13 bp, Artificial Sequence
  Oligonucleotide for detection of SNP TSC0063923
aagtagattttaa

SEQ ID NO: 263684 - DNA, 13 bp, Artificial Sequence
  Oligonucleotide for detection of SNP TSC0063923
ttaaaatctactt

SEQ ID NO: 263685 - DNA, 13 bp, Artificial Sequence
  Oligonucleotide for detection of SNP TSC0063923
aagtaggttttaa

SEQ ID NO: 263686 - DNA, 13 bp, Artificial Sequence
  Oligonucleotide for detection of SNP TSC0063923
ttaaaacctactt

SEQ ID NO: 263687 - DNA, 13 bp, Artificial Sequence
  Oligonucleotide for detection of SNP TSC0063924
tttaggtgtagta

SEQ ID NO: 263688 - DNA, 13 bp, Artificial Sequence
  Oligonucleotide for detection of SNP TSC0063924
tactacacctaaa

SEQ ID NO: 263689 - DNA, 13 bp, Artificial Sequence
  Oligonucleotide for detection of SNP TSC0063924
tttaggcgtagta

SEQ ID NO: 263690 - DNA, 13 bp, Artificial Sequence
  Oligonucleotide for detection of SNP TSC0063924
tactacgcctaaa

SEQ ID NO: 263691 - DNA, 13 bp, Artificial Sequence
  Oligonucleotide for detection of SNP TSC0063924
tattgtgtttgga

SEQ ID NO: 263692 - DNA, 13 bp, Artificial Sequence
  Oligonucleotide for detection of SNP TSC0063924
tccaaacacaata

SEQ ID NO: 263693 - DNA, 13 bp, Artificial Sequence
  Oligonucleotide for detection of SNP TSC0063924
tattgtatttgga

SEQ ID NO: 263694 - DNA, 13 bp, Artificial Sequence
  Oligonucleotide for detection of SNP TSC0063924
tccaaatacaata

SEQ ID NO: 263695 - DNA, 13 bp, Artificial Sequence
  Oligonucleotide for detection of SNP TSC0063924
tattgcgtttgga

SEQ ID NO: 263696 - DNA, 13 bp, Artificial Sequence
  Oligonucleotide for detection of SNP TSC0063924
tccaaacgcaata

SEQ ID NO: 263697 - DNA, 13 bp, Artificial Sequence
  Oligonucleotide for detection of SNP TSC0008131
ttgagtatgtagg

SEQ ID NO: 263698 - DNA, 13 bp, Artificial Sequence
  Oligonucleotide for detection of SNP TSC0008131
cctacatactcaa

SEQ ID NO: 263699 - DNA, 13 bp, Artificial Sequence
  Oligonucleotide for detection of SNP TSC0008131
ttgagtgtgtagg

SEQ ID NO: 263700 - DNA, 13 bp, Artificial Sequence
  Oligonucleotide for detection of SNP TSC0008131
cctacacactcaa

SEQ ID NO: 263701 - DNA, 13 bp, Artificial Sequence
  Oligonucleotide for detection of SNP TSC0008131
ttgagcgtgtagg

SEQ ID NO: 263702 - DNA, 13 bp, Artificial Sequence
  Oligonucleotide for detection of SNP TSC0008131
cctacacgctcaa

SEQ ID NO: 263703 - DNA, 13 bp, Artificial Sequence
  Oligonucleotide for detection of SNP TSC0063927
atggtaagtatgy

SEQ ID NO: 263704 - DNA, 13 bp, Artificial Sequence
  Oligonucleotide for detection of SNP TSC0063927
rcatacttaccat

SEQ ID NO: 263705 - DNA, 13 bp, Artificial Sequence
  Oligonucleotide for detection of SNP TSC0063927
atggtaggtatgy

SEQ ID NO: 263706 - DNA, 13 bp, Artificial Sequence
  Oligonucleotide for detection of SNP TSC0063927
rcatacctaccat

SEQ ID NO: 263707 - DNA, 13 bp, Artificial Sequence
  Oligonucleotide for detection of SNP TSC0063928
aatgttgttataa

SEQ ID NO: 263708 - DNA, 13 bp, Artificial Sequence
  Oligonucleotide for detection of SNP TSC0063928
ttataacaacatt

SEQ ID NO: 263709 - DNA, 13 bp, Artificial Sequence
  Oligonucleotide for detection of SNP TSC0063928
aatgttattataa

SEQ ID NO: 263710 - DNA, 13 bp, Artificial Sequence
  Oligonucleotide for detection of SNP TSC0063928
ttataataacatt

SEQ ID NO: 263711 - DNA, 13 bp, Artificial Sequence
  Oligonucleotide for detection of SNP TSC0063929
agattttgggtgt

SEQ ID NO: 263712 - DNA, 13 bp, Artificial Sequence
  Oligonucleotide for detection of SNP TSC0063929
acacccaaaatct

SEQ ID NO: 263713 - DNA, 13 bp, Artificial Sequence
  Oligonucleotide for detection of SNP TSC0063929
agatttcgggtgt

SEQ ID NO: 263714 - DNA, 13 bp, Artificial Sequence
  Oligonucleotide for detection of SNP TSC0063929
acacccgaaatct

SEQ ID NO: 263715 - DNA, 13 bp, Artificial Sequence
  Oligonucleotide for detection of SNP TSC0063929
atattcgaaattt

SEQ ID NO: 263716 - DNA, 13 bp, Artificial Sequence
  Oligonucleotide for detection of SNP TSC0063929
aaatttcgaatat

SEQ ID NO: 263717 - DNA, 13 bp, Artificial Sequence
  Oligonucleotide for detection of SNP TSC0063930
ataagatgattta

SEQ ID NO: 263718 - DNA, 13 bp, Artificial Sequence
  Oligonucleotide for detection of SNP TSC0063930
taaatcatcttat

SEQ ID NO: 263719 - DNA, 13 bp, Artificial Sequence
  Oligonucleotide for detection of SNP TSC0063930
tgagtttttttat

SEQ ID NO: 263720 - DNA, 13 bp, Artificial Sequence
  Oligonucleotide for detection of SNP TSC0063930
ataaaaaaactca

SEQ ID NO: 263721 - DNA, 13 bp, Artificial Sequence
  Oligonucleotide for detection of SNP TSC0063931
tttggaattgtta

SEQ ID NO: 263722 - DNA, 13 bp, Artificial Sequence
  Oligonucleotide for detection of SNP TSC0063931
taacaattccaaa

SEQ ID NO: 263723 - DNA, 13 bp, Artificial Sequence
  Oligonucleotide for detection of SNP TSC0063931
tttggagttgtta

SEQ ID NO: 263724 - DNA, 13 bp, Artificial Sequence
  Oligonucleotide for detection of SNP TSC0063931
taacaactccaaa

SEQ ID NO: 263725 - DNA, 13 bp, Artificial Sequence
  Oligonucleotide for detection of SNP TSC0063932
tttattattaagy

SEQ ID NO: 263726 - DNA, 13 bp, Artificial Sequence
  Oligonucleotide for detection of SNP TSC0063932
rcttaataataaa

SEQ ID NO: 263727 - DNA, 13 bp, Artificial Sequence
  Oligonucleotide for detection of SNP TSC0063932
tttattgttaagy

SEQ ID NO: 263728 - DNA, 13 bp, Artificial Sequence
  Oligonucleotide for detection of SNP TSC0063932
rcttaacaataaa

SEQ ID NO: 263729 - DNA, 13 bp, Artificial Sequence
  Oligonucleotide for detection of SNP TSC0008685
aatgtttttatty

SEQ ID NO: 263730 - DNA, 13 bp, Artificial Sequence
  Oligonucleotide for detection of SNP TSC0008685
raataaaaacatt

SEQ ID NO: 263731 - DNA, 13 bp, Artificial Sequence
  Oligonucleotide for detection of SNP TSC0008685
aacgtttttatty

SEQ ID NO: 263732 - DNA, 13 bp, Artificial Sequence
  Oligonucleotide for detection of SNP TSC0008685
raataaaaacgtt

SEQ ID NO: 263733 - DNA, 13 bp, Artificial Sequence
  Oligonucleotide for detection of SNP TSC0008685
gagtgggaatgtt

SEQ ID NO: 263734 - DNA, 13 bp, Artificial Sequence
  Oligonucleotide for detection of SNP TSC0008685
aacattcccactc

SEQ ID NO: 263735 - DNA, 13 bp, Artificial Sequence
  Oligonucleotide for detection of SNP TSC0008685
gagtggtaatgtt

SEQ ID NO: 263736 - DNA, 13 bp, Artificial Sequence
  Oligonucleotide for detection of SNP TSC0008685
aacattaccactc

SEQ ID NO: 263737 - DNA, 13 bp, Artificial Sequence
  Oligonucleotide for detection of SNP TSC0008685
gagtgggaacgtt

SEQ ID NO: 263738 - DNA, 13 bp, Artificial Sequence
  Oligonucleotide for detection of SNP TSC0008685
aacgttcccactc

SEQ ID NO: 263739 - DNA, 13 bp, Artificial Sequence
  Oligonucleotide for detection of SNP TSC0008685
gagtggtaacgtt

SEQ ID NO: 263740 - DNA, 13 bp, Artificial Sequence
  Oligonucleotide for detection of SNP TSC0008685
aacgttaccactc

SEQ ID NO: 263741 - DNA, 13 bp, Artificial Sequence
  Oligonucleotide for detection of SNP TSC0063933
aaattttggtttt

SEQ ID NO: 263742 - DNA, 13 bp, Artificial Sequence
  Oligonucleotide for detection of SNP TSC0063933
aaaaccaaaattt

SEQ ID NO: 263743 - DNA, 13 bp, Artificial Sequence
  Oligonucleotide for detection of SNP TSC0063933
aaatttcggtttt

SEQ ID NO: 263744 - DNA, 13 bp, Artificial Sequence
  Oligonucleotide for detection of SNP TSC0063933
aaaaccgaaattt

SEQ ID NO: 263745 - DNA, 13 bp, Artificial Sequence
  Oligonucleotide for detection of SNP TSC0063933
agagttggggttt

SEQ ID NO: 263746 - DNA, 13 bp, Artificial Sequence
  Oligonucleotide for detection of SNP TSC0063933
aaaccccaactct

SEQ ID NO: 263747 - DNA, 13 bp, Artificial Sequence
  Oligonucleotide for detection of SNP TSC0063933
agagttagggttt

SEQ ID NO: 263748 - DNA, 13 bp, Artificial Sequence
  Oligonucleotide for detection of SNP TSC0063933
aaaccctaactct

SEQ ID NO: 263749 - DNA, 13 bp, Artificial Sequence
  Oligonucleotide for detection of SNP TSC0063933
agagtcggggttt

SEQ ID NO: 263750 - DNA, 13 bp, Artificial Sequence
  Oligonucleotide for detection of SNP TSC0063933
aaaccccgactct

SEQ ID NO: 263751 - DNA, 13 bp, Artificial Sequence
  Oligonucleotide for detection of SNP TSC0063935
agaaaaggatgtt

SEQ ID NO: 263752 - DNA, 13 bp, Artificial Sequence
  Oligonucleotide for detection of SNP TSC0063935
aacatccttttct

SEQ ID NO: 263753 - DNA, 13 bp, Artificial Sequence
  Oligonucleotide for detection of SNP TSC0063935
agaaaaagatgtt

SEQ ID NO: 263754 - DNA, 13 bp, Artificial Sequence
  Oligonucleotide for detection of SNP TSC0063935
aacatctttttct

SEQ ID NO: 263755 - DNA, 13 bp, Artificial Sequence
  Oligonucleotide for detection of SNP TSC0063936
aggtaagagagag

SEQ ID NO: 263756 - DNA, 13 bp, Artificial Sequence
  Oligonucleotide for detection of SNP TSC0063936
ctctctcttacct

SEQ ID NO: 263757 - DNA, 13 bp, Artificial Sequence
  Oligonucleotide for detection of SNP TSC0063936
aggtaatagagag

SEQ ID NO: 263758 - DNA, 13 bp, Artificial Sequence
  Oligonucleotide for detection of SNP TSC0063936
ctctctattacct

SEQ ID NO: 263759 - DNA, 13 bp, Artificial Sequence
  Oligonucleotide for detection of SNP TSC0009313
ttgttgtagtata

SEQ ID NO: 263760 - DNA, 13 bp, Artificial Sequence
  Oligonucleotide for detection of SNP TSC0009313
tatactacaacaa

SEQ ID NO: 263761 - DNA, 13 bp, Artificial Sequence
  Oligonucleotide for detection of SNP TSC0009313
ttgttggagtata

SEQ ID NO: 263762 - DNA, 13 bp, Artificial Sequence
  Oligonucleotide for detection of SNP TSC0009313
tatactccaacaa

SEQ ID NO: 263763 - DNA, 13 bp, Artificial Sequence
  Oligonucleotide for detection of SNP TSC0009313
tatattataataa

SEQ ID NO: 263764 - DNA, 13 bp, Artificial Sequence
  Oligonucleotide for detection of SNP TSC0009313
ttattataatata

SEQ ID NO: 263765 - DNA, 13 bp, Artificial Sequence
  Oligonucleotide for detection of SNP TSC0063940
gaggaggatagat

SEQ ID NO: 263766 - DNA, 13 bp, Artificial Sequence
  Oligonucleotide for detection of SNP TSC0063940
atctatcctcctc

SEQ ID NO: 263767 - DNA, 13 bp, Artificial Sequence
  Oligonucleotide for detection of SNP TSC0063940
gaggagaatagat

SEQ ID NO: 263768 - DNA, 13 bp, Artificial Sequence
  Oligonucleotide for detection of SNP TSC0063940
atctattctcctc

SEQ ID NO: 263769 - DNA, 13 bp, Artificial Sequence
  Oligonucleotide for detection of SNP TSC0063941
gtagataatattt

SEQ ID NO: 263770 - DNA, 13 bp, Artificial Sequence
  Oligonucleotide for detection of SNP TSC0063941
aaatattatctac

SEQ ID NO: 263771 - DNA, 13 bp, Artificial Sequence
  Oligonucleotide for detection of SNP TSC0063941
gtagattatattt

SEQ ID NO: 263772 - DNA, 13 bp, Artificial Sequence
  Oligonucleotide for detection of SNP TSC0063941
aaatataatctac

SEQ ID NO: 263773 - DNA, 13 bp, Artificial Sequence
  Oligonucleotide for detection of SNP TSC0063941
aaatattatttay

SEQ ID NO: 263774 - DNA, 13 bp, Artificial Sequence
  Oligonucleotide for detection of SNP TSC0063941
rtaaataatattt

SEQ ID NO: 263775 - DNA, 13 bp, Artificial Sequence
  Oligonucleotide for detection of SNP TSC0063941
aaatatgatttay

SEQ ID NO: 263776 - DNA, 13 bp, Artificial Sequence
  Oligonucleotide for detection of SNP TSC0063941
rtaaatcatattt

SEQ ID NO: 263777 - DNA, 13 bp, Artificial Sequence
  Oligonucleotide for detection of SNP TSC0063942
aagttagtaggat

SEQ ID NO: 263778 - DNA, 13 bp, Artificial Sequence
  Oligonucleotide for detection of SNP TSC0063942
atcctactaactt

SEQ ID NO: 263779 - DNA, 13 bp, Artificial Sequence
  Oligonucleotide for detection of SNP TSC0063942
aagttaataggat

SEQ ID NO: 263780 - DNA, 13 bp, Artificial Sequence
  Oligonucleotide for detection of SNP TSC0063942
atcctattaactt

SEQ ID NO: 263781 - DNA, 13 bp, Artificial Sequence
  Oligonucleotide for detection of SNP TSC0004750
gatgttgtgttat

SEQ ID NO: 263782 - DNA, 13 bp, Artificial Sequence
  Oligonucleotide for detection of SNP TSC0004750
ataacacaacatc

SEQ ID NO: 263783 - DNA, 13 bp, Artificial Sequence
  Oligonucleotide for detection of SNP TSC0004750
gatgttatgttat

SEQ ID NO: 263784 - DNA, 13 bp, Artificial Sequence
  Oligonucleotide for detection of SNP TSC0004750
ataacataacatc

SEQ ID NO: 263785 - DNA, 13 bp, Artificial Sequence
  Oligonucleotide for detection of SNP TSC0004750
gatgtcgtgttat

SEQ ID NO: 263786 - DNA, 13 bp, Artificial Sequence
  Oligonucleotide for detection of SNP TSC0004750
ataacacgacatc

SEQ ID NO: 263787 - DNA, 13 bp, Artificial Sequence
  Oligonucleotide for detection of SNP TSC0004751
gatttgtatgttt

SEQ ID NO: 263788 - DNA, 13 bp, Artificial Sequence
  Oligonucleotide for detection of SNP TSC0004751
aaacatacaaatc

SEQ ID NO: 263789 - DNA, 13 bp, Artificial Sequence
  Oligonucleotide for detection of SNP TSC0004751
gatttggatgttt

SEQ ID NO: 263790 - DNA, 13 bp, Artificial Sequence
  Oligonucleotide for detection of SNP TSC0004751
aaacatccaaatc

SEQ ID NO: 263791 - DNA, 13 bp, Artificial Sequence
  Oligonucleotide for detection of SNP TSC0004751
aggtatgtagaty

SEQ ID NO: 263792 - DNA, 13 bp, Artificial Sequence
  Oligonucleotide for detection of SNP TSC0004751
ratctacatacct

SEQ ID NO: 263793 - DNA, 13 bp, Artificial Sequence
  Oligonucleotide for detection of SNP TSC0004751
aggtatttagaty

SEQ ID NO: 263794 - DNA, 13 bp, Artificial Sequence
  Oligonucleotide for detection of SNP TSC0004751
ratctaaatacct

SEQ ID NO: 263795 - DNA, 13 bp, Artificial Sequence
  Oligonucleotide for detection of SNP TSC0063945
taaaggaaatgga

SEQ ID NO: 263796 - DNA, 13 bp, Artificial Sequence
  Oligonucleotide for detection of SNP TSC0063945
tccatttccttta

SEQ ID NO: 263797 - DNA, 13 bp, Artificial Sequence
  Oligonucleotide for detection of SNP TSC0063945
taaagggaatgga

SEQ ID NO: 263798 - DNA, 13 bp, Artificial Sequence
  Oligonucleotide for detection of SNP TSC0063945
tccattcccttta

SEQ ID NO: 263799 - DNA, 13 bp, Artificial Sequence
  Oligonucleotide for detection of SNP TSC0063946
tattttatattay

SEQ ID NO: 263800 - DNA, 13 bp, Artificial Sequence
  Oligonucleotide for detection of SNP TSC0063946
rtaatataaaata

SEQ ID NO: 263801 - DNA, 13 bp, Artificial Sequence
  Oligonucleotide for detection of SNP TSC0063946
tattttttattay

SEQ ID NO: 263802 - DNA, 13 bp, Artificial Sequence
  Oligonucleotide for detection of SNP TSC0063946
rtaataaaaaata

SEQ ID NO: 263803 - DNA, 13 bp, Artificial Sequence
  Oligonucleotide for detection of SNP TSC0063946
gtggtatggaatg

SEQ ID NO: 263804 - DNA, 13 bp, Artificial Sequence
  Oligonucleotide for detection of SNP TSC0063946
cattccataccac

SEQ ID NO: 263805 - DNA, 13 bp, Artificial Sequence
  Oligonucleotide for detection of SNP TSC0063946
gtggtagggaatg

SEQ ID NO: 263806 - DNA, 13 bp, Artificial Sequence
  Oligonucleotide for detection of SNP TSC0063946
cattccctaccac

SEQ ID NO: 263807 - DNA, 13 bp, Artificial Sequence
  Oligonucleotide for detection of SNP TSC0063947
atttattatatgy

SEQ ID NO: 263808 - DNA, 13 bp, Artificial Sequence
  Oligonucleotide for detection of SNP TSC0063947
rcatataataaat

SEQ ID NO: 263809 - DNA, 13 bp, Artificial Sequence
  Oligonucleotide for detection of SNP TSC0063947
atttatgatatgy

SEQ ID NO: 263810 - DNA, 13 bp, Artificial Sequence
  Oligonucleotide for detection of SNP TSC0063947
rcatatcataaat

SEQ ID NO: 263811 - DNA, 13 bp, Artificial Sequence
  Oligonucleotide for detection of SNP TSC0063947
atttacgatatgy

SEQ ID NO: 263812 - DNA, 13 bp, Artificial Sequence
  Oligonucleotide for detection of SNP TSC0063947
rcatatcgtaaat

SEQ ID NO: 263813 - DNA, 13 bp, Artificial Sequence
  Oligonucleotide for detection of SNP TSC0063947
gtatatagtaaat

SEQ ID NO: 263814 - DNA, 13 bp, Artificial Sequence
  Oligonucleotide for detection of SNP TSC0063947
atttactatatac

SEQ ID NO: 263815 - DNA, 13 bp, Artificial Sequence
  Oligonucleotide for detection of SNP TSC0063947
gtatattgtaaat

SEQ ID NO: 263816 - DNA, 13 bp, Artificial Sequence
  Oligonucleotide for detection of SNP TSC0063947
atttacaatatac

SEQ ID NO: 263817 - DNA, 13 bp, Artificial Sequence
  Oligonucleotide for detection of SNP TSC0063947
gtatatcgtaaat

SEQ ID NO: 263818 - DNA, 13 bp, Artificial Sequence
  Oligonucleotide for detection of SNP TSC0063947
atttacgatatac

SEQ ID NO: 263819 - DNA, 13 bp, Artificial Sequence
  Oligonucleotide for detection of SNP TSC0063950
gtgttgagtaatg

SEQ ID NO: 263820 - DNA, 13 bp, Artificial Sequence
  Oligonucleotide for detection of SNP TSC0063950
cattactcaacac

SEQ ID NO: 263821 - DNA, 13 bp, Artificial Sequence
  Oligonucleotide for detection of SNP TSC0063950
gtgttgggtaatg

SEQ ID NO: 263822 - DNA, 13 bp, Artificial Sequence
  Oligonucleotide for detection of SNP TSC0063950
cattacccaacac

SEQ ID NO: 263823 - DNA, 13 bp, Artificial Sequence
  Oligonucleotide for detection of SNP TSC0063953
tattattagtgta

SEQ ID NO: 263824 - DNA, 13 bp, Artificial Sequence
  Oligonucleotide for detection of SNP TSC0063953
tacactaataata

SEQ ID NO: 263825 - DNA, 13 bp, Artificial Sequence
  Oligonucleotide for detection of SNP TSC0063953
tattatgagtgta

SEQ ID NO: 263826 - DNA, 13 bp, Artificial Sequence
  Oligonucleotide for detection of SNP TSC0063953
tacactcataata

SEQ ID NO: 263827 - DNA, 13 bp, Artificial Sequence
  Oligonucleotide for detection of SNP TSC0063953
tgtatttatgata

SEQ ID NO: 263828 - DNA, 13 bp, Artificial Sequence
  Oligonucleotide for detection of SNP TSC0063953
tatcataaataca

SEQ ID NO: 263829 - DNA, 13 bp, Artificial Sequence
  Oligonucleotide for detection of SNP TSC0063954
taggtgaggagtt

SEQ ID NO: 263830 - DNA, 13 bp, Artificial Sequence
  Oligonucleotide for detection of SNP TSC0063954
aactcctcaccta

SEQ ID NO: 263831 - DNA, 13 bp, Artificial Sequence
  Oligonucleotide for detection of SNP TSC0063954
taggtgtggagtt

SEQ ID NO: 263832 - DNA, 13 bp, Artificial Sequence
  Oligonucleotide for detection of SNP TSC0063954
aactccacaccta

SEQ ID NO: 263833 - DNA, 13 bp, Artificial Sequence
  Oligonucleotide for detection of SNP TSC0063954
taggcgaggagtt

SEQ ID NO: 263834 - DNA, 13 bp, Artificial Sequence
  Oligonucleotide for detection of SNP TSC0063954
aactcctcgccta

SEQ ID NO: 263835 - DNA, 13 bp, Artificial Sequence
  Oligonucleotide for detection of SNP TSC0063954
taggcgtggagtt

SEQ ID NO: 263836 - DNA, 13 bp, Artificial Sequence
  Oligonucleotide for detection of SNP TSC0063954
aactccacgccta

SEQ ID NO: 263837 - DNA, 13 bp, Artificial Sequence
  Oligonucleotide for detection of SNP TSC0063954
agttttatgtttg

SEQ ID NO: 263838 - DNA, 13 bp, Artificial Sequence
  Oligonucleotide for detection of SNP TSC0063954
caaacataaaact

SEQ ID NO: 263839 - DNA, 13 bp, Artificial Sequence
  Oligonucleotide for detection of SNP TSC0063954
agtttttcgtttg

SEQ ID NO: 263840 - DNA, 13 bp, Artificial Sequence
  Oligonucleotide for detection of SNP TSC0063954
caaacgaaaaact

SEQ ID NO: 263841 - DNA, 13 bp, Artificial Sequence
  Oligonucleotide for detection of SNP TSC0063954
agttttacgtttg

SEQ ID NO: 263842 - DNA, 13 bp, Artificial Sequence
  Oligonucleotide for detection of SNP TSC0063954
caaacgtaaaact

SEQ ID NO: 263843 - DNA, 13 bp, Artificial Sequence
  Oligonucleotide for detection of SNP TSC0004946
aaagtaattgtag

SEQ ID NO: 263844 - DNA, 13 bp, Artificial Sequence
  Oligonucleotide for detection of SNP TSC0004946
ctacaattacttt

SEQ ID NO: 263845 - DNA, 13 bp, Artificial Sequence
  Oligonucleotide for detection of SNP TSC0004946
aaagtatttgtag

SEQ ID NO: 263846 - DNA, 13 bp, Artificial Sequence
  Oligonucleotide for detection of SNP TSC0004946
ctacaaatacttt

SEQ ID NO: 263847 - DNA, 13 bp, Artificial Sequence
  Oligonucleotide for detection of SNP TSC0004946
ttgtagttgtttt

SEQ ID NO: 263848 - DNA, 13 bp, Artificial Sequence
  Oligonucleotide for detection of SNP TSC0004946
aaaacaactacaa

SEQ ID NO: 263849 - DNA, 13 bp, Artificial Sequence
  Oligonucleotide for detection of SNP TSC0004946
ttgtaggtgtttt

SEQ ID NO: 263850 - DNA, 13 bp, Artificial Sequence
  Oligonucleotide for detection of SNP TSC0004946
aaaacacctacaa

SEQ ID NO: 263851 - DNA, 13 bp, Artificial Sequence
  Oligonucleotide for detection of SNP TSC0004728
gagtttaggttta

SEQ ID NO: 263852 - DNA, 13 bp, Artificial Sequence
  Oligonucleotide for detection of SNP TSC0004728
taaacctaaactc

SEQ ID NO: 263853 - DNA, 13 bp, Artificial Sequence
  Oligonucleotide for detection of SNP TSC0004728
gagtttgggttta

SEQ ID NO: 263854 - DNA, 13 bp, Artificial Sequence
  Oligonucleotide for detection of SNP TSC0004728
taaacccaaactc

SEQ ID NO: 263855 - DNA, 13 bp, Artificial Sequence
  Oligonucleotide for detection of SNP TSC0063955
taaattgaagaty

SEQ ID NO: 263856 - DNA, 13 bp, Artificial Sequence
  Oligonucleotide for detection of SNP TSC0063955
ratcttcaattta

SEQ ID NO: 263857 - DNA, 13 bp, Artificial Sequence
  Oligonucleotide for detection of SNP TSC0063955
taaattaaagaty

SEQ ID NO: 263858 - DNA, 13 bp, Artificial Sequence
  Oligonucleotide for detection of SNP TSC0063955
ratctttaattta

SEQ ID NO: 263859 - DNA, 13 bp, Artificial Sequence
  Oligonucleotide for detection of SNP TSC0004681
taagaaattggaa

SEQ ID NO: 263860 - DNA, 13 bp, Artificial Sequence
  Oligonucleotide for detection of SNP TSC0004681
ttccaatttctta

SEQ ID NO: 263861 - DNA, 13 bp, Artificial Sequence
  Oligonucleotide for detection of SNP TSC0004681
taagaagttggaa

SEQ ID NO: 263862 - DNA, 13 bp, Artificial Sequence
  Oligonucleotide for detection of SNP TSC0004681
ttccaacttctta

SEQ ID NO: 263863 - DNA, 13 bp, Artificial Sequence
  Oligonucleotide for detection of SNP TSC0010867
aaagttatagaga

SEQ ID NO: 263864 - DNA, 13 bp, Artificial Sequence
  Oligonucleotide for detection of SNP TSC0010867
tctctataacttt

SEQ ID NO: 263865 - DNA, 13 bp, Artificial Sequence
  Oligonucleotide for detection of SNP TSC0010867
aaagttgtagaga

SEQ ID NO: 263866 - DNA, 13 bp, Artificial Sequence
  Oligonucleotide for detection of SNP TSC0010867
tctctacaacttt

SEQ ID NO: 263867 - DNA, 13 bp, Artificial Sequence
  Oligonucleotide for detection of SNP TSC0010867
aaagtcgtagaga

SEQ ID NO: 263868 - DNA, 13 bp, Artificial Sequence
  Oligonucleotide for detection of SNP TSC0010867
tctctacgacttt

SEQ ID NO: 263869 - DNA, 13 bp, Artificial Sequence
  Oligonucleotide for detection of SNP TSC0063957
aaaatagtttaty

SEQ ID NO: 263870 - DNA, 13 bp, Artificial Sequence
  Oligonucleotide for detection of SNP TSC0063957
rataaactatttt

SEQ ID NO: 263871 - DNA, 13 bp, Artificial Sequence
  Oligonucleotide for detection of SNP TSC0063957
aaaataatttaty

SEQ ID NO: 263872 - DNA, 13 bp, Artificial Sequence
  Oligonucleotide for detection of SNP TSC0063957
rataaattatttt

SEQ ID NO: 263873 - DNA, 13 bp, Artificial Sequence
  Oligonucleotide for detection of SNP TSC0063960
gaagaggtgtggg

SEQ ID NO: 263874 - DNA, 13 bp, Artificial Sequence
  Oligonucleotide for detection of SNP TSC0063960
cccacacctcttc

SEQ ID NO: 263875 - DNA, 13 bp, Artificial Sequence
  Oligonucleotide for detection of SNP TSC0063960
gaagagatgtggg

SEQ ID NO: 263876 - DNA, 13 bp, Artificial Sequence
  Oligonucleotide for detection of SNP TSC0063960
cccacatctcttc

SEQ ID NO: 263877 - DNA, 13 bp, Artificial Sequence
  Oligonucleotide for detection of SNP TSC0063961
aatttttttggty

SEQ ID NO: 263878 - DNA, 13 bp, Artificial Sequence
  Oligonucleotide for detection of SNP TSC0063961
raccaaaaaaatt

SEQ ID NO: 263879 - DNA, 13 bp, Artificial Sequence
  Oligonucleotide for detection of SNP TSC0063961
aattttgttggty

SEQ ID NO: 263880 - DNA, 13 bp, Artificial Sequence
  Oligonucleotide for detection of SNP TSC0063961
raccaacaaaatt

SEQ ID NO: 263881 - DNA, 13 bp, Artificial Sequence
  Oligonucleotide for detection of SNP TSC0063961
ggttaaaaaggtt

SEQ ID NO: 263882 - DNA, 13 bp, Artificial Sequence
  Oligonucleotide for detection of SNP TSC0063961
aacctttttaacc

SEQ ID NO: 263883 - DNA, 13 bp, Artificial Sequence
  Oligonucleotide for detection of SNP TSC0063961
ggttaataaggtt

SEQ ID NO: 263884 - DNA, 13 bp, Artificial Sequence
  Oligonucleotide for detection of SNP TSC0063961
aaccttattaacc

SEQ ID NO: 263885 - DNA, 13 bp, Artificial Sequence
  Oligonucleotide for detection of SNP TSC0005727
agtttgggtaata

SEQ ID NO: 263886 - DNA, 13 bp, Artificial Sequence
  Oligonucleotide for detection of SNP TSC0005727
tattacccaaact

SEQ ID NO: 263887 - DNA, 13 bp, Artificial Sequence
  Oligonucleotide for detection of SNP TSC0005727
agtttgagtaata

SEQ ID NO: 263888 - DNA, 13 bp, Artificial Sequence
  Oligonucleotide for detection of SNP TSC0005727
tattactcaaact

SEQ ID NO: 263889 - DNA, 13 bp, Artificial Sequence
  Oligonucleotide for detection of SNP TSC0005728
tgggttgggtaty

SEQ ID NO: 263890 - DNA, 13 bp, Artificial Sequence
  Oligonucleotide for detection of SNP TSC0005728
ratacccaaccca

SEQ ID NO: 263891 - DNA, 13 bp, Artificial Sequence
  Oligonucleotide for detection of SNP TSC0005728
tgggttaggtaty

SEQ ID NO: 263892 - DNA, 13 bp, Artificial Sequence
  Oligonucleotide for detection of SNP TSC0005728
ratacctaaccca

SEQ ID NO: 263893 - DNA, 13 bp, Artificial Sequence
  Oligonucleotide for detection of SNP TSC0010595
tgaagatgggaga

SEQ ID NO: 263894 - DNA, 13 bp, Artificial Sequence
  Oligonucleotide for detection of SNP TSC0010595
tctcccatcttca

SEQ ID NO: 263895 - DNA, 13 bp, Artificial Sequence
  Oligonucleotide for detection of SNP TSC0010595
tgaagacgggaga

SEQ ID NO: 263896 - DNA, 13 bp, Artificial Sequence
  Oligonucleotide for detection of SNP TSC0010595
tctcccgtcttca

SEQ ID NO: 263897 - DNA, 13 bp, Artificial Sequence
  Oligonucleotide for detection of SNP TSC0010596
atagggagtaaaa

SEQ ID NO: 263898 - DNA, 13 bp, Artificial Sequence
  Oligonucleotide for detection of SNP TSC0010596
ttttactccctat

SEQ ID NO: 263899 - DNA, 13 bp, Artificial Sequence
  Oligonucleotide for detection of SNP TSC0010596
atagggggtaaaa

SEQ ID NO: 263900 - DNA, 13 bp, Artificial Sequence
  Oligonucleotide for detection of SNP TSC0010596
ttttaccccctat

SEQ ID NO: 263901 - DNA, 13 bp, Artificial Sequence
  Oligonucleotide for detection of SNP TSC0063969
aatgtatgtttaa

SEQ ID NO: 263902 - DNA, 13 bp, Artificial Sequence
  Oligonucleotide for detection of SNP TSC0063969
ttaaacatacatt

SEQ ID NO: 263903 - DNA, 13 bp, Artificial Sequence
  Oligonucleotide for detection of SNP TSC0063969
aacgtatgtttaa

SEQ ID NO: 263904 - DNA, 13 bp, Artificial Sequence
  Oligonucleotide for detection of SNP TSC0063969
ttaaacatacgtt

SEQ ID NO: 263905 - DNA, 13 bp, Artificial Sequence
  Oligonucleotide for detection of SNP TSC0063969
aatgtacgtttaa

SEQ ID NO: 263906 - DNA, 13 bp, Artificial Sequence
  Oligonucleotide for detection of SNP TSC0063969
ttaaacgtacatt

SEQ ID NO: 263907 - DNA, 13 bp, Artificial Sequence
  Oligonucleotide for detection of SNP TSC0063969
aacgtacgtttaa

SEQ ID NO: 263908 - DNA, 13 bp, Artificial Sequence
  Oligonucleotide for detection of SNP TSC0063969
ttaaacgtacgtt

SEQ ID NO: 263909 - DNA, 13 bp, Artificial Sequence
  Oligonucleotide for detection of SNP TSC0063969
ttaagtgtgtgtt

SEQ ID NO: 263910 - DNA, 13 bp, Artificial Sequence
  Oligonucleotide for detection of SNP TSC0063969
aacacacacttaa

SEQ ID NO: 263911 - DNA, 13 bp, Artificial Sequence
  Oligonucleotide for detection of SNP TSC0063969
ttaagtatgtgtt

SEQ ID NO: 263912 - DNA, 13 bp, Artificial Sequence
  Oligonucleotide for detection of SNP TSC0063969
aacacatacttaa

SEQ ID NO: 263913 - DNA, 13 bp, Artificial Sequence
  Oligonucleotide for detection of SNP TSC0063969
ttaagcgtgtgtt

SEQ ID NO: 263914 - DNA, 13 bp, Artificial Sequence
  Oligonucleotide for detection of SNP TSC0063969
aacacacgcttaa

SEQ ID NO: 263915 - DNA, 13 bp, Artificial Sequence
  Oligonucleotide for detection of SNP TSC0063969
ttaagtatgcgtt

SEQ ID NO: 263916 - DNA, 13 bp, Artificial Sequence
  Oligonucleotide for detection of SNP TSC0063969
aacgcatacttaa

SEQ ID NO: 263917 - DNA, 13 bp, Artificial Sequence
  Oligonucleotide for detection of SNP TSC0063969
ttaagtgtgcgtt

SEQ ID NO: 263918 - DNA, 13 bp, Artificial Sequence
  Oligonucleotide for detection of SNP TSC0063969
aacgcacacttaa

SEQ ID NO: 263919 - DNA, 13 bp, Artificial Sequence
  Oligonucleotide for detection of SNP TSC0063969
ttaagcgtgcgtt

SEQ ID NO: 263920 - DNA, 13 bp, Artificial Sequence
  Oligonucleotide for detection of SNP TSC0063969
aacgcacgcttaa

SEQ ID NO: 263921 - DNA, 13 bp, Artificial Sequence
  Oligonucleotide for detection of SNP TSC0009170
ttgagtattggag

SEQ ID NO: 263922 - DNA, 13 bp, Artificial Sequence
  Oligonucleotide for detection of SNP TSC0009170
ctccaatactcaa

SEQ ID NO: 263923 - DNA, 13 bp, Artificial Sequence
  Oligonucleotide for detection of SNP TSC0009170
ttgagtgttggag

SEQ ID NO: 263924 - DNA, 13 bp, Artificial Sequence
  Oligonucleotide for detection of SNP TSC0009170
ctccaacactcaa

SEQ ID NO: 263925 - DNA, 13 bp, Artificial Sequence
  Oligonucleotide for detection of SNP TSC0009170
ttgagcgttggag

SEQ ID NO: 263926 - DNA, 13 bp, Artificial Sequence
  Oligonucleotide for detection of SNP TSC0009170
ctccaacgctcaa

SEQ ID NO: 263927 - DNA, 13 bp, Artificial Sequence
  Oligonucleotide for detection of SNP TSC0009170
ttttagcgtttag

SEQ ID NO: 263928 - DNA, 13 bp, Artificial Sequence
  Oligonucleotide for detection of SNP TSC0009170
ctaaacgctaaaa

SEQ ID NO: 263929 - DNA, 13 bp, Artificial Sequence
  Oligonucleotide for detection of SNP TSC0009171
tgtagggtaattt

SEQ ID NO: 263930 - DNA, 13 bp, Artificial Sequence
  Oligonucleotide for detection of SNP TSC0009171
aaattaccctaca

SEQ ID NO: 263931 - DNA, 13 bp, Artificial Sequence
  Oligonucleotide for detection of SNP TSC0009171
tgtaggataattt

SEQ ID NO: 263932 - DNA, 13 bp, Artificial Sequence
  Oligonucleotide for detection of SNP TSC0009171
aaattatcctaca

SEQ ID NO: 263933 - DNA, 13 bp, Artificial Sequence
  Oligonucleotide for detection of SNP TSC0063974
aaattatggtaaa

SEQ ID NO: 263934 - DNA, 13 bp, Artificial Sequence
  Oligonucleotide for detection of SNP TSC0063974
tttaccataattt

SEQ ID NO: 263935 - DNA, 13 bp, Artificial Sequence
  Oligonucleotide for detection of SNP TSC0063974
aaattagggtaaa

SEQ ID NO: 263936 - DNA, 13 bp, Artificial Sequence
  Oligonucleotide for detection of SNP TSC0063974
tttaccctaattt

SEQ ID NO: 263937 - DNA, 13 bp, Artificial Sequence
  Oligonucleotide for detection of SNP TSC0005062
tttagaaattagg

SEQ ID NO: 263938 - DNA, 13 bp, Artificial Sequence
  Oligonucleotide for detection of SNP TSC0005062
cctaatttctaaa

SEQ ID NO: 263939 - DNA, 13 bp, Artificial Sequence
  Oligonucleotide for detection of SNP TSC0005062
tttagatattagg

SEQ ID NO: 263940 - DNA, 13 bp, Artificial Sequence
  Oligonucleotide for detection of SNP TSC0005062
cctaatatctaaa

SEQ ID NO: 263941 - DNA, 13 bp, Artificial Sequence
  Oligonucleotide for detection of SNP TSC0005062
tttgatttttgaa

SEQ ID NO: 263942 - DNA, 13 bp, Artificial Sequence
  Oligonucleotide for detection of SNP TSC0005062
ttcaaaaatcaaa

SEQ ID NO: 263943 - DNA, 13 bp, Artificial Sequence
  Oligonucleotide for detection of SNP TSC0004758
aggtagaagaaty

SEQ ID NO: 263944 - DNA, 13 bp, Artificial Sequence
  Oligonucleotide for detection of SNP TSC0004758
rattcttctacct

SEQ ID NO: 263945 - DNA, 13 bp, Artificial Sequence
  Oligonucleotide for detection of SNP TSC0004758
aggtaggagaaty

SEQ ID NO: 263946 - DNA, 13 bp, Artificial Sequence
  Oligonucleotide for detection of SNP TSC0004758
rattctcctacct

SEQ ID NO: 263947 - DNA, 13 bp, Artificial Sequence
  Oligonucleotide for detection of SNP TSC0063976
atttggaaattga

SEQ ID NO: 263948 - DNA, 13 bp, Artificial Sequence
  Oligonucleotide for detection of SNP TSC0063976
tcaatttccaaat

SEQ ID NO: 263949 - DNA, 13 bp, Artificial Sequence
  Oligonucleotide for detection of SNP TSC0063976
atttggtaattga

SEQ ID NO: 263950 - DNA, 13 bp, Artificial Sequence
  Oligonucleotide for detection of SNP TSC0063976
tcaattaccaaat

SEQ ID NO: 263951 - DNA, 13 bp, Artificial Sequence
  Oligonucleotide for detection of SNP TSC0063976
ttaatttttaggt

SEQ ID NO: 263952 - DNA, 13 bp, Artificial Sequence
  Oligonucleotide for detection of SNP TSC0063976
acctaaaaattaa

SEQ ID NO: 263953 - DNA, 13 bp, Artificial Sequence
  Oligonucleotide for detection of SNP TSC0063976
ttaattgttaggt

SEQ ID NO: 263954 - DNA, 13 bp, Artificial Sequence
  Oligonucleotide for detection of SNP TSC0063976
acctaacaattaa

SEQ ID NO: 263955 - DNA, 13 bp, Artificial Sequence
  Oligonucleotide for detection of SNP TSC0063977
tgttaatttggaa

SEQ ID NO: 263956 - DNA, 13 bp, Artificial Sequence
  Oligonucleotide for detection of SNP TSC0063977
ttccaaattaaca

SEQ ID NO: 263957 - DNA, 13 bp, Artificial Sequence
  Oligonucleotide for detection of SNP TSC0063977
tgttaagttggaa

SEQ ID NO: 263958 - DNA, 13 bp, Artificial Sequence
  Oligonucleotide for detection of SNP TSC0063977
ttccaacttaaca

SEQ ID NO: 263959 - DNA, 13 bp, Artificial Sequence
  Oligonucleotide for detection of SNP TSC0063977
ttttaggttaata

SEQ ID NO: 263960 - DNA, 13 bp, Artificial Sequence
  Oligonucleotide for detection of SNP TSC0063977
tattaacctaaaa

SEQ ID NO: 263961 - DNA, 13 bp, Artificial Sequence
  Oligonucleotide for detection of SNP TSC0063977
ttttagtttaata

SEQ ID NO: 263962 - DNA, 13 bp, Artificial Sequence
  Oligonucleotide for detection of SNP TSC0063977
tattaaactaaaa

SEQ ID NO: 263963 - DNA, 13 bp, Artificial Sequence
  Oligonucleotide for detection of SNP TSC0005801
tgtaggggttggt

SEQ ID NO: 263964 - DNA, 13 bp, Artificial Sequence
  Oligonucleotide for detection of SNP TSC0005801
accaacccctaca

SEQ ID NO: 263965 - DNA, 13 bp, Artificial Sequence
  Oligonucleotide for detection of SNP TSC0005801
tgtaggagttggt

SEQ ID NO: 263966 - DNA, 13 bp, Artificial Sequence
  Oligonucleotide for detection of SNP TSC0005801
accaactcctaca

SEQ ID NO: 263967 - DNA, 13 bp, Artificial Sequence
  Oligonucleotide for detection of SNP TSC0063980
ttattattattgt

SEQ ID NO: 263968 - DNA, 13 bp, Artificial Sequence
  Oligonucleotide for detection of SNP TSC0063980
acaataataataa

SEQ ID NO: 263969 - DNA, 13 bp, Artificial Sequence
  Oligonucleotide for detection of SNP TSC0063980
ttattagtattgt

SEQ ID NO: 263970 - DNA, 13 bp, Artificial Sequence
  Oligonucleotide for detection of SNP TSC0063980
acaatactaataa

SEQ ID NO: 263971 - DNA, 13 bp, Artificial Sequence
  Oligonucleotide for detection of SNP TSC0063980
ataatggtagtaa

SEQ ID NO: 263972 - DNA, 13 bp, Artificial Sequence
  Oligonucleotide for detection of SNP TSC0063980
ttactaccattat

SEQ ID NO: 263973 - DNA, 13 bp, Artificial Sequence
  Oligonucleotide for detection of SNP TSC0063980
ataatgttagtaa

SEQ ID NO: 263974 - DNA, 13 bp, Artificial Sequence
  Oligonucleotide for detection of SNP TSC0063980
ttactaacattat

SEQ ID NO: 263975 - DNA, 13 bp, Artificial Sequence
  Oligonucleotide for detection of SNP TSC0063982
agagttatgagtt

SEQ ID NO: 263976 - DNA, 13 bp, Artificial Sequence
  Oligonucleotide for detection of SNP TSC0063982
aactcataactct

SEQ ID NO: 263977 - DNA, 13 bp, Artificial Sequence
  Oligonucleotide for detection of SNP TSC0063982
agagttgtgagtt

SEQ ID NO: 263978 - DNA, 13 bp, Artificial Sequence
  Oligonucleotide for detection of SNP TSC0063982
aactcacaactct

SEQ ID NO: 263979 - DNA, 13 bp, Artificial Sequence
  Oligonucleotide for detection of SNP TSC0063983
tagatagaatgtg

SEQ ID NO: 263980 - DNA, 13 bp, Artificial Sequence
  Oligonucleotide for detection of SNP TSC0063983
cacattctatcta

SEQ ID NO: 263981 - DNA, 13 bp, Artificial Sequence
  Oligonucleotide for detection of SNP TSC0063983
tagataaaatgtg

SEQ ID NO: 263982 - DNA, 13 bp, Artificial Sequence
  Oligonucleotide for detection of SNP TSC0063983
cacattttatcta

SEQ ID NO: 263983 - DNA, 13 bp, Artificial Sequence
  Oligonucleotide for detection of SNP TSC0009480
tgggtaattatta

SEQ ID NO: 263984 - DNA, 13 bp, Artificial Sequence
  Oligonucleotide for detection of SNP TSC0009480
taataattaccca

SEQ ID NO: 263985 - DNA, 13 bp, Artificial Sequence
  Oligonucleotide for detection of SNP TSC0009480
tgggtagttatta

SEQ ID NO: 263986 - DNA, 13 bp, Artificial Sequence
  Oligonucleotide for detection of SNP TSC0009480
taataactaccca

SEQ ID NO: 263987 - DNA, 13 bp, Artificial Sequence
  Oligonucleotide for detection of SNP TSC0000392
attttatggttgg

SEQ ID NO: 263988 - DNA, 13 bp, Artificial Sequence
  Oligonucleotide for detection of SNP TSC0000392
ccaaccataaaat

SEQ ID NO: 263989 - DNA, 13 bp, Artificial Sequence
  Oligonucleotide for detection of SNP TSC0000392
attttacggttgg

SEQ ID NO: 263990 - DNA, 13 bp, Artificial Sequence
  Oligonucleotide for detection of SNP TSC0000392
ccaaccgtaaaat

SEQ ID NO: 263991 - DNA, 13 bp, Artificial Sequence
  Oligonucleotide for detection of SNP TSC0000392
ttagttgtaaggt

SEQ ID NO: 263992 - DNA, 13 bp, Artificial Sequence
  Oligonucleotide for detection of SNP TSC0000392
accttacaactaa

SEQ ID NO: 263993 - DNA, 13 bp, Artificial Sequence
  Oligonucleotide for detection of SNP TSC0000392
ttagttataaggt

SEQ ID NO: 263994 - DNA, 13 bp, Artificial Sequence
  Oligonucleotide for detection of SNP TSC0000392
accttataactaa

SEQ ID NO: 263995 - DNA, 13 bp, Artificial Sequence
  Oligonucleotide for detection of SNP TSC0000392
ttagtcgtaaggt

SEQ ID NO: 263996 - DNA, 13 bp, Artificial Sequence
  Oligonucleotide for detection of SNP TSC0000392
accttacgactaa

SEQ ID NO: 263997 - DNA, 13 bp, Artificial Sequence
  Oligonucleotide for detection of SNP TSC0063985
ttaatttgtagag

SEQ ID NO: 263998 - DNA, 13 bp, Artificial Sequence
  Oligonucleotide for detection of SNP TSC0063985
ctctacaaattaa

SEQ ID NO: 263999 - DNA, 13 bp, Artificial Sequence
  Oligonucleotide for detection of SNP TSC0063985
ttaattggtagag

SEQ ID NO: 264000 - DNA, 13 bp, Artificial Sequence
  Oligonucleotide for detection of SNP TSC0063985
ctctaccaattaa

SEQ ID NO: 264001 - DNA, 13 bp, Artificial Sequence
  Oligonucleotide for detection of SNP TSC0000149
gattgggatagtt

SEQ ID NO: 264002 - DNA, 13 bp, Artificial Sequence
  Oligonucleotide for detection of SNP TSC0000149
aactatcccaatc

SEQ ID NO: 264003 - DNA, 13 bp, Artificial Sequence
  Oligonucleotide for detection of SNP TSC0000149
gattggaatagtt

SEQ ID NO: 264004 - DNA, 13 bp, Artificial Sequence
  Oligonucleotide for detection of SNP TSC0000149
aactattccaatc

SEQ ID NO: 264005 - DNA, 13 bp, Artificial Sequence
  Oligonucleotide for detection of SNP TSC0063987
agttttaatattt

SEQ ID NO: 264006 - DNA, 13 bp, Artificial Sequence
  Oligonucleotide for detection of SNP TSC0063987
aaatattaaaact

SEQ ID NO: 264007 - DNA, 13 bp, Artificial Sequence
  Oligonucleotide for detection of SNP TSC0063987
agttttgatattt

SEQ ID NO: 264008 - DNA, 13 bp, Artificial Sequence
  Oligonucleotide for detection of SNP TSC0063987
aaatatcaaaact

SEQ ID NO: 264009 - DNA, 13 bp, Artificial Sequence
  Oligonucleotide for detection of SNP TSC0063987
agtttcgatattt

SEQ ID NO: 264010 - DNA, 13 bp, Artificial Sequence
  Oligonucleotide for detection of SNP TSC0063987
aaatatcgaaact

SEQ ID NO: 264011 - DNA, 13 bp, Artificial Sequence
  Oligonucleotide for detection of SNP TSC0063987
aggtgttgaaatt

SEQ ID NO: 264012 - DNA, 13 bp, Artificial Sequence
  Oligonucleotide for detection of SNP TSC0063987
aatttcaacacct

SEQ ID NO: 264013 - DNA, 13 bp, Artificial Sequence
  Oligonucleotide for detection of SNP TSC0063987
aggtgtcgaaatt

SEQ ID NO: 264014 - DNA, 13 bp, Artificial Sequence
  Oligonucleotide for detection of SNP TSC0063987
aatttcgacacct

SEQ ID NO: 264015 - DNA, 13 bp, Artificial Sequence
  Oligonucleotide for detection of SNP TSC0000528
aaggaaaaatata

SEQ ID NO: 264016 - DNA, 13 bp, Artificial Sequence
  Oligonucleotide for detection of SNP TSC0000528
tatatttttcctt

SEQ ID NO: 264017 - DNA, 13 bp, Artificial Sequence
  Oligonucleotide for detection of SNP TSC0000528
aaggaagaatata

SEQ ID NO: 264018 - DNA, 13 bp, Artificial Sequence
  Oligonucleotide for detection of SNP TSC0000528
tatattcttcctt

SEQ ID NO: 264019 - DNA, 13 bp, Artificial Sequence
  Oligonucleotide for detection of SNP TSC0007177
gagtttgattatt

SEQ ID NO: 264020 - DNA, 13 bp, Artificial Sequence
  Oligonucleotide for detection of SNP TSC0007177
aataatcaaactc

SEQ ID NO: 264021 - DNA, 13 bp, Artificial Sequence
  Oligonucleotide for detection of SNP TSC0007177
gagttttattatt

SEQ ID NO: 264022 - DNA, 13 bp, Artificial Sequence
  Oligonucleotide for detection of SNP TSC0007177
aataataaaactc

SEQ ID NO: 264023 - DNA, 13 bp, Artificial Sequence
  Oligonucleotide for detection of SNP TSC0005396
ggtttgaataaty

SEQ ID NO: 264024 - DNA, 13 bp, Artificial Sequence
  Oligonucleotide for detection of SNP TSC0005396
rattattcaaacc

SEQ ID NO: 264025 - DNA, 13 bp, Artificial Sequence
  Oligonucleotide for detection of SNP TSC0005396
ggtttggataaty

SEQ ID NO: 264026 - DNA, 13 bp, Artificial Sequence
  Oligonucleotide for detection of SNP TSC0005396
rattatccaaacc

SEQ ID NO: 264027 - DNA, 13 bp, Artificial Sequence
  Oligonucleotide for detection of SNP TSC0005397
ttagttaattata

SEQ ID NO: 264028 - DNA, 13 bp, Artificial Sequence
  Oligonucleotide for detection of SNP TSC0005397
tataattaactaa

SEQ ID NO: 264029 - DNA, 13 bp, Artificial Sequence
  Oligonucleotide for detection of SNP TSC0005397
ttagtttattata

SEQ ID NO: 264030 - DNA, 13 bp, Artificial Sequence
  Oligonucleotide for detection of SNP TSC0005397
tataataaactaa

SEQ ID NO: 264031 - DNA, 13 bp, Artificial Sequence
  Oligonucleotide for detection of SNP TSC0005397
tatagttggttag

SEQ ID NO: 264032 - DNA, 13 bp, Artificial Sequence
  Oligonucleotide for detection of SNP TSC0005397
ctaaccaactata

SEQ ID NO: 264033 - DNA, 13 bp, Artificial Sequence
  Oligonucleotide for detection of SNP TSC0005397
tatagtgggttag

SEQ ID NO: 264034 - DNA, 13 bp, Artificial Sequence
  Oligonucleotide for detection of SNP TSC0005397
ctaacccactata

SEQ ID NO: 264035 - DNA, 13 bp, Artificial Sequence
  Oligonucleotide for detection of SNP TSC0005398
tgtttatgtaggt

SEQ ID NO: 264036 - DNA, 13 bp, Artificial Sequence
  Oligonucleotide for detection of SNP TSC0005398
acctacataaaca

SEQ ID NO: 264037 - DNA, 13 bp, Artificial Sequence
  Oligonucleotide for detection of SNP TSC0005398
tgtttaggtaggt

SEQ ID NO: 264038 - DNA, 13 bp, Artificial Sequence
  Oligonucleotide for detection of SNP TSC0005398
acctacctaaaca

SEQ ID NO: 264039 - DNA, 13 bp, Artificial Sequence
  Oligonucleotide for detection of SNP TSC0005398
tgtttacgtaggt

SEQ ID NO: 264040 - DNA, 13 bp, Artificial Sequence
  Oligonucleotide for detection of SNP TSC0005398
acctacgtaaaca

SEQ ID NO: 264041 - DNA, 13 bp, Artificial Sequence
  Oligonucleotide for detection of SNP TSC0005398
atttgtgtaggta

SEQ ID NO: 264042 - DNA, 13 bp, Artificial Sequence
  Oligonucleotide for detection of SNP TSC0005398
tacctacacaaat

SEQ ID NO: 264043 - DNA, 13 bp, Artificial Sequence
  Oligonucleotide for detection of SNP TSC0005398
atttgtttaggta

SEQ ID NO: 264044 - DNA, 13 bp, Artificial Sequence
  Oligonucleotide for detection of SNP TSC0005398
tacctaaacaaat

SEQ ID NO: 264045 - DNA, 13 bp, Artificial Sequence
  Oligonucleotide for detection of SNP TSC0005398
atttgcgtaggta

SEQ ID NO: 264046 - DNA, 13 bp, Artificial Sequence
  Oligonucleotide for detection of SNP TSC0005398
tacctacgcaaat

SEQ ID NO: 264047 - DNA, 13 bp, Artificial Sequence
  Oligonucleotide for detection of SNP TSC0005399
gtttttaagaatg

SEQ ID NO: 264048 - DNA, 13 bp, Artificial Sequence
  Oligonucleotide for detection of SNP TSC0005399
cattcttaaaaac

SEQ ID NO: 264049 - DNA, 13 bp, Artificial Sequence
  Oligonucleotide for detection of SNP TSC0005399
gtttttgagaatg

SEQ ID NO: 264050 - DNA, 13 bp, Artificial Sequence
  Oligonucleotide for detection of SNP TSC0005399
cattctcaaaaac

SEQ ID NO: 264051 - DNA, 13 bp, Artificial Sequence
  Oligonucleotide for detection of SNP TSC0005399
gttttcgagaatg

SEQ ID NO: 264052 - DNA, 13 bp, Artificial Sequence
  Oligonucleotide for detection of SNP TSC0005399
cattctcgaaaac

SEQ ID NO: 264053 - DNA, 13 bp, Artificial Sequence
  Oligonucleotide for detection of SNP TSC0005399
tatttttgaagay

SEQ ID NO: 264054 - DNA, 13 bp, Artificial Sequence
  Oligonucleotide for detection of SNP TSC0005399
rtcttcaaaaata

SEQ ID NO: 264055 - DNA, 13 bp, Artificial Sequence
  Oligonucleotide for detection of SNP TSC0005399
tattttcgaagay

SEQ ID NO: 264056 - DNA, 13 bp, Artificial Sequence
  Oligonucleotide for detection of SNP TSC0005399
rtcttcgaaaata

SEQ ID NO: 264057 - DNA, 13 bp, Artificial Sequence
  Oligonucleotide for detection of SNP TSC0000726
tgggggataattt

SEQ ID NO: 264058 - DNA, 13 bp, Artificial Sequence
  Oligonucleotide for detection of SNP TSC0000726
aaattatccccca

SEQ ID NO: 264059 - DNA, 13 bp, Artificial Sequence
  Oligonucleotide for detection of SNP TSC0000726
tggggggtaattt

SEQ ID NO: 264060 - DNA, 13 bp, Artificial Sequence
  Oligonucleotide for detection of SNP TSC0000726
aaattacccccca

SEQ ID NO: 264061 - DNA, 13 bp, Artificial Sequence
  Oligonucleotide for detection of SNP TSC0000727
tgaatttataaay

SEQ ID NO: 264062 - DNA, 13 bp, Artificial Sequence
  Oligonucleotide for detection of SNP TSC0000727
rtttataaattca

SEQ ID NO: 264063 - DNA, 13 bp, Artificial Sequence
  Oligonucleotide for detection of SNP TSC0000727
tgaattgataaay

SEQ ID NO: 264064 - DNA, 13 bp, Artificial Sequence
  Oligonucleotide for detection of SNP TSC0000727
rtttatcaattca

SEQ ID NO: 264065 - DNA, 13 bp, Artificial Sequence
  Oligonucleotide for detection of SNP TSC0000727
tgaatcgataaay

SEQ ID NO: 264066 - DNA, 13 bp, Artificial Sequence
  Oligonucleotide for detection of SNP TSC0000727
rtttatcgattca

SEQ ID NO: 264067 - DNA, 13 bp, Artificial Sequence
  Oligonucleotide for detection of SNP TSC0000727
gtttgtggattta

SEQ ID NO: 264068 - DNA, 13 bp, Artificial Sequence
  Oligonucleotide for detection of SNP TSC0000727
taaatccacaaac

SEQ ID NO: 264069 - DNA, 13 bp, Artificial Sequence
  Oligonucleotide for detection of SNP TSC0000727
gtttgttgattta

SEQ ID NO: 264070 - DNA, 13 bp, Artificial Sequence
  Oligonucleotide for detection of SNP TSC0000727
taaatcaacaaac

SEQ ID NO: 264071 - DNA, 13 bp, Artificial Sequence
  Oligonucleotide for detection of SNP TSC0000727
gtttgtcgattta

SEQ ID NO: 264072 - DNA, 13 bp, Artificial Sequence
  Oligonucleotide for detection of SNP TSC0000727
taaatcgacaaac

SEQ ID NO: 264073 - DNA, 13 bp, Artificial Sequence
  Oligonucleotide for detection of SNP TSC0063992
tgtttagaattta

SEQ ID NO: 264074 - DNA, 13 bp, Artificial Sequence
  Oligonucleotide for detection of SNP TSC0063992
taaattctaaaca

SEQ ID NO: 264075 - DNA, 13 bp, Artificial Sequence
  Oligonucleotide for detection of SNP TSC0063992
tgtttaaaattta

SEQ ID NO: 264076 - DNA, 13 bp, Artificial Sequence
  Oligonucleotide for detection of SNP TSC0063992
taaattttaaaca

SEQ ID NO: 264077 - DNA, 13 bp, Artificial Sequence
  Oligonucleotide for detection of SNP TSC0063993
gttagagtgtggg

SEQ ID NO: 264078 - DNA, 13 bp, Artificial Sequence
  Oligonucleotide for detection of SNP TSC0063993
cccacactctaac

SEQ ID NO: 264079 - DNA, 13 bp, Artificial Sequence
  Oligonucleotide for detection of SNP TSC0063993
gttagaatgtggg

SEQ ID NO: 264080 - DNA, 13 bp, Artificial Sequence
  Oligonucleotide for detection of SNP TSC0063993
cccacattctaac

SEQ ID NO: 264081 - DNA, 13 bp, Artificial Sequence
  Oligonucleotide for detection of SNP TSC0063994
ggggataggttay

SEQ ID NO: 264082 - DNA, 13 bp, Artificial Sequence
  Oligonucleotide for detection of SNP TSC0063994
rtaacctatcccc

SEQ ID NO: 264083 - DNA, 13 bp, Artificial Sequence
  Oligonucleotide for detection of SNP TSC0063994
ggggatgggttay

SEQ ID NO: 264084 - DNA, 13 bp, Artificial Sequence
  Oligonucleotide for detection of SNP TSC0063994
rtaacccatcccc

SEQ ID NO: 264085 - DNA, 13 bp, Artificial Sequence
  Oligonucleotide for detection of SNP TSC0063994
ggggacgggttay

SEQ ID NO: 264086 - DNA, 13 bp, Artificial Sequence
  Oligonucleotide for detection of SNP TSC0063994
rtaacccgtcccc

SEQ ID NO: 264087 - DNA, 13 bp, Artificial Sequence
  Oligonucleotide for detection of SNP TSC0001487
atgtttaatataa

SEQ ID NO: 264088 - DNA, 13 bp, Artificial Sequence
  Oligonucleotide for detection of SNP TSC0001487
ttatattaaacat

SEQ ID NO: 264089 - DNA, 13 bp, Artificial Sequence
  Oligonucleotide for detection of SNP TSC0001487
atgttttatataa

SEQ ID NO: 264090 - DNA, 13 bp, Artificial Sequence
  Oligonucleotide for detection of SNP TSC0001487
ttatataaaacat

SEQ ID NO: 264091 - DNA, 13 bp, Artificial Sequence
  Oligonucleotide for detection of SNP TSC0001487
ttatattgagtat

SEQ ID NO: 264092 - DNA, 13 bp, Artificial Sequence
  Oligonucleotide for detection of SNP TSC0001487
atactcaatataa

SEQ ID NO: 264093 - DNA, 13 bp, Artificial Sequence
  Oligonucleotide for detection of SNP TSC0001487
ttatatagagtat

SEQ ID NO: 264094 - DNA, 13 bp, Artificial Sequence
  Oligonucleotide for detection of SNP TSC0001487
atactctatataa

SEQ ID NO: 264095 - DNA, 13 bp, Artificial Sequence
  Oligonucleotide for detection of SNP TSC0006349
gtatataatttaa

SEQ ID NO: 264096 - DNA, 13 bp, Artificial Sequence
  Oligonucleotide for detection of SNP TSC0006349
ttaaattatatac

SEQ ID NO: 264097 - DNA, 13 bp, Artificial Sequence
  Oligonucleotide for detection of SNP TSC0006349
gtatatgatttaa

SEQ ID NO: 264098 - DNA, 13 bp, Artificial Sequence
  Oligonucleotide for detection of SNP TSC0006349
ttaaatcatatac

SEQ ID NO: 264099 - DNA, 13 bp, Artificial Sequence
  Oligonucleotide for detection of SNP TSC0063997
gaagaaataatay

SEQ ID NO: 264100 - DNA, 13 bp, Artificial Sequence
  Oligonucleotide for detection of SNP TSC0063997
rtattatttcttc

SEQ ID NO: 264101 - DNA, 13 bp, Artificial Sequence
  Oligonucleotide for detection of SNP TSC0063997
gaagaattaatay

SEQ ID NO: 264102 - DNA, 13 bp, Artificial Sequence
  Oligonucleotide for detection of SNP TSC0063997
rtattaattcttc

SEQ ID NO: 264103 - DNA, 13 bp, Artificial Sequence
  Oligonucleotide for detection of SNP TSC0063998
atattgattaggg

SEQ ID NO: 264104 - DNA, 13 bp, Artificial Sequence
  Oligonucleotide for detection of SNP TSC0063998
ccctaatcaatat

SEQ ID NO: 264105 - DNA, 13 bp, Artificial Sequence
  Oligonucleotide for detection of SNP TSC0063998
atattgtttaggg

SEQ ID NO: 264106 - DNA, 13 bp, Artificial Sequence
  Oligonucleotide for detection of SNP TSC0063998
ccctaaacaatat

SEQ ID NO: 264107 - DNA, 13 bp, Artificial Sequence
  Oligonucleotide for detection of SNP TSC0063998
ttttaattagtgt

SEQ ID NO: 264108 - DNA, 13 bp, Artificial Sequence
  Oligonucleotide for detection of SNP TSC0063998
acactaattaaaa

SEQ ID NO: 264109 - DNA, 13 bp, Artificial Sequence
  Oligonucleotide for detection of SNP TSC0063998
ttttaagtagtgt

SEQ ID NO: 264110 - DNA, 13 bp, Artificial Sequence
  Oligonucleotide for detection of SNP TSC0063998
acactacttaaaa

SEQ ID NO: 264111 - DNA, 13 bp, Artificial Sequence
  Oligonucleotide for detection of SNP TSC0064002
tagttgggggatt

SEQ ID NO: 264112 - DNA, 13 bp, Artificial Sequence
  Oligonucleotide for detection of SNP TSC0064002
aatcccccaacta

SEQ ID NO: 264113 - DNA, 13 bp, Artificial Sequence
  Oligonucleotide for detection of SNP TSC0064002
tagttgagggatt

SEQ ID NO: 264114 - DNA, 13 bp, Artificial Sequence
  Oligonucleotide for detection of SNP TSC0064002
aatccctcaacta

SEQ ID NO: 264115 - DNA, 13 bp, Artificial Sequence
  Oligonucleotide for detection of SNP TSC0000657
aaaatgtaaaata

SEQ ID NO: 264116 - DNA, 13 bp, Artificial Sequence
  Oligonucleotide for detection of SNP TSC0000657
tattttacatttt

SEQ ID NO: 264117 - DNA, 13 bp, Artificial Sequence
  Oligonucleotide for detection of SNP TSC0000657
aaaatggaaaata

SEQ ID NO: 264118 - DNA, 13 bp, Artificial Sequence
  Oligonucleotide for detection of SNP TSC0000657
tattttccatttt

SEQ ID NO: 264119 - DNA, 13 bp, Artificial Sequence
  Oligonucleotide for detection of SNP TSC0010539
ttaataataagtg

SEQ ID NO: 264120 - DNA, 13 bp, Artificial Sequence
  Oligonucleotide for detection of SNP TSC0010539
cacttattattaa

SEQ ID NO: 264121 - DNA, 13 bp, Artificial Sequence
  Oligonucleotide for detection of SNP TSC0008640
gtttttgggagtg

SEQ ID NO: 264122 - DNA, 13 bp, Artificial Sequence
  Oligonucleotide for detection of SNP TSC0008640
cactcccaaaaac

SEQ ID NO: 264123 - DNA, 13 bp, Artificial Sequence
  Oligonucleotide for detection of SNP TSC0008640
tattttgaaaagy

SEQ ID NO: 264124 - DNA, 13 bp, Artificial Sequence
  Oligonucleotide for detection of SNP TSC0008640
rcttttcaaaata

SEQ ID NO: 264125 - DNA, 13 bp, Artificial Sequence
  Oligonucleotide for detection of SNP TSC0008640
tatttttaaaagy

SEQ ID NO: 264126 - DNA, 13 bp, Artificial Sequence
  Oligonucleotide for detection of SNP TSC0008640
rcttttaaaaata

SEQ ID NO: 264127 - DNA, 13 bp, Artificial Sequence
  Oligonucleotide for detection of SNP TSC0008640
tatttcgaaaagy

SEQ ID NO: 264128 - DNA, 13 bp, Artificial Sequence
  Oligonucleotide for detection of SNP TSC0008640
rcttttcgaaata

SEQ ID NO: 264129 - DNA, 13 bp, Artificial Sequence
  Oligonucleotide for detection of SNP TSC0008927
gaagatgtgtatt

SEQ ID NO: 264130 - DNA, 13 bp, Artificial Sequence
  Oligonucleotide for detection of SNP TSC0008927
aatacacatcttc

SEQ ID NO: 264131 - DNA, 13 bp, Artificial Sequence
  Oligonucleotide for detection of SNP TSC0008927
gaagatatgtatt

SEQ ID NO: 264132 - DNA, 13 bp, Artificial Sequence
  Oligonucleotide for detection of SNP TSC0008927
aatacatatcttc

SEQ ID NO: 264133 - DNA, 13 bp, Artificial Sequence
  Oligonucleotide for detection of SNP TSC0008928
taattttgaagtt

SEQ ID NO: 264134 - DNA, 13 bp, Artificial Sequence
  Oligonucleotide for detection of SNP TSC0008928
aacttcaaaatta

SEQ ID NO: 264135 - DNA, 13 bp, Artificial Sequence
  Oligonucleotide for detection of SNP TSC0008928
taatttcgaagtt

SEQ ID NO: 264136 - DNA, 13 bp, Artificial Sequence
  Oligonucleotide for detection of SNP TSC0008928
aacttcgaaatta

SEQ ID NO: 264137 - DNA, 13 bp, Artificial Sequence
  Oligonucleotide for detection of SNP TSC0008928
agttttgaagtta

SEQ ID NO: 264138 - DNA, 13 bp, Artificial Sequence
  Oligonucleotide for detection of SNP TSC0008928
taacttcaaaact

SEQ ID NO: 264139 - DNA, 13 bp, Artificial Sequence
  Oligonucleotide for detection of SNP TSC0008928
agttttaaagtta

SEQ ID NO: 264140 - DNA, 13 bp, Artificial Sequence
  Oligonucleotide for detection of SNP TSC0008928
taactttaaaact

SEQ ID NO: 264141 - DNA, 13 bp, Artificial Sequence
  Oligonucleotide for detection of SNP TSC0008928
agtttcgaagtta

SEQ ID NO: 264142 - DNA, 13 bp, Artificial Sequence
  Oligonucleotide for detection of SNP TSC0008928
taacttcgaaact

SEQ ID NO: 264143 - DNA, 13 bp, Artificial Sequence
  Oligonucleotide for detection of SNP TSC0008929
ggagtaagataat

SEQ ID NO: 264144 - DNA, 13 bp, Artificial Sequence
  Oligonucleotide for detection of SNP TSC0008929
attatcttactcc

SEQ ID NO: 264145 - DNA, 13 bp, Artificial Sequence
  Oligonucleotide for detection of SNP TSC0008929
ggagtatgataat

SEQ ID NO: 264146 - DNA, 13 bp, Artificial Sequence
  Oligonucleotide for detection of SNP TSC0008929
attatcatactcc

SEQ ID NO: 264147 - DNA, 13 bp, Artificial Sequence
  Oligonucleotide for detection of SNP TSC0008929
attgttttattty

SEQ ID NO: 264148 - DNA, 13 bp, Artificial Sequence
  Oligonucleotide for detection of SNP TSC0008929
raaataaaacaat

SEQ ID NO: 264149 - DNA, 13 bp, Artificial Sequence
  Oligonucleotide for detection of SNP TSC0008929
attgttatattty

SEQ ID NO: 264150 - DNA, 13 bp, Artificial Sequence
  Oligonucleotide for detection of SNP TSC0008929
raaatataacaat

SEQ ID NO: 264151 - DNA, 13 bp, Artificial Sequence
  Oligonucleotide for detection of SNP TSC0010961
attgttattatat

SEQ ID NO: 264152 - DNA, 13 bp, Artificial Sequence
  Oligonucleotide for detection of SNP TSC0010961
atataataacaat

SEQ ID NO: 264153 - DNA, 13 bp, Artificial Sequence
  Oligonucleotide for detection of SNP TSC0010961
attgttgttatat

SEQ ID NO: 264154 - DNA, 13 bp, Artificial Sequence
  Oligonucleotide for detection of SNP TSC0010961
atataacaacaat

SEQ ID NO: 264155 - DNA, 13 bp, Artificial Sequence
  Oligonucleotide for detection of SNP TSC0064008
gtagttatggggt

SEQ ID NO: 264156 - DNA, 13 bp, Artificial Sequence
  Oligonucleotide for detection of SNP TSC0064008
accccataactac

SEQ ID NO: 264157 - DNA, 13 bp, Artificial Sequence
  Oligonucleotide for detection of SNP TSC0064008
gtagttgtggggt

SEQ ID NO: 264158 - DNA, 13 bp, Artificial Sequence
  Oligonucleotide for detection of SNP TSC0064008
accccacaactac

SEQ ID NO: 264159 - DNA, 13 bp, Artificial Sequence
  Oligonucleotide for detection of SNP TSC0064009
ttgattagtgtaa

SEQ ID NO: 264160 - DNA, 13 bp, Artificial Sequence
  Oligonucleotide for detection of SNP TSC0064009
ttacactaatcaa

SEQ ID NO: 264161 - DNA, 13 bp, Artificial Sequence
  Oligonucleotide for detection of SNP TSC0064009
ttgattggtgtaa

SEQ ID NO: 264162 - DNA, 13 bp, Artificial Sequence
  Oligonucleotide for detection of SNP TSC0064009
ttacaccaatcaa

SEQ ID NO: 264163 - DNA, 13 bp, Artificial Sequence
  Oligonucleotide for detection of SNP TSC0064010
atagtgattggtt

SEQ ID NO: 264164 - DNA, 13 bp, Artificial Sequence
  Oligonucleotide for detection of SNP TSC0064010
aaccaatcactat

SEQ ID NO: 264165 - DNA, 13 bp, Artificial Sequence
  Oligonucleotide for detection of SNP TSC0064010
atagtggttggtt

SEQ ID NO: 264166 - DNA, 13 bp, Artificial Sequence
  Oligonucleotide for detection of SNP TSC0064010
aaccaaccactat

SEQ ID NO: 264167 - DNA, 13 bp, Artificial Sequence
  Oligonucleotide for detection of SNP TSC0064011
tgttggaagggag

SEQ ID NO: 264168 - DNA, 13 bp, Artificial Sequence
  Oligonucleotide for detection of SNP TSC0064011
ctcccttccaaca

SEQ ID NO: 264169 - DNA, 13 bp, Artificial Sequence
  Oligonucleotide for detection of SNP TSC0064011
tgttggtagggag

SEQ ID NO: 264170 - DNA, 13 bp, Artificial Sequence
  Oligonucleotide for detection of SNP TSC0064011
ctccctaccaaca

SEQ ID NO: 264171 - DNA, 13 bp, Artificial Sequence
  Oligonucleotide for detection of SNP TSC0000092
agtttcgatatat

SEQ ID NO: 264172 - DNA, 13 bp, Artificial Sequence
  Oligonucleotide for detection of SNP TSC0000092
atatatcgaaact

SEQ ID NO: 264173 - DNA, 13 bp, Artificial Sequence
  Oligonucleotide for detection of SNP TSC0000092
atgtattgagatt

SEQ ID NO: 264174 - DNA, 13 bp, Artificial Sequence
  Oligonucleotide for detection of SNP TSC0000092
aatctcaatacat

SEQ ID NO: 264175 - DNA, 13 bp, Artificial Sequence
  Oligonucleotide for detection of SNP TSC0000092
atgtatcgagatt

SEQ ID NO: 264176 - DNA, 13 bp, Artificial Sequence
  Oligonucleotide for detection of SNP TSC0000092
aatctcgatacat

SEQ ID NO: 264177 - DNA, 13 bp, Artificial Sequence
  Oligonucleotide for detection of SNP TSC0009945
gaatattttatty

SEQ ID NO: 264178 - DNA, 13 bp, Artificial Sequence
  Oligonucleotide for detection of SNP TSC0009945
raataaaatattc

SEQ ID NO: 264179 - DNA, 13 bp, Artificial Sequence
  Oligonucleotide for detection of SNP TSC0009945
gaatatgttatty

SEQ ID NO: 264180 - DNA, 13 bp, Artificial Sequence
  Oligonucleotide for detection of SNP TSC0009945
raataacatattc

SEQ ID NO: 264181 - DNA, 13 bp, Artificial Sequence
  Oligonucleotide for detection of SNP TSC0009945
gaatacgttatty

SEQ ID NO: 264182 - DNA, 13 bp, Artificial Sequence
  Oligonucleotide for detection of SNP TSC0009945
raataacgtattc

SEQ ID NO: 264183 - DNA, 13 bp, Artificial Sequence
  Oligonucleotide for detection of SNP TSC0009945
ggatggagtatty

SEQ ID NO: 264184 - DNA, 13 bp, Artificial Sequence
  Oligonucleotide for detection of SNP TSC0009945
raatactccatcc

SEQ ID NO: 264185 - DNA, 13 bp, Artificial Sequence
  Oligonucleotide for detection of SNP TSC0009945
ggatggtgtatty

SEQ ID NO: 264186 - DNA, 13 bp, Artificial Sequence
  Oligonucleotide for detection of SNP TSC0009945
raatacaccatcc

SEQ ID NO: 264187 - DNA, 13 bp, Artificial Sequence
  Oligonucleotide for detection of SNP TSC0009945
ggatggcgtatty

SEQ ID NO: 264188 - DNA, 13 bp, Artificial Sequence
  Oligonucleotide for detection of SNP TSC0009945
raatacgccatcc

SEQ ID NO: 264189 - DNA, 13 bp, Artificial Sequence
  Oligonucleotide for detection of SNP TSC0064017
gttatagtattta

SEQ ID NO: 264190 - DNA, 13 bp, Artificial Sequence
  Oligonucleotide for detection of SNP TSC0064017
taaatactataac

SEQ ID NO: 264191 - DNA, 13 bp, Artificial Sequence
  Oligonucleotide for detection of SNP TSC0064019
gtttttataggta

SEQ ID NO: 264192 - DNA, 13 bp, Artificial Sequence
  Oligonucleotide for detection of SNP TSC0064019
tacctataaaaac

SEQ ID NO: 264193 - DNA, 13 bp, Artificial Sequence
  Oligonucleotide for detection of SNP TSC0064023
ttttggagatata

SEQ ID NO: 264194 - DNA, 13 bp, Artificial Sequence
  Oligonucleotide for detection of SNP TSC0064023
tatatctccaaaa

SEQ ID NO: 264195 - DNA, 13 bp, Artificial Sequence
  Oligonucleotide for detection of SNP TSC0064023
ttttggggatata

SEQ ID NO: 264196 - DNA, 13 bp, Artificial Sequence
  Oligonucleotide for detection of SNP TSC0064023
tatatccccaaaa

SEQ ID NO: 264197 - DNA, 13 bp, Artificial Sequence
  Oligonucleotide for detection of SNP TSC0064024
ttgttcgttgtty

SEQ ID NO: 264198 - DNA, 13 bp, Artificial Sequence
  Oligonucleotide for detection of SNP TSC0064024
raacaacgaacaa

SEQ ID NO: 264199 - DNA, 13 bp, Artificial Sequence
  Oligonucleotide for detection of SNP TSC0064024
gggtaatgagtaa

SEQ ID NO: 264200 - DNA, 13 bp, Artificial Sequence
  Oligonucleotide for detection of SNP TSC0064024
ttactcattaccc

SEQ ID NO: 264201 - DNA, 13 bp, Artificial Sequence
  Oligonucleotide for detection of SNP TSC0064024
gggtaacgagtaa

SEQ ID NO: 264202 - DNA, 13 bp, Artificial Sequence
  Oligonucleotide for detection of SNP TSC0064024
ttactcgttaccc

SEQ ID NO: 264203 - DNA, 13 bp, Artificial Sequence
  Oligonucleotide for detection of SNP TSC0064025
gttttaaggagga

SEQ ID NO: 264204 - DNA, 13 bp, Artificial Sequence
  Oligonucleotide for detection of SNP TSC0064025
tcctccttaaaac

SEQ ID NO: 264205 - DNA, 13 bp, Artificial Sequence
  Oligonucleotide for detection of SNP TSC0064026
tttgtagtaaaty

SEQ ID NO: 264206 - DNA, 13 bp, Artificial Sequence
  Oligonucleotide for detection of SNP TSC0064026
ratttactacaaa

SEQ ID NO: 264207 - DNA, 13 bp, Artificial Sequence
  Oligonucleotide for detection of SNP TSC0064026
tttgtaataaaty

SEQ ID NO: 264208 - DNA, 13 bp, Artificial Sequence
  Oligonucleotide for detection of SNP TSC0064026
ratttattacaaa

SEQ ID NO: 264209 - DNA, 13 bp, Artificial Sequence
  Oligonucleotide for detection of SNP TSC0064028
tattttatggtag

SEQ ID NO: 264210 - DNA, 13 bp, Artificial Sequence
  Oligonucleotide for detection of SNP TSC0064028
ctaccataaaata

SEQ ID NO: 264211 - DNA, 13 bp, Artificial Sequence
  Oligonucleotide for detection of SNP TSC0064028
tattttgtggtag

SEQ ID NO: 264212 - DNA, 13 bp, Artificial Sequence
  Oligonucleotide for detection of SNP TSC0064028
ctaccacaaaata

SEQ ID NO: 264213 - DNA, 13 bp, Artificial Sequence
  Oligonucleotide for detection of SNP TSC0064028
tatttcgtggtag

SEQ ID NO: 264214 - DNA, 13 bp, Artificial Sequence
  Oligonucleotide for detection of SNP TSC0064028
ctaccacgaaata

SEQ ID NO: 264215 - DNA, 13 bp, Artificial Sequence
  Oligonucleotide for detection of SNP TSC0064028
ttgttatgggatg

SEQ ID NO: 264216 - DNA, 13 bp, Artificial Sequence
  Oligonucleotide for detection of SNP TSC0064028
catcccataacaa

SEQ ID NO: 264217 - DNA, 13 bp, Artificial Sequence
  Oligonucleotide for detection of SNP TSC0064028
ttgttacgggatg

SEQ ID NO: 264218 - DNA, 13 bp, Artificial Sequence
  Oligonucleotide for detection of SNP TSC0064028
catcccgtaacaa

SEQ ID NO: 264219 - DNA, 13 bp, Artificial Sequence
  Oligonucleotide for detection of SNP TSC0064029
ggtttgaatgtag

SEQ ID NO: 264220 - DNA, 13 bp, Artificial Sequence
  Oligonucleotide for detection of SNP TSC0064029
ctacattcaaacc

SEQ ID NO: 264221 - DNA, 13 bp, Artificial Sequence
  Oligonucleotide for detection of SNP TSC0064029
ggtttggatgtag

SEQ ID NO: 264222 - DNA, 13 bp, Artificial Sequence
  Oligonucleotide for detection of SNP TSC0064029
ctacatccaaacc

SEQ ID NO: 264223 - DNA, 13 bp, Artificial Sequence
  Oligonucleotide for detection of SNP TSC0064030
gagtattgtatta

SEQ ID NO: 264224 - DNA, 13 bp, Artificial Sequence
  Oligonucleotide for detection of SNP TSC0064030
taatacaatactc

SEQ ID NO: 264225 - DNA, 13 bp, Artificial Sequence
  Oligonucleotide for detection of SNP TSC0064030
gagtatggtatta

SEQ ID NO: 264226 - DNA, 13 bp, Artificial Sequence
  Oligonucleotide for detection of SNP TSC0064030
taataccatactc

SEQ ID NO: 264227 - DNA, 13 bp, Artificial Sequence
  Oligonucleotide for detection of SNP TSC0064030
tggtgtaatgtty

SEQ ID NO: 264228 - DNA, 13 bp, Artificial Sequence
  Oligonucleotide for detection of SNP TSC0064030
raacattacacca

SEQ ID NO: 264229 - DNA, 13 bp, Artificial Sequence
  Oligonucleotide for detection of SNP TSC0064030
tggtgttatgtty

SEQ ID NO: 264230 - DNA, 13 bp, Artificial Sequence
  Oligonucleotide for detection of SNP TSC0064030
raacataacacca

SEQ ID NO: 264231 - DNA, 13 bp, Artificial Sequence
  Oligonucleotide for detection of SNP TSC0064031
ggttaaggtagtt

SEQ ID NO: 264232 - DNA, 13 bp, Artificial Sequence
  Oligonucleotide for detection of SNP TSC0064031
aactaccttaacc

SEQ ID NO: 264233 - DNA, 13 bp, Artificial Sequence
  Oligonucleotide for detection of SNP TSC0064031
ggttaaagtagtt

SEQ ID NO: 264234 - DNA, 13 bp, Artificial Sequence
  Oligonucleotide for detection of SNP TSC0064031
aactactttaacc

SEQ ID NO: 264235 - DNA, 13 bp, Artificial Sequence
  Oligonucleotide for detection of SNP TSC0064032
tatattggtttta

SEQ ID NO: 264236 - DNA, 13 bp, Artificial Sequence
  Oligonucleotide for detection of SNP TSC0064032
taaaaccaatata

SEQ ID NO: 264237 - DNA, 13 bp, Artificial Sequence
  Oligonucleotide for detection of SNP TSC0064032
tatattagtttta

SEQ ID NO: 264238 - DNA, 13 bp, Artificial Sequence
  Oligonucleotide for detection of SNP TSC0064032
taaaactaatata

SEQ ID NO: 264239 - DNA, 13 bp, Artificial Sequence
  Oligonucleotide for detection of SNP TSC0064033
ttttttaagtggg

SEQ ID NO: 264240 - DNA, 13 bp, Artificial Sequence
  Oligonucleotide for detection of SNP TSC0064033
cccacttaaaaaa

SEQ ID NO: 264241 - DNA, 13 bp, Artificial Sequence
  Oligonucleotide for detection of SNP TSC0064033
ttttttgagtggg

SEQ ID NO: 264242 - DNA, 13 bp, Artificial Sequence
  Oligonucleotide for detection of SNP TSC0064033
cccactcaaaaaa

SEQ ID NO: 264243 - DNA, 13 bp, Artificial Sequence
  Oligonucleotide for detection of SNP TSC0064033
ttttttaagcggg

SEQ ID NO: 264244 - DNA, 13 bp, Artificial Sequence
  Oligonucleotide for detection of SNP TSC0064033
cccgcttaaaaaa

SEQ ID NO: 264245 - DNA, 13 bp, Artificial Sequence
  Oligonucleotide for detection of SNP TSC0064033
ttttttgagcggg

SEQ ID NO: 264246 - DNA, 13 bp, Artificial Sequence
  Oligonucleotide for detection of SNP TSC0064033
cccgctcaaaaaa

SEQ ID NO: 264247 - DNA, 13 bp, Artificial Sequence
  Oligonucleotide for detection of SNP TSC0064035
ataaaagaaaata

SEQ ID NO: 264248 - DNA, 13 bp, Artificial Sequence
  Oligonucleotide for detection of SNP TSC0064035
tattttcttttat

SEQ ID NO: 264249 - DNA, 13 bp, Artificial Sequence
  Oligonucleotide for detection of SNP TSC0064036
tggatatggtggt

SEQ ID NO: 264250 - DNA, 13 bp, Artificial Sequence
  Oligonucleotide for detection of SNP TSC0064036
accaccatatcca

SEQ ID NO: 264251 - DNA, 13 bp, Artificial Sequence
  Oligonucleotide for detection of SNP TSC0064036
tggatacggtggt

SEQ ID NO: 264252 - DNA, 13 bp, Artificial Sequence
  Oligonucleotide for detection of SNP TSC0064036
accaccgtatcca

SEQ ID NO: 264253 - DNA, 13 bp, Artificial Sequence
  Oligonucleotide for detection of SNP TSC0064037
tgttttatggggg

SEQ ID NO: 264254 - DNA, 13 bp, Artificial Sequence
  Oligonucleotide for detection of SNP TSC0064037
cccccataaaaca

SEQ ID NO: 264255 - DNA, 13 bp, Artificial Sequence
  Oligonucleotide for detection of SNP TSC0064037
tgttttgtggggg

SEQ ID NO: 264256 - DNA, 13 bp, Artificial Sequence
  Oligonucleotide for detection of SNP TSC0064037
cccccacaaaaca

SEQ ID NO: 264257 - DNA, 13 bp, Artificial Sequence
  Oligonucleotide for detection of SNP TSC0064037
cgttttatggggg

SEQ ID NO: 264258 - DNA, 13 bp, Artificial Sequence
  Oligonucleotide for detection of SNP TSC0064037
cccccataaaacg

SEQ ID NO: 264259 - DNA, 13 bp, Artificial Sequence
  Oligonucleotide for detection of SNP TSC0064037
cgttttgtggggg

SEQ ID NO: 264260 - DNA, 13 bp, Artificial Sequence
  Oligonucleotide for detection of SNP TSC0064037
cccccacaaaacg

SEQ ID NO: 264261 - DNA, 13 bp, Artificial Sequence
  Oligonucleotide for detection of SNP TSC0064037
tgtttcgtggggg

SEQ ID NO: 264262 - DNA, 13 bp, Artificial Sequence
  Oligonucleotide for detection of SNP TSC0064037
cccccacgaaaca

SEQ ID NO: 264263 - DNA, 13 bp, Artificial Sequence
  Oligonucleotide for detection of SNP TSC0064037
cgtttcgtggggg

SEQ ID NO: 264264 - DNA, 13 bp, Artificial Sequence
  Oligonucleotide for detection of SNP TSC0064037
cccccacgaaacg

SEQ ID NO: 264265 - DNA, 13 bp, Artificial Sequence
  Oligonucleotide for detection of SNP TSC0064037
tttttatgaagtg

SEQ ID NO: 264266 - DNA, 13 bp, Artificial Sequence
  Oligonucleotide for detection of SNP TSC0064037
cacttcataaaaa

SEQ ID NO: 264267 - DNA, 13 bp, Artificial Sequence
  Oligonucleotide for detection of SNP TSC0064037
tttttatgaagcg

SEQ ID NO: 264268 - DNA, 13 bp, Artificial Sequence
  Oligonucleotide for detection of SNP TSC0064037
cgcttcataaaaa

SEQ ID NO: 264269 - DNA, 13 bp, Artificial Sequence
  Oligonucleotide for detection of SNP TSC0064037
tttttacgaagtg

SEQ ID NO: 264270 - DNA, 13 bp, Artificial Sequence
  Oligonucleotide for detection of SNP TSC0064037
cacttcgtaaaaa

SEQ ID NO: 264271 - DNA, 13 bp, Artificial Sequence
  Oligonucleotide for detection of SNP TSC0064037
tttttacgaagcg

SEQ ID NO: 264272 - DNA, 13 bp, Artificial Sequence
  Oligonucleotide for detection of SNP TSC0064037
cgcttcgtaaaaa

SEQ ID NO: 264273 - DNA, 13 bp, Artificial Sequence
  Oligonucleotide for detection of SNP TSC0064040
gggttgtgaaaty

SEQ ID NO: 264274 - DNA, 13 bp, Artificial Sequence
  Oligonucleotide for detection of SNP TSC0064040
ratttcacaaccc

SEQ ID NO: 264275 - DNA, 13 bp, Artificial Sequence
  Oligonucleotide for detection of SNP TSC0064040
gggttgggaaaty

SEQ ID NO: 264276 - DNA, 13 bp, Artificial Sequence
  Oligonucleotide for detection of SNP TSC0064040
ratttcccaaccc

SEQ ID NO: 264277 - DNA, 13 bp, Artificial Sequence
  Oligonucleotide for detection of SNP TSC0064040
gggtcgtgaaaty

SEQ ID NO: 264278 - DNA, 13 bp, Artificial Sequence
  Oligonucleotide for detection of SNP TSC0064040
ratttcacgaccc

SEQ ID NO: 264279 - DNA, 13 bp, Artificial Sequence
  Oligonucleotide for detection of SNP TSC0064040
gggtcgggaaaty

SEQ ID NO: 264280 - DNA, 13 bp, Artificial Sequence
  Oligonucleotide for detection of SNP TSC0064040
ratttcccgaccc

SEQ ID NO: 264281 - DNA, 13 bp, Artificial Sequence
  Oligonucleotide for detection of SNP TSC0064040
ggttttttggtty

SEQ ID NO: 264282 - DNA, 13 bp, Artificial Sequence
  Oligonucleotide for detection of SNP TSC0064040
raaccaaaaaacc

SEQ ID NO: 264283 - DNA, 13 bp, Artificial Sequence
  Oligonucleotide for detection of SNP TSC0064040
ggttttacggtty

SEQ ID NO: 264284 - DNA, 13 bp, Artificial Sequence
  Oligonucleotide for detection of SNP TSC0064040
raaccgtaaaacc

SEQ ID NO: 264285 - DNA, 13 bp, Artificial Sequence
  Oligonucleotide for detection of SNP TSC0064040
ggtttttcggtty

SEQ ID NO: 264286 - DNA, 13 bp, Artificial Sequence
  Oligonucleotide for detection of SNP TSC0064040
raaccgaaaaacc

SEQ ID NO: 264287 - DNA, 13 bp, Artificial Sequence
  Oligonucleotide for detection of SNP TSC0064041
ttattattgattt

SEQ ID NO: 264288 - DNA, 13 bp, Artificial Sequence
  Oligonucleotide for detection of SNP TSC0064041
aaatcaataataa

SEQ ID NO: 264289 - DNA, 13 bp, Artificial Sequence
  Oligonucleotide for detection of SNP TSC0064041
ttattaacgattt

SEQ ID NO: 264290 - DNA, 13 bp, Artificial Sequence
  Oligonucleotide for detection of SNP TSC0064041
aaatcgttaataa

SEQ ID NO: 264291 - DNA, 13 bp, Artificial Sequence
  Oligonucleotide for detection of SNP TSC0064041
ttattatcgattt

SEQ ID NO: 264292 - DNA, 13 bp, Artificial Sequence
  Oligonucleotide for detection of SNP TSC0064041
aaatcgataataa

SEQ ID NO: 264293 - DNA, 13 bp, Artificial Sequence
  Oligonucleotide for detection of SNP TSC0064041
aagttgttggtag

SEQ ID NO: 264294 - DNA, 13 bp, Artificial Sequence
  Oligonucleotide for detection of SNP TSC0064041
ctaccaacaactt

SEQ ID NO: 264295 - DNA, 13 bp, Artificial Sequence
  Oligonucleotide for detection of SNP TSC0064041
aagttgatggtag

SEQ ID NO: 264296 - DNA, 13 bp, Artificial Sequence
  Oligonucleotide for detection of SNP TSC0064041
ctaccatcaactt

SEQ ID NO: 264297 - DNA, 13 bp, Artificial Sequence
  Oligonucleotide for detection of SNP TSC0064041
aagtcgttggtag

SEQ ID NO: 264298 - DNA, 13 bp, Artificial Sequence
  Oligonucleotide for detection of SNP TSC0064041
ctaccaacgactt

SEQ ID NO: 264299 - DNA, 13 bp, Artificial Sequence
  Oligonucleotide for detection of SNP TSC0064041
aagtcgatggtag

SEQ ID NO: 264300 - DNA, 13 bp, Artificial Sequence
  Oligonucleotide for detection of SNP TSC0064041
ctaccatcgactt

SEQ ID NO: 264301 - DNA, 13 bp, Artificial Sequence
  Oligonucleotide for detection of SNP TSC0064044
gtagatttaatta

SEQ ID NO: 264302 - DNA, 13 bp, Artificial Sequence
  Oligonucleotide for detection of SNP TSC0064044
taattaaatctac

SEQ ID NO: 264303 - DNA, 13 bp, Artificial Sequence
  Oligonucleotide for detection of SNP TSC0064044
taattagatttgy

SEQ ID NO: 264304 - DNA, 13 bp, Artificial Sequence
  Oligonucleotide for detection of SNP TSC0064044
rcaaatctaatta

SEQ ID NO: 264305 - DNA, 13 bp, Artificial Sequence
  Oligonucleotide for detection of SNP TSC0064044
taattatatttgy

SEQ ID NO: 264306 - DNA, 13 bp, Artificial Sequence
  Oligonucleotide for detection of SNP TSC0064044
rcaaatataatta

SEQ ID NO: 264307 - DNA, 13 bp, Artificial Sequence
  Oligonucleotide for detection of SNP TSC0064045
tatgtagagtata

SEQ ID NO: 264308 - DNA, 13 bp, Artificial Sequence
  Oligonucleotide for detection of SNP TSC0064045
tatactctacata

SEQ ID NO: 264309 - DNA, 13 bp, Artificial Sequence
  Oligonucleotide for detection of SNP TSC0064045
tatgtaaagtata

SEQ ID NO: 264310 - DNA, 13 bp, Artificial Sequence
  Oligonucleotide for detection of SNP TSC0064045
tatactttacata

SEQ ID NO: 264311 - DNA, 13 bp, Artificial Sequence
  Oligonucleotide for detection of SNP TSC0064049
taagatggaaatg

SEQ ID NO: 264312 - DNA, 13 bp, Artificial Sequence
  Oligonucleotide for detection of SNP TSC0064049
catttccatctta

SEQ ID NO: 264313 - DNA, 13 bp, Artificial Sequence
  Oligonucleotide for detection of SNP TSC0064049
taagatagaaatg

SEQ ID NO: 264314 - DNA, 13 bp, Artificial Sequence
  Oligonucleotide for detection of SNP TSC0064049
catttctatctta

SEQ ID NO: 264315 - DNA, 13 bp, Artificial Sequence
  Oligonucleotide for detection of SNP TSC0064049
taagacggaaatg

SEQ ID NO: 264316 - DNA, 13 bp, Artificial Sequence
  Oligonucleotide for detection of SNP TSC0064049
catttccgtctta

SEQ ID NO: 264317 - DNA, 13 bp, Artificial Sequence
  Oligonucleotide for detection of SNP TSC0064050
gtttttatgaatg

SEQ ID NO: 264318 - DNA, 13 bp, Artificial Sequence
  Oligonucleotide for detection of SNP TSC0064050
cattcataaaaac

SEQ ID NO: 264319 - DNA, 13 bp, Artificial Sequence
  Oligonucleotide for detection of SNP TSC0064050
gtttttgtgaatg

SEQ ID NO: 264320 - DNA, 13 bp, Artificial Sequence
  Oligonucleotide for detection of SNP TSC0064050
cattcacaaaaac

SEQ ID NO: 264321 - DNA, 13 bp, Artificial Sequence
  Oligonucleotide for detection of SNP TSC0064055
taagaatgaaatt

SEQ ID NO: 264322 - DNA, 13 bp, Artificial Sequence
  Oligonucleotide for detection of SNP TSC0064055
aatttcattctta

SEQ ID NO: 264323 - DNA, 13 bp, Artificial Sequence
  Oligonucleotide for detection of SNP TSC0064055
taagaacgaaatt

SEQ ID NO: 264324 - DNA, 13 bp, Artificial Sequence
  Oligonucleotide for detection of SNP TSC0064055
aatttcgttctta

SEQ ID NO: 264325 - DNA, 13 bp, Artificial Sequence
  Oligonucleotide for detection of SNP TSC0064056
ggattataggtat

SEQ ID NO: 264326 - DNA, 13 bp, Artificial Sequence
  Oligonucleotide for detection of SNP TSC0064056
atacctataatcc

SEQ ID NO: 264327 - DNA, 13 bp, Artificial Sequence
  Oligonucleotide for detection of SNP TSC0064056
ggattagaggtat

SEQ ID NO: 264328 - DNA, 13 bp, Artificial Sequence
  Oligonucleotide for detection of SNP TSC0064056
atacctctaatcc

SEQ ID NO: 264329 - DNA, 13 bp, Artificial Sequence
  Oligonucleotide for detection of SNP TSC0064056
atgtttttaatty

SEQ ID NO: 264330 - DNA, 13 bp, Artificial Sequence
  Oligonucleotide for detection of SNP TSC0064056
raattaaaaacat

SEQ ID NO: 264331 - DNA, 13 bp, Artificial Sequence
  Oligonucleotide for detection of SNP TSC0064058
ggatgtatttgtg

SEQ ID NO: 264332 - DNA, 13 bp, Artificial Sequence
  Oligonucleotide for detection of SNP TSC0064058
cacaaatacatcc

SEQ ID NO: 264333 - DNA, 13 bp, Artificial Sequence
  Oligonucleotide for detection of SNP TSC0064058
ggatgtgtttgtg

SEQ ID NO: 264334 - DNA, 13 bp, Artificial Sequence
  Oligonucleotide for detection of SNP TSC0064058
cacaaacacatcc

SEQ ID NO: 264335 - DNA, 13 bp, Artificial Sequence
  Oligonucleotide for detection of SNP TSC0064058
ggatgcgtttgtg

SEQ ID NO: 264336 - DNA, 13 bp, Artificial Sequence
  Oligonucleotide for detection of SNP TSC0064058
cacaaacgcatcc

SEQ ID NO: 264337 - DNA, 13 bp, Artificial Sequence
  Oligonucleotide for detection of SNP TSC0064059
atgatatgtgtay

SEQ ID NO: 264338 - DNA, 13 bp, Artificial Sequence
  Oligonucleotide for detection of SNP TSC0064059
rtacacatatcat

SEQ ID NO: 264339 - DNA, 13 bp, Artificial Sequence
  Oligonucleotide for detection of SNP TSC0064059
atgatacgtgtay

SEQ ID NO: 264340 - DNA, 13 bp, Artificial Sequence
  Oligonucleotide for detection of SNP TSC0064059
rtacacgtatcat

SEQ ID NO: 264341 - DNA, 13 bp, Artificial Sequence
  Oligonucleotide for detection of SNP TSC0064059
gtgtatgtgttat

SEQ ID NO: 264342 - DNA, 13 bp, Artificial Sequence
  Oligonucleotide for detection of SNP TSC0064059
ataacacatacac

SEQ ID NO: 264343 - DNA, 13 bp, Artificial Sequence
  Oligonucleotide for detection of SNP TSC0064059
gtgtatatgttat

SEQ ID NO: 264344 - DNA, 13 bp, Artificial Sequence
  Oligonucleotide for detection of SNP TSC0064059
ataacatatacac

SEQ ID NO: 264345 - DNA, 13 bp, Artificial Sequence
  Oligonucleotide for detection of SNP TSC0064059
gtgtacgtgttat

SEQ ID NO: 264346 - DNA, 13 bp, Artificial Sequence
  Oligonucleotide for detection of SNP TSC0064059
ataacacgtacac

SEQ ID NO: 264347 - DNA, 13 bp, Artificial Sequence
  Oligonucleotide for detection of SNP TSC0064062
aatttaagtgaat

SEQ ID NO: 264348 - DNA, 13 bp, Artificial Sequence
  Oligonucleotide for detection of SNP TSC0064062
attcacttaaatt

SEQ ID NO: 264349 - DNA, 13 bp, Artificial Sequence
  Oligonucleotide for detection of SNP TSC0064062
aatttaggtgaat

SEQ ID NO: 264350 - DNA, 13 bp, Artificial Sequence
  Oligonucleotide for detection of SNP TSC0064062
attcacctaaatt

SEQ ID NO: 264351 - DNA, 13 bp, Artificial Sequence
  Oligonucleotide for detection of SNP TSC0064063
tatggggtgttgt

SEQ ID NO: 264352 - DNA, 13 bp, Artificial Sequence
  Oligonucleotide for detection of SNP TSC0064063
acaacaccccata

SEQ ID NO: 264353 - DNA, 13 bp, Artificial Sequence
  Oligonucleotide for detection of SNP TSC0064063
tatgggatgttgt

SEQ ID NO: 264354 - DNA, 13 bp, Artificial Sequence
  Oligonucleotide for detection of SNP TSC0064063
acaacatcccata

SEQ ID NO: 264355 - DNA, 13 bp, Artificial Sequence
  Oligonucleotide for detection of SNP TSC0064064
ttagtaaaaatgg

SEQ ID NO: 264356 - DNA, 13 bp, Artificial Sequence
  Oligonucleotide for detection of SNP TSC0064064
ccatttttactaa

SEQ ID NO: 264357 - DNA, 13 bp, Artificial Sequence
  Oligonucleotide for detection of SNP TSC0064064
ttagtagaaatgg

SEQ ID NO: 264358 - DNA, 13 bp, Artificial Sequence
  Oligonucleotide for detection of SNP TSC0064064
ccatttctactaa

SEQ ID NO: 264359 - DNA, 13 bp, Artificial Sequence
  Oligonucleotide for detection of SNP TSC0064064
ttagtaaaaacgg

SEQ ID NO: 264360 - DNA, 13 bp, Artificial Sequence
  Oligonucleotide for detection of SNP TSC0064064
ccgtttttactaa

SEQ ID NO: 264361 - DNA, 13 bp, Artificial Sequence
  Oligonucleotide for detection of SNP TSC0064064
ttagtagaaacgg

SEQ ID NO: 264362 - DNA, 13 bp, Artificial Sequence
  Oligonucleotide for detection of SNP TSC0064064
ccgtttctactaa

SEQ ID NO: 264363 - DNA, 13 bp, Artificial Sequence
  Oligonucleotide for detection of SNP TSC0064065
taatataggggag

SEQ ID NO: 264364 - DNA, 13 bp, Artificial Sequence
  Oligonucleotide for detection of SNP TSC0064065
ctcccctatatta

SEQ ID NO: 264365 - DNA, 13 bp, Artificial Sequence
  Oligonucleotide for detection of SNP TSC0064065
taatatgggggag

SEQ ID NO: 264366 - DNA, 13 bp, Artificial Sequence
  Oligonucleotide for detection of SNP TSC0064065
ctcccccatatta

SEQ ID NO: 264367 - DNA, 13 bp, Artificial Sequence
  Oligonucleotide for detection of SNP TSC0064066
agagtaaatatta

SEQ ID NO: 264368 - DNA, 13 bp, Artificial Sequence
  Oligonucleotide for detection of SNP TSC0064066
taatatttactct

SEQ ID NO: 264369 - DNA, 13 bp, Artificial Sequence
  Oligonucleotide for detection of SNP TSC0064066
agagtagatatta

SEQ ID NO: 264370 - DNA, 13 bp, Artificial Sequence
  Oligonucleotide for detection of SNP TSC0064066
taatatctactct

SEQ ID NO: 264371 - DNA, 13 bp, Artificial Sequence
  Oligonucleotide for detection of SNP TSC0064067
atagttggtttgt

SEQ ID NO: 264372 - DNA, 13 bp, Artificial Sequence
  Oligonucleotide for detection of SNP TSC0064067
acaaaccaactat

SEQ ID NO: 264373 - DNA, 13 bp, Artificial Sequence
  Oligonucleotide for detection of SNP TSC0064067
atagttagtttgt

SEQ ID NO: 264374 - DNA, 13 bp, Artificial Sequence
  Oligonucleotide for detection of SNP TSC0064067
acaaactaactat

SEQ ID NO: 264375 - DNA, 13 bp, Artificial Sequence
  Oligonucleotide for detection of SNP TSC0064067
atagtcggtttgt

SEQ ID NO: 264376 - DNA, 13 bp, Artificial Sequence
  Oligonucleotide for detection of SNP TSC0064067
acaaaccgactat

SEQ ID NO: 264377 - DNA, 13 bp, Artificial Sequence
  Oligonucleotide for detection of SNP TSC0064068
tgaagtatggagt

SEQ ID NO: 264378 - DNA, 13 bp, Artificial Sequence
  Oligonucleotide for detection of SNP TSC0064068
actccatacttca

SEQ ID NO: 264379 - DNA, 13 bp, Artificial Sequence
  Oligonucleotide for detection of SNP TSC0064068
tgaagtgtggagt

SEQ ID NO: 264380 - DNA, 13 bp, Artificial Sequence
  Oligonucleotide for detection of SNP TSC0064068
actccacacttca

SEQ ID NO: 264381 - DNA, 13 bp, Artificial Sequence
  Oligonucleotide for detection of SNP TSC0064070
atatggggataay

SEQ ID NO: 264382 - DNA, 13 bp, Artificial Sequence
  Oligonucleotide for detection of SNP TSC0064070
rttatccccatat

SEQ ID NO: 264383 - DNA, 13 bp, Artificial Sequence
  Oligonucleotide for detection of SNP TSC0064070
atatggagataay

SEQ ID NO: 264384 - DNA, 13 bp, Artificial Sequence
  Oligonucleotide for detection of SNP TSC0064070
rttatctccatat

SEQ ID NO: 264385 - DNA, 13 bp, Artificial Sequence
  Oligonucleotide for detection of SNP TSC0064071
tgaatgtgagggg

SEQ ID NO: 264386 - DNA, 13 bp, Artificial Sequence
  Oligonucleotide for detection of SNP TSC0064071
cccctcacattca

SEQ ID NO: 264387 - DNA, 13 bp, Artificial Sequence
  Oligonucleotide for detection of SNP TSC0064071
tgaatgcgagggg

SEQ ID NO: 264388 - DNA, 13 bp, Artificial Sequence
  Oligonucleotide for detection of SNP TSC0064071
cccctcgcattca

SEQ ID NO: 264389 - DNA, 13 bp, Artificial Sequence
  Oligonucleotide for detection of SNP TSC0064072
aagtatttaataa

SEQ ID NO: 264390 - DNA, 13 bp, Artificial Sequence
  Oligonucleotide for detection of SNP TSC0064072
ttattaaatactt

SEQ ID NO: 264391 - DNA, 13 bp, Artificial Sequence
  Oligonucleotide for detection of SNP TSC0064072
ttattgggtattt

SEQ ID NO: 264392 - DNA, 13 bp, Artificial Sequence
  Oligonucleotide for detection of SNP TSC0064072
aaatacccaataa

SEQ ID NO: 264393 - DNA, 13 bp, Artificial Sequence
  Oligonucleotide for detection of SNP TSC0064073
tttgtttgtggaa

SEQ ID NO: 264394 - DNA, 13 bp, Artificial Sequence
  Oligonucleotide for detection of SNP TSC0064073
ttccacaaacaaa

SEQ ID NO: 264395 - DNA, 13 bp, Artificial Sequence
  Oligonucleotide for detection of SNP TSC0064073
tttgttcgtggaa

SEQ ID NO: 264396 - DNA, 13 bp, Artificial Sequence
  Oligonucleotide for detection of SNP TSC0064073
ttccacgaacaaa

SEQ ID NO: 264397 - DNA, 13 bp, Artificial Sequence
  Oligonucleotide for detection of SNP TSC0064073
ttttatggatagg

SEQ ID NO: 264398 - DNA, 13 bp, Artificial Sequence
  Oligonucleotide for detection of SNP TSC0064073
cctatccataaaa

SEQ ID NO: 264399 - DNA, 13 bp, Artificial Sequence
  Oligonucleotide for detection of SNP TSC0064073
ttttatagatagg

SEQ ID NO: 264400 - DNA, 13 bp, Artificial Sequence
  Oligonucleotide for detection of SNP TSC0064073
cctatctataaaa

SEQ ID NO: 264401 - DNA, 13 bp, Artificial Sequence
  Oligonucleotide for detection of SNP TSC0064073
ttttacggatagg

SEQ ID NO: 264402 - DNA, 13 bp, Artificial Sequence
  Oligonucleotide for detection of SNP TSC0064073
cctatccgtaaaa

SEQ ID NO: 264403 - DNA, 13 bp, Artificial Sequence
  Oligonucleotide for detection of SNP TSC0064074
taaattatagtag

SEQ ID NO: 264404 - DNA, 13 bp, Artificial Sequence
  Oligonucleotide for detection of SNP TSC0064074
ctactataattta

SEQ ID NO: 264405 - DNA, 13 bp, Artificial Sequence
  Oligonucleotide for detection of SNP TSC0064074
taaattgtagtag

SEQ ID NO: 264406 - DNA, 13 bp, Artificial Sequence
  Oligonucleotide for detection of SNP TSC0064074
ctactacaattta

SEQ ID NO: 264407 - DNA, 13 bp, Artificial Sequence
  Oligonucleotide for detection of SNP TSC0064076
gttattttgatta

SEQ ID NO: 264408 - DNA, 13 bp, Artificial Sequence
  Oligonucleotide for detection of SNP TSC0064076
taatcaaaataac

SEQ ID NO: 264409 - DNA, 13 bp, Artificial Sequence
  Oligonucleotide for detection of SNP TSC0064076
gttattgtgatta

SEQ ID NO: 264410 - DNA, 13 bp, Artificial Sequence
  Oligonucleotide for detection of SNP TSC0064076
taatcacaataac

SEQ ID NO: 264411 - DNA, 13 bp, Artificial Sequence
  Oligonucleotide for detection of SNP TSC0064076
tggttagagtgay

SEQ ID NO: 264412 - DNA, 13 bp, Artificial Sequence
  Oligonucleotide for detection of SNP TSC0064076
rtcactctaacca

SEQ ID NO: 264413 - DNA, 13 bp, Artificial Sequence
  Oligonucleotide for detection of SNP TSC0064076
tggttatagtgay

SEQ ID NO: 264414 - DNA, 13 bp, Artificial Sequence
  Oligonucleotide for detection of SNP TSC0064076
rtcactataacca

SEQ ID NO: 264415 - DNA, 13 bp, Artificial Sequence
  Oligonucleotide for detection of SNP TSC0064079
gattttagggtta

SEQ ID NO: 264416 - DNA, 13 bp, Artificial Sequence
  Oligonucleotide for detection of SNP TSC0064079
taaccctaaaatc

SEQ ID NO: 264417 - DNA, 13 bp, Artificial Sequence
  Oligonucleotide for detection of SNP TSC0064079
gattttggggtta

SEQ ID NO: 264418 - DNA, 13 bp, Artificial Sequence
  Oligonucleotide for detection of SNP TSC0064079
taaccccaaaatc

SEQ ID NO: 264419 - DNA, 13 bp, Artificial Sequence
  Oligonucleotide for detection of SNP TSC0064080
tagagtatagtgg

SEQ ID NO: 264420 - DNA, 13 bp, Artificial Sequence
  Oligonucleotide for detection of SNP TSC0064080
ccactatactcta

SEQ ID NO: 264421 - DNA, 13 bp, Artificial Sequence
  Oligonucleotide for detection of SNP TSC0064080
tagagtgtagtgg

SEQ ID NO: 264422 - DNA, 13 bp, Artificial Sequence
  Oligonucleotide for detection of SNP TSC0064080
ccactacactcta

SEQ ID NO: 264423 - DNA, 13 bp, Artificial Sequence
  Oligonucleotide for detection of SNP TSC0064082
atttaatttgtay

SEQ ID NO: 264424 - DNA, 13 bp, Artificial Sequence
  Oligonucleotide for detection of SNP TSC0064082
rtacaaattaaat

SEQ ID NO: 264425 - DNA, 13 bp, Artificial Sequence
  Oligonucleotide for detection of SNP TSC0064082
atttaagttgtay

SEQ ID NO: 264426 - DNA, 13 bp, Artificial Sequence
  Oligonucleotide for detection of SNP TSC0064082
rtacaacttaaat

SEQ ID NO: 264427 - DNA, 13 bp, Artificial Sequence
  Oligonucleotide for detection of SNP TSC0064082
gtataagttaaat

SEQ ID NO: 264428 - DNA, 13 bp, Artificial Sequence
  Oligonucleotide for detection of SNP TSC0064082
atttaacttatac

SEQ ID NO: 264429 - DNA, 13 bp, Artificial Sequence
  Oligonucleotide for detection of SNP TSC0064082
gtataatttaaat

SEQ ID NO: 264430 - DNA, 13 bp, Artificial Sequence
  Oligonucleotide for detection of SNP TSC0064082
atttaaattatac

SEQ ID NO: 264431 - DNA, 13 bp, Artificial Sequence
  Oligonucleotide for detection of SNP TSC0064083
atatttgtttagg

SEQ ID NO: 264432 - DNA, 13 bp, Artificial Sequence
  Oligonucleotide for detection of SNP TSC0064083
cctaaacaaatat

SEQ ID NO: 264433 - DNA, 13 bp, Artificial Sequence
  Oligonucleotide for detection of SNP TSC0064083
atatttatttagg

SEQ ID NO: 264434 - DNA, 13 bp, Artificial Sequence
  Oligonucleotide for detection of SNP TSC0064083
cctaaataaatat

SEQ ID NO: 264435 - DNA, 13 bp, Artificial Sequence
  Oligonucleotide for detection of SNP TSC0064084
aaattatatgtgg

SEQ ID NO: 264436 - DNA, 13 bp, Artificial Sequence
  Oligonucleotide for detection of SNP TSC0064084
ccacatataattt

SEQ ID NO: 264437 - DNA, 13 bp, Artificial Sequence
  Oligonucleotide for detection of SNP TSC0064084
aaattagatgtgg

SEQ ID NO: 264438 - DNA, 13 bp, Artificial Sequence
  Oligonucleotide for detection of SNP TSC0064084
ccacatctaattt

SEQ ID NO: 264439 - DNA, 13 bp, Artificial Sequence
  Oligonucleotide for detection of SNP TSC0064084
ttatatttaattt

SEQ ID NO: 264440 - DNA, 13 bp, Artificial Sequence
  Oligonucleotide for detection of SNP TSC0064084
aaattaaatataa

SEQ ID NO: 264441 - DNA, 13 bp, Artificial Sequence
  Oligonucleotide for detection of SNP TSC0064085
ttttaagaaatta

SEQ ID NO: 264442 - DNA, 13 bp, Artificial Sequence
  Oligonucleotide for detection of SNP TSC0064085
taatttcttaaaa

SEQ ID NO: 264443 - DNA, 13 bp, Artificial Sequence
  Oligonucleotide for detection of SNP TSC0064086
attaaatagatgg

SEQ ID NO: 264444 - DNA, 13 bp, Artificial Sequence
  Oligonucleotide for detection of SNP TSC0064086
ccatctatttaat

SEQ ID NO: 264445 - DNA, 13 bp, Artificial Sequence
  Oligonucleotide for detection of SNP TSC0064086
attaaagagatgg

SEQ ID NO: 264446 - DNA, 13 bp, Artificial Sequence
  Oligonucleotide for detection of SNP TSC0064086
ccatctctttaat

SEQ ID NO: 264447 - DNA, 13 bp, Artificial Sequence
  Oligonucleotide for detection of SNP TSC0064086
ttatttttttggt

SEQ ID NO: 264448 - DNA, 13 bp, Artificial Sequence
  Oligonucleotide for detection of SNP TSC0064086
accaaaaaaataa

SEQ ID NO: 264449 - DNA, 13 bp, Artificial Sequence
  Oligonucleotide for detection of SNP TSC0064087
tttaaataaatty

SEQ ID NO: 264450 - DNA, 13 bp, Artificial Sequence
  Oligonucleotide for detection of SNP TSC0064087
raatttatttaaa

SEQ ID NO: 264451 - DNA, 13 bp, Artificial Sequence
  Oligonucleotide for detection of SNP TSC0064087
tttaaagaaatty

SEQ ID NO: 264452 - DNA, 13 bp, Artificial Sequence
  Oligonucleotide for detection of SNP TSC0064087
raatttctttaaa

SEQ ID NO: 264453 - DNA, 13 bp, Artificial Sequence
  Oligonucleotide for detection of SNP TSC0064087
ggatttatttgag

SEQ ID NO: 264454 - DNA, 13 bp, Artificial Sequence
  Oligonucleotide for detection of SNP TSC0064087
ctcaaataaatcc

SEQ ID NO: 264455 - DNA, 13 bp, Artificial Sequence
  Oligonucleotide for detection of SNP TSC0064087
ggatttttttgag

SEQ ID NO: 264456 - DNA, 13 bp, Artificial Sequence
  Oligonucleotide for detection of SNP TSC0064087
ctcaaaaaaatcc

SEQ ID NO: 264457 - DNA, 13 bp, Artificial Sequence
  Oligonucleotide for detection of SNP TSC0064088
ttttaaagaaaty

SEQ ID NO: 264458 - DNA, 13 bp, Artificial Sequence
  Oligonucleotide for detection of SNP TSC0064088
ratttctttaaaa

SEQ ID NO: 264459 - DNA, 13 bp, Artificial Sequence
  Oligonucleotide for detection of SNP TSC0064088
ttttaatgaaaty

SEQ ID NO: 264460 - DNA, 13 bp, Artificial Sequence
  Oligonucleotide for detection of SNP TSC0064088
ratttcattaaaa

SEQ ID NO: 264461 - DNA, 13 bp, Artificial Sequence
  Oligonucleotide for detection of SNP TSC0064088
gatttttttgagg

SEQ ID NO: 264462 - DNA, 13 bp, Artificial Sequence
  Oligonucleotide for detection of SNP TSC0064088
cctcaaaaaaatc

SEQ ID NO: 264463 - DNA, 13 bp, Artificial Sequence
  Oligonucleotide for detection of SNP TSC0064088
gattttattgagg

SEQ ID NO: 264464 - DNA, 13 bp, Artificial Sequence
  Oligonucleotide for detection of SNP TSC0064088
cctcaataaaatc

SEQ ID NO: 264465 - DNA, 13 bp, Artificial Sequence
  Oligonucleotide for detection of SNP TSC0064089
agtttgataaaay

SEQ ID NO: 264466 - DNA, 13 bp, Artificial Sequence
  Oligonucleotide for detection of SNP TSC0064089
rttttatcaaact

SEQ ID NO: 264467 - DNA, 13 bp, Artificial Sequence
  Oligonucleotide for detection of SNP TSC0064089
agtttgttaaaay

SEQ ID NO: 264468 - DNA, 13 bp, Artificial Sequence
  Oligonucleotide for detection of SNP TSC0064089
rttttaacaaact

SEQ ID NO: 264469 - DNA, 13 bp, Artificial Sequence
  Oligonucleotide for detection of SNP TSC0064089
gttttattaaatt

SEQ ID NO: 264470 - DNA, 13 bp, Artificial Sequence
  Oligonucleotide for detection of SNP TSC0064089
aatttaataaaac

SEQ ID NO: 264471 - DNA, 13 bp, Artificial Sequence
  Oligonucleotide for detection of SNP TSC0064089
gttttaataaatt

SEQ ID NO: 264472 - DNA, 13 bp, Artificial Sequence
  Oligonucleotide for detection of SNP TSC0064089
aatttattaaaac

SEQ ID NO: 264473 - DNA, 13 bp, Artificial Sequence
  Oligonucleotide for detection of SNP TSC0064091
ataaataaattaa

SEQ ID NO: 264474 - DNA, 13 bp, Artificial Sequence
  Oligonucleotide for detection of SNP TSC0064091
ttaatttatttat

SEQ ID NO: 264475 - DNA, 13 bp, Artificial Sequence
  Oligonucleotide for detection of SNP TSC0064091
ataaattaattaa

SEQ ID NO: 264476 - DNA, 13 bp, Artificial Sequence
  Oligonucleotide for detection of SNP TSC0064091
ttaattaatttat

SEQ ID NO: 264477 - DNA, 13 bp, Artificial Sequence
  Oligonucleotide for detection of SNP TSC0064093
taaaattgaggga

SEQ ID NO: 264478 - DNA, 13 bp, Artificial Sequence
  Oligonucleotide for detection of SNP TSC0064093
tccctcaatttta

SEQ ID NO: 264479 - DNA, 13 bp, Artificial Sequence
  Oligonucleotide for detection of SNP TSC0064093
taaaatcgaggga

SEQ ID NO: 264480 - DNA, 13 bp, Artificial Sequence
  Oligonucleotide for detection of SNP TSC0064093
tccctcgatttta

SEQ ID NO: 264481 - DNA, 13 bp, Artificial Sequence
  Oligonucleotide for detection of SNP TSC0064102
gaagatatttgty

SEQ ID NO: 264482 - DNA, 13 bp, Artificial Sequence
  Oligonucleotide for detection of SNP TSC0064102
racaaatatcttc

SEQ ID NO: 264483 - DNA, 13 bp, Artificial Sequence
  Oligonucleotide for detection of SNP TSC0064102
gaagatgtttgty

SEQ ID NO: 264484 - DNA, 13 bp, Artificial Sequence
  Oligonucleotide for detection of SNP TSC0064102
racaaacatcttc

SEQ ID NO: 264485 - DNA, 13 bp, Artificial Sequence
  Oligonucleotide for detection of SNP TSC0064104
atttaaattttgy

SEQ ID NO: 264486 - DNA, 13 bp, Artificial Sequence
  Oligonucleotide for detection of SNP TSC0064104
rcaaaatttaaat

SEQ ID NO: 264487 - DNA, 13 bp, Artificial Sequence
  Oligonucleotide for detection of SNP TSC0064104
atttaagttttgy

SEQ ID NO: 264488 - DNA, 13 bp, Artificial Sequence
  Oligonucleotide for detection of SNP TSC0064104
rcaaaacttaaat

SEQ ID NO: 264489 - DNA, 13 bp, Artificial Sequence
  Oligonucleotide for detection of SNP TSC0064105
ttttggagagaaa

SEQ ID NO: 264490 - DNA, 13 bp, Artificial Sequence
  Oligonucleotide for detection of SNP TSC0064105
tttctctccaaaa

SEQ ID NO: 264491 - DNA, 13 bp, Artificial Sequence
  Oligonucleotide for detection of SNP TSC0064105
ttttggggagaaa

SEQ ID NO: 264492 - DNA, 13 bp, Artificial Sequence
  Oligonucleotide for detection of SNP TSC0064105
tttctccccaaaa

SEQ ID NO: 264493 - DNA, 13 bp, Artificial Sequence
  Oligonucleotide for detection of SNP TSC0007006
tgattaaaagtaa

SEQ ID NO: 264494 - DNA, 13 bp, Artificial Sequence
  Oligonucleotide for detection of SNP TSC0007006
ttacttttaatca

SEQ ID NO: 264495 - DNA, 13 bp, Artificial Sequence
  Oligonucleotide for detection of SNP TSC0007006
tgattagaagtaa

SEQ ID NO: 264496 - DNA, 13 bp, Artificial Sequence
  Oligonucleotide for detection of SNP TSC0007006
ttacttctaatca

SEQ ID NO: 264497 - DNA, 13 bp, Artificial Sequence
  Oligonucleotide for detection of SNP TSC0064107
tgaaaatgtttga

SEQ ID NO: 264498 - DNA, 13 bp, Artificial Sequence
  Oligonucleotide for detection of SNP TSC0064107
tcaaacattttca

SEQ ID NO: 264499 - DNA, 13 bp, Artificial Sequence
  Oligonucleotide for detection of SNP TSC0064107
tgaaaaagtttga

SEQ ID NO: 264500 - DNA, 13 bp, Artificial Sequence
  Oligonucleotide for detection of SNP TSC0064107
tcaaactttttca

SEQ ID NO: 264501 - DNA, 13 bp, Artificial Sequence
  Oligonucleotide for detection of SNP TSC0064109
gttgtaggttgag

SEQ ID NO: 264502 - DNA, 13 bp, Artificial Sequence
  Oligonucleotide for detection of SNP TSC0064109
ctcaacctacaac

SEQ ID NO: 264503 - DNA, 13 bp, Artificial Sequence
  Oligonucleotide for detection of SNP TSC0064109
gttgtaagttgag

SEQ ID NO: 264504 - DNA, 13 bp, Artificial Sequence
  Oligonucleotide for detection of SNP TSC0064109
ctcaacttacaac

SEQ ID NO: 264505 - DNA, 13 bp, Artificial Sequence
  Oligonucleotide for detection of SNP TSC0064111
ttagtatattttt

SEQ ID NO: 264506 - DNA, 13 bp, Artificial Sequence
  Oligonucleotide for detection of SNP TSC0064111
aaaaatatactaa

SEQ ID NO: 264507 - DNA, 13 bp, Artificial Sequence
  Oligonucleotide for detection of SNP TSC0064111
ttagtagattttt

SEQ ID NO: 264508 - DNA, 13 bp, Artificial Sequence
  Oligonucleotide for detection of SNP TSC0064111
aaaaatctactaa

SEQ ID NO: 264509 - DNA, 13 bp, Artificial Sequence
  Oligonucleotide for detection of SNP TSC0064111
aaagatgtgttgg

SEQ ID NO: 264510 - DNA, 13 bp, Artificial Sequence
  Oligonucleotide for detection of SNP TSC0064111
ccaacacatcttt

SEQ ID NO: 264511 - DNA, 13 bp, Artificial Sequence
  Oligonucleotide for detection of SNP TSC0064111
aaagatttgttgg

SEQ ID NO: 264512 - DNA, 13 bp, Artificial Sequence
  Oligonucleotide for detection of SNP TSC0064111
ccaacaaatcttt

SEQ ID NO: 264513 - DNA, 13 bp, Artificial Sequence
  Oligonucleotide for detection of SNP TSC0064112
ttttggtggggtg

SEQ ID NO: 264514 - DNA, 13 bp, Artificial Sequence
  Oligonucleotide for detection of SNP TSC0064112
caccccaccaaaa

SEQ ID NO: 264515 - DNA, 13 bp, Artificial Sequence
  Oligonucleotide for detection of SNP TSC0064112
ttttgggggggtg

SEQ ID NO: 264516 - DNA, 13 bp, Artificial Sequence
  Oligonucleotide for detection of SNP TSC0064112
cacccccccaaaa

SEQ ID NO: 264517 - DNA, 13 bp, Artificial Sequence
  Oligonucleotide for detection of SNP TSC0064112
ttttggtggggcg

SEQ ID NO: 264518 - DNA, 13 bp, Artificial Sequence
  Oligonucleotide for detection of SNP TSC0064112
cgccccaccaaaa

SEQ ID NO: 264519 - DNA, 13 bp, Artificial Sequence
  Oligonucleotide for detection of SNP TSC0064112
ttttgggggggcg

SEQ ID NO: 264520 - DNA, 13 bp, Artificial Sequence
  Oligonucleotide for detection of SNP TSC0064112
cgcccccccaaaa

SEQ ID NO: 264521 - DNA, 13 bp, Artificial Sequence
  Oligonucleotide for detection of SNP TSC0064112
tgtttttttaaga

SEQ ID NO: 264522 - DNA, 13 bp, Artificial Sequence
  Oligonucleotide for detection of SNP TSC0064112
tcttaaaaaaaca

SEQ ID NO: 264523 - DNA, 13 bp, Artificial Sequence
  Oligonucleotide for detection of SNP TSC0064112
cgttttattaaga

SEQ ID NO: 264524 - DNA, 13 bp, Artificial Sequence
  Oligonucleotide for detection of SNP TSC0064112
tcttaataaaacg

SEQ ID NO: 264525 - DNA, 13 bp, Artificial Sequence
  Oligonucleotide for detection of SNP TSC0064112
cgtttttttaaga

SEQ ID NO: 264526 - DNA, 13 bp, Artificial Sequence
  Oligonucleotide for detection of SNP TSC0064112
tcttaaaaaaacg

SEQ ID NO: 264527 - DNA, 13 bp, Artificial Sequence
  Oligonucleotide for detection of SNP TSC0064114
aagggtggatagt

SEQ ID NO: 264528 - DNA, 13 bp, Artificial Sequence
  Oligonucleotide for detection of SNP TSC0064114
actatccaccctt

SEQ ID NO: 264529 - DNA, 13 bp, Artificial Sequence
  Oligonucleotide for detection of SNP TSC0064114
aagggtagatagt

SEQ ID NO: 264530 - DNA, 13 bp, Artificial Sequence
  Oligonucleotide for detection of SNP TSC0064114
actatctaccctt

SEQ ID NO: 264531 - DNA, 13 bp, Artificial Sequence
  Oligonucleotide for detection of SNP TSC0064115
tgggtagggttaa

SEQ ID NO: 264532 - DNA, 13 bp, Artificial Sequence
  Oligonucleotide for detection of SNP TSC0064115
ttaaccctaccca

SEQ ID NO: 264533 - DNA, 13 bp, Artificial Sequence
  Oligonucleotide for detection of SNP TSC0064115
tgggtaaggttaa

SEQ ID NO: 264534 - DNA, 13 bp, Artificial Sequence
  Oligonucleotide for detection of SNP TSC0064115
ttaaccttaccca

SEQ ID NO: 264535 - DNA, 13 bp, Artificial Sequence
  Oligonucleotide for detection of SNP TSC0064119
ggaagagagggaa

SEQ ID NO: 264536 - DNA, 13 bp, Artificial Sequence
  Oligonucleotide for detection of SNP TSC0064119
ttccctctcttcc

SEQ ID NO: 264537 - DNA, 13 bp, Artificial Sequence
  Oligonucleotide for detection of SNP TSC0064119
ggaagatagggaa

SEQ ID NO: 264538 - DNA, 13 bp, Artificial Sequence
  Oligonucleotide for detection of SNP TSC0064119
ttccctatcttcc

SEQ ID NO: 264539 - DNA, 13 bp, Artificial Sequence
  Oligonucleotide for detection of SNP TSC0064129
gttatttgaggta

SEQ ID NO: 264540 - DNA, 13 bp, Artificial Sequence
  Oligonucleotide for detection of SNP TSC0064129
tacctcaaataac

SEQ ID NO: 264541 - DNA, 13 bp, Artificial Sequence
  Oligonucleotide for detection of SNP TSC0064129
gttattcgaggta

SEQ ID NO: 264542 - DNA, 13 bp, Artificial Sequence
  Oligonucleotide for detection of SNP TSC0064129
tacctcgaataac

SEQ ID NO: 264543 - DNA, 13 bp, Artificial Sequence
  Oligonucleotide for detection of SNP TSC0064130
taatgtatatagy

SEQ ID NO: 264544 - DNA, 13 bp, Artificial Sequence
  Oligonucleotide for detection of SNP TSC0064130
rctatatacatta

SEQ ID NO: 264545 - DNA, 13 bp, Artificial Sequence
  Oligonucleotide for detection of SNP TSC0064130
taatgtttatagy

SEQ ID NO: 264546 - DNA, 13 bp, Artificial Sequence
  Oligonucleotide for detection of SNP TSC0064130
rctataaacatta

SEQ ID NO: 264547 - DNA, 13 bp, Artificial Sequence
  Oligonucleotide for detection of SNP TSC0064130
gttgtatgtatta

SEQ ID NO: 264548 - DNA, 13 bp, Artificial Sequence
  Oligonucleotide for detection of SNP TSC0064130
taatacatacaac

SEQ ID NO: 264549 - DNA, 13 bp, Artificial Sequence
  Oligonucleotide for detection of SNP TSC0064130
gttgtaggtatta

SEQ ID NO: 264550 - DNA, 13 bp, Artificial Sequence
  Oligonucleotide for detection of SNP TSC0064130
taatacctacaac

SEQ ID NO: 264551 - DNA, 13 bp, Artificial Sequence
  Oligonucleotide for detection of SNP TSC0064131
ttattgtggaggg

SEQ ID NO: 264552 - DNA, 13 bp, Artificial Sequence
  Oligonucleotide for detection of SNP TSC0064131
ccctccacaataa

SEQ ID NO: 264553 - DNA, 13 bp, Artificial Sequence
  Oligonucleotide for detection of SNP TSC0064131
ttattggggaggg

SEQ ID NO: 264554 - DNA, 13 bp, Artificial Sequence
  Oligonucleotide for detection of SNP TSC0064131
ccctccccaataa

SEQ ID NO: 264555 - DNA, 13 bp, Artificial Sequence
  Oligonucleotide for detection of SNP TSC0064131
ttttttatagtgg

SEQ ID NO: 264556 - DNA, 13 bp, Artificial Sequence
  Oligonucleotide for detection of SNP TSC0064131
ccactataaaaaa

SEQ ID NO: 264557 - DNA, 13 bp, Artificial Sequence
  Oligonucleotide for detection of SNP TSC0064132
taaatggtagtat

SEQ ID NO: 264558 - DNA, 13 bp, Artificial Sequence
  Oligonucleotide for detection of SNP TSC0064132
atactaccattta

SEQ ID NO: 264559 - DNA, 13 bp, Artificial Sequence
  Oligonucleotide for detection of SNP TSC0064132
taaatgatagtat

SEQ ID NO: 264560 - DNA, 13 bp, Artificial Sequence
  Oligonucleotide for detection of SNP TSC0064132
atactatcattta

SEQ ID NO: 264561 - DNA, 13 bp, Artificial Sequence
  Oligonucleotide for detection of SNP TSC0064133
ttaaaatagagtg

SEQ ID NO: 264562 - DNA, 13 bp, Artificial Sequence
  Oligonucleotide for detection of SNP TSC0064133
cactctattttaa

SEQ ID NO: 264563 - DNA, 13 bp, Artificial Sequence
  Oligonucleotide for detection of SNP TSC0064133
ttaaaagagagtg

SEQ ID NO: 264564 - DNA, 13 bp, Artificial Sequence
  Oligonucleotide for detection of SNP TSC0064133
cactctcttttaa

SEQ ID NO: 264565 - DNA, 13 bp, Artificial Sequence
  Oligonucleotide for detection of SNP TSC0064134
tggggaaggaaaa

SEQ ID NO: 264566 - DNA, 13 bp, Artificial Sequence
  Oligonucleotide for detection of SNP TSC0064134
ttttccttcccca

SEQ ID NO: 264567 - DNA, 13 bp, Artificial Sequence
  Oligonucleotide for detection of SNP TSC0064134
tggggagggaaaa

SEQ ID NO: 264568 - DNA, 13 bp, Artificial Sequence
  Oligonucleotide for detection of SNP TSC0064134
ttttccctcccca

SEQ ID NO: 264569 - DNA, 13 bp, Artificial Sequence
  Oligonucleotide for detection of SNP TSC0064135
atggaaagaagtg

SEQ ID NO: 264570 - DNA, 13 bp, Artificial Sequence
  Oligonucleotide for detection of SNP TSC0064135
cacttctttccat

SEQ ID NO: 264571 - DNA, 13 bp, Artificial Sequence
  Oligonucleotide for detection of SNP TSC0064135
atggaaggaagtg

SEQ ID NO: 264572 - DNA, 13 bp, Artificial Sequence
  Oligonucleotide for detection of SNP TSC0064135
cacttccttccat

SEQ ID NO: 264573 - DNA, 13 bp, Artificial Sequence
  Oligonucleotide for detection of SNP TSC0064136
ggttaaaaaaatg

SEQ ID NO: 264574 - DNA, 13 bp, Artificial Sequence
  Oligonucleotide for detection of SNP TSC0064136
catttttttaacc

SEQ ID NO: 264575 - DNA, 13 bp, Artificial Sequence
  Oligonucleotide for detection of SNP TSC0064136
ggttaataaaatg

SEQ ID NO: 264576 - DNA, 13 bp, Artificial Sequence
  Oligonucleotide for detection of SNP TSC0064136
cattttattaacc

SEQ ID NO: 264577 - DNA, 13 bp, Artificial Sequence
  Oligonucleotide for detection of SNP TSC0064139
attagtatgttty

SEQ ID NO: 264578 - DNA, 13 bp, Artificial Sequence
  Oligonucleotide for detection of SNP TSC0064139
raaacatactaat

SEQ ID NO: 264579 - DNA, 13 bp, Artificial Sequence
  Oligonucleotide for detection of SNP TSC0064139
attagtgtgttty

SEQ ID NO: 264580 - DNA, 13 bp, Artificial Sequence
  Oligonucleotide for detection of SNP TSC0064139
raaacacactaat

SEQ ID NO: 264581 - DNA, 13 bp, Artificial Sequence
  Oligonucleotide for detection of SNP TSC0064139
attagcgtgttty

SEQ ID NO: 264582 - DNA, 13 bp, Artificial Sequence
  Oligonucleotide for detection of SNP TSC0064139
raaacacgctaat

SEQ ID NO: 264583 - DNA, 13 bp, Artificial Sequence
  Oligonucleotide for detection of SNP TSC0064139
gaggtatgttgat

SEQ ID NO: 264584 - DNA, 13 bp, Artificial Sequence
  Oligonucleotide for detection of SNP TSC0064139
atcaacatacctc

SEQ ID NO: 264585 - DNA, 13 bp, Artificial Sequence
  Oligonucleotide for detection of SNP TSC0064139
gaggtacgttgat

SEQ ID NO: 264586 - DNA, 13 bp, Artificial Sequence
  Oligonucleotide for detection of SNP TSC0064139
atcaacgtacctc

SEQ ID NO: 264587 - DNA, 13 bp, Artificial Sequence
  Oligonucleotide for detection of SNP TSC0064140
ttttgaattattt

SEQ ID NO: 264588 - DNA, 13 bp, Artificial Sequence
  Oligonucleotide for detection of SNP TSC0064140
aaataattcaaaa

SEQ ID NO: 264589 - DNA, 13 bp, Artificial Sequence
  Oligonucleotide for detection of SNP TSC0064140
ttttgagttattt

SEQ ID NO: 264590 - DNA, 13 bp, Artificial Sequence
  Oligonucleotide for detection of SNP TSC0064140
aaataactcaaaa

SEQ ID NO: 264591 - DNA, 13 bp, Artificial Sequence
  Oligonucleotide for detection of SNP TSC0064142
aatttagatttgg

SEQ ID NO: 264592 - DNA, 13 bp, Artificial Sequence
  Oligonucleotide for detection of SNP TSC0064142
ccaaatctaaatt

SEQ ID NO: 264593 - DNA, 13 bp, Artificial Sequence
  Oligonucleotide for detection of SNP TSC0064142
aatttaaatttgg

SEQ ID NO: 264594 - DNA, 13 bp, Artificial Sequence
  Oligonucleotide for detection of SNP TSC0064142
ccaaatttaaatt

SEQ ID NO: 264595 - DNA, 13 bp, Artificial Sequence
  Oligonucleotide for detection of SNP TSC0064144
taaattatattag

SEQ ID NO: 264596 - DNA, 13 bp, Artificial Sequence
  Oligonucleotide for detection of SNP TSC0064144
ctaatataattta

SEQ ID NO: 264597 - DNA, 13 bp, Artificial Sequence
  Oligonucleotide for detection of SNP TSC0064144
ttgatatggtttg

SEQ ID NO: 264598 - DNA, 13 bp, Artificial Sequence
  Oligonucleotide for detection of SNP TSC0064144
caaaccatatcaa

SEQ ID NO: 264599 - DNA, 13 bp, Artificial Sequence
  Oligonucleotide for detection of SNP TSC0064144
ttgataaggtttg

SEQ ID NO: 264600 - DNA, 13 bp, Artificial Sequence
  Oligonucleotide for detection of SNP TSC0064144
caaaccttatcaa

SEQ ID NO: 264601 - DNA, 13 bp, Artificial Sequence
  Oligonucleotide for detection of SNP TSC0064145
tattaagtaatag

SEQ ID NO: 264602 - DNA, 13 bp, Artificial Sequence
  Oligonucleotide for detection of SNP TSC0064145
ctattacttaata

SEQ ID NO: 264603 - DNA, 13 bp, Artificial Sequence
  Oligonucleotide for detection of SNP TSC0064145
tattaaataatag

SEQ ID NO: 264604 - DNA, 13 bp, Artificial Sequence
  Oligonucleotide for detection of SNP TSC0064145
ctattatttaata

SEQ ID NO: 264605 - DNA, 13 bp, Artificial Sequence
  Oligonucleotide for detection of SNP TSC0064146
ttattaatattag

SEQ ID NO: 264606 - DNA, 13 bp, Artificial Sequence
  Oligonucleotide for detection of SNP TSC0064146
ctaatattaataa

SEQ ID NO: 264607 - DNA, 13 bp, Artificial Sequence
  Oligonucleotide for detection of SNP TSC0064146
ttattagtattag

SEQ ID NO: 264608 - DNA, 13 bp, Artificial Sequence
  Oligonucleotide for detection of SNP TSC0064146
ctaatactaataa

SEQ ID NO: 264609 - DNA, 13 bp, Artificial Sequence
  Oligonucleotide for detection of SNP TSC0010398
aagaaaatatttt

SEQ ID NO: 264610 - DNA, 13 bp, Artificial Sequence
  Oligonucleotide for detection of SNP TSC0010398
aaaatattttctt

SEQ ID NO: 264611 - DNA, 13 bp, Artificial Sequence
  Oligonucleotide for detection of SNP TSC0010398
aagaaagtatttt

SEQ ID NO: 264612 - DNA, 13 bp, Artificial Sequence
  Oligonucleotide for detection of SNP TSC0010398
aaaatactttctt

SEQ ID NO: 264613 - DNA, 13 bp, Artificial Sequence
  Oligonucleotide for detection of SNP TSC0064148
gttttgtgtttay

SEQ ID NO: 264614 - DNA, 13 bp, Artificial Sequence
  Oligonucleotide for detection of SNP TSC0064148
rtaaacacaaaac

SEQ ID NO: 264615 - DNA, 13 bp, Artificial Sequence
  Oligonucleotide for detection of SNP TSC0064148
gttttgcgtttay

SEQ ID NO: 264616 - DNA, 13 bp, Artificial Sequence
  Oligonucleotide for detection of SNP TSC0064148
rtaaacgcaaaac

SEQ ID NO: 264617 - DNA, 13 bp, Artificial Sequence
  Oligonucleotide for detection of SNP TSC0064148
gtaggtgtagagy

SEQ ID NO: 264618 - DNA, 13 bp, Artificial Sequence
  Oligonucleotide for detection of SNP TSC0064148
rctctacacctac

SEQ ID NO: 264619 - DNA, 13 bp, Artificial Sequence
  Oligonucleotide for detection of SNP TSC0064148
gtaggtatagagy

SEQ ID NO: 264620 - DNA, 13 bp, Artificial Sequence
  Oligonucleotide for detection of SNP TSC0064148
rctctatacctac

SEQ ID NO: 264621 - DNA, 13 bp, Artificial Sequence
  Oligonucleotide for detection of SNP TSC0064148
gtaggcgtagagy

SEQ ID NO: 264622 - DNA, 13 bp, Artificial Sequence
  Oligonucleotide for detection of SNP TSC0064148
rctctacgcctac

SEQ ID NO: 264623 - DNA, 13 bp, Artificial Sequence
  Oligonucleotide for detection of SNP TSC0064150
atttgaattttay

SEQ ID NO: 264624 - DNA, 13 bp, Artificial Sequence
  Oligonucleotide for detection of SNP TSC0064150
rtaaaattcaaat

SEQ ID NO: 264625 - DNA, 13 bp, Artificial Sequence
  Oligonucleotide for detection of SNP TSC0064150
atttgagttttay

SEQ ID NO: 264626 - DNA, 13 bp, Artificial Sequence
  Oligonucleotide for detection of SNP TSC0064150
rtaaaactcaaat

SEQ ID NO: 264627 - DNA, 13 bp, Artificial Sequence
  Oligonucleotide for detection of SNP TSC0064151
ttgttagtaaatt

SEQ ID NO: 264628 - DNA, 13 bp, Artificial Sequence
  Oligonucleotide for detection of SNP TSC0064151
aatttactaacaa

SEQ ID NO: 264629 - DNA, 13 bp, Artificial Sequence
  Oligonucleotide for detection of SNP TSC0064151
ttgttaataaatt

SEQ ID NO: 264630 - DNA, 13 bp, Artificial Sequence
  Oligonucleotide for detection of SNP TSC0064151
aatttattaacaa

SEQ ID NO: 264631 - DNA, 13 bp, Artificial Sequence
  Oligonucleotide for detection of SNP TSC0064153
agtaaaatatgga

SEQ ID NO: 264632 - DNA, 13 bp, Artificial Sequence
  Oligonucleotide for detection of SNP TSC0064153
tccatattttact

SEQ ID NO: 264633 - DNA, 13 bp, Artificial Sequence
  Oligonucleotide for detection of SNP TSC0064153
agtaaagtatgga

SEQ ID NO: 264634 - DNA, 13 bp, Artificial Sequence
  Oligonucleotide for detection of SNP TSC0064153
tccatactttact

SEQ ID NO: 264635 - DNA, 13 bp, Artificial Sequence
  Oligonucleotide for detection of SNP TSC0005134
tatagaggttaaa

SEQ ID NO: 264636 - DNA, 13 bp, Artificial Sequence
  Oligonucleotide for detection of SNP TSC0005134
tttaacctctata

SEQ ID NO: 264637 - DNA, 13 bp, Artificial Sequence
  Oligonucleotide for detection of SNP TSC0005134
tatagaagttaaa

SEQ ID NO: 264638 - DNA, 13 bp, Artificial Sequence
  Oligonucleotide for detection of SNP TSC0005134
tttaacttctata

SEQ ID NO: 264639 - DNA, 13 bp, Artificial Sequence
  Oligonucleotide for detection of SNP TSC0064154
tgatttaatattt

SEQ ID NO: 264640 - DNA, 13 bp, Artificial Sequence
  Oligonucleotide for detection of SNP TSC0064154
aaatattaaatca

SEQ ID NO: 264641 - DNA, 13 bp, Artificial Sequence
  Oligonucleotide for detection of SNP TSC0064154
tgatttgatattt

SEQ ID NO: 264642 - DNA, 13 bp, Artificial Sequence
  Oligonucleotide for detection of SNP TSC0064154
aaatatcaaatca

SEQ ID NO: 264643 - DNA, 13 bp, Artificial Sequence
  Oligonucleotide for detection of SNP TSC0004774
aataaatgaaata

SEQ ID NO: 264644 - DNA, 13 bp, Artificial Sequence
  Oligonucleotide for detection of SNP TSC0004774
tatttcatttatt

SEQ ID NO: 264645 - DNA, 13 bp, Artificial Sequence
  Oligonucleotide for detection of SNP TSC0064155
tttaagataatty

SEQ ID NO: 264646 - DNA, 13 bp, Artificial Sequence
  Oligonucleotide for detection of SNP TSC0064155
raattatcttaaa

SEQ ID NO: 264647 - DNA, 13 bp, Artificial Sequence
  Oligonucleotide for detection of SNP TSC0064155
tttaaggtaatty

SEQ ID NO: 264648 - DNA, 13 bp, Artificial Sequence
  Oligonucleotide for detection of SNP TSC0064155
raattaccttaaa

SEQ ID NO: 264649 - DNA, 13 bp, Artificial Sequence
  Oligonucleotide for detection of SNP TSC0064156
taagtaaagtaaa

SEQ ID NO: 264650 - DNA, 13 bp, Artificial Sequence
  Oligonucleotide for detection of SNP TSC0064156
tttactttactta

SEQ ID NO: 264651 - DNA, 13 bp, Artificial Sequence
  Oligonucleotide for detection of SNP TSC0064156
taagtatagtaaa

SEQ ID NO: 264652 - DNA, 13 bp, Artificial Sequence
  Oligonucleotide for detection of SNP TSC0064156
tttactatactta

SEQ ID NO: 264653 - DNA, 13 bp, Artificial Sequence
  Oligonucleotide for detection of SNP TSC0064156
tttgttttgttta

SEQ ID NO: 264654 - DNA, 13 bp, Artificial Sequence
  Oligonucleotide for detection of SNP TSC0064156
taaacaaaacaaa

SEQ ID NO: 264655 - DNA, 13 bp, Artificial Sequence
  Oligonucleotide for detection of SNP TSC0064161
taaaatataatty

SEQ ID NO: 264656 - DNA, 13 bp, Artificial Sequence
  Oligonucleotide for detection of SNP TSC0064161
raattatatttta

SEQ ID NO: 264657 - DNA, 13 bp, Artificial Sequence
  Oligonucleotide for detection of SNP TSC0064161
taaaatgtaatty

SEQ ID NO: 264658 - DNA, 13 bp, Artificial Sequence
  Oligonucleotide for detection of SNP TSC0064161
raattacatttta

SEQ ID NO: 264659 - DNA, 13 bp, Artificial Sequence
  Oligonucleotide for detection of SNP TSC0064162
ttggttttatttt

SEQ ID NO: 264660 - DNA, 13 bp, Artificial Sequence
  Oligonucleotide for detection of SNP TSC0064162
aaaataaaaccaa

SEQ ID NO: 264661 - DNA, 13 bp, Artificial Sequence
  Oligonucleotide for detection of SNP TSC0064162
agggtgtagttaa

SEQ ID NO: 264662 - DNA, 13 bp, Artificial Sequence
  Oligonucleotide for detection of SNP TSC0064162
ttaactacaccct

SEQ ID NO: 264663 - DNA, 13 bp, Artificial Sequence
  Oligonucleotide for detection of SNP TSC0064162
agggtggagttaa

SEQ ID NO: 264664 - DNA, 13 bp, Artificial Sequence
  Oligonucleotide for detection of SNP TSC0064162
ttaactccaccct

SEQ ID NO: 264665 - DNA, 13 bp, Artificial Sequence
  Oligonucleotide for detection of SNP TSC0064163
tttagttgaatat

SEQ ID NO: 264666 - DNA, 13 bp, Artificial Sequence
  Oligonucleotide for detection of SNP TSC0064163
atattcaactaaa

SEQ ID NO: 264667 - DNA, 13 bp, Artificial Sequence
  Oligonucleotide for detection of SNP TSC0064163
tttagtcgaatat

SEQ ID NO: 264668 - DNA, 13 bp, Artificial Sequence
  Oligonucleotide for detection of SNP TSC0064163
atattcgactaaa

SEQ ID NO: 264669 - DNA, 13 bp, Artificial Sequence
  Oligonucleotide for detection of SNP TSC0064163
atgtttagttgaa

SEQ ID NO: 264670 - DNA, 13 bp, Artificial Sequence
  Oligonucleotide for detection of SNP TSC0064163
ttcaactaaacat

SEQ ID NO: 264671 - DNA, 13 bp, Artificial Sequence
  Oligonucleotide for detection of SNP TSC0064163
atgttcggttgaa

SEQ ID NO: 264672 - DNA, 13 bp, Artificial Sequence
  Oligonucleotide for detection of SNP TSC0064163
ttcaaccgaacat

SEQ ID NO: 264673 - DNA, 13 bp, Artificial Sequence
  Oligonucleotide for detection of SNP TSC0064164
ataaataattgay

SEQ ID NO: 264674 - DNA, 13 bp, Artificial Sequence
  Oligonucleotide for detection of SNP TSC0064164
rtcaattatttat

SEQ ID NO: 264675 - DNA, 13 bp, Artificial Sequence
  Oligonucleotide for detection of SNP TSC0064164
ataaatgattgay

SEQ ID NO: 264676 - DNA, 13 bp, Artificial Sequence
  Oligonucleotide for detection of SNP TSC0064164
rtcaatcatttat

SEQ ID NO: 264677 - DNA, 13 bp, Artificial Sequence
  Oligonucleotide for detection of SNP TSC0010868
atttatattttcg

SEQ ID NO: 264678 - DNA, 13 bp, Artificial Sequence
  Oligonucleotide for detection of SNP TSC0010868
cgaaaatataaat

SEQ ID NO: 264679 - DNA, 13 bp, Artificial Sequence
  Oligonucleotide for detection of SNP TSC0010868
tgggaatgtaagt

SEQ ID NO: 264680 - DNA, 13 bp, Artificial Sequence
  Oligonucleotide for detection of SNP TSC0010868
acttacattccca

SEQ ID NO: 264681 - DNA, 13 bp, Artificial Sequence
  Oligonucleotide for detection of SNP TSC0010868
tgggaaggtaagt

SEQ ID NO: 264682 - DNA, 13 bp, Artificial Sequence
  Oligonucleotide for detection of SNP TSC0010868
acttaccttccca

SEQ ID NO: 264683 - DNA, 13 bp, Artificial Sequence
  Oligonucleotide for detection of SNP TSC0010868
cgggaatgtaagt

SEQ ID NO: 264684 - DNA, 13 bp, Artificial Sequence
  Oligonucleotide for detection of SNP TSC0010868
acttacattcccg

SEQ ID NO: 264685 - DNA, 13 bp, Artificial Sequence
  Oligonucleotide for detection of SNP TSC0010868
cgggaaggtaagt

SEQ ID NO: 264686 - DNA, 13 bp, Artificial Sequence
  Oligonucleotide for detection of SNP TSC0010868
acttaccttcccg

SEQ ID NO: 264687 - DNA, 13 bp, Artificial Sequence
  Oligonucleotide for detection of SNP TSC0064167
attttaatgtttt

SEQ ID NO: 264688 - DNA, 13 bp, Artificial Sequence
  Oligonucleotide for detection of SNP TSC0064167
aaaacattaaaat

SEQ ID NO: 264689 - DNA, 13 bp, Artificial Sequence
  Oligonucleotide for detection of SNP TSC0064167
attttagtgtttt

SEQ ID NO: 264690 - DNA, 13 bp, Artificial Sequence
  Oligonucleotide for detection of SNP TSC0064167
aaaacactaaaat

SEQ ID NO: 264691 - DNA, 13 bp, Artificial Sequence
  Oligonucleotide for detection of SNP TSC0064168
agatatagttttt

SEQ ID NO: 264692 - DNA, 13 bp, Artificial Sequence
  Oligonucleotide for detection of SNP TSC0064168
aaaaactatatct

SEQ ID NO: 264693 - DNA, 13 bp, Artificial Sequence
  Oligonucleotide for detection of SNP TSC0064168
agatattgttttt

SEQ ID NO: 264694 - DNA, 13 bp, Artificial Sequence
  Oligonucleotide for detection of SNP TSC0064168
aaaaacaatatct

SEQ ID NO: 264695 - DNA, 13 bp, Artificial Sequence
  Oligonucleotide for detection of SNP TSC0064168
aagaattgtgttt

SEQ ID NO: 264696 - DNA, 13 bp, Artificial Sequence
  Oligonucleotide for detection of SNP TSC0064168
aaacacaattctt

SEQ ID NO: 264697 - DNA, 13 bp, Artificial Sequence
  Oligonucleotide for detection of SNP TSC0064168
aagaatagtgttt

SEQ ID NO: 264698 - DNA, 13 bp, Artificial Sequence
  Oligonucleotide for detection of SNP TSC0064168
aaacactattctt

SEQ ID NO: 264699 - DNA, 13 bp, Artificial Sequence
  Oligonucleotide for detection of SNP TSC0064169
aaataagtaatag

SEQ ID NO: 264700 - DNA, 13 bp, Artificial Sequence
  Oligonucleotide for detection of SNP TSC0064169
ctattacttattt

SEQ ID NO: 264701 - DNA, 13 bp, Artificial Sequence
  Oligonucleotide for detection of SNP TSC0064169
aaataaataatag

SEQ ID NO: 264702 - DNA, 13 bp, Artificial Sequence
  Oligonucleotide for detection of SNP TSC0064169
ctattatttattt

SEQ ID NO: 264703 - DNA, 13 bp, Artificial Sequence
  Oligonucleotide for detection of SNP TSC0009239
tgtgtaggaatay

SEQ ID NO: 264704 - DNA, 13 bp, Artificial Sequence
  Oligonucleotide for detection of SNP TSC0009239
rtattcctacaca

SEQ ID NO: 264705 - DNA, 13 bp, Artificial Sequence
  Oligonucleotide for detection of SNP TSC0009239
tgtgtaagaatay

SEQ ID NO: 264706 - DNA, 13 bp, Artificial Sequence
  Oligonucleotide for detection of SNP TSC0009239
rtattcttacaca

SEQ ID NO: 264707 - DNA, 13 bp, Artificial Sequence
  Oligonucleotide for detection of SNP TSC0064170
tgtaaggaataty

SEQ ID NO: 264708 - DNA, 13 bp, Artificial Sequence
  Oligonucleotide for detection of SNP TSC0064170
ratattccttaca

SEQ ID NO: 264709 - DNA, 13 bp, Artificial Sequence
  Oligonucleotide for detection of SNP TSC0064170
tgtaagaaataty

SEQ ID NO: 264710 - DNA, 13 bp, Artificial Sequence
  Oligonucleotide for detection of SNP TSC0064170
ratatttcttaca

SEQ ID NO: 264711 - DNA, 13 bp, Artificial Sequence
  Oligonucleotide for detection of SNP TSC0008012
aataggatttagy

SEQ ID NO: 264712 - DNA, 13 bp, Artificial Sequence
  Oligonucleotide for detection of SNP TSC0008012
rctaaatcctatt

SEQ ID NO: 264713 - DNA, 13 bp, Artificial Sequence
  Oligonucleotide for detection of SNP TSC0008012
aataggttttagy

SEQ ID NO: 264714 - DNA, 13 bp, Artificial Sequence
  Oligonucleotide for detection of SNP TSC0008012
rctaaaacctatt

SEQ ID NO: 264715 - DNA, 13 bp, Artificial Sequence
  Oligonucleotide for detection of SNP TSC0008013
tttgaaattgaat

SEQ ID NO: 264716 - DNA, 13 bp, Artificial Sequence
  Oligonucleotide for detection of SNP TSC0008013
attcaatttcaaa

SEQ ID NO: 264717 - DNA, 13 bp, Artificial Sequence
  Oligonucleotide for detection of SNP TSC0008013
tttgaagttgaat

SEQ ID NO: 264718 - DNA, 13 bp, Artificial Sequence
  Oligonucleotide for detection of SNP TSC0008013
attcaacttcaaa

SEQ ID NO: 264719 - DNA, 13 bp, Artificial Sequence
  Oligonucleotide for detection of SNP TSC0064172
tattattattgag

SEQ ID NO: 264720 - DNA, 13 bp, Artificial Sequence
  Oligonucleotide for detection of SNP TSC0064172
ctcaataataata

SEQ ID NO: 264721 - DNA, 13 bp, Artificial Sequence
  Oligonucleotide for detection of SNP TSC0064172
tattattatcgag

SEQ ID NO: 264722 - DNA, 13 bp, Artificial Sequence
  Oligonucleotide for detection of SNP TSC0064172
ctcgataataata

SEQ ID NO: 264723 - DNA, 13 bp, Artificial Sequence
  Oligonucleotide for detection of SNP TSC0064172
tattacgattgag

SEQ ID NO: 264724 - DNA, 13 bp, Artificial Sequence
  Oligonucleotide for detection of SNP TSC0064172
ctcaatcgtaata

SEQ ID NO: 264725 - DNA, 13 bp, Artificial Sequence
  Oligonucleotide for detection of SNP TSC0064172
tattatgatcgag

SEQ ID NO: 264726 - DNA, 13 bp, Artificial Sequence
  Oligonucleotide for detection of SNP TSC0064172
ctcgatcataata

SEQ ID NO: 264727 - DNA, 13 bp, Artificial Sequence
  Oligonucleotide for detection of SNP TSC0064172
tattacgatcgag

SEQ ID NO: 264728 - DNA, 13 bp, Artificial Sequence
  Oligonucleotide for detection of SNP TSC0064172
ctcgatcgtaata

SEQ ID NO: 264729 - DNA, 13 bp, Artificial Sequence
  Oligonucleotide for detection of SNP TSC0064172
tttggttgtaatg

SEQ ID NO: 264730 - DNA, 13 bp, Artificial Sequence
  Oligonucleotide for detection of SNP TSC0064172
cattacaaccaaa

SEQ ID NO: 264731 - DNA, 13 bp, Artificial Sequence
  Oligonucleotide for detection of SNP TSC0064172
ttcggtggtaatg

SEQ ID NO: 264732 - DNA, 13 bp, Artificial Sequence
  Oligonucleotide for detection of SNP TSC0064172
cattaccaccgaa

SEQ ID NO: 264733 - DNA, 13 bp, Artificial Sequence
  Oligonucleotide for detection of SNP TSC0064172
ttcggttgtaatg

SEQ ID NO: 264734 - DNA, 13 bp, Artificial Sequence
  Oligonucleotide for detection of SNP TSC0064172
cattacaaccgaa

SEQ ID NO: 264735 - DNA, 13 bp, Artificial Sequence
  Oligonucleotide for detection of SNP TSC0064172
tttggtcgtaatg

SEQ ID NO: 264736 - DNA, 13 bp, Artificial Sequence
  Oligonucleotide for detection of SNP TSC0064172
cattacgaccaaa

SEQ ID NO: 264737 - DNA, 13 bp, Artificial Sequence
  Oligonucleotide for detection of SNP TSC0064172
ttcggtcgtaatg

SEQ ID NO: 264738 - DNA, 13 bp, Artificial Sequence
  Oligonucleotide for detection of SNP TSC0064172
cattacgaccgaa

SEQ ID NO: 264739 - DNA, 13 bp, Artificial Sequence
  Oligonucleotide for detection of SNP TSC0006738
tttttggaggtga

SEQ ID NO: 264740 - DNA, 13 bp, Artificial Sequence
  Oligonucleotide for detection of SNP TSC0006738
tcacctccaaaaa

SEQ ID NO: 264741 - DNA, 13 bp, Artificial Sequence
  Oligonucleotide for detection of SNP TSC0006738
tttttgaaggtga

SEQ ID NO: 264742 - DNA, 13 bp, Artificial Sequence
  Oligonucleotide for detection of SNP TSC0006738
tcaccttcaaaaa

SEQ ID NO: 264743 - DNA, 13 bp, Artificial Sequence
  Oligonucleotide for detection of SNP TSC0064175
attatgagtaata

SEQ ID NO: 264744 - DNA, 13 bp, Artificial Sequence
  Oligonucleotide for detection of SNP TSC0064175
tattactcataat

SEQ ID NO: 264745 - DNA, 13 bp, Artificial Sequence
  Oligonucleotide for detection of SNP TSC0064175
attatgtgtaata

SEQ ID NO: 264746 - DNA, 13 bp, Artificial Sequence
  Oligonucleotide for detection of SNP TSC0064175
tattacacataat

SEQ ID NO: 264747 - DNA, 13 bp, Artificial Sequence
  Oligonucleotide for detection of SNP TSC0064175
attacgagtaata

SEQ ID NO: 264748 - DNA, 13 bp, Artificial Sequence
  Oligonucleotide for detection of SNP TSC0064175
tattactcgtaat

SEQ ID NO: 264749 - DNA, 13 bp, Artificial Sequence
  Oligonucleotide for detection of SNP TSC0064175
attacgtgtaata

SEQ ID NO: 264750 - DNA, 13 bp, Artificial Sequence
  Oligonucleotide for detection of SNP TSC0064175
tattacacgtaat

SEQ ID NO: 264751 - DNA, 13 bp, Artificial Sequence
  Oligonucleotide for detection of SNP TSC0064175
attatgcgtaata

SEQ ID NO: 264752 - DNA, 13 bp, Artificial Sequence
  Oligonucleotide for detection of SNP TSC0064175
tattacgcataat

SEQ ID NO: 264753 - DNA, 13 bp, Artificial Sequence
  Oligonucleotide for detection of SNP TSC0064175
attacgcgtaata

SEQ ID NO: 264754 - DNA, 13 bp, Artificial Sequence
  Oligonucleotide for detection of SNP TSC0064175
tattacgcgtaat

SEQ ID NO: 264755 - DNA, 13 bp, Artificial Sequence
  Oligonucleotide for detection of SNP TSC0064175
tattatgtgtagt

SEQ ID NO: 264756 - DNA, 13 bp, Artificial Sequence
  Oligonucleotide for detection of SNP TSC0064175
actacacataata

SEQ ID NO: 264757 - DNA, 13 bp, Artificial Sequence
  Oligonucleotide for detection of SNP TSC0064175
tattattcgtagt

SEQ ID NO: 264758 - DNA, 13 bp, Artificial Sequence
  Oligonucleotide for detection of SNP TSC0064175
actacgaataata

SEQ ID NO: 264759 - DNA, 13 bp, Artificial Sequence
  Oligonucleotide for detection of SNP TSC0064175
tattacgtgtagt

SEQ ID NO: 264760 - DNA, 13 bp, Artificial Sequence
  Oligonucleotide for detection of SNP TSC0064175
actacacgtaata

SEQ ID NO: 264761 - DNA, 13 bp, Artificial Sequence
  Oligonucleotide for detection of SNP TSC0064175
tattatgcgtagt

SEQ ID NO: 264762 - DNA, 13 bp, Artificial Sequence
  Oligonucleotide for detection of SNP TSC0064175
actacgcataata

SEQ ID NO: 264763 - DNA, 13 bp, Artificial Sequence
  Oligonucleotide for detection of SNP TSC0064175
tattacgcgtagt

SEQ ID NO: 264764 - DNA, 13 bp, Artificial Sequence
  Oligonucleotide for detection of SNP TSC0064175
actacgcgtaata

SEQ ID NO: 264765 - DNA, 13 bp, Artificial Sequence
  Oligonucleotide for detection of SNP TSC0064176
tatgataattttg

SEQ ID NO: 264766 - DNA, 13 bp, Artificial Sequence
  Oligonucleotide for detection of SNP TSC0064176
caaaattatcata

SEQ ID NO: 264767 - DNA, 13 bp, Artificial Sequence
  Oligonucleotide for detection of SNP TSC0064176
tatgattattttg

SEQ ID NO: 264768 - DNA, 13 bp, Artificial Sequence
  Oligonucleotide for detection of SNP TSC0064176
caaaataatcata

SEQ ID NO: 264769 - DNA, 13 bp, Artificial Sequence
  Oligonucleotide for detection of SNP TSC0064176
tagaattattata

SEQ ID NO: 264770 - DNA, 13 bp, Artificial Sequence
  Oligonucleotide for detection of SNP TSC0064176
tataataattcta

SEQ ID NO: 264771 - DNA, 13 bp, Artificial Sequence
  Oligonucleotide for detection of SNP TSC0064176
tagaataattata

SEQ ID NO: 264772 - DNA, 13 bp, Artificial Sequence
  Oligonucleotide for detection of SNP TSC0064176
tataattattcta

SEQ ID NO: 264773 - DNA, 13 bp, Artificial Sequence
  Oligonucleotide for detection of SNP TSC0064177
ggaatagaattaa

SEQ ID NO: 264774 - DNA, 13 bp, Artificial Sequence
  Oligonucleotide for detection of SNP TSC0064177
ttaattctattcc

SEQ ID NO: 264775 - DNA, 13 bp, Artificial Sequence
  Oligonucleotide for detection of SNP TSC0064177
ggaataaaattaa

SEQ ID NO: 264776 - DNA, 13 bp, Artificial Sequence
  Oligonucleotide for detection of SNP TSC0064177
ttaattttattcc

SEQ ID NO: 264777 - DNA, 13 bp, Artificial Sequence
  Oligonucleotide for detection of SNP TSC0064180
ggtattggggaga

SEQ ID NO: 264778 - DNA, 13 bp, Artificial Sequence
  Oligonucleotide for detection of SNP TSC0064180
tctccccaatacc

SEQ ID NO: 264779 - DNA, 13 bp, Artificial Sequence
  Oligonucleotide for detection of SNP TSC0064180
tttttttagtaty

SEQ ID NO: 264780 - DNA, 13 bp, Artificial Sequence
  Oligonucleotide for detection of SNP TSC0064180
ratactaaaaaaa

SEQ ID NO: 264781 - DNA, 13 bp, Artificial Sequence
  Oligonucleotide for detection of SNP TSC0064184
taggaaagttttt

SEQ ID NO: 264782 - DNA, 13 bp, Artificial Sequence
  Oligonucleotide for detection of SNP TSC0064184
aaaaactttccta

SEQ ID NO: 264783 - DNA, 13 bp, Artificial Sequence
  Oligonucleotide for detection of SNP TSC0064184
aaaggttttttta

SEQ ID NO: 264784 - DNA, 13 bp, Artificial Sequence
  Oligonucleotide for detection of SNP TSC0064184
taaaaaaaccttt

SEQ ID NO: 264785 - DNA, 13 bp, Artificial Sequence
  Oligonucleotide for detection of SNP TSC0064185
ttgttataaaagt

SEQ ID NO: 264786 - DNA, 13 bp, Artificial Sequence
  Oligonucleotide for detection of SNP TSC0064185
acttttataacaa

SEQ ID NO: 264787 - DNA, 13 bp, Artificial Sequence
  Oligonucleotide for detection of SNP TSC0064185
ttgttagaaaagt

SEQ ID NO: 264788 - DNA, 13 bp, Artificial Sequence
  Oligonucleotide for detection of SNP TSC0064185
acttttctaacaa

SEQ ID NO: 264789 - DNA, 13 bp, Artificial Sequence
  Oligonucleotide for detection of SNP TSC0064185
atttttttagtag

SEQ ID NO: 264790 - DNA, 13 bp, Artificial Sequence
  Oligonucleotide for detection of SNP TSC0064185
ctactaaaaaaat

SEQ ID NO: 264791 - DNA, 13 bp, Artificial Sequence
  Oligonucleotide for detection of SNP TSC0006268
aaataagtaaatg

SEQ ID NO: 264792 - DNA, 13 bp, Artificial Sequence
  Oligonucleotide for detection of SNP TSC0006268
catttacttattt

SEQ ID NO: 264793 - DNA, 13 bp, Artificial Sequence
  Oligonucleotide for detection of SNP TSC0006268
aaataaataaatg

SEQ ID NO: 264794 - DNA, 13 bp, Artificial Sequence
  Oligonucleotide for detection of SNP TSC0006268
catttatttattt

SEQ ID NO: 264795 - DNA, 13 bp, Artificial Sequence
  Oligonucleotide for detection of SNP TSC0064186
gtgtgtatttgtg

SEQ ID NO: 264796 - DNA, 13 bp, Artificial Sequence
  Oligonucleotide for detection of SNP TSC0064186
cacaaatacacac

SEQ ID NO: 264797 - DNA, 13 bp, Artificial Sequence
  Oligonucleotide for detection of SNP TSC0064186
gtgtgcgtttgtg

SEQ ID NO: 264798 - DNA, 13 bp, Artificial Sequence
  Oligonucleotide for detection of SNP TSC0064186
cacaaacgcacac

SEQ ID NO: 264799 - DNA, 13 bp, Artificial Sequence
  Oligonucleotide for detection of SNP TSC0064186
tataagtgtatay

SEQ ID NO: 264800 - DNA, 13 bp, Artificial Sequence
  Oligonucleotide for detection of SNP TSC0064186
rtatacacttata

SEQ ID NO: 264801 - DNA, 13 bp, Artificial Sequence
  Oligonucleotide for detection of SNP TSC0064186
tataagcgtatay

SEQ ID NO: 264802 - DNA, 13 bp, Artificial Sequence
  Oligonucleotide for detection of SNP TSC0064186
rtatacgcttata

SEQ ID NO: 264803 - DNA, 13 bp, Artificial Sequence
  Oligonucleotide for detection of SNP TSC0064187
tatttgatttatt

SEQ ID NO: 264804 - DNA, 13 bp, Artificial Sequence
  Oligonucleotide for detection of SNP TSC0064187
aataaatcaaata

SEQ ID NO: 264805 - DNA, 13 bp, Artificial Sequence
  Oligonucleotide for detection of SNP TSC0064187
tatttggtttatt

SEQ ID NO: 264806 - DNA, 13 bp, Artificial Sequence
  Oligonucleotide for detection of SNP TSC0064187
aataaaccaaata

SEQ ID NO: 264807 - DNA, 13 bp, Artificial Sequence
  Oligonucleotide for detection of SNP TSC0064189
gataatagttatt

SEQ ID NO: 264808 - DNA, 13 bp, Artificial Sequence
  Oligonucleotide for detection of SNP TSC0064189
aataactattatc

SEQ ID NO: 264809 - DNA, 13 bp, Artificial Sequence
  Oligonucleotide for detection of SNP TSC0064189
gataatggttatt

SEQ ID NO: 264810 - DNA, 13 bp, Artificial Sequence
  Oligonucleotide for detection of SNP TSC0064189
aataaccattatc

SEQ ID NO: 264811 - DNA, 13 bp, Artificial Sequence
  Oligonucleotide for detection of SNP TSC0064190
tagtagtaagaaa

SEQ ID NO: 264812 - DNA, 13 bp, Artificial Sequence
  Oligonucleotide for detection of SNP TSC0064190
tttcttactacta

SEQ ID NO: 264813 - DNA, 13 bp, Artificial Sequence
  Oligonucleotide for detection of SNP TSC0064190
tagtaggaagaaa

SEQ ID NO: 264814 - DNA, 13 bp, Artificial Sequence
  Oligonucleotide for detection of SNP TSC0064190
tttcttcctacta

SEQ ID NO: 264815 - DNA, 13 bp, Artificial Sequence
  Oligonucleotide for detection of SNP TSC0004814
ataagtaagtaay

SEQ ID NO: 264816 - DNA, 13 bp, Artificial Sequence
  Oligonucleotide for detection of SNP TSC0004814
rttacttacttat

SEQ ID NO: 264817 - DNA, 13 bp, Artificial Sequence
  Oligonucleotide for detection of SNP TSC0004814
ataagtgagtaay

SEQ ID NO: 264818 - DNA, 13 bp, Artificial Sequence
  Oligonucleotide for detection of SNP TSC0004814
rttactcacttat

SEQ ID NO: 264819 - DNA, 13 bp, Artificial Sequence
  Oligonucleotide for detection of SNP TSC0004815
ggtattttttttg

SEQ ID NO: 264820 - DNA, 13 bp, Artificial Sequence
  Oligonucleotide for detection of SNP TSC0004815
caaaaaaaatacc

SEQ ID NO: 264821 - DNA, 13 bp, Artificial Sequence
  Oligonucleotide for detection of SNP TSC0004815
tagggatgatgty

SEQ ID NO: 264822 - DNA, 13 bp, Artificial Sequence
  Oligonucleotide for detection of SNP TSC0004815
racatcatcccta

SEQ ID NO: 264823 - DNA, 13 bp, Artificial Sequence
  Oligonucleotide for detection of SNP TSC0064191
ggggttggagatg

SEQ ID NO: 264824 - DNA, 13 bp, Artificial Sequence
  Oligonucleotide for detection of SNP TSC0064191
catctccaacccc

SEQ ID NO: 264825 - DNA, 13 bp, Artificial Sequence
  Oligonucleotide for detection of SNP TSC0064191
ggggttagagatg

SEQ ID NO: 264826 - DNA, 13 bp, Artificial Sequence
  Oligonucleotide for detection of SNP TSC0064191
catctctaacccc

SEQ ID NO: 264827 - DNA, 13 bp, Artificial Sequence
  Oligonucleotide for detection of SNP TSC0064191
ggggtcggagatg

SEQ ID NO: 264828 - DNA, 13 bp, Artificial Sequence
  Oligonucleotide for detection of SNP TSC0064191
catctccgacccc

SEQ ID NO: 264829 - DNA, 13 bp, Artificial Sequence
  Oligonucleotide for detection of SNP TSC0064192
tattttagtagay

SEQ ID NO: 264830 - DNA, 13 bp, Artificial Sequence
  Oligonucleotide for detection of SNP TSC0064192
rtctactaaaata

SEQ ID NO: 264831 - DNA, 13 bp, Artificial Sequence
  Oligonucleotide for detection of SNP TSC0064192
tattttggtagay

SEQ ID NO: 264832 - DNA, 13 bp, Artificial Sequence
  Oligonucleotide for detection of SNP TSC0064192
rtctaccaaaata

SEQ ID NO: 264833 - DNA, 13 bp, Artificial Sequence
  Oligonucleotide for detection of SNP TSC0064192
tatttcggtagay

SEQ ID NO: 264834 - DNA, 13 bp, Artificial Sequence
  Oligonucleotide for detection of SNP TSC0064192
rtctaccgaaata

SEQ ID NO: 264835 - DNA, 13 bp, Artificial Sequence
  Oligonucleotide for detection of SNP TSC0064192
gtttattgaaata

SEQ ID NO: 264836 - DNA, 13 bp, Artificial Sequence
  Oligonucleotide for detection of SNP TSC0064192
tatttcaataaac

SEQ ID NO: 264837 - DNA, 13 bp, Artificial Sequence
  Oligonucleotide for detection of SNP TSC0064192
gtttatcgaaata

SEQ ID NO: 264838 - DNA, 13 bp, Artificial Sequence
  Oligonucleotide for detection of SNP TSC0064192
tatttcgataaac

SEQ ID NO: 264839 - DNA, 13 bp, Artificial Sequence
  Oligonucleotide for detection of SNP TSC0004998
gttatgtgattta

SEQ ID NO: 264840 - DNA, 13 bp, Artificial Sequence
  Oligonucleotide for detection of SNP TSC0004998
taaatcacataac

SEQ ID NO: 264841 - DNA, 13 bp, Artificial Sequence
  Oligonucleotide for detection of SNP TSC0004998
gttatgcgattta

SEQ ID NO: 264842 - DNA, 13 bp, Artificial Sequence
  Oligonucleotide for detection of SNP TSC0004998
taaatcgcataac

SEQ ID NO: 264843 - DNA, 13 bp, Artificial Sequence
  Oligonucleotide for detection of SNP TSC0004998
tgaattgtatgay

SEQ ID NO: 264844 - DNA, 13 bp, Artificial Sequence
  Oligonucleotide for detection of SNP TSC0004998
rtcatacaattca

SEQ ID NO: 264845 - DNA, 13 bp, Artificial Sequence
  Oligonucleotide for detection of SNP TSC0004998
tgaattatatgay

SEQ ID NO: 264846 - DNA, 13 bp, Artificial Sequence
  Oligonucleotide for detection of SNP TSC0004998
rtcatataattca

SEQ ID NO: 264847 - DNA, 13 bp, Artificial Sequence
  Oligonucleotide for detection of SNP TSC0004998
tgaatcgtatgay

SEQ ID NO: 264848 - DNA, 13 bp, Artificial Sequence
  Oligonucleotide for detection of SNP TSC0004998
rtcatacgattca

SEQ ID NO: 264849 - DNA, 13 bp, Artificial Sequence
  Oligonucleotide for detection of SNP TSC0064199
atttttagatagg

SEQ ID NO: 264850 - DNA, 13 bp, Artificial Sequence
  Oligonucleotide for detection of SNP TSC0064199
cctatctaaaaat

SEQ ID NO: 264851 - DNA, 13 bp, Artificial Sequence
  Oligonucleotide for detection of SNP TSC0064199
atttttggatagg

SEQ ID NO: 264852 - DNA, 13 bp, Artificial Sequence
  Oligonucleotide for detection of SNP TSC0064199
cctatccaaaaat

SEQ ID NO: 264853 - DNA, 13 bp, Artificial Sequence
  Oligonucleotide for detection of SNP TSC0064199
attttcggatagg

SEQ ID NO: 264854 - DNA, 13 bp, Artificial Sequence
  Oligonucleotide for detection of SNP TSC0064199
cctatccgaaaat

SEQ ID NO: 264855 - DNA, 13 bp, Artificial Sequence
  Oligonucleotide for detection of SNP TSC0064199
tttgtttggaaat

SEQ ID NO: 264856 - DNA, 13 bp, Artificial Sequence
  Oligonucleotide for detection of SNP TSC0064199
atttccaaacaaa

SEQ ID NO: 264857 - DNA, 13 bp, Artificial Sequence
  Oligonucleotide for detection of SNP TSC0064199
tttgttcggaaat

SEQ ID NO: 264858 - DNA, 13 bp, Artificial Sequence
  Oligonucleotide for detection of SNP TSC0064199
atttccgaacaaa

SEQ ID NO: 264859 - DNA, 13 bp, Artificial Sequence
  Oligonucleotide for detection of SNP TSC0064200
ttttgtatgtttg

SEQ ID NO: 264860 - DNA, 13 bp, Artificial Sequence
  Oligonucleotide for detection of SNP TSC0064200
caaacatacaaaa

SEQ ID NO: 264861 - DNA, 13 bp, Artificial Sequence
  Oligonucleotide for detection of SNP TSC0064200
ttttgtttgtttg

SEQ ID NO: 264862 - DNA, 13 bp, Artificial Sequence
  Oligonucleotide for detection of SNP TSC0064200
caaacaaacaaaa

SEQ ID NO: 264863 - DNA, 13 bp, Artificial Sequence
  Oligonucleotide for detection of SNP TSC0064200
tagatatataagg

SEQ ID NO: 264864 - DNA, 13 bp, Artificial Sequence
  Oligonucleotide for detection of SNP TSC0064200
ccttatatatcta

SEQ ID NO: 264865 - DNA, 13 bp, Artificial Sequence
  Oligonucleotide for detection of SNP TSC0064200
tagatagataagg

SEQ ID NO: 264866 - DNA, 13 bp, Artificial Sequence
  Oligonucleotide for detection of SNP TSC0064200
ccttatctatcta

SEQ ID NO: 264867 - DNA, 13 bp, Artificial Sequence
  Oligonucleotide for detection of SNP TSC0064202
gatgatgaaggaa

SEQ ID NO: 264868 - DNA, 13 bp, Artificial Sequence
  Oligonucleotide for detection of SNP TSC0064202
ttccttcatcatc

SEQ ID NO: 264869 - DNA, 13 bp, Artificial Sequence
  Oligonucleotide for detection of SNP TSC0064202
gatgataaaggaa

SEQ ID NO: 264870 - DNA, 13 bp, Artificial Sequence
  Oligonucleotide for detection of SNP TSC0064202
ttcctttatcatc

SEQ ID NO: 264871 - DNA, 13 bp, Artificial Sequence
  Oligonucleotide for detection of SNP TSC0064202
gatgacgaaggaa

SEQ ID NO: 264872 - DNA, 13 bp, Artificial Sequence
  Oligonucleotide for detection of SNP TSC0064202
ttccttcgtcatc

SEQ ID NO: 264873 - DNA, 13 bp, Artificial Sequence
  Oligonucleotide for detection of SNP TSC0064206
gttttaatatgtg

SEQ ID NO: 264874 - DNA, 13 bp, Artificial Sequence
  Oligonucleotide for detection of SNP TSC0064206
cacatattaaaac

SEQ ID NO: 264875 - DNA, 13 bp, Artificial Sequence
  Oligonucleotide for detection of SNP TSC0064206
gttttagtatgtg

SEQ ID NO: 264876 - DNA, 13 bp, Artificial Sequence
  Oligonucleotide for detection of SNP TSC0064206
cacatactaaaac

SEQ ID NO: 264877 - DNA, 13 bp, Artificial Sequence
  Oligonucleotide for detection of SNP TSC0064207
gggttttgaggaa

SEQ ID NO: 264878 - DNA, 13 bp, Artificial Sequence
  Oligonucleotide for detection of SNP TSC0064207
ttcctcaaaaccc

SEQ ID NO: 264879 - DNA, 13 bp, Artificial Sequence
  Oligonucleotide for detection of SNP TSC0064207
gggtttcgaggaa

SEQ ID NO: 264880 - DNA, 13 bp, Artificial Sequence
  Oligonucleotide for detection of SNP TSC0064207
ttcctcgaaaccc

SEQ ID NO: 264881 - DNA, 13 bp, Artificial Sequence
  Oligonucleotide for detection of SNP TSC0064208
gtggagtagttgt

SEQ ID NO: 264882 - DNA, 13 bp, Artificial Sequence
  Oligonucleotide for detection of SNP TSC0064208
acaactactccac

SEQ ID NO: 264883 - DNA, 13 bp, Artificial Sequence
  Oligonucleotide for detection of SNP TSC0064208
gtggaggagttgt

SEQ ID NO: 264884 - DNA, 13 bp, Artificial Sequence
  Oligonucleotide for detection of SNP TSC0064208
acaactcctccac

SEQ ID NO: 264885 - DNA, 13 bp, Artificial Sequence
  Oligonucleotide for detection of SNP TSC0064209
gatgataatgata

SEQ ID NO: 264886 - DNA, 13 bp, Artificial Sequence
  Oligonucleotide for detection of SNP TSC0064209
tatcattatcatc

SEQ ID NO: 264887 - DNA, 13 bp, Artificial Sequence
  Oligonucleotide for detection of SNP TSC0064209
gatgatgatgata

SEQ ID NO: 264888 - DNA, 13 bp, Artificial Sequence
  Oligonucleotide for detection of SNP TSC0064209
tatcatcatcatc

SEQ ID NO: 264889 - DNA, 13 bp, Artificial Sequence
  Oligonucleotide for detection of SNP TSC0008272
agggtttgattty

SEQ ID NO: 264890 - DNA, 13 bp, Artificial Sequence
  Oligonucleotide for detection of SNP TSC0008272
raaatcaaaccct

SEQ ID NO: 264891 - DNA, 13 bp, Artificial Sequence
  Oligonucleotide for detection of SNP TSC0008272
agggttcgattty

SEQ ID NO: 264892 - DNA, 13 bp, Artificial Sequence
  Oligonucleotide for detection of SNP TSC0008272
raaatcgaaccct

SEQ ID NO: 264893 - DNA, 13 bp, Artificial Sequence
  Oligonucleotide for detection of SNP TSC0008272
gaaattgaatttt

SEQ ID NO: 264894 - DNA, 13 bp, Artificial Sequence
  Oligonucleotide for detection of SNP TSC0008272
aaaattcaatttc

SEQ ID NO: 264895 - DNA, 13 bp, Artificial Sequence
  Oligonucleotide for detection of SNP TSC0008272
gaaattaaatttt

SEQ ID NO: 264896 - DNA, 13 bp, Artificial Sequence
  Oligonucleotide for detection of SNP TSC0008272
aaaatttaatttc

SEQ ID NO: 264897 - DNA, 13 bp, Artificial Sequence
  Oligonucleotide for detection of SNP TSC0008272
gaaatcgaatttt

SEQ ID NO: 264898 - DNA, 13 bp, Artificial Sequence
  Oligonucleotide for detection of SNP TSC0008272
aaaattcgatttc

SEQ ID NO: 264899 - DNA, 13 bp, Artificial Sequence
  Oligonucleotide for detection of SNP TSC0007500
gaaagtgttaaga

SEQ ID NO: 264900 - DNA, 13 bp, Artificial Sequence
  Oligonucleotide for detection of SNP TSC0007500
tcttaacactttc

SEQ ID NO: 264901 - DNA, 13 bp, Artificial Sequence
  Oligonucleotide for detection of SNP TSC0007500
gaaagtattaaga

SEQ ID NO: 264902 - DNA, 13 bp, Artificial Sequence
  Oligonucleotide for detection of SNP TSC0007500
tcttaatactttc

SEQ ID NO: 264903 - DNA, 13 bp, Artificial Sequence
  Oligonucleotide for detection of SNP TSC0008450
gatgtaattttgg

SEQ ID NO: 264904 - DNA, 13 bp, Artificial Sequence
  Oligonucleotide for detection of SNP TSC0008450
ccaaaattacatc

SEQ ID NO: 264905 - DNA, 13 bp, Artificial Sequence
  Oligonucleotide for detection of SNP TSC0008450
gatgtagttttgg

SEQ ID NO: 264906 - DNA, 13 bp, Artificial Sequence
  Oligonucleotide for detection of SNP TSC0008450
ccaaaactacatc

SEQ ID NO: 264907 - DNA, 13 bp, Artificial Sequence
  Oligonucleotide for detection of SNP TSC0064210
ataaatattttty

SEQ ID NO: 264908 - DNA, 13 bp, Artificial Sequence
  Oligonucleotide for detection of SNP TSC0064210
raaaaatatttat

SEQ ID NO: 264909 - DNA, 13 bp, Artificial Sequence
  Oligonucleotide for detection of SNP TSC0064210
ataaacgttttty

SEQ ID NO: 264910 - DNA, 13 bp, Artificial Sequence
  Oligonucleotide for detection of SNP TSC0064210
raaaaacgtttat

SEQ ID NO: 264911 - DNA, 13 bp, Artificial Sequence
  Oligonucleotide for detection of SNP TSC0064210
ggggggtgtttgt

SEQ ID NO: 264912 - DNA, 13 bp, Artificial Sequence
  Oligonucleotide for detection of SNP TSC0064210
acaaacacccccc

SEQ ID NO: 264913 - DNA, 13 bp, Artificial Sequence
  Oligonucleotide for detection of SNP TSC0064210
ggggggcgtttgt

SEQ ID NO: 264914 - DNA, 13 bp, Artificial Sequence
  Oligonucleotide for detection of SNP TSC0064210
acaaacgcccccc

SEQ ID NO: 264915 - DNA, 13 bp, Artificial Sequence
  Oligonucleotide for detection of SNP TSC0001454
tataggagataag

SEQ ID NO: 264916 - DNA, 13 bp, Artificial Sequence
  Oligonucleotide for detection of SNP TSC0001454
cttatctcctata

SEQ ID NO: 264917 - DNA, 13 bp, Artificial Sequence
  Oligonucleotide for detection of SNP TSC0001454
tataggtgataag

SEQ ID NO: 264918 - DNA, 13 bp, Artificial Sequence
  Oligonucleotide for detection of SNP TSC0001454
cttatcacctata

SEQ ID NO: 264919 - DNA, 13 bp, Artificial Sequence
  Oligonucleotide for detection of SNP TSC0001455
aaagtttgttgtt

SEQ ID NO: 264920 - DNA, 13 bp, Artificial Sequence
  Oligonucleotide for detection of SNP TSC0001455
aacaacaaacttt

SEQ ID NO: 264921 - DNA, 13 bp, Artificial Sequence
  Oligonucleotide for detection of SNP TSC0001455
aaagttcgttgtt

SEQ ID NO: 264922 - DNA, 13 bp, Artificial Sequence
  Oligonucleotide for detection of SNP TSC0001455
aacaacgaacttt

SEQ ID NO: 264923 - DNA, 13 bp, Artificial Sequence
  Oligonucleotide for detection of SNP TSC0001455
agtaatgagtttt

SEQ ID NO: 264924 - DNA, 13 bp, Artificial Sequence
  Oligonucleotide for detection of SNP TSC0001455
aaaactcattact

SEQ ID NO: 264925 - DNA, 13 bp, Artificial Sequence
  Oligonucleotide for detection of SNP TSC0001455
agtaataagtttt

SEQ ID NO: 264926 - DNA, 13 bp, Artificial Sequence
  Oligonucleotide for detection of SNP TSC0001455
aaaacttattact

SEQ ID NO: 264927 - DNA, 13 bp, Artificial Sequence
  Oligonucleotide for detection of SNP TSC0001455
agtaacgagtttt

SEQ ID NO: 264928 - DNA, 13 bp, Artificial Sequence
  Oligonucleotide for detection of SNP TSC0001455
aaaactcgttact

SEQ ID NO: 264929 - DNA, 13 bp, Artificial Sequence
  Oligonucleotide for detection of SNP TSC0000183
tttggggaattga

SEQ ID NO: 264930 - DNA, 13 bp, Artificial Sequence
  Oligonucleotide for detection of SNP TSC0000183
tcaattccccaaa

SEQ ID NO: 264931 - DNA, 13 bp, Artificial Sequence
  Oligonucleotide for detection of SNP TSC0000183
tttgggaaattga

SEQ ID NO: 264932 - DNA, 13 bp, Artificial Sequence
  Oligonucleotide for detection of SNP TSC0000183
tcaatttcccaaa

SEQ ID NO: 264933 - DNA, 13 bp, Artificial Sequence
  Oligonucleotide for detection of SNP TSC0005343
gataggagagtat

SEQ ID NO: 264934 - DNA, 13 bp, Artificial Sequence
  Oligonucleotide for detection of SNP TSC0005343
atactctcctatc

SEQ ID NO: 264935 - DNA, 13 bp, Artificial Sequence
  Oligonucleotide for detection of SNP TSC0005343
gataggggagtat

SEQ ID NO: 264936 - DNA, 13 bp, Artificial Sequence
  Oligonucleotide for detection of SNP TSC0005343
atactcccctatc

SEQ ID NO: 264937 - DNA, 13 bp, Artificial Sequence
  Oligonucleotide for detection of SNP TSC0005344
gagtgtttgtgga

SEQ ID NO: 264938 - DNA, 13 bp, Artificial Sequence
  Oligonucleotide for detection of SNP TSC0005344
tccacaaacactc

SEQ ID NO: 264939 - DNA, 13 bp, Artificial Sequence
  Oligonucleotide for detection of SNP TSC0005344
gagtgtgtgtgga

SEQ ID NO: 264940 - DNA, 13 bp, Artificial Sequence
  Oligonucleotide for detection of SNP TSC0005344
tccacacacactc

SEQ ID NO: 264941 - DNA, 13 bp, Artificial Sequence
  Oligonucleotide for detection of SNP TSC0005344
gagtgcgtgtgga

SEQ ID NO: 264942 - DNA, 13 bp, Artificial Sequence
  Oligonucleotide for detection of SNP TSC0005344
tccacacgcactc

SEQ ID NO: 264943 - DNA, 13 bp, Artificial Sequence
  Oligonucleotide for detection of SNP TSC0005344
tttataggtatty

SEQ ID NO: 264944 - DNA, 13 bp, Artificial Sequence
  Oligonucleotide for detection of SNP TSC0005344
raatacctataaa

SEQ ID NO: 264945 - DNA, 13 bp, Artificial Sequence
  Oligonucleotide for detection of SNP TSC0005049
atttagatgtaag

SEQ ID NO: 264946 - DNA, 13 bp, Artificial Sequence
  Oligonucleotide for detection of SNP TSC0005049
cttacatctaaat

SEQ ID NO: 264947 - DNA, 13 bp, Artificial Sequence
  Oligonucleotide for detection of SNP TSC0005049
atttagttgtaag

SEQ ID NO: 264948 - DNA, 13 bp, Artificial Sequence
  Oligonucleotide for detection of SNP TSC0005049
cttacaactaaat

SEQ ID NO: 264949 - DNA, 13 bp, Artificial Sequence
  Oligonucleotide for detection of SNP TSC0005049
tttgtatttagat

SEQ ID NO: 264950 - DNA, 13 bp, Artificial Sequence
  Oligonucleotide for detection of SNP TSC0005049
atctaaatacaaa

SEQ ID NO: 264951 - DNA, 13 bp, Artificial Sequence
  Oligonucleotide for detection of SNP TSC0005049
tttgtaattagat

SEQ ID NO: 264952 - DNA, 13 bp, Artificial Sequence
  Oligonucleotide for detection of SNP TSC0005049
atctaattacaaa

SEQ ID NO: 264953 - DNA, 13 bp, Artificial Sequence
  Oligonucleotide for detection of SNP TSC0064214
aaattgattttta

SEQ ID NO: 264954 - DNA, 13 bp, Artificial Sequence
  Oligonucleotide for detection of SNP TSC0064214
taaaaatcaattt

SEQ ID NO: 264955 - DNA, 13 bp, Artificial Sequence
  Oligonucleotide for detection of SNP TSC0064214
tggaagttaattt

SEQ ID NO: 264956 - DNA, 13 bp, Artificial Sequence
  Oligonucleotide for detection of SNP TSC0064214
aaattaacttcca

SEQ ID NO: 264957 - DNA, 13 bp, Artificial Sequence
  Oligonucleotide for detection of SNP TSC0064214
tggaagataattt

SEQ ID NO: 264958 - DNA, 13 bp, Artificial Sequence
  Oligonucleotide for detection of SNP TSC0064214
aaattatcttcca

SEQ ID NO: 264959 - DNA, 13 bp, Artificial Sequence
  Oligonucleotide for detection of SNP TSC0000820
tttgtagtgtttg

SEQ ID NO: 264960 - DNA, 13 bp, Artificial Sequence
  Oligonucleotide for detection of SNP TSC0000820
caaacactacaaa

SEQ ID NO: 264961 - DNA, 13 bp, Artificial Sequence
  Oligonucleotide for detection of SNP TSC0064216
atagttattttat

SEQ ID NO: 264962 - DNA, 13 bp, Artificial Sequence
  Oligonucleotide for detection of SNP TSC0064216
ataaaataactat

SEQ ID NO: 264963 - DNA, 13 bp, Artificial Sequence
  Oligonucleotide for detection of SNP TSC0064216
atagtttttttat

SEQ ID NO: 264964 - DNA, 13 bp, Artificial Sequence
  Oligonucleotide for detection of SNP TSC0064216
ataaaaaaactat

SEQ ID NO: 264965 - DNA, 13 bp, Artificial Sequence
  Oligonucleotide for detection of SNP TSC0064216
atgaagtggttgt

SEQ ID NO: 264966 - DNA, 13 bp, Artificial Sequence
  Oligonucleotide for detection of SNP TSC0064216
acaaccacttcat

SEQ ID NO: 264967 - DNA, 13 bp, Artificial Sequence
  Oligonucleotide for detection of SNP TSC0064216
atgaaggggttgt

SEQ ID NO: 264968 - DNA, 13 bp, Artificial Sequence
  Oligonucleotide for detection of SNP TSC0064216
acaaccccttcat

SEQ ID NO: 264969 - DNA, 13 bp, Artificial Sequence
  Oligonucleotide for detection of SNP TSC0064217
agaggttggaagg

SEQ ID NO: 264970 - DNA, 13 bp, Artificial Sequence
  Oligonucleotide for detection of SNP TSC0064217
ccttccaacctct

SEQ ID NO: 264971 - DNA, 13 bp, Artificial Sequence
  Oligonucleotide for detection of SNP TSC0064217
agaggtcggaagg

SEQ ID NO: 264972 - DNA, 13 bp, Artificial Sequence
  Oligonucleotide for detection of SNP TSC0064217
ccttccgacctct

SEQ ID NO: 264973 - DNA, 13 bp, Artificial Sequence
  Oligonucleotide for detection of SNP TSC0064219
tattaaaagtttt

SEQ ID NO: 264974 - DNA, 13 bp, Artificial Sequence
  Oligonucleotide for detection of SNP TSC0064219
aaaacttttaata

SEQ ID NO: 264975 - DNA, 13 bp, Artificial Sequence
  Oligonucleotide for detection of SNP TSC0064219
tattaagagtttt

SEQ ID NO: 264976 - DNA, 13 bp, Artificial Sequence
  Oligonucleotide for detection of SNP TSC0064219
aaaactcttaata

SEQ ID NO: 264977 - DNA, 13 bp, Artificial Sequence
  Oligonucleotide for detection of SNP TSC0010195
ataggagttagay

SEQ ID NO: 264978 - DNA, 13 bp, Artificial Sequence
  Oligonucleotide for detection of SNP TSC0010195
rtctaactcctat

SEQ ID NO: 264979 - DNA, 13 bp, Artificial Sequence
  Oligonucleotide for detection of SNP TSC0010195
ataggaattagay

SEQ ID NO: 264980 - DNA, 13 bp, Artificial Sequence
  Oligonucleotide for detection of SNP TSC0010195
rtctaattcctat

SEQ ID NO: 264981 - DNA, 13 bp, Artificial Sequence
  Oligonucleotide for detection of SNP TSC0000911
agataatgaaagt

SEQ ID NO: 264982 - DNA, 13 bp, Artificial Sequence
  Oligonucleotide for detection of SNP TSC0000911
actttcattatct

SEQ ID NO: 264983 - DNA, 13 bp, Artificial Sequence
  Oligonucleotide for detection of SNP TSC0000911
agataacgaaagt

SEQ ID NO: 264984 - DNA, 13 bp, Artificial Sequence
  Oligonucleotide for detection of SNP TSC0000911
actttcgttatct

SEQ ID NO: 264985 - DNA, 13 bp, Artificial Sequence
  Oligonucleotide for detection of SNP TSC0064223
gaaggtgttttta

SEQ ID NO: 264986 - DNA, 13 bp, Artificial Sequence
  Oligonucleotide for detection of SNP TSC0064223
taaaaacaccttc

SEQ ID NO: 264987 - DNA, 13 bp, Artificial Sequence
  Oligonucleotide for detection of SNP TSC0064223
gaaggtattttta

SEQ ID NO: 264988 - DNA, 13 bp, Artificial Sequence
  Oligonucleotide for detection of SNP TSC0064223
taaaaataccttc

SEQ ID NO: 264989 - DNA, 13 bp, Artificial Sequence
  Oligonucleotide for detection of SNP TSC0001111
gagttatgataat

SEQ ID NO: 264990 - DNA, 13 bp, Artificial Sequence
  Oligonucleotide for detection of SNP TSC0001111
attatcataactc

SEQ ID NO: 264991 - DNA, 13 bp, Artificial Sequence
  Oligonucleotide for detection of SNP TSC0001111
gagttacgataat

SEQ ID NO: 264992 - DNA, 13 bp, Artificial Sequence
  Oligonucleotide for detection of SNP TSC0001111
attatcgtaactc

SEQ ID NO: 264993 - DNA, 13 bp, Artificial Sequence
  Oligonucleotide for detection of SNP TSC0001112
gtaagatagatga

SEQ ID NO: 264994 - DNA, 13 bp, Artificial Sequence
  Oligonucleotide for detection of SNP TSC0001112
tcatctatcttac

SEQ ID NO: 264995 - DNA, 13 bp, Artificial Sequence
  Oligonucleotide for detection of SNP TSC0001112
gtaagagagatga

SEQ ID NO: 264996 - DNA, 13 bp, Artificial Sequence
  Oligonucleotide for detection of SNP TSC0001112
tcatctctcttac

SEQ ID NO: 264997 - DNA, 13 bp, Artificial Sequence
  Oligonucleotide for detection of SNP TSC0001112
gtaagatagacga

SEQ ID NO: 264998 - DNA, 13 bp, Artificial Sequence
  Oligonucleotide for detection of SNP TSC0001112
tcgtctatcttac

SEQ ID NO: 264999 - DNA, 13 bp, Artificial Sequence
  Oligonucleotide for detection of SNP TSC0001112
gtaagagagacga

SEQ ID NO: 265000 - DNA, 13 bp, Artificial Sequence
  Oligonucleotide for detection of SNP TSC0001112
tcgtctctcttac

SEQ ID NO: 265001 - DNA, 13 bp, Artificial Sequence
  Oligonucleotide for detection of SNP TSC0001112
tcgtttgttttay

SEQ ID NO: 265002 - DNA, 13 bp, Artificial Sequence
  Oligonucleotide for detection of SNP TSC0001112
rtaaaacaaacga

SEQ ID NO: 265003 - DNA, 13 bp, Artificial Sequence
  Oligonucleotide for detection of SNP TSC0001112
tcgttttttttay

SEQ ID NO: 265004 - DNA, 13 bp, Artificial Sequence
  Oligonucleotide for detection of SNP TSC0001112
rtaaaaaaaacga

SEQ ID NO: 265005 - DNA, 13 bp, Artificial Sequence
  Oligonucleotide for detection of SNP TSC0064226
gaagtatgtgata

SEQ ID NO: 265006 - DNA, 13 bp, Artificial Sequence
  Oligonucleotide for detection of SNP TSC0064226
tatcacatacttc

SEQ ID NO: 265007 - DNA, 13 bp, Artificial Sequence
  Oligonucleotide for detection of SNP TSC0064226
gaagtacgtgata

SEQ ID NO: 265008 - DNA, 13 bp, Artificial Sequence
  Oligonucleotide for detection of SNP TSC0064226
tatcacgtacttc

SEQ ID NO: 265009 - DNA, 13 bp, Artificial Sequence
  Oligonucleotide for detection of SNP TSC0000889
agataatggattt

SEQ ID NO: 265010 - DNA, 13 bp, Artificial Sequence
  Oligonucleotide for detection of SNP TSC0000889
aaatccattatct

SEQ ID NO: 265011 - DNA, 13 bp, Artificial Sequence
  Oligonucleotide for detection of SNP TSC0000889
agataaaggattt

SEQ ID NO: 265012 - DNA, 13 bp, Artificial Sequence
  Oligonucleotide for detection of SNP TSC0000889
aaatcctttatct

SEQ ID NO: 265013 - DNA, 13 bp, Artificial Sequence
  Oligonucleotide for detection of SNP TSC0064227
agtagtatgattg

SEQ ID NO: 265014 - DNA, 13 bp, Artificial Sequence
  Oligonucleotide for detection of SNP TSC0064227
caatcatactact

SEQ ID NO: 265015 - DNA, 13 bp, Artificial Sequence
  Oligonucleotide for detection of SNP TSC0064227
agtagtgtgattg

SEQ ID NO: 265016 - DNA, 13 bp, Artificial Sequence
  Oligonucleotide for detection of SNP TSC0064227
caatcacactact

SEQ ID NO: 265017 - DNA, 13 bp, Artificial Sequence
  Oligonucleotide for detection of SNP TSC0064228
ggagagaaaataa

SEQ ID NO: 265018 - DNA, 13 bp, Artificial Sequence
  Oligonucleotide for detection of SNP TSC0064228
ttattttctctcc

SEQ ID NO: 265019 - DNA, 13 bp, Artificial Sequence
  Oligonucleotide for detection of SNP TSC0064228
ggagaggaaataa

SEQ ID NO: 265020 - DNA, 13 bp, Artificial Sequence
  Oligonucleotide for detection of SNP TSC0064228
ttatttcctctcc

SEQ ID NO: 265021 - DNA, 13 bp, Artificial Sequence
  Oligonucleotide for detection of SNP TSC0064229
ttttaaatgttgg

SEQ ID NO: 265022 - DNA, 13 bp, Artificial Sequence
  Oligonucleotide for detection of SNP TSC0064229
ccaacatttaaaa

SEQ ID NO: 265023 - DNA, 13 bp, Artificial Sequence
  Oligonucleotide for detection of SNP TSC0064229
ttttaagtgttgg

SEQ ID NO: 265024 - DNA, 13 bp, Artificial Sequence
  Oligonucleotide for detection of SNP TSC0064229
ccaacacttaaaa

SEQ ID NO: 265025 - DNA, 13 bp, Artificial Sequence
  Oligonucleotide for detection of SNP TSC0064230
ttaattgttgagt

SEQ ID NO: 265026 - DNA, 13 bp, Artificial Sequence
  Oligonucleotide for detection of SNP TSC0064230
actcaacaattaa

SEQ ID NO: 265027 - DNA, 13 bp, Artificial Sequence
  Oligonucleotide for detection of SNP TSC0064230
ttaattattgagt

SEQ ID NO: 265028 - DNA, 13 bp, Artificial Sequence
  Oligonucleotide for detection of SNP TSC0064230
actcaataattaa

SEQ ID NO: 265029 - DNA, 13 bp, Artificial Sequence
  Oligonucleotide for detection of SNP TSC0064231
aagaattatgttt

SEQ ID NO: 265030 - DNA, 13 bp, Artificial Sequence
  Oligonucleotide for detection of SNP TSC0064231
aaacataattctt

SEQ ID NO: 265031 - DNA, 13 bp, Artificial Sequence
  Oligonucleotide for detection of SNP TSC0064231
aagaatgatgttt

SEQ ID NO: 265032 - DNA, 13 bp, Artificial Sequence
  Oligonucleotide for detection of SNP TSC0064231
aaacatcattctt

SEQ ID NO: 265033 - DNA, 13 bp, Artificial Sequence
  Oligonucleotide for detection of SNP TSC0064231
aagtatgattttt

SEQ ID NO: 265034 - DNA, 13 bp, Artificial Sequence
  Oligonucleotide for detection of SNP TSC0064231
aaaaatcatactt

SEQ ID NO: 265035 - DNA, 13 bp, Artificial Sequence
  Oligonucleotide for detection of SNP TSC0064231
aagtattattttt

SEQ ID NO: 265036 - DNA, 13 bp, Artificial Sequence
  Oligonucleotide for detection of SNP TSC0064231
aaaaataatactt

SEQ ID NO: 265037 - DNA, 13 bp, Artificial Sequence
  Oligonucleotide for detection of SNP TSC0064232
ggtagtgatatty

SEQ ID NO: 265038 - DNA, 13 bp, Artificial Sequence
  Oligonucleotide for detection of SNP TSC0064232
raatatcactacc

SEQ ID NO: 265039 - DNA, 13 bp, Artificial Sequence
  Oligonucleotide for detection of SNP TSC0064232
ggtagtaatatty

SEQ ID NO: 265040 - DNA, 13 bp, Artificial Sequence
  Oligonucleotide for detection of SNP TSC0064232
raatattactacc

SEQ ID NO: 265041 - DNA, 13 bp, Artificial Sequence
  Oligonucleotide for detection of SNP TSC0064233
agaaaagaataga

SEQ ID NO: 265042 - DNA, 13 bp, Artificial Sequence
  Oligonucleotide for detection of SNP TSC0064233
tctattcttttct

SEQ ID NO: 265043 - DNA, 13 bp, Artificial Sequence
  Oligonucleotide for detection of SNP TSC0064233
agaaaaaaataga

SEQ ID NO: 265044 - DNA, 13 bp, Artificial Sequence
  Oligonucleotide for detection of SNP TSC0064233
tctatttttttct

SEQ ID NO: 265045 - DNA, 13 bp, Artificial Sequence
  Oligonucleotide for detection of SNP TSC0064234
tttttgattgtat

SEQ ID NO: 265046 - DNA, 13 bp, Artificial Sequence
  Oligonucleotide for detection of SNP TSC0064234
atacaatcaaaaa

SEQ ID NO: 265047 - DNA, 13 bp, Artificial Sequence
  Oligonucleotide for detection of SNP TSC0064234
tttttggttgtat

SEQ ID NO: 265048 - DNA, 13 bp, Artificial Sequence
  Oligonucleotide for detection of SNP TSC0064234
atacaaccaaaaa

SEQ ID NO: 265049 - DNA, 13 bp, Artificial Sequence
  Oligonucleotide for detection of SNP TSC0064235
tgttttgtgtgay

SEQ ID NO: 265050 - DNA, 13 bp, Artificial Sequence
  Oligonucleotide for detection of SNP TSC0064235
rtcacacaaaaca

SEQ ID NO: 265051 - DNA, 13 bp, Artificial Sequence
  Oligonucleotide for detection of SNP TSC0064235
tgttttatgtgay

SEQ ID NO: 265052 - DNA, 13 bp, Artificial Sequence
  Oligonucleotide for detection of SNP TSC0064235
rtcacataaaaca

SEQ ID NO: 265053 - DNA, 13 bp, Artificial Sequence
  Oligonucleotide for detection of SNP TSC0001381
ttttagtgttata

SEQ ID NO: 265054 - DNA, 13 bp, Artificial Sequence
  Oligonucleotide for detection of SNP TSC0001381
tataacactaaaa

SEQ ID NO: 265055 - DNA, 13 bp, Artificial Sequence
  Oligonucleotide for detection of SNP TSC0001381
ttttagcgttata

SEQ ID NO: 265056 - DNA, 13 bp, Artificial Sequence
  Oligonucleotide for detection of SNP TSC0001381
tataacgctaaaa

SEQ ID NO: 265057 - DNA, 13 bp, Artificial Sequence
  Oligonucleotide for detection of SNP TSC0001381
tgtgatgttggga

SEQ ID NO: 265058 - DNA, 13 bp, Artificial Sequence
  Oligonucleotide for detection of SNP TSC0001381
tcccaacatcaca

SEQ ID NO: 265059 - DNA, 13 bp, Artificial Sequence
  Oligonucleotide for detection of SNP TSC0001381
tgtgattttggga

SEQ ID NO: 265060 - DNA, 13 bp, Artificial Sequence
  Oligonucleotide for detection of SNP TSC0001381
tcccaaaatcaca

SEQ ID NO: 265061 - DNA, 13 bp, Artificial Sequence
  Oligonucleotide for detection of SNP TSC0001381
tgtgacgttggga

SEQ ID NO: 265062 - DNA, 13 bp, Artificial Sequence
  Oligonucleotide for detection of SNP TSC0001381
tcccaacgtcaca

SEQ ID NO: 265063 - DNA, 13 bp, Artificial Sequence
  Oligonucleotide for detection of SNP TSC0001024
tattttgttaagg

SEQ ID NO: 265064 - DNA, 13 bp, Artificial Sequence
  Oligonucleotide for detection of SNP TSC0001024
ccttaacaaaata

SEQ ID NO: 265065 - DNA, 13 bp, Artificial Sequence
  Oligonucleotide for detection of SNP TSC0001024
tattttattaagg

SEQ ID NO: 265066 - DNA, 13 bp, Artificial Sequence
  Oligonucleotide for detection of SNP TSC0001024
ccttaataaaata

SEQ ID NO: 265067 - DNA, 13 bp, Artificial Sequence
  Oligonucleotide for detection of SNP TSC0010861
aaggtaaattttg

SEQ ID NO: 265068 - DNA, 13 bp, Artificial Sequence
  Oligonucleotide for detection of SNP TSC0010861
caaaatttacctt

SEQ ID NO: 265069 - DNA, 13 bp, Artificial Sequence
  Oligonucleotide for detection of SNP TSC0010861
aaggtatattttg

SEQ ID NO: 265070 - DNA, 13 bp, Artificial Sequence
  Oligonucleotide for detection of SNP TSC0010861
caaaatatacctt

SEQ ID NO: 265071 - DNA, 13 bp, Artificial Sequence
  Oligonucleotide for detection of SNP TSC0010861
taaagtttatttt

SEQ ID NO: 265072 - DNA, 13 bp, Artificial Sequence
  Oligonucleotide for detection of SNP TSC0010861
aaaataaacttta

SEQ ID NO: 265073 - DNA, 13 bp, Artificial Sequence
  Oligonucleotide for detection of SNP TSC0010861
taaagtatatttt

SEQ ID NO: 265074 - DNA, 13 bp, Artificial Sequence
  Oligonucleotide for detection of SNP TSC0010861
aaaatatacttta

SEQ ID NO: 265075 - DNA, 13 bp, Artificial Sequence
  Oligonucleotide for detection of SNP TSC0010862
taggaagtgatag

SEQ ID NO: 265076 - DNA, 13 bp, Artificial Sequence
  Oligonucleotide for detection of SNP TSC0010862
ctatcacttccta

SEQ ID NO: 265077 - DNA, 13 bp, Artificial Sequence
  Oligonucleotide for detection of SNP TSC0010862
taggaaatgatag

SEQ ID NO: 265078 - DNA, 13 bp, Artificial Sequence
  Oligonucleotide for detection of SNP TSC0010862
ctatcatttccta

SEQ ID NO: 265079 - DNA, 13 bp, Artificial Sequence
  Oligonucleotide for detection of SNP TSC0001518
tagtgttgggggy

SEQ ID NO: 265080 - DNA, 13 bp, Artificial Sequence
  Oligonucleotide for detection of SNP TSC0001518
rcccccaacacta

SEQ ID NO: 265081 - DNA, 13 bp, Artificial Sequence
  Oligonucleotide for detection of SNP TSC0001518
tagtgtcgggggy

SEQ ID NO: 265082 - DNA, 13 bp, Artificial Sequence
  Oligonucleotide for detection of SNP TSC0001518
rcccccgacacta

SEQ ID NO: 265083 - DNA, 13 bp, Artificial Sequence
  Oligonucleotide for detection of SNP TSC0001491
gaggtttaagtgg

SEQ ID NO: 265084 - DNA, 13 bp, Artificial Sequence
  Oligonucleotide for detection of SNP TSC0001491
ccacttaaacctc

SEQ ID NO: 265085 - DNA, 13 bp, Artificial Sequence
  Oligonucleotide for detection of SNP TSC0001491
gaggtcgaagtgg

SEQ ID NO: 265086 - DNA, 13 bp, Artificial Sequence
  Oligonucleotide for detection of SNP TSC0001491
ccacttcgacctc

SEQ ID NO: 265087 - DNA, 13 bp, Artificial Sequence
  Oligonucleotide for detection of SNP TSC0001491
ttatttgggttty

SEQ ID NO: 265088 - DNA, 13 bp, Artificial Sequence
  Oligonucleotide for detection of SNP TSC0001491
raaacccaaataa

SEQ ID NO: 265089 - DNA, 13 bp, Artificial Sequence
  Oligonucleotide for detection of SNP TSC0064237
tttggtatgtgta

SEQ ID NO: 265090 - DNA, 13 bp, Artificial Sequence
  Oligonucleotide for detection of SNP TSC0064237
tacacataccaaa

SEQ ID NO: 265091 - DNA, 13 bp, Artificial Sequence
  Oligonucleotide for detection of SNP TSC0064237
tttggtgtgtgta

SEQ ID NO: 265092 - DNA, 13 bp, Artificial Sequence
  Oligonucleotide for detection of SNP TSC0064237
tacacacaccaaa

SEQ ID NO: 265093 - DNA, 13 bp, Artificial Sequence
  Oligonucleotide for detection of SNP TSC0064237
tttggcgtgtgta

SEQ ID NO: 265094 - DNA, 13 bp, Artificial Sequence
  Oligonucleotide for detection of SNP TSC0064237
tacacacgccaaa

SEQ ID NO: 265095 - DNA, 13 bp, Artificial Sequence
  Oligonucleotide for detection of SNP TSC0064237
tatatatgttaga

SEQ ID NO: 265096 - DNA, 13 bp, Artificial Sequence
  Oligonucleotide for detection of SNP TSC0064237
tctaacatatata

SEQ ID NO: 265097 - DNA, 13 bp, Artificial Sequence
  Oligonucleotide for detection of SNP TSC0064237
tatatacgttaga

SEQ ID NO: 265098 - DNA, 13 bp, Artificial Sequence
  Oligonucleotide for detection of SNP TSC0064237
tctaacgtatata

SEQ ID NO: 265099 - DNA, 13 bp, Artificial Sequence
  Oligonucleotide for detection of SNP TSC0064238
gtatgtaatagtg

SEQ ID NO: 265100 - DNA, 13 bp, Artificial Sequence
  Oligonucleotide for detection of SNP TSC0064238
cactattacatac

SEQ ID NO: 265101 - DNA, 13 bp, Artificial Sequence
  Oligonucleotide for detection of SNP TSC0064238
gtatgtgatagtg

SEQ ID NO: 265102 - DNA, 13 bp, Artificial Sequence
  Oligonucleotide for detection of SNP TSC0064238
cactatcacatac

SEQ ID NO: 265103 - DNA, 13 bp, Artificial Sequence
  Oligonucleotide for detection of SNP TSC0064239
gtaagtatgtttg

SEQ ID NO: 265104 - DNA, 13 bp, Artificial Sequence
  Oligonucleotide for detection of SNP TSC0064239
caaacatacttac

SEQ ID NO: 265105 - DNA, 13 bp, Artificial Sequence
  Oligonucleotide for detection of SNP TSC0064239
gtaagtttgtttg

SEQ ID NO: 265106 - DNA, 13 bp, Artificial Sequence
  Oligonucleotide for detection of SNP TSC0064239
caaacaaacttac

SEQ ID NO: 265107 - DNA, 13 bp, Artificial Sequence
  Oligonucleotide for detection of SNP TSC0064239
tagataggtttgy

SEQ ID NO: 265108 - DNA, 13 bp, Artificial Sequence
  Oligonucleotide for detection of SNP TSC0064239
rcaaacctatcta

SEQ ID NO: 265109 - DNA, 13 bp, Artificial Sequence
  Oligonucleotide for detection of SNP TSC0064241
aaggaagaggaty

SEQ ID NO: 265110 - DNA, 13 bp, Artificial Sequence
  Oligonucleotide for detection of SNP TSC0064241
ratcctcttcctt

SEQ ID NO: 265111 - DNA, 13 bp, Artificial Sequence
  Oligonucleotide for detection of SNP TSC0064241
aaggaaaaggaty

SEQ ID NO: 265112 - DNA, 13 bp, Artificial Sequence
  Oligonucleotide for detection of SNP TSC0064241
ratccttttcctt

SEQ ID NO: 265113 - DNA, 13 bp, Artificial Sequence
  Oligonucleotide for detection of SNP TSC0064242
ttttttatttcgt

SEQ ID NO: 265114 - DNA, 13 bp, Artificial Sequence
  Oligonucleotide for detection of SNP TSC0064242
acgaaataaaaaa

SEQ ID NO: 265115 - DNA, 13 bp, Artificial Sequence
  Oligonucleotide for detection of SNP TSC0064243
atgtgatgaaggg

SEQ ID NO: 265116 - DNA, 13 bp, Artificial Sequence
  Oligonucleotide for detection of SNP TSC0064243
cccttcatcacat

SEQ ID NO: 265117 - DNA, 13 bp, Artificial Sequence
  Oligonucleotide for detection of SNP TSC0064243
atgtgacgaaggg

SEQ ID NO: 265118 - DNA, 13 bp, Artificial Sequence
  Oligonucleotide for detection of SNP TSC0064243
cccttcgtcacat

SEQ ID NO: 265119 - DNA, 13 bp, Artificial Sequence
  Oligonucleotide for detection of SNP TSC0006569
tgtaaattggtty

SEQ ID NO: 265120 - DNA, 13 bp, Artificial Sequence
  Oligonucleotide for detection of SNP TSC0006569
raaccaatttaca

SEQ ID NO: 265121 - DNA, 13 bp, Artificial Sequence
  Oligonucleotide for detection of SNP TSC0006569
tgtaaagtggtty

SEQ ID NO: 265122 - DNA, 13 bp, Artificial Sequence
  Oligonucleotide for detection of SNP TSC0006569
raaccactttaca

SEQ ID NO: 265123 - DNA, 13 bp, Artificial Sequence
  Oligonucleotide for detection of SNP TSC0006569
cgtaaattggtty

SEQ ID NO: 265124 - DNA, 13 bp, Artificial Sequence
  Oligonucleotide for detection of SNP TSC0006569
raaccaatttacg

SEQ ID NO: 265125 - DNA, 13 bp, Artificial Sequence
  Oligonucleotide for detection of SNP TSC0006569
cgtaaagtggtty

SEQ ID NO: 265126 - DNA, 13 bp, Artificial Sequence
  Oligonucleotide for detection of SNP TSC0006569
raaccactttacg

SEQ ID NO: 265127 - DNA, 13 bp, Artificial Sequence
  Oligonucleotide for detection of SNP TSC0006569
gaattagtttatg

SEQ ID NO: 265128 - DNA, 13 bp, Artificial Sequence
  Oligonucleotide for detection of SNP TSC0006569
cataaactaattc

SEQ ID NO: 265129 - DNA, 13 bp, Artificial Sequence
  Oligonucleotide for detection of SNP TSC0006569
gaattattttatg

SEQ ID NO: 265130 - DNA, 13 bp, Artificial Sequence
  Oligonucleotide for detection of SNP TSC0006569
cataaaataattc

SEQ ID NO: 265131 - DNA, 13 bp, Artificial Sequence
  Oligonucleotide for detection of SNP TSC0006569
gaattagtttacg

SEQ ID NO: 265132 - DNA, 13 bp, Artificial Sequence
  Oligonucleotide for detection of SNP TSC0006569
cgtaaactaattc

SEQ ID NO: 265133 - DNA, 13 bp, Artificial Sequence
  Oligonucleotide for detection of SNP TSC0006569
gaattattttacg

SEQ ID NO: 265134 - DNA, 13 bp, Artificial Sequence
  Oligonucleotide for detection of SNP TSC0006569
cgtaaaataattc

SEQ ID NO: 265135 - DNA, 13 bp, Artificial Sequence
  Oligonucleotide for detection of SNP TSC0064247
tatgggatatttg

SEQ ID NO: 265136 - DNA, 13 bp, Artificial Sequence
  Oligonucleotide for detection of SNP TSC0064247
caaatatcccata

SEQ ID NO: 265137 - DNA, 13 bp, Artificial Sequence
  Oligonucleotide for detection of SNP TSC0064247
tatgggttatttg

SEQ ID NO: 265138 - DNA, 13 bp, Artificial Sequence
  Oligonucleotide for detection of SNP TSC0064247
caaataacccata

SEQ ID NO: 265139 - DNA, 13 bp, Artificial Sequence
  Oligonucleotide for detection of SNP TSC0064247
taggtattttatg

SEQ ID NO: 265140 - DNA, 13 bp, Artificial Sequence
  Oligonucleotide for detection of SNP TSC0064247
cataaaataccta

SEQ ID NO: 265141 - DNA, 13 bp, Artificial Sequence
  Oligonucleotide for detection of SNP TSC0064247
taggtaatttatg

SEQ ID NO: 265142 - DNA, 13 bp, Artificial Sequence
  Oligonucleotide for detection of SNP TSC0064247
cataaattaccta

SEQ ID NO: 265143 - DNA, 13 bp, Artificial Sequence
  Oligonucleotide for detection of SNP TSC0000188
taaattgtagaat

SEQ ID NO: 265144 - DNA, 13 bp, Artificial Sequence
  Oligonucleotide for detection of SNP TSC0000188
attctacaattta

SEQ ID NO: 265145 - DNA, 13 bp, Artificial Sequence
  Oligonucleotide for detection of SNP TSC0000188
taaattatagaat

SEQ ID NO: 265146 - DNA, 13 bp, Artificial Sequence
  Oligonucleotide for detection of SNP TSC0000188
attctataattta

SEQ ID NO: 265147 - DNA, 13 bp, Artificial Sequence
  Oligonucleotide for detection of SNP TSC0001533
tttgagattggga

SEQ ID NO: 265148 - DNA, 13 bp, Artificial Sequence
  Oligonucleotide for detection of SNP TSC0001533
tcccaatctcaaa

SEQ ID NO: 265149 - DNA, 13 bp, Artificial Sequence
  Oligonucleotide for detection of SNP TSC0001533
tttgagtttggga

SEQ ID NO: 265150 - DNA, 13 bp, Artificial Sequence
  Oligonucleotide for detection of SNP TSC0001533
tcccaaactcaaa

SEQ ID NO: 265151 - DNA, 13 bp, Artificial Sequence
  Oligonucleotide for detection of SNP TSC0001533
ttttaattttaga

SEQ ID NO: 265152 - DNA, 13 bp, Artificial Sequence
  Oligonucleotide for detection of SNP TSC0001533
tctaaaattaaaa

SEQ ID NO: 265153 - DNA, 13 bp, Artificial Sequence
  Oligonucleotide for detection of SNP TSC0001533
ttttaaatttaga

SEQ ID NO: 265154 - DNA, 13 bp, Artificial Sequence
  Oligonucleotide for detection of SNP TSC0001533
tctaaatttaaaa

SEQ ID NO: 265155 - DNA, 13 bp, Artificial Sequence
  Oligonucleotide for detection of SNP TSC0001534
tgttacgtatgta

SEQ ID NO: 265156 - DNA, 13 bp, Artificial Sequence
  Oligonucleotide for detection of SNP TSC0001534
tacatacgtaaca

SEQ ID NO: 265157 - DNA, 13 bp, Artificial Sequence
  Oligonucleotide for detection of SNP TSC0001534
tgtatgtgtggta

SEQ ID NO: 265158 - DNA, 13 bp, Artificial Sequence
  Oligonucleotide for detection of SNP TSC0001534
taccacacataca

SEQ ID NO: 265159 - DNA, 13 bp, Artificial Sequence
  Oligonucleotide for detection of SNP TSC0001534
tgtatgcgtggta

SEQ ID NO: 265160 - DNA, 13 bp, Artificial Sequence
  Oligonucleotide for detection of SNP TSC0001534
taccacgcataca

SEQ ID NO: 265161 - DNA, 13 bp, Artificial Sequence
  Oligonucleotide for detection of SNP TSC0000223
agatagtttttgy

SEQ ID NO: 265162 - DNA, 13 bp, Artificial Sequence
  Oligonucleotide for detection of SNP TSC0000223
rcaaaaactatct

SEQ ID NO: 265163 - DNA, 13 bp, Artificial Sequence
  Oligonucleotide for detection of SNP TSC0000223
agataggttttgy

SEQ ID NO: 265164 - DNA, 13 bp, Artificial Sequence
  Oligonucleotide for detection of SNP TSC0000223
rcaaaacctatct

SEQ ID NO: 265165 - DNA, 13 bp, Artificial Sequence
  Oligonucleotide for detection of SNP TSC0000223
gtagggattgttt

SEQ ID NO: 265166 - DNA, 13 bp, Artificial Sequence
  Oligonucleotide for detection of SNP TSC0000223
aaacaatccctac

SEQ ID NO: 265167 - DNA, 13 bp, Artificial Sequence
  Oligonucleotide for detection of SNP TSC0000223
gtagggtttgttt

SEQ ID NO: 265168 - DNA, 13 bp, Artificial Sequence
  Oligonucleotide for detection of SNP TSC0000223
aaacaaaccctac

SEQ ID NO: 265169 - DNA, 13 bp, Artificial Sequence
  Oligonucleotide for detection of SNP TSC0009998
gggagtaattggy

SEQ ID NO: 265170 - DNA, 13 bp, Artificial Sequence
  Oligonucleotide for detection of SNP TSC0009998
rccaattactccc

SEQ ID NO: 265171 - DNA, 13 bp, Artificial Sequence
  Oligonucleotide for detection of SNP TSC0009998
gggagtgattggy

SEQ ID NO: 265172 - DNA, 13 bp, Artificial Sequence
  Oligonucleotide for detection of SNP TSC0009998
rccaatcactccc

SEQ ID NO: 265173 - DNA, 13 bp, Artificial Sequence
  Oligonucleotide for detection of SNP TSC0001077
tttatttgtgaaa

SEQ ID NO: 265174 - DNA, 13 bp, Artificial Sequence
  Oligonucleotide for detection of SNP TSC0001077
tttcacaaataaa

SEQ ID NO: 265175 - DNA, 13 bp, Artificial Sequence
  Oligonucleotide for detection of SNP TSC0001077
tttattcgtgaaa

SEQ ID NO: 265176 - DNA, 13 bp, Artificial Sequence
  Oligonucleotide for detection of SNP TSC0001077
tttcacgaataaa

SEQ ID NO: 265177 - DNA, 13 bp, Artificial Sequence
  Oligonucleotide for detection of SNP TSC0001077
ttttatggatgaa

SEQ ID NO: 265178 - DNA, 13 bp, Artificial Sequence
  Oligonucleotide for detection of SNP TSC0001077
ttcatccataaaa

SEQ ID NO: 265179 - DNA, 13 bp, Artificial Sequence
  Oligonucleotide for detection of SNP TSC0001077
ttttatagatgaa

SEQ ID NO: 265180 - DNA, 13 bp, Artificial Sequence
  Oligonucleotide for detection of SNP TSC0001077
ttcatctataaaa

SEQ ID NO: 265181 - DNA, 13 bp, Artificial Sequence
  Oligonucleotide for detection of SNP TSC0001077
ttttacggatgaa

SEQ ID NO: 265182 - DNA, 13 bp, Artificial Sequence
  Oligonucleotide for detection of SNP TSC0001077
ttcatccgtaaaa

SEQ ID NO: 265183 - DNA, 13 bp, Artificial Sequence
  Oligonucleotide for detection of SNP TSC0064252
tattatttgaatt

SEQ ID NO: 265184 - DNA, 13 bp, Artificial Sequence
  Oligonucleotide for detection of SNP TSC0064252
aattcaaataata

SEQ ID NO: 265185 - DNA, 13 bp, Artificial Sequence
  Oligonucleotide for detection of SNP TSC0064252
tattatgtgaatt

SEQ ID NO: 265186 - DNA, 13 bp, Artificial Sequence
  Oligonucleotide for detection of SNP TSC0064252
aattcacataata

SEQ ID NO: 265187 - DNA, 13 bp, Artificial Sequence
  Oligonucleotide for detection of SNP TSC0064252
aatttaaataatg

SEQ ID NO: 265188 - DNA, 13 bp, Artificial Sequence
  Oligonucleotide for detection of SNP TSC0064252
cattatttaaatt

SEQ ID NO: 265189 - DNA, 13 bp, Artificial Sequence
  Oligonucleotide for detection of SNP TSC0064252
aatttatataatg

SEQ ID NO: 265190 - DNA, 13 bp, Artificial Sequence
  Oligonucleotide for detection of SNP TSC0064252
cattatataaatt

SEQ ID NO: 265191 - DNA, 13 bp, Artificial Sequence
  Oligonucleotide for detection of SNP TSC0064253
aaagatggaagty

SEQ ID NO: 265192 - DNA, 13 bp, Artificial Sequence
  Oligonucleotide for detection of SNP TSC0064253
racttccatcttt

SEQ ID NO: 265193 - DNA, 13 bp, Artificial Sequence
  Oligonucleotide for detection of SNP TSC0064253
aaagatagaagty

SEQ ID NO: 265194 - DNA, 13 bp, Artificial Sequence
  Oligonucleotide for detection of SNP TSC0064253
racttctatcttt

SEQ ID NO: 265195 - DNA, 13 bp, Artificial Sequence
  Oligonucleotide for detection of SNP TSC0064253
aaagacggaagty

SEQ ID NO: 265196 - DNA, 13 bp, Artificial Sequence
  Oligonucleotide for detection of SNP TSC0064253
racttccgtcttt

SEQ ID NO: 265197 - DNA, 13 bp, Artificial Sequence
  Oligonucleotide for detection of SNP TSC0064254
gagttatgtagga

SEQ ID NO: 265198 - DNA, 13 bp, Artificial Sequence
  Oligonucleotide for detection of SNP TSC0064254
tcctacataactc

SEQ ID NO: 265199 - DNA, 13 bp, Artificial Sequence
  Oligonucleotide for detection of SNP TSC0064254
gagttacgtagga

SEQ ID NO: 265200 - DNA, 13 bp, Artificial Sequence
  Oligonucleotide for detection of SNP TSC0064254
tcctacgtaactc

SEQ ID NO: 265201 - DNA, 13 bp, Artificial Sequence
  Oligonucleotide for detection of SNP TSC0064254
ttttgtgtgatty

SEQ ID NO: 265202 - DNA, 13 bp, Artificial Sequence
  Oligonucleotide for detection of SNP TSC0064254
raatcacacaaaa

SEQ ID NO: 265203 - DNA, 13 bp, Artificial Sequence
  Oligonucleotide for detection of SNP TSC0064254
ttttgcgtgatty

SEQ ID NO: 265204 - DNA, 13 bp, Artificial Sequence
  Oligonucleotide for detection of SNP TSC0064254
raatcacgcaaaa

SEQ ID NO: 265205 - DNA, 13 bp, Artificial Sequence
  Oligonucleotide for detection of SNP TSC0064255
ataatggtattty

SEQ ID NO: 265206 - DNA, 13 bp, Artificial Sequence
  Oligonucleotide for detection of SNP TSC0064255
raaataccattat

SEQ ID NO: 265207 - DNA, 13 bp, Artificial Sequence
  Oligonucleotide for detection of SNP TSC0064255
ataatgatattty

SEQ ID NO: 265208 - DNA, 13 bp, Artificial Sequence
  Oligonucleotide for detection of SNP TSC0064255
raaatatcattat

SEQ ID NO: 265209 - DNA, 13 bp, Artificial Sequence
  Oligonucleotide for detection of SNP TSC0064256
taatttatgttag

SEQ ID NO: 265210 - DNA, 13 bp, Artificial Sequence
  Oligonucleotide for detection of SNP TSC0064256
ctaacataaatta

SEQ ID NO: 265211 - DNA, 13 bp, Artificial Sequence
  Oligonucleotide for detection of SNP TSC0064256
taatttacgttag

SEQ ID NO: 265212 - DNA, 13 bp, Artificial Sequence
  Oligonucleotide for detection of SNP TSC0064256
ctaacgtaaatta

SEQ ID NO: 265213 - DNA, 13 bp, Artificial Sequence
  Oligonucleotide for detection of SNP TSC0064256
taattcgtgttag

SEQ ID NO: 265214 - DNA, 13 bp, Artificial Sequence
  Oligonucleotide for detection of SNP TSC0064256
ctaacacgaatta

SEQ ID NO: 265215 - DNA, 13 bp, Artificial Sequence
  Oligonucleotide for detection of SNP TSC0064256
taatttgcgttag

SEQ ID NO: 265216 - DNA, 13 bp, Artificial Sequence
  Oligonucleotide for detection of SNP TSC0064256
ctaacgcaaatta

SEQ ID NO: 265217 - DNA, 13 bp, Artificial Sequence
  Oligonucleotide for detection of SNP TSC0064256
taattcgcgttag

SEQ ID NO: 265218 - DNA, 13 bp, Artificial Sequence
  Oligonucleotide for detection of SNP TSC0064256
ctaacgcgaatta

SEQ ID NO: 265219 - DNA, 13 bp, Artificial Sequence
  Oligonucleotide for detection of SNP TSC0064256
ttggtgtgagtta

SEQ ID NO: 265220 - DNA, 13 bp, Artificial Sequence
  Oligonucleotide for detection of SNP TSC0064256
taactcacaccaa

SEQ ID NO: 265221 - DNA, 13 bp, Artificial Sequence
  Oligonucleotide for detection of SNP TSC0064256
ttggcgtgagtta

SEQ ID NO: 265222 - DNA, 13 bp, Artificial Sequence
  Oligonucleotide for detection of SNP TSC0064256
taactcacgccaa

SEQ ID NO: 265223 - DNA, 13 bp, Artificial Sequence
  Oligonucleotide for detection of SNP TSC0064256
ttggtgcgagtta

SEQ ID NO: 265224 - DNA, 13 bp, Artificial Sequence
  Oligonucleotide for detection of SNP TSC0064256
taactcgcaccaa

SEQ ID NO: 265225 - DNA, 13 bp, Artificial Sequence
  Oligonucleotide for detection of SNP TSC0064256
ttggcgcgagtta

SEQ ID NO: 265226 - DNA, 13 bp, Artificial Sequence
  Oligonucleotide for detection of SNP TSC0064256
taactcgcgccaa

SEQ ID NO: 265227 - DNA, 13 bp, Artificial Sequence
  Oligonucleotide for detection of SNP TSC0064258
tgatttaatagay

SEQ ID NO: 265228 - DNA, 13 bp, Artificial Sequence
  Oligonucleotide for detection of SNP TSC0064258
rtctattaaatca

SEQ ID NO: 265229 - DNA, 13 bp, Artificial Sequence
  Oligonucleotide for detection of SNP TSC0064258
tgatttgatagay

SEQ ID NO: 265230 - DNA, 13 bp, Artificial Sequence
  Oligonucleotide for detection of SNP TSC0064258
rtctatcaaatca

SEQ ID NO: 265231 - DNA, 13 bp, Artificial Sequence
  Oligonucleotide for detection of SNP TSC0064259
agtttgaaaaaag

SEQ ID NO: 265232 - DNA, 13 bp, Artificial Sequence
  Oligonucleotide for detection of SNP TSC0064259
cttttttcaaact

SEQ ID NO: 265233 - DNA, 13 bp, Artificial Sequence
  Oligonucleotide for detection of SNP TSC0064259
agtttggaaaaag

SEQ ID NO: 265234 - DNA, 13 bp, Artificial Sequence
  Oligonucleotide for detection of SNP TSC0064259
ctttttccaaact

SEQ ID NO: 265235 - DNA, 13 bp, Artificial Sequence
  Oligonucleotide for detection of SNP TSC0064260
atagtttgatagg

SEQ ID NO: 265236 - DNA, 13 bp, Artificial Sequence
  Oligonucleotide for detection of SNP TSC0064260
cctatcaaactat

SEQ ID NO: 265237 - DNA, 13 bp, Artificial Sequence
  Oligonucleotide for detection of SNP TSC0064260
atagttcgatagg

SEQ ID NO: 265238 - DNA, 13 bp, Artificial Sequence
  Oligonucleotide for detection of SNP TSC0064260
cctatcgaactat

SEQ ID NO: 265239 - DNA, 13 bp, Artificial Sequence
  Oligonucleotide for detection of SNP TSC0064262
atatattattaat

SEQ ID NO: 265240 - DNA, 13 bp, Artificial Sequence
  Oligonucleotide for detection of SNP TSC0064262
attaataatatat

SEQ ID NO: 265241 - DNA, 13 bp, Artificial Sequence
  Oligonucleotide for detection of SNP TSC0064262
atatatgattaat

SEQ ID NO: 265242 - DNA, 13 bp, Artificial Sequence
  Oligonucleotide for detection of SNP TSC0064262
attaatcatatat

SEQ ID NO: 265243 - DNA, 13 bp, Artificial Sequence
  Oligonucleotide for detection of SNP TSC0064262
attaataatgtat

SEQ ID NO: 265244 - DNA, 13 bp, Artificial Sequence
  Oligonucleotide for detection of SNP TSC0064262
atacattattaat

SEQ ID NO: 265245 - DNA, 13 bp, Artificial Sequence
  Oligonucleotide for detection of SNP TSC0064262
attaattatgtat

SEQ ID NO: 265246 - DNA, 13 bp, Artificial Sequence
  Oligonucleotide for detection of SNP TSC0064262
atacataattaat

SEQ ID NO: 265247 - DNA, 13 bp, Artificial Sequence
  Oligonucleotide for detection of SNP TSC0064263
aggtagagtttaa

SEQ ID NO: 265248 - DNA, 13 bp, Artificial Sequence
  Oligonucleotide for detection of SNP TSC0064263
ttaaactctacct

SEQ ID NO: 265249 - DNA, 13 bp, Artificial Sequence
  Oligonucleotide for detection of SNP TSC0064263
aggtagtgtttaa

SEQ ID NO: 265250 - DNA, 13 bp, Artificial Sequence
  Oligonucleotide for detection of SNP TSC0064263
ttaaacactacct

SEQ ID NO: 265251 - DNA, 13 bp, Artificial Sequence
  Oligonucleotide for detection of SNP TSC0064263
ttgaatattgttt

SEQ ID NO: 265252 - DNA, 13 bp, Artificial Sequence
  Oligonucleotide for detection of SNP TSC0064263
aaacaatattcaa

SEQ ID NO: 265253 - DNA, 13 bp, Artificial Sequence
  Oligonucleotide for detection of SNP TSC0064267
atgttggtattat

SEQ ID NO: 265254 - DNA, 13 bp, Artificial Sequence
  Oligonucleotide for detection of SNP TSC0064267
ataataccaacat

SEQ ID NO: 265255 - DNA, 13 bp, Artificial Sequence
  Oligonucleotide for detection of SNP TSC0064267
atgttgatattat

SEQ ID NO: 265256 - DNA, 13 bp, Artificial Sequence
  Oligonucleotide for detection of SNP TSC0064267
ataatatcaacat

SEQ ID NO: 265257 - DNA, 13 bp, Artificial Sequence
  Oligonucleotide for detection of SNP TSC0064269
agtttgatatttt

SEQ ID NO: 265258 - DNA, 13 bp, Artificial Sequence
  Oligonucleotide for detection of SNP TSC0064269
aaaatatcaaact

SEQ ID NO: 265259 - DNA, 13 bp, Artificial Sequence
  Oligonucleotide for detection of SNP TSC0064269
agtttggtatttt

SEQ ID NO: 265260 - DNA, 13 bp, Artificial Sequence
  Oligonucleotide for detection of SNP TSC0064269
aaaataccaaact

SEQ ID NO: 265261 - DNA, 13 bp, Artificial Sequence
  Oligonucleotide for detection of SNP TSC0064272
tgttttaatagay

SEQ ID NO: 265262 - DNA, 13 bp, Artificial Sequence
  Oligonucleotide for detection of SNP TSC0064272
rtctattaaaaca

SEQ ID NO: 265263 - DNA, 13 bp, Artificial Sequence
  Oligonucleotide for detection of SNP TSC0064274
agatgtaatatgg

SEQ ID NO: 265264 - DNA, 13 bp, Artificial Sequence
  Oligonucleotide for detection of SNP TSC0064274
ccatattacatct

SEQ ID NO: 265265 - DNA, 13 bp, Artificial Sequence
  Oligonucleotide for detection of SNP TSC0064274
agatgttatatgg

SEQ ID NO: 265266 - DNA, 13 bp, Artificial Sequence
  Oligonucleotide for detection of SNP TSC0064274
ccatataacatct

SEQ ID NO: 265267 - DNA, 13 bp, Artificial Sequence
  Oligonucleotide for detection of SNP TSC0064274
ttatgttatattt

SEQ ID NO: 265268 - DNA, 13 bp, Artificial Sequence
  Oligonucleotide for detection of SNP TSC0064274
aaatataacataa

SEQ ID NO: 265269 - DNA, 13 bp, Artificial Sequence
  Oligonucleotide for detection of SNP TSC0064274
ttatgtaatattt

SEQ ID NO: 265270 - DNA, 13 bp, Artificial Sequence
  Oligonucleotide for detection of SNP TSC0064274
aaatattacataa

SEQ ID NO: 265271 - DNA, 13 bp, Artificial Sequence
  Oligonucleotide for detection of SNP TSC0064275
ttaataagtaaat

SEQ ID NO: 265272 - DNA, 13 bp, Artificial Sequence
  Oligonucleotide for detection of SNP TSC0064275
atttacttattaa

SEQ ID NO: 265273 - DNA, 13 bp, Artificial Sequence
  Oligonucleotide for detection of SNP TSC0064275
ttaataggtaaat

SEQ ID NO: 265274 - DNA, 13 bp, Artificial Sequence
  Oligonucleotide for detection of SNP TSC0064275
atttacctattaa

SEQ ID NO: 265275 - DNA, 13 bp, Artificial Sequence
  Oligonucleotide for detection of SNP TSC0064276
gtgatagagaagt

SEQ ID NO: 265276 - DNA, 13 bp, Artificial Sequence
  Oligonucleotide for detection of SNP TSC0064276
acttctctatcac

SEQ ID NO: 265277 - DNA, 13 bp, Artificial Sequence
  Oligonucleotide for detection of SNP TSC0064276
gtgataaagaagt

SEQ ID NO: 265278 - DNA, 13 bp, Artificial Sequence
  Oligonucleotide for detection of SNP TSC0064276
acttctttatcac

SEQ ID NO: 265279 - DNA, 13 bp, Artificial Sequence
  Oligonucleotide for detection of SNP TSC0064280
gttattatgatgt

SEQ ID NO: 265280 - DNA, 13 bp, Artificial Sequence
  Oligonucleotide for detection of SNP TSC0064280
acatcataataac

SEQ ID NO: 265281 - DNA, 13 bp, Artificial Sequence
  Oligonucleotide for detection of SNP TSC0064280
gttattgtgatgt

SEQ ID NO: 265282 - DNA, 13 bp, Artificial Sequence
  Oligonucleotide for detection of SNP TSC0064280
acatcacaataac

SEQ ID NO: 265283 - DNA, 13 bp, Artificial Sequence
  Oligonucleotide for detection of SNP TSC0064280
gttatcgtgatgt

SEQ ID NO: 265284 - DNA, 13 bp, Artificial Sequence
  Oligonucleotide for detection of SNP TSC0064280
acatcacgataac

SEQ ID NO: 265285 - DNA, 13 bp, Artificial Sequence
  Oligonucleotide for detection of SNP TSC0064280
atattatgatgay

SEQ ID NO: 265286 - DNA, 13 bp, Artificial Sequence
  Oligonucleotide for detection of SNP TSC0064280
rtcatcataatat

SEQ ID NO: 265287 - DNA, 13 bp, Artificial Sequence
  Oligonucleotide for detection of SNP TSC0064280
atattacgatgay

SEQ ID NO: 265288 - DNA, 13 bp, Artificial Sequence
  Oligonucleotide for detection of SNP TSC0064280
rtcatcgtaatat

SEQ ID NO: 265289 - DNA, 13 bp, Artificial Sequence
  Oligonucleotide for detection of SNP TSC0064281
gggtgaatggaga

SEQ ID NO: 265290 - DNA, 13 bp, Artificial Sequence
  Oligonucleotide for detection of SNP TSC0064281
tctccattcaccc

SEQ ID NO: 265291 - DNA, 13 bp, Artificial Sequence
  Oligonucleotide for detection of SNP TSC0064281
gggtgagtggaga

SEQ ID NO: 265292 - DNA, 13 bp, Artificial Sequence
  Oligonucleotide for detection of SNP TSC0064281
tctccactcaccc

SEQ ID NO: 265293 - DNA, 13 bp, Artificial Sequence
  Oligonucleotide for detection of SNP TSC0064286
tatgaaaaggaat

SEQ ID NO: 265294 - DNA, 13 bp, Artificial Sequence
  Oligonucleotide for detection of SNP TSC0064286
attccttttcata

SEQ ID NO: 265295 - DNA, 13 bp, Artificial Sequence
  Oligonucleotide for detection of SNP TSC0064286
tatgaataggaat

SEQ ID NO: 265296 - DNA, 13 bp, Artificial Sequence
  Oligonucleotide for detection of SNP TSC0064286
attcctattcata

SEQ ID NO: 265297 - DNA, 13 bp, Artificial Sequence
  Oligonucleotide for detection of SNP TSC0064286
atttttttttata

SEQ ID NO: 265298 - DNA, 13 bp, Artificial Sequence
  Oligonucleotide for detection of SNP TSC0064286
tataaaaaaaaat

SEQ ID NO: 265299 - DNA, 13 bp, Artificial Sequence
  Oligonucleotide for detection of SNP TSC0064286
atttttgtttata

SEQ ID NO: 265300 - DNA, 13 bp, Artificial Sequence
  Oligonucleotide for detection of SNP TSC0064286
tataaacaaaaat

SEQ ID NO: 265301 - DNA, 13 bp, Artificial Sequence
  Oligonucleotide for detection of SNP TSC0064292
tgaatgtataaag

SEQ ID NO: 265302 - DNA, 13 bp, Artificial Sequence
  Oligonucleotide for detection of SNP TSC0064292
ctttatacattca

SEQ ID NO: 265303 - DNA, 13 bp, Artificial Sequence
  Oligonucleotide for detection of SNP TSC0064292
tgaatgaataaag

SEQ ID NO: 265304 - DNA, 13 bp, Artificial Sequence
  Oligonucleotide for detection of SNP TSC0064292
ctttattcattca

SEQ ID NO: 265305 - DNA, 13 bp, Artificial Sequence
  Oligonucleotide for detection of SNP TSC0064293
gtgtttatgttty

SEQ ID NO: 265306 - DNA, 13 bp, Artificial Sequence
  Oligonucleotide for detection of SNP TSC0064293
raaacataaacac

SEQ ID NO: 265307 - DNA, 13 bp, Artificial Sequence
  Oligonucleotide for detection of SNP TSC0064293
gtgtttgtgttty

SEQ ID NO: 265308 - DNA, 13 bp, Artificial Sequence
  Oligonucleotide for detection of SNP TSC0064293
raaacacaaacac

SEQ ID NO: 265309 - DNA, 13 bp, Artificial Sequence
  Oligonucleotide for detection of SNP TSC0064293
gcgtttatgttty

SEQ ID NO: 265310 - DNA, 13 bp, Artificial Sequence
  Oligonucleotide for detection of SNP TSC0064293
raaacataaacgc

SEQ ID NO: 265311 - DNA, 13 bp, Artificial Sequence
  Oligonucleotide for detection of SNP TSC0064293
gcgtttgtgttty

SEQ ID NO: 265312 - DNA, 13 bp, Artificial Sequence
  Oligonucleotide for detection of SNP TSC0064293
raaacacaaacgc

SEQ ID NO: 265313 - DNA, 13 bp, Artificial Sequence
  Oligonucleotide for detection of SNP TSC0064294
tgttttgggtatt

SEQ ID NO: 265314 - DNA, 13 bp, Artificial Sequence
  Oligonucleotide for detection of SNP TSC0064294
aatacccaaaaca

SEQ ID NO: 265315 - DNA, 13 bp, Artificial Sequence
  Oligonucleotide for detection of SNP TSC0064294
tgttttaggtatt

SEQ ID NO: 265316 - DNA, 13 bp, Artificial Sequence
  Oligonucleotide for detection of SNP TSC0064294
aatacctaaaaca

SEQ ID NO: 265317 - DNA, 13 bp, Artificial Sequence
  Oligonucleotide for detection of SNP TSC0064295
agattttgggaga

SEQ ID NO: 265318 - DNA, 13 bp, Artificial Sequence
  Oligonucleotide for detection of SNP TSC0064295
tctcccaaaatct

SEQ ID NO: 265319 - DNA, 13 bp, Artificial Sequence
  Oligonucleotide for detection of SNP TSC0064295
agatttcgggaga

SEQ ID NO: 265320 - DNA, 13 bp, Artificial Sequence
  Oligonucleotide for detection of SNP TSC0064295
tctcccgaaatct

SEQ ID NO: 265321 - DNA, 13 bp, Artificial Sequence
  Oligonucleotide for detection of SNP TSC0064296
ggaagttaagtgg

SEQ ID NO: 265322 - DNA, 13 bp, Artificial Sequence
  Oligonucleotide for detection of SNP TSC0064296
ccacttaacttcc

SEQ ID NO: 265323 - DNA, 13 bp, Artificial Sequence
  Oligonucleotide for detection of SNP TSC0064296
ggaagtgaagtgg

SEQ ID NO: 265324 - DNA, 13 bp, Artificial Sequence
  Oligonucleotide for detection of SNP TSC0064296
ccacttcacttcc

SEQ ID NO: 265325 - DNA, 13 bp, Artificial Sequence
  Oligonucleotide for detection of SNP TSC0064297
aaagatattttat

SEQ ID NO: 265326 - DNA, 13 bp, Artificial Sequence
  Oligonucleotide for detection of SNP TSC0064297
ataaaatatcttt

SEQ ID NO: 265327 - DNA, 13 bp, Artificial Sequence
  Oligonucleotide for detection of SNP TSC0064297
aaagattttttat

SEQ ID NO: 265328 - DNA, 13 bp, Artificial Sequence
  Oligonucleotide for detection of SNP TSC0064297
ataaaaaatcttt

SEQ ID NO: 265329 - DNA, 13 bp, Artificial Sequence
  Oligonucleotide for detection of SNP TSC0064297
atagagtgttttt

SEQ ID NO: 265330 - DNA, 13 bp, Artificial Sequence
  Oligonucleotide for detection of SNP TSC0064297
aaaaacactctat

SEQ ID NO: 265331 - DNA, 13 bp, Artificial Sequence
  Oligonucleotide for detection of SNP TSC0064298
tgtttttgtaaag

SEQ ID NO: 265332 - DNA, 13 bp, Artificial Sequence
  Oligonucleotide for detection of SNP TSC0064298
ctttacaaaaaca

SEQ ID NO: 265333 - DNA, 13 bp, Artificial Sequence
  Oligonucleotide for detection of SNP TSC0064298
tgttttcgtaaag

SEQ ID NO: 265334 - DNA, 13 bp, Artificial Sequence
  Oligonucleotide for detection of SNP TSC0064298
ctttacgaaaaca

SEQ ID NO: 265335 - DNA, 13 bp, Artificial Sequence
  Oligonucleotide for detection of SNP TSC0064298
ttttatggggata

SEQ ID NO: 265336 - DNA, 13 bp, Artificial Sequence
  Oligonucleotide for detection of SNP TSC0064298
tatccccataaaa

SEQ ID NO: 265337 - DNA, 13 bp, Artificial Sequence
  Oligonucleotide for detection of SNP TSC0064298
ttttatagggata

SEQ ID NO: 265338 - DNA, 13 bp, Artificial Sequence
  Oligonucleotide for detection of SNP TSC0064298
tatccctataaaa

SEQ ID NO: 265339 - DNA, 13 bp, Artificial Sequence
  Oligonucleotide for detection of SNP TSC0064298
ttttacggggata

SEQ ID NO: 265340 - DNA, 13 bp, Artificial Sequence
  Oligonucleotide for detection of SNP TSC0064298
tatccccgtaaaa

SEQ ID NO: 265341 - DNA, 13 bp, Artificial Sequence
  Oligonucleotide for detection of SNP TSC0064299
attgtgaaatttg

SEQ ID NO: 265342 - DNA, 13 bp, Artificial Sequence
  Oligonucleotide for detection of SNP TSC0064299
caaatttcacaat

SEQ ID NO: 265343 - DNA, 13 bp, Artificial Sequence
  Oligonucleotide for detection of SNP TSC0064299
attgtggaatttg

SEQ ID NO: 265344 - DNA, 13 bp, Artificial Sequence
  Oligonucleotide for detection of SNP TSC0064299
caaattccacaat

SEQ ID NO: 265345 - DNA, 13 bp, Artificial Sequence
  Oligonucleotide for detection of SNP TSC0064300
gattgatttttty

SEQ ID NO: 265346 - DNA, 13 bp, Artificial Sequence
  Oligonucleotide for detection of SNP TSC0064300
raaaaaatcaatc

SEQ ID NO: 265347 - DNA, 13 bp, Artificial Sequence
  Oligonucleotide for detection of SNP TSC0064300
gattgagttttty

SEQ ID NO: 265348 - DNA, 13 bp, Artificial Sequence
  Oligonucleotide for detection of SNP TSC0064300
raaaaactcaatc

SEQ ID NO: 265349 - DNA, 13 bp, Artificial Sequence
  Oligonucleotide for detection of SNP TSC0064300
gatcgatttttty

SEQ ID NO: 265350 - DNA, 13 bp, Artificial Sequence
  Oligonucleotide for detection of SNP TSC0064300
raaaaaatcgatc

SEQ ID NO: 265351 - DNA, 13 bp, Artificial Sequence
  Oligonucleotide for detection of SNP TSC0064300
gatcgagttttty

SEQ ID NO: 265352 - DNA, 13 bp, Artificial Sequence
  Oligonucleotide for detection of SNP TSC0064300
raaaaactcgatc

SEQ ID NO: 265353 - DNA, 13 bp, Artificial Sequence
  Oligonucleotide for detection of SNP TSC0064300
gagagaattggty

SEQ ID NO: 265354 - DNA, 13 bp, Artificial Sequence
  Oligonucleotide for detection of SNP TSC0064300
raccaattctctc

SEQ ID NO: 265355 - DNA, 13 bp, Artificial Sequence
  Oligonucleotide for detection of SNP TSC0064300
gagagatttggty

SEQ ID NO: 265356 - DNA, 13 bp, Artificial Sequence
  Oligonucleotide for detection of SNP TSC0064300
raccaaatctctc

SEQ ID NO: 265357 - DNA, 13 bp, Artificial Sequence
  Oligonucleotide for detection of SNP TSC0064300
gagagaatcggty

SEQ ID NO: 265358 - DNA, 13 bp, Artificial Sequence
  Oligonucleotide for detection of SNP TSC0064300
raccgattctctc

SEQ ID NO: 265359 - DNA, 13 bp, Artificial Sequence
  Oligonucleotide for detection of SNP TSC0064300
gagagattcggty

SEQ ID NO: 265360 - DNA, 13 bp, Artificial Sequence
  Oligonucleotide for detection of SNP TSC0064300
raccgaatctctc

SEQ ID NO: 265361 - DNA, 13 bp, Artificial Sequence
  Oligonucleotide for detection of SNP TSC0064302
tattttgaaaagt

SEQ ID NO: 265362 - DNA, 13 bp, Artificial Sequence
  Oligonucleotide for detection of SNP TSC0064302
acttttcaaaata

SEQ ID NO: 265363 - DNA, 13 bp, Artificial Sequence
  Oligonucleotide for detection of SNP TSC0064305
gaaaaagagaaaa

SEQ ID NO: 265364 - DNA, 13 bp, Artificial Sequence
  Oligonucleotide for detection of SNP TSC0064305
ttttctctttttc

SEQ ID NO: 265365 - DNA, 13 bp, Artificial Sequence
  Oligonucleotide for detection of SNP TSC0064305
gaaaaaaagaaaa

SEQ ID NO: 265366 - DNA, 13 bp, Artificial Sequence
  Oligonucleotide for detection of SNP TSC0064305
ttttctttttttc

SEQ ID NO: 265367 - DNA, 13 bp, Artificial Sequence
  Oligonucleotide for detection of SNP TSC0064306
gaaattggtgaag

SEQ ID NO: 265368 - DNA, 13 bp, Artificial Sequence
  Oligonucleotide for detection of SNP TSC0064306
cttcaccaatttc

SEQ ID NO: 265369 - DNA, 13 bp, Artificial Sequence
  Oligonucleotide for detection of SNP TSC0064306
gaaattagtgaag

SEQ ID NO: 265370 - DNA, 13 bp, Artificial Sequence
  Oligonucleotide for detection of SNP TSC0064306
cttcactaatttc

SEQ ID NO: 265371 - DNA, 13 bp, Artificial Sequence
  Oligonucleotide for detection of SNP TSC0064307
tttattaataaaa

SEQ ID NO: 265372 - DNA, 13 bp, Artificial Sequence
  Oligonucleotide for detection of SNP TSC0064307
ttttattaataaa

SEQ ID NO: 265373 - DNA, 13 bp, Artificial Sequence
  Oligonucleotide for detection of SNP TSC0064307
tttatttataaaa

SEQ ID NO: 265374 - DNA, 13 bp, Artificial Sequence
  Oligonucleotide for detection of SNP TSC0064307
ttttataaataaa

SEQ ID NO: 265375 - DNA, 13 bp, Artificial Sequence
  Oligonucleotide for detection of SNP TSC0064307
ttttattaatgga

SEQ ID NO: 265376 - DNA, 13 bp, Artificial Sequence
  Oligonucleotide for detection of SNP TSC0064307
tccattaataaaa

SEQ ID NO: 265377 - DNA, 13 bp, Artificial Sequence
  Oligonucleotide for detection of SNP TSC0064307
ttttatgaatgga

SEQ ID NO: 265378 - DNA, 13 bp, Artificial Sequence
  Oligonucleotide for detection of SNP TSC0064307
tccattcataaaa

SEQ ID NO: 265379 - DNA, 13 bp, Artificial Sequence
  Oligonucleotide for detection of SNP TSC0064308
attgtgtggaagg

SEQ ID NO: 265380 - DNA, 13 bp, Artificial Sequence
  Oligonucleotide for detection of SNP TSC0064308
ccttccacacaat

SEQ ID NO: 265381 - DNA, 13 bp, Artificial Sequence
  Oligonucleotide for detection of SNP TSC0064308
attgtgcggaagg

SEQ ID NO: 265382 - DNA, 13 bp, Artificial Sequence
  Oligonucleotide for detection of SNP TSC0064308
ccttccgcacaat

SEQ ID NO: 265383 - DNA, 13 bp, Artificial Sequence
  Oligonucleotide for detection of SNP TSC0064309
ttagtttttatta

SEQ ID NO: 265384 - DNA, 13 bp, Artificial Sequence
  Oligonucleotide for detection of SNP TSC0064309
taataaaaactaa

SEQ ID NO: 265385 - DNA, 13 bp, Artificial Sequence
  Oligonucleotide for detection of SNP TSC0064310
aagatatgggtay

SEQ ID NO: 265386 - DNA, 13 bp, Artificial Sequence
  Oligonucleotide for detection of SNP TSC0064310
rtacccatatctt

SEQ ID NO: 265387 - DNA, 13 bp, Artificial Sequence
  Oligonucleotide for detection of SNP TSC0064310
aagatacgggtay

SEQ ID NO: 265388 - DNA, 13 bp, Artificial Sequence
  Oligonucleotide for detection of SNP TSC0064310
rtacccgtatctt

SEQ ID NO: 265389 - DNA, 13 bp, Artificial Sequence
  Oligonucleotide for detection of SNP TSC0064310
gtatttgtgtttt

SEQ ID NO: 265390 - DNA, 13 bp, Artificial Sequence
  Oligonucleotide for detection of SNP TSC0064310
aaaacacaaatac

SEQ ID NO: 265391 - DNA, 13 bp, Artificial Sequence
  Oligonucleotide for detection of SNP TSC0064310
gtattcgtgtttt

SEQ ID NO: 265392 - DNA, 13 bp, Artificial Sequence
  Oligonucleotide for detection of SNP TSC0064310
aaaacacgaatac

SEQ ID NO: 265393 - DNA, 13 bp, Artificial Sequence
  Oligonucleotide for detection of SNP TSC0064311
agtatagaatttg

SEQ ID NO: 265394 - DNA, 13 bp, Artificial Sequence
  Oligonucleotide for detection of SNP TSC0064311
caaattctatact

SEQ ID NO: 265395 - DNA, 13 bp, Artificial Sequence
  Oligonucleotide for detection of SNP TSC0064311
agtataaaatttg

SEQ ID NO: 265396 - DNA, 13 bp, Artificial Sequence
  Oligonucleotide for detection of SNP TSC0064311
caaattttatact

SEQ ID NO: 265397 - DNA, 13 bp, Artificial Sequence
  Oligonucleotide for detection of SNP TSC0064312
tattttggtttgy

SEQ ID NO: 265398 - DNA, 13 bp, Artificial Sequence
  Oligonucleotide for detection of SNP TSC0064312
rcaaaccaaaata

SEQ ID NO: 265399 - DNA, 13 bp, Artificial Sequence
  Oligonucleotide for detection of SNP TSC0064312
tattttagtttgy

SEQ ID NO: 265400 - DNA, 13 bp, Artificial Sequence
  Oligonucleotide for detection of SNP TSC0064312
rcaaactaaaata

SEQ ID NO: 265401 - DNA, 13 bp, Artificial Sequence
  Oligonucleotide for detection of SNP TSC0064312
tattttggttcgy

SEQ ID NO: 265402 - DNA, 13 bp, Artificial Sequence
  Oligonucleotide for detection of SNP TSC0064312
rcgaaccaaaata

SEQ ID NO: 265403 - DNA, 13 bp, Artificial Sequence
  Oligonucleotide for detection of SNP TSC0064312
tattttagttcgy

SEQ ID NO: 265404 - DNA, 13 bp, Artificial Sequence
  Oligonucleotide for detection of SNP TSC0064312
rcgaactaaaata

SEQ ID NO: 265405 - DNA, 13 bp, Artificial Sequence
  Oligonucleotide for detection of SNP TSC0064313
ggatattttgtta

SEQ ID NO: 265406 - DNA, 13 bp, Artificial Sequence
  Oligonucleotide for detection of SNP TSC0064313
taacaaaatatcc

SEQ ID NO: 265407 - DNA, 13 bp, Artificial Sequence
  Oligonucleotide for detection of SNP TSC0064313
ggatatgttgtta

SEQ ID NO: 265408 - DNA, 13 bp, Artificial Sequence
  Oligonucleotide for detection of SNP TSC0064313
taacaacatatcc

SEQ ID NO: 265409 - DNA, 13 bp, Artificial Sequence
  Oligonucleotide for detection of SNP TSC0064313
taataaaatatty

SEQ ID NO: 265410 - DNA, 13 bp, Artificial Sequence
  Oligonucleotide for detection of SNP TSC0064313
raatattttatta

SEQ ID NO: 265411 - DNA, 13 bp, Artificial Sequence
  Oligonucleotide for detection of SNP TSC0064313
taataatatatty

SEQ ID NO: 265412 - DNA, 13 bp, Artificial Sequence
  Oligonucleotide for detection of SNP TSC0064313
raatatattatta

SEQ ID NO: 265413 - DNA, 13 bp, Artificial Sequence
  Oligonucleotide for detection of SNP TSC0064314
tggattagaagaa

SEQ ID NO: 265414 - DNA, 13 bp, Artificial Sequence
  Oligonucleotide for detection of SNP TSC0064314
ttcttctaatcca

SEQ ID NO: 265415 - DNA, 13 bp, Artificial Sequence
  Oligonucleotide for detection of SNP TSC0064314
tggattggaagaa

SEQ ID NO: 265416 - DNA, 13 bp, Artificial Sequence
  Oligonucleotide for detection of SNP TSC0064314
ttcttccaatcca

SEQ ID NO: 265417 - DNA, 13 bp, Artificial Sequence
  Oligonucleotide for detection of SNP TSC0064321
aaaagtttgataa

SEQ ID NO: 265418 - DNA, 13 bp, Artificial Sequence
  Oligonucleotide for detection of SNP TSC0064321
ttatcaaactttt

SEQ ID NO: 265419 - DNA, 13 bp, Artificial Sequence
  Oligonucleotide for detection of SNP TSC0064321
aaaagtgtgataa

SEQ ID NO: 265420 - DNA, 13 bp, Artificial Sequence
  Oligonucleotide for detection of SNP TSC0064321
ttatcacactttt

SEQ ID NO: 265421 - DNA, 13 bp, Artificial Sequence
  Oligonucleotide for detection of SNP TSC0064322
taatattaagaaa

SEQ ID NO: 265422 - DNA, 13 bp, Artificial Sequence
  Oligonucleotide for detection of SNP TSC0064322
tttcttaatatta

SEQ ID NO: 265423 - DNA, 13 bp, Artificial Sequence
  Oligonucleotide for detection of SNP TSC0064322
taatataaagaaa
